United States Patent Application Publication US 2019/0348154 A1 - sequence listing, part 15

SEQ ID NO: 55337 - DNA, 657 bp, Acinetobacter baumannii
atgaaacgattaaacgtattagtcgcatgtgaatactctggccgtgttcgtgatgcttttgccgctcttggtcataatgctatgtcttgcgatctactcccgactgaagcaccagggaatcattatcaaggtgatgttcgtgatgttttgtataaaggttgggatcttgttgttgctcatcctccttgcacctttctatctgtagctggcaatcgttggtttaacgttgagcgttacgggcaaaaagctattacccggctgaaagatcgtgaacaagcaatagcatttttcaaactctttacggatctggagtgtgaaatggtggctattgaaaaccctattggatgcatgagcaaaacctatcaaaagccatcacaagttattcatccgtacatgtttggcgatcctgagcgaaaagctacctgtttatggttgaaaggcttgccagctttacaggcaactaatgtggttgagccaacgattgtgaaatacaaaaacggaaaaggcactgatagtccgtggcatttggataccttgaaactaccagcagaagaacgcagaaaagctagaagcttaacatttcaaggcattgcagatgcaatggctttgcaatggggtggggacgtgcgtcatttagctatgagggaagcggtatga

SEQ ID NO: 55338 - DNA, 405 bp, Acinetobacter baumannii
atgcgtgttgatagtacagcttttacagacaaccctcgcgcacgcgcgcgttttatcgaatctagaaaaaaagccaaaggattcttgctcaaacgccgaggttataagcgtccagacttcaaccgcatgattctagatttacgcaaccttggatggtcacacgaaaagattgcatacgtccttgatgtgtcgggtggcagcactgtttcttcttggtctactggatccattccagagtacatacacggtgagcaattcatcatgttgtggcaagagcaaacaggcttacagcgcgtaccacgtgaaggcgagtggcaaacatataaatacgatatagggcagcttgatctacttgaaactttagatgtgttcgctgctcagttagatgaggaattacaacaatga

SEQ ID NO: 55339 - DNA, 360 bp, Acinetobacter baumannii
atgagtatttatcagaaagtaatggaatctaagcaattagcatctgaagttcatgaattcttggcttctggtggtcaaattaaaacttatcaaggatgtgaatttacacacaaaccagagcacacaacacgctttttagcaaaaaaagcttctcgaattgagaagttcaggatttttcgatgggttttgcaagaggaagaaatcggcactcgcagaaaacaacttgcagaagaaacaggaatttcaattaaacggattagatcgattgttggtgaaaattcaccttcacatatgacacgtgaagaatatcgattactgattgccgcaattaaaagaatcgagaacggggctaaatcatga

SEQ ID NO: 55340 - DNA, 489 bp, Acinetobacter baumannii
atgaaatcagttaagaaaagcttagttgctgaatgggaaatcatttcaatggctgaatggctagaaggtttgggcagagagccaaccgatcaggagcttattgaaacttacaagggaaccttcttcccactgtatctaactcgtcgtgttgataagaaacaaatctggtctttaaccattacgactacgttgcatggtgatgatggaactgtttcagagtgtgagatggaatggaaatttaacaagccaatgtcgatgaatgaagtccttaacggtgctaagcacatcaaagttcaagacggaaatttcacaaagcgttgggaaggtgtcactaagcaatggcttcgagaaatggataaggactatgacgattcattcaaggctgtcaaagcggtagctgttgcacgttgtacagcaatggttaagcaggtcaatggagcagcaaagttactcaatagcttgattggtcatctggagaaagtcgcatga

SEQ ID NO: 55341 - DNA, 735 bp, Acinetobacter baumannii
atgaacgcaatgcttaatccagaggttttacaaggttcagatttctgcactaaacacaacgtgaaagaaatcatcatgggaggcttccaaggctgtccacaatgtgcaatcgagtatgtggaaaaagcaaaccaagaacatgcgttcgaagttcagaagtctgtacgtgaaaaacactttgcaggcgcaatgattccagaacgtcacaaaaacgctgggttcagaaattacaacacgcctttgcccggccagaagaacgctttaactcaaacagccaactttgccaaaaagatcgtgaagggcgaagtcgaaaacctagttatggtcggaagtaccggaacaggtaaaacacatttggcgtgtgcaactgcaagaacgcttttagcgaaaggcaactatgcacgctacatcacaagcgaagaattggctcaacgcatcatgaaagcgtgggacaaggacacaaaagatcaatcagagcagtcagtaatttatgagttcacgacatatgacttgctcattcttgacgagtacggattgcatgaccgtgataagcgcttagagctggtgcacaaagttctttactcacgctatgacgcatgcaaagcaacgatgctcatttcaaacatgacacttgaacaactcaaaaatgatttgggtgatcgcctatggtcacgtttccaacatggcggactcacaaccattgagtgcaactggaaagatgcgagggcggtatga

SEQ ID NO: 55342 - DNA, 1488 bp, Acinetobacter baumannii
atgagtgaagttaagattttacaaagcgtacagcaatttatggcacgtcaacatggacattttattgatggaaagttagttgttgccgagcttttagataaagtggatattgtgaatccatcgactgaacaagtcgttgctcaaattagtattggtagtcaacacgatgtcgaaagcgccgtcaaaagtgctgaacatgcttttcaaaatgcttgggctgaaacgacgccgtatgaacgtggcgttaaactaaataaactggcagatttaattgagcaatatggtgaagaacttgcacagctcgaatcgttgtctactggaaaacttatcaatatttcccgtcatcttgaagtcgcacaatctgttattttcttgagatattttgctggttgggcaactaaaattaatggtcaaaccatgcaaccctctattccttctatgcaaggtgagaaatatacggcctttactttaaggcaaccaataggtgtggttgcagggattgtgccttggaatttttcactcatgattggcgtttggaaaattggctcagctttaacaactggctgtaccattgtgcttaaaccaagtgagtttgccagcttatctttattacgtttagctgaacttgcaattgaggcaggtattccagcgggtgtaattaatgtggttacgggtaagggggagacagggcaatatttaattgagtcaccactggttaagaaagtctcgtttacgggttcagtaccaacaggtattgccatcggtaaacttgcgatgagcagtgatttaactcgggtaagtctggagctgggtggtaaaaatgccatagctgttttggccgatgcaaatattgatgagattttaccgactttattgcaagcaacttttgtacatcaggggcaagtttgtgcatccccagagcgtttttttgtacaccgtacaaaatatgatgaacttgtcgggaaactctcgaaagcactttcgcagtttaaaattggatcggctatggatgaaggaagtatgtttggtccactctctaatcagccacattttcataaagtgaaacattatttagatatggctaaagccaacaatcagattattgctggtggtgaggctttagatcagaccggatattttgtacaaccgactttaatttcctttaaaaatacggatgatcctttattttcagaagaaacttttggtccattggtcggagtaatgccattcgaaactgatgaagagctcattcaactgatgaatcagtcacgctttggtttaaccgcaagtatttggacaaatgacttatctaaagctttacgtttaattcctaaaattgaagcaggtaccttgtgggtcaatatgcatacattcttagatccatcagttccatttggtggggtaaaagcttcgggaattggcagagagttttcagatgcctttattgaagattacaccgaattaaaatcggtcatgattcggtattaa

SEQ ID NO: 55343 - DNA, 2307 bp, Acinetobacter baumannii
atgcgtaaacaacgattattgaatgacatacaaaaaatactggcacttaacttatcaatcgctgcaagcttttggggactcaatactcaagcgtttgctcatggtggaaaggccgacatggtctcactttatcaaaacatgagtgagcaaggcgctaaagttgttaaagatgactttaccaatacctatacaattaccaaaggctctatagtggtgagagccaagccaaactcaaatcaggttttagtgaatggcaaacctttaaaactcagtgtccctttattaattaaagatggtaaacctgttattggaaaagatttttttaatgaagtcttccagtcggggttagatcaaacttttaaagttgaaaatacctttcacccgctcaatagcttaaattctgatgaaatcaaaaagacatttgatgtgattaaccgctcgaaatacgcttataaaaatatgcgttttgccgagttaaagcttaaagaacctgaaaaagccaaagtctgggattactttattaatcacaaagaatttaaagaagatcgtattgcctcatttattttattaaagggcaatcaagcgattgaaggtgaagttaaccttaacactcaacaagtcacaaaatggaatgtactgaaagacactcatggaatggtgttgctcgataattttgaagccgtacagcgtgtaattgaaacgagtaaagaatatcaggaagctttacggaaacgcggcattaccgatgtgaagaaagtgattgctacaccgctaactgttggatattttggcggtaaagatggtctggacaaacaactcaatatattaaaagtcgtcgcttaccttgatgtaggagatggtaactattgggcgcatcctattgagaacctagttgctgtagtcgatttagataaagaaaaaattatcaagattgaagaaggtgcgatcattcctgtgccaatggcaaatcgaccttatatgtcgaataagcccgtagcaagtaagctaaaaccactcaatattactgaacctgagggtaagaactttagcattaccggtcaaaccatacattgggggaactggtgtttgcatgtggcgttagattctcgtgttggcttacagctttcaacagtgacctataaagataaaggtgtgaagcgtaaagtcatgtatgaaggtaacttaggtggaatggtagttccatatggtgaccctgatatcggttggtacttcaaatcttatttggactctggcgaatatggtatgggaacacttacctcatctattcttccgggaacagatgcacccgacaatgcagttttacttgatgccgtgattgcagactacaaaggccagccacaagtaattccaaatgccattgctgtatttgaacgttatgcaggacctgaatataaacatcacgaaatttttggcaatcaggatgccagtgaagcccgccgtgaacttgtcatccgctggattagtacggttggaaactacgattatatgtttgactgggtatttgcccaaaatggtgtaattggaattaatgcgggtgcaacgggtattgaggcggttaaaggtgttaaatcacgcactatgcatgacagtaccgctaaagaagacaccaaatatggaactttaattgaccataatattgtgggtacaacgcatcagcacatctataacttccgcttagatatggatgtagatggggaaaacaacagctttatgcatatggaccctgtggtgaaagccaatgacaaaggtggtgttcgtacaagctcaatgcaaatcgatagtaaagtcattacgaatgagcaaaatgcagctgaaaaatttgatccatccactattcgtttactcacgaatttcaacaaggaaaataaattaggtaatccggtttcttatcaactcattccttttgcaggtggaacacaccctgtggcgaaaggagccaatttttctaaagatgaatggttatttaaacgtttgaactttatggataaacaaatttgggtgactcagtacaatccagacgaacgctaccctgaagggaaatattcaaaccgttcaactcatgatacagggttaggacaattcattggcaacaatgaaaatattgaaaataaagaccttgtggtgtggatgacaacaggcacaacccatgtggcacgtgctgaagagtggccaatcatgccgacagagtgggtgaatacactcatcaaaccttggaacttctttgacaacaccccgactttaaacttgggtgaagaagagcaaaacacgcagcacgaccatcactaa

SEQ ID NO: 55344 - DNA, 321 bp, Acinetobacter baumannii
atggaaaaagccgagcgttttattatagagaacttagcaaaaccagatttaacacctaaattaattgcagagcatattggggtatctctacgtcatctctaccgtctatttcttcaagaaaatctatctattaacaaatatatacagctcaaacgcctagaaaaagtcaaagcggatttgcttgataaaaagaacaaacagagttcgattacccaaattgccttgaagtggggtttctgggacggtgctcatttttcaaagatctttaaaaagacttatggtatctctcctaaagaatttagagagggtatgacagtttaa

SEQ ID NO: 55345 - DNA, 918 bp, Acinetobacter baumannii; identical to SEQ ID NO: 53014

SEQ ID NO: 55346 - DNA, 1098 bp, Acinetobacter baumannii; identical to SEQ ID NO: 53013

SEQ ID NO: 55347 - DNA, 219 bp, Acinetobacter baumannii; identical to SEQ ID NO: 53012

SEQ ID NO: 55348 - DNA, 648 bp, Acinetobacter baumannii
atggctaagaaagagttaaaaaataaaattaaactcgtaggtttttggacttttggaggagttttttggtacttggttattagtttctttttattaagtgagtatccaatacaagacttcatttttgatcataaaaaagcttatgatgttttaaaagatgctctaactattgcggcgtccttcttagctcctgtagctgcttttgttctttttactgattggcgtgaacaacataaattagtaaagcttgaaaaagatgcggagcaaattattcataatatttacattgcgaataaaactctattaactttttttaactctatatgtgtaggggaaaagaagcaaatgagtacttatttaaaagtatttgaattaagaaatgatatttatctacaaacaaatatgcttttcaatgatattaaaagagtaaatttacatgatttgaatgttcaaatgttctgtattgaagcagcaaaatctctgataaaaatacgtgaatgcgctacagaaatgtttgaggtacaagaaaagtatgatgcagatgatttatcttatttaattgatattaaaaaaatttcgaatactctagatgaattagtagtaaatcaggaaaaattgagtgaaatttccgttgatttaaaaatctaa

SEQ ID NO: 55349 - DNA, 951 bp, Acinetobacter baumannii; identical to SEQ ID NO: 52974

SEQ ID NO: 55350 - DNA, 621 bp, Acinetobacter baumannii
atgagcaagaaactattaacagcatctatggttgcatacattggtactaagtcagttttagcaacgcccatgacgcgtggtgaatacaatgaataccaagggtggcaaatccctgaaaatgaagacccaagtgatcctggttatttaatcgaatacaaagatggtggcaaggctaatcatccagatcatgaaggttatattacttggtcgccaaaagatgtttttgagcattcatatcaactagatggttttcaaaattgtgtaatgggccgtgaaattcataaagatgataatggagtaacagttacccataacgaaactgttaaaacccgtgatggtgaacagtctcttgaaaccggtcatttctatgacatcgtaactggagattcacttactccaattcaatttcaacttggtccagttaaggaagttggagtaaatggcatcacgaatgaagcattacttgcgatagttttacatcgtttacgtgttctgaatgaaaagtttccttgccgcgaaaattcacttgctattaccaatattgagcaaggtcaaatgtggctagagcaacgtacccgaaatcgtcagaagcgtggtgttgaaggttttaacatcgcttaa

SEQ ID NO: 55351 - DNA, 231 bp, Acinetobacter baumannii
atggttgtaattatgcttcaaataactccaattcgaattcaattcagtactgtatgccaattacttgatgtaacacgtgagtctcttcgacacactattcgtaaagaccccacgtttccaaagcctataaaaatgggtaaaacaaaacaagcacccgttttctttgattataaagagcttgttgattggcataacagcaagaaaactgctgcttcagaaatgggggcatag

SEQ ID NO: 55352 - DNA, 216 bp, Acinetobacter baumannii
atgagtgaattagaaatacttgaatcagcacccaaaggtgctacccattattttcttgtgcctaatggatctggtgagccttattttgttcttgaaaaagataaaaagttttactggtttcacggtcaggatgaaataacaaagccacacattttaagttggattaagtcaattgaatcactgaaagaagttaaagcggaaagtaaggaggggtga

SEQ ID NO: 55353 - DNA, 210 bp, Acinetobacter baumannii
atgagcataactcttaatggtcaccaattaaaaagccttctcgaatttgtaaatccagatggtgaaaatgatttagatcaacttgaaactgaactaactattaaattttttgaagatgggcacagtggcaaaggctattacttttggatgaccgaatatccagaggaaggcagcatgttgttggatgttgaatcgggagctgagggatga

SEQ ID NO: 55354 - DNA, 333 bp, Acinetobacter baumannii
atgacagatttgaataagttaagaagtgagtttgagagtgatttagcagaccacttaatcgaacgtgatgctaatggtttttatattaatgatgagatccaaaattattgggagaaacatctcttaaaagcacaaataaaggaacttaaggcagagctagaaaaagccaaagctcaggcggtgccagagggttatgtactaatgcctaaggttccatcggaaaagatgttccaagcatacgaacgatattcagtcgcgccgatgtcgacgctgagtaaaactggatataaggcaatggttgaagcagcaggtgatcaaaatgaaaactcttaa

SEQ ID NO: 55355 - DNA, 756 bp, Acinetobacter baumannii
atggataactacaaaatcaaagttaaagatgaagctgagagcaaagaggctcaggagttgttaaagcagcttggattccaagaagaaggttttacaggtataggcctgccatgctacttggcgacatggaatggtggatatgctgattactattttggttctttaagtgaaggtagaaaacgagaagaactcaccctccctcagcttcgagaccttgttgtgttgaagcgtaatgatgtgaaggatgcgacgcacaataattttagaacaaataccccatacctaaaacaaggtgagaatgagtattacatgcttaatggtgagtgggttttgtctaactgcccaaatgacctagagccaataaataaaccccaagaccccgccttgattagcggtgcggatgcgatcgatgcacttaaggctaagaaggaagttgaatactgcggagagggaataaatgatagctggttatcagcagaaaccttgccagtagtttatttcttgacggactctttccgttttcgaatcaaaccccaaaccatcaagcttgaacttgagctgccgaagccttttgagccgaatctggatgaaaactattggtttatagatagcacagaagagaaaggttacagactaactcgctttgacaacgatgaaaatgatcaggacgttatgcaattcggagcatggcgcaccgaagtcgagatcaagcaagtcgtagagcaactcagaaagatacgaggtactaactcatga

SEQ ID NO: 55356 - DNA, 321 bp, Acinetobacter baumannii
atgggtattaaaaaattagtaacgatcactgttgaagctcaaattgaaattgaacttccagatgaatttcaagaattgtcggctgaagacattgaaggaatcaatgcatgtggttacgacattaccaaatctgatgatctgtataaatatgcagccgaacttgtcttgaatggcggacaggatggcacttgggatgtttttggtcatgtagttccttggtggaaaaaaggcatgactggaatctctgataacagcacattttttaatagacgtgagttacacattgaagattgtgaagtcgagggattatctcatggataa

SEQ ID NO: 55357 - DNA, 192 bp, Acinetobacter baumannii
atgaatcaaagaattgaaaagtacaagttaagccaggcctttcgggatggctcgaaagcattcgtagctttctggattatcaccttcattgtattcaccttcttacgaggctgtgccgacgagcaacacgtcaacgaactcaaagcaaaacagaacatgtatgtacgcgttcaggttgagggggtgaagtga

SEQ ID NO: 55358 - DNA, 345 bp, Acinetobacter baumannii
atgaaatttattaaacaatctggccaatttgatattaataagttgaaagaaaaaaaagacaaagaggcaccatttaaatattggttagaaaatgtgttaaagcgtggagatattttgcctcgtggtaaattctttataggtaaaactgctggtaagccaatttgggcaactgatgagttttggatgcatagggaggatgatttttttatcagtaattttattattcctccggcaagaagtgggttgagtattttttcagaaggtgaagctgagcattttatgttagctggtacaactggaatccgtaataatcctgaacaaaaaaaagagccaggttctttatga

SEQ ID NO: 55359 - DNA, 333 bp, Acinetobacter baumannii
atgagagacattacgaataaaattttatcactaaatctttttgaagcagttgaaattgatgtagatcatacaggccaatgggatgatcctgatcatatagtacttcttaggaatgcaaatgctcaaattgtattaagaatttcagaacaaggaccagatgttgagttatattcgttaagtctcgaagttgatgaatttgattcttatggagaaatttatcttaatgatgatctttggatgatatttggtaatgaagatgcaatactggttgaattaaaaaataaagactggagccttaaggatttgggttcctataaccattattttaaatag

SEQ ID NO: 55360 - DNA, 405 bp, Acinetobacter baumannii
atgaatttagattacattgctttcgatcctaatcttactatgagtctaaacggtagaaatattcaatttctattaaatcccttagatgaaaaatacttagaggatccagctatctttactcattatcgttacataaaaggtggaatgttaccaccagaggaatttgaaataagacaggcgcttagaaaagttatattttatgagaaaacaatttctagttttggcttattaaataaaataattcatcaagaacaatatcaggaggctcaagttgaagctaaagtttggaaagagaagcttttaaatttgatgaataaatctcctcaacatgaggcggcaattaaacgtatagtatcgactctaacaggtgatggattggagcgtttaaatatactattgaagtaa

SEQ ID NO: 55361 - DNA, 705 bp, Acinetobacter baumannii
atggaagatatgcaatccatcatagataaaattagtaaatgtcttgcattatctaaaagtgcaaatgaacatgaggctgctatagcacttaagcaagcccaagcattgatgcagaaacacaaaatcaatgaaaaacaggttctcttaagtgatgtaaaagaaaatataattcgaactaaaaatcaaaggaataaagacatagaattgcggcttaagtcaatgatcgcaaatgtgtttgaatgcggtacttatctcaaatggtatagctcaaaaggaaaaatataccagcagtatgttttttatggtattgagcctaacgtatctatagctgcatatgcctattcagtattgcttcctattctaattaggaataaacaaaattatttaacaagcttgcatggtaataccaaattaaaatctaaaagaaaattaggcattagctaccatcgtggatggattcaaggagtagaaggaaagtgtaaaaatctgcatccaaatgaagaacttaaggataagcttaaagaatttgagaaaactctaaatcttacttattacgatgttaaagatgtaaagcattataataaagatatgcttacacaggctcgtataaacggatattcagatggtagtaaagtaaatttacaccgggcaattgaccctaatgatgaaaagaaaaagattttcttgagttgcttgaatgaataa

SEQ ID NO: 55362 - DNA, 198 bp, Acinetobacter baumannii
atgtcgcaagtcatgatcatggtttcggaagcgggcaggatggagaatacttgtaatctacccgctgatttagataagaacgggaatgttcttaaaatctatgactactcattaaaagagctgccgattaatttagatggcactgtgtcttacaatggcaaaagatggacctttgataagaagcaatcgtctacctag

SEQ ID NO: 55363 - DNA, 795 bp, Acinetobacter baumannii
atgaaattagatcttcaaaataagatcgccgttgtcagtggttcaacttcggggatcggtttaggtattgctaaaggcttagcatctgcgggtgctacggttgtggttgttggccgtaagcaagctggtgttgatgaagcaattgcacatattcgtcaaagtgttccagaagcgagtttacgtggtgttgatgcagatttgaccactgaacaaggtgcagcagctttatttgcagctgaaccaaaggcagatattttggtgaacaatcttggcatttttaatgacgaagatttctttagtgtacctgacgaagagtggatgcgtttttaccaagttaacgtgttatctggcgtgcgtttggctcgacattatgcaccatcgatggttgagcaaggctggggcagaattatctttatttcttctgaatctggtgtagccattccgggtgacatgattaattacggtgtgaccaaaagtgccaatttagcagtttctcatggtttagctaaacgtttggcgggtacaggcgtgactgtaaatgcggttttaccagggccaacatttacagatggtctagaaaatatgctagcggatgcagcagcaaaagcagggcgtagtacacgtgatcaggctgacgaatttgtcaaagtgttacgtccaagttcaattattcaacgtgcagcagaagtagacgaagtcgcaaatatggttgtttatattgcttcgccactttcatctgcaacttcgggtgccgcattacgtgttgatggcggtgttgtcgatacactcgtttaa

SEQ ID NO: 55364 - DNA, 408 bp, Acinetobacter baumannii
atggacacaagcaaggttaatattaatgagttaattgataaagcccgttttacatcttttcattggaaagttttaatctggtgcttacttattattatttttgatggatatgatttagttatttatggggttgctcttcctctgttaatgcagcaatggtcgttaactgctgttgaagctggtttactcgccagtgccgctctattcggcatgatgtttggtgccatgattttcggcacactttcagacaaacttggacgtaaaaaaaccatcctgatttgtgtcaccttatttagcggatttacctttataggtgcctttgccaaaggaccaactgagtttgctattttgcgctttattgcaggtcttgggattggtggcgtatgccaaacgttgtggcacttatga

SEQ ID NO: 55365 - DNA, 936 bp, Acinetobacter baumannii
atgaagaatggtttagttgtgaaagataatgcattaataaacgccagctataatttggaactaacagaacagcgtttagtgatgcttgcgattattaatgcaagggaattggggcaaggcatcacagcagacagtaagcttgaaatacatgctagtgattatgcaaagctatttaatgtatcacctgatgcgtcttataaggccttgaaagaggctgtaaataatctatttaatagacagtttagctataccgctgaatataaaaaaactggaaaggtcggtgttgttcgctctcgttgggtgagccggattttttacgttgacgacttagcgttattagaaattactttcgctcctgacgtggtgcccttaattactaggttagaagaacattttactaagtacgaggctaaacaagttgcccatttaacaagtaaatatgcgactaggctttatgagttattaatttcttggcgtgaagttggtaaaacaccaatttttgaacttcaacaattacgtaaaaatttaggtgtcgaagatgatgaatatcagcgtatgcaccactttaaaagtcgtgtattagaaacagctattactcagatcaatgagcatacagacattaaggctacatatgaacagcataagcagggacgaacaatcactgggttttcattcaaatttaagcaaaagcaaataagaactgaggctaaaaaaaataaaaatataggagatttttttaaccgaatgactgattcacaacgtcttaagtttggatctaaacttgcctatgatgagcgtgtacaaagtgaatatagccacttaattggtactggaaattatgaacaattcggacaacttttagctgaaatgctagcagaaaaaagacactttgaaatgttctttcctttgcttgtagagcatggttttaacgtataa

SEQ ID NO: 55366 - DNA, 390 bp, Acinetobacter baumannii
gtgaaaaaatggatattaagtactttagcagtacttttattagtaggttgtgcgacagtaattccttataaccagaaggcaatgagcttacaaataggcatgacgaaacaagaagtagtatctctattaggaaatccaaaaaaggtggctgcaagaaagacaccgcaaggttttgaagagaaatattcttattgggggctatcaagagtaggttatatcagcatggataatgaaatgctttctcaagatagattatatgtcaccttattagatggaaaggtcattgaatggggagataaatatgatccatctacaatgatggacaaaaatttagaaatcactcaaaaaacggccgagcaatatagacaactttatcaaaataaaaactaa

SEQ ID NO: 55367 - DNA, 954 bp, Acinetobacter baumannii
atggcaatttatcactgtacgactaagaccgttaaccgaagttcgggacgaactgcggtagcatctatggcctatcgtgcaggagaaaaattgacagatgaacggacaggattaacgcacgacttcaaaagaaaagaaggtgtggtttatacagagattctttctaacttggatactgagttagaccgaagcaaagtttggaatctggcagaaaaatcagaaaatcggaaagatgcccgaactgcacgtgaatgggtgattgctctaccggacgaactggacgaagaacagcgaaaagaactagcaaaagagtttgcccaatctttagtagaccgttatggggtgattgcagacttagccattcatgcgcctagccataacggcaatgataaaaatcatcacgcgcatatcttgctgactacgcgcaaggctgaactcgatcaagatcataatctggtgctgaaagataaggccgatattgaattaagtaacaccaaaagaaaaagcttaggcatgggaacaagccaggaagaaattaaacagattcgagccacctgggcaaacttagctaatcatgctctggaatatgcagggtatcgggaaagaatcgaccaccgcagttatgccgatcaaggtaatcagctacaagccaccatacatgaaggcagtaaagtcacccagatgcgcagaaagggcatagatactgaaattagccgtttcaacgacacgatcaaacagcagaacagtcaacagctccaatacaaacaacagcacaaggaacagaccttagaacagggtttcaaccgtgttgaaaaaggctttgagcaatggaagaaagatcaggaagctaaacgtctggaactggaacataaaaagcagttaaagctacagcaagaacaagcgatgaagctgaaacaacgcaaaagcatgaatagaaatgggccttccctatga

SEQ ID NO: 55368 - DNA, 471 bp, Acinetobacter baumannii
atgagcaatcaaaacgatttagacgaccagttatatattttattggcatccatgaaggaatacagggaagccatagcagacgataacaagcgattagagacgttttacaataaggtagctagtggggtactagaacagagcaaaaagaccctaaataacgcaaatcaggaagctacacgcgcccttcagagacgtattcaggagttagataaagccaccgataaattgaactacagatttattgccttgttgtgtgcaattttccttagtctggtattggtttttctgtcttttatatttttattcattccaagttttgacgagatcaaagaacgtcgtgcagaagcagcttggctagaacaaagatataatctagatattaaaaactgtaatggtaaatcctgtgtccgaattatgaaaaatgactgtcacggaacaaacaaggattattgcgtgattgaccctaaataa

SEQ ID NO: 55369 - DNA, 216 bp, Acinetobacter baumannii
atgcaaaatgaattagaacgctataaaaattttgaccctaccaatgcgccagtagtaaaaccgaattttgttaaaaaattacaagaacgccatgctattgctcaagcaaaggcttttgatgcagatgtcgtaacttggctaagttctcaagatgatgaaacaaaacagcacattaacgatatggtgcgccatatcatggcgttgaaacgtgtttaa

SEQ ID NO: 55370 - DNA, 297 bp, Acinetobacter baumannii
atgccgttgattgagtattacggtctgctatttgaatggcacgataaaaaaatggaaatagtctatcgagggcgtgaaattacttttgaagaagtatgtagcgtttttcttgatccagagctgatttcctttgacgatcttggtcattacgatgagcaacggctaatatcaatcggtctaagtaatcgtggtagactactaacagtggtttgggttgaacgtggtgatgttgcaagaatcattactgcctttgagccatcgcacaatcaaaagcggaggtataaccatgcaaaatga

SEQ ID NO: 55371 - DNA, 468 bp, Acinetobacter baumannii
atgatagaaaaaggggcaatcatttctgactgtaacaaatatcgttattcactttggcgtatttgggataaagaaaaaccaatatttacctttgtcggcttaaatccatcaactgcagaccatgagcaagatgaccgaaccataagacgatgcattaattttgctaaaagttggggaggtggtggcatttatatggctaatctatttgcatatagagctactgatccacaagaaatgatgtcccaagaagaccctattggtcctgataacgatgcccacttaaagcaattagcagcagaatcccaaaaacttattgcttgttggggaaatgatggtgtttttaaagcgagatcaacttttgtaaaacaattgcttacggacagactctattatcttaaattaaataaaagtggagaacctggacatccgttatatatacattcttccactcaaatacagcctttttag

SEQ ID NO: 55372 - DNA, 468 bp, Acinetobacter baumannii; identical to SEQ ID NO: 55371

SEQ ID NO: 55373 - DNA, 1119 bp, Acinetobacter baumannii
atgactactttacaagaacaaattgagaatgctcgtatgcaggtacatacggattcttatccaatgtcaattggtgaacttgttaacctgtatgatgatggagaacttgatattcatcctgaatttcaacgactttatcgttggtcagatgaacaaaaaagtaaattaattgaatctattttattgggtattcctttaccctcgattttcgtggcccaacgaaaagatggcgtatgggatgttgtagatggtttacaacgtatttctacaatcttatcctttcttggaaaattaaaagatgaagaaggaaaagttaaagagcctctagttttacaaaaaactaaatatttgcccgctcttgaaaataaagtttgggaaaatccaattaatcgtgatttagagattgatatagaaattaaacgaatttttaagcgtgaaaaaatagacatcaagattattaaacgtgaaagtgataatgatacaaaattcgagctttttcaaaggctaaatactggtggttcaaaactatctgatcaagaagttcgaaactgcatgttattaatgcacaataaaaatgcttatttctggttaaaagatctagcaaaaaattctgacttcctgaatacattacctatttctgagaagcaaactgaagaatgctatgatcaagaattagcttttcgtttttttgttcaaagacatagtgatggcacaactcgtaaagaacattcggatgtaggtccatacctcaatgctgagttaaccagactttttgatgaaaaaagtggctttaactatgatgaagaacaaggaattttcatcaaaacttttaaaatagctaatcaggctctaggtgaggatgcttttaaaaaatttaatcattcaaaaggaaaatatgaaggagcaatttcattaccagtttatgaagccatgtctgttgctttatccaacctcattaaatctagtaaatatgacgatgagcaattgatagatttgtataaagataaaagtaaagagttaactgctcacgaagattttaaaatctctcaagaaagaagagttcgacctctagacagaatggtattaatgtcaactatagggcaggaaattctaaaatga

SEQ ID NO: 55374 - DNA, 1416 bp, Acinetobacter baumannii
atgcatctgaccccaagtgtgaagaatgcccctgccggaaccgtaccagccaaagccattaaaggcttaaagctcaaagaccaaaataaaaacgaaaaccagatctacaatttaacctataaccataaagacttttttggcaataaggttgatgctcaaatttattaccgcgacttctttacccgtttttcaccatttgatgcacgtaaaaatccgaatcggggtggaaacgtagaccagatctatcaagaaaataacatactcggtagccgtttaactgttaccacaccgcttgagtttttaggtgacacctcactggtttggggtggtgactttagccgtgaaaaaagcgaaatgcctttagatactttcaatcctgatatttatgaccaatctggtggcctagagtttgtaaaaactggtaagctcatttatttacctgaacttaccacacaaagtgttggtggctttgtacagttaaaacatcgctttaatgaccaatggtcggctgaagcaggtacacgctatgaagatagctatgcccaaattgatagttttattccattatcacaatttgatcctaaaacacaatcatataagccaaacccttatgtatatcaaggtgggaaagtaaaagctgatgcatggttgtacaatgctaatgtaactttctctccaaatgaccagcactcgatttatgcatcgtttaaccaaggttttcaattacccgatgttggtgtaattattcgtaatgcagataatactgataagaaaaaaaattatgaattatcatcttcatttttagaacctgtaaaagttgataactatgagttgggctggaaagggaacttcaataacttttcatcaagcttagcagtcttccactctacttctgatctaggcgctgtgcagtctttcagcaatggtctggcacttactagaaccaaagaaaaagtcactggtgttgaagcaacttttgactatatggacgatgccaatgtttggggaactggtggtagtgttacgtggatgaaaggccgcgaaaaaccgcaagatggtgctgaacaagacatgacaggcttccgtattccgccattaaaactcacaggttatatttcttatagcccaacagaaacttggacaaaccgtttacaagctacttacttcggttcagaagattaccgcctaaacggcaagaatagttttggtcgctacgatgtaaaatcttatacaacagcagatttaatcagtagctttgcgcttaacaaaaaagacactgtgacgattggtttagagaacatgtttaaccgcaagtattatcctctttatagccaattattacgaactagcgataacactagccatttagtagcaaatggtgcaacgcttaaagtttcttatagccataagtggtaa

SEQ ID NO: 55375 - DNA, 447 bp, Acinetobacter baumannii
atgaagtattttgttttaagtgcgacgcaaagtagtctttgtccaatttcacttgtggatgatgctgttctatatatgaataaagagcaagctagccaaaatatcgaatgtggatctttaccgtggtatagttataaaactagcaaaaactgtgatttacctatcgaaggtgtacttatcttaaaaagtaaaaaaatagaaataagtattagaaatataaatgaaaatatatatgttgttgatgagatttttaaaaatatttttggaaaatatattaattctgattttataagggttgaagtgttgagtgagagtttggaaaaaataaataacaaaaattattatatttttagatttaatcaaatttttgattttaaaaatgtcttagatttaaataagtcaacttatagatatggattctgctcaagatactttttttatcagtga

SEQ ID NO: 55376 - DNA, 180 bp, Acinetobacter baumannii; identical to SEQ ID NO: 53204

SEQ ID NO: 55377 - DNA, 669 bp, Acinetobacter baumannii
gtggaattgtcaaatgatgcagtgcttaagatagagcaggctttatctataccacgcttatctaagtatgaaaatttctataaagataaaggtgaaccatatgaaaaatctgatgtattgatgctttatgaacgtaatttaataatttccaataagtttttttacttattaaattattttgaagttgttctgagaaatgctgttgttcaggcaatagaaatatcttttaggtgtaatgaaacaaatagttggcatgaaaatgaagcttttattcgaagccttagccgtagagggaggtatagccctaaaagtatgtttgatagtgctaaagagaagttcccagattcgcctagtaaaatgatccctgagcttaaatttgtattctggcaaaagatgcttatggctaattatgaagaacgtatttggcagggatgttttaattctatttttcctaatgcaacagttgaaaacaggcaaattttttacgattggacagatcaattacgtgaattaagaaacaggattgctcatcatgaaccgattatttttaaccgtaatctagaaaatgatttagaggttttaacaaaatttatttactgtcgttgtattaatacatacgattttatcgagcaatctgcattagatctaaaagaatatttagatttttaa

SEQ ID NO: 55378 - DNA, 546 bp, Acinetobacter baumannii
atgtttaaatttagctatattgaatgtagtataggcttgtttatatattttggtggtgttatgaataataactgtgtagtagtactaactgctcgtggaaagactagaattttaaaagaaggtggtagtcagtcttggagactaaatgctcataatgcaggaaagtgcgattatctagtttgtgtgcaaaataggaaacaatcttggggagaaccagaggctgatcatcacactgcatttttagttggcaaaatatctagtatcagccaatctcaagaagaagatgcagatggtagatggataataaatatctccgaatatgctgatatatctattcccaatatgtgggatggtaatcggaatccagtttcttatagttcattagaagagatgaatatcgatttgaatgagctgaaatttaccaaattaaatgaagataattcttctaaaacactggataaaatatctattcctgaagctaagagactattagctaattattttgatgtccctcaagaaaatatttcaattacaatcaatatgtaa

SEQ ID NO: 55379 - DNA, 1815 bp, Acinetobacter baumannii
atgatcgttgatttttttagacatggttcaggtttatcaaaaggttgtattgattatttattgggtgaagatcgagagcgtgaacacgcacaagtgcttagtggtgatgtagagctgacagcacaattgattgatagcagtccttttgccaaaaaatataccagtggttgtttgtccttttatgagcatgatttatctaacgaggataaacagaaaatcatgcaaaattttgaggaatgtttatttccaggactggataaagaccaatatcaaattttatgggtgcagcaccaagacaaaattaatcaggacacaggtgagacaaggcttgagcttaattttgtgattcccaatgttgagctttcaacaggcaaacgcctacagccattctatgcgccagtcgatttagatcgagtcgatctatttaagcagatcaccaataccgaacattcactgtatgaccccgatgatccggagcatcgacagctatttttaaataaaaagaacctgcccaaagatattaaggattttaaagagcagttacatcaacgtgtttaccgagcggtttctaatggggaagttgccgatcggcaagaattggtgcaatggcttgaatcgaatcaaatcaatgtcacccgacaagtaaaaaactccatatccattgaaaacccgtatgagggcgcaaaacgtcccatccgtttagagggcgagatttatgagcaaggctttagagctactggcgaatatcgacaagaagtacaacaacgaattgaagaatacagaggaacaacttctgagcggtatcgagcaaacgtcacagactatcagagacagcttgaacacaagagccaatatcactgcgaccgctatccaacagtcggacgagaaaatagccaagagcattcaaaacaacgcccagacggtcgagaagcagttaagccagtatcaaaccttgctgcaatcgaaattgagccatttaacgcaattaaacgagcaaatacagagccaagaacagcaagcccagaatcaagccgtacagaaaaaacttactattttgaatatgggactgatttcagcagcagttattttgcttatagcgattttctcgcttggtctcgtcaccaaaaacaagtacagcgagatgcagacgctaaatacagtgatcaacgagaagcaaatgagggtcgaccatttgaaccgatcggggggcagtttgacgatcagcacatgcaagcgaccagacagcaaagcacagcgcctatgtattcagatcaacaagaacgcaggcgaatggcagaacggctacatgattccaatggggtattaaacgatgaccgaattagaaacacaattattgagaatcatcgaagaacaacagcaacaattaatgcaacaacaagtgcaattgcagaagcaacagcaagctttagacacaatgcaaaccaaaattatccaagccttgtcagcacaatcaaagacaatcaagagcgatcagcaaagcttacagcaagcacagaaatcattagcgacaatgcagaagcaatttcacgagctagaacgaagtacagcaagctataccgagcagatcaatggcaaagtccgagagatgagccttatcacagccaacaacgaagaaattctggagagaatctcaaccacacagcattctgtctcgtcagaagtagccaaagcgcagcagaatttgctcgaaacatccgagatattgaaaaaaatctcgtccagatgaatgagcgtaaacaagagatagaaaaacctcgacctaagcaagatcgaggtatggattttgggatgtaa

SEQ ID NO: 55380 - DNA, 408 bp, Acinetobacter baumannii
atgtcaggacaggaacaagaaaacaaacagagcaaagcagttcgagaacgaacctttaaagtcagactttcagaatcagaatatcaattgctcgattccaataatccttatggttcgattgcaaagttgcttagacaagcagcagtagagaaagcgactaaaattcataattccaaagcagaagatgaccaaaaaattaaagcaacaaaggttgttgaatcttcgtatagcaagacagagcgagcgttaattttagaaattagtcggattggtaataatgtgaatcagattgccaaagcagtaaatacagatattgcgggtactggtgctttcgataaagtgaaattacttcatttattgatttcaattgatcaacagcttcgggagttacgtccagatgatcgttga

SEQ ID NO: 55381 - DNA, 687 bp, Acinetobacter baumannii
atgtcaaaacttcctagatttcataacaagcacatcgaaaaacgtaagtattcaaatagcctcctagccaaatctatttcttctaaagtacgtttctctaataaaacattttttaatgttaatttgagaggatcccgcctacgatcatgttcattcaaaaatataaaaattgttttatctgatttttcaggagtaatcttaaataagaataggtttacgaatgttcacttcaaaaagtgcgtattttatgctgctatttttagagattgtcgctttaaaaattgcacatttgaaaaatgcatttttattaatacaaatacagaaagcctaaatcactcgatattagactgttctaaaaaatataatttttacgaaatgaaaattcctgatgacttaaaagatcaactaacagaatatagaaatattccaatactgcaaaaaaaccgtttacttcatctaaaagggggaagaatcaataccgcaaccttattcattctcctatccaaaatatccaaatacaagctgctaaatggtcttaaaaaaatttatattgaggaacaaagtaaagtaaaaatacttagcactttcaaactccttgaagaaataaagaacctagttgacactaacaccgcattcaaacagaataatggtgctctgccccatccaatcgaaaggttggatagttaa

SEQ ID NO: 55382 - DNA, 1272 bp, Acinetobacter baumannii
atgaatcaattgatcaatcataacaatagtttaagaaatactattgaacgtacagatttaaccttgttagatgcagcgattgatttagattctattgatcttgttttaagagaatgcctaactattgaagaaatgagagaggctggtagtttttttactggtcaaattttggctactgcaactgttaaagcttttccttcggctgtaacttttgattcaattattcttgatcctacttgtggtgctggtaatttactaatcgagtgttcaagaatgttgggagtagagaaaaatttatcaagtacactaaaaaaatgggggaaagtgctttggggatttgatattcatgaatcctttattgaatctactaaattaagacttgtcattgaagcattaagacgtggtgtaaataaagactgttctattgaggatgccttatctttttttattaatatacaagtaaaagatgtcttaactctaactaaaaatgatgtaagtgaagtgacacatgctattcttaatcctccattttctatttggccttcgccaaataaatattattggaaatcaggaaaaattaacgcggcaggtatagtttttgatcattttttaagaatattccccgaaggttgctttttttcagctatcttacctgatgtcttgagatcaggtagtagatataacttattcagagatttttgctctttgaagtcagacgcaatatgtcaaatttgggggcgttttaataaaaaaacagatgtagatgtttttatactgtcaggcaaaattcttgatgaggaaaacaataaaaaaattgtttggcaggagtcctttggtgaatatattcctctttctgataactttgaagttcgaactggacctttagttgcgtatcgtgatccagaggtaggacccgaatatccatattttcattcaaaaaataccccatcatggcagattataacgcaagccaatgaacgtagaaaatttaatggaacagttatttcgccaccatttataattattaagagaacctctagtcctggtgataagtacagagctacggcaagtttaatagatatgaatgagatggtggcagtagagaatcatatgattatcattaagcctaaaagtaattcaataggcgaatgtaaaaaattaatgaagatcttaagatctaaaagtaccaatgaatttttaaatagcagaataagattaagacatttaaccgttcaagtaattaaagatatccctttaaagaaagtttcttag

SEQ ID NO: 55383 - DNA, 693 bp, Acinetobacter baumannii
atgaatatgcgacctaaccatatatttgaattaacaaaaggtattcaattgcctttaccaaaaatatcagatgatattctagagattattgctagtggtattattcaagcatttaatgaagtaatgctgagtcatcctaatgatatgtgtacgggtacggaagcagaagttactgccttattgcaagcaagattgaataacttaatacaagaagattttttcttaagtcaattagtctcttacgttggtcgtggtgttgaaagtctcagttttgatggggttcacttagaaaaacgtcctgatttatcattagttttgactagtagtgttaataattttcctcttattgttgaagcaaaaataattgataggtccaatggtaaaacagaacagctttattgtgataaaggtctccgaagatttatagatggagagtatgcttggggtaatcaagaggctttcttagttgcgtatgttagagataagtcaacaataaatttaaagctgacgccatatttagcagctaaattaaatactagtccaaatgattaccaaactatagcgttaccaactcttagagggggagaggaacttgcaacttctcaacatgatagagtgtttcaatatattcatcaaaaagcccctaataatagaccaggttctatttctttatggcatatttggctatcatag

SEQ ID NO: 55384 - DNA, 639 bp, Acinetobacter baumannii
ttggtcactagtggtgaatttgggtttgagcgtgaagtagtagaaaaaacaactgttgatagattacctataccagattttgataagctctcaaaggaagagattaataaaactttgactatatttgagtcattacgtagtcataaaattacttggcatgatgtcgataattgggtggcagatttatatggttttaatgagcgggatctacaggtcattaatgacactttagaatataatttacctttttccgaaaataagaaaaaagcccagaccttaccaaatgaagtagaaatacagaatttttgtgagatactgagagaagagcttaaaccatggactgagagatttaaaacgcaattgacggtgatgcctattaatctcaactattatttaccttggcaaggtatactagtttctactagtaaaaataatatggatatatcatcaaatgattggcttggactactaaatttctcaaatcactcagctgcctcagaagttgttgtacatattagtaagagccaaatttatattggacggctagctcaaaaaagatattggagtaagacacaagctagattattagctcaaagaattatttggtcttatttagatgttttaaagggtggaaaataa

SEQ ID NO: 55385 - DNA, 2235 bp, Acinetobacter baumannii
  misc_feature (2220)..(2229): n is a, c, g, or t
atgattaaattacaaaaactgttgcctgattttggagcagatgtatcttcttttcattcttttgagctagatgctccacagttgttgccttatgctactttaataaacacacagcatgatgatagtgggttattaaaaaagatagcaggtatatatgaatggcaagactcgccattaatgtttatagtagatgctgaattattagaaaataatgaagaaattcaacaaataaggagattgttagcaatgaggggggatgcaccatatttgggtgtaattgctcctggcagattagaggtttataaaatagctttagataatctaccattaagccgttctcgcgttgttgctgacattaatgataaatccttaattccattgttaagtaataataggccaaatgctgctattactcatagaggatggatttctaatgtagtattaaacttattgactaatactattactagattaattgagctaaataacatatctgatgatgatgctatttctttggtagggcgagctttatttattcgattcttagcggatagaaatcttttacccgaaaatataaactctaatgctggtagtctttttgattcctctgaagaagcacgaaaaatatgcagctggttagataaaacatttaatggcgatttactacctttaagtgaaaatatatttattaagcttccaaaagaagcataccggatattaggtgatgtgcttcgacgtgctcccaatagccaactctttttagggtgggaagaaaagtgggattatcttgattttgcccatattcctgttggagtcttgagtcaagcatatgagttatatttaagaaaccatgcaccaatacgtcagcgtaaagagggtggattttatacaccaagaccgattgcagatcttatggttagatcctctcttgctgctttatcaatagagggtaatgctttcaaagcaaaaattcttgatccttctgctggagcaggtgtatttctattaactgcttttagggaattggttgcagaacgatggaaatacgatggagtaaggccttccactgagactttaagagaaatactttataatcaaatcgttggttttgacataaatgaggccgctctgcgtttctctgcattaggtttgtatttaatgtcaattgagcttgatgctgaaccaagaccagtagataaattgaagtttaaaaatttacgcgataatgttcttctaaaaatgactactgaggaaaaaatatctggtcaaaacttaggaagcttagggagtcttgtcggtaaagaacatattaatcaatatgatcttgtaataggtaatcccccgtggtcgagtggaacaaagctagaagattgggaaatggttttatcaaaagtttctcaaatagctaaagaaaggggaatttctaatacatctcctcctctaccaaatgaagtattagatttaccctttgtttggagagctatggagtgggctaaacctaatgcccaaatagcttttgcattacatgcacgattattgtttcaacaaggtgatggtatgagctctgctcgccaagccttatttgatgctttaaatataacttctgtaatcaatggtgttgagcttaggcaaacaaaagtatggcctgagatatccgctcccttttgtataattattgccaacaataaaccttcagtgggaagttcagggtttcgtttaattaatccacgattagaacaaaccctaaactcagcaggaagtatgagaattgatacttcaaatgccgatataattccaacacaacaattgcttcaaattccagatattataaaaatactattccgtggtactaaggctgatttaagccttgttacacgtattcgttctaaaggtttcccaacattagagcaatactgggaaaaatcagttggagtctcagatcgtgggcgacttttagggagtggaagtggctatcagacattaaaaccaagcagtcggattcgtaaaagcggtgatggtttgccaggagttgatgcaacttatttgaaaggatatcctgagctatcagcatcgtcctttacaaatttatttatagatacgaaacaattagatttattccaagccgaaagaattcatgatccacgatcattagaaatttttaaaggcccattagctatagttcataaatctcctcccgcatcaactggacgaattaacgtnnnnnnnnnnaattaa

SEQ ID NO: 55386 - DNA, 354 bp, Acinetobacter baumannii
atgtgctatattacattaatttatgtgttaaactttagcaaaatgacctattcagatttcatctctgaactgagaaaagcgaaaattagtgtccgtgaatttgctgatttaattggaatgaaccctaactctatttcaaattatgcgcgttcaggagaggtaccaacacatttagctgtgataattgtacttattgctgaaatggtaagaaaaaatattgattatcaaattcttattgagaatttaaaactttctccaaaaaagccgagaggtgctggaaaagctggttgttttggtggtaatcatcaaagtcatcctgagttagatttatttatggaagatactaatgattaa

SEQ ID NO: 55387 - DNA, 543 bp, Acinetobacter baumannii
atggacgccagtaaagcgtttaaaaagtctagaacaacaatttatgaagctataaaaagtggcgaattatcaagggatagtgatggactcatagatctatcggaattaataagagtttatggaaatccaactggtgttcagtccagtacacgtattgaacaagtccagaaggatgcacctgtacgtgtacagtccgagatcgaaaatgttctaaaagatcagattgctttacttaaaaatcagttagatttagcaaatcaaagagaaaagtctttgatgcaacatattgaagatcttactcatagaattgagtttaaaggcaccttagaacagccaaaacaagaaaatactagtaagctaaatgaatctactaatctaaatatagcaacagatcctcggccagagattgagtcgaactatgacgcattgactactcctagtgaagacaataagcgtatacctattccagaacacgttgaaccggaacctaaaaaaaggggattattgggtcgtttagctcgggcagtttttacagatgagtaa

SEQ ID NO: 55388 - DNA, 870 bp, Acinetobacter baumannii
ttgaacgatttgaaatccgtagcaatgggactgttatcaataatagatactgatgatgccttttcagactatgaaaacttaagatgtgataaggatttttactacatatacaaacatctaagctttgaccaatattttaaagtattagaaatatttacagaatgtcatttaaagtttacccctcctggtcgtttcaatgatccttatgactgcgtagcagtaactgaaattgaaggtaacaagcctactgagttacttcaaaaagctctcactgaaaaattagcagttacatgcttcaacaataatcctttaagtattctaatgtggtcacattatgcacaatcacatcagggattcgttattgaatttagaataccacaacctttcatttacggtcccgctcctgatgtctttactctattaaaagtcatatatacggataactttcctaaaacagtcttaccgcctgccccagttactccatggtcagatgatttctatagacttatgcatacaatggtaaaaaatcaattcttaacgaaatctagtgagtggggatatgaagaagaatttcgggtgcttaaacatgattatgatcccaacaatgaaaattcattgttagtaaaatttccgcccttaagtatagcgtcagtaattctaggagctaaactaaattcagatgatgaaaaatataacgcacttttaaatgctataaatcaatataatgtattaaataaatgtaacttacctgtgtaccaaacccaattacagccaaatagtttcaagttaacagttccaggccatccacgccttagtaaagaagcttttactattcgtcatttctatgaaaatttaaaggcgcaaaaatga

SEQ ID NO: 55389 - DNA, 240 bp, Acinetobacter baumannii
atgaatgaattttctcaagacccaaatataataaatcgttttaataagtatattcgccatttacgctcatggcatctacaaacagatagctacacccctagagcatttgtagttggtgaaacacaatattatggaaaaaatttctatctaatagatgttgaacccaaaaataaagaatctctatctattatatttataagcccctggacatggtttaaagatctcactgctagaacttaa

SEQ ID NO: 55390 - DNA, 366 bp, Acinetobacter baumannii
atgggaaactttctttggcatctgatgaaaaaacgaagaatacaaaataaaggagagtgggtttttccatctgtaaaatctgaatctggtcatattattaatatttcgaaatttagaaaaaaaattaatgagcaatgtaaactttcttttacttttcaagatctacgtagaacattttattttgtgttaaatcatttaactaataaaccattagttagcaaaagaacagaggggtatgaagaaaagctagacgttaagaatattgctcatgctcaggatatgcgtaatagaatgaacaaggttgagcaaattattcttggtccctatcgagatgaacttattaaatctatcaatattaacctataa

SEQ ID NO: 55391 - DNA, 522 bp, Acinetobacter baumannii; identical to SEQ ID NO: 46790

SEQ ID NO: 55392 - DNA, 324 bp, Acinetobacter baumannii
atggaattagatttaaatgagaaatatcgtgtggtaactgatgagtacaattatgttttgcaagagaagaagataattggtagcaaaaagccagctacgagatcacctgatgcttgtaatgtaggcaagataaaatatacaagccttgggtactactcaaacttatcaagtttagtgtatggattaataacacatgaaattagaatctcaaaagtagatgagattaatgagattgagatgctagttaaaagatgcactcaggagattgttgataatcttagcttatacggtattaaaaaagaagtcgctaactatgaagaataa

SEQ ID NO: 55393 - DNA, 351 bp, Acinetobacter baumannii
atgataatagtagatattggtcataatgattatggacgtaatgagataaaaatttgtgttaataaagcaatctcaagaatctctggtttagaggaggttgtatatgaagattgtgtatgtaccaaaaattatcgagtagtgtcactaggatttcttaagttacgagatagtaatagcaaggttaaaattgagactgaatttattgattattattggcatgatttaaaaaacgaatttgaggatgcaataattagggcatcttatttgtgtaaaacagaacagaagcttttactacctgaacgatttcaaaagggtaatagctttaatatcactagagaaaaaaggagttaa

SEQ ID NO: 55394 - DNA, 858 bp, Acinetobacter baumannii
atgaaactagttgatcaatggaaacctgatgtaatccattcacatatgtttcatgcaaatataattgcaagattggtaaaaataagaagaaaaaatattcgtataatttgtagttcgcattctaattatgaaggtggagcattacgtatgatgatgtatgctatgactgaaaaattatgtgatgtacatacaaatgtaagttctaatgctgctactgcattaatgcatgctggagcagtaagaaaaagaaaaattaaagctgtttataatggtattaatataaaagactatcattttgatgaagtagaaaacaagtacttacataaagcgtttaacttgaaaaatgaagctaaaactatacttgcaataggaaggatagatactcctaaagattatccaaatttattaaaagctttcaaaataatttatgagatagacaatagtgttcatctatttatagctggaaatgggccaaaaaaagaagaaatcatgctattggctaataatttaggtattaatagcaatgttaaatttttaggcatacggaatgatattcctaagctattaaattcatgtgatttatttatttcatcgtctgcatgggaaggatttggactagctatattagaggcgatgatttgtaaaaaacctattgtagcaactgaaactgatggtgccaaagaattattaaataatgaaaatttggttgaaattggaaatccagagcttttggctaaaaaagctctgcaaaaacttaatagtaatttaggtttaattgaatatagtgggattgagagctttgattggaatgaaatatctaaaacttggctatctttatatgaaggaaaagatttttaa

SEQ ID NO: 55395 - DNA, 537 bp, Acinetobacter baumannii
atgaaaaacattcagaaatcacttcttgcagcattaatagttgctggttatgcggtaaatactcaagcagctgttactggacaggttgacgttaaattgaatatctcaacaggctgtactgtaggtggtagtcaaactgaaggaaatatgaacaagtttggtactttagattttggtaaaacttccggtacttggaataacgtattaactgctgaagttgcttcagcagcaacaggtggcaatatttctgtgacttgtgacggaacagatcctgttgattttacagtcgcaattgatggtggtgaacgtacagaccgtactttaaaaaatactgcttctgctgatgtagttgcatataacgtttatcgcgatgctgcacgtacaaacctttatgttgtaaaccaaccacaacagttcactacagtaagtggccaagctactgccgtaccaattttcggtgcaattgctccaaacacaggtacaccaaaagcacaaggcgattataaagatactctattagtcactgtaaatttctaa

SEQ ID NO: 55396 - DNA, 765 bp, Acinetobacter baumannii
gtgcgcaaattaaagtcaaatttcgaacgcttttatttttggctaaaagcttataaatcttggagcttttataaaacatggattttttgggcttcattttatggggttgtaatctttttatacaacttagcttttatttttattgatcctgaaaaaaaagttcttcttacatcaaatgaattaggtgactttttaggatataggcagcaaggcgaagagatgaagcaaaatacagctgctctcaaactacaagctcaagagttaaaacatagtgtcgatgaacaaagacgcttaattcagttgcatgagaaagagcaggaagaaaaacattttcaagttttacctgactttagaaagaccaaagagaatgtcaaaaaatatcagatacagtctcctatagttgatgaagatgaaaaaattattggaaccgaagttgaaaaatacttaagagtatcctttacatttgtgaattatggtgaagtggcaaaaaatgttttagttaaaagctttgaagatgaattttacgtaagacagtccatgtataaaataaattatgaagaaccattagatattagttttgaattaaatgaacaaataatggaaaatttaggggtaggcgcagaatattataatactctgattctaacttttactaatctttatggtaaggcttataccaagtatattcattacactcttagtggtagttatgaaccagagtttaatgatgttttttttagtttaagtgtcttcataaaagattaa

SEQ ID NO: 55397 - DNA, 456 bp, Acinetobacter baumannii
atgtttatttcgttatggattggctaccacccatctcgtcgatatgaaattaaaagctttatttatttgaaatactctgctttgaaattttactatacctataattataaaacaccaaagccaattaagcttttagagtattactactttactatatttgttctttttttactcaccataggttttgcttttatacacaatgcatataaaaaaggtgagaaaaatattaaagaaaatttatatcaaatttacataaagaaagactattctttctcaggcactgttactgaaggtgataaaaaatataaagcatataaaatagtttgtggtaattacaaatgtattggtttagatcttgataacaatagaaatactaccttccttcctgaacaatacaaacaaaattttgattatcaaactttcaaggataaatttaaggaaaagaagagcagttga

SEQ ID NO: 55398 - DNA, 147 bp, Acinetobacter baumannii
atgtctcaagaccaagttcaaagcgatcaagacaaatcaaaagagcaacaacagcaacagcaagatggtaaagagtttgaaccaaaaactcctgatcagaatgatgtagaaaaactaaatcaaaatgagaaagaagagaaaaaataa

SEQ ID NO: 55399 - DNA, 2826 bp, Acinetobacter baumannii
atgtttaataatatttcccaagttttagagagtataggttttctctcacagcatcgttcggtgtatctccagttttcagatgcatccctgaatagtcaggtttttttacaacgtatagatgggcaacattatcttaatcagggcatgacagccgagctgatttgtttatcaaccaatgctcatattccactcaaaacatttattgggctgcaggttgcggttgatcaggtcacagatcaaggccaacagtttcgtactacagggattattactggagcatcacaaggacagagtgatggtgctctaaccttatataaactcacgatatctgatccaacctacctctggcataaacgcagaaacagtcgtgtgtttatgaacaaaagtgtacgggatattagcgaaattctgtttcaagaatggcagggggaaagtcctttatttgcttctagtctgactttagatttaagtggattgaaacaggcatacgatatccgtccttttgttatgcagctcaatgaaagcgactatgactttctaacccgcttatggcggagtgaaggcattaactggttgattgatgaagctgagcttaccgtggcgagcaatacggacaatattcagccacaaaaattacgccttattgatgacaatagccagtatcaggcactgactagaaggacaatccgttaccatcgtagcagtgcaactgaacagtttgacagtatgaccagtttgatcgctggacgtcgtttgcagccgacttctgtttttgtgcagtgttggcagtcagatgtactacaacaaactgatggggcaggcagtgtacaaagtacacatcagcatagcgccagctatgacaatcaaagtttaagccttgaagatgcatggcacttcagtccggcatggatgcaggatttaaacggcgaagatggggcagcctcagcaagtaatcaacaactggaaaaatttaaccagaacttaagcgcttttcatgatgcccaatccaaacagtttgttgctcaaaccacagtacgagacacacaagtcggctattggtttgaactgaatgaacaccctgaaattgatctgcatagtggggcagataaagagtttctgatcattggtaagcagtactacaaccagaataacttaccgaaagacttaaaccagcaaatacaaactttaattacacaaagccattggcaatctagtcatacaaaagagcggcaaggcaatcaactgattttacaacgtcgccatatcaagacagttcctgaataccagcccttacaagatcgccctcaagcctctatacaacgtgcccgtgtagtcggacctgaaggtgaaagtatccatgttgatcagtggggccgtattaaagttcgatttctgtttacccgagctaatgaccatagccatgatggaggcgcggggagtaacgacaacgatactgattcggcttgggttgatgttgtaactccgtgggctggaaaggggtatggggcacggtttttaccacgcgtgggtgagattgttgtgattgatttctttgatggcaacattgatcgaccatttgtagtgggtcgcattcatgaagctgaacgccacccaacccagtttgaccagaaaggacaactccccgacactaaaaagttgagtggtatacgttcagaagaggtcgatggtaaaggctttaaccagctacgttttgatgatacgactgggcaaatcagtgcccagctacaaagcagccatgcggcaagccaactcaacttaggtaacttaagccatccaaaagacagtgcgacaagcgatggtcgtggagaaggttttgaactgagaactgaccagtggggcgcggttagagcaggcaaaggcttactcgttagtacgcataaacaggaccaagcgcagggtgtacacctagacgcaactgatgccaagcaacaaatagaaggcggcctcaacaatgctaaggcactgagtgaagttgctaaaaaccagcaaactgatccattggaaatgcttgagaacttaaaaacgttcatagagcaaattgaagaaaaagatcaggacaaagctgccacttttaagcaagccttgatggtcttaacagcaccaaacagtattgcagtcgctagtaatgaagatattcatttaagtgcagatggtcagttaagccaaaatgctggggacagcattagcctaagcactcaaaagaacctgattgcacatgcacaaaacaagattagcctgtttgccgctcaacagggagcacggctctatgcaggcaaaggtaaagttgagatacaagcgcaaggcgatggagcagatttaattgcccgtaaaggtatccagattatttctacagaagacaaaatagaaattaatgcttctaaagaaattgtgattacctcgggtagttcccaaatcaagattaatagctcaggtattttcccagtcacgggcggcaaatttgaagtgaaggcggggcagcatgtgtttatgggtggggcaaaggcgaactatattttaccgtctttaccaacacaagaaatcaagacagatgacttattgctggaatatttacatagcgatgggacacctgttaaaggtgctgaatatgaggttttattatctgatggttccatccgtaaaggaaaattagatgcttcgggtaaggctattgtgagtggtgtacctgctggacgagccaaaatccaatatggggaagaccaaagtaaagatgagtttccagctttagaagtagatgactggtttactcaacttggaagcagtacaaagactggaaaagaggaataa

SEQ ID NO: 55400 - DNA, 1590 bp, Acinetobacter baumannii
atgccagatcctcaaaatcaacaattctggtcaaagatcgcagaacgacctacggaaatacaacagcagttctggtatggcgctgaaaaattagcaaagtatctcaatgataatccagctatgtataaaggttatatgacctatgatacgagtaagcctgatcctaatctgtcatggtgggaaaagatattattttacagtgggcaggctcattacaatgaggcggtgacccactataacaccagtaaggtaatcgccgatcaagggagctggttatggggcatgctcaagggtgactttaataaagatccttcaatgtctcagattattgttggtggacttattagtcttatacctgtagctgatcaggtgtgtgatatccgcgatttgattgccaactttatcaccttgtcggatgagaaagcccgaacgaaagataactatatggcacttgctttgacaagtgtgggtatcattcctgaagttggttcagcaatcaaaacgattgtgaaatcaagccgggcaaaagatgttagtaaggtcaagttatttaagttcatggagtattttgaggcggctttaacaaagctcaaaattaaatgtccatggggtaaggcaccagaggcatggttaaggtctcgaccatggaaaggcatagcgacacaagcttttaatactttaaaaaataatattgaccgaatcctatctgtcattaataagtgtttgatacggttcaatggtgcattgaaagttgccttagcaaaatttcaggcaacactaaaccatgttttaaataccatcaaaaagtatattgatcagttgtgtgatgaagtggataaggcaatcggtcgtttattgcctcaacaaccattagcaatggcacatgctggtggcggtggtaagaacacccctacagggcgttatgaggccaatgttagttccggtaaaaaaacagaaaccagccatcgtcaaaagaaagaaacacctccaccgccaaggaaaatgaaaccgaagcatgtggttgaaccttgtttggaaccgaaaaaagggttgaagaatagttggggtaaaaagactggtaagtctcaggctgaactagatgccgagtttgatcgtcagcttaagcggcaagaggaagggcttaaccgtctaacggttgaggagtatcaacagaaccgagaaacttataaaaaatataagcgagctgggacgggctctgaacaacagaaaattcgagaggatatgcttgggcagttaagaagatctgaaatgggtaaaatagcaaaagaacaaccaaacctgtcaccagttcaaatgcggaatttagcagatagtaatgctaaaaagaccctggagggcttggatgtcctacatgatccggatatgcaattgggtggttttgatgtcaaatatgatcctaaaaagccccctacactagatgattttgggcatagtggcgtaaaccgttctattggttcccaaatggcagcaaagcagcgtctagagggtatggataaagcagcggctcaggctaaagcgaagggaatggggaaagatgcgatggatgttgaattaaaacgttgtaaataa

SEQ ID NO: 55401 - DNA, 864 bp, Acinetobacter baumannii
atgttacatccagattatgcaaaagattttaaagaattgtttggtgagccaattgataaagttgaagtcacagaggacttcataaaaaaatatcggggtaaactgcctgaaagtattttagaacagtggcgaattattggttttgcaggttatttgaatggtttgtactggattacaaacccagatgattatgctgaagtgatttatgactggttggaagagacgccattaccagatgatgatgtctaccatgtgttagcacgttctgcatttggtgaactattaatttggggtgaacgtaattatggtagatattacatcaaaactatggaaggtatcctgcatgataatgggttgcaagaggaaggtgctgagttctatggaaacctctttttcttctattcagataaagattcgttagaccatattgataaaaatgggaaaaagctatttgagcgagctgtaaaaaaattaggggttttaaaggcagatgaaatgtatgcttttgagcctgctttggcattaggtggggaagagtcattagcatatctgacaaaagtaaatcttcctgttcacatgaagttgctaaaacaggtgactccattaagactcagaacttttgaggatcttacggctgctctatatggtacatcgtatagtgtggacgatttaacaagtggacaagatactgagtcacaatatcaagaatctgttcaagctggagaagtttgtcctagaacaggttactggacaacgcctgcacaacccaatacacgccattattgtaagaaaggtgaaattcttcctgaaattaaggaacaagactggggggaagtatattggtattgggatggtgagaattaa

SEQ ID NO: 55402 - DNA, 879 bp, Acinetobacter baumannii
atgatcgatgcagattttgaatattttttggaaaagtttgggcaaccgcagcaagcagttagagtcacagacaatattcttaataaatataaaggaaaactccctgatcaattattggaatactggaaagaggtaggtttttgtacttttaaagaaggattgttttggattaccaatcctgatgattatgctgaagatatttatcgctggttagaaaatactgatattctagacgaggatgtttggcatgttattgctagatcagcattcggagaactttacttatggggtgaaaaaaattggcaaaaatatgatttaaatattataaatggtgaagtatttcagaatagtgtaggttttaacgatgaaaagcataaaaacgatgaaattattagaaacttctttgctttctctgatttagatgaatttgatagaaaagatgaaaatcttaaacccttatttgaccgtgctgtaaaaaagtattgtccactctcaagcaatgaagtatttggttttgaacctgctttggcactcggtgggaagtccgttctacagaacctgaaaaaactggatattcatgttcatatggcaatactcaaagagtttactaatgtttataagactgatctggaggggttagggaaaatattatatggcgagaatgcttcttttagtaaagctattgagcaggtcagtcagatagaaaaaactcattctcaagttattagtattcaaagtggtcaaccatgtactaagtctggctattggtttactccagccaaagagaattcacgtcagtattttaaagaaggtgaaatatttcctaattttgttacagattggggagaggtttactggcagttcgatggtgatgaataa

SEQ ID NO: 55403 - DNA, 210 bp, Acinetobacter baumannii
atgactccaatacttaaagctggaaacaagcctacaagcgctgaagataagcttgaatcaattggcgactctctttctaaactagaacaccatctatctgctctgtcacgcatgcactttgatgatgacctaccaagtgatgagttcaatgccatcatgtgtgggttacacctgcaggtccatgagatctgccagcaagtcaaagcctaa

SEQ ID NO: 55404 - DNA, 828 bp, Acinetobacter baumannii
atgaatactcaatataaaagtatacattctgcacaaattagcatttcacatgctgtcttcattcaagatcaacaaatcaaaactgatagtctcaaagttgctgaagcttttggaaaacgtcatacgaatattttaagagcaattgaaaatctagattccacaaaatcttttaacgagctcaactttgagctggttgaatatatggatgctaaaggtgaatctcgtcctatgtatgaaatgaccaaagacggttggatgtttttggtcatgggttttactggagagaaagcagctcaaatcaaaattgcttttattaatgcctttaatgcaatggctgtgcttttacaaaaccagcagttaatagagcagcagggtatttctgttggctcaaaggttcagctcaaatcgggcagtcctgaacttactgtgaatcgattcattccaaatgctgaaggccacaacgacagggtagaagttatttggtttggcaatcgacttcataaagaaacgctttctatccatgcacttgttccagtagaacaacagcaaaatcaaatgctcaaacagttttgggaagcgatctatcagtatggtttagacaagctaaaccatgggtataaggctgagttaatagcattgaatctaactcaggtctatgaagttatccacgggctaccagagcgtaaaatcttaatccaacaactaaaagttagctcgaaaccctatccccaatacatggacactaacttacctatacgcagcgtattaacaggtaaaacagttaaatgtgttgtattcaaaagcccagttttactaggggagaactaa

SEQ ID NO: 55405 - DNA, 879 bp, Acinetobacter baumannii
atggcacgtaaaagaagcgtaacatatacagcattaaatattagggtacatccacatccaagcccagacatttatgtagatctttttaactatctaaatgagaatcgccgccctattcctttaagtaataatatttatctagcaattaatgatcttaaaccgcttaatgaaaataaaccattagatggctttattggtgaaattattaaatacaatggaattactgaccagtggtataatcaaaaaacaggtcaaaaggctgaaccagaagatttaaaagaagtaaacataccagagcatttaaaaccaaacgctaagttctttaattttatattctatcctattgatcataaactggtttgtgagatcaaagatactgatggctcaataagtgcaaaaatgcttttagaatttttcgagaacctatttaagtctccgaaattattagaagtatttaatactgttgaagtaaatattttacctgatttagatgcagtagataaaattctgagattaaaatatttaaaaaaattgcacctaataatattaagaccaaatgctgatgaacttgctgaaatggaagcagaaatttttgaagagatggatagccaaaacataggagtttatcaaaaaattcttgaagcccaagaaaatgaatccttggatttaaatgaacgtacaaaagaacaaactaaagttgctgcaactaatggtagggtagattataaagcaaaagatgaaagaacaggtttaactgtcactaaaagcacggcctcaacacctttaattgaacgcgataaatatgaccctgatacaacaaccccaattgaatttttaaagcaaaatgctgttaaaattatagctaaattcaggaaataa

SEQ ID NO: 55406 - DNA, 690 bp, Acinetobacter baumannii
atggcatcagagaccaagaccgaaagttcaatatctatatattggaaggcatatgggggctggaaagccttgtggtcttctatttatctaaaaattgctattgttattactttaatttgtagccacacctggttaaatgaaaaatggatagaggatgcaattactgctcttccatctttacttggattctctttaggtgggtatgccgtatggctttcaattggtgatgagagactaaagaaaattctttatgcaaataaagatattactaaaccatctgcctatatgcgggtaaatgcggcatttgtacatttcattttcttacaggtaatctgtttattgtatatgtattttcttaaatacaactcttcatctgcaattcttcatttttttgaaaaagattggatttttacaaatgaattttatcttgtaagagatcttcttgttaattttttcaatgcatttggttttttcctatttatctattctattctctcaatgcttgccgcagtatttgctatttttcggattgcacgatggacagatcgtttaaatagaaataatcataatcaacctacagatagggcaaaatgtccagattgtatggaggatgttcatcatcaagcaaaaaaatgtaagcattgtggggcaatttttaaacctattaatgatataaataatccatcctga

SEQ ID NO: 55407 - DNA, 705 bp, Acinetobacter baumannii
atgaaaaatttagaaagtcttgctccctttatcaaaacatatgctggtgaaactgtaggtagttttattattcttgttttgattatattcactgtttataaaacaatatttgattcaggattattccaacatttgtttattttaattcgctttcgaagatggaagatcgataaagagattaaggaagtgactgaattaattaaccatggaagtctaaatgaatatgtaaaaaacaaatatattgataaaagaagagctttgtatcttcaaaaacagctacttactaaagaagatcgaattgaaattcttgatattcttagctcttatgaagatgaaaaaaaggctgtaaggttatttgatagttgtaaaaaagtcctagagtattgtcctaataaaaaaactcttgattttaaaactggatatcacacagccccagcacaagcagagaaacataaatcaatagccttctatacctattggattttggccttacctgcagctgcatgggtgttatatgaatattatcatctattattcaaacagctacctaatacagattcaaatctatacgttttatttatatttagtctctatactggctgggtatttttagttgctttctgtcttcgttattttttgaagcgagctaatgcttgtgaactattaggaatgaagaaaataaaaatgactaaattaatctattag

SEQ ID NO: 55408 - DNA, 462 bp, Acinetobacter baumannii
ttgtctcagtttcattttgcatttcatccgaaatttaatgccacaccagctttcatagatattttcgaagaattttgctattacaaagaaaatagcgattctcatgagcatccttcgcctacacgctatacacaagaaacctacgaatgtctttcgcctttatttgggcgtgatcgctttgacaaaaaatatcctgaagcaagtaaccaaaatatccagcatttacatgtaaagcagcccaattctaattgggattttcccaatggttcagcaaaggcacagtgggaatgcaccagtgacagctatttggtctactcatattttaaacataatgatatccatcattatttcgtaatcgaattttataaatctggtggccatgctcaatacgaacaagacgtccagatttttattcatgaagccgaacaatacagacaaagtcaaattaatctgtccgcataa

SEQ ID NO: 55409 - DNA, 165 bp, Acinetobacter baumannii
atgaatacaatggtaacactgcgtcgccctgtttcaaaacgtggcaatcgtcgtgaaatctctccagaacgtttagctgctttggtaagtacagctgaccaattagctgatcatggtaccgagcgcatggaaaaagtgagacagtctgttacagctagaggctaa

SEQ ID NO: 55410 - DNA, 987 bp, Acinetobacter baumannii
atgtcagacagtaaagttcaagccttttcctttggagatcctgagccggttcttaataaccatgacttttcaggttactttgagacttggttaaatggacgttattttgaaccgcacattagcttgaatggtctggctaaatctttccgttctacgccatatctttcaacggccatcatctataaaaagaatcagctcgtttcttctttcaaaccacacaaattgcttagctctgctaactttgaacgaatggttttagacaattttgtttatggcaacggctatttgcaacgcattgataaccgcttaaaagatccacttcaattcaaaggcttgatgggtaaatatgtccgtcgaatgaaagaacctaatcgctttttgatgctaatagatgggtttaatgaacacgagtttgcagagggttcaatttgccatattaaaacttcagatgttgaccaagaaatatatggctctcctgaatacttatcagcattacagtctgcatggttaaatgagtcagcaactctttttcgtcgtaagtattacaacaatggatctcatgctggcttcatcttgtacatgaccgattcaggaatagacgatgaagatgtggagtcactcaaacaagctatgaaagactcacgtggaccaggcaacttcaaaaatttatttcttcatgcacctggtggaaaaaaagatgggcttcaacttatcccaattagtgaactagccgcaaaagatgaattcttaaatatcaaatcaatcacgcgcgatgacattcttgctgctttcagaacaccaccgcagcttctaggaatcattccttcaaatgctggagggtttggatctataaaagatgcacgcgaggcttattggtataacgaaattattccggagcagacacgaattgctgatactgtcaatgagtgggcaggggataatatactgaattttaaaaaattcgaggatgtaaatccaattttgtag

SEQ ID NO: 55411 - DNA, 1785 bp, Acinetobacter baumannii
atgaatacgacgcctgaaaatacatctctgacttttgataaccgcctcttagcaaagttcttatactggatggggtggcggatcagctcgattgcagaatacttaaaagaaaaagacaaaaatgttcatgcgtggaaggcaagagatgaatgggacgagcaagctcctgaaggacgtgttgcacaggctttagaagcccaactagtaaagttaattattcttgaaaagaaaacaccaggtgattttaaagaaattgatttacttatgcgccagctggagcgtatggctaaaatcaataaatataacaatggtggaaatgaaactgacctcaacccaaatttaaaaaatagaaatgctggcccacgtaaacccactgctagaaatgtgctgacagaggagcaaattgagaagcttcttgaagactttgacgatggcttatttgaatatcaaaaagtttggtaccgtgctcgtgaacaacgtaaccgtgctcttttaaaatcacgtcagattggtgccacattctactttgcccgagaagctttaatcaaagccgtgacaactggccgaaatcagattttcctgtctgcatcaaaagctcaagcacatggctttaaaacctatattaaagactttgttcttcagtcaattggcgtggatctacagggtgatccaatcacaatcactctaccgaccaacgaaacagttcagctcattttcttaagtacaaatgctaagacggcccaaagttaccatggcgatttgtactttgatgagttcttctgggtacatggctttgccacacttaaaaaagtggcatcagcaatggcggcccaaaaacaatataaaaagacctacttttctacaccttcaagtaaatcacatgaagcctataagttctggacaggagaagcttataacaagggtcgaactaaagataaacaagttgaagtcgatacaagtcacgaagcactaagaaatggcgctctttgtaatgaccagatgtggcgacacatcgttaacatttatgatgctgaacgccaaggctgtgatttgtttgatattgatgaactcattgcagaaaacagtgctgaagagtttgcaaacttgtacatgtgtgagttcgtcgatgacgggcagagtgtttttccattaagccttattcaaccttgtatggtggactcatgggaactttgggccaaagactttaagccgttagcaataagaccgtttggaagtaaacaagtctgggtgggctatgatccggcagaatctggtgacagtgctggcttggttgtagttgctccacccgaaccaacttacaacaagttccgcttattagaacatcatcaattcaaaggaatggattttgcgagtcaggcactttttatcaagaaaatttgccaaaaatatcgggtgacttatctcggaatggacaagtcaggcatggggactggtattgctcagttagttctagatttttttcctaatcttacaacctttacttattcagttgatgtcaaaactcaattagtcatgaagggtatggacgtcatcaataaaggacgttttgagtttgatgctggttctactgaagtagctcaatccttaatggccataaaaaagaccctcacagcttctcagaagcaaatgacttttgaagcttcacgtgctgaaaacattgggcacgcggatttggcatttgccatttttcacgccttctttaacgaaccgttgtctttagaaaatgacggaaattctaaaaaatcctcaatggagatttactaa

SEQ ID NO: 55412 - DNA, 804 bp, Acinetobacter baumannii
atgagtaagaaatccaagttttatcgagttgcagttgctggagccacaaccgatggccgccagattgaagcagcttggattcaacaaatggccaaaaactatagccagaatacttatacagccatggcaaatattgaacacttccgtggtatttcgccagattctacttttggaaattatgccaaagtaatcgcactgaaagcccaagaagatgaaattgcaggccaaaagaaatgggctttatatgctcagcttgaagccttcgataatctcattgagatgcatggccgaaaacaaaaactgtttaactcaattgaagttaatcccaactttgcagataccaatgaagcttatttagttggtattgcgttcactgatactcctgcttctttaggtacgcaaatcatggagtttgcggcaaataatcctgaagcaagtccttttacttctaaaaagcagcacaaagacaaccttttcactgctgctgaagaagtcgatttacagtttgaagaagagctggcagttacaggtttgttcaataccgttatgaattggctaaagccacaacaagaagaacaggatcagaaaaacaaaggccaatttactgaagttgcaaagtcaattgagcagattgctaaaacctttggtgaaactcagcaagaactccaagagttcaaaacaaagtactccaccctcgaaaaagactttaaagctttgaaagtaaagctaagtcaagaacctcaccctgatactccgcctgctcctgaaaatacaggcaattattcagaacaaattgattgctaa

SEQ ID NO: 55413 - DNA, 990 bp, Acinetobacter baumannii
atgcgtaacgatacacgaattaaatataaccacagccttcaaaaactggcccaaattaatggcgttgaatctgtagcacatacttttaatgtcgcgccggttccagctcaaaagatggaagataaaattcaagcctctagcgaatttttatctaaaatcaatgtcattggtgtgattaatcctaaaggtcaagcgattggtttatctgtaaaccaaacaattgcaggtcgtacagatacttcaggttctggtgaacgtaccccagtagatccaacgggtttcggtgcagataactatgaatgtatcaaaacagattttgacgttgccattggttatgaaaagcttgatgcatgggccgtcttcccagattttcatgcacgttggacgaacgcgattgctaagtctattgcgttggatcgcatcatgatcggctttaatggtaagacagcagcagctacaacgaaccgagcgactaaccctaaacttcaggatgtgaatgtaggctggttagaaaaaattcgactaaatgctgctgatcgagtaatggcagatgtgactgtaggagctacaggtacatataaaaatcttgatgctcttgtacaagatgttgttaatgagcttattgatgaagtacatcaagatgacactgatttagtcgtaatttgtggccgtcagttacttgcagataaaaacttcccaatcgtaaataacgctgcagataaccagaatgttttagctggtcagatcttggttggtcaaaagcaaattggtggtttacctgccatccgtgtacctcacttcccagacaatgcccttctagttacttcgcttgataatctttcgatttactaccagaaagatgcaaaacgtcgtcacattaatgaaaagccaagtaagaaccgtattgaagattaccaatcttcaaatgaagcttacgtcattgaagcctacgagaaagtaggcctcgttgaaaacatcacaattcaataa

SEQ ID NO: 55414 - DNA, 762 bp, Acinetobacter baumannii
atgttgagtccagctcgacgacatcgccttcaggcattagcagctaaagcagctgctaatgctgaaaatgaatttggtggtgttcgtgaagatgccagtgtctatatgttgcaactggcagaattaaaaaatgaccaaaacttattgcgtaacgttaaatccgaaattgaacgtgcccaatacaaagcaactttaatcccgaaatacatgccttatgttgaaggtgttctttcaattgaagaacgtgctcctgatctgaaggacgatgttgtcacaacgattatgctttggtgctttgatgcagacatgtttgaagatggtctccgtattgctgaatttgctttaaaacatggtctttcaatgcctgattctttcagccgtgatacagcatctattgttgccgaagagatcggtaatgctgcaaaagctgcttatgctgaaggtaaagtttttgatttatcagttttaaagcaagccattagcattacatctgacttcagtatgcatgatcagatccgcgcaaagctctatgtcgcaattggccgtgtgttcttacaaaaagagatctactcacaagcggtcgagtggctaaaagaagcaattaaatacaatgaaaattgtggtggtaaacaagacctccaaaagtctgaacgtttactgaaaaaacaattagaagaaaacccacctcagccattactcaatgccgatggaagccctgttgttgatgattgcaatcaggcatttgagggagtttcttcttaa

SEQ ID NO: 55415 - DNA, 684 bp, Acinetobacter baumannii
atgaatgctgacattaatcgtcgtcttgagaatctgattcggttcggaacaatcaagactgtaaatccgtctaaaccaatcccacttgtcacagtagatcttgacgatatcgttacgcctgaaattcgcttttttaatgcacgttcaggagatgactcaacttgggacccaccctctttagatgaggaagtcatggtgatttcaccttgtggcgaaattggccctacaagcgtcgttttctatgggctttacaacaatgaacacccatctccttctgatgatttaaataggaaaatccgcgttttcgcggatggatgcgttattgcttatgacgttgctgcacatcatttgtcggcaatccttccacctatgggaacaattgaagtaactgcaaatggtggcgtcactgtaaatgccaatggcggtgtcactataaacgccaatgatggcctaacaataaacgctgtatcaggcggtacaacccacaatgggaacttattaataaatgggagttctgtcacaacaggaaataatactgttcaaggtagtcaactagtacaaggaagtagccattcaaaaggcgacttcagtactgaaggtgacgttaaagctggctctatttcacaactacatcataaacatcttggtgatagcggtgggacaactggagagccaataccatga

SEQ ID NO: 55416 - DNA, 2307 bp, Acinetobacter baumannii
atggcagcactatatcactcactttttactgaaaaaggcttagcattacttagagagtcaattcaaaacggaaccaaattaggtattacacatatgtcatttggtgatggtggcggcatgttacctacaccagacgcaacatttactcatatggttaatgaagtatatcgtgttgcattaaataggcttgctccctctagagagaatccgaattggttagaagccgatggtgtaattccttcagcagttggtggatttaatattcgtgaggtcggtctatgggctggcaatgtcatggttgcctatgcaaactatccaccaacatataaaccaagtggtgatcaaggtaccgcccaaattaaatcaattcgtattgtgctacaaattgataatactgctaattttgaattaaagattgatgcatccgtcgttatggcaacgattcaagctttagaagatgtaaaagttgaggtaattgattttgccaataaaactaaggttcaacatgttaattcaatagatgaattattaggtttagaagtttgggatggcaggactgtctttgtaaaatcatattgggaaggtgaatctaaagccggaggatcgtttgtatttgactcatcaaaaagtaatatcaatgatgggggtattgttataaatggttgggttcgccagattgataaagagtattttattgagtattggggagtacaatctaatggtttggatcaaagcttacgttttcaaaatgcattagattattgtttaaaaaatagaattaactccattaagacattcggtaaagaatattttattgattctacggttacttttgatgcattagatagtaatttagtcactgaatggggctatgcagacaaacgtttaatattagatttaaatggtgcgactattaaaacgcataatgataatttaacatttttcaaaattcttagagatcacattagtattatcaatggaacaataactggtacatatggaaagaaacaacgagctatcgttctcggatatgatctaaatgaagctcacaaagcgggtactagagaatctgtaatgtgggtaaacgttgcagatttaaaattaaatggactagatatcggtattcaatttaatcctaattacggtggttatggtatgtattaccataaaatctttaatattgatgcaagagacgtcaaaatattattttatggagaacaaaatacatctactcaagatgatatagatcgcggacgtggaagcaataaagttacacgatctgtatttaataatattactcatgtcggtggttcatgtactgtatactttaaagatattgaaacttcacaatttaaaaacctatatcttgaatttattcaataccaagataatcgtttaccggatggtgaagcggtatgtatctttattccagaagctcaaatatataatccattatcttatgataataatagccttgagtttcatggagcctttgaagctattaacagaacatataatttctcccaaagaaatcaagctgttattattgatattaatactattggagcaacaagtagtacaagttttgttggtagtgaatggactgttagcaataatgtcgggcgctcttatcatcacaaaacagcgaatatacttaactataaaggcaccgtagatgtaaggcctgttactgtagaggtctcaaaatcgacacaagaagtccgtaattcctatcctctaaacaatgtagacctatatggtagtttaattagtttttcttcaactggtagcgaatcaccagaaacatttcagatgtttgctgcacaattaagtgagcgaatttacgcacgttttaacccccaaggaaattggtctccttggttttatctttatcatagtcgtaataccactgttacggctgatggaactttaaaggcagcatctcctatcgttaagttgttttctgatcatattgagtggaacgatgaaatcagtgatcaaattcccgaatttgaaaagcttggaattgggcattatttagttaaaaacacatctggacttgcaaaaactggttggtggattgaagtcccaagtgatagtaatgggaacaaagtttgtgccatcaaatataaagagttagaaaatggcgatattgaagttaaaacttataagcgcaagtttgatattgcgaccgcttcagttgtagctgatgaagaaaacccaattgatataccggacaacatcaatggcgaaccacgatggattgatatacgtttaaattcaatcgaaaacgtaaatcagttgtaa

SEQ ID NO: 55417 - DNA, 1176 bp, Acinetobacter baumannii
atggctatagatcaataccaccacggaatccgtgtccttgaactcaatgatgggattcggccaatccgaaccattgcaacagcaattccaggctttgttgcaactgcagatgatgcagatccactcgtgtttccagaaaaccaagcagtactaattacaaatatacaagctgcagtagctaaagccggaaaaaacggaacattagctaaagcacttcaaaatatggccaaccaaaccaacgctatttgtgtcgtggtccgtgtacccactgcagttgatgaagcagctcaaactgcaaacgtcgttggaaccgtaactgctgaaggaaaatataccggccttaaagcccttctcgtcgccaaatctaaattaggtgttcagccacgtattttaggtgcaccagggcttgatactcaggctgtggccactgagttagttgttattgctaagaagttgcgtgctatggcttatgcgtatgcatggggctgtaaaaccaaagaagaagccgttgcatatcgtgaagcctttgctgcacgtgaacttatgatcatttggccaaactttgtagcatttaataccacaactgctaaaacagaaactgtaccagctgttgctgttgctatgggattacgcgcaaaaattgataacgaagtcggctggcataaaaccctttcaaacgttgcagtatcaggtgttactggcattgatgctgatgtgacttgggacctgcaagacccagcaactgatgctggctatctcaacagcaatgaagttacaaccctcattcaacatgaaggctttcgtttctggggatctcgtacttgttcagacgatcctttatttgcttttgaaaactatacacgtactgctcaagtgttggccgacaccatggctgaagcacatatgtgggcaaacgatttaccactccatggttcattggccacagacattatcgaaggtcaaaaagccaagcttcgggaactaacgcgtaataaataccttattggtggtgatgcctggttcgatccggaagcaaatactcctgatacgttgaaagtgggtaaattggccactgattacgattacacccctgtcccacctcttgaagatttgaccttcagacaacgtatcactgatcgctatctcgctaactttgctgcatctgtaaaagcttaa

SEQ ID NO: 55418 - DNA, 246 bp, Acinetobacter baumannii
atgatgcaagctgtaactcaacaacaatttttagaaattgcaaataaattagctcaacagcaagatgagtattatgaggggtttatagtggaggaaattaataataaaggaggagttcttgaaattaaatgtcaaggtttttcagatgggaaaggcaaaattgaattaaaaaagttccagttagcaaatattattgcaagtaaaattgaaccaattctaagagctaattatattgttgttggctaa

SEQ ID NO: 55419 - DNA, 195 bp, Acinetobacter baumannii
atgaaatcattttctgctaagcgttcgtacactcaaaattctgttaaagaacatacccctatctatgacctgaatgcttatcaaaaacgccagcgtcaattcaaacgtaaaaagctactgaagaaccttttcgacactgccatatttgccagtgctgctggcttcactttctcaatgctattttggggagtatga

SEQ ID NO: 55420 - DNA, 246 bp, Acinetobacter baumannii
atgaaaaaaatcattgaacaactgtacttaatcattcagatcaaacagggccacattgagctaaacaatttacaagctgaagcacaattaccagcacatttgaaatacgtttatcgaaaggccaatattcttatcagaagtaaaaatcgaaaccaaatgttcccgactttggtgttaaagatattattccccctaaaagctcgattaattaatcgaattaaacaaaagtattcgaccaaggtataa

SEQ ID NO: 55421 - DNA, 228 bp, Acinetobacter baumannii
atgattacatctgtatttacaaataatcgctcccaagctgttcgcttaccagctatttttcgctttcctaaagaaacacaaaaagtctttgtaagggtcgttggtgtagaacgcgtcatttgccctgtggaacatatttgggacagtttttttgatgatgctcaactcaccgtttcagatgattttgagcgtggtgaacaaattgcagcggagcgtgagagtttttga

SEQ ID NO: 55422 - DNA, 402 bp, Acinetobacter baumannii
atgttgagatatatgttagataccaatatcgtgatctataccatcaaaaataaaccgcctgaagttaaagtgcgatttaatgctgttgccactcagttatgtgtcagtagtatcactgtggcagaacttatttatggtgcagaaaatagtcaaaaccctataaaaaatttacgcgttgtcgaagattttttatctcgattacagattttagattatacccctgaagcagcagctcaatatggcatgatcaaagcagatttacgtcgtaaaggcacgcttattagtgataatgacacgcatattgcagctcatgctcgtagtcatggtcttattttagtcaccaacaatactaaagaatttcaaagagtcgaagctttacagttagagaattgggttgagtga

SEQ ID NO: 55423 - DNA, 441 bp, Acinetobacter baumannii
atgaatgcacaaaaaggttttacattaatcgaactcatgatcgtggttgccatcatcggtattttggcggcaattgcgattcctgcttatcaaaactatattgcaaagtcaaaagcttctgctgctttagctgatattgcttcattaaaaacaggttatgaaacttggtatagtgaaaatggtgagacaggcttaaatttagcagctgttggtggtcaaacgccaactgggaattgttctactgtagcagtaaatcctccagctgctggtgctccctctgctacaacagatgcaattaaatgtactattaatgctcctggacgtttagctagtactgctggtactgccgtttctattcagtttgatcgctcagctacaggtttattctcatgtactactacaaacatggttgcagactttaagccaaaaggttgtgtataa

SEQ ID NO: 55424 - DNA, 630 bp, Acinetobacter baumannii
atgggtgtcaaccaagttactggaagtaccgatgtcgcgaaaatggataaagagcctcaatataacgagcaatatgaaattggggtaaaaagtgaatggttcgataatcgtttaaatactcaattttctgtctttgatatccataaaaataatattcgttataaaccgaatcctgacagtgaaccagaggtatgggcaactgctggtcaacatcaatctcgtggtctcgaatttagttttattggccgtgtacttgataatgtctttgttcgcggtgggtatggctataccgatgccaaagttaaagaagacaagcaaaatcctgaacgtgaaggcaattatttagccaacacatctaagaacacaggtaatttatttgttcgttatttaccaaccgagcagtggtataccgaagtgggcgtgacctatgtgggttcttattatccaaatattaataatcaagtaaaaatggaaggcttcaatcgtgtcgatgcagcaattggctacagtgccgacccttggaatgtcacacttgcggtaaataacctaaccaataaagagtactggcgttcggacagcatgccaggcacaccacgtaatgtattattgcgtttgaattatcaattttaa

SEQ ID NO: 55425 - DNA, 1845 bp, Acinetobacter baumannii
atggcagtttttggatattcatcagcaacttccgtcttacctggaagttcaatcagtttttatctcagtactgatgtacctggggtaatgaatttaaccatagagcgtataggaacaacctcagtatcatcaacaattactacaactctttttacccgatcacttccgactaccaacccatgggaaggatttggttggccagtttcaacaacatttaatatcccttcaaattggccttctgggttatacagacttgcctatatgtctcaagatgtgcttacttttgtgattcggccagtcattccggcggccgtttctaaggtgcttttacaagtctcttttctgacaccgaccgcctataatgcggcaggtggcaaaagtttatatgattttaatagtgtgggaggagctcgtgcgaataaagtttcatttaatcgatctggtggtacaccagcaagtaatgggcctgagtctattctcattcactggcttgaaactgaaggaatagcaattgaatattgctcaagtgtggacctccatagtatttcaaatctactcacgaactatgagtgtttgatcattgcaggacatgatgagtactggacaagagcaatgcgagaccaaacggagcagtttattgctaacggtggtaacctgatcatactttctggtaacacatgctaccgagctgtaaggttagaacaagggaaccgcatggttgttttttataaatttgctggtagtgacccgaatcaaaatgcttatgatacgactgtagcatgggcagagccaccattgaaccgaccccagaattcatttcttgggactggtttcactgaaggtgcttatggtggaacagcgacagcatatacaatccggtttccagaacattgggtgttcaacggagttttatccacaactacaacatcagcttttatgacctatgagactgatgctgcagcttatgtagatgaggaggagggttacccacgtgttactggagatgaaaatacaccactgactatgactgtgcttgcctcagcagagcttggttcatggactggtaaaccagggcgcgcgacaatgggtatattttctcataacggtacagtttttaatgctgcaacaacggactggatatatgttttgggtagtgatgccgttgtgactactatcacacgtaatgtattttcccgtcttaaacagcgtataacatgggattgggagaatattggatatgcaaatgattgctgtgcgctcaccgcattgcaaggcaaaattttcatggcaacaacacaaaatagacttttacagcggtaccctattggtgcagatgtagcttggcgtgatgttagtcatgcgtataatgtcgttgcaatgacagctcttggagatacactttattgtgttacatccgataatcaactttggtggaagcctgcttcagagggggggcagccttgggcttcaatggggactggcccgactggtggaaccaaggcgttagctgctacgggcggaatgctttatgcagttgatagtctgggagcattatggagggcgccagcaacgagaacaactccgtcatgggtagcaatgacgacattcacgcaggatgctactgttaatgcaatggctgcttatggagatattctcttcgcttcaactacagataatcgcttgttacgttcaaacaatgactttatttgtgaaagtagtgcatgggcctatatccatcactgtaactattctgctggtctggcagtagttgaatcaatcctctttgttgctacaacccaaaatcttctttggaaaattgacctttatggactccgtcagccttaa

SEQ ID NO: 55426 - DNA, 1248 bp, Acinetobacter baumannii
atgaaagtattactcgatattttatttgcttttgcctttttatatccgttgttgatggcttggacatggatggtaggaggcctctggtttttctttaaaagggaatatcatgagcagcaactgcctgagccatcaagtgaagggtgcagtattattattccttgctttaatgaagaagctcaggtccgacaaacgattcgttatgcattacaaacaaaatatccgaattttgacgtcattgccgtaaatgacggaagtagtgacagcactgcagaaattcttgatgaactggcagctcaagatgcccgattaagagttgtgcacctggcagaaaaccaaggtaaggccgtagctttaagatcgggagtgttagtaagtaaatacgaatatctagtttgtattgacggagacgctttattacatcctcatgcagtactttggcttatgcagccttttttaaattttccaagaattggtgctgtaactggtaatcctagaattttaaatcgctcaagtattttaggtaaattacaagttggcgagttctcttcaattattggcttgattaagcgcgcacaaagaacatatggccgtatttttacagtatcaggcgtaattgcagcttttagaaagaccgctttggttcgcgtgggcttttggtctgatgacaagattacggaagatattgatatctcttggaagctccaaatggaccattgggacattcaatatattcctcaagcactttgttatatctatatgccggaaacctttaaaggcctttggaaacagcgtttacgctgggcacaaggtggggtagaggtattattagaatatattccgaaaatgttcaaactccgcttgcgccgtatgtggccggtaatgctcgaagctttagtcagcattatttggtcatatgtgatgattatgatttttattctattttttgtgggattgtttgtggatttaccgcaacaatttcaaattaattcactcatgccgcagtggtatggcgtgatattaggtggaacatgtcttgttcaatttctagtaagtttatggatagaccatcgttatgatcgtggtcggctttttagaaattatttttgggtaatttggtatccattatttttctggttactgacgttatttaccagtgttgttgcagtacccaaaactatatttaacaccaaaaaacgtgctcgttgggtaagccctgatcgaggcttccgtggagatcactcatga

SEQ ID NO: 55427 - DNA, 465 bp, Acinetobacter baumannii
atgaaaaatgatacaaatatcgacgtagaagttttagatatacctgaatatattgatcagcctgaatatgtgaaaaataaaactgcaaactatacgttacaaacaataggttggttttgtttaatgtggctgctttttccactcgtttcattatttttatggatttttgaagggcacctcatctatgactatgtgtgggtcgatcatgtttcagaagtgaaaactttattgcatttacttctgttaataggtctgagcgcgctaattttaattttatgggcaagttataactggcttagatttcatggggatgatcgccgcagcaaggcccccaatagctctgttgagttgctggcctcacaatttatggtcagtaccgaatcattatcagaattacaaaagtcccagcgcatcatcttacattatgatgatcaggggtatttaactcgatatgatttgaaatga

SEQ ID NO: 55428 - DNA, 183 bp, Acinetobacter baumannii
atgtcgcacttcaagttttactctgccgatcctatagaattaaatttaaaaccaggtgactatataatattttgggcaaaaacaactgtacatgcaagaactactttaaagaaaggagaggaagtatgcattatgtcctatggcttcccattaaaaaatttggagatattaaatggtaattga

SEQ ID NO: 55429 - DNA, 711 bp, Acinetobacter baumannii
atggtaattgaaagtttttctgaatcaattttaaaaattaaagataaacttaactctaaggaattagccttattaagaggaagtttatctatggctatccaggaaatatgtccaaatggagtattgccaaagaataatgaagaactatccttattcaaagagtatgcatatttgatctcaagaattcaaaatcataataaaatttctgaaaccggggttaattactttggaagacctagcttcatgactgataaattgctaaatcagcttattaatgaagcaaaaaatgaagtacgaccaagagcaattaaacaaattggacattatttaggattaggaggaacgattgcagatagaattgcattgtcaaatgagctaaatgaacttgtcactacttatactacgcaatcaactccaacaggaatagcaagctatttattttatgagaaagttggagatggattggctgcgcatgtagatacaacaagtttctcaataaatgtaaatataaatctatggcatgaagcagtggaaaataaaaattctttcttatatgtttttgatattaatggagaaaaaatgagaaaatattatttcaagcctggagaaataatgattacttatggtgattccatagtacatggaagatcacaactatctgttaatgagtcaattggaattttaacaattggatttactcctagaggataa

SEQ ID NO: 55430 - DNA, 1833 bp, Acinetobacter baumannii
atgggactatcattaggaattcatttaggacatcatgcttcattagcattagttcaagatggtacgcttatagcagctacacaattagaacgaataaccagaataaaaaacttcgtttgtcatggtttatcaaagagactagaaataaagaattttttagaatcttttggattttcaatcgaacaagttgatattattgtgtcttcttttcagggtactgcaagaggaggtgtaggatttcagcattcggttatagaagaggattttgatgattttgatccctattcaaataatcattacgttatttcacatcatttagctcatgcttattgtgcttcaagttatgcacctaaaaaagaaatttgtgtattagtatctgattatgctggatcagctactgaagaattagaagattatgaaatgaagttttcggaatggtataattcaataattgaatgtaaaaaaccagtcaaacttaaatctgaaaatttaagtatttataaaattaaattaggtgaatactttgatttaaaatatagagaaagccaaattcctcaccctaataacttttcaataattcaaagtgttggagccttatatgaaaatgttagtagattaatttttaataaagaggggcaacatggctccttgatggccctagcagcctataacaaacgtaaagaattaataaaaatttttgaagaagaagatggagaaatcatatatcataataattggcaacagatgctatataaattaccctcaaataataatgataaatttacattaacagatgaaactaaattttatttggcagatagttgtcaaaatgctgcagaaaatatacttttacattatgcaaagaaagcatcagaattaacaggtttaaaggatatcgcattagcaggcggctcttttcttaatattttagctaattctaaaatctataacagtagttttttcgatagtgttagtttaccaagtgcgccaaatgatgctggaatatcaattggttgtgcattttggggtgcagttaaacttaaagatcaagttaacaaagttacaacggataggcttggcatcaaatatgaactagatatagatattttaaataaagagcataaaaatttcatttcattcaaaaaaacgaatacccatgaagtagcaaaattaatattcgatgggaaaatatttgctcgttgttcaggtcgctcagagtttggcccaagagcacttggtggacgaagtatattggcctctccactattggatagtacaaaaaacaaattaaacaaaataaagaagagacagtcatggagaccagttgcacctattattctaaaagaagaaataggaaatatctttcacggtcccttaaatagctcttggatgacgttctcatataatatatctgatagtaatctaagaaaaatgccagctttagaacatccagataatacgacaagatgccaaacgctagattatgaagatgatccttggttatatgatttaataacaaaatttaaagaaatgacaggtttaggcgtattagttaacacatctttcaatggtccagatgagcctattatagaaaattataatcaagcaatagattggtatctaaaaaaaattgatgttgattatttattaatagataactacttagtcgaaagaaacaattatttcatcgaagcaataagggataataaatatagaattaataataatatttttatacttagaaaatttaatgatggatctcacaatttaaatgatgatctcattctaagcttaaatgatatttctttaataattaaagaggttttatcatga

SEQ ID NO: 55431 - DNA, 1068 bp, Acinetobacter baumannii
ttgtctcaattacaagctgaagtagatgtagtcattattggtggtggacaagcagctcttgctacagcttattttttaaaacgtaagaaaattccatttgtgattttagatgaccaaaatcaggcaggtggtgcatggttacatgcttgggagtctttacgtcttttttctccaaatacttggagttcgttgtcgggctggatgatgccaaaaactgaacaaacttatccaacgcggaatgaggtgattcaatacttatctgcatacgaacaacgctatcaatttcctgtcattcgacctatacatgttgatcatattgagaaaaaaaatgactgcttagatgtatatgcgggtgataaatattggcgagcaaaggcggttgtcagtgctacaggtacatggagtcagccttatattccacattacgaaggattagaaagatttaaaggaatacaaacccattcagcacattatgttaatccagaaccttttattaataaaaaggttctagtgataggaggaggtaactctggtgctcaaattcttgctgaagtctcagaagttgcagacactatttggatcacagtaactcctcctcaatttttatcggatgatgttgatgggcgtgttttattccttcgagcaacagaacgtttgaaggcacaacaggagggacgaatagttgatcaacccattggtggtctaggggatattgtcatgattgacagtgtcaaagatgcacgtgaacgtggggtattacatagcagagaaccctttaaagcatttaaagaacattcggttgtttgggaggatggttcaacacaattggtcgatgctgtgatttggtgtacaggtttcaaagcttccctaaatcacttaaggagtcttggagtgatagaacctaatcagactgttgctgtcaatgatggacgttcaataaaaataaacaatctttggctagttggttatggtgaatggacaggcatggcatcggcaacattaatcggggtttctagaacagccaaagcagtagtcgatgaaatagctgtttacttagctatagattaa

SEQ ID NO: 55432 - DNA, 1305 bp, Acinetobacter baumannii
atggatctattccttaatcgtaaatcgtttgttgttaaaagtttagctattacagtaacagctttaatgatgagtggggcaaatgcggcaacttctgataaagaggaaattcgaaagcttcgtcaagaagttgaagcattaaaagcattagttcaagaacaacgtcaagtacagcaacaacagcaacaagtacagcagcaacagcaagtacagttagctgaagtaaaagcacaacctcaacctgtggcagcaccagtgtctccattagcaggatttaaatctaaagctggcgctgatgtgaacctttatggttttgttcgtggcgatgctaactatattattgaaggtgcagataacgactttggtgatgtaagtaagtcagacggtaaaacacatgataaattacgtgcgactgctaaaacaacacgcctcggtttagattttaatacacctgttggagacgacaaagttggtggtaaaatcgaagtcgattttgctggttcaaccacagattcaaatggctcattgcgtattcgccatgcttatttaacctataacaactggttgtttggtcaaacgacttcaaacttcttatctaaccatgcaccagaaatgatcgacttctcgacaaacattggtggtggtactaaacgtgtacctcaagtacgctataactacaaactaggcccaactacacaattatttgtttctgctgaaaaaggtgatagtactgcttcggtaacaggtgatagtattaagtatagcctaccagcattaactgctaaaatcactcaaggctatgcagaaggcagaggttctgcttcagctcgtgttcttgtagaaaattataaatcacaacttgctgatgatgataaaactggttggggcgttgcagttggtactgactttaaagtgtctgatcctttaaaactctttgctgacgcatcatatgttgtgggtgataatagttacttgtatggtagtaactctccatacgcagtagatgggaattctattgagcaaaatgaatttgtagcagtacaagtgggtggaacttataagattttacctaacttacgttctactttagcgtacggtgctcagttctctgatgatggcactgattatgcgagattaaatgcctctgcaaatgaaaaagttcaacaagcatggatcaactttatctatacgccagttaaaccaattgatttaggcgttgagtatgtaaacggtaagcgtgatacatttgaaggtaagtcttacaaagataaccgtgttggtttaatggctaaatatagcttctaa

SEQ ID NO: 55433 - DNA, 297 bp, Acinetobacter baumannii
atgagattatttaaattatctgcttccgcacttgctactgctacggcattaactatggctcagtcagcttttgctcaagatctgaaaattcagagttttctggctaaaccagagcactttggtgtcacctcaaccttaatagaaggtgacaaagaagttttactggttaatgcacaattctcaaaatctgaagcattacgtattgctgcaaatattctcgatagcggtaaaacattaaaaaactattttcgtaagctatggcgacccggattattatttcggcttagacgtatttaa

SEQ ID NO: 55434 - DNA, 1095 bp, Acinetobacter baumannii
  misc_feature (1066)..(1075): n is a, c, g, or t
gtgcgtaaaattttagtcaccaatgccctcccttatgccaatggtccaattcatatgggtcatttactcggttatatccaggcagacatctgggttcgtgccatgcgggcaatgggtcatgacgtgacttatgtatgtgcggatgatgctcacggtacagcaattatgctacgtgctgaagcaaatggtattagcccagaagagcaaatcgcgaatgttcaaaaagaacacatccgtgactttgacggttttggcgtacatttcgatcattatgattcaactcatagtgatgcaaataaagctcgttcaacagatatctatattaaaaaccgtgaagccggaaatattgcagttcgacctgtaactcaattatttgatccggaaaaaggtatgttcttgtctgaccgtttcattaagggtacttgcccaaaatgtaagtcagaagatcaatacggcgactcatgtgaagtgtgtggtacaacttataatgcgactgagttactcaatccgcgttcgactttaagtggtgcaacgccagttgaaaaatcatcagatcactatttcttcaagctcccaaactttgctgaatatttgcaaaaatggacccgcgatgaaggtcgcttacctctttcaattgctaacaaattagatgaatggtttgaagcaggtttagcagactgggatatttctcgtgatgctccttattttggttttgaaattccggatgcaccgaataaatatttctatgtgtgggtagatgccccaatcggttatatgtctagttttgaaaactatatcaaaactaagcgcccagatttaaactttgatgatttctggaagaaagatagtcaaaatgaggtttaccattttattggtaaagacattgtttacttccatgctttattctggcctgcgatgcttgaaggggcgaactatcgcactccaacaggcttgttcgtaaatggtttcttgactgtaaatggacaaaaaatgtctaagtctcgcggtactttcattaaagccgagacgtacttacaacatctaaacccagagtatttacgctatnnnnnnnnnncgctattactttgcttctaa

SEQ ID NO: 55435 - DNA, 312 bp, Acinetobacter baumannii
atggcggcacataaagtacgttatgacaaaggtgaagtggttgaagggacgattggctcggcagatgtttggaataatgaacttgatcgaattcaatttttccatgagcgttatggtacctcagttgaagaaatggaagcggcttctgttgcgcaaattgcaagccagtttaatgttccgtttttaggaattcgaattttatctaataatattaccaataacggggcttatgaccctagtacaggagaagcttgccaagactacgtgcttaacgtagctgaagaatatatgaaatctaaactaccaaaataa

SEQ ID NO: 55436 - DNA, 183 bp, Acinetobacter baumannii
atggctgatttagatgcaataataaagaaatatagaatgtatgaagtagaaacagaaatagttttggttcaaccaagtttagattattctgaattgacttctagagttaactcggttttaggtcaattagcttgtattattaaaaaaacattacatgcagatctgtattttattattagataa

SEQ ID NO: 55437 - DNA, 366 bp, Acinetobacter baumannii
atgaagaaatacttatttgtgcctctaatagggctgatcacatcgcatgctttttctcaagaaattgatattagtggtcaagatttaaagcttaatctaggcggggcaatacgaacccgttttgatttagatcctgatcgggatatagaagagtttggaattgatactgtgattcttaacggtcgattttcctataaaggcttaagtggagaaattgaataccggcttttgggaggcttttatccatatcaatatgtcgacaatattggagatatatcttttccaaaaaaagcttttattaagtatgcattcgataatgaaactactgtgaaccgtaccgggtttgtcggagagtcaatattctga

SEQ ID NO: 55438 - DNA, 513 bp, Acinetobacter baumannii
atgaaaaaagcagaagatcaaaatgttattgagagtttcaaaaagccagagtcattagaccaaatgctggattacagactctatttagtttatcgggactgtggagttgtgaccgaaaaaatttgcaatgatatttttggaataacaaggagaagactcagaatcatttttctattaatggaatatccaaatatttctgtgagtgagcttgcagctttagctgaattagaccttactcaaacatcaagaacaattagctcaatgatgagagaaggttacttgaaaaggctgtcaaatccagataatgcacgatactccattttaaaattgacagagaaaagtgttgaaatttataaagatttacttcagcagtaccaatatgtaaataatcagttgattgataattttaatgacagtgagttgcagcaactagatcatttattgaaaaaattacggaacaatgctcagcaggtgattgaaaaatataaagagatcaatctaactaaagaataa

SEQ ID NO: 55439 - DNA, 645 bp, Acinetobacter baumannii
atgttattccatttgcctaaactccctgcagaaatacgtgttagtcatttaaatgcacgtgtaaatgaacagagaaaaaaaattgcacaaaccacagcaagtcgtttagagcttttacaattggctcaacaacttgcaaaagaagctaaaattcgccgtaagaacaaccagaaaatttttgttttagattttaaaggtgacattcaggcatctgcggttgaaaaccttcgtgaagaaatcacccttattttagcaacggctaaagctggacgtgaccgtgttgtggtacgtcttggaagtccgggtggtatggttcatggatatggtttggcagcagctcaattggttcgtttgcgtgatgcaggttttcatttaacgatttgtgttgataaagtcgctgcaagtggtggctatatgatggcttgtattgcaaatgaaattatttctgcaccgtttgcagtcgtgggttcgattggtgttgtggctcaggtaccaaattttaatcgtcttttaaaagaacataacgtggacttcgaactttacacagcagggcaatataaacgtactgtcaccatgtttggtgagaatactcctgaaggtaaggcgaaatttgaagaagagctaccaaacgcatgtgttgtttaa

SEQ ID NO: 55440 - DNA, 543 bp, Acinetobacter baumannii
atgtggcaaaaacttaaacgtagtttatttctacaagtcctctgcgctctcttcctcggtattgcagtaggtcttgcttttcatgatttctccctagctttaaaacctcttggtgatggttttatttctctcattaaaatgttgattgccccgattgtattctgtgtagtggtactgggaatatatggtgcaaatgatattaaaaaaatgggcaaagtcggtgcaaaaacgattctttattttgaagtggtcacaagtattgctttaattttgggaattattgttgcttatgtctttaaaccgggcgtcggtatgaatatcgatattactcatttagatgctaaagatttaagtacctataccgaacgtgctcatgacatgcatacaggttcggagtttttactcaatattattccgaaaacatttactgccgcttttgccaacggcgatattttacaagttttactcatcgctattttatttggcgtttcactacggctttgttgcacaaacctatctgtaaagggtttttcagcgatataa

SEQ ID NO: 55441 - DNA, 2658 bp, Acinetobacter baumannii
atgggacttttatctgttagtgatatctcaaatttagaaattgaagaaattttagattcttggaaaacaactacacaaatttatgaaactgaacttagagatgtgcaaaaatcagcattactaaaatgtattgaatatgatatcaataaaacatccttagagcctgcgatagtaaacatgcccaccggtaaaggtaagacaggcgtgattgctggtttaatatttaaatcagtttttaaaagaacattgattattgttccttcagatgccctgagaacgcaattagcagatgatcttgtagatatagataagtataaaagttggggtatattacctaaagacggtttaaaagcaaaggttgctaagttagaaccagggaatctaaaagatttagatatagatgaggttaataattttattattgttgtagcaactcctcagatattggaatcattagataaagtccaacaaaatagttttcttaaaaaatttgatagactgattttagatgaagctcatcatagcgaagctcccacatggcgtaagttacgtagtacattcaaagagaaagaaaaaaagatttttcaatttactgctactccatatagaggggatggaaagaaattagaaggagatttaatttttcagtactctgtttcaaaagcatttgaagacaaaatatttgaaaaaattaatttcgaagcaatcgaagaattttatgactcaaagtcagatgaagcgatagcaaaaaaagcgttaagtattttaaaaaaagatatgaatcaaggtttagaacatgtactaatggtgaaaactagtacaataaagcatgcaagagaattaaagaaaatctatgaaaaatatattaaaaattattttaataatcaacttgaggtacttttagctacaagtcgtgatggtatattagaagaggataaaaataagcttaagaatggagaaactaatattgttgtatgtgtggatatgtttggggaaggatatgacttaccaaatttaaaaattttagcattacacaaaaaatgtaaaagcttaccaatttttatgcagttagtgggaaggtttactagaactaatcgaagtaagaaattaggccaagctacaataatagcaaatattgtagcagatgatattagtgaacaatttacagatttatatgctgttgatgccgattggaatttattgttaggtactctaagtaaagagaaagttgagaaagaattttttagttctactgttaatggtaaatataataatgaaatattacgtaagctattctcttctaattcattttatataaaaaatagtgcaattatttataaggatataactgaaaatatagtagatatttttgaaaagaatacctttactaaattttttgaaaaaaactcagattcatatatttcagcttattttaataatgaagaactaggtattattcttgctcgtaaaaaggtgcttcctaattgggtagctagtgaagatttaatttttgatcaatttgatatttttatctttttaaaaaaagaagatactcttttcattcatggaagtaataaggatattgttcagcttttagctaaagacttaagttttataaattatagttttcctgatctttttaaaatactttatgatttagagcgttcagcttttgcgaatcttggaatgttgtcaacttctaaaactaccagatttagaatgtatacaggatcagatgtctttaaggagttaacgcaagctgattttaataataatagtctttcaaatttatttggtcatggctttataaaaggccgtaagtctagtcttggttgttcagcaaaaggaatggcatggtcaatgtctagtgctaatatttatgagtggatgaaatggtgtgaatctttatatgagaaaataaatgataaaaatattcctgataatttttttattagaaatatgttggaaccatttaatgtgaaagatttaagtagtctaaatattattattgttaccccaattgatttgctaactaaaacaataaatttaaactctttaaaggctgatattgccgggaatagactaagttttgaatattatgacgttaaacttataaaacatgataaggaagaattatttttttatatagagctttactttgtggaaggtaattcctgcagatttgattttctatataatttagtaaatggcttttctttaatggataagcatatgaatgggttaagcttgtttgttgaagatggatatattgaatctttacctaaaaaattagaattagtagcatggactagtatgtttgaagttattagtcttaatgaaaagtctggttataaagctaaatatgaatatagcttagaaagtgataaagtacttgaactagattgggaaggagtagatattaataaagaaagttggaaatatggtgatgttaataattctgtgcaaggaaaaattattaattatttaattgaaaataatactcctaatgtacttttttatgatgatggtagtaatgaattagccgatttgataggtttctggattgatgaagaaagtagaaaaattattatgagactttatcattgtaaatatgctattggtgctaaatcctcaataggtgggcagagtaaaacttga

SEQ ID NO: 55442 - DNA, 1299 bp, Acinetobacter baumannii
ttgttagtcaagcagatagaatcacttgatatactaatttcttatctcgaagataaaaaagataaattatttagtactgtagattttttatatcctactgattactctagtgagattaaaaaaaatcttgatgatgtcaactctattcgtgacaagcatattgaattgacggatagactggagcaagatcagggtacagcaaaaaatgagctaagactaaatcatatttatcattttttacaagatattggttacacggatctaataactcagatagatatcttaaaacaaaaaattacaccatataaaaatgaatttgatgcacttgaagcaagagaaagagaaattcttacgtgcataaaaaatgaagaagataagctaaaatctgaaagtgaagcatgtatccgtattaataatattttaaaacatgattttggacatcaagcactatgtttagaagctatagaagtcaatgagtattcaggtaaaactattaaatttgagattcaaaggaatggggttaaagcacataatttaagtgagggtgaatgtagccttatatctttctgctattttttggcaaaaatacaagatgatctcaatcagggtaagaaacctatcatctggattgatgaccctattagcagtctagatagtaatcatatattttttatttactcattaatcaatgataaaatatgtggtgataaacttttttcacaattatttatatccacgcataatttggaatttttaaaatatctaaagcgcttagatattagttttaataacaatggagcaaccccaaatctaaaaacaaacaaatacttgatacaaagagaaaataataattcttttatcacaataatgcctacttatatgagtgagtatgcaactgagtttaactacttattccagcaaatacatacatgtgctacagctaacataattactgatcagaatcatagttgcttttataattttgggaataatgctagaaagtttattgaaatttattctttttacaagtttcctagtcacatgaaagatgatgaacggttaaaattattttggaacgatgacaaccttcatcgtttcttcattggaagaataaacaatgaactttcacattgttctggggtatttgaaagaggtatgtctatgatagatgaagctgaaatgcaaaaagcagcaaaagcaatcattgccaaagtacaagatgatattcagcagtataatgctttattagaaagtattgatgtagaaatttctactgatcctttgtatcctaacagatag

SEQ ID NO: 55443 - DNA, 387 bp, Acinetobacter baumannii
atggagaataaaaatcagtgtcgccaatgcgccgtatgtggaaagagctttcctttaaaagatttagtatctggtgaagtcatccgtaacgtgattagtgatgaaattttaaaagaccatccagattggagttactcaagctttatttgtcgggccgatctggcagattatcgaattaaatatgtgcagtcgctattacgttcggaaaagggtgagttatctaacctagaaaatgaagtaattggcaatatgcaacggcatgaattaattagccgaaatacagagtcagttttgatcaaaactggacgtttggagaaaaactggcagataaaatcgcatcatttggtggtagctgggcttttcttatttgttttgctttatttttaa

SEQ ID NO: 55444 - DNA, 720 bp, Acinetobacter baumannii
atgacagaaaaagataataatttaaatgcaagttttttagatcatagagttgcaacttataaggctattgcaggtttgataccaggatttggttcgatcctttcagaggttgtaggagctattattcctgatcaacgaatggatagattagtaaaatatataaaaatattggatacaaaggttcagaaaattaattctgatttattagaaattgctaaacagaatgaattggctatagatctgattgaagagggatttgttcaggcatcgagatcactctctaacgaaagaagagaatatattgcaaacgtagtagcaaatggtatatcagatgaagaaaaaaattatgcagatagtaagtatattttaaaattattaggtgagcttaacgatcaagaagtgatttggctgcgcttttttttacatcccacctttgatggtgatgaagaatttcgtcaacaacatcaaaatgttatagaaccaatagcaacttatataggtgcagatgaaaatatattagagaaaaaggatattcaggagagctataaatcacatttagagagattaggacttattcgatcaaattatcgaattgataagaatactggtttaccgaaatttaatcatcagggagtacctgaggtttcttatagatttgtcacaccacttggtaaaatgatgctaaagaaaattggtcttatagattcagcgaatacataa

SEQ ID NO: 55445 - DNA, 1686 bp, Acinetobacter baumannii
ttgctttttaattacacagtgattcaactgttttttattttattcgggcggaagtatgcagcattagccctcagccaacttattgttatttttctcaattttattaatcaaaagaaacagcagtatttatttagcaatttaagtccagaagatattttcttggttcctgaagccatgaaagcatccccatggttattgcaattggtcttttttttcctcatggtggttttcatggtggtattgctgattgctatacgtaaagaaagtaaagcgacatttcatacatatgtacccaacattatcatttttagtctattgtgttgtagtttgatctatataaattttcttaaaaatccgactggtatatgtactagcgaaaataaaccaattttttgtatatacttaaattcttttccaaatacccgaaataactggattggtgattatcgaaatattcaagaatatggttttacaacgttttatgtttctaaactgctagataatgtcaccagtgttttgttacctagccgaaaggtgtctgaacagaccattcaacaaataatgcgacaatatagcaagccaacagaagttgtgcaatcaagcaaattaaagcagtatccaaatattgtagtagtgatggaagaatcgtattgggattctcggctgctagatcccaagttacctcaagatattgcccccttttttgataaaaaccaggttacacatttattatcgccctcatttggaggggggacagccaatgtcgaatttgaagtattgaccagcttaaatactgctttttacccaaatgaagtgttgtatgtatctaagttgaaaaaaccagtttattccttgccattttatttaactagtttgggttatcaaactgttgctatgcataataattatggcgactactacaatcgtaacacggtttatccaaatttgggttttcaaaaatttatttcactggagaatatggctgcaaaaaaagatcaagaacaacttattaatgcaggtggttgggcaacggacgatttaatttttaagtctcttcaagacactttacagcaaaaccctgaacagccaaaatttatttatgcaatcacggtggaaaatcacccgatgtataatgatgagcgttatggtaaacaagactttaagtttagtcagaatttatcggaaattgatcggcggaaattgagtacttatacagcaggtactatacgtgccaatcaaaaattgcttgagttaaagcagtttttaaaaacagtagatcgaccaacaattttgttggtgtttggtgatcatttaccaaatctgcaaggagtttatgataattataatttctttaaagatgatcccgagcggaaaaatttaaaaaattatcaaacaccttttgcagtgtggagcaactacaagcttagtaaaaaagcgtttaagcagccgtacgttgctgcgagttttgtagcaccgaagttactgcaaatgtcgggtataccgctctcaaattattatcaatttattcagcaagtttcacaatgctataacgcagttcatcaaaagtttctgttgcctggggaaaactgtgaggtcgatcaaaaggcgctgttagaacagtataaaagtctaaattatgatgtgctagatggcaaaaatcatacttatcaactattgaagaattag

SEQ ID NO: 55446 - DNA, 216 bp, Acinetobacter baumannii
atgggtatatctatagaccttacaaatacagagcgacgtgtatcgactgctgaatttgcattaagaatgaatatatcggaaaaagagctatatgatcgaattaaaactggtcgtgtgaaaagaccgataaaggatggacgtaaaaacttctggcttaatagctatgtccttacctgtattctaaatgaggaaaactccattcttacgtcaaaatga

SEQ ID NO: 55447 - DNA, 795 bp, Acinetobacter baumannii
gtgacagaggacatcataaaaaaatatcggggaaagctgcctgaaaatattttagaacaatggcgtttatttggttttgctggttatttgaatggtttgtactggattactaatccagacgattatgttgaagttatttatgactggttagaagaaacatcattaccagatgatgatgtctaccatgttttagcacgttctgcatttggtaaattgttgatttggggtgaaaaaaattttaatcgctattatgttttaactctggaagggattttacacgataaaggtgaaaagaaagaagatgcagagttttatggcgaagacttcttttttgcacctgataacaattcattagaccatattgataaaaatgggaaaaagctatttgattgtgctgtaaaaaaattaggtgttttaaaggcagatgaaatgtatgcatttgaacctgctttggcattaggtggggaagaatcattacagtacctaacaaaagttaatcttcctgttcacatgaagctactaaaacaggtaactccattaagattgagaacttttgaggatcttacggctgctctatatggtacatcgtatagtgtggacgatttaacaagtggacaagatgctgagtcacaatatcaagaatctgttcaagctggagaagtttgtcctagaacaggttactggacaacgcctgcacaaccagatacgcgtcattattgtaaaaagggtgaagttcttcctgaaatcaaggagcaagattggggtgaagtgtattggtattgggatggtgaatag

SEQ ID NO: 55448 - DNA, 936 bp, Acinetobacter baumannii
ttgacaacattcaattcacaatccatagaaaatagattgacatctattatgttatttacaagtggattgattggagtctttgcatttcttcaggtttatactattcaagctgtactacctctagtcattaaacaactacatgctagtgtattacaggctggaaatgctgttggtgcaagtgttctagccgtagcacttatgtctccatttttaggtttaatatctgattattttggaagaaaaatactaattgtaggttcagtgatttttattgctattccaacaatacttatggcctacgcgcagtccattcaatctctgacattattacgattttttcaaggtttaggtgttccaggtattacagttgttgctattgcatatattggtgaagagttctcgggaaaaaatataacaagcatgttgtctgcatatgtttcgggttctattgtgggaggattcttaggaaggtttatatttggatacttatgcggatggttagattggaatcatgcttttcttgttatgggtataacgaatatcattggcggctttttaatttggtatttattacctagttctcaagcctttatacctacaaaaagtgttttatcgagtcttagaattataccaattcatttaaaaaataattctattatttttgcatgtcttctcggaatgagcgtattatttacgctggttggatcttttacatatataactgtacacctagaaggtaatccctttaattatagtttatcccagctatctaatattttttctgtatatttaattggttttattataacaccaattgcaagtcgaattattcaaatttatggatcaagaaaaactataatttgtgccttatctttgactttaattggattattgttgactttaaacatgcatatagtacttataattctaggatag

SEQ ID NO: 55449 - DNA, 147 bp, Acinetobacter baumannii
atgtcgtattatggagggggatttattggagcatatgcttgtggacttgcttatacacatggtcaatggaatgcaacagttgtgactttaattgctgcaaatcttattggaatcaatatcgctttttggctgatgcaagagcgctaa

SEQ ID NO: 55450 - DNA, 1200 bp, Acinetobacter baumannii
atgcctttaacagatacttggcttaaaaagaatctagatcgtgaacgttcagctatacatacagagcctgatcaagatggattgagcgttcgtgtatcgcaaaaaggaaagctcacttttcagatgcgttttcgatataacgataagcaagctcgtttagacttgggaacctatccaaatatgagccttaaagaagctcgtattgaattgcagaaaatgaaagcaattttagtaaagggacatgacccacgtattcataaaaaagtagaacttcacaagatcacagaggctataacttttgaagcgttatttcgtgagtggcatgcgaaatatagtattcctaataaaaagaatgcagatcaatatttgagatcatttgaactttatgttttcccaaagttaggtggcatacctgctgagcaaatcacattacatatgtggttagctttactagaagaccaatttaaacagtcgccatcaattactgatcgtattcttacaaatactaagcagtgcttggactggggggttaatcgaaagttaattgagcaaaaccctatacgacatatcactggaaagcgtgacttaaatattaagaagaataaaacgaatcgagtgttaagagatgatgagttatctttaatttttaaaatttgtgaagaatcgagaacatccctaagaaatgttttatttttaaaattatgtttgttttatggcaatcgatatagtgagttgaggcttgcacggaaatcagaatttgattttagtaaaaatacatggacagtaccgtatgaaaatcataagacaggagaaagtaaaggagatattgtcagacctattattgatgaaattaaatcgtggcttcagtcggcaattgatttgagcaattctgaatacatttttccacatgaaaatggcaaggagccaatgggacgtagtggaccaacagataccccttataacttcatgcaatttgcaaggaagaattataatattgaaatggatcattggtctatgcatgatttacggcgtacagcaaggacaaatttcagtgcgtttacaagtagggatgttgcggaactgatggttggtcatgtgatgcctggggaacaggggacatatgactattatgattatcaaaaagagatgtctaaagcttataaaaaatggtggaaaaagttaagtaatctgtctagctag

SEQ ID NO: 55451 - DNA, 801 bp, Acinetobacter baumannii
ttgaataatgaattaatagaaacggagaatcaatcatatattgatcaaaaagaaaaaatcataaaaagaatgcagcagaatgattttcaattgagtgagcagtcagcttttcatttagaaatgatgggggatgtggtttcaatccctttcaagccattccagattgcacagcttttaatgcagataaatacattaagacctgaggtgaataacttgcctgccaaaattttccaaaggcaatattcagatattttaattgcttatgtgcaaatgcttggtggggtggagtttattcagaaccgtacacttgccaaaagtgcaaaggcaatcattgcagtcaaagctcgttacgacaagcatttatatccaagacgggaaattttatatcgcactttaagagagcagattgtgcgtcgtggcaaatgggataatttgaatcaagcagttaattttgtgcttgatgatctagtcaaagcttttgaggtttacgatattgaatggcttcagtctgaacttgtgcttaagcaaaaaatgctcagtgaattagagcaggagagtaagcagttgtatgctaaagctcagtcagatggcgtgcgaagaaagccagcatcaattgggaaaaaaatagaaaaattacagctcgaacttaacaatcttaatcagatactgaaagcaaaatatccttctaaagagatggaaaagtttgggtataagatgccttacagtggtggatacattgccgaaaccatcattcatgagctccgaactcagcctgatatattgaaagaaatcttgttctaa

SEQ ID NO: 55452 - DNA, 2646 bp, Acinetobacter baumannii
atgaagatgatcaatacactaaataataaccgcccaaaactgtttaattgggtcttgaccttgctgtgcgtgttgatggtccagcaatcggcctgggctgcaaccaactcgatcatcagtaacatggcagttggtgaatatagcgaagagggctcaacggttgtacaggtggcgcgttcaaatcttgtccaaactacgattttgcctgtgtactcattaaatttggtggcagccaataacaaaacagtagtggcgggacagacagtttattttaaccatatcttaaccaacaccagtaatgagacagatcaatatactttcactgtaagcaataatcccactggtgatgattttgattttgtgaatagtagcctgatggtttatctggatgccaataatgatggtattcccgatggatcagcgattacaggttatacattgggtgcaggtcagtcagttggactaattgttgcagcaagcataccgaatgcgattaccgcaggaaaagttgcaaatttaactttgatggtgacatctgcgaatggcgcgagtggaacaaatagcaatgttgacaaggcaactgtaactgaccagtcaactctggtggtgcgtaaaaaattctctcaaatcactgctgcaaatggtgatgtggtcaccatacgtctggattatcaaaatccaacaaacacaattgtaccaatggcaaccgtgactgacacgttaggaagcaatttaacctatgaggcaaattcgggtaaatggaatggcaccaccgtatatgattcagtaagtgggacggccgatccaacaggaattaattatagtgtcacctcgaatgttgttaccgcaaccctaaccaatattgcagcgaatacgattggctatatcgaatttaatgtaagaattaataaaagcattgcagggaaaattgagaacgtcattaatgtaacagggccagcgacagatacaagtaatacagcagttgtgaatgtgctccctatttatgcggtcaaaatgaatggtagtgcaagcaacgtcaatgataatgccaatatcattacggccagtgcggtttcacaggggggtgaacttaaatttaccaactatgtctggaatatagggaataccacagatcgttttaacctcactttaactaacagtacatttccagcaggcagtcaaattgagttgtatcgtgccgatggtgtgactccgttattggacagtaatgctgacggtattcctgatacagggttgttggctgccaataccaatcttcctgttgtggtcaaagttcgtttcccaagtagttatacggtaaccacaaatacagtttttgaagttacaccacaagcacagtctgtgggtgatggtggtaaaaccagcacgattaaggatcagggcactttaactcctgtttcacaattggtggatttaaccaatgctgataatacggggctgggtaatggtgcggttgataatagtggcgctgcatggaaaaccataacagtaaaatccagtgataatgctgtgactggcggacaggtaatttttccattaacagtgaaacatacaggtgttggaacagagtatttgctcagtgcaaatgccagcagtgatttttctagcctgactttacccgcaggcgtaaaccgtgtgcgtttttatgcatccacaaatggtacaaactgtagtgggttgggtaatgaaattggtaagacgatttatttaaataatgcggaaacccaactggtctgtgcggttgttgaagtggataaagtcaataaagacgtgactgtaccaatttatttccgtgtgatctcaaccagctttgttggtacggataaccctgctcaggacatgattaaaaatgctgtaacgattcaaagtgtcaattccgtaccccaattggaatttacaccagatttacatgctcaggtcgcacccttgggcacagtggtctatcgtcatttactgaccaaccctgctgctacagactttacggggagctatggttttatcatcaacaatagtgagtctagctttaacagtgtactatttctggatatcgatggggatggcaagttcagcagtggggatttaaatattcgtacattggcggacttaccaggtggcaaagtggcagctcatgagcaaattcaactgctactacaggtcacgaatgttgcaaataacaatctcaatcagacgaatacaacagttgtgaacttaacagatagtagcaatcaggtttttgcctctattactgacgtgaccacagtcaagcagtcacaattaaccctgacaaagttgcaagcacgagatttcaattgtgatggtacagccgatgaaacatacacaacaaatgctttaactattggtaagcaaagcaatggtcaaggccaatgtgtcttatacaaggttattttaaataattcaggcgcaacaattaacagtacatttacctttagggatatgacacctgcttatacggtgttatcgaaagcacctacctgtacaccagcatgtgcaagtgtttcgccattgtcattgaatagtgcaggtgaattgagtggaaccttaaatagtgtgataggtggtcaaagttacgaatttagttttggggtgcgctatgtgggtcagtaa

SEQ ID NO: 55453 - DNA, 828 bp, Acinetobacter baumannii
atgaaatatgtcacacctgccttgcgtcaattttatcgtggtgctgcaactgttgtggtttgctggagcgtgatggtttgggcaaaaaatcctgatcatttggctgcacctgttatggcgcaagattctccagatactacagcccagtcaggtatttataatccaaaagatcaacaggttgctgccttgcaaacacgtctcgttccttttttgaatgaacagggaattgaacgttatcatgctgtcaaagcagccgcatggttgacttatgcagcccatgagggaagtgaaaaaagtgcaacggttgcgcgaaaagaggcccttgcccaggcggaaatgattatagtagcattagagcaaggtcaggctaagcagttaagtttaaccacaccgattctgtctacctcaagtgtaatgcgtcgggatttatgggcaaatactgaattattgaaacagcatgcaggtttttcctgtgcccagtctcagattgcacaggcagaggtgatgctggtctgggcagccgctgaacattgtgagttgggctggcgacattcacgggagctgtttttatcagcacagcgcttaattgatcaggcaaatagtcgggcgtttagttgcagtgcagatgttcctcaacagcttccgaaaattagttatccatctttacaggaactgaatggcagtgagcagggatgtcatggtgtggtcggaacatggccgatttggtcgccacaacaaaaaacagtcatctctgaaaatagccaggttgctgatcaacctgtgccgaatgttgtacattttgctttggatcaggcagttttatcgtaa

SEQ ID NO: 55454 - DNA, 240 bp, Acinetobacter baumannii
gtgggcgggaatttttttgctgaaaaagtacagaaaaaattgatgcagcatggaatcaaatttaggccaaataaaccaggttcacctcatttgaatggcaaggtagagcgttctcaaaagactgataaatctgagttctacgctactgtcgatattaattctgaagatatccaagacaagctagccgaatggcagcatgactataactggatgagaccacattcagctttgaaaggttaa

SEQ ID NO: 55455 - DNA, 615 bp, Acinetobacter baumannii
atgtctatgaacagagaaattcaacaaagactcgtatgggttaaattatttgaagagaccaatgatgctggcctagtctgtcggagatgtggcatttctagaccaacattacgcaagtggtggaaacgatattctgagcaaggtattgatggattaagtagtcagagtaaacgcccattaaaatctccaaatactaaaatcaatgctgagctagaagccttaatattggaaatgcgctcggctagaaatctgggtgctcgacgtttgcaaacagaattgatgaggctgcacggagtctcgttgtccttagcgactatccataaagtactatccacccatcaagtcaaaccgattaaaaaattccgtcgtaaagtagatttcattcgttatgaacgcccattaccaggcgatagaattcaaatggatacctgtaaattgggtcctgggctatatcagtacacatctatcgatgactgcacacgatatcgcgttttaaggatatataaacgccgaacagcggcgaatacgctcgactttttagactgcgtaattgaagaaatgccttttcccatacagcgaatacagaccgatcgtgggcgggaatttttttgctga

SEQ ID NO: 55456 - DNA, 1086 bp, Acinetobacter baumannii; identical to SEQ ID NO: 54494

SEQ ID NO: 55457 - DNA, 579 bp, Acinetobacter baumannii
atgccaaatttagtgatctccccacgtgccatacaagtcgtaaataaatcaattaatctgtttcacaaccacggatttcataccgttggagtcgacagaatcgtgaaagagtctcaaattccaaaagcgactttttatcattactttcactctaaagaacggttcattgaaatctgcatgatcgtgcaaaaagaacgtttaaaagaaaaagtagtttcaatggttgagtacaccagtcaaacaagtgtggtggataaacttaagaaactttatgtcttacacaccgatttggagggactttactatctattatttaaagcaatttttgagatcaaactgacctatccaaaagcctatataactgcagtgcgctatagaacatggctaaaaaatgaaatttatagccaacttagaacactaaaacctgatgcctcttttaccgatgccaaactatttttatatatggtggaaggcacaatcattcagcttttaagctctggtggggtagatgaaagggagagattactagattattttcttggtctaagtgatctgagccgatccaaaatagaaagttaa

SEQ ID NO: 55458 - DNA, 327 bp, Acinetobacter baumannii
atgaaagcaactaaattaattagagataaagggctgaaatacgcgaaggaaatcgtagattcagccccttctaacgcaactgaatggaatgagggttatgagttccaatgtggtcaaagtgtagaaatcagcccagcagatcgtgagaagtattttgtagatttggttgagcttaaacgtctggtggagtcggttgatttagtaaatagcttaggtggaataaaagcagcacgttcagaagctcataaagattgttttgtatataaccagccattgctagctgctattgcagcatacgaatcaatatacggaggcggggatgagtaa

SEQ ID NO: 55459 - DNA, 519 bp, Acinetobacter baumannii
atggataagtgtagagaagagtttcaaaaggcctttccgatccctgcacattggattgagtttgatgaaaaagcaaataggtactattgcccatatgttgcagatgccacagcttctacgtatcagtctaagtgggttgtatggcagcaccagcaagcgaaagtggaggagcttaaagccacaataaaaggtaatcatgggcgcattgcagaacttgagcgcttaaaccgtgtgaaggctcaggcaattattgatttgcatcaagaaattacagagcttaaagcatctcatcacggtgaagtgattggtcatgaagttcactttaaaaagatcaagcaagagcgtgacgagctgcaaaccttatacatccaacaaggcataaacatgctgaagctgcaaaagcgggtggataaggcactagaacttatgcagaagcctgtgattgttggagagcctacaaactacgtttgtgcaaggttcaaagagttagagcaagcgctcaagggggaaggacagtga

SEQ ID NO: 55460 - DNA, 552 bp, Acinetobacter baumannii
atgaatgcagtagcagttgagaagtttgaacgttttgaatggttgactcatggtttaactgcgagttcaccaagtattgagccagtggtgcgcggaacaggagagaaaccattgaactatcaagaccgcttgggtgctattgcttcaatggatacccaactcgaaaaagcagttgcgtcagtaattatctttggcgaaaaaagcaaaggtgactttgattatatattgaagcaccttgcaagcattatgattgttggggcgcatgatgataaacgctctaaacctaagaacattaagctggaggatctggcaagaaaggttgcatggatggtaactatgtttgcactcaaaccgggtatggaagataactttacagctaaaggtagattgcaattagcagcagggattaaagaatcagagatgactttgaaagcttatgatggcacatggaagcagtatgaaaagctgatgtgtcttgctatagagtctgcaattgatggcgctgcaaaggcaattgaaaagtacaagaaaaatacttacaaagaaatgtaa

SEQ ID NO: 55461 - DNA, 399 bp, Acinetobacter baumannii
atggcaatgacattagagcaagctagacaagcaatagtcgaccgtatgatgagcttcacaggaatatctcaagacagaatccagtatccaaatgcaccaggttttacggtaccaacaaaaggtgtgtggtgtcgtttaaccattacgggaggaccaagttttattgctggactaggaaataagccgtgtacacgccgtactgggaatatcttaattcaatgttttgcccgtcctaatactggagacaggggagtaacagaacttagtgatgctttgctggcacattttgaatatttctcagtcgaacatttagaatgtttgaatggtcaatcaatttttgtcggtcaagatgctgacttcattcagtataatgtgacgattggttatagggtgaattga

SEQ ID NO: 55462 - DNA, 534 bp, Acinetobacter baumannii
atggctttaaaagtaagcattcagaccagtaaaacagttagcaaatggcgggagtatgttgatggcgatggcaatgttttagctgaatttaagatacgcggtatcgcatataaaccatatcaagtagctcttgaacgagcaaataaccaaatcacatctaaaggttatgacgtaagtaaagctagtaaagatgacaagctctatcatgaattgcttcttgaagctgcagcctgccatttaattgaggactggaaaggcgtagtttttgaagaagtaaccgaaaaccaagaattgattgtgtatgaaccagaatattcgcaggaaaatgcaattaaattgttgaatctaggtgatcttggcgtagcaatctggttgtttgtgagacaagaagcagaaaacatccaaaaagaagcagattcttataaggatgaagtggtgggaaagtcctcaagctctacaactggtcaaagttcaactcagagcaagaagcgagtgactacaaccagaagcaaacggcaatcgcccaagccttaa

SEQ ID NO: 55463 - DNA, 2781 bp, Acinetobacter baumannii
atgactcaagaatcacgtttaatcattactattgattcaagaaatgcggaacgaaacgcaagaaatctaggcaatgaactcgacagcatagaaaagaaaggggattttgcatcaaagtccatggatagtttatctgtagcaacaagagcacttgctggacacatggcaggtcttgttacagttggcgcggccatatccaaaatggatgagtatacaggcttacagaacagacttaagttagtaaccacgaatcaagttgagctaaataaagcaactgaagatacatttagaattgctcagaaaacctattcgacatggaattctgtattacaggtttaccagcgatttagtgataatgcgaaaacgctcaatttaaatatggatgaaacagctcgtctaactgaaacagtatcgaaagctgttgcaattagtggtgcaagcgcagaagctgctgatgcagctttagtccaatttgggcaggcactggcgagcggaactctcagaggtgaagagctgaactccgttatggagcaaacaccagcacttgcaaaagcgatcgcacaagggatgggcattactgtaggtcaacttcgttcagttgctgctgaagggaagattacttcaaaagaaatcgttaaggcccttaaaaatgttcaagatgacgttgatgctctttttgcaaaaaccgatatcactattggacagtctttgacgctgctcaacaacgagattactaaatttgttggggagtcaggaaagggaagcggtgcggctcatgtgcttgctgattcgattcagcttcttgcatcaaatttaaagttgatttctgatggagcactggtgttagggattggacttgtaactaaggcaatcgctactaaaaccgttgcggtatatgccgatgttgcagcaactgccgcaaatgtaaaagcaagcaaagaaaaggttattgcagacgcagctgaagcagccgctgctgtaaaaacagcacaggcgcaaatagcaaattcacaagcaacattgcaggttctagccgctgaaaaagcattagaagttgaaagactaaaagctcaaatgaatgcggtcggtcgcacacaatcaattacgcgtatggccgaattaaagaaaattgaggctcaggtaacgcgagaattagctgctgcagaaacagcattagcagctgcacaaactaaggccaatgctacaaaagtgacagcattaacaacattagggcgacttggaaaaggagctttagggctggtaggtggacctattggtgcactcgctttgggagtttcagcacttgctgccacatacacttattttaaggacaaggcagaggaagctaataagaagcttgaggagcaagctaaggttgctaatcgatctgcaacggaattaaaaaatttaaaaggtcaagccaaaacagatgcaattaatgacttaactactgcattcaaggctcaaaatgatgagcttacaaaaatggaatatcgagtaggtgctgcgttaattgatatccagaattatgcacaaggaaatgctgaagtagctcggatttcaaatgaagctcgcttaggaaccattagttatcaagaagctttgcaacaactagcaaaagtgaaattaccgcctagtttaagacaagcgcttgaggaacaaattgaaaaatacaaggatgcatatgataaagctgataagacaaaaacagctattaagctatttggtattgaagtattcgtagctggaaataaagcccagaatgctgctattgaacagcaaaaacatgctgatgcaatacaaaacaccaagcaagcagcagatgaggcacaaaagtccttacagaaaatgtatcaagataaattgtgggattctcaatttgtcgagatagttatgaaaaaaggtttttctgagtctcaagctaatgatttactgaagctttataaagattctttagctaagggtcttaagtcagcagaccgagaggctctaaaatcattaacggatacttggaaatctgaagaatcaatcaaagctatgaccgatgctagaactgattctatacgtgagcaaaacaaggagctaaaaaatcagcaaaaagtactaagtgtaaatgcgaaagtcctagccaatgcttcaaaattcggattttcagatctagagtctaaatatgagttattgccaggcttactatcagcaatcaacatgcaagaaagcaaaggtgatgcaaacgctattggtccgcatactaaatacgggaaagccaaaggtggtttccagatgctggatgatactgccaagcgctgggggttggttggtaaagaagtttttgatactggtaaagctgcagaagcagctgcgaaatatctaaactttttgtttaaaaagttcggtaattgggatcaagcaatttctgcctatcatgctggagaaggtagcgtagaaaaaggtaccaatattggtccagttaataggcagtacgttaaaaacgtaaaaggatatgttgctggatataatggttttgatatgaagggagtctctgaaaaagatttcgattcataccttaatcaatttctgaaaactcaagaggagaccgaaaagttacgtgatcagtatcgagataaagatacgcttgctgagaaagaatatttaaaaagaattggtgagttaaaattgcattttaaagatgcagagttaaagcagctcactgataaagagacagcacgtttcaatgctcaaaaggtgaaccgtaccgggtttgtcggagacttttttatttaa

SEQ ID NO: 55464 - DNA, 195 bp, Acinetobacter baumannii
atgagtgaagtaaaccaacgtttcgagcaagtcttcaaagtttctatggatgaaatgaacaaagtaaatatcgatgtttatggcattgcaatggcaactattatgaagcctgctttagtaaccatgaagccaatctttcagcttatttatgaacaaggtgtgaaagatggtaaagcggaaagtaaggaggggtaa

SEQ ID NO: 55465 - DNA, 318 bp, Acinetobacter baumannii; identical to SEQ ID NO: 47461

SEQ ID NO: 55466 - DNA, 726 bp, Acinetobacter baumannii
ttggcaacaccatatataactataggctgcccgacctctggtggtggccaagtaatttctgggaataatatgttcctgattgacggaattcccgttgcctgtgttggtgacaaagcaacttatccaactcataaagtcgttgcaactattgtatctggcgatccgtgcatgcaaatctttgggaaagctgctgcccgagtaaatgattcactctcttgtggttgtaaattactgcctcaacaaaacttagttgttcaggataacggtggtggcgctgcatcatcggctgcaaaatcttcatcagctccaatttcacagaaacaaccagccacagatagctttgttaaagatgaatatgagaactactacatcgagcaaaacacaacgaaatatgtaaaatttacaaatggtattttcccgtacgatgaagataagaaaaatatttttggggcaattagtcaggctgtttcaggtgtatgcaccttcatagttacttatattctaaaagggcaagaacttttcgtgacagtttctatgcttcctccaacattaagcggtgatgctacaatttttccatacgcaacacttgatcttgtgcataacaatcagagtttaggaaaaacacgtttggaaaagggaaaaggtgtttggtcaacagaaaactctaaggagcctgtaggtcagtgtatgaaccgtaccgggtttgtcggagagtcaatattctga

SEQ ID NO: 55467 - DNA, 1104 bp, Acinetobacter baumannii
atgatttacttaattactgcgacgcctggatcagggaaaactttgtgggctgtaaaagagatatttgcacgtgtaaatgaggcggagccgtggaatattttttcaaacatcgatggtctaaaactcgatacagctcaacctttaaaagaggattttaacgactatccacctaggtcattagttgttattgatgaggcgcagcagattaagcatttctctaaaaagtttaaagggatgcatgatcaggtagagtttctccagacccaccgacatgcagaaatgctggatattattttcattactcaagcaccacgtttattgaatgcggacgttttggacatggtcgggatgcactaccacttgcaccgtccgatgggtatgaaaatggcgacatggtggctctggaagcatcaccagttaaaccctaacactaaatcagttaaatcagatgcagaagatacgggtactttttcttaccccaaacatctttttaatatgtacacctcaaccaaaggtggtacagatagccatggtaaaattagaatacctgccaagctagtttcagcaatctggatgttgtttttaaccatttgtgctgctggctatttctatattaaaaacgataatcagaataaacatgatgaaccaaaaactattaaatcagaggttccaaaggttgccgatccgttgcaaaagaagatcgatgattgtgtaaaacagctcggttggactgctgaaatgtgcaaagaaggattagacccagaatacaaagcaaaaagagatcaagaaacactaaacaagtctcaaaatgatatccagtctattacgatcaagtacaatccaaataaaccgtatgcaacggaaatgccgcaagattttgagattcaagcggttgattatccacgtatatcaggtgttacaacacttagaaatggtcgttatattgcggtagaccaacaaggcaattacatgcctaatatctcgcaatcagactgtaaaaaatggctatccggatatagaccttttgactacacgaaagcaccacagagtgcacggagtgtgcacgaactgacaccaatggcttctgcaacttcttctctctga

SEQ ID NO: 55468 - DNA, 276 bp, Acinetobacter baumannii
gtgggtaatttatttaagttagttggggaaatccttgcatcgggatttttaagacgtctgctagctggtgcgggtatatcgctggttacttcgaccattattttgactgttattaatttcttgttagatcgttttatgtctgacttttttgttgtggggaacttggctggtcttgttggggtgtcaggtttagacaaaggcgtatctatcgtattttctgcattgatcgcaagagcaattatttcaagttcatcacttgctcttacaaagaactag

SEQ ID NO: 55469 - DNA, 1266 bp, Acinetobacter baumannii
atgattcatagaataaatatatttttgttgtcgttatttattgctcttgcaccaacttatatttttgcaggttctgttgcgagtgagggttggtctgttactaaacgtcttgtgaatggtgctacaactttttacgacggtactaaatcagttattttgaatggcaaacagtatgtaactaaaggttcggcttttatcattcctaattcttcacaagtggggaaaatgattgttggaactggtgctgtacttgctgtcgatttagctattaaaggcttgcttggtgcggttgattatgtaatggatcctgcaaacaatcgtgttatttatcatgagcaatctactgattatatcggtacgaaagctagtactcagggtgtttatggtacttcggctatgaattcctgtgtgaattggaattctaatcaacagacgagaaatggcggaaattataggtttaaagctaagtctgtttcactgcattctgttgttaatccatcgtatcaatattttttttgtaattaccagttttcttgggatgctggttctacttgggtttctgataaagtttctggtgttattgagaatttacagcagcaaactactgaagaaaaatatttaccttatgagtctgttggtgcacgcatcatttcagacgcaaatgccaataattctgatgctaaagcttatgtttcttctgtagctgacactgctttagaacaagatgaacaaaagcaattggttcctgcccaagatattatcaatcagtttgaatttaataagtcaattcctactaataatacggctacaggtacttctacgcctacaactgggactggtgatcctgctactgcaactccaccttatgacatcaaattagattttcccgttttctgtgattgggcacctacggtgtgtcaagctgctcaagctgctattgaatttccaaaaacgtttgttgagaagttcaataaatgggatgactggcttaatagagaaactaaggcttatacatacgatgaaactaagctagacacagaagataagcgaagttttgacttctctgtatttaatgaaaatcgatttaacgtagatgacaaatgcccagcacctgagcctcatacgtttaccttagctggtcaaactgtcagtttttcatttgacttaatgcctgtttgttcaattttggagatggccaagcctgcactcattgcagcctcgtacatctatgcagcctatatcgttataggagcatcacgtgggtaa

SEQ ID NO: 55470 - DNA, 255 bp, Acinetobacter baumannii
atggaaaacaaagcaactaatcaagttgaagaaactaaacaacaacgccaattgagcgcgtcacaaaaggtaatgctaggtgtcggtgcaaccgcactttctagcgctgcttttgctgaaatcgatgcctcagcgggtattacggttattgggggtgctgtagcagttgtggggttaattgcagcagcgaagatcgtaccacaggcgacaattgtcgtttggggctatgtgaaacaagcattcaaccgaacctaa

SEQ ID NO: 55471 - DNA, 195 bp, Acinetobacter baumannii
atgacgacatacgtttgtaaagagattgctcaagtaaacaatcagacaacgtgtgtcacatatgttgcaaaagaagattttgatcttttcaacattagcgtggctgatgcagatgcactgcttagccaaattctcgtagtcttcgcaacggtatggttagcaaacgttgtgcaagacatgtttaaaaaggggtaa

SEQ ID NO: 55472 - DNA, 318 bp, Acinetobacter baumannii
atgcatacatctaaagtaaagattttaggcgctaaagctgttgattttaaaccagatgataactcaggtcgtcattatgatcatgtagcgctttattgtcagattccaatggatttgactcaaggtaatgccattggtaacggctgtgagacttttaactggcaggattcatcgaatattgcattgttgcgtaagttcaagcaatcagactttccaattgaagcggatattacgtttgacatggttacatcgggcaaaggcgttaaatacgttgttgttgatgtagagctaccaacaccaagcaaaccaacggtttaa

SEQ ID NO: 55473 - DNA, 1158 bp, Acinetobacter baumannii
atgaatgagtataaaaaacaaccaatccccactgtattatcggggggaatgaaaaaagcgacggttgtaacccccattaataagatgggggtaaaggtatccgatacacaacctcaagacgccgatctcccgttccaagagcattcgttatataccattcctcgaactcacatgatcatgaccaatgatggcgtgaagcatatcgagtacagaatgcctgctgataatgaaattgctgtaatcgattgggttaatttcacgattggcattgagactctaggcgatagattctggcaagaagatgaatatattcttgattcacaccgcattacggctgctgtagaagccttagagactgatttagaacatatttttggctttacaactacgttatgtcgtaagaaaggtcttaacttttatgatgaaagctacgtgctgggtgaagatttcggctttgtatgtattggcggtcaacgtaatacgattctaattatgatcaatggccgtggctgtaatttcgctaaaagcggttgggaattaagactttatcacttcttagtgaccagagctaaaagagcgaaattaacccgtgtagacattgcacatgatgactttgaaggtaagcatgtcagcgtagactggggcaacatgcaagatgggttagggggttttcaactcggtaaccgtgctccaaacattgagcataaaggcaattggcgtcgcccaaatggcaaaggacgtactttatgtattggtagccgtgattctggtaagtacctgagattgtacgagaaaggtcgtgctgagggtgatccagacgacaattggcaacgtgctgaggttgagtttaaagctatcgaccgtgttttaccgttcgacatgttacttgcaccaagtgaatattttatcgctgcttatccatgtttccgtgatctagctgaacatttacagcctgaacgtattgaaactattagtaaaacagcacaaatcaatttccagactgctatttccaatcttaaacatcagtatgggaaatacatcaatgtatttaaagatgtattcgaacctgaagaactcattaatttaatttgttgctctgatccgcttgcatatcccaagcgacttgatcacgtgcttctaactgctcggagaatgtaa

SEQ ID NO: 55474 - DNA, 291 bp, Acinetobacter baumannii
gtgtcacacgttgcgttgttgcgcgcaattctgttatatttctgtcaaatagttgcatgtgatgctgttgcaatggaaaaagaacaagcttttgagatcgtagccaagatcgtccacgaccgtggtgttgagttaatcatagggggcaatccagctttcgagactgagtttgttcttttttatatcgagtcaaccatgcttgcatggggctataagaatcctaaagtcgcggcttactgtgacgctatcaaagcagagaatgacaattttagagcaatggggatctgctaa

SEQ ID NO: 55475 - DNA, 222 bp, Acinetobacter baumannii
atgttggggtgttccatgaaaaaatcagacttatcaaaaacatatagagttcgcggggaattcgtagaatcgatcaaagaaaaatctttggatttcataattgaaaccaaagaaagaatcgaagaagcagacataatcaatgcattgatttataagcatttaaattcgataactgctaaagatgtaacaaaatatatcgaagaaataaaaaaagcagactag

SEQ ID NO: 55476 - DNA, 1104 bp, Acinetobacter baumannii
atgatttacttaattactgcgacgcctggatcagggaaaactttgtgggctgtaaaagagatatttgcacgtgtaaatgaggcggagccgtggaatattttttcaaacatcgatggtctaaaactcgatacagctcaacctttaaaagaggattttaacgactatccacctaggtcattagttgttattgatgaggcgcagcagattaagcatttctctaaaaagtttaaagggatgcatgatcaggtagagtttctccagacccaccgacatgcagaaatgctggatattattttcattactcaagcaccacgtttattgaatgcggacgttttggacatggtcgggatgcactaccacttgcaccgtccgatgggtatgaaaatggcgacatggtggctctggaagcatcaccagttaaaccctaacactaaatcagttaaatcagatgcagaagatacgggtactttttcttaccccaaacatctttttaatatgtacacctcaaccaaaggtggtacagatagccatggtaaaattagaatacctgccaagctagtttcagcaatctggatgttgtttttaaccatttgtgctgctggctatttctatattaaaaacgataatcagaataaacatgatgaaccaaaaactattaaatcagaggttccaaaggttgccgatccgttgcaaaagaagatcgatgattgtgtaaaacagctcggttggactgctgaaatgtgcaaagaaggattagacccagaatacaaagcaaaaagagatcaagaaacactaaacaagactcaaaatgatatccagtctattacgatcaagtacaatccaaataaaccgtatgcaacggaaatgccgcaagattttgagattcaagcggttgattatccacgtatatcaggtgttacaacacttagaaatggtcgttatattgcggtagaccaacaaggcaattacatgcctaatatctcgcaatcagactgtaaaaaatggctatccggatatagaccttttgactacacgaaagcaccacagagtgcacggagtgtgcacgaactgacaccaatggcttctgcaacttcttctctctga

SEQ ID NO: 55477 - DNA, 276 bp, Acinetobacter baumannii; identical to SEQ ID NO: 55468

SEQ ID NO: 55478 - DNA, 1266 bp, Acinetobacter baumannii; identical to SEQ ID NO: 55469

SEQ ID NO: 55479 - DNA, 255 bp, Acinetobacter baumannii; identical to SEQ ID NO: 55470

SEQ ID NO: 55480 - DNA, 195 bp, Acinetobacter baumannii; identical to SEQ ID NO: 55471

SEQ ID NO: 55481 - DNA, 318 bp, Acinetobacter baumannii; identical to SEQ ID NO: 55472

SEQ ID NO: 55482 - DNA, 1158 bp, Acinetobacter baumannii; identical to SEQ ID NO: 55473

SEQ ID NO: 55483 - DNA, 291 bp, Acinetobacter baumannii; identical to SEQ ID NO: 55474

SEQ ID NO: 55484 - DNA, 222 bp, Acinetobacter baumannii; identical to SEQ ID NO: 55475

SEQ ID NO: 55485 - DNA, 267 bp, Acinetobacter baumannii
atgaatctgcaatacgaccgtatagagcagctttgccaaaagctcaatctgcctgccaccgcatcacaatggtcacctcatgcacaacaaacattaagtcagcatggaagttatgccgactttgttgaagctatcttgacgcatgaatatgctgccaggcaacagcgcagtcagcaggtactgatgaaactctcaggtctgcctcaagtcaaaaccttggaagactatgattttaattatgccctagggcccctaaatcacaggtga

SEQ ID NO: 55486 - DNA, 333 bp, Acinetobacter baumannii
atggtggattttatccatcataataaagagctgtacggagtcgaggcgatttgtagaattttaccgattgcctcttcaacctattaccggactttagatcttacagtaaatcaagaacatcgagcgaaacgggatctgcatgaccttcatcatgctgaacaaattaaacgaatttggaaagaaagctcaggtcgatacggtgtgcgtaaggtctggcaacaactgaaacgtgaaggctatgttattgcacgttgtactgtggttcaattgatgcaaaatcttgaaatacaaggtgtatggcgtggtaagaatatggtgcttgatggatgttag

SEQ ID NO: 55487 - DNA, 231 bp, Acinetobacter baumannii
atgacaaaaccaaaatatacccctgaaatcggagaaagagcggttcagcttgtgattgaatctgaaaaagattatccatcgaactgggcagcagtttctgcaattgctcctaaaattggctgtaatcctgaaacactacgtgtttggtatcaaaaatacttagatcaacaaaatcctgtcaaagtacaacagatatctgatcaagaaaaaaatgaagcaaatagaacgtga

SEQ ID NO: 55488 - DNA, 1224 bp, Acinetobacter baumannii
atgctgaacgatttaaaaatcaaaagattaaaaccacgtgaagaattataccgcatggctgatcattcagggctctgtatagaagtccgcccatctggtagcaaattctggcgttatcgttaccgctttcttactaaagcaaaaatgctcacaatcggtaaatatcctgaaattactttagcatatgctcgattaaaaactattgaatatcgagagcaacttgccaaaggagtagacccaataggtcaccagaaaaatgaacgtcttgaagcaattaaagcaaataatggtacatttcggttagtcgcaagtgaatttataaattcccgaaaagctcaacaatccaaggaatgggaacaacgccgaagcagttattttgagaaagatgtttaccctcttattggtaacaaacctattcatgagattgactctattgatattaaaactgtgcttgatagcactatggcaagaatcaaaaaatcaggaagaggcacaggagaagttaaagggatttttgtaagacaaatcattggtgaggttatggaatatgcaattatcacaaaacgtatttctatagatcctacttatgttcttaggggttacattaaacagccagatgtaacccatgccagaccattaactgagtctgaaaaaaaagtacttatgcttaagctcaatgcatacggtggctcaattagcacacgaaatgctattaaagccgcaatatacacatggcttagaagcattgagatacgtcgaggtaaaaaggaatatattgactttgaagataagacatggacgattccagcagtatcaagggctgatattttggctggcaagcgcaatatgaaaaagaacagaatacatgttgtaccattatctgaccaagccattgaaatcataaaagagcaatttgcactttatccagatagtgaatatatatttgcaggagaagacggggaaatgatgggtaaaaccacattgaatacagccctgagtaatatgaaattagagttcaggatgcatactctaagagcaactgcatccactgtggctaatgagaatggttttaataaggattgggttgaaatacaacttgcccacgtttcagataataaaacaagggcatcgtacaatcatgctcaatggttaaatgatcgtaaaacgatgatgcaatggtgggctgaacatgtagatagttgggataaaaataataatctatag

SEQ ID NO: 55489 - DNA, 1734 bp, Acinetobacter baumannii
atgagtgagattctagacaatccagcaataattgcagctcaactagctgaagcaaaaattaatgcagctataaaagcaggacgaagtttccgactagaagctggcgcaggtgcgggaaaaacattttctttagttcatgctctaaaatccattattaaagagcgtggtagatcattaacgcaaacaggtaaaaaagtagcttgtattacttatacggaagttgcaagaaatgagattgcccaagaaattgaagaccatccagcaattttagtcgatactatacatggattctcatgggcttttatgcgccaatttcaaaaagccataagagagattcttattgaagatgattcaagaaaagaaaaagttgaacaaggtggtggcattgggtctaaatcagtggaatacgagttgggcttttttggtgttaatgatcagaaaattacactgagtcatgatgatatcccaacgatgatggctaaattactaaataaagaaaagtttcggaaaatatttagcaatcagtttccggtagtttttattgatgaatatcaagataccaatcgccaatttatggatgctattacagagtatttcttaaaaccaaaggtgggaccactttttggtctttttggagaccattggcagactatttatggtagtgaatatgaattggcagagtatccaatcgaagagattgcaaagggatcaaattttcgatcagttccagcaattgtagatatattaaataatttaagaccagacttaccacaagctgtcagttcgccagatgccaaaggtgaagctagattttttcatactaattcttataaggggacacgaacagatgagagaagttctaaagatgatttaccaatagatatagctcgatctactcgtacaagtttgatacagaggctacaaaatgaggggtgggatattgaaaaaactaagatactgatgttaagccataatgttttagcatctgaacaaggataccctcaattaattaaagtatttgacggacgtaatgatcaatttgctaaaaaagaagaccctgtaataaaattttttgcagaaatagttgaaccaatgagtgttagctatagcttatcaaattatggtgaaatgtttaaaatctttggctcaaggcctgcaataacgaagcatgaagataaatcttgttggcgacgggatatggatcaattattaaaactaagacaagaggggactatagggcaagtgatagatcatcttaagcagacaaaacgtccctcccccccagatagagtgcttagacgagatgatgagcttatttctctaagaaattcacctgacacggaaatgtcttcaacactacttcgttataataaattaagagaaattccatataaagaagtaatcgaagttacaaagtttattgaaaagcaaactccatttgcaactcagcacagtgttaagggggcagagtttgagaatgtattagtagttttaggtggtggatggaataattataaatggccacagcttctcgagttgcttgagactaaaaagttgactaatgcaaacacaaaaggtttttatagagctcgtaatcttttctatgtatctatttctcgcccaatgacgagactggccgtgttagctactcagacattatctgatacagcacttgtaacagtgaataatctatttggaagtgagaatgtaatagaattaagtttagatacatag

SEQ ID NO: 55490 - DNA, 1698 bp, Acinetobacter baumannii
atgcatttgctttttgaccttaccccatcttccgcagtggttgaacctcgtacacatttttataaaaatttgaagggtaatttgtctaaagcttatggggttcatgtaagtgcagttgatcctactgatattacaaatacgagagattttgaaggcacatctgctttaacagcattattacaatgtaactttgtattagctcaaagaaatcttgataaaacaaaactaggggatgctgatgtaataggtaaattgcttagtgagctatttaagacagctacagcaccatctgctgctgaggcagatcaaaatttagctataagattaaagcaatctgttgaaaatattgagcataatgtccaactcgactttgatggtatgcttaaagaattattaccagttatgaacgtaatgggattcccaagtcttaatgatactgagataagaccagagacatcattaaacgtggaatcattattatcagggcatactaaggtcgtttatagcggagttgatggagtacatttaccagaagggtataatggtctaggaacccgtaatttgatttacatgttgctacagttagcaagctatcacaaaatctatagatcaaaatcaattagccccgctactcatttaatatttattgaagagccagaagctcatttacatcctcaaatgcaggaggtttttatcaatcaattaaatgtggctgttcaaaaattatcagaaaattattctaacaaagataaatggaatatccagtttgttatcacaacacactccccacatgttgcgaatgctgcaaaatttgatgctgttagatatttttataatgaaattcataagatagaaaacgtacgtcagacaaaggttaaagattttaagaaggggttgagtagtatttctgttaaagatcaaaaatttttacatcaatatatgaccttaacgaaatgtgatctttactttgctgataaagctatcttagttgaagggacaacagaacgtttattaatgccaaagttatgtcaattagttgatgagtctcttgatgaaccacaaaaactagccagacaatatgttacttgtgttgaggttggtggagcacatgcgcatattttttacccacttcttgactttctggagttgaaaacgttagtaatcactgatctagattcaacaaaaaaaggcaaaataactaagaatggaaaacaggaagatgcatgggtgaaatgcccagtagttgatggtcagaatacatctaatgctgccattaaaaactggttttatcctaaagaagtcgatgatactggtaaagttaagaaaaaagctaaaaatgaggatagtcaaatttccccgtcagtcttgattgctaaaactgctcaagagaaacaaattaagttccgtagaattgcatatcaaataccagaagatccagaaactaatatatgcgctagaagttatgaggatgctttcatattagctaatctttctaaatttgaattacctgaaggacaagatattgctgttgctgcttgggaaaaagcacaagggcttattaaatctgatttcgccttagaatatgcaattctaatagaagattggtcggcaccaagatatatcaaggaaggtctaatttggttatctgaaatggacactataaaaaaatcaaactatgaattaactacaggcgaataa

SEQ ID NO: 55491 - DNA, 399 bp, Acinetobacter baumannii
  misc_feature (385)..(394): n is a, c, g, or t
atgcgcattgaaaaaattaaagtagaaggttttaggcttctggagaatgtcgaattcggattggaagagaattcaactgtaattgttggacgtaataatagtggaaagacatcttttaccagtatttttgattgtttttgtggtgaatctggaacaagatttcggctagaggatttttcagttttatcacgagagaaatttttaaaagctaaagaattaagagaggcgggggaaagttcagaagtaatattcgaagcacttcctcgaatttctcttacacttacatttcaatataataaactttctcctgatttaggttctctatccccttttgttattgatttagatgaagactctacaacggctattgcgcgagttgagtatnnnnnnnnnngttga

SEQ ID NO: 55492 - DNA, 921 bp, Acinetobacter baumannii
atgaaaatatccttactcatatcctcactgcctacgcagaacacaaccactcgtatgagagtctggcgatctctcaaagcaagcggcgcagcaattctaagagatggggtctatttgcttcctatttctcatagtgaaaagtttgatcctattgctaatgatgttatctcagaacaaggggctgcttatgtatttcacgcagaccaacctataaaccttgaattagctcctttcttcaatcgaaaagaagaatacgatgccctctataaacaactctccgagttgagagatagacagaataaagatgaaaagaaagagctactcaagcaagtccgtaaattaagaaaaagtatcgatgcgcttgtagaaattgactactaccccgatgaaactcaagcacaggttctaaatgagctttcctctttagaactttcaattgcacgtcttggtgaagtgaatgaaccaatagcaatacaagctcatattcaacttctagataaagctagttatcaaaacagaacttgggcaactcgtaaaagaccttggattgatcgtttagcctctgcatggctaataaagacatttattgatgcctcaccaaaattcatttggttagaaacaccaagtgactgcccaaaaggagcatttggattcgattttgatggtgcaactttcagtcatatcaatcattgggtgaccttcgaagttcttttacatagttttgatctagaaacacccgcattaaagaaaatcgctgaaattgttcattacctagatgtagggggaattgagcctcccgaagcaatcggtattgaaaaagttattcaaggaattcgaagtcagataagtgacgatgaccaattatttgcattatcgaatcacattttcgatggcttatatgccaacctatcaagagaataa

SEQ ID NO: 55493 - DNA, 1353 bp, Acinetobacter baumannii
atggaacaagaacttgttatagaaccagaacaagaaatacagtcaatttcattttggcaagcatttctattctggctgaaattggggttcattagttttggtggaccagcaggacaaatcgctgtcatgcaccaagaactcgttgaacaaaaacgctggatctctgaaaaacgtttcttacacgctctcaactactgcatgttattgcctggacctgaagcacaacaattagcaacctatatcggttggttaatgcacaggactataggtggtattgttgctggtgtcttattcgttttaccttctttatttatcctgatcgccctctcatgggtctatgtgaagtttggtgatgttcctattattgctgggctcttttatggcatcaaacctgctgttgttgctattgtctttcatgcaacctacagaattggcagccgatcattaaagaataaatttttatgggcaattgctgcacttgcattcgttgctatctttttctttaaccttccgttccccttaatcgttctaaccgcagcaatcattggatacttagcaagtaaaaaatatccaagcttttttacgggtggaggttcacatcagcaaggtaaaaaagattatggcccagcactaattgatgatgataccccaaccccagaacatgccatatttagttggaagcacttaggaaaaatattatttataggtgcaattttatggttcacacccattataggtttgactctaaccttaggatgggatcatgcctatacacaaatggcttggttctttaccaaagcggcgctgctaacatttggtggagcttatgctgtattaccctacgtgtatcaaggtgctgtaaatttttatggctggttaggaccgacacaaatgattgacggcttagctctaggagaaagcacccctggtccattgatcatggttgttgcattcgtaggttttttaggtggttataatcatgcattattaggtagcgaacatttatttctagcgggtgcaattggtgcagtaatcgtcacttggtttacgtttctattttcattcattttcattctagctggcgctcctgttattgaatcaactcacaatgaactaaagtttacagcgcctttaacagcaatcactgctgctgttgtcggtgtgatactaaacttagcacttttctttagctatcacgtcttatggccaaatggattcaatcatcctttcaactatgaagcagcattcatcgcaatagcggcatttattgccttgttccattttgaagtgaaagtcatgtatgtgattcttgccgctgccttatgtggtttgattctatacattggagcctaa

SEQ ID NO: 55494 - DNA, 921 bp, Acinetobacter baumannii
atgcaacttcatagtaacttggatcgctatcattctcatcaatttgatgagggaaatcccttagctcaaaaaaagattcttatcgctacgatattaacagcgataatgatggtgctagaaatttttggtggttggatttttaattcaatggcactgcttgcagatggttggcatatgagttcacatatggtggctctaggcttggcctattttgcgtatcgaatggctcgtcattatgctcatgacaaaagatttagctttggtacttggaaaattgaaattttagcaggttatagcagtgccattattttaatggtagtcgcgatattaatgggaattcagtctattgatcgtttaatgaaccctgtaaatattcactataatgaagcgattcctattgctgttgttggtttattagtaaatatagtgtgtgcatggttattgcacgatggtggagaccatcaccatggtcatgatgaccaccatcatgatcatcatcatgatttaaatcaaaaagcagcttttattcatgtagtggctgatgcggtgacttctgtacttgcaattgtggctcttattgcaggtaaatatttcggttggaatttcttggatgctttacttggtgttgttggtgcaattctagttgcaaaatggtcatggggcttgttgtgtgaaactgggaagactttacttgatgcagaaatgtcacatcctgttgtagatgaaattagagaagttattgatcagtttactcaagctaaaattactgatttacacgtttggaaagttgggaaagggaaattttcatgtatcttggctttagaaagtacaggtattgatttaacgcctgatgttgtaaagaaagcactttctattcatgaagaaattgttcatgcaagtgtagaaattcattttatttag

SEQ ID NO: 55495 - DNA, 1308 bp, Acinetobacter baumannii
atgctagaagtactaaaaaacacaacatatcggcatttgtttttggcccaagtaatagcactaatcggaacggggttaatcacaattgccctagctttacaggcatacgatattgcaaagggagaagcagcccaagttctcggtattgcattggcaattaagatgattgcttatatcggtgtagcacctatagcatcagcatttgctgagagattaccaagaaaacaagtattggttggattagatgttattcgagcattaacagcattgtgtctaccgtttgtgacgcaaatttggcaaatttatattctcatttttattttgcaatctgcttctgctgcatttacaccaacatttcaggcaatgattccagatgttcttcctgaagaaaaagactataccaatgctttgtcattgtctcgcttagcctatgatttggaaaatattatcagtccaatgctggcaggtttcttactcactgtcatgagctaccataatctgtttttaggaacagtattaggttttatcggttctgctttgtttgtggtaagtgcaaaattaccagttgccaaagtacctgaatttagaggtgtttatagtcgtataaagcagggagctaaaatttattttaatacgccaagacttaaggcgttgcttgctttaaatctagcaattgcatcggcgagtgcggttgtgattgtaaatactgttgtactggttcaatcgacatttaaacttactgaaaatgcaacgacatgggcatttggtttatttggtcttggatcaatgttatcggcttttgttttgccaaagatattggataaatttcctgatcgatcagttatgttgactggtacaacaattcttgtaatcgggctgttaagtggttatttcattacatcttataatggtttgcttgcactttggtttgtgcttggtattggatattctgtttcacaaacacctacaggccgtttaattcgcaagtctgcatcgagtgagaatagaacctcactgtttgccgcacaatttgctttctctcatgcttgttggttaattacttatccattagttggatggttaagtaccaatataggcacattacagacttttattccgatggctgttattgcgattattgctctcattcttgcattacgcttatggacaactaaagatgaagattttctagcacatagccatgatgatttacccgcagaccacgatcatgtggttcagcaccaagtcaatggtgtacatgtgcatgagtatgtgattgatgactatcatcaaaagtggcctaaataa

SEQ ID NO: 55496 - DNA, 471 bp, Acinetobacter baumannii
atgaaagatatcggcttgtacgtcagcctatttgcacttgggcattcgattacgatgctggtgggtgtttattacaatatctcgataaacgcctacatcattgatgcaatcattggtttttcgattgtttataaggctctagataacttgggggcatatcagcgttggtttggttttcaaccaaacacgaaaatcgcgactttaatttttggtctgattcatggttttggactcgcagtaaaaattcaggaatatgaagttccgagtgatggactgttggcaaatttaatctcattcaatattggggttgaattaggtcagtttatggctctgtgcatcatcttgttattaatgacgttttggagaaagacaccttatttctttaaaacagcttatcaaagcaatgtcttcctcatgttcctcggttttttacttgttggctatcaacttactggcttcattactcaataa

SEQ ID NO: 55497 - DNA, 894 bp, Acinetobacter baumannii
atgaatatcagtgcaaacctacaaacttctgcccaaattgttgatggtaaagcaactgcagcaaaggtactggaagaagtcaaagctgaagtacagcagtttaaacaaaagggcattgaaccttgtctggccgtggtattggtcggtgatgatcctgcgagccacgtttatgtacgtaataaagttgagaaagctcagctggtcaatatccgctctttagagttccgtatggatgctgatacggcggaagaggtattactggaaaaaattgatgaactgaatgcagatgccagtgtgcatggcattctggtacagctgccattacccaaacatatcaatgaaactgctgtattagaacgtatccatccgcaaaaagatgtcgatggtttccatagtgaaaacgtcggtggcttgagtcaggggcgtgatgtcctcactccatgtactccaacgggatgtattcgtttactgaaagataccttggggccggatttaacaggtctgaatgctgtcgtggtggggcgttctaatatcgtgggtaagccgatggcggccttgcttttaaaagaaagttgtacagtcaccattgtgcattctaaaaccaaaaatattcaggatatttgcaagcaggcagacattctggttgctgcagttggtcgtccgctcatgattgacgaaagttatgttaatccgaacatggtcgtgatcgatgtagggattaaccgtattcaagtggatggcaaaaaccgtttggtaggcgatgtccattatgaggcagtcattgataaggtcaaagcgattacacccgtacctggaggtgtaggacccatgacgattgcttatctcatgaaaaatacactcgatgcagccagattgcagacaaaaatattttaa

SEQ ID NO: 55498 - DNA, 327 bp, Acinetobacter baumannii
atgaaaataatgatttgtcctctgaatggtccgcgtaatatcagtgaatttacctatggcggagaagtgcgtgagatgcccgatcagaacacttgtacggatcaggaatgggctgactatgtatttaataaagacaatttaattggcgtggtacgtgagtggtggatgcatacaccaagtagctattggtttattgcagaacggcataccgcgacagatgagattctgtgtacctatgacccaaaacaaatttttaataaacgtattgaatttacaaatgaagcgcaggtgacaacatctgtattacaacaaggggtaggcgcatga

SEQ ID NO: 55499 - DNA, 2910 bp, Acinetobacter baumannii
atgacaaaaataggcttagacagacttcctgcaccttatgggctactgattgaccgtgatcatcaagtgcagtttgaatttgatcagcagcgtttcagtggctttgctggtgacagcattgccagtgctttaattgctagtggacgctggatcatgtcgcgttcatttaaataccaccgtccacgtgcaccattgacaatggcaggacaggatgcaaataccttgatccagctaccacaagaaccaaacgtattggcagattgtacggatattcaaacgattacgacttcttcaggtcaaaactattcaggttctttattaaaagactcagatgcatttttaggtaagttttctaaatttatgccagtgggtttttactaccgttctttctataaacccaaaggtgtgtggaaactctgggaaccgatgatccgtaaaaaagccggactaggtgtgctagatctgaatttcgagccggaatactatgataaggcatacttatttacggatgttgctgtgattggtgcaggtcctgcagggttgaaagcagcgattacatcagccgatgccggtttgaaagtattactgattgaacaggaaaaagtactcggtggcagtttgaactatgcacgttttgacatagcagggcagcgagcaaaccaattaagagacgaattgataaatgtagctgagcagcatgccaatatcacagtactgaaagaagccgtctgtaatgcctggttcacggatcattatctgcccgtgatccaaggtaaacgcatgtataaagtccgtgccaaacagtgcatcgtggcgagtggcagttttgatcagccggtggttttcagaaataatgatttgccgggtgtcatcttaaccagtgctgtacagcgattaatcaagttatatgctgtaaaaccgggtcagaaagttgtcattctgaccggtaatgatgatggttattttgctgcactggatttgctagacgccggtattgcagttcaggctctggttgatatgcgtgcaggtgccgccgatgcagcattacagcaggctgtatcggctaaaatcaaatgttattacagcagtacagtgtatgaagcacaacatgatcgtgccatgcagcatcttactggtgtggaaattcggcagattactgctgaagggcaggtcgcgaaagactcaatttatctggaatgtgatgtactggcgatgtcatcaggctatatgcctgtgtatcagctactgtgtcaggcaggtgctaaactaagctatgatgaccgccgtgcccagtttagtatcacgggattgccaaaaggtttacatatcacaggttctgtacacggtgtacatgcaattgagaatgtcctcaaagatgcagaacatactgcacagaatgtcatacggtctatccaagaaaaatcacaatttgctcaagagctgagcttcattgaatcgtctgtcaatttcccttggccgatgtttgcacatcctaaaggtaaagaatttgtcgactttgatgaagatctgcaaatccgcgatattattaatgcaaccaagagcggctaccgtgatgtacagctggttaagcgtttctcgactgttggtatgggaccatcacaaggccgtcattcagccttgccaactgcacgtttagttgcgaaatacactgatcgtagtgtgagtgaaacaggcgtgaccacagcccgtcctccatttactgccgaaaaactggcacatattgcgggtcgtggttttgatccatatcgtcaaactccaatgcatcaacgtcatttagaactcggtgcgaaaatgatgcctgcaggtaactggcaacgtccggcattctatggtcctgcagagcagcgtttgaaaaatattgaacgtgaagcactgaacgtgcgtcaaaatgtaggcatcattgatgtctccaccctgggtggtttagaaatacgcggtgctgacagtgctgagttcttgaatcgtctgtatacctttgcttttgcaaaattaccagtaggcaaaacccgttatgctgtgatggctgcagaagatggtgtagtgattgatgatggggtcgctggtcgcatcagtgagcagcatttctatgtcacagcgacgaccagcggtgtcgaccgtatttaccagcagatgctgaaatggaatgcacagtggcgtctgaatgttgatattactaatgtgaccacggcatttgctgcggtgaatgtcgcaggacccaagtctcgtgcattgatgcagaaagtatgtgccgatgtggactttagtaatgaagccttcccgtatctgggcttaagactgggcacaattcaaggcatccctgtccgtctgcttcgtgtcgggtttgtaggtgaattgggctatgaaattcattatccagcgcgttatggtgaatttgtttgggatctgttgatggaggcaggcaaagaatggaatatgcagccatttggtgtagaaactcaacgtctactgcgtcttgaaaaaggccatatcatcattagccaggataccgatggcatgactcatccgaaggaatgcgatctcagctgggcagtagcaaaatcaaaaccctggtttgtcggtaaacgttcgatcgaaattctggcctcgcagcctttaaaacgcaaactggtttcttttgtactcgataagaataagactcaaccgttggaaggacatatcgtactagaaggtgaaaatatttcgggcaatatcacgtcttgtgagtactcaccaagcttagacaaaattattggcatggcttatgtgggaatcaatcaaagtacagaaggtcagacttttccgatccgtgtcgaaaaaggtgaaatagtgcaggcaacagtcgtcaaagcaccattttatgatccagaaaacaaacgtcaggaggtttaa

SEQ ID NO: 55500 - DNA, 660 bp, Acinetobacter baumannii
atgcacaatctatatcaggcagagcgcagtttaatccagcgcacgtttgaaaaatatgatgcttatggttcaggcaaatattttctaactacatctaatcagcaggagcagcttaagcgctgcggcctgattgatttaacccatttatctcgtgtgggattccgcggtgtagatgcagcgacctatttgcaggaaaagggatatcgtacgccagaaatacccaatactgtacttgctcaggacgatggcagctttgtggggcgtctttctgcaactgaatatctgattttagggtcattcaatcattttggtgacaaggttacagcacttgaagctgagtggcagatggatgaatatcttaattatttactgccacgccaggatagtcatgcttggatgatgcttaccggagataatgtctctgccattatggcgaagctttgtgcagtagacttaagcgcagaagaattcaagccaggtcagattgtgcaaacttcagtcgcaagaattaatgccattgtgctgaatgtcagcgatgagatttgtccgaaatttagcattctatgtgatcgttctgcgtccttgtatttatgggacgtgctgattgatgcgatggctgaatttaatggcaaagtaatcggtgtgaatacactactttaa

SEQ ID NO: 55501 - DNA, 330 bp, Acinetobacter baumannii
atgggttttagatttcgtaaaagtattaaattattcccgggttttaaaattaatctgacccataaaggcatcagcagtgccagcattggcaaacctggtgcttctctaaatattggaaaaaaaggtacgcgaaccagtgtcggtattccaggtacgggactatcttactctaaacaccagccttactctaaaaagacccgtgttccacaaccgacatcgctagaacacacggaatataatcctcagaatttagaacaaccgaagacaaagatctggccttggattatttttggaatattgtgttttatgatgggtgccgtcattttttag

SEQ ID NO: 55502 - DNA, 3681 bp, Acinetobacter baumannii
atgaacattaaagaacttttttacaagccattagatcgtgcgattaacggggtcgtaaaagcagaccagaatgacaataccacggtttatcaggaactcgatgagtatgtggtcaccaatgaactggaaaagcattttcgggactttttccagtcttatggcacagacctgagcgatccttcgattgccaaccgtgtcggcgtatggatttcaggcttctttggttcaggtaaatcacacttcctgaaaaccttgtcgtatattctggccaataaagtggcacgcgatgcggaaggtaacgagcgtagcgccgcagaattctttgatgaaagcaaaattcgtgatgcgtttatccgtgcggatattggcaaggccgtcagccatcatgccgatgtcatcctgtttaacatcgacagtaaagccagttcaaatgatgacggcaatccgattttgaatgtatttttacgcgtgtttaacgagtatcagggttttagtgctgaccatccacatattgcccatatggaacgtcacctcagccagaaaggtgtctacgaacgctttaaacaggcgtttgaggaatccagcggcatgtcctggctagaggagcgtgacggctatcagttctatcaggatgatgtcgaaaccgcgatttctcaggcactcaatctatcaccagaagcagcgcataaatggtttgaggattctgagcagacctttagtgtttcggtcgaaaacttctgtcagtgggtgaaagaatacctggacagcaaaggaccccagcaacgcatgttgttcttggttgatgaagtggggcagtttattggcagtgatacccgcttgatgctgacactgcaaaccattactgaaaacttgggtacgatctgtaaaggccgcgcttggattatcgtcacctcgcaggcagacatcgatgctgttttaggtgagatgtcttcttcaaaagccaatgacttctccaagattgctggacgttttaaaacccgtttatcactgtccagttccaataccgatgaagtcatccagaaacgtttattacgtaaaaccccagaagcagaagcattgctcagatcggtgtttgagcaaaagggcgatatcttaaaaaatcagattacctttgaccgttcaggcccaaccctcaagaactatgaggggccagacagttttattcataactatccttttgcgccgtaccatttccagctggtgcaaaaagtatttgaagaaatccgtaaagtcggtgcgactggtgcacatctggcctatggtgaacggtccatgctggatgcgttccagatggccgcgaatgcgattgccaccgatgaagtcggtgccctggttcctttccaccgcttctatacttcagtcgaaggcttcctggatactgcagtgaagcgtaccatcgaccaggcagggcagaataagaccctggatggttttgatgtgcagatgctgcgtaccctgttcatgatccgctatgtcgatatcatcaaaggtacgctggataacctggtgactttatcgattgagaaaattgatgaagataagctggcattgcgcaagcggattgaagagagcctgcagcgtctagaaaaagagagcctgattacgaggaatggcgatgagttcctgttcctgaccaatgaagagcgggacattacccgcaaaattaaagccacagacttagcagcttcagaagaaaataaagagttagccaatctgatctttaaagatttactgcgcgatcagaacaaataccgccatcaagccaacaagatggactatcagattggtcgttttctggatggtcatagcctggatggcaagtatgagagtgatttgaaagttgaaatcatttctccactggatacggaatacaacctctacacagaagctttctgtattggtaagagcgccgaggccgaagggcagatactgtttaaactggcagacgataaacagttctttaatgaactgcgcacctggctgaaaaccaataaatttattcggttaaatgatgatggcactcagtccgatatcacccgtatcctggcagaccgtggccgtgagaatcaggagcgtaaaaaacgtctgcgtgtccgggtcgaagaaatgttgctggaggcggaaagttatgccttggggcaacatctacaactttcatcttcaagtccaaccaccaagctggatgaggcttgtcgttatttgctggaaaacacttataccaaactgagctatttgcaggtctatcagcaggatgcctggcgtgaactgaacgccgtcttgactgtggatgatatggcgcagctcggattgtctctggatggcgggcagagcaatccgaaagccctacaggatgtcgaacagtacatctcgctgcgtgcaaccggtaccgaacgtattctggtgtcagatgtggtggatcgttttgccaaacgtccttatggctggccagatgccgagattttactgttggtgggtcagctggctgcgatggggcggatttcactgcagttaaatggcggcagcttacagttaaaagatgcctttgagcctttacaaaacagccgccgtcgccgtgatgtttccattattaaaaagcgccagactgatgatcaggtattgaaacaggcacgccaactcacccaagacctattctcggccatgggaccagcgactgagaaagagctatttgaattctatttgaagcattttaagacttggttagccaactttaagtcgtacaaaagcaaaacagatgtcgggcagttcccgggcaagaaagtgattgaaaagtcgattctgactttggaacgtctgctggcgaatagcgatagcttcgatttctttaaggccgtggtcgagaacaaggacgactatttggatctggaagaagattatcgtgacattcatgaattctttagcaaccagatgccaagctggcagcaactgcaacaggccttacgtcattttgagaaaaacaaacaggcgctgggcagtgatgagctggcgaaaaaagccctctccgaattacatcgcatttcgaccactgaatcaccctatggcctgttaaataaagtcgctgatttggttcgtacagtggaaagcgtcaatcaacgcttgctgactgaaaagcgcagtcaggcgctagagcaaattgatgacaagatcaagcagctggaagccgagattaaaaacagtggtattgccaccgctgagctgagtaacaagctactgcgtccgctgcaattgctcaaagcggatatcgaagtggaaagcagcctgtccaccatctatatgctgcaaacccaaaccgccattgaacgttttgatgaagccttatatgagctggaacgagaagttcaggctgaaattcagcgtcaggccaaagcggcacaactggctcagagcaaagcagagagtgtaaccaacactgcaaccacctccagcccagcaacatcagaacctgctgcgattctggtacagcctgcgacagccgtagtgccaccgaaaccagtggtggaagtcgatgtcgccagcatttacagcaaaacctccagcagtgtctatctggaaacggaagagtcagtggatcagtttgtagaagcactcaaagctgaattgaaaaaaattgtgagtgataaaaagcgtgtgcgtatccgctaa

SEQ ID NO: 55503 - DNA, 384 bp, Acinetobacter baumannii
atggaatctgctaacgataaagaactggatcagctgctgaatgaacactttgccggacgagtagtacgcaaggatctgaccaaactgatcaaagaaggggctaacgttcctgtctatgtactcgaatacctgctagggatgtactgtgcctcggatgatccagagatcattgaacagggactacgtaacgtaaagacggttctggcagagaactatgtacgacctgatgaagctgagaaggtgaaatccctggttcgtgagcgtggcagttataaggtcattgatcgggtgaccgtaaagctgaatgagcgtaaagacaaatacgaagcatcatttagtaatgaaccgtaccgggtttgtcggagacttttttatttaagttaa

SEQ ID NO: 55504 - DNA, 318 bp, Acinetobacter baumannii; identical to SEQ ID NO: 54614

SEQ ID NO: 55505 - DNA, 501 bp, Acinetobacter baumannii
atgaaatattgggctttacttattcttttaatattttcaataaaagagtctattgccaatccatatccacttaaacctagggattattatgttggcgtaaataaaatttatcagggaaaaccagctactttaaaaataactgatgagtatataaaaaattatcgcactagattacaagaagctctaaatcaagatgtagaatttgctggagaatatgttgttgctgaatgggggtgtggaagtagttgtgttattcactcatttataaataaacggacaggcgtagtactagatcacgtttttggtggtgaaggtggtccttttttagaagaggtttacttaaatagccgattagttaaagcctttggcgaaaatgaggctgatgggaaattctatacttattattacctgttagaaggtaatcaacttaagttagtaaaaatgaacgaacgagaacctattgattgggtggatattataaattatgcatacagaaaatag

SEQ ID NO: 55506 - DNA, 690 bp, Acinetobacter baumannii
atgagaaagcaatacttttttttgatggcattagggttttcaagttcttcatttgcattagaaaatctacctcttactcataaagggttagaaaaactaaaaatgcaagaaattggatctgtaataaaaaattttttaccaaactcagatgtatctgcaatatggtgggattacaagtctaataatccatctataatttggcttcatacaccttatactgaaacacaatttaaagatggttctattcagacaatacgtaaaggggtttttagatcacatgtgttaggggttcaaacaacttatctacaagacagaaaatatgaattgccttggtcagttatttatttaggtaaaatggcgaaatttggtgtaacagaaatacaatttcatcctaacttacccgatatcgatatcatcgactcatatcaatgttttggagcgagttatgataattgtgatttcaatccaatcaaatcattaaaaaatgttggtgttaatagtaaaatgatttgcagagatgatactggaagtggttcaaattataaaaaagcttacttattaacagcaaatggtaaaaaaccaacttatgctattcactcaatgagtacaggttcaggaggctctagtaatgatttcagcctcatgcttaatacaacaaaaaatgaaatatgcaatttagttaaatactag

SEQ ID NO: 55507 - DNA, 1311 bp, Acinetobacter baumannii
atgttggataatttaaaaaaaatactgctcgcaagctgtatgctgtctccagcaatggcatttgctcaggacacgattgatgcaccagctaccgtctgggtaatggtatccatcgtgatcgtattactcatgtttatccctggacttgcactgttctatgggggcatggtccgctcaaaaaatattttatctattttcagtcagttttttgccattgcaagtgtggtcggcattttatggatcgtggttgtatatagtcttgcgacagataccactggcatggaagaaggtgtatataaccttggtagttttgtgggaggcttaaacacagcattccttgcagggattacgcccgaaagtatgtcaggcggtattcctgaatatatcttgattgtgttcctcatgaccttcgccatgattaccccagcaattgcaatgggcggttttgctgaacgtatgcattttggtgcaatggtgctgttctctgcactatggacgattattgtatatgcgccaatggcacatatggtttggggtggtgatggtgctttattccataactggggcgtactcgactttgcgggtggtacagccgttcacattggtgcaggcgtagctgcatttgtcggtgcaatggtacttggcaaacgcaaaggctggccaactgcgccaaatccaccacataatgttgtgttcgttttagtcggtgctgctttcttatgggcaggttggttcggctttaacgtgggttctacacttgctgttgatggttctactgcactggtattcatgaccactatgcttgcaacacttggcggtatcctaggttggatgtttattgaaaaactagttgcaggccatgtcactgcattcggtctagcttctggtgcaattggtggtttggttggtattacaccagctgccgcgttcgttggtccatttggtgcaatcatgattggtttcttggcaagtatcgcagtgtttttctcaatcactgtcttgaaacgtaaattgggcgtagatgatgctttggacgtattctctgtacacggcgtaggcggcattgtcggctgtatcttaactggtattttctgtgttcctgcactgggtggtaatgtcgaaggtatttcgattgtgcctcaagtccttgctcaaattgcaagtattctatttaccttcttatatgtgggtgtcttgtcttggattctattcaaaatcgtcggtctagtcatgccactacgtgcagatgaagaacaagaacaagtggggcttgataaaactgaccacaatgaaagtgcttataaccattaa

SEQ ID NO: 55508 - DNA, 1317 bp, Acinetobacter baumannii
atgaacccatccaagctacaaagactttgtatcatcagtattatgctaatcccctctctgtgttttgcctcagagacggaaatggataaagcatccaccgtctggatgatcatttcatccttactggtcctattaatgtgtattcctggacttgcacttttctatggtgggatggttcgtgaaaaaaacgtattgtcgatcataactcagttcatgggcattgctgctgtcgtctcagtattatggacggcttttgtctatagtatgactgctgatacaacgggtatggaagcaggtctctataatattggtagttttgtcggtggattcgataaagcttttctaattggtatcgatgaatttacattggtcagtggtgtacctgaatacgtactattcatcttcgggttggcctttgccattattaccccatgcatcgccattggtggttttgctgaacggatgaaatttagtgctgtcattttgtttagtgttttatggttaattattgtttatgcaccaatcaaccatatggtttggagtggtagcggtgcattgttccataattggggcgttttagattttgctggtggaaccgccattcatatcaactctggtgttgcagcacttgtcggcgcttatgtactcggccgacgtcatggttggccaaaaactgcaatgcctcctcataatgttatttttacatttatgggcatggcatttttgtggctcggttggtttggttttaatgtcggctctgcgctcgcaatcaatgattctgcaattgtagcattcgttacgacgatgctagcaacctgtacaggtatcttaggttggatggttgttgagaaattaaaaactgggcacgtcactggtttaggactggcttcgggagctattggcgggctagttggcattacaccggcttgtgcatttgttggaccacttggggcactattgattgggtttatcagcgccatcgggtgctattatgcaatcactgtattgaagaaaaaactcggtatcgatgatgctttagatgtttttgcactacatgggatcggtggaatcatcggttgtgttctgaccggaattttctgtattcctgctttgggcggtaaagttgctgatgtcagtgttattccgcaagtttgtgctcaaattgcaagtgttattgtcaccattttatattctggcattctgacctggattatcatgaaaatcattgataaaacgattggcttacgtgcaagtcctgaaagtgagcatcgtggtctagatctgagcgatcataacgaacgtgcttataatcattaa

SEQ ID NO: 55509 - DNA, 600 bp, Acinetobacter baumannii
atgagacaaaataaaaatggtatgaagctggaacaatatattggtattcaaatcaagaaataccgtcaggaacaggggctaaaactcgcggaagtggcgcagatcgcagatatcagtcaaggtatgctgagtaagattgaaaatgcccaagtgtctaccagcctagaaacgctgagccgcttatgtgaagttcttggaattccactttctactttatttagtcagtatgatcagcaagccagtcaagctatgctggtcaaacaaggagaaggtatggaggtggtacggcgtggcacagacaaaggtcatacctatcatttgctcacccattcgcgtggcccgcataagaattttgaggcttacttagtcagtatggatgatgcgagtgaagaatttccaactttcgcccatccaggtacagaaatgctttatatgattgaaggagaaattttgtatcgtcacggtaatgaagtcttccacctccaacctggtgattgcctaaccttagaaggagaaatcccacatggaccagaaaagctcattcaagtacctattcgactgatctctatggtgaactattctacatatcatgacgaatag

SEQ ID NO: 55510 - DNA, 1392 bp, Acinetobacter baumannii
atgctgcaaaaggccgtaaacgagttgtttgatcaacaggatgtcataagcaaacccatgtaccgtccggaagtacagcaggtgattgatcagcacaaattaaaatatgtattggctcaattcgtggatattcatggtgctgctaaaacaaagtcagtacccatctctggcttaaaagcgattgaaggtgagggcgtcggatttgctggttttgcaatttcaggtatgggtatgcaaccacatggacccgactttatggtcaaaggaagtttgtctgaccttatgccagtgccatggcagccaggctatggtcgtgtagtctgtgaaggctatgtcaatggcaaacctcatccttatgattcacgttatgtgttgcgccgccaggtagagcgtttagcagaaaaaggctggactttaaatacagggcttgaaccagagttcagtctgttccgtcgtactgaagacggtaaactgaaaatggtcgatgactcagataacctagacaagccatgctacgactataaaggcttatctcgttcacgcgagttcttggaaaaactcacggaagcccttattccagtcggtttcgatatttatcaaattgaccatgaagatgccaatggtcagttcgaaattaactatacctatgcagatgcgatgaaatctgcagatatgttcaccttcttccgtatggcggctggcgaaattgccaatgatctggggatgatctgttcatttatgccaaaaccagatccaaagcgagctggaaatggtatgcatttccatctctcaataggaagtgatgattctcaaaacttatttcatgacccaagtgatccgagtggtatggggctgtcaaaaatggcctatcactttattgccggacttctggcacatggtccagcactatgtgccttctgtgccccgaccgttaactcatataagcgcctggtggtaggtcgttcactttcaggtgcaacttgggcaccagcatttattgcttacggttcgaataatcgttctgcaatggttcgtattccttatggtcgtatcgaattacgtctacctgatgctggttgtaacccatatcttgtttcagcagcgattattgctgcgggtctagatggcattgaacgtgagctgaccccacctcaaccatgcaatgaaaacttatatgacctgacgttagaagaaatttcagcacgtggcattgagactttaccgcaatctttaaaagaagccgtgcaggcactcaaagcagatccacttttcagagaaaaattaggtgtcgaaattgttgatgaatttattcaccagaagagtatggagtgggtggaatacagccgccatgtatctgattgggaaatccaacgttacaccgaatttttctaa

SEQ ID NO: 55511 - DNA, 912 bp, Acinetobacter baumannii
atgtgtggaattgtaggtttatatttaaaaaacccagcgcttgaatcacaactgggcaaattgtttgaaccgatgcttgagtccatgactggccgtggtcctgacagtgcaggcttcgcgatctatggtgatgaagttcaggatggttgggtcaaattgacactgcaagccgtgacagaaggttttgactggaacgtattcgcggacacaataaaagcaaaattaaatactgaaatcgattggttccagaatgccacagctgccgttgtgaaagccaaaacagatgaagatacgattcgtgcaacgattgctgaaattgcacctgaactcaaaatcatgagtgcaggtcaaagtattgaaattcttaaaggtatgggcttaccagttgaaatttcagcacgttttggtttagccaacatgaaaggcagtcacatcattggtcatacccgtatggcgactgaaagtgcggtgactatggaaggtagtcatccgttctcaactggtgcagatttatgcttggtacataatggttcattgtcaaaccatgcacgtttacgtcaagaacttaaacgtcaaggcattcattttgaaacagagaatgatactgaagttgcggcagggtatctcacttggcgtttacaagaaggcgatagccttgcacaagcactcgacaatgcccttgatgatttagatggctttttcacctttgcgataggcactaaagacggttttgcagtgattcgtgatcctattgcatgcaaaccagcagtccttgctgaaactgatgactacgttgcaatggcatctgaatatcaagcccttgcttctttaccaaatattgacaaagccaaagtttgggaaccagaacctgcgacattgtatgtgtgggaacgctcaaaagacgcggcttaa

SEQ ID NO: 55512 - DNA, 726 bp, Acinetobacter baumannii
atgaatagtgcagtagcagaacaattaaataaagtggaattaaaaaacacttacgatttgagtgtagatagcattcgtgacctaaaccaagctttgcatactcccgaagtagtcgcagaaataacagaatggactgtaaaaaatccagcgggacagcacaatattgcagtcggtattaaagcaccggtgaaagtaaccattgatggccatgcaggatattactgtgcgggtatgaaccaagaagcagaagtcattgtgaatggcaacgtgggtgtcggtgtcgctgaaaacatgatgtcaggttatgtacatatcaaaggcaatgcatcacaagcagcgggtgcaacagcacatggtggtttgctggtgatcgacggtgatgcaggcgcacgttgtggtatttccatgaaaggggtcgacattgtggtgggcggtagcatcggtcatatgagctgctttatgggtcaagcaggccggttagtggtctgtggcgatgctggcgatgcgcttggtgattcattgtatgaaacacgtatttatgtcaaaggtgttgtgaagtcattgggttcagattgtattgaaaaagaaatgcgtgaagagcatttggcggaacttgcagaactcttagaaaaagcaggatttgatgaagatccaaaagcattcaaacgctacggctcagcacgtcagctgtataactttaaagtcgataacgcgtctgcatactaa

SEQ ID NO: 55513 - DNA, 507 bp, Acinetobacter baumannii
atgagaaattatttttacttgatgatttttatatctttaactaattttttgaccaaatggtatattgttatgagggatcttgaaaattacttacttcaatttgttcttgtctattgtgccgatgatccagatgtaaatgcacaagttaaaaaaatactgaataacatcaagctgaaaaataaaaatgaaactttatcccctcagaagaggagagaaacatacatgaaatattggcaaaagatttttgaacttttaaaaaccagtcgctcactccgagcacattgctcgtatataccaatcaaaatactgatgatgaatttggatcgaatgattaaacccaaattgcaaattgaattgtttcaactggctgcagataaacacctagataaaaaattttttctgaattatttcggcttaaagagttgtaaagactttgaaaccatccagttaaatcaaatcgattctgagtatgtacagctacaaaagccaaagaggccagagtattaa

SEQ ID NO: 55514 - DNA, 2325 bp, Acinetobacter baumannii
atgttaagcgatacaggatttcttgaagcttatgaaaaattaaagcagcaaatacttttttttgactttgaaaatatacccactgaactgtctgatgagctgattaaactctatcaaaaagcacattctatccagactcaaattattgcaacaagaaaaataggtgcggaattcagatatgcaagcctcacttattttgcttgtattcaagcagaatccatcagtaaagatgcttatctgatactgcaagccagttatgctattgatacatgttacaggcaactaaagcagattgagggttcagagaacaagcagaaacaagtttatgatttacatagatatatttcaagatatttactggaaattcagccgaatacagcgccgtatcgtagcgagagtattcaagcgctaaaattcttggtgaaattcattcgagatttaacatgtaataccgaaaataataaaaccgaactttggaacaaaatttattctatagatgagttcacacatattgatattaaaaattatattcatagttttgaaatcattctaaaaaatatagatacaggaagaataactcacagatcaagattatctaaaaggacaggtaaactcagttgggccactcccgcccagaaatcgcgctatagcagcagaacaaccacgagcacgattgatttaggatatggcgcgactctcgatatccctccaccaggagtcattattgatgaagatggagaggtagatatcgaagaagaggcagtagaatactatgcccaagatatagatactcaagagtttcagaaacaaatcgtcactccatacattgaggaaatcgccaaacatcgtcaacgtcggcttctgccatttatttctaatccttattacatagaacctcaagctttagctcgaatcatagaattatttagtcagaaattacaaacagataccaaagaggggcagatgtctgctgcctgtttactttctcttgtcacaggactcccgcctatagagctattaaattatcgtaacctaatcaaacaaggtgtattaagtgaacttaagcaaaataaaaaaacgatatatcttttgaacttagagcttaatattagccagcaaaaaataaatattctaaaaaatcatcgtatcaatgatgatatatcacatcaactttacttgcctgctgcatggtttgagtatttaccacaagatacaaataatatttcaatccaggatataaaaaaatatttgaaaaacgtcacaaaaaatcagtttgtcggtcatctcacaattgaaaaattgcaagcgcaaatctacttccatattcgatatcaaacatttaatgaatatctagcacatttggtggctggtaaggacgctaaacataacttgccgggaatgtactatggaggcattccaaagacaacagtgaatgaggcatatttatgttatctaaaaacagtatttaatgatgccgcatttttggacgataaagaactaacacaagaatataaaatccttgaaaaacggtttgcagaaaatcctcctaagcaaaatgagcgtttaggtagccaattggccttgagcaaagattttgtagccgaaatattcagtgtattgcatcatcactgtcaaaaaaatatccatgtttcacagcaccccatcaagcaaatcaatgcatatgcttgttggatgtggcatttgaatttgctttgtcttacacgccgacctcaggaaaatttattaggaaatcctgaagattatctaagtgaacttcagtttacttatataaatgataagaaaaacagcaaatctagaaaagatggacgttttattcccatcccaccgttttttgacaaagcacttcaaaactatcaaagttttttaagcgatctgatgcaacgctataaagcgttgttcactcgtatttcagtattggcaaaggtcaatgagagtcatctttttggctcgatcataaagtctccgaagattttacccatcagtttaaatgaatggaaaaaagttaaattagaacccctatctagaaattggataaaaagctatatggaagaggttttacccaaaaatatgtatgccaactggcttcgccattttggtatgaatatgcttatggagaactcatgtggggcatcaaataatcttagttttcattttattcaagcgttatacgggcatgatcagcgtgaccaagaaatttttcatccacattcttccactgtaccgcatacatatttaactgaggtcatagagaaaatggaaaaagttatcgctgaacttcatatccagcatttggtgcggaaataa

SEQ ID NO: 55515 - DNA, 3183 bp, Acinetobacter baumannii
atgcatacaaatgataaagaacttattcaatcgaaattaaatgaatggtttaaaggcatcagaaaaaaattaaattctgaaaagaacctcacttctacacgaattagtgaagctcaggaaattgaacttgatcaattcatacagcgcaaatgggatgattttagagaaactttcaagtgtactattcataagttttcgagtattgaacgacgggaatatattggttatctagaagcagaatttaaaaaatgcgcagataagttaaatgctgaatattctgaattttatcaaattaagattcgcccaaaaactcaaattttaatacttccgccaagaaaattagaaagtactgaagcacgatctgaagctgcagaaatgcatgctcatgtttataaaatgctgcagtcttattggcaaagtaatttttggcaagaaatggataatgaaagtttatggggtaacttatatctcagtatgatttatctatcaggttgttcaaatcaagatgtacttcaaattttaccgaatacattcagggatgcgctatcgaataaatatttgcagagttttcgactgtataaatatgaaaatttaaaagataatcccatcattttacatttaaaagttaaaagtgactcctatggtaatgactttgaaaaagatcagctttataaatggactaacatctatcttaacccttgggctcaattctttttgcaaacactgttatcacgcagaaaaaagcattttcatatagaccaaaatacagatattgagcaatgtattttaaaaagtcttcatcatttgaaacaaacaaaatatgtgattaagttatgtatgctcctgagaaaaaaagggttaaatacatttcaacatgtacaaatggctctgcagtttgacagggaattaaatctagatatctttttaggcaatatacttgcccaaaacataaatactgtggcactcagaccacaagaacacatttttttaagtgcttctcatacgacaaatccttctattgaattaacagatattaaaatagagcaagaacagcttaaatccacacaagatgaacccatatcaattactaaaaagctgaagactattccttttaaaattcaattatttgagaataatcattccgcatcaacaaaagctaaaggggtgagtacgcaaagaaagaaaaataataatttttatgagcgatatactcggattcaacaagagttagagcaaaaaagtctgcaggcaagttcagaagagaataatctgattcaagctcaactacgcctgattgcatgggtatttcatcatagaaagaaggggttaaaaatctcgactataagtaaatatttaagctgttttggcaaagattttatatttgaggtatggttccgaaaaatcgatcttgagtgcttaagtgaagaagattattccgatctttatcaacaacttttatggaattgccgtaaacgtgatgaagcagaaaaaatgaaagatcaaaataaattatcgcgaaaggggcataacagtgaagcttatcgatttgggcgtttaaaagcatttcatgcattttgctgtgaaaaatttaaagcaccagaggtcaaactactcaaacaaaccaaatacagacatatgcaaatcacaaatgcacgaataatcagtccatctgtgtttaataacatgctttaccatttagattttttggtcaatatcaaccaaagttggtctaaacatattacccctctgaaattaatatatattttatcataccgattagggcttagattaaatgaagttcgttgtttaacgcttcaagatataatatgcccagaattaatatctttaaaatctcataaggatgagattaaaaatattacactgtgcattcaaaataatccgtatcgtcggctaaaaacccccaatgctcatcgacatttacccataaaatatttactcatgaaaaatgaatttgagatatttaaggaatttttaaagagtcgatatatacagtggaaaaataataaagaggatcacttattatttaactataaggatcaagtattaacagaattatgcattacccaagtcacttcgaatatactcagggcgatttatggagagaatcacgggtatagttttcattccctacgtcatagtgctgcgaatacattggcaattcttttaggaggatctcctcgccttattcacacttatacagattactcaatgcgacaagtaaaatatatacgtgaacttttttttggtcatggggcatatcgtcaacaagatatgattcaacaaaaatggaaagcccttgcagcttggatgggacatagcagtattgagcaaactgcttctaactattgccatgtattagaaataatcgccattgataggattgtaaatcataactatctgattaacaaaaatgttatttcagaatcattgagtatggactctaacaacgatgaatttcaccctataaacgatgtgattaatgctccagaatttgattggatgtgtacgagaagtactgtaaaacaagacaataaacgacaatcagctttaaaagttgaaaaaattaaattaaatccattagagagaatcatggcggtaaaagatggatatttggaggataaacaggccaaaatgtggttacaccgttgcaattttcttagtaaaaaatggtcaagtacgactagctttcacattgaatatcaaaattttatacacgatgaagatgaattttattttgaagagttttacgatcgagttaaaaaattaaaacttatagattccaaagatatcttagttgcgatggataatccaataccagaaaaattgagtgaagtcttaagtgtgatggtcgctgaagtaaaacaacgaaaaaattttctacattttcaaattcgacagcctaaacacagacatccagtcaatgatagtgataccaataatattgattctaagttaaaaaaattgaaagacttcatcagtggtatttctagcattctagaaaacacaatctcaattcatgtagaagatcttgcttcaaatccaattaagaaagaacaaattcaacgcattagctttataagaacagcggacaaaaagaatattacgcttgctgtgctctttcatttaatgattatggctgttcagatggactcactttggtag

SEQ ID NO: 55516 - DNA, 222 bp, Acinetobacter baumannii
atgattacttgtaagttatctagcctcatgggcgatagaaaaattttaaaattaagtgaagtggtgcatgcgacaggaatcaatcgtaatacgctgacaagtatgtattatgaccgtgctatacgtatcgaattgccagtcgctgataagttatgtaaatactttaactgtacgatgaatgatttgtttgagtttaaggaagaagttgaagaaaaagattaa

SEQ ID NO: 55517 - DNA, 534 bp, Acinetobacter baumannii
atgaaattattaaagatagcagtaatgacatatcttttattaaatagcataaatttatatgcagaaagtgcgaaagaatgtatgaagtattggagtaaacccgcagtacaagtgagtgtgctgccagacgtccaatgttctgatgtctgggatgatagttttagcctagaaaataaaaaactagtaaaacaaataggatttaatctaaaagataaaaattggatttctactggttcatgtagccatatccagtataaaactaaagactattatatttattgggctgatatgaaaaataataaaactgatcttattatgatttatagtcctaataattcatttgcttactcaagagcattagatcaaaaaaaaattaaagaaggattcaaaatagaggactctgtcgacgtaaatttgtcttgcggtaaaataggggaagatataaatattatatctgtcttaaatggatatttacataaggaaacatcgattaagaatatttctaaatataaaatttatgaaagatttaaatga

SEQ ID NO: 55518 - DNA, 339 bp, Acinetobacter baumannii
atgaaattaattacagcaatcattaaacctttcaagctagatgatgtacgtaatgaactctctgcgcttggaattcaggggatgactgtcagcgaggtcaaaggtgctggtcgacaaaaaggtcatacagaaatgtatcgtggtgcagaatataacatcgagtttctaccgaaagtgaaaattgaaattgctgtgctagaagatcagttagatgtggccattgaaaccatcagtaaagcagcgagcactggaaaaatcggagatggaaaaatctttatcactacgctcgaacaagttatacgtatccgtacaggtgaaactggaaatgaagcgatctaa

SEQ ID NO: 55519 - DNA, 1131 bp, Acinetobacter baumannii
atggcaaactcttggcgtatttctgctcttgcaacacatcaccgtcagctgggttccaaactagaagattggaatgggatgggtacagcctggacttatgacagtgatattactgatcattatatggcgatccgtactaaagcgggcctgatggatgtatctggtctgaaaaaagttcactatgtcggtccgcatgcagaaagcttgctggaatatgcaactacacgagatatatcaaaactgtatccaggtaaatcagtctatgccaccatgctgaatgagcagggcaagtttgtcgatgactgcgtgatttatcgcactggaccaaatgcatttatggtcgtgcatgggacgggaattggccatgaaatgctggtacgctcagcgcttggacgtcaggtcgcagtactgtttgatgatgatttacatgatctttctctgcaaggacctcttgccgtcgattttctggctgagtatatgccgggaattcgtgatctgccatatttccatcatattcagaccaaactgtttggtgctccggtcatgatttcccgtacgggttataccggtgaacgcggttatgagattttctgcaaggcggttgatgccccgatgatttgggaaactattctggagaaaggcgcttcgtatggcattattccttgttcatttaccacattagactggttgcgaaccgaaagttacttactattcttcccatatgataactccgaatatttcccatttgaaaatgacaactgtggcgatacactctgggagctcgggctagactttacggtttctcctactaaaggggaattccgtggctgctatgaacatcgtcgtctacagggcaaagaacgctttaaaatctttggtgtattgctagaaggtcatcaggcttcccagatgggagatacactttgggatggggacaaaagaattggggtgattacctgcggcatgtattcaccactttcaggaaaatcggttgcgattgcccgtgtcgatgttgattatgctgtacaaggaaaaacgatccaggtcaaaggaagtttggaagtggatgccatcacccacaccttaccatttgatgatccgcaaaagctaaaacgtacagcaaaaggctag

SEQ ID NO: 55520 - DNA, 1020 bp, Acinetobacter baumannii
atgaccatacaatttaatccgaatgaagacatgcatgaacagtttcgctattacaacagtcagcaggcaattcaacgttttccatttccttttcctgaagattcttacatgtattcggtgaatatcgagccagcaatctcgaagccggggactattttcgagcattggtttgatatagatgaacattatgttacggaaatgaatgaacgcggattaaccctggaacaggatccgaaacgctgcatcgttatgccgcatatgttgcaggccagctgggatttcctggcgatggttatggagcattactcaaaagactatcctgaatacttccaattagataaacagggtaatcattggcattggaccaatctgccattgaatattgatcagcagtttatttttggtgacacagcaaccttgccaatgcatccatttgaattcatcagtcgccaatttcagggagatgtggcgattttggatcaacgtgatggcgacctgtttatggatgctggcatgatcacgggacctgcagattggtcactgaatttcgatgccggcatgagctttaagcagtggcatgccccagtgccgcagctcgcacataatctaggggtttttgaccgtgcgctaaaatttttgctgaatattcaggtcgggcagccctatcgccgtctgaactggaccatgacggtcaacccacgtatggatacctcatctgaaacctatcatctttggggacatgaacgtggtctggttacagctgaaaatgccggtcatatgctacatctgcgtgtcgaattacagatgatgccacgcttggcaccgagcaatgcactgctatttagtattcggacctatctgatcagcctgaatgatctgtgtaccaatccagcttgggctcagcgactgcaccgtgtaatccgtgatttgccagagccgattgctgactataaaggcattagtgaataccgagagcctctcgtgcaatggctgagtcaatttgattcagacaaaaattaa

SEQ ID NO: 55521 - DNA, 945 bp, Acinetobacter baumannii
atgagttcaacagttgcagtgcgtgtcaaacagatcaagcagattacccccgtgatccgtgaattcagttttgaatcaactgagcaggaattgctgcctttctcttccggtagccatattgtcgtccagttgcctttggcagatcgggtgctgcgtaacgcctattccctgatgaatgatccttatgatcaatatgaatacaaaattgcagtacgtttgcaggaacagtctcgtggcggttccaaatatttgcatgaacgagttaaggttggagaccagctcaagatttctgctcctctgaatttattctcattacattctcaggcccagcatcatgtctttattgctggtggtattggaataactccatttatgtcacacatgcgctatatgctacatgctagagacagttttgaactgcattatgcttgccgcgatgggatcagtaatgcctatgaagaggacctgagatatctatttcaggaccaggttcatatttattcagaaaaaacccagcaacgcctggatattgaacaactgctgagtcaacagaatctgaatagccatgtctatatctgcgggccagatcggttgatccaggcagtgatcaccacagccaaaaaattaggctggtcaccgaaccgagtgcattgggaagcctttaattctcctacaccaggacaggcattcgagatttacttaagtaaatccaacaaaaagattcatgtgccaagtgatttcagcatgctggaagcactagaagcatgtgatatccagattccaaacctatgtcgtggcggtgtttgtggacagtgtgtcacaggctatagccaaggagaggtagagcatctcgatcattatctgagtgtacaagaacaacaacattcactcatgccatgtgtatctcgtgcccaagctgggcagtgtatccatctggatctatag

SEQ ID NO: 55522 - DNA, 531 bp, Acinetobacter baumannii
atgtcgactgccatgttcagtactccaaactatcaaaactatacggatataaaaacttcagcatctggttatctggttttgctcgagcagcaggatgatgaactgatccaccagctatcaggtctgattcctgttgattcacctatacaggtcattgtgcagaatcaaacggacgatgcggcacttgcagatttcctgaatgcagtgacacaagccctgcaggctaagaaagccgggattcatagtgtggtgattgggagtgaatcttttatctggatgactcatcaatgtttgcagacattcggttgcctgaaagaagaaatgaccctgattctgaatattaaggcaggacaaaaacgtaacgtctattgtgtacattgcggacaccagcaacagacagaagagcaagaattctgtacctgtgaacactgtcaggtacatctgtatatccggactcatttttcacagcgtttgggtgcgtatatgggcgtatgtgcgaatgcccatgatccgatgggggtggcatcatga

SEQ ID NO: 55523 - DNA, 1365 bp, Acinetobacter baumannii
atgacacgtgttgcaattataggggcaggaccaagcggaatggcacagctcagagccttccagtctgcccaagccagaggcgctgaaattcctgagatggtgtgtttcgaaaaacagtccgactggggcgggcagtggaattacacctggcatacaggtctagatgagcatggtgaaccggtacatagcagtatgtatcgctatctctggtcgaatggcccaaaagagtgtctggaatttgcagactatactttcgatgagcatttcggtcgtccaatcgggtcatatccgccacgtgaagtgttgtgggattatattaaagggcgtgtagagaaagccaatgttcgccaatatgtacgtttcaatactgcagttcgttttgtcagttttgatgagaccaccagactctttactgtgacggtacaagactatgaaaaggatcgtatttatacagaacaatttgattatgtcgtcgtagcttcagggcatttttctaccccaaaaattcctgaatttccaggatttgaacattttggtgggcgtattctgcatgcgcatgatttcagagatgccttagagtttaaagataaaaatgtcctgattgtgggcagcagctattcagcagaagacatcggctcacaatgctataaatatggtgccaaaaatattattagttgttaccgtactgccccaatgggctataaatggccagaaaactggtcagaacgtccacagttaacgcatgtcgatcagactcatgcctatttcaaagatggcagttcaacagctgtggatgccattattttatgtacaggttacttacatcatttcccatttctggaagaatccctgcgactgaaaaccaataatattctttatccattaaatttgtatcagggggttgtctgggaacaaaacccgcaactgttttacctgggcatgcaggatcaatggtattcattcaacatgtttgatgcccaagcctggtatgcaagagatgtcatgttaggtcggattcaattacccaatctggaggaaatgcaggcggatacgcaggtctggcatgaacaggaacaaacattggaagatgtccatgccatgtataaattccagggtgactatatcatgcgcctaattgagcagaccgattatcctacctttgatattgaaggcgtcagaaagacctttatggcatggaagcagcataagaaggaaaatattatgaccttccgtgaccatacctaccgttccttaatgaccggaaccatggcagcacctcatcatactacttggctgcaagcgttagatgactcattagaagcttatttgcaggagcttgcaccagtacagcaaaaagtaggctaa

SEQ ID NO: 55524 - DNA, 765 bp, Acinetobacter baumannii
atgatgctacaaaaacagaaagcgcagaaaattgatcagccagatgaatattggacacctgtttttgaccagttgaatgagccggtgattttttttgatgatcagctgaatattttacgctgtaacgcagcttggaaaaatttcagtcggaatacaactacgattttaaatcactatatttatccggaagacctatacgtatttatccggtcaatgcaatcgggattttcccaccctattcatatccgcctgattcaggatgcggagcatctggcatggtttgaagtcaaaatgcagaaaatccagatgatggattggcatgttccacgttatttttggtctatgatggcctgtgaacagaccgatctgatcaaggcccgtgatctgaaagatgcacggcaaaggatattgaaaggcatcctgacacgtatgcctatcatgctgtaccgttcgcgtaacaatcgtgactggaccatggaatatgtcagtgaaggttgcaagaagattaccggacatactgaagctgaactgatcaatagcccactgtatgggcagctcattcatcaggatgacagggaatatgtctggaacaatattcaggaggcattacagcggcatggctgtttccatattcgttatcgtctgaatgtggcagaaaaccagacccattgggtacaggaaattggtcagggagcttactctgaaagtggcatggttctgggtatcgatggcatcgtgtttcagacacaggcggaaatattctga

SEQ ID NO: 55525 - DNA, 693 bp, Acinetobacter baumannii
atgaacaggattcaggtaagtattgtcgatgatcatgccctgttcaggcgcggtgtggcagacatcatacgccattccgggcagtttgaattgctacaggaatattcctcaggtcagcactttttagatcactgcgagcagaactgtcccgatcttttattgctggatatccagatgcccgatatgtccgggattgaggtactgaagaaactgatggaatatccactgccgttaaaagtcatcatgctgactgcatgtgaggatgatcaggcagttttagatgccatacgttatggtgcacagggctttttggccaaagatactttgccagaagttattctggaaaacctacagcaggtctatgctggcaagacagttttacaggagcgcagtgtgcatattctggctcagcagttccggcaaatgccaatggatacggcaatgaccaggacatcggtgcagcagcctcatgctcatcttctgaatgaaatgacacagcgtgaacaggagactttaagactgattgctaaggggttgaataacaaattgatcgctcgcgaactcggaattagcgacggtacggtaaaagtctatgtcaaaaacctattgcgtaaactcaatgtacattcacgactggagctatcggtctgggtgcatcagaacctgaatagctcagaatttaatattgaatag

SEQ ID NO: 55526 - DNA, 1173 bp, Acinetobacter baumannii
atgagtgcagcaatgacagcaaatgagatggatgcattattagaacagaggcaaaacagtgcatcatggcaggtgacgcaattacagcaagaacttgcaatacaaaaatttgaaactcgttgcttacattttaaaaatcagctgagcagaattcgccatctgagcagtgagttgccacactgtcttgcatctttgaaagggcttcagcctttgaaaaatgcaccagaattcgccattgtgacttgttatccgttttcacaggaatgttttatttatcatgctgtggagactggtctgtcgtcccaaattcttcgtaagatccaacaggttttattgccattgtcatcaggaagcaatgatgaacaaaatttacagcatttgaagattgatcagcatatagcaaacttgctgttcactgggcaggactttctcgtatggcggatctatttagatgtccaagatctagagcagatcaatcatcctgttttcatgttgctagataggtgtatccgtgaaggctttcaggaaagggatcaacagcaccgatatatgcaggacatattacagcaggaacgtcgggctttttctgcagacctacatgacagtattgcgcaaatcctgggatatctcaggctaacgtctgcacagctttaccagcagtgcaagcagcctgcttatcaggagctcatcgagcaggtagaggacatttctaactatacccactatgcctaccagcaggtacgtgaactgattacggcatcgaggctggcccaggagctggattttatcaaggcgctaaaaaaagtgattcaggaatttgaacagcagtcgagtattgtctttgagctggatcaccgtgctcatcatatcaacatccagcctagacattcggtacaggtgctgtacatcattcgggaaagcctgagtaatatcgtgcgccactcgcatgcctcctatgcacgaatttatctgcatgttgaggagcaaaaattacaggtccgtatttctgataatgggcaagggattgatttacatagaaaacgcaaagacagttttggtctagacatcatgcaggaacgtgcggagcgtattggcgctattttaaagatttatccagaacagccacagggcacctgtgttgagctgacactgaatttaaaaggtggagaataa

SEQ ID NO: 55527 - DNA, 2340 bp, Acinetobacter baumannii
atggagcatttatcagtactccctgctgaaccattcagcgatgaaattattcatttacagccacctattcatatcctacaaatgcagatcgctgcacaaagactgaatcgttttcagctggatgaaaatgatgaaatggttctagaagctgcaaatggaagtgtcgagctcttggttttggatcaggatggacacccagctttggaaaagattgatattcttacgcctgccacctatctaatgaccagcgcacagcacaccttggcgcaacttcagcaggaaagccacaccgcccatgcattgcaaaagcagtttgatcagtaccagctctgtacacagcatttgcaacaagtctcttgcattgaaggttttgaaatactcaaaataaaagcaaagactgccgttcaggtctttgtgttgaataccggtccagatctagatatcaccagccctgcctgcctggatgaaatcaaagtcatcattcacaaagcccagtcagttgatgcctatttaccggaacctttggcaaaccctgtacaagagatccatgttccccgtgcctctgcacgaacctatcacgtcaaaaaagggcaatggatccagattattgacgtatcaggaaaacagtgctcggactttctggcttttgatcagcaggcgctggaacaagctcatgaaatcggtctcgatgccgttgccactagaactattctgggtcagagtacacctagacctggtttacattcacgcttttatggcagtgatatgcaaagcatggtcgaagtaatccaggataccgtgggccggcatgacatgtttctaactgcatgcagccccaagttttataatgacgctggatattttggtcatatttcctgtaccgataattttaatcaggtgttgaaaccttatggtatcgcagcacgtgatgcctggccggcgattaacttcttctataacacctttgttcaggattgcggcagcatcggcctagatgaaccttggtccagaccaggagattatgtgctgttacgcgccaatcgcgacctggtctgcgccagttctgcctgtccggatgaaattgatccatccaacggctgggttcctaccgatatccatgtccgtatctatgcagaaaccgaagaatttaaacgctcacaacattatcggatacatcctgaggagcagccaagaatgaccatgacatccggattttattcacgtatttccgccctgacctccaaaatcagtgagtacaaaggctactggattgccaatgaatatgatggctggggaagcgttgccgaatatctggcctgccgagaacgggtcgccatgctggacctcagcccgctacgtaaatttgatatttcaggtccagatgcagaagcttttttacaatatgtcctgacccgcaacgtacgcaaacttgccattggggaaatcgtgtattccgcttcctgtctggaaactggaggaatggtcgatgatggcaccctgtttaaaatgagcacacaaaatttccgttggatttgtggtgatgaatattcaggtacctggcttaaacagaaagccaaggaacagggctttcgggtcagtatccgcaatgcctctactcagattaataacctcgctgtacaaggtccaaaaagtcgggaattactggcaaaaatcatctggacaccagaacatcaaccagagattgaaaaactggcctggtttcactttactttgggtaagctcggcggtccaacgggtatcccactgatggtttcacgtactggttatacaggagagctgggctttgaggtctggtgtcatcccaatcatgccgaacagctctgggatactatctggcaggaaggccaacaataccaaatcgcacccatggggttcgatgctttagatatgttaaggattgaagcgggcctgatctttgctgaacatgaattcaatgcacagaccaatccatttgaggcaggcattgggtttactacccccttaaaaaccaaagaagatgattttattggcaaacaagccatacaaaaccagaacccagccagtcgccacaaactgatgggactgatactggaaggcaatgagcccgtccatcatggtgattctatctatgcaggcaggtatcctgttggtattgtcacgagcagtacgaactcaccgttattaaaaaaacaaatcgcgatgtgcagactggcaccagaatatgcccaggtcgataaagaagttcaggtcggtcaactagatggtcataaaaagcgtctgaatgccaaagtggtcagcctgcctttctatgatcccgagcgtagccgcgtacgctcctag

SEQ ID NO: 55528 - DNA, 912 bp, Acinetobacter baumannii
atggcgagcacgaaagagcttttagctcagaaattgaaacagaatacgcagaaacatcaacaagcacagaaagataatattaaggaattgaaggagtttcggcgtaatgttccaattgaagatatcagtaggagtccaaatcagcctcgcaaaacatttgacgaactagagctgaaagaactagctgattctattgaagaagtaggacttttacagccaattactgttcgtaaacttgataatttgaaatatgaactgattgctggtgaacgtcgtctacgtgcgcatcagttactcggtaaaacagttattgaagcgatcattattgatgctaataatgatgaagcttccttattgacgcttgctgagaatttaaaacgccaggatttgacggattatgaaatttttgttggtctgaatgcattagatgagaaattaaagaaaaacaaacaacgtttggctaagtctctcggtttaaatcgtgaagatatgtataaatacctatcttatgaaaaattacctgaagtgatattaaaagatttagatgctgagccaaatttactgggtcgtactgctgctactgcattcaaaaagttcctatcagatcatcttcagcagctttcagaagctgaaacagtactccttaaagcttgggaaaaagttaaagataaaaagcttgaacagactaaggcagcagcatatgcggaaaaattatttagtcagggttcagataagctcacgaccacctcagtcgttagaaatatagaatatgcaggtaaggttgctggaaatatcaagcttagtgataaacaactaaaagtctcactaaatatttcacaaattgatgaagcaagcttacagctgcttgagaacttcctgaaagagttagttcagaaaaatgaaaaagtgtag

SEQ ID NO: 55529 - DNA, 783 bp, Acinetobacter baumannii
atgacacgtatgtctgcaaaaattattgctgttgccaatcacaaaggtgggtgtggtaaaacaacaacagttgttcatttggcatcagaacttgcaaacttgggcaacaaagttctagttattgatttagatccacaagcaaatgcaagtttgcatattggagttcaacatcctagtgaaatggctgttacaacggccgaattactcgtgggtgatatttctttgctagctgatgccttacaagaagaaaccaattttgataatgtatcattaatttacggatccctgaatttgggaaaaaccgaagaccagcttaaagaagaagcaccacgtccctctgaagaactcgcaatcaaactaaaattactgaaagatctgtacgattttatacttattgattgtccacctagcctaaaattattgaccagtaatgctttagcatcatctacccatgtgatcattcccattgaatcaggatcacaatatggtctttatggggtaacagaccttctaaaccatcttgaaaaaattaagcgtattaacccagatctcaaactattaggggcattattgatcaaacatgatgaacgccaaaatgtttgcaaattgattcgtgatgaagctttgaagcaagttggaaaaattttagaaacaactattcctcaaagtaccaaagttaaccaggcagcaattttgcagcagtcacttttgaaagttgaaaaaggctcaaaagtgcgtaaggcatttgaaagtctggcatctgaaattgtggctaaagtataa

SEQ ID NO: 55530 - DNA, 1173 bp, Acinetobacter baumannii
atgacagaatcctatccattgcaagaagaatcgaactatatcccttactgtattggcaatattcgccataatggagtagttagtaccagtaaccgcttgatccgtccgattgagctatctgcgaatgaatacaaagctcttctgtatgcaatggctgtagctaattatggagaaaaaaatagcgtagaccgtgaaattactgaacagacctatatatatttgtacaaagatgatcttgctgatctattaggccttagtaaacgtaattcaattaatgtggcaattgaccggatttacaaagagctttcgtcaagagttgcacattttattattgaagaacctgctgacgatggtaaaagaaagaccaaaaaagtacattctgtagtgcctatcattcgagagttgcgatgggaagatgattcaaaaaatgccatacagattcgttttaccagtgaagttctaccatattttactcaacttgctggagggaatttcacaacctatcagctcaaacatctatttgcattagattctgtagcaagcatgagtttatatacttacttcatcaaaaatgaatttaagtacacgaatcaaaaaagttatgaaattccactacttttggaaaatcttaaggccctcattgatattaatgaaacaaagtatgatcgctgggtagatttcagacgttatgttctagataagattgtggcagaaattaatgaaaatactgatctacagttggaatatgaaacaattaagaaaggacgtcccatagtaggtgtaaatttcaaattacaacaccgtattgctgaaaagaatgttagtgatactctaacagttgagaaaatttatttagatgtagcatttgaagataacgctcttgtcaaagagctgggtgcaaaattcgatactaatgtgcgttcctggtatatttttagtaatgatgaaaaatacaatcagttcaagaagtggttcaaaaaagttggatgtttaactgattctcaagccaatattgtagttaacgatactttattccagatggattttgctgaaatcggaatgagcctgaatgatttcaaacgtaatatgaagcacaagttgaaaaataatcctgaatttgtacaaagtattcgtgatcgtttaaatgagattttcggtaaagaagtgatttag

SEQ ID NO: 55531 - DNA, 561 bp, Acinetobacter baumannii
gtgcatccaaatagtctattgccattgaaagcaaaaaagcactctaaaatacaccctgagctaaaactttataacctagaaatcaataaaagaagaattgggattgaaaatgtatttggtaggtggcttgatgccatgcattacaaaatcaaggaggaaggccgttatgtcaacaaagccgcttatagcgtacttagattaaataccgaaggccataaagaaccgctgggtctttacctgtcagaaagtgaaggtgataattattggctcagcgtactcatagatttgcagaaccgtggcatacaagacatcctgatgcctgcattgattggcttaaaggcttccctgaagcaattgctacgatatttccgcagacagaagtacagttgcattattcaccaaatccgcaatagcttgccttatgtggccagtaaggatcaaaaagcttttatgatagatctgcagcctgtttaccgagcagatatcaagcaggcagctaaaatggcgctagatgagctggaagccaaatgggaagataaatacaagaaagtcattcgttga

SEQ ID NO: 55532 - DNA, 1926 bp, Acinetobacter baumannii
atggcagcagactttatttcaggttgggcacaatctgaggactctttacgtcctttggctttcgagcattccgcacaggcattgatggtgattgatccgaaagagaaccgttttattgattttaatattgctgctgctcacctgctgcgttatgaacggcatgacttgttgaataaatcagttacttctatttttggtcattttacccagctgccctatttgattgcctttaccgaggaaacactaaataaaggtcaggcctggaataatgagatttatgcttttgaccgcaatggcgagaaaatccagctagatatgcattccatccatttaccgtatcaacagcatgattacatgatctggtcgctagaggatgtgaaagatctggagctgcgccaatttaataaaaatgccgacaaggccatacgtgcaggtctactggaatggcaagcattacaggaactttttattgattccgatacgggtaaacatttactgctgagtgccgtgggcgacgggatctatagtattaatcatcaggggttgtgtacctttattaacccggttggcgccaaaatgctgggactgaaacctgaagatgtcatcggcaagaatattcaccagattcaccatcatactcatgaagatggccgacattatcccgtagaagaatgtccaatttatgcagcggtccatgacggcgtggtgcatgaaggtattcaggaagtgttttggcgggtggatggcagctatttcccggttgaatttaccagtaccccggtgattcgtgatggcgagattattggcgcagtcgtggtcttccgtgacatttctgaacgcttaaataccgaggctaagcttacccaagcgctgaatgaactgcaaaacttgaaaagccgtctggaacagcaaaatgaatatctgcaggaagagatcctgcaagataatcaataccatgagattgtcgggaatagcagttcgatccgggaaattattgaaaagatcaaggtcgttgcgcaaaccgatgccaacgtgatgatctatggcgagtctggtacgggtaaggaattgattgcccgtgcgattcaccagtctagtcatcgcaagcagcagcctctaatccgggtgaactgtgccgcaattcctgctgaactgtttgaaagtgagttttttggtcatgccaaaggtgcttttaccggcgctgtccgagatcgtgccggacgttttgaattggcggatcaaggcactctctttctggatgaaatcggtgaaattccacttgagttgcaaagtaaactgcttcgtgtcttgcaggaaggtacctttgaacgggtcggtgaggaaaaaacgcgcaaagtaaatgtacggattattgctgcgaccaaccgtaatctcaaactggaggtcagacagaagcgcttccgggaagacctgtatttccgcctcaacgtatttccaattttttcgccggcactgcgtgagcgtaaagaagatatcccgctgctagtcagccactttagtaaactgatcagtgaaaaacgtaaagtgccctacctttcttttagccagaaacatatccaggaactgcagtgctataactggccaggtaatatccgcgaattacagaatgtgttggaacgtgccatgattactgcccggcatggggcggtgtctttccagtatttattggaacaggatggacagcccgttgcacatcaagaaaaacagcctaataccccattacaacaaaaccttaccgagattctaaccatcgaggatctgaaacagctggaaatagataacctgaaacgcgccgttgagcattgtgaagggaaaatatttggtgacgacggcgctgccaaattgattggaattaatccgacgaccttaatttcaagattaaaaaaatttgggattagctattag

SEQ ID NO: 55533 - DNA, 1008 bp, Acinetobacter baumannii
atgagtcgaatcgtaaaagctgcagccgtacagtgtagtccagtgctttatagccaagcaggcaccgtgaaaaaggtctgtgagctgattgctgagcttggacagcaaggtgtgcaatttgcagtttttcctgagactgtggtgccgtattacccttatttttcctttgtccagccaccgtttgcgatgggtaaagaacatctcaaactgctcaatgaatctgtggtggtgccttcagaagccacggacctcattggcgctgcatgtcgtgctgcgcaaatggtggtctccattggaattaatgaacgtgcaggtgggacaatttataacgcccagctgttatttgatacggatggcagcatcatccagcatcgtcgtaaaatcaccccgacttaccatgaacgtatggtgtggggacagggcgatggcagtggtttgcgtgccattgattccgccgtcggaagaattggttcattggcatgctgggaacactacaacccattggcgcgtttcgctttgatggcagatggtgaacaaattcatgctgcaatgtttcctggttctttagtcggacaggtttttgccgatcaaatctctgcaaccattcagcatcatgccctggaatccggttgttttgtagtgaatgccacagcatggctaacaccagaacagcaagaacaaatcatgcaggacaccggttgtgaaaagggtccgatttccggtggttgctttactgccattgtgtcgccagaaggcaaatttttaacggcaccgttaaccgaaggtgaaggttatgtgattgccgatctggactttagcctgatcgataaacgcaaacgcatgatggactctgtggggcattacagtcgccctgaattgctgagcctgctaatcgatcgtcgcaagacccagattttacatgaatatcaagaatctaatccatcaacaaaccaagaaaaactgagcaactttaccgcaccaacagaagagttgctaagtaaagcatag

SEQ ID NO: 55534 - DNA, 351 bp, Acinetobacter baumannii
atgtcagcagttgagttactcagtgacctgcaatgcaatggcctgaaatgggaaggtgaagtcggtttggcccgtaaaggtggtgccggcccaagcgaccataaagccctgagtctgaatggaaagaccatgatgattcccgtgctgaatcttgcctctcaggattctccttataccgcacagcaggacaaagaaacagataatgtcattgtcttcaaaaacaagatcccggttgctacgctaactgcaccgaaacgtccaaagttttatgacctgaaaaccgcagatggcattccttatgaacagattgccaccttgcatagtcatgacgtactggcgactacggtgtga

SEQ ID NO: 55535 - DNA, 546 bp, Acinetobacter baumannii
gtgattgcgtttccatcaggatcacgatcattagttaaaacattgccattaactggggtatcttcaacacctgtaatttcatccttaacggcgattggccatgcgtttttatcccctccaccgccacttcctgcagctgcaatgatgccaccaataacagcaccaccaccaataatccatggcagtaaagacccacctgccgcactagcaggtaataagacctcaagcccaggtattcccttaaaaccagaaacaccatcaaaccagtataagatacaaccatcttcttcaaaaaccagatcagaatcaactttgtcatatacgacaaagaagttttcgataaggacagtttcaccattatttaactttaaaatcaggttattgccatcacgtaaaaactctgctacatcattacgatgcattttggtatggacaattgatgcttctgttaaagtgatatgttgcgtgttgatagatactttatttaaagaatctttttctactacaataaaatttgtcatgttctgtgtggcctatattcgttga

SEQ ID NO: 55536 - DNA, 693 bp, Acinetobacter baumannii; identical to SEQ ID NO: 54353

SEQ ID NO: 55537 - DNA, 384 bp, Acinetobacter baumannii
atgtggaaaatatataaagaagaaagttctgatcttggatttgctattgggtgtctattttcagaagcaattaatttaaatgagtttaggcaatgggttgagctttgtattaacgatttaaatcaagatgaaataccactttatatgtttgatcttttagatttcgaagactcattagcgaagattcatttagttattggatttgtgccaagctctggactatcaaaaacagaaaaaatagcgttagaaggcatttcttatctaaggggaatagatatttttgaccctatgtctacgcaagaacaatccattgaatacctaaagaacaacccacatgtctcagagaaatttaagctcacttttccttttataaattttatttaa

SEQ ID NO: 55538 - DNA, 336 bp, Acinetobacter baumannii
atggtcaccagacatggcgctaagaaattcatcatctctgtattaccagaaatagaaaaacggctggaagctggttatacaattaaggaaatccacgctgatttacctgagctagcgaacaatatttcttacagttcagttttacgaaatttgagtaaaatgggaatcagtgaaaaaaagccacattcaaataaaatagaaaaatcagtgaaccttgatactgcttctagttctagccaaaaaataacgaatgctcaaagaaatcttgaaaagctacagaagcgacctgagaaatttaaatttgatcatggaacaaatgataaggaattaatctaa

SEQ ID NO: 55539 - DNA, 240 bp, Acinetobacter baumannii
atgagtgagcaacagatatatgagcgtattcgattggctatgaatgaagctcctagaaatagacaaacggcagagctacatttgcaaatgattaaatatgcagatgatttaaaaaatataacatctaaagagttctgtgaaggtgtcggactacctcttagttacggtactgaatttagtaaaatgagaaacattactgaacgcttaaaagcagcaggccttaaggtaaatatgatttaa

SEQ ID NO: 55540 - DNA, 1521 bp, Acinetobacter baumannii
atgagtcaagaccctaaaaaatgtcctgttacccacctgactactgaagctggtgcccctgtggtcgacaatcagaacagtatgacggcaggtgcgcgtggacctttacttgcccaggatttatggctaaatgaaaaactggccaattttgtccgtgaagtgattccagagcgtcgtatgcatgccaaaggttcaggtgcttttggtacctttaccgtgaccaatgatattacccaatatagccgcgctaaaattttctctgaagtcggcaaaaaaaccgaaatgtttgcgcgtttctcaacggtggcgggtgaacgtggtgcggccgatgcagaacgtgatattcgcggttttgccctgaaattctatactgaagaaggcaactgggatctagttggcaacaatactccggtatttttcctacgggatgcccgcaagttccctgacctgaataaagcagtcaaacgtgacccgaaaaccaacaagcgcagtgccaccaataactgggatttctggacattattgcctgaagccttgcatcaggtgaccattgtcatgtcggatcgcggtattcctgctggctaccgtcatatgcatggttttggcagccataccttcagttttatcaatgcccaaaatgaacgcttctgggtgaaattccatatgcgtacccagcaaggcatccagaacctgaccgatgctgaagcagcagacttgattgccaaagaccgtgaaagcagccagaccgacctgtttgatgccatcgaacgtggcgactatccaaaatggaaaatgtacgttcaagtcatgccagaactggaagccgaaacagtgccttatcatccatttgacctgaccaaagtctggccgaagggcgattatccactgattgaagtcggtgaatttgagctgaaccgcaatccggaaaactatttccaggatgtagaacaggcagcctttgcacctagtaatcttgtaccgggcatcagctactcaccggaccgtatgttacaggcacgtttagtgaactatgccgacgcagcgcgttaccgtgttggtgtaaatcattcacaggttccggtcaatgctgcacgctgccctgtaaactctaatcgtcgtgatggtcagggccgcatggatggcaactatggttcattgccacattatgaaccgaacagttttaaccagtggcaggaacaacctcagtttaaagaaccagcattaaagattaccggtgatgctgatttctgggacttccgtgaagatgacaatgattacttcagccagccacgtgccctgttcaatttgatgaatgatgagcagaaacaggccctgtttaataacacggccgcagcgatgggtgatgcgctagatttcatcaaataccgtcatatccgcaactgttatgcttgcgatccagcttatgggcaaggcgttgctaaggccttaggtatgactgtagcagatgctcaagcggcacgtgaaacagatcctgctaaaggtttgccaagttttctttaa

SEQ ID NO: 55541 - DNA, 330 bp, Acinetobacter baumannii
atgttggtgtctatgtcggataaagaacttaaacgattgtcggtcttgcaggaaatctgcgatcaacgcataactcaatcccaggctgctcagctacttcatatttcagaacgtcagatcagacgcttactgcagaaatacaaagcccaaggtccagctgcattagcccatgccggtcgtggccaaatcagcaattctaaacttcctgaagaactcaaactcaagtgcctcaatattgtttctgaccaactccatggtttcggacccactttagcgcatgaaaagctcaccatgaaccgtaccgggtttgtcggagacttttttatttaa

SEQ ID NO: 55542 - DNA, 864 bp, Acinetobacter baumannii
atgatgaaacaatatcactctgaaactgcgccaagccttctgcaagatcaatatggacgcatcaagcgtaagttacgaatttctgtaactgatcgctgtaattttaagtgtgtatattgcatgcctgagcatccagaatggttaaataaacaagatttgcttagttttgaagcgctcttccaattttgtcattttatggtgcagcaaggtatcgaaagtattcgcattacgggtggtgaaccattaatgcgtcaaggtattgttcatttcattcgagatctacagtctttaaaaagtttaggtttaaaacgtatatcgatgactaccaatggtcattaccttgctaaacatgccaagcagctaaaagacgctggattagatgatttaaacattagtttagatagtttagatcctgttcagtttaaagagttgaccaagaaaaaattggagcctgttttagaggggatacaagctgcaaaagaagtaggattaccttttaaaattaattgcgtgttaatgaaagatagaaatgatgatcaaatcttacctatggtgaaatggtcaattgctcatcatattcctttgcgttttatcgagtttatgccgcttgatggtgatgcactttggtcaaataaagatgtggtaagtgaggctgaaattttacaggtattgcaaccgtattattcggtacaagtcatcgagcagcaacatgagccagcgcgtcaatatctaattaacggtagctaccatttaggaattatttccacaattacgcattcattttgccaccaatgtgaccgtatacggcttaccgcaaaaggcgaactgaaccgtaccgggtttgtcggagacttttttatttaa

SEQ ID NO: 55543 - DNA, 150 bp, Acinetobacter baumannii
atgactccagaattacccggaacttatattaatttattagctgacatcgttaagcgcagaggtatctcttgtgagcagtttttagagggtagtggagtaacgccggaacaattaaaaaaccgtattggtatgttgagtttaataccttaa

SEQ ID NO: 55544 - DNA, 189 bp, Acinetobacter baumannii
atgaatattgacagacgtgtgcgtgcaaaagagtttatggcccttctttctataaaaaaggatgccttctatgaccgggtaaatagtggtgaaattcctcaaccaatccgcattaacaaaaaagatgttttctggtatgagtcagttgtaaaaaaagaagttgaaaagtttaaagataaactggattag

SEQ ID NO: 55545 - DNA, 744 bp, Acinetobacter baumannii
ttgactctccgacaaacccggtacggttcaattcaagattatcaaaagcaacctgaacagttaaatcaagggcagactcaaggaagtaaaaaatattatattggaacattggttgtttttgagcgtagcgatggcacttatgaaattatcgatggtcagcaacgatttaccactttaaccttgttagcgatttgcctgaaacgattatccaaagaagaaaaaattgttcttgatatgtcttggtttaatcaattcaatcttgattttgaaagtcgtccaaagtcttctttaacctttcaggctttacttagaggcgatcatctacaacatttaaaatcatccgaatataacgccgatttagttcaggggtttgagttgctacaacgagcaatggaaaaaatcattaatcaaggcggtttgagtgttttttgcaaatatttatttgaaaatgtagtcatcacacaagttttagttccgaaagatactgatctcaatcattattttgaggttatgaataaccgtggtgaacaattagaaaagcatgaaattttaaaagcgagattgatgagcgtattgaatcaaatcaaagatgaagcagataaaacatcaagcatgacactatttacgagtatttggaacgcgactgccaatatggagcgttacgttcaatatggtttttctacaatatatcgtgatgtgatttttggaaaggattggggtgattttgttcctgaaaatttttaa

SEQ ID NO: 55546 - DNA, 336 bp, Acinetobacter baumannii
atgagtgaaattaaaggtactttgcccaaagctttgaaaaagttagttggtcaaaccgatattaaaagtcgaaatattgtgatgcgccaaccaactgcaattgagtatcttgaagcccaagcaaaaattggaattggacaatttgttcatattgctgatttggcagcgatgactaaacttgttgatgatgaaggtaatgagcatgaaatcacttatgacatgcttggccattcatcgcgtgcaaatttgaaatatcttgaaggcttacgtgatgccttagatgcaaaggaagcagccgagagttccgagcaagagcaagaatcatcagaagactga

SEQ ID NO: 55547 - DNA, 378 bp, Acinetobacter baumannii
atgtctgaagatgcagttggtgcaatcgtcatgagctttaacgggctggattatgacgttgctcgttttacatcatcaattactacgggcaatcgcccagtcccaacaatgaaccgaaaacaacgggtgaagtataaatcaaaaggtatcacaacctaccagctaacagcttctgttgtaattccgaatggaaaggacacagttaattggttggcagttgaagatggtcgtctttctgttgaatcgcctgatggtaattaccgtgaaacctttattgattgtaacgtgcagtcaattagtaagtcatatgaagtaaatggtgaaaccatgcgtgacttggaaatgttctgcttagattatcttgatgaaacactatag

SEQ ID NO: 55548 - DNA, 612 bp, Acinetobacter baumannii
gtgattgatttaagtgttgttgaacaaggcatcaaagacgtcatggctaaacaagtcaatgacaaaaaatggacttgggttcgtgaaatcaaaacttatggcggtgagtttgatgatggcttgaccactattatcaaggcatttccagctatttgggtgacttttgagagttctggtacacccaagaagattgctcataacaaaacagaatttcctttgaaatttgttgttttagttggtgctcgttctgtacgtaatgaagaagcgcgtcgccacggtgctgcaagtgacattggtacatacaaaatgttagcccatgtgcaacagcttttgattggcaatgacttgtcttctgttggcgtaactggtctagccccactagaacttggtcgtgcaaaaactatcttcaacaccaaaacggccagccagtccatcagtgtcctatctcaagactttactacccaatacaccattactgcttcagatcgtgaccgtgaagaggctgatgaatctatcggtgaaatccaccgaatcaatgtcgattattgcttcaatccgggtgatgacgttactgacgcatctgatctggttgaactgaaggaaaataaataa

SEQ ID NO: 55549 - DNA, 411 bp, Acinetobacter baumannii
atgagcagtattttaactcaagaagaacgacaaactgagcgacgtgaagttggtttgattcacgtgccagttaaagctggtgcaacagtagtggctgggtttattgcggttgtagatgcaacaggtcatgcggtaactgcaacagctgcaacaggcctaacttatttgggtcgctatgaagacagtgttgataacacagaaggtggagatggtgatgtatacgttttagtacgtactcatgacgcattcctatttgccaacagtgctacagacccagtaactcaggcatcgtttggcaagccttgctatatcgaaaataaagaaacagttgccgaaacagatgctggtggaaccttatctgtagctggtcgtgtggttggtgttgatgaaaatggagtgtggatcgaatga

SEQ ID NO: 55550 - DNA, 747 bp, Acinetobacter baumannii
atgaccacaaagagtgttgttgcacaaaaaatgcaagaattaaagctaaatggttgtttagattgctttgttgatcattatgatgaaatgatcaatagtaacaaaacttcgttagaaattctaaatgagttattaatagcagagcaaaatgctgttagtaatcgcaaagttttggctctacttaacaagtctaatataagatatccatcaagcaacttgacaggaattgattgttctaacaaacaaggactgacaagcgatattttacaaagttttgctgattgtgagtggattagatcaaaacacaacttaatttttacaggtgcgacgggtattggtaagacttggttggcctcagcttttgggacaaatgcatgtaaattaggctttaaagtgcttttttataatactactgagctatttgaagagtttaatactgcggtacatttagggactatcaacaccttaaaaaagaaattgctttcaaataaattactaattcttgacgattttggattatcacagattagtaactcatggatgcctcattttattagtgtgatagacaaacacagtgacaatggctcacttcttatcacaagtcaatatgaaacaagcatatggctaaaccattttgaggatcaaacagtaggtgaagcattgttagatcgcattgtccatcgttcccatgtttttaatttaaagggtgagtccatgcgtaagaaaagaggtaaaaaagtcgagtaa

SEQ ID NO: 55551 - DNA, 1545 bp, Acinetobacter baumannii
atgaaaatacctgttgtaattcaacgaaaaatttttgagtttttaactcaaggcaatacgcatagacaaattgcaaaaagagtgaatgtatcaccaacaactgttggcgttattgcaaaaaaattaaatgaaatccaaatgcccgttgctgatgtattaaatgcctctaatcaagaatttatagacatcttacaaactggtgtcgttaagaatgttgagaagtgtaaacccgtaccagattttacatatatcaatgatcaaatgaagatcagagatatgacgctcaagcaattgtggcttgaatttaaagagacacaccctgactgtgtttcctattctcgctttgccgaattgtataagcactggttgaaaaagctacacccctctatgcgccaaaattttactgctgggcagacattgctagttgatttttgcggtaaaaccatgccactacatgatcttaaatcagacaaagtacgtcatgttcaaatttttgctggagtactaggcgcttcaagtttaatcactgctattgcatctgaaacccagcaaacacacgattggttaaaatgctttacagccacttttgaacgtatcggaggtgttccaagagaagttattacggataacttaaaggctgctgttataaaaactggtcgaaatggtacagtatttaataaaacatttgaacaatttgctgattatcataattttgcaatattgaatactcgcccacgaacacctcaagataaagggcttgcagaggtttccgttcaaattattcaacgatcagttttggtcaaattaagaaatagaaaatttttctcacttgatgaattacaaaaagctcttgatgttgaagttgataaaatcaatcgagccattacgaaacgttttcctgaaagtcgttgggatcgttttaatcgttttgagaaaaatgaattattatcactgcctgcgcacccatacccattttcaaaatggatatttcaacaaacggtctctgaattttatcaatttacagttgatgggaatatttattctgttccctatactctaattggtaagaagttggatattggcattacaagccgtgaagtacaatttttttatgaaaatgaaataattgcttcacacgatttactgatgggctatggtgaagcaagtattctagaagagcatatgccagctaaccacagactttataatactttaagcccagcgagcattaagcaatgggcaaaatctattggaaattatgtttatgagtttgttgaacaagttttaaacaagtccaaacatctcgctcgaaatattaaatccttgaataaactgagagattatattttagaaaataagcttgattctgtactcaatcaagcttgtgaatatgcattaaaatacaatctattagcagttacagacttattgtatgtgctaaaaaatcgaaaatatatccaacctttaaacaccacgcaaacgatcaatcgtcctacccatgcaaacctccgcggtgctaattatttcggaggtgatgctagatga

SEQ ID NO: 55552 - DNA, 153 bp, Acinetobacter baumannii
atgcaagcaactaaacaattaaatttaagattacctgaagagctagttttttggataaaaagaatggctaagaaaaaacatcaatcaatgaattcttatgtactcactgaacttgaacgaatgcagaaggagtctaaaaatgggctaaattag

SEQ ID NO: 55553 - DNA, 1014 bp, Acinetobacter baumannii
atgaaaaaaaaagatattcagtttaatcttcgaattccagaagatttaaagttaaaaattgatgaagccgctaagataaatcagaggtctatcaatgctgagacaatgtctcgcctatatgactcttttgttatggataataatattcatttagaagcagctaaggttatagaaaactttttgcaagctagaacacctacacaacgtaaaaaggatgtagctgaacgacttacttttctgtttaatcaaattaaaaaaagtaaatatttcgatcaacttacgattgcagaattagcatataaaattgatgaaaattcagcagatagtgctgaatcatggtttagagcagaaatggaaccaacttttaatcagttggagaggatcgctgacttcttatctgcgaattcaaattggttactttttggaaaagaaagaccattcaaagttgagagcttccgttttgatgagaatttagataaagatttgagatggttgttgacccctaatcctgaaaaagctttcttaaaaaatcagtcagtgcgagaagttaaatttcttcgcagtctcaatgcagaaggctcgctaattgtagctaaactatactctaatcattatgtggagtgtttccagactccttaccatattagtgatgtaactggtgtaggtgggtataattctctgctttatttatgtttactctttaaaactttaaaaaaatatcatggttcataccatcatcctaatatctacagttatttgatttctgaagaagtgacgaagaaaatatggtcggaagaaacacaccccttaccattgattgatcaactacatcaaattccatggatggatgatcttgctgataaatcacctaatcggtctttagatgaattatattggaaaggttttgatttacttagatcacggcttataaaggattttaatgaaaaagaatacattcaaaacattttgaaagattcggaatttcatattaagcatcctatgactttcgattaa

SEQ ID NO: 55554 - DNA, 2478 bp, Acinetobacter baumannii
atgaatatcgtccaaatcgaagaaaatattaaacagctcatccatagaatttctaaaggcgagctacatcaaaaagaatttatctatgaattgttgttggcttatggtttgcgtaagtattcaataaataaactgcgctcaggggatactaatttagcagaggataaagagaatactttattttggaagctgaaggtttattttaaaattgcaaaacagcatgatttgcatggtttgattgatcaaatgaagaatgaaaagcgaacggaaagcaataagattcgcttcttgatcgtaactgacttcaaaactctattggcagtagatactaaaacacaagatacattggatgttccttttggtgatttagctaaaaaatttgatttcttcttaccatgggctgggatggagaaagctgtatatcaaggtgaaaaccctgcggatgttaaggctgctgaaaaactagcaaagctatttgacgaaattaaagccgataatttcaatgaagacgacttaaacaataaagagaacttacatcaccttaatattttcttatctcgactgctattttgttactttgctgaagatacagagatttttaaggacaaacagtttacttcggcaatatccaagagtaatgaagatggatcagacttatcggctttaataggacgtttgtttaaagtattaaaccaatcatctgaagatcgtgaagcagatttacctgattacctagcagattttccgtatgtaaatggcggtttgtttaaagatgatattcaagtcccaaaattcacacgtaaatcacgtaggattttgattgagtgtggtgcagagttagattggtctgatattaatcccgatatttttggttcaatgttccaagcagttgttcatacagaacagcgtagtaccatgggtcaacactacacctctgttccaaacatcatgaaggtgattgaacctttatttttgaatgatctatatgaagaattagagaaaaaccaagacagtgttaataagttattgaaattacagcaacgtttggggcagcttaaaatttttgatcctgcttgtggctcaggtaacttccttattattgcgtataaagagcttcgcaagtttgaaatggagcttctgaaacgtattcaagagttagaactagaaaaaacggggcaatttttaaaaccattttcagtgattcaggttgctcaattttgtggtattgaattagatagttttgctcatgaagtagcaattttatccttatggttaacagaacaccaaatgaacctagtttttaaagatgagtttggagagctattaccatcattgccacttaaaaaaagtggaaatattgttttaggaaatgcaactagagttgattggaatgacatgtgttccaatcaggacgaagaaatttatattttaggtaatcctccttatcgaggtgctagacagcaagatatatcccaaaaatcagatattgaagcaacacttaaacacttagatggttataaaaatttagattatatttccatttggttttataaagcggcagagattattaagaaatataaaaatgtctctgctgctttcgtatcaacaaactctataacgcaaggcacacaagtaaatcttctatggccacatatcttagataataatatttatataagtttttgccatacttcatttaaatggactaataatgcaagatttaatgcaggtgtcatttgtgttgttataggcttaaaaaatactagtaatttatccaatcagtatatatacgattcatcaaatggtagcaaaagaaatgttagttctattaccccatatttaacagaaggtgattttatctttatcgagcagagaaaaaatccactctctctgatattaccacctattaattatggaagctttgcactggatgatgggaatttaactttaaactctatagaagccgatgaattaacttctatataccctgatgctgcaccccttattaaaaaatttattggtgctaaagaattattgcaaggtcaaaaaagatactgtttatggcttgagtcgatggatcaagctcaagaatttcctttaatttatgatcgtattaataaagtgaaaaaatggagattagcaagtgatagaaaatctacggtaaatatagctaatactccatataaattcgcagaaattcgtcaaccgtctacgtcttatttagcatttcctacgatttcttctgaaagtcgtgaatatattccgtctcaatattttgaggcagatacaatagcttctaatcaaatttatattatccctgaagctccactttggctatttgcagtgttaagttcagctatgcacatggtatgggtaagaagtattggaggtaggcttggcgaattcaaacatgaggtgcgacagtttgaaaagtcttatgataatcaacaagctgagcaaatttctctaatggtgtaa

SEQ ID NO: 55555 - DNA, 909 bp, Acinetobacter baumannii
atgatcgttaatggcgcgaatttaaatgcaattttcttaaacttgagtaaggcttttaacctgacttttaatgatactcaagttgaataccctgatattgctatggttatcccaagcaatggtgcatatcaggactatcgttggttgtcgaattttccacaaatgaaagaatgggttggcaaaaaaaatattgccaaactttcagaatatgattacgtaattcgcaataaaaattatgaagcaacgattgaggtgcttcgtgacaatattgaagatgatcaacttggtatttataaaccgcaagctgaatcagctgcttggtctgcaaaacagcatcctgatgaaattgtatttgaagctgctaatgctgtatttactgccaagtgttatgacggtcaaccaatggtttctaataatcataaagttggtaaaactactgtcagcaataaaggcaccaagaaactttcaatcgcatcacaggaggctgctcgagcttctttcggtgctgcgcgcacagcaatgcgaaaatttaaagatgaagaaggccgtcctttaaatatcacaccaaaccttttgcttgtgcctcctgcgcttgaagacattgctaatgctttgatgacaaatgctcaattagaagatggtaaaccaaacccttataaaggcactgctaaggttaaggtttcaactcgtctaacagatgacaatgcatggttccttcttgatacaaccaaacctgttaagcctttcgtgtaccagcaacgtaagaagccagtttttgtacagatgactagtatggattcaccaaacgtatttatggaaggtgttttctattttggtgtcgaagcgcgtggtgcgggtggttatggtttctggcaaaccatttacggctctactggtacggaggcgtaa

SEQ ID NO: 55556 - DNA, 435 bp, Acinetobacter baumannii
atgagctatgcaacggcagctgcgatgattgcgaagtttggtgagcgtgaacttattcagctcactgataatgaagaatctgaatattcagatgctattaactacgacaagttaaatgcagcactgcaagaagctaactcggaaattgatggttatctaatgggtcgctataagctgccgttgcaaactgtccctccattccttgaaagccttgcttgccatattgcacgctatcatgcatgcactggtgcaatgactgacgatgacccgatccgcacacgctatgtcgatgccatcaacaaattgaaagatatttctaaaggtattgttggtgttggtggtacgccagctggtgaatctgagcctgttaaaacttcctctaacaatgtgatgttccaagttggacgtcatgattttggaggtaaaggctggtga

SEQ ID NO: 55557 - DNA, 429 bp, Acinetobacter baumannii
atgacaagtccaatttttttaagagatcttccgtatgaaaaattacaagaactttcagaaaatgatattcaacagattctaaaagcagaaaatttatattggaaaaataaaccctttacgaaatattatatagtagtaaatggtgctaaaacaaaaaatggtggactcattcgggcatcgggatattctccaaaatttaaaggtatttccatagcattagttggtgatgaagcaatttatgcagatggaacaacagcaaaaattattacaggggctggtgaagctttaactataagagatcatccagtagctttgattggttcacatttagataataatgatgaaattatagatagtcctaataagtcagtttatatatgtatatatcatgatcaaccaaaacctttaggttttttaagtaatatataa

SEQ ID NO: 55558 - DNA, 525 bp, Acinetobacter baumannii
atgtcgaaaggttttgcaatccataatgcgattactgatcacggtggaatggttccttcaactcaaatgaaaagttcccaaatgggtaatttatttgtacgtgctggggatggacatgtttgtcctaaatgtagatgttggtctactgttattaaaagtcatgatcatgtgatttttgatggaaaacctgttgcttatgtaggtgataaactgtcgtgtggggctacacttttacctcaacaaagtcatgttgttggtgagagtggtagtccttattctcagaaaacaaatcatgcctcagccactccagaaaagtttgatgagcaacttaaaattgtttttgaggagggtatgaatgatatatttaaatacattgattgtcgggttaaagtagggggaaaatttcaagatggtaagcttgatttaaatggcaacaccaagcggttttatacagagaaacaagaacctattactgagatagagtttgtccttaaagataatatagtttattttcatgatttataa

SEQ ID NO: 55559 - DNA, 657 bp, Acinetobacter baumannii
atgacttggtctgaaacccccaaaagtcttctaaatatttttacaaataaaaaagaaggtagtattaaagaagtaaagattgaaactccatctagaccgctaacgaatggtgaaattaaactagcaacatctgtctttaaaaattcaataaattacacaacagtaaagatattttttggaagttttttcccgcttaaatctcagaatgaagatacattcgtcactccgaatggcagtatatatataatgcctaaacattatagagatgattatagtttggaggatatttcttataagaaaatttttcttcatgagcttggtcacgtttggcaacatcaacgtaaacttattgttctagccaatgctggagcattgcaggcttgttctgttcttagtaattttaaatatgatccttatatatacaatatatgggaaagcccaactgttgctgagtttgttaaatataaaaatacgactaaaagatttttagactataatttagaatcacaggctgaaattttggctgactattggttgttaaaaaataattatgatgtgagttatatgcttgaaagaaatagaaagaatgttgtgggtaagagtagggataaagttcttgctatgtatgaacaaaaaattcgtcaagtaataaaataa

SEQ ID NO: 55560 - DNA, 342 bp, Acinetobacter baumannii
atgagtaatcgtaaattcactttcgaatgcgacttagacggaaatagtaatactcagagctttaatacgttatcaagcaaatttggtgatggatatgaacaaaacattgctgtaggtatcaataaccgatctggtgaatggacttatcaaagaacagcttataaagccgaaattatgcaaatcaaagcattctttgatcagcacaagggcgcggactcatttctgtgggattcgccgttagatggtgaggtccgagtaaaaacaggtgaatatcaaccccgttgtttaggtggtgatgtctggcaaatctctacgacatttacccaagttttttacccttaa

SEQ ID NO: 55561 - DNA, 1176 bp, Acinetobacter baumannii
atgacgattcaaacagtaaatctaggtacggcaccgactggcgcaggcggtgatactttccgctctactggcgcaaaaatgaatgaaaactttacgaataacacccatgcagctagtcgatatgtaggtactgctgctgggaatgtgatggaagttggtgcgtatggtttgggcggtaattcaataatgtatactggcggttcaaatggatttggaagtttccatacaggtaagtcagctttttattttaataatacccaaggtgtagatattaatggaaagattgttccaaattatgcatcttatgtagtttcaagtcttaacgatggtggtttttttgctattggtgggtcaactacagataaacgaatttttgctgtccatggacttgaaagtgatgcttatccgttgcaattagttgacttatggcatacaggtatcacaactattgatgcaaacggctttattaaagctgcttcaccgatcgtaaaactatttgcagataaaattgaactcaatgatgaagctgctgaacagccactttcttttgaaaaaccagacattggtcattaccttgttaaaggatcatctggttttgctaaagaaggctggtggatagaaattccaactgacactcacggtaataagatttgtgcagttgaatatcaaactttagaaaacggtgatcttgaaattaagacattcaagaaaaagctaaatgatgaaggtgatattgttgccaatcttgatgcaccaatcgatattccaaacaatgcaaatggtgagccgcgctggatcgatattcgtttaaatacggttaagaaaacgattgttagaaaggtgccacgcactgaaaagcagccacgtatggttcagcaagtaaagtatgctccgcaattgacctatatcactaaatacgaagatctatttgatgatgctggtaatccagtcgttgttggcggtaaaaattaccaaaaaccagtgacccatattcaaactgatcaaaacggcaccccgatcttaacgaatcaacctgtaattaatgaaaatggtgagccagtttttgaatgggttcaagcagttgatagtgaaggaaatcctgtttttgatgatgtgccagtcttagacaaagatggaaatccaatctatgacgaggtgacttatgaccctgaatag

SEQ ID NO: 55562 - DNA, 666 bp, Acinetobacter baumannii
atgttaaaaacaattaagttgtacggcattctagggcaaaagttcggtcgtgaatttaagctcgatgtcgcaaatacacgtgaagccatgcgggcattatctgtccagattactggctttgagcattttatgttgcatgctcatgagcaaggcctacgctttgccgtatttttaaaaagtaagaactcaagtaataagcgaggcaagaaacgcccagcaatttacgatcatgaaactaagcgcctaatcactggtgacaatatcggtgaagaacagcttgatatgaatactgaagctgaggttattcatattgttccacgtgtagttggtgcaggcggtaatggaatattacagactgtattgggtgctgttatggtcgtcgtaggcgttttgatgacggtaggtacattgggtgggggagcgccattaggtgctgcattgattggttcaggtattggaatgatgcttggtggggtggccatgatgcttatgccaaaggttgatactactcaagatcaaaaccaagatggaaacagagcgaataaaggctttggcggtgcagttaccacagttgcacaaggtaatcctgttccaattctttatggtcaacgggaaatcggcggcttcattgtgagcgcaggtcaatatcctgaagatcagatgtaa

SEQ ID NO: 55563 - DNA, 3951 bp, Acinetobacter baumannii
atgaatgcagtagtaggcgcaaaaaaaggcagtaaaaaacaacggcaacctgtcatttcaccagattctgctcaatcgaaaacttttattaaaatcctttatggattatctgaaggggaaattgaaggtttagcaaatggatttcagtcaattttcttagaagaaactccacttcagaacgcagatggaagccttaactttgaaaatgtaaaagttgattttagaaatggtaccaatgatcaggaatacattgagggttttccagcagtcgaaagtgaaactgccatcgatgttgaattaaagtcggaaacaccttgggtccgtgcttttagcaatcttgatctcgatgctgtacgtttacgcttgaaatggggaccattacgcagccaaaatgccaccaatggtgatgtgtccggtattacaatcgaatacgcaatagatttacaggctgatggaggtgtctggactgaagtactaaaaaccaagatttcagataagacttctgcaaattacgagcgagcacaccgcattgatttgcctcgagctgactcaggttggctcatacgtgttcgcagacttacaccgaactcaacgtcagagtatgtcagtgacaagatgtatattgaagcagtgactgaagtcattgatgcaaaattacgttacccaaatacggctttgcttggtcttcaatatgatgccgagacttttggaaacgttgctaaagttgctgcagatacaaagggaagaattctaaaggttcctactaactacaatccagctacacgacaatatgttgggatgtgggacggtactttcaaagaagcctattcaaacaaccctgcatggatttactatgatctttgcacatctaagcgctacggaattggtgagcgaattacagatggaatgcttgataaatggtctttatatcgtttagctcaatattgtgatgagctggtaccagatggcttgggtggagaagaaccacgctttacttgtaacgtttatcttcagagcgcagaaggtgcctttgaaattttaactaagttagctggtgtattccgtgctatcacattttgggatggtaatagcattatttgtgatgcggatattccccaagatacttacttcacgtatacccgggctaatgttattgatggcaattttgagtacgcgggaacccgtgctcgagatagacataatgttgtaaaaattgcatgggataacccagctaatcactacaaaaccgaatatgagtttgttcgcgatgaaaaggcgattgctgaggccggccaagttcgtattttggaaattgatgcttggggatgcacttcgcgtggacaagcgcagagagcaggctggtgggcattaaagtctgagcaacttgaaacacgtacagtgtctttcaaggttggtctggacggttatataccattgccggggaaagtgattgaagttgctgatcctttatttgccggtcgtgcaaatggtggtcgtgtatcagctatttcagcagatcgtaaaagtattacgcttgaccgtgatgatgtggtcgcagttgccggtgacaggctgattattaatggcgaggatggcaaagctcaaactcgaattattcaatcgatctcgggtcgagttgttactgttactcatgagtttgatgctattgccacacaaaatgtatgggttatagatgctcaagatttagcaacaatgaagtttcgagtgatctcgattactcaagacgaaagtcatcaattttcagttactgcacttcaatataatccagccaagttcgatgccattgacaagggtgcttattttgatgaggttccgatttcgattgtgaatccaacaattcaggatcctgtaactaatgtcgttgttactagtgaaagccgagttgatcagggcatcaatctagcgacaatgattgtatcttgggcgcaggctaagggcgcggttaaatatcaagttgagtggcgcaaggatgacggcagctggattaagcttccagtaaccggcaataactcagtcgaagtaccaggtatttatgcgggtcaatatcaagcacgagtaacagcgatttcagcatttgagattgcttctttaccagtttattcaattttgactgaactttctggaaagcaaggtttaccgccaaaattggcattcatccaagcaacaggtattttgtttggtatgcgcctaaattggggttttcctgcaactggtgcacttgatacggcttataccgagattcaagtttcaccggatggtaccagcaacattgctcaattgggtttatttgcttatccaacgacaacacatactttgcaaggtttacagccaaatttaactcaattctatcgtggtcgcttgatcgacaggattggaaatattgggccatggtcggactggactcatgcgacaacttctgccgatgcaacagatgttcttgagctcttgaacgatcaaatcagtgaaacacaacttagtcaggatcttaaaaccaagattgatcatattgagactattgatgctgaaattggaccaattaagcaagatattcaaaatacgaaagatcaaattgcacaagaagtcattgatcgtcaaaacgctattcagcaagcttcagatggcctttcacagcaaattattgatggtgatgaaagtgttcttgaagttgtggaaacggtcaagaaatcaagtgatgatggtcttgcggcggttcaggaagatattcgtgttgttgcagatgatctttcattagttgctgaaaaaacagatggtgtgtatgcacaactgaatcctgcattgattggctctgaatcagatctaattggtaacgatcaaggttttgctggcacatggtctgttcaatcggcaatgatcgaaggggatttagcacttagtaagcgtattgatacaacggcagttgagttaaataacttacaggcttatgcacaacgagaagtacaagcgcgaattgaaggcgataaagtaactgttcaaaagattgatacgtatatcgcaagcaatgatagtgctcttgcaactgtacgccagtcggcacaggtagcagttgagcaggcatcggcaaatgccgaagcgattgattccattaatcttgagcttgacgataaagcttcaactggtgcacttgagcaagttaagtctgatattaagaatgtagatgacaaagttattgcccaaactacaaggattgatggagtttacgcgcaaatcaatcctccgttgatcgggtcagaatctgacttaatcggaaatgaaggaggttatgcaggcgtatggaccgagcaatctgctcgtatcgaaggtgatttggctcaagctaaacttactgaacagctttctgctcagatgaatgagaacaatgccgtattcaagcgccagctcgaggcaaattcaagtgctatttcttcaacgataaaagtaacggaaacgttgcaaactaaagtcggtgagaatagtgcgtctattcaaaatgtcagtgaaagtgtggatggcatctatgctcagcagtttactaagttcgatgtaaatggccatgtttctggtcatggatcaatgaatgatggtacgacttcaactttcatattcaattatgatgcaattcagtttggtacgcctgtcggtgttgatggtgtagaacctaaaccattaatgaccctgcaaaacactccggttactttgccaaacggtactgttattccgcgtggattgtatgtcgataatggtagttttggatacatcaatgcgaatcgaatttgggctgaaaacttaagcgttatcacagcaaacttgggtacttttatctcacttgcagatgaaaacaaacctaacggtgcacgaactgttattagcggcaaaaagattgaagtctatgacgacttgaatcaagtccgggtaaaactcggtattttctaa

SEQ ID NO: 55564 - DNA, 360 bp, Acinetobacter baumannii
gtggatgctcagttcttggcttctattgatggagcccaattaataccatttaagcaatcattgccaatttctcatatggttggggaggtaataaatccagcagatattaattcttatcaagatagagcttcatggcaatttaccattcctgatggcctgataaagcctattctgattggtgaaattaaaggatgccgatgtgcttttgagcaaatttctacttcacctaatacttggagatttcaagctatgggcttgtggattcgacataaacgggattcatatttagatcaaaagcagtggaaagaacccatgattccagcaggttttaaaattcgatatggtggatatcgtggttag

SEQ ID NO: 55565 - DNA, 852 bp, Acinetobacter baumannii
atggtggatatcgtggttagttattttgaacttaaaaacgataacttcaatgttgttattgatgatacatacaactcagctaagttcttgggaaagtatgatgtaactttaaatacttttattgatcgtaataaaagttcttattatgttgaaggatctgattatacatggtcgggtaccgtaactgccgcaacaggtaatactttaagagagctaggttttgattatgatgaaccaagtgatgccgactatgaaaaattcttagctagtttaaatagtcaaattctttcttttgctcggacgctttcagggcgtccaatacgatcaaattcaatattaactaaaattaatggtatatggaattttaactttaatctctttggttatcagcaaggagatgtaggaacagtagtaagttataccattgcaaaaatgatgccgagtaaattcggacttcaggtttttaatgctgaaggtaccttagtatttgatgctcttaaagggtatttgcaattggcaggtattatgacaggtggcgtcaatacttataccaaccctgcggcaacctataccattacattgtctgaagaattatctagcgaacatctatttatatcagatacgatgtcatacccatggcgtaatggcatgagaattacatcaagtggtgtgcagtatggtgaagcaaacttttatccagttatgtcattcccgaacttaacaactattaaagtaaaattgatgcaaaacggaaatattccgggaaccacaggttcaagaagctttaactatttttatgaggcagtgatttattgctcatatcccaaaaatttctatacaggtaaacagtaa

SEQ ID NO: 55566 - DNA, 276 bp, Acinetobacter baumannii
atgtctgaaacgcagtctgcacttgaagctagtgcagcaacattaacatcaaaagtaacagcaaccagcggtgtggggtcatttatcggatttgcagcaaagatcgatgttattgcgtggggtggtttatttattgcggcacttggtttggttattcaaatttattttgcaattgcccgtaatcgccgtgaaaaggtggagcacgaaatgcgaaaggctgaatacaagttgcgtataaaaaacttaaaaggtgactgtgatgtcaaacaagactaa

SEQ ID NO: 55567 - DNA, 1512 bp, Acinetobacter baumannii
  misc_feature (1460)..(1507): n is a, c, g, or t
atgaacaacgttagctataaccgtaattttaaaactgggaatgatcaaagaattaatcaccgttcttttgtattaaatggtgttgcatctgcacaaatggcccttcgattaggctatgcattaggcaccgtatttgttctatgtgcatcaaatacctatgctgctgttattgataattcagcaaaaactctagaacaacaaactgctcaaacaaatgtagcagctttaccagcaattaccgtaaaagctgaacaagatgatacttatgcgggaggacaggtttcgtcgaaaagctcagttggctttttaggtaataaaaccgctatggaaaccccgtttaataccattgcgtatacagaaaaatatattgcagatcagcaagcgaaagatatcaccgatgtgattgcaaaaacggatccatctattttttcaactggcgcttacggcgtaattgcagaaagttatgctattcgtggatttagatcaagttctgtggctgctggccgcgatacttctatgggcggattatatggtattgctcctttataccgcgcttcaccggaaatgtttgaacgtattgacgtgttaaaaggcccttcagcaatgttaaatggaatgcctccaggttcaactttagggggaacagttaacttggttccgaaacgtgcaggagatgatcccttaactcggtttacaacgacgtatatgtcagattcacaattcggaggccatctggatattgggcgccgttttggtgaaaacaaagagtttggtgtgcggttcaatagtgtatatcgagatggtgaaggaccgattaaagagcaagaaaaaaccactcatctattttcacttggtttagattggagaggcgacaatgcacgactttcagccgatttatatactagccgtgaccatgctgacggtataaatcgtggtttaaccattttaccgggtgtcaatttacccaaagcgccaaatccagatactttattgaacccgacgtggacggtctataacacgcgtgatacgggaggtatgatccgaggcgagtatgacttaaatgataagtggatggcgtatgcaacggcaggtatgagtaaaacagaatataacactttaggtgctgctaaaactgaaatacaaaacgaagcgggagatataaagtttaatattgcacatttaggtttcaaatatgaacgtaaatctgctgaagtgggtttacgtggtaaatttgatacaggtgctgtcaaacatgcactggcattaaatgcaacacattaccgcgaaacggatgacgaagctggtattagacaaggatttcctgagggagatcgtgtaactaatatttataatccgaattggggcagtaaaccgaatcgcgttcctattgcccctatttttagtaataaagaaaatttaacaagtgttggattagccgatacgatgtcggttcttcaagnnnnnnnnnnnnnnnnnnnnnnnnnnnnnnnnnnnnnnnnnnnnnnnnattaa

SEQ ID NO: 55568 - DNA, 417 bp, Acinetobacter baumannii
gtgaagcaagtacaagccataacggccaatcgcccagaaagagcgttagtcgttcttcataacaatggggcatttagtaattttggtattcagtcacgctatggctttatttttaatgcctttggggtaaagcctgcaagtggtgtggtggatacaagtctacatgggcaacctatttcgagtgaattcatcaaaaaagctgaccccgatattctttatatcgtggaccgaactgctgtgatggaacatcgctcaaacattaatgctgccagtgttgaaaatccattattacgtcaaaccaaagcatggaaaaacggtcgtgtcatttttgtcgatgccgatgcgtggtacaccacggctgcaagcccaacctcactcaaaatagtgatggaagatgtgaaaaaaggctatcaataa

SEQ ID NO: 55569 - DNA, 315 bp, Acinetobacter baumannii; identical to SEQ ID NO: 54445

SEQ ID NO: 55570 - DNA, 192 bp, Acinetobacter baumannii
atgcaagtcatgatcatggtttcggaagcgggcaggatggagaatacttgcaatctacccgctgatttagataagaacgggaatgttcttaaaatctatgactactcattaaaagagttgccgattaatttggatggcactgtgacttacaatggtaaaagatggacctttgataagaagcaaaacttttag

SEQ ID NO: 55571 - DNA, 690 bp, Acinetobacter baumannii
atgcaagaccaagctttgccatcattccctcaagatttaaatgaggatcaaagtattacacgtccaccaatttcacactcaggtattcatcattttaaatttcacggtaatgcctcagaatattttggaatttggatcgttaatattcttttaactattattactttaagcttatatgcgccttgggctaaagttcgtcgtttacgttatttctatggaaatacagagttttttgaacgtcgttttgattttactggtattccaaccaagattttgattgggcgtttaattgcattaggaatttacgtagcattttcaatttcatcacagtattcaatgattgcaactgtagttggaatagttgtgttatatatggctgtgccttggctaattcgcgctactttacgttttactgcaagaaatagtaagtatggtaacgcacgcttttattttggtggcactataaaagaatcttataaaattttccttttaagtatattggtatatatctttacattaggaatttttacgcctgtagctatttggctatataaaaaatattatcttaatcacctatatgctggacaattaaattttaaattaaacgcgaactggactgcatatatggctgcagtttatgtacccatttttattgctcttggcatcattgctgggcgaattcaaacatga

SEQ ID NO: 55572 - DNA, 360 bp, Acinetobacter baumannii
atgaaattcacaaaattagtagtaagcaaaaaagaaatcttcaaaatcgctcacgaagtaacacgcgatacagttagaaaaggcgacagttactctgctacattcagcgctgtactcaaagaaatttatgctgctgtaaacatgaatagtgaatatgctgctaaatcaataaagtcacgtttaaacgcattcttctcaaatgctactggcccagcattattcacaggctcagaggtggttgttaagttagaagatgcaacaacaatcaatgtattaagtagcgatcaagtaaacgcaacttttgcgaaattttctctatcagtaattggttctatttgggattacatgccatttaattaa

SEQ ID NO: 55573 - DNA, 432 bp, Acinetobacter baumannii
atgaaaattcatgaatttggtttagctctttttggagagcactattcggctaatcagtttgcaaaaatcctaatcaataaagatggttcaaatgttgatagaaagacgattcagaactggattaatagagatcaggaattaggtgactgggttgtagaacaactaaaaaccgaacttgtaaagcgggaagatattctcaacaaactattaacaagtctaaacaaggaatcaaaaatgaaaaacttaacaatactaagcaaagtaacaaaagacgcaaaagctactgcaaaatatgatgagtcactaaaaagtggcgatgtgataacttacagatcagaagatggggttctgcttgaaggggtggtttcttttgctaaaaagtgggaatcacaacgttattcaaatcttccagtagttgagattataaaatga

SEQ ID NO: 55574 - DNA, 330 bp, Acinetobacter baumannii
atgaaagaatttaatttccctataaatagccaactagtaagagtaaaccacattcttgcgacagacttgccatatgattcttcccatgatagatatccagatgactaccatgttgctattgatatccaaaactatgctttagcttttagtgattgtgcaaggatagtcagtaaatcaacaatgaaatctgtaaaaatcagaacaggacattcattgaagtatgctgaaaaaattcttgtagatggttatgagttttttattgtgagttctaatagtgaaatttctaaattagagaaagccaacataccaacctatataccaagaaaataa

SEQ ID NO: 55575 - DNA, 327 bp, Acinetobacter baumannii
ttggttgctggtcttgcgggcaagattaaatctgctcgaggcggttacgacattccatcaggtgtgaatccggttacccagctacatgaagatgaaatggttttaccttcccaacatgcgaataccattcgtgaaatgggtaaagctttgcgtaatggggcaagctttggagctgctgcagttgctgaaggtggaggtgcgggagcaaccattaatattagtgcaattgatgccaagagtattcaacggctcttgaagagcaatggtcgtgcagttgctagtggtttgcaaagttatgcccgtggatttggtaaaaacggtaaataa

SEQ ID NO: 55576 - DNA, 2490 bp, Acinetobacter baumannii
atgggtggattatttggtagtactacaattagtacaacggatacccgaattaactctatgcggatccaacagtcagcatatggtctttgccagccattggtgtacggtaaaacacgggtagcggctaatatgttttggtatggggattttaaagcaacacctcatacaacggttcaaaagtctggaggtaagggtggtggtactaaaaccagcaatactacctttagttatagcgcgtctcttatgcttggtttatgtgaaaaccaaattaagaagattggcctgatttgggttgataaagaacagtatgtccctaagcaggaaggtactatcacgttagatccaatcgatcagttaaattttgaattattcgatggaaataataatcccccgtggggatggttactatcaaagcatccagaacaggcaattaactatccttatttgggatatgtagcatgtgctaattatgagatggggaatagcgcaagtctttcaaaccataattttgaagtgatcagtacgattacattatctgacacgatagatgacgctaatccggcagatgttattgaagatttcatcacacatccacgtcatggtgcggccccaaatcttaaaattgcagatcttgacgaatttagaacttattgccgagctgccaatcttttaattagtccagctttcacagaacaacgaccagcctatgaaactatcaatgagattgttgaggcagtaaattgtgctgtggtacccagcccagatggcttaaagatccgttcttttggggactctgcaactacaggtaacggcgttacgtttatacctgatctcacaccagtttatcacttaaccgatgatgactttattggcgatgatgagccagtacgtgtacgccgcagccgtgacacagatgcttataatcatgtgcagattgaatatatcaaccgttttaatcaatacaatacagaaactgtagaagcaaaggatcaagcaaatattgaaatgtttggtctacgtactgaagatcctgtagaaaaccactttttttgcgacccaaaaatcgcccgtcatgcagcacaattacgactgcaacgcttgttgtatgtgcgaaatgaatatgaatttgatctggggtggaagttttgtcgactagaaccaatggatatagttacattgactgatagcgctttgggtttataccgctttcctgtacgtattactcgaattgaggaagaccaagagggtcgtttgactgtgactgcagaagagctggcagttggttcaagatcagcaattgaatatgatcttcaagcatccaatggctatcaaggggggaatgaagaaccgggtaatgttaatgcacctattatttttgaacctcctttagatctttcagatggtaaagttcaagtatgggcggcggtgtcgggcggcattaactggggtggctgtaatgtgtgggcaagtcttgacaataccacttatgaaatgattggcaccatctatggctctgcgcgttatggtctccttgtggatgccattgatgctagtgctacatctatgcaagtagaacttaatactgccagccagatttttagcggtactctggaagatgcacatgcagatcagacactatgtaagctaggtgatgaatactttaactatcaagtggccacattaaatggattaggtctctatacattaagtgatgttttacgtggacgttttgatgatgcacaaattcacaatgctggtgagccatttgtgcgcttagataaagcaatattcaagtatagtttcaatgaaaaccttgtaggtaaacagatcttcttgaaattcactagctttaatggacttgaacgtaaagagcaaactcttgatgaagtaacagcttacagttacacgttaaatggagggaaaccatcgggtattaagggcctttccttgcaatctccatttgtcgggacaacattcaaagtacaatggcaaacttcaagtggcgttacaggttatcgtgttcagatctggtcgaatggcgtaatgttgcgtgaagttgatacgacaaattcagattatagttattcaattgaagaagctaagcaagatggtttgggccgttcttacacaatccgtgttgcgagtaaaaatggtgaccaacttagtgccttcgctgaattaagcattagcaatcctgtccctccagtgttatctaacatatatacatctgcttcgacgaactctataacagtgagttggattcctagtgaggctccagatcttaaagattatgcaatttggctcagcaataatcctaactttgacccaacaacaatgcctcctacatggtcaggctcagagattacaaaaacgataggagggctacaatcaacaacgccatattatatacgtgtcgctgcacgggatgtatggaaagatacagtctggaattattcaaatcagattactcaaagtacttctgaagcttaa

SEQ ID NO: 55577 - DNA, 654 bp, Acinetobacter baumannii
atgaagaagtatgaacgtatctttgtagtgggcgacttgcacggtagttacgataacctatgtcgacatcttgtcgacataggtttcgattttaaaaatgatcttttgatttcggtaggtgacttggttgatcggggtaaaaagagccttgagtgtataaaactactcaataagccttggttcaaagctgttcgtggaaatcacgaacaaatgtgtattgatgggatgctgaatcataagattcgcaatatacacaaagatgagcgtaacggtggtgagtggttttataaattatctaaaagtgatcaactaaagataattgagcaactaaaagaacttccgctctatctagaaattgaacataagggagagcttattggatttgttcatgcaaatgttgagcaaaacgattggcttgagtttaaaaaatcgtttaataagcaagatatagatgatgttcttttagctatgaatttggccttgtggtcaagaaatcgatttaacgatcaaactggaatttaccgtaaagttaaaaatattgaccgtatttatctgggtcatacgattgttgactaccctgtcattaagcataactgtcactttatagatacaggggcttataggacggggaacctaactattattgaagtctaa

SEQ ID NO: 55578 - DNA, 3063 bp, Acinetobacter baumannii
atgaatgatttatctaatgttgtatttccaacaatccctaccgttgctgaattcatagacccaactgttactgaagcaggatttaaagatgctttaaaacgcttgattgagtacatagaaactttggaacaaaaaagtaattttgataagaaatataattctgtttcaaaagatctattaaatgaaattaatgctttaaaagcccttacaagcgtttattttgatcgacaaaatacttatccatttaatgttgttggacgctactttaaaacgggtgaatctgatagaagcaaaaactttgacattcataccgttaactatgtaaatacagggcttatttatcttgatcaaggcgctacaattagtgcatcgatcttacaacagaatcgcaataatttttccgatgtcgcctcattactagtttttgacatggatcttaaattagttgcagatttatctataccaaacataggccctgaagaggtcgaagaagttcaataccgctatacagctccatttaattgttattgtgtagcaacaacaattcactatgcaggatcactttatcctacacgttttgcaactgtgacaggcaatcattaccagcttacagttttagatcgtagttcatacttcgatagatatatcgttcggatgattgctaacttacgatatgcaaatgccaaaatggtgagtgaagggaaaacaataacttttgagtttaatgagcttggtcgttactatgaaaacggaacccatgacttaaatgggggcggtgatatttatacaaatgcctacagaaatacaggtttaataccgttggaagtaggggatcagattaaggcaacagttcttaatccagacagcaatattcccgccatggtaatttttgacaaagatttgaactttctagaatctttcaaaaatactgaacggccgggtgactcatatccatttgaatactcttataccgcgacaaagcgctgttttattgtcttttgttcaattaatccagcaaaccgtgcatacataagcggactgaagttgaaagcagacttaatccctgcgggcactgatcaaaatttatcatggagcagaccccaagagaatgtttttgtgcggaatgataatttatctaggttggctgcagaaaaaattgaagagaaaatcccttttctcgcaccaggtactggttacacagcagctggaattgaattcaatcaaaatgtttctccagagtattggtctgcatataaaagtacgggaaagattgcagtaaaacatggcgatacttttgaagctgtagttgatacggatgaacctggcggaataatgagcgtacttaacttgtatgactataatgggaatttcatcagatgtgttcattcaattccagattttggttcgcaaggcattaaatctgcaaaaataaactatacttgtgatcatgagggatatatcaccattacaagtattcatcgtgacgctccaaatttaaaagaactatctaacccatatgttattaagaatcgtactaatcagtttagttcaaaggtaaagccacttaatacgaacgttgtacagaacacgctatttactttcccaaaacctacaagcgtaatccaaatagacatttttgcagacaaagtttttccgcctgagagtaaagctgagggttcgattaattgtagattgaagctaaatgtcgacggggttgttaatgaaagttatgcccaatatgcggtacaggggagtagttctgctgtgtatccgaaaaagaactttagttttggtttttttacggatgaaagttttactactgagcgttcaataaaattaggagatttgattcctcaacaggaacttgtttggaaagcaaactggattgatgcaacacatagccggaacattctttgtaatagactatgggaggaaatggttcaatcaagaaaaggttttccaaagcgtgaggtagatcgcgcgtacctcaaccagttgggtgtgaattcacttgatactggtgctatcggtcatgttgatggttatcctgctgtggttcgtttaaatggcgttttttatgggattggtacattaaatattggcaaaaaacgagacaattacaatttggacaaaagcaataaaaagcatgttcaatttgagttgctgggagggggtattgatttcacagcatctgcaccgccttacgaaaaactaggccttagaaaccctaaactaaacggttatgaagaaggcggaccgattagtgacgctactgtaaaagcttccatgcaggcgctttgggattttcaccgtttgccaatagctgaacgaactgctcaattcgacaaatattatgatcgtacaaatgttgttgattggtatttgcttgttgagtttactgctgcagcagatttgcttgataagaattcaattttgacaacttgggatggtactcaatattgttggatgccttatgaccttgatacgactttcgggcttcattgggcaggtattggggttgaatatgcttcaaattggaattgggacgctaacaatatcattcctattgttaagccaattattcttaatgatgttattaaacgatatgctgaattaagaaataaaggaatttttaaccttaatactgtttatcgaattgagcgtgatattgaatcaaaattcagtctcaatctctttaagcaagagcaacagcgttggcccgatattccatcgaaggatctcggagggatttgtcaaataatggcttggctaaaagaacggattaaatatcttgatgcaaaatatggatatttagatcaaggagttttagctcaaaaactttggaacccgccaacattggcagctggtgcaagtcaatcaacaacattaaatctttcaacggcgactcttggtactcaatatttagttgattttcagtttgacttaaagggtacacaaatgactgctgaatgtaaaagtgcaggtgtagttactgtaacacacgtgaacaattcaggtgagcaagtcaatcttgatgaaggagctttgagattaatcgtatga

SEQ ID NO: 55579 - DNA, 858 bp, Acinetobacter baumannii
atgagaaaagcatcagataagcttataagattgttggatgcagatcagtttattatggctgatctatataccattacaacaatacaaggtattgaatatcattacacaaattacgatgttgatttggtggtagatggcaaggtgtttcagtcaaatgggccaattataagtcgggaaggtattagtctctcacttggaattgaagtcgataatttatcaattacgattgaaactactgaaagtacaatgtttggtgaggtgcctgtcgctcaagcattccataacggtattttagatggttctcgctttaaattagagcgcattttcatggatattaatactcccacagacactagtgcgggaacgatggttttatttgaagggcgtattattgaacctgagtttgatcgatatgagattaaagcgagtgtggtttcggaaatagatgatttaaaagtacaaatgccacgtaatttgtatcaaccgggttgcttaaatacactttttgatcaggcttgtggcttattaagttcagaatttgcagttgatacaaccattggtgctaacagtactttaaatagaattcactgtgatctaagtcatcctcaaggctggttcactcagggtgttgtagagtttcttgagggtattaatgttggtattaagcgcacggtgcgattgcatgaaacgggagcattacttcttacgttgccgcttttagaaatgcctgcaattggtgaggtgattcgtgtatatccgggttgtgataaacgactagatacttgtgacaatcgctttaataatcgcgctcgctttagaggcgcaccatatgttcctattcctgaaacttcagtctaa

SEQ ID NO: 55580 - DNA, 363 bp, Acinetobacter baumannii
atgtggggtgatgattacataggttggtgggaaacagaagcccagatcgaaaagatagtcctaagtcataccgaaccaaagatcttggcttttaatcaaagcatgtggaaccgaaacacgattaaatctatgtgggtcagtgatgatgctttaatgtggaagcaaggcgtatttgagataactaaggatggatatctgatcctgtcagaacctcttgctttagatcaggaaataactgtttcaggtacttattattaccgatgtcgttttaaagaagacacgcaagaatatgtaaattttatgcataagctttggaaatcaaacaaagttgacttaattggttcattgggaaataaggtatga

SEQ ID NO: 55581 - DNA, 702 bp, Acinetobacter baumannii
atgcgtactttagcaatatctactcttctccttggtacggtactcagccctatggtttttgcccaagatgataatgcccttcactacaatattgtaaatgttcaagcagaagcttctcgccaagtttcaaacgatgaaatgcatgcaaccttatatattgaaaaaagcaataagcagcctgcagagctttcaaatcaaattaaccagttaatgaaccaagcactcgcgacttcgcgtaaatatccacaagtgaaagtggaaactggtgctcaaagcacttatccaatttatgacaatgacagtaataaattaaaagaatggcgtggccgtgcggaaattcgtctagaaagtaaagatttcaaagctgctagccaattaattaatgagttacaacaaagctttcaaactcaatccattaattttagcgtttcagatgagcaacgtaaaaaagttgaaaatgaattgatggtagaagcgtctaaaaactttcaacagcgtgcgcaaatgttgactcaagcatggaataaaagccaatattctttggtcactctaaacctgaacacgaataattattttcctcaacctgtaatgcgtgccagcctagctaagttcgctgctgctgaagcggcaccagctcaagacatggctgctggtgaatctaaaattactgtaaatgcaaacggttcaatccagtttaaataa

SEQ ID NO: 55582 - DNA, 174 bp, Acinetobacter baumannii; identical to SEQ ID NO: 47989

SEQ ID NO: 55583 - DNA, 1332 bp, Acinetobacter baumannii
atgaaaaaattaacgatacaggctttactaaataaaaactggatagatatagcagaactaaaactgctggaacctaagttgggttcggctagcgccagtgaactagaatatgaattggattatgcaattcaatatttagacagacgagatgagcacgcctgtagtttatcacttcctgtacaaattcttatcaaacacgaatcggacacatggtttggctttttagatgatattgttccatctggcgctgcacgccgttattgggtgaattatctagatttacaacgcttaacctatgcggaacaagaaagtattctattagaaaaaggtgggatggcacctgttggtaatttacgaattaaagaagcattgcctccactaaacccagagtcaaccttgcacttacgttattttagtaaggaagatgtggctgagcgtaatattgattttctggaatatgctcaacaaatgggagctattagtagtggtgcaactggtgcaggcggtgaagctcccaaattacttattcgtgtttcaccggaacaaaaagtctggattgacacctaccaagaaaaatttgatcagccagatcagcattatttagttaaatttccgcgaaataaacgtagcgagattgattgcgatattctcagagccgaatattattattatcagatactcaatgagttaggtttcaacacaattgaaacaacccaaatgaagctcattgaaggtacaaaatatccgtcattgtggcttccaagattcgatacagaatggtgtgatcaatattggcaccgctatggtctagagtctgtgtattctgtactaaataagtcttctggtagtcatcttaatcatttcgaagtcattgaagatctatgtagattactcacaagcattgactcagattttgatgtaccacaatttatttgtgagtggttacaacgtgacttactcaatatcatttttggtaattcagataaccatgggcgtaatacatcgtttataaaaaaatctggaaaaatttatctttcgcctatttatgactttgcacctatgaaagccgatccagaagttgtgaccagatcgacgacttggggaagtccgtacgaggaaggtggtgaataccggtgggcgcaaattacacaaaaacttgctccttggtgcgatcccgatttatctctagcgacattaaggactttggcgaataacctgcttggcttaaagcaacgattagttgataaaggtgtacccaaacaaattattgaaatgccagcgctgtcatttgattacatagaagctaaattgaaaagatgggaactgctatga

SEQ ID NO: 55584 - DNA, 264 bp, Acinetobacter baumannii
atgtatggaattgacaaacacggtaagcgcgttgaaatcactgctaaatcatcacttgtaggacgctcatttcattcaattactattgagtgtgcggatgatttaaagattctacctagagttcaaggtcggttgatgtggagaggtactcataaaaagtatccatcaatcacccttcaaataaaagctttcagcgttaaatctctcaaggagaagttcatccctaaatatggaaagcttattggagagctgttcgaaaagtaa

SEQ ID NO: 55585 - DNA, 306 bp, Acinetobacter baumannii
atggataatattattcaatttccaaaatctactttaagcaatagacaggaaatagaaagcattttaatacaaggccttgtagaacatggagccaatcaagaagatgttggatacgtggtggaaagaatgtctaattttttggatattttatgtgaatttgagttttcttcaaatttacctaaaaacccaaggcacgaagacattcagttacttttcgaacagctctccaataagctttccatatttagggatgaacttctccttgagagatttaacgctgaaagcttttatttgaagggtgattga

SEQ ID NO: 55586 - DNA, 297 bp, Acinetobacter baumannii
atgtataagatacctaaagtagttattcctgattctgctaaagaatatagaccacctaaagttaaattaacgctagaagaaatcaagcagctatcagatgatgatttaatgaagctgctaagtggtgaagggaaaagcggtataatccctgctcctcttttgcaagctattagctatgaattaacttctcggcaaattaaggagtcatctaaaccacattggactgtatattttggggtggtgttagcttttattgcagctataacaggcatcatacaattacttagctcaaagtaa

SEQ ID NO: 55587 - DNA, 507 bp, Acinetobacter baumannii
ttgattctagacagaaaattacaattagaattgttgaaaaaaatgagtgcttcatatcctgactactatgattttgataatgattatagttacgatagcgatgagtatgcacaggctgtcaccaatttatactaccttatgcaacataatttagttgaaaccagaagcatcatgtcttcttcgagcatggatggactgaaacgcctacaatttggtgcggcaactataaatcaaaatggattggatttccttgctgatgatgggggtctatccgcaatacttaatgttgttactgttaaatttgaagcagacactctcaaggcaattttagaaaatcgaattaatcaatctgacttagcccctgatgataagaaatcaatgattgatgcgcttcgagagctgcctgccgagtccataaaacacctgaccatgaaattactggatgaaggtttagagaacctaccgagtgcgattttactaattggaacgtatcttggcatatcctag

SEQ ID NO: 55588 - DNA, 276 bp, Acinetobacter baumannii
atgaacacaaacaatttatcagaacaaccaatcgaactcaactcaccagattttttaataggtgacgttgtagtgcttactaaagagtgccgtactttcaaatcaaatgatttgtttgaagttaaaaataaaactctgactagtttatggaccatcaaatcagagaatcatttgattctagtttcttcaaaagaaatccgcacagcaacagtagcagagctcaacgctaaacgccgcctaacaaaagctgagcaagcattagcggaggtgtcatga

SEQ ID NO: 55589 - DNA, 129 bp, Acinetobacter baumannii
atgaataaattcgagattttagcgtgggcaatgcttatttcctgcatttcagcagtgctttgcggtgttgtagtgctgtggtggttggcgcgtaaagagctagatgagaaaggagccagccatgagtga

SEQ ID NO: 55590 - DNA, 291 bp, Acinetobacter baumannii
atgagtgagtttaaagagtttgaaatcaatgattgggtaaaggcaaatgatggtcagtttggatttaatgagctattccaaattgttgacttcttcgctgatcgtaacggcactttattagcggtattagatgatggggattgccacccattatcttgccttgagcacgcatcagaagccgagattaaagcaggccaccgcattgataaaccatcggattcgagggaattagaaaccctagacaaactagaaaaccacatttcgccgaattgcaaagtggaggatgtgtga

SEQ ID NO: 55591 - DNA, 990 bp, Acinetobacter baumannii
ttgaattcgcccccagttgatttattagcagggttaccttcttctaaagaccatcaggctggtcgtttagtgattggaccggaccataagatttattacactttgggtgaccaaggccataaccagttaacgtatttgtttgagcctaactatgcccaaagtcttccaacccaacaagaattaaagaataaagacttccatgcctattctggtaaagtcctgcgtttaaatttggatggtagtattcctcgtgataacccaagttttaatggtgttacaagtcatgtttacacattaggtcatcgtaacccacaaggtttggcatttgcaccaaatggtaagctcttacaagctgagcaaggcccaaattctgacgatgaaattaatttggttgttaagggtgggaactacggttggcctaatgtagcaggctataaagatgacagtggttatgcctatgcaaactattcagccgcaaccaataaatctcaaattaaagatttaggacaaaacggcataaaagtagcggcgggtgttccagtaacaaaagagtctgaatggactggtaaaaaatttattgcacctttgaagaccttatttaccgttcaggatacttataactataacgacccaatgtgtggcgatatgacttatatctgctggccaacggtagctccatcttcggcttatgtttatacgggcggtaaaaaagcaattcctggttgggaaaatactttgcttgttccatctttaaaacgtggggttattttccgtattaagatggatcagacatatagcacgacctatgatgatgctattccgatgttcaagagtaacaatcgctatcgtgatgttattgcaaaccctgaagggaatactttatatgtcttaactgacccggaaggtaatgttcaaaaagatgatggttccgttacaaaccagttggaaaacccaggggctttaattaagtttacctataaagctaagtaa

SEQ ID NO: 55592 - DNA, 321 bp, Acinetobacter baumannii; identical to SEQ ID NO: 47768

SEQ ID NO: 55593 - DNA, 384 bp, Acinetobacter baumannii; identical to SEQ ID NO: 55537

SEQ ID NO: 55594 - DNA, 1425 bp, Acinetobacter baumannii
atgagttcacaatttaagtaccaagagattgattttttaataccatcacaagaatttattgtgaacttttcctatgtttctggtaaaggcttatcctttattcgagagtatgtattacgacttattaatattgcaccgatgaccaaaatgcaaattgcagtgtattttggattaagtgatattgaagtaactgaagcgatcgatgatttaatcgaacaagattttataaaattaaattctgacggtcgcttgggacttactgaattagcaaacaaattatttacagacgttgcctcagacgtaagcttgactacgattgaggaaagtacagctaaaattaaatttgatttagcaacatttagctatttcaaaagagatcagaatggtggtctaaataattgggcttgtggtttaaaattaaatgctcctccagagcatttagcttatgcgactgaatatgtgaaaacagagttccaagatgaatttttccaaattgcagaaaataattatctccctaattctgtaacaaaagaaaaacatcgacctcacttatatatgattaattctgtgatccctacttttaatagtccattacgaattaaagttgactttaaaattgaccacaaaggtgatccagtattgttagaaaaattctctaatttgagtaattctgatcaaatacattctttgatcgcagagcatttagatcaaatgaaacgtggtgacaatgccaaggaaattataaaagcactagagttattcggggatcgttatacagcacagtttttggatgaacaatgtcaaataaaaagtttagtagatctgcaagatggcttagttggcgagattattggtggagtaaattataatttacttttaggtccaatttatcaggaagaaaattggaaagtactggaaaaagaaatccaaatgatttctaaacatcagcaagtatcaaataaatctaataatgcgttacaactgacatggattgcaccttcgaatccattttggggtatgacttcaaaagttggggttgcatttgaatctgtacaagaagcattcagagataataaaggactaacagcaaaagtctttttacctatagggaatcagtatgataaacatgctgctaaaacttggttaaatattttcaaaccttatgcaaagttactaaatggtataagagaagggttttgtgatgggaatgtggaaatattacacatagaaaatgaattggtggctattagttatcatgtaattgacccagaaagattgccagtgacgatgcctatcggctttttcacaaaggaccggcatacgataaatcacattggtaaaattttgaatcaatatctgacaggttatgctgcctataatgagcctaacgattgtggtcatcttcaaaagattataggacgttaa

SEQ ID NO: 55595 - DNA, 5151 bp, Acinetobacter baumannii
ttggatattaaaatttgggaaggtggacttcaacctcaagaaatcattgctatcgacaaaattaaagctgctttttctaagcagggaaagatgttcccttggaaaggatatgcaggatttcgttttaccaattcaaaaggtaaagaaggcgaattcgatcttgttatcgtgacgcattgtaatgtaattattgtagagcttaaagactggaatcatcaaccgattacatgtgttaatggtcgctggtataaaggtgatcgtgatatgggtacctctccagtcacagtaactaagaataaagtatttacgttacaaaacaaattagaaaaatataggaataagtttacaaataaaggtcgagttccatttattaagtatatggtagtcatgactggcgatgcagactttagccagctacaaggggtagataaagatctaacaatatcgctcgaagatttcttaaaactagctaatgcctcagaatttaataataaatttcccacaaaccacccgctgcaacgtacggtgaaccaagattttgatatctttgatgagttgtttttggggaatcaaacaaaggccagatcacttaatgttggtggctatacagctgaaggtgtgatatttgatcatccgaaagggatttataaagaatattatgcggtcacaaaaggtgaatttaaaaatgaagcactgctccgctggtgggactttagtaaagtttctggggtgaaaggatcgactccaaacggtcgtggacaaattgtttcaagagagcgtaatgtcctacaatatttaaaaaatcacaatcaagaactatataatcattgcttaaggtcattgaccccgtttgatcctgatgaggtgactacaatcagtgctgagctgttcgagtttccgtctaatcatttccgttttaatgaatttataggtaaatatgcgagtttatatagtgaagcagatttactggtaattgctaaaattctattagctcaatttgtttcactacataaagtacaagttgcacaccgtgatattaatactcatagtctgtggctctctcaatcgaaaacagttgtaatatctaatttggcatgtgcttattttaaacctgttggtacagtaggtgattatcgagagcaactagctgttggtgcaattgaagcaatcggggatgagagtgcaaatcaaaaatttaacaccccttttgaatcagatgtatatgctttggcgattatgctttggcatttattgagtggacaacgtatttcccaagatacgctactatcactacaaagtgacctaaaaaaaagttctgctttctatgcccccgtaatatatgacgcaattttcaacaaagcgtttaaagaggccttagaatttttaacagcatttcaagctgcagaacctaagcgtgctgaggtactaacttttgatgcgaaattgttagaaccatatcgccatagtattaatcattctcgtcaatttagaccttctgatgacattgatttttttgttgaaactgatgaaaaagaagtgtactgctcaaacgggtttatcgtaaaggcttggcttaatactggtggaattaatgcatctgatattgaggcttttcaaatccataaatttattaaaaaaatagaaaagctaaaatcaattaattctccatatattccacgaattgaagaatttggaattgcacaaaagtcttccagtctttttcttgtgacagagtatattactgatagcaaatcgtggcgtcagaaatataatcaatgtagtaatgagactgttgaaattagccatgatgaaagattggcagatattggtaaattgatcgcagcaattgaagagcttcatgaattacatatagctcacggtgatttacatgatgaaaatattttattcgatacaaatattggtcaaatctatctaattgatatacctgactttaacttatccggagacgaatctagaaatactcaatatgcgccagaacgatatgatgctgatgctgatgcttatcagcgtgataattatgcagttatgaaattggcgagcgagattttaggttttagttttggtgaggaatcagaaatctatccaacacttgctgaagcaattcaaaatgaattggaagatgaagaatttggatttaaagggattgcacgatttaagcaggcttttgacaatctaagtgataaatcaaagcaaattattactgtgtatgatgaccgtgtacaagaagactttacaatttatcctgaaaatatgcagatgtatgttgggatcacaactcgtactgaagggcgagatcatatagctagcttaacttttaatggaattggtggttcatacactttgcaatatgatttaacgaggagttccaaaaaaatctttggcggttatgcacctcgtaaaaaagattatttatccgcaaaagaaaaggagaatagccaaacaagcttaaatatagagatacaaatcaaagcatctgatcaccgcaatcatgtagaacttgcaaattatcttatgatgcaagacgattttatcgagatagttgagtcatctcttcaagatcatattgctatacaagagcaagcccatctgcaaaagacgctacaggcagtatctgaagaagagatagatgttactcaaaccctctcaaactcgatcgattccgtacaatctatacaaccgatagttgtatcgagctatgctattgaaaatgagcagcatgataaatcatcaatctccacatcaaacaaatttaatacccataaattgtggactgctattttagatgccgaaattgatgcagccccatcaattgagctcaaagaaacggcatctgttcgtggcgatacttttgtctgtccttatgatgcagtaaaggaccctttggaaagctttgatgattcagatactgataaggtttatgcttttatcgcaaaaatcgactacaaggctttaaaggctgaggggaaaagacctgaacaggttgaatttaatgatgagctagctaaagagttcataaaagaatttaaaataggggaagtggatttaaaagcatctagtcttcacgaagtacacattacaaaggttaaaaatactcgatatccaccggaagaaggcgatataatttattttcgttcaatgcaaagtaatgcatcattaagaaaacgtaaacacgctattgaacgtattttaaataaacaaagtgttatttcaaatttagccgatttgtttgatccagaatgcaatacacaagcgaatgactacgatatacagattacagatactgattttgctcgttacgatcgcatagatgatcatggcaatcagatcagtctaaactctcaacaacgagaagcttttcaaaaattgattaatagtggccctctttcattattacaagggcctccaggaacaggtaaaacagaatttattgcagcatttgtacattacctgatcgaaaagcaaaatgtaaaaaatatccttttagtaagtcagtctcatgaagcagtaaataatgctgcagagcgtatacgtaaacactgtgctcgtttgcaaacaccactagaagttgtacgatttagtaatcgtgacaccacagtatcagatggtttgaaagacgtattttctaaagctattaccacagaaaaacgtgaattgttcttagcagaattgaaaacacgtatatcttctctggcaacagcattgggtttgcaatcagatgtaatggtgaaagtggtcgagctcgaactacaactatttaagcaaattgatgatttgctcaggttgaaaaaaatatttaagaacattattgaacatgaacattcaaaaacatctaaagaaaacatggattttgacctggatgcccagatcaaagagcttgaagcatcaattcgttgggaaagcctaaatgagttcaatgtagatatttcatcgaaaaccccgatagattttcaattaaaaaaccgcatcattaaggcattaagtattagatttggactgaatactcaagaaacccaacgggtcagtgccttagcaaaagtcactaaggaaatgattgatactttgtcaggtgactatgtaaattacgacgaattttacgcccgttctcgacaactagtgattggtacatgtgtggggattggacaaggtcatctcaatattagagaaaacatatatgactgggtaataattgatgaggcagctcgctctcaatcaggagaacttgcgattgcaatgcaatcaggaaagcgagtgttattggtgggtgatcaccatcaattacctccaaactatctgcctgagcaaaaaaaggtaattgctagaaaactaggaattcagcttggacatggcaattatgatgaaattgatgatttgctcaaaagtgattttgatcgagcatttaattcagaatatggtcagcaagcgagtgaatccctttggacacaataccgtatggctacccctatcggaacacttgtttcagaaatcttttataaaggtaaattaaaatcttctggacgttttatttcagaacagtataagcaaagcgctgatgtcttatattcaactgtgacgtgggtagatacatctgatatgggacgcgacgcataccatacagaagttaatcaaaatcgagggaaaattcgtaataaagaggaagcgaaagcgatcattaccatattaaagcaaattgctgaagatgaagatttgatcggttatctaaatagtgttcgtaaatctgatgctgccataggtgtgatatgtatgtatgcagaacaaaaacgctatttacaccagttatttaatcaaaatgcatggcctgaaggatttaaagacctagtgaacattgatacggttgacagttatcaaggcaaggaaaatcgcataattatcgtttcaattactcgttctgataaatttaatagccctggatttatggatatgccaaatcgcattaatgttgctttatctcgtgcgatggatcgattaattgtagttggcaacaaaaatgtttggtgtggacgaaataaagatttgccatttgggaaagtggtaaaacatatggaagaacgaggtaaagatgaaggataccgttttatcctatctagatctcttaaaggagaaatggtatga

SEQ ID NO: 55596 - DNA, 1929 bp, Acinetobacter baumannii
atgattgtcggtatatttcttcgcaatgttaaaacttatagaaaaatcacatacataccgctaagtgatggtgaaaagttttgttcacttttgggtgataatggtgcagggaaaagctctatactagaagctctagattctttctttaacggaaaaccaataattccgaatctttcttataaacagactcctgatattaaaaatttaccgagtattactccaatctttttattagatagaaatatttttgaagcacaagatataaaacctattgagaaaattcatgaatttcttatgagtgcagatgaaaaaacagatgttccagctgtaacaaagcaacaatttagaagattcctaactcatagagatagtttaaagaaatattgtgatctaactaataaactcttgttttgtcttggatttgattacaaagaaaatatacatttatcaatttttcatcacactgaaattcttttaaacaaggaagatgtaacatccgaaagtaagctcgatatttataatgatctattaaagaatcaaataaatactattcgagattattatgagtatatttatatacccagagaaattgacacagagtctttcacaaagttagaaacaagtgaaattcagaaactcatgggtgaaaatttatatgatgaattagaaggtttaattacaaaaactgatattcgtgaaataaatactaaattaaatggctatatcacttctttaagtaaagacttagttgaatatacttatagaacttcaggtttaaagcaacaatatcttaaaccgaaacaagtttatgacttagttattcaagcatttttcaatataagaaaattatttaaaaaagaaggtaatgactggcttgaaattaacagtttaagttcaggagaaaaacaaaaagctcttattgacatggcggaaaaattattagaaaaaagaaataagaataatcaaaatgttatattagcaattgatgaacctgagtcatcactacatatgtcatcctgctatgatatatttgatcaactatacacaatgagtagtcactgtcaccaattacttattactacccattggtatggttttttacctattattgaaaatggtaatgcaagtattattaccagaagttcaaatgatcaacataatgctgatctaataaatttatatcattacaaagagcagattaaagagttaactactgctaatagaggagctttcccctccaatattagattaaaaagtatgaatgatttaattcaatcaattattacaagcgcgacaaataatcccccatataactggttaatatgcgaaggttcttcggagaaggtatatttaaattattatttagaagatttaataaaagaaagaaaattaagaataatacccgtaggtggcgctaaagcaattaaacaaatatacggatatctatcaacagcctatgaagatttttctagcgaagttaaaggtaaaatctttttactgtcagatactgatgcatcattagtccgatatgaagttaaaagtgacgatcaacacaagaatttacgttcaaagagattagcaaactgtaatacagcatttactacaaaactagtaaccattcatgataatcacatgacatctcctaccgagattgaggatgttttaaatgctaatttatttaaagaaacattaaaagaatttcaagatgactatgatttggaatttttaaattcagcagcatttgatccagcatattgttctcaatggtgttttacattacatccaactgaacaaataaaattaaaaggcttctttgacaaaaatggagtaaagttcaaattcgctaaaaaatatgttgaattatctaaatgccatcctgatgagcctccagtctggattaatgaaattaaaacatggtttttaagttaa

SEQ ID NO: 55597 - DNA, 204 bp, Acinetobacter baumannii
atgtctgatcgcattcgggaaaaactacaaattcttgctgatgctgctaaatatgatgtgtcttgttcatcaagtggcagtgatcgtaaaaacaaaaataaaggtctgggggatgccagtcattcgggtatttgccatagctataccgaagatggccgctgtgtatctctcttaaaaattctatttaacccgaatcgcggataa

SEQ ID NO: 55598 - DNA, 714 bp, Acinetobacter baumannii
atgaatgacaaggcaactgcatgccagttctgttcaattgatcaatctcttaaagatggccggaccttaatccgtaaacgtcctgaacaactggcggaagtggcgaaagcagctgtcgagttagatgggatcactcagatgattctgaccacaggaacaccgaatacaccggatcgcggtgccgagattttatttaattcagtcactgctattcgtgcaacggttgatttacctattcaggtgcaatgtgaaccaccggatgattttagctggtttaccaagttaaaaaatgcaggcgccgtatctattggcatgcacttagaagctgtgagtgatcgggtacgacacaagatcatgccgggtaaagcggaagtctcactggataaatattttgcggcatttaaggcagcagttgaagtctttggccggggtcaggtcagtacctatattctggctgggcttggcgatacccaagaagaaattctggagatgacagccaaactgactgaaattggtgtctatccatttgtggtgccattcgtcccgattcaaggtacgccacttgagcatcatccaaaacctgaaccagagtttatgcaggcactctacccagaaatcggtgctcagttgaaacagcatcaattgaagtctgaagacacccaggcgggttgtgccaaatgtggtgcctgctcatccctcaaagcttatgaatag

SEQ ID NO: 55599 - DNA, 603 bp, Acinetobacter baumannii
atgtatttagatgatgatctttcacaaaacccatggctgcaggcagttaaccagcaactcaaacattatctggctgatgaatttattagtgcagatatcgtgatcaaaatcgtcagcgaagattgggagcgacgtcaatattatcgcctgcgtgaagcaacctttcgcgatgaacagcagatattgaaagaagatcgggatgaatacgattttaaagcattcggtattgtggcgattggtcagatgtttggtgaaccagatcgtgtcattggtgcagtccggatctttcctgaaggtaaaaagacctggtggggtggccggctttgtgtcgatcccttatatcgccaccaccgagccattgggaaagccctaatcaatgcggctgtttctactgcaaaaaatctgggatgccgacgttttcttgcgactgtacagcaacagaatgaaaggtatttccaaaagctgcattggcatagcgaacagaatattcaggttgccaatattcctcatgtactgatgcaggcggatctagcacattatccattgagcaatattagtcaggcttacatgcagcattcctatgcaatgcaggaggtagtgtaa

SEQ ID NO: 55600 - DNA, 1047 bp, Acinetobacter baumannii
atgaaccagtcagaacttgaacggctgctcgactacctcagacagacacccgccatgcaagcgaaaatgaatattggtcaagggatcaaaatagcccagccaaatattgaaaagctggcagatttgtatgccttaccgggagatgatactgctgcgattgccacagaacatggctatatgttgcatgcctgcgaaggcatgattcccagctttgttgagcatcatccctattttgcaggttggtcagcggtgatggccaatatcagtgatattgcagcgatgggaggccgggcgacatctgttgtgaatagcttctggcatcgcagcactgagcaagcacaagcattaattcaaggaatgcaggatgcctgtcagtgctacggcgtgccactagtcggtggacatacacatatagcccctaattttcagcctgcactttccgtggcgatccagggagaggctaagcggctgttatcagtcatacatgtacaaccgcaacaaaatattttgctggcactcaatatgaaaggccagttccatccaaacaccacttactggaaatgctttgaacatgtaggtggagccaagttacaggcagaactggaaattctcccacaattggcagaacagggcttagcttactcagcacgtgatattagcaatgccggtattttaggtagcttgctgatgttgttggaagcctctggctgtggtgcagatattcagctggatcagattgccaaacctcaagaggttgactggcagcactggctacaaatcttcccaagttatggcttcttgctgactgctgacgatgcagagtgtgaagagattattgaactctttgcttcacaggatctgcattgtgccgtgattgggcaagtaaaagattcaggcaaagtcactgtttctaataaagattcaaaagctgaattctgggatttccagcaagcatttactggtctgtgctacgcaaaacagatccaagaatttcaaagatatcaacatgattttagacaaggggagctcagcgtatgccaagcgtaa

SEQ ID NO: 55601 - DNA, 294 bp, Acinetobacter baumannii
atgccaagcgtaaatttcacggttaaatggccgaatggtcaaagcagcaatttctattcaccaagcaccattgtctatgaatattttcagaaaggtcagcaatgggccggtcaggaatttttaaaacaggctgaacaggccctgcatgctgcttccgaacgggtacgtacacgttacggctttgcctgcagttcagccatggatacgctcaaccgtattcaggaacaagcagcatcattctcagtcaagcctgaagacaccattgaaatcactgacatttataacatcgactag

SEQ ID NO: 55602 - DNA, 1287 bp, Acinetobacter baumannii
atgtttcaatcaacaagtttaaaatcacattatgatgtcgttatagtcggtggtgggcaggctggactttcagtgagtcattatctcaaacaggccaatatcgaccatgtggtgattgaaaaagaagattgtctaacccatagctggcgtaaaaaacgctgggataactttactttggtaacgccaaactggcagtgtttattgccgaaccatccctatcacggcaatgatccagacggttttatgaaacgtgatgaaattgtcgactatctggatggatttattgaaaagctaaatccacctgcattattaaatgtcgccgttgaacaagtcactaaaattgccgagcagcatttccatattcaaactagcattggtgaaaccacagcaaatcaggtcgtgattgctgcgggtggttatcacacgccaatctatccaaaacacagttctgaattgccggagcatgtctataccattcactccgagcagtactttaatgctgggcaattaccggaagggaatgtattggttgtcggttctggccagtctggtgcgcagatcgcagaagatctgcatttagctggcaaaaaagtctatctgtccatcggtgatgcaccacgttgtgcacgtttttatcgcggcaaagatgtggtgaaatggctgtttgagatgggctattacgaaaccacggtaaaagaccatcgctatagtgaagaagtccgtaacagtaccaaccattatgtaaccggtcgtgatggtggtcgggacatcgatctgcgcaaattcgcgctcgaaggtatgcagttatttggacgttttgctgactatcaaaatggttcacttaaattccagccaaatctggtacagaatctagataatgcagattccacctataaccgtattaatgcttccattgatgcctatattgcacagaatggaattgcaacggctgaacctgtcagtgtctatacaccagtatggcaaccagaaaccgagcggacagaaattaatttagctgaagaaaatattacttcaattatctggtgtatcggctttaaaccggattactcatggattgatctggatatttttgaaaatagcggttatccaaaacatgatcgtgggattacagtggatccagatgtcagctttatcggcttaccatggttatatacttggggatcagggcgtttcctagggatcgatcaggattcacaatatttatctgaacatattattcaacgccatcatgcctttaaggaaaaatatgcagagatgattgcttaa

SEQ ID NO: 55603 - DNA, 696 bp, Acinetobacter baumannii
atgttttttaacttgctttgtcagtttgaaagtaaactctttaaagacttgccttgttataaaaacctgattaccctcatcaatcagcaccaacttgctattcatgctttgctttatgcgttgagccaaaaagatgaaagttcatatttatggattgattcaacacctttacctgtttgtaaaaataaaagaatccctaaaggtcatcatgctttagatgagattgcttctcgtggtaaaagtacgatgggctggttttatggttgcaaattacacttgctgatgaatcaagagggtgaaattgtaaattcagatttatcaaacggacatattgctgatcttaaaaaagttgaggatttagtgaatggcttatcagcaacggtctatggtgatagaggctacattagccaaccattgaaagaaacacttaaagagcaaggcattgatttaattacttatccaagaaaaaatatgagagtgaccttattaccattttctgatgaatttcatctacgacaacgtaaaagaattgaaacattgataggattattgaaagaaaaatatcacttagttacgagtaaacatcgttcgattgctggttttttagcaggcgtattttcttcactatgtgcgtatcaactttgccaaaagaataagcctaaaattcatgtgattaaatctttggcttatccgtaa

SEQ ID NO: 55604 - DNA, 702 bp, Acinetobacter baumannii
gtgcgtaaggtctggcaacaattgaaacgtgaaggttatgttattgcacgttgtacagttgctcgattgatgcagaagctaggtatacaaggtgtttggcgtggtaagaataaacaaaccacccgtagccgagatgatcaaaaaagagcagatgatttagtgaaacgtaattttaatgctgatcatcctgaccaactgtgggtgagtgactttacgtatattcaaactcattcaggctgggtctataccgcctttattaatgatgtgttctcacgagcaattgttggatggaaagtatctacacggatgaatacagatatggtgctcgatgcattagagcaagccttgcacgatcgaggcatgccaaagaatgtgattcatcattccgatagaggtgttcaatatctttctattcgctataccaatcgtttagaagctgcaaatttacgagcatcagtcggtacaactggtgattcatacgataatgctttggctgaaacggtgaatggcttatacaaaacagaggtgattgaatatttaaaagcagattggcaaggtttagcagatgtacaacttgcgacactaaactgggtagattggttcaataaaaagcgtgtacacagtgcactgggttatgtatcgccttttgagtttgaagcaatgtactatgataagattaacccgttaggtcaggtggcttaa

SEQ ID NO: 55605 - DNA, 639 bp, Acinetobacter baumannii; identical to SEQ ID NO: 54446

SEQ ID NO: 55606 - DNA, 1188 bp, Acinetobacter baumannii
atgagcgcacttaaacaattgcttaaacaacatgacatgacgcaaagctcgctctgcaaaccgctgggtgtaagtactgcaactgtcaatttatttatcaatcacgggttatccccgaagaaacgcgctgctgagtttaaagcccaatttattgagcttttaaagaacaaaggcattgcacctgaagacattcaaaacgcattagatgctgaccaatcccacgccaataacgaccaagccttggatggtgggactgacagcactactcaaccggaggaagagcaactcatgctactacgcaaacaaaccttaacaccagaagcaaaacgaaaatttaagttatttaaaaatatctttactgaagaaattcgtaatgcaacagaattttatcaggattcaaacatcaattatgcacgtgaagcagtttggcaaactgtcaaaggcaacagctcattcattgcattagtcggtcaatcaggttcgggtaaaacaactattcgtatggagacacatgatcgagtagaacgtgagcgtgaacctaccatcattattgaaccatatgtgattgctacagaagctgatgacatcaaagggaaaactttaaaatcttcacatattgctgaagcaattttacgagcattggcacctaatacaaaagcaatgcgttcacctgaagcgcgttttcagcaaattcatagcttattaaaagagtctagtcgagctggattacatcacacattaatgattgaggaagcacatagcttacctatcccaactttaaaacatctcaaacgttttcttgaactcaagaatggttttacaccattactttctattgttttgattggtcaggatgaactcaaaatcaaactggctgaaaacaacccagaagttcgcgaagtagttcagcgctgtgaaattgtcacccttgaaccatttacccaaaccacgcttattgactatttacagcaccgttgcaaagcagctggacgtcaactttctgactttattgatgagtctggcctagatgctatttgcaccaagctcacccgcaatgttggtcgcaagaaccatagtgaaagccttttatatccacttgcagtcggcaaccttttaacaggtgcattaaacgtagctgctgagttgggtgttgatgtcgtcactggtgacctagtcatggaggtatag

SEQ ID NO: 55607 - DNA, 180 bp, Acinetobacter baumannii
atgtacacagtaaaagcacttgaaccacaacttaacgacgatccgcaagcattgtttgcaatcgtccgtgaagacgacgctttagtcggtcatttctaccaccatgagcatgcagaaattgcatgtgcagcacttaaccaaactcaagcaactactgaaggaaatactacccatgaataa

SEQ ID NO: 55608 - DNA, 276 bp, Acinetobacter baumannii
atgaataaatctgacttaatcgcaaacatcgcaatggacgctaatttaactaaatcacaggcagcagctgcattacaagcagtggaagatgcaatcgctgctgctttagctgaaggcggaagtgtttcttggattggcttcggaactttttctgtaaaagaacgcgctgcgcgtacaggccgcaatcctaaaactggtgaagaaattcagattgcagctgccaaggctccaactttcaaagctggcaaaggtttaaaggatgcagtcaatggataa

SEQ ID NO: 55609 - DNA, 234 bp, Acinetobacter baumannii
ttgttagctctacaagctgaattggtaggccgtttagaaacagattctgaagtaaagcaagcagctgcaactcgttcacaacttgctcctaatgattttgcaagtgctgagtatcaagagtggaaccgcttcaaacaagcagaaccattgcattgggctgcaatcggcaagaccgatattcaaactggaatcatggctctgatgcgtgcagtagctcaaccaactgttgtttaa

SEQ ID NO: 55610 - DNA, 180 bp, Acinetobacter baumannii
atggcaacaaaaattaagggcttagacatgcttgtaaagcacggtttaagtgttgtccgtaaattcaatatttgcggatggttcgagtatcacgttttgaatgaggctggtcagagaatttcacggcatacagttcaacaacgtgcgattgatatagctctgaacacacttcaagcataa

SEQ ID NO: 55611 - DNA, 714 bp, Acinetobacter baumannii
atgagtatgacccgcgaagaagcaattctaaaaatcaaaaaatgtttagcattggctaaatcagccaatgaaaacgaagcagcaattgcactacgtcaagcacaggctttgatgcgcgaatttcagattgatcctgatctactcgatatcgttgaggctagttgcgaaagtaaagcaacaaaggttcctcaagcgtgggaagcaagcttagttatgactatagctagagccatgcaatgcaaacctatttttagttctggtagcagtacttggggtattaaagcttcatggacatttattggtatcgatccagcaccagaagttgcatcttacacttttgatgttttatatcgccaagtgattcgttcaagaaaaagctttattgaaaacagcttaaaacgtgtatcggtcaaaaagaacaaggtacgtcgtgcagatttgttctgtgagggctgggttgattcagttaagcatttaataactgacttagatattgatgtaccagcaaataccactgaacgtataaaaaaatatatggataaagctcacggaaagcttggttcatttacacctaaagatcgaaacaaaggcaaagctttcaatgatagagcagctaatgattatcatgcgggtaaacaatctggaaagtcagcaaaacttaatcaagctatgaatggtggcaagcaatacgaaaagttgggagcaccaacatga

SEQ ID NO: 55612 - DNA, 2031 bp, Acinetobacter baumannii
atgacaagttacgccaatttattaaaaccattacatttgggcttcacaaccattaaaaaccgtgtggtcatgggatctatgcatacgggattagaagaccgcttttttaactacccaaaactggcagcttattttgaagagcgtgccaaaggtggagttggtttgattgtgactggcggtatttctccgaaccgtcaaggatggttggctccggctggcggaaccatgaatagcttatttgatattccgcagcaccgtttggtgactcatgccgtccataagcatggttcaaaaattctgatgcaaattttgcatgcgggacgctatggttaccagccatttgtagtatcttcgagtgcaataaaatcaccgatttcaccatttaagccacgtcaacttactgaaaaaaatattctcagcacaattgaagattatgcacagtgtgccgacattgccaaaaaggcaggctacgacggcgttgaaattatggggtcggaaggatatctgattaaccagtttttaagtcgccatgtaaaccagcgtacagaccgttggggtggtgaaattgaaaaccgtatgcgttttcctgttgaaattgtcaaagcgatccgcgcaaaagttggcgaaaaatttattatctgtttccgtttatcgctgcttgaccttgtgcatgacggtaacaccatgcaagaagtggttactgttgcgaaagctttagaaaaaacgggtgtcactttattaaatacgggtattggttggcatgaagcacgtgtgccgactattgtcacctcggtccctcgtgcagcgtttgtcgattatacggctcatgtaaaacaacatatttcaattccagtcattgcttctaaccgtattaatatgcctgaaactgctgaagagattttggcaaccggcaaagcagatatgattcaaatggctcgccctttattggccgatgctttttgggtaaataaaactgcgaccaatcgtgtagatgaaattaatacgtgtattgcctgtaaccaagcatgtttagatcatgcatttaaaaataagcgtgtgtcttgtttagtaaacccacgtgcaggccatgaaactgaattggtttatttaaaaaccaaacaaccaaagcgtatcgccgttgtaggtggtggtgtagccggtatgtctgctgcaactgttgctgcaagtcgcggtcatgcagttaccctgtttgaagccaatgcagatgtaggtggtcagtttaactttgcaaaggttgtgccgggtaaagaggaatttcacgaaacgattcgctactttaaagtacaacttcaaaaaacaggggtagatgttcgtttaaatactcgtgttaatcgtgaacaacttgaacgcgaaggttttgatgaggtgattgtggcgactggagtcgtgccgcgtgcattaaagattgaaggaagtaattcacctcaagttctttcttatgctcaagttttacagggcgctgaagttggacgaaaagttgccgtgattggggctggtggtattggtttcgatgtctcagaatttttacttaaaccaccacatcaaccacagcctcaatctttagccgagtggcaacgtgagtggggtgtagacccagatccaaattatgtttctgaaggtggtatgcaaccaccagtagttgagcccgcaatacgagaaatttatttactgcaacgtaaaacaaccccactcggtattggtcttggcaagacttcggggtgggtacatcgtgcccagcttaaaaagcacggtgtacgcatgcttcgtggcgtgcaatataaagcagttaccgatgaagggctttggattgagcataatggtcaagaccagcttttacgtgtagataccgttgtggtgtgtgcggggcaagagtcggtaaaagacttgatgccaaaagaaggggagtcgactatagcgaactaccatattattggtggtgcaaagctcgcagcagagctagatgcgaagcgtgcgattaaagaaggagcagaattggctgcccaactgtaa

SEQ ID NO: 55613 - DNA, 288 bp, Acinetobacter baumannii
atgacctatgaagtttcttacttgccacaagcagaacaggatttaattgaaattttggcgtatggcatagagacatggggcgaaaaactagcagaagggatgtatttaaaaattactgaacagctagaaaccctgtatttctcaccaaatcgaaccaaaaagaagggaagtttaggaacaagagaaatgcttatttctgacagtccttatcgggcaattattcaaattgatgaggaagccaagcgagtttttattttaagaatcttgcatacttcgagaaatatttaa

SEQ ID NO: 55614 - DNA, 315 bp, Acinetobacter baumannii
atgcaagttattacagcaaaagatgcaaaatcacgctttggtgagttattagatacgatgcagcgagagcctgtcttagtgacaaagaataagcgccctgttggtgttttcttgtcattaaaagacgtgaaaggcacccacttagaaagcctttttgatgtccaagatgatgattatgaagattgggaaaaagagaaaatcacagaagcgttaaatgctttgaaagcgcatccatctgacacgaaagaaatgaagtcagtacatgcgactgcaatgcaaaaggcacgagacttggtagcgagccgtaaaagatga

SEQ ID NO: 55615 - DNA, 1644 bp, Acinetobacter baumannii
atgatcgttaaaatattgggaaacaaaggtggcggcagtgcaggtgcagttattgattacatgttaggtaaagacaaagatcgtgatggagcgattttacttagtggcgaccctgatttaaccgctcgattagcggacaacttaaactttcaaaaccgttatacagtcggtgttttatcttttgaagaaccaaaccttaaagatcatataaaacaagaaatcatgcaagattttgaaaaaacactacttgcaggattagaaagagatcaatacgacattacttggatagaacatacggataaagggcgtttagagcttaattttattattccaaatgttgaattaagtacaggaaaacgcttacagccttactacgacaaagtagatcgtccattagttgaaaattggaagcaaaaaactaactttgaacatggattatcagaccctcacgcacctgaaaaagctcaagctattaagacgcttaacagccaaaacttacctccgtcagttaaggacattaaagagcaaataggtttggtgattgctgatcaaattggtaaagggaatattcaggatagaaaagacgttattcaaactttagaagtagcaggttttgaaataacaagacaaacagatagatcaatcagtattaagaatcctgatggtaagaggaatatacgcctagagggtacaatttatgaaaatcgacaatttgatcaaaaatttgcagaagaacacaacagagcaagagcagagtatcaaggaacaagcagagagcgttacgcaacagcacttggaaaactacaaagccttgttgaaagcaagcgaggaagcaacagcgagcgttatcaaagagaatttaaggttgattcatcaagaacaatcgaagatcaaaaacgcactacgtttgaatatatttacagggggagtgctgggctttctgatagcattgtttctattcctaatagtgagcgacatttggttagggaaaagcgtagcgagcaagcaacaacagttggcaacactcaactcacagatcgagtacacccaattagagcagaaagttttaaagacagtgacgatattggaaagcaaggacaaaacaacgtattacatcagagcaaacgacagcaagacatcggaagcttatacaaccaaaaacgacaacaaggtgctttcagtaaaaccttaaataatccttttgataagaatccctttgatcatgctttaaatcgttcaaatgataaggacataggtaatctttgggacgttgagtatttgtatgcagatataaaaaatactcaaaaatcatcattgagccaatctcaggcgaataaagcaaagaaaccaaatacatcggaacaagaagatgccaaacgactttatgaatcgttacaacgatttattagactcattagagaagcaattgaacgagttagagcagataaagaaaaatcagacagagcagatcgagctattgataacgcagatcgagctattaacgacacagaatcaagaattgagcgaacaaaatcaggaattaaacaatctgaacagcaaattaagggaagtgaacagcaaattagccaacaaataaaagagaaacaggctgaaagaaaggtaagtagaggatttgggcgttaa

SEQ ID NO: 55616 - DNA, 327 bp, Acinetobacter baumannii
atgaaacagacaattaagcgaaataaagaaatcaaaattcgtcttacagaagaagaacatcaagctttacttgagcgtatgacaggtggtgagcttgctacgtggatgagatcagtttgtttagatgaaaaaccgaataaaaaaagaaattacaaagtagcggatccaattcttcttaatgctttagctcgtattggtgggaatttgaatcaaattgctcgccaagtgaataccgttgaatcagatatagaaaaaatcaaagcatttgcacaattggcaatgattagagagcaacttcaagaagtattagaaaactatgatcgttaa

SEQ ID NO: 55617 - DNA, 243 bp, Acinetobacter baumannii
atgaaaaaagaaattattagagaatgtactaatgaatctgaatacaatgaaaaattaagaatgataaaaaacacgcttgctggagcaccatgctctatcaaagaatataaagaatatgaaaatggaacaaaaaaattttatggcaaaatagaagtattattagaagatgaaaaattaacaaatgagcaagatattaatttaattgaattttttgaagttttagaagaattggaaatgttgtaa

SEQ ID NO: 55618 - DNA, 420 bp, Acinetobacter baumannii
atgtttaagtctatttctttttcaatctttctttcattcttttttattcagaatacttattctaactctaccttagatggtcatgttgcggagcttttaggaaatagttcatcttcagacgattttcaatatgacaagaatatatgtgcgatgttttataatattagttctattgccatgacatatagacaattaaattggtctgcaaaagatactattgataagctcttatctgtaaatggtttggataacttttcagataaaaatatgattacaaatatgactgtcagtattgtaaaacaagcttaccaagcacctatttatcctactaaagctgaaaaaaagaatattgctgatagttttgccgatcaacattatttactttgtatggagctttattttaagaaattacatccataa

SEQ ID NO: 55619 - DNA, 516 bp, Acinetobacter baumannii
atgatgatatttaatatgttaaaaaaaatagcaattttgagcttacttttaatttcacctattcttgcttttgcaaatggtgcgggatatggaaaaacaacttggggaatgtcaccacaagaagtagttgctgtggaaagtaatagagctactcttattgaaccaaagaaatattctggagcatggggtaaagtacaaattaataatgtttcgattggtagcggtagctatacagtagattttctttttgatgaatctgataagctagttcaaaccaatgtcacaagtaatgaaaaaagaaatataggaatagcaaataataactttaaaacattaagtcagcttttaactcaaaagtacggaacaccacaatttcaaagtagtgatagcgttacatggaaaacagcagatactacaattgaattaaaaaaattgattgtaggaagtgttatagctcaaacaagtattcgctatatacctaatagtaaagtggtagtagacacatcaaatctttaa

SEQ ID NO: 55620 - DNA, 366 bp, Acinetobacter baumannii
atgttcaataccgtgcgtaaatgggcatatacggctgttagagcgcatagaggtggtgtttataatacttggctagaggaagtcaccaaacagtgtttaagcgtaaatgaggcgtttttagaggcattaccgtattcagaaatcaaagctacagcaaaaagtattgccgaatactgttggaagaaggacgcttattgttaccaagagtttatagatcggcaaagtcgcaagggggctttaggtggtaaaaagtcgcaaagaggggctgttgttaattcagaaagaagtactaagccttgggaagttttaggaattggacaagcaacttattatcgaagaaagaaaaaaggtttattaaataattag

SEQ ID NO: 55621 - DNA, 1587 bp, Acinetobacter baumannii
atgatgatttcaaaaacctttatgccatctgtgctgatgatggcaatcagtacagtcatggtcggttgtggaggcggtggttcgggaggagagtccagttcatccaatggtggtggaacggaaaatcctaataatggcagtaccaatcctaagcctgtaacttgtgctgaaactcaatatctagaagaggggacatgtagaaataaggcgccgcagaatattcaggcattctcattgagtaacctgatccaaggtcaaagctatccattatcgctgcaaacagatcaaggtctggcagtgacttttagcagtaatacccccaacatctgtagtgtaaatgatagtgaacttaaagccctaaaggttggacagtgtactctggcactgacacaggctggtacaacaaaagttctaccactcaatagccgcatgaccgtcaatgtgacttgtgctgccgatcaatatctagaaaataatgtttgtgtaactaaggtcgagcaaaccattaccccactcaaaatcaaatacatcctgacggatagtgtgtattcactggatactgaatccagtgccaaacttcccgtcacgattagcagcctttcttcatcaacctgtacgtatagtcagggcgaactcaaggggattggggcgggtgtatgtactcttaaactcacccaagagggtgataccaaaacactggtagcagagagtaaaaccatcagctttgatgtgtttaaggcttcatctatgagtgatgcccccaatattaataactgttatgcgggtaagctcagtgcaaagtttagaaatgaatttttaaatgaaatcaatacggttcgtgccttgcatgggctgccaagtattacatacgactatgcccatgaagatgagatgatgcagacggcgctgattcttgctgcaaacaacatcttgacccattacccagaatcaaacacaaactgctattcagatattggtgcagtgggtgcaaaaaccagtagtttggaaatgggggtaagacagaataaatatgactattcacctgccgaaagcattacaaatatggtgcatgacaaattaaatctgtttgcaggagatgtggggcatcgcctctggatgctgaatcctttcttacaaaaatcggcgtatggttcagttaatgcgccatcatttaaagatacccgattcccttatgtggtcggtacgtcctacaaagtggtttatcccttcgacaatccaaccactgcaccactcggtgtgattgcctatccctaccacaactatccagccaaatattatatggcgggttcaattctctcgatttcagttttaaccgatcaaaagaatttctttgccaatcgcaatgtggactacgccaaagctaacgttgttgtcactgaacgaagtagtggtgctaaacagaagatcagtaatatccgttatgaaaatatcggagttcccaaccatatccagtttaactttgacgatttgaaattgaacgtgatctacgatgtcaaactcagcaatgtcttggtgaatggtcagcctaaagaatattcctactggtttaacgtgaatgatcggtaa

SEQ ID NO: 55622 - DNA, 762 bp, Acinetobacter baumannii
atgagatgtatgattaaagaatttcttgtcacgagtatctcgctgctcatgatacacaccgcgacggctcaacctatttctgcctcatctttaacactggagcaaggcttatcctgtctggattggactgaaaatgaacaatcttttaataaccaactggcgttgggtgacagggcagatataccaacaccagcgatcgccaaacttcagaaacaatttcaaaagcaatatagcaagcaagagacgaccattatcgatgattcagacgatgaaaatttctgtcaggactgccctgaaacaaccgtctatcgtcctagaaacaaaagcaatccgattcaacgcattgagacctcaatgcatgtcagtgttgcaggagcaagtacatcgatctatcgtcgagatgacatcgccacaactaaacaaaaaattgagagcggattaaatattaaattcagtcgccatacagggcagcaattcaaaagctttaaacagcagtgggataaagcttctatgcatgatgatcaaaatagaagtaaaacccaaaaagtctttcagcaatatccacatttaaaggtctttaatggcgaagtcttccaaaatcaaaagatctatacacccaaacagatttatatttatagccagccctataaacgtgacacttcttatctgaatgatatgattgcttttatcagtctttatgacaacccagtcaattcttcacaacacattttacagtgtggctttattgacaatgtgttttaa

SEQ ID NO: 55623 - DNA, 384 bp, Acinetobacter baumannii
atgaaaaaattaatattcgcaggattatgtttaagtctttcaacactagcttgtgctggtgcaaaagaaagcctagtaggaaagcgtctggtcttagatttgccagataccgaatgtgcgggattatcttttgccaaaaatggtaaggacgcagcaatgtatgccgaaatggggcaatgccaagatcctttaccacttcgagtaaaatggctagatgacaagacctttattctaattgagaaagtacgaacgaataatatttctccaccacgtagctatttatataaagttcaaagcgttaatcagcattatgtaaaattgacccagatatggacggggtggggagattcaaaagacgatacgctaggctattattttaaatag

SEQ ID NO: 55624 - DNA, 303 bp, Acinetobacter baumannii
atgcaaaagctgaaatttcagtaccagcgccctgtaaaaatcgatcctaatgatggtatccgaaaacgatatccccatatgaggaatgcttattttaaaaagttcagtacatatccagaacgtagtttctatttttttcatttgatcgaatataaggattatcctttaaaacttcgtgttgcacgaggttctggtttgccagaagaatgggatgatcttccatcttcagtctacaaggtagctaaaagctggaagcataattccaaaagaaagcatcagtactttaaagaggatgttgcctaa

SEQ ID NO: 55625 - DNA, 258 bp, Acinetobacter baumannii
ttgaatgagacagctaaaaataaaattttagaaacttttgcattttatctttatgattataaaaatattaatttagaaattaatggtgaaaagttagatcctaaaaaaataatattagatgtagtcgtttttaatcttgattttattaattatgaaggaaaaaactatccatctaatttaaaaattacggaatggataagttcaaaacatgcgacttcaacatatttaagctgtaatcatgggcagagtaaaacttga

SEQ ID NO: 55626 - DNA, 519 bp, Acinetobacter baumannii
atgaactatgctcattcagtacaattaacaatacaaaatgatcttattagcaagcttggtaaaacgagtcttgtagatgcactaattgagctaatttggaatgcattagatgccgatgctttaaatgttcgagtaatttttgaaggtaatggtttagattcattgaattctataaaaataattgatgatggtgttggcattcacttttcagaagcaaaaaatatctttaaaaatttaggcggatctaaaaagaaaaataaacttaaaagtgatatgtatggccgttttttacatggaaaagagggcaagggtcgccttaaagctttttctttaggtgctacagtaaattggacaattacatatcaagatgaaaatttagataaattatttacttataaagtagcaatgcatttaagtaacccatctgatgtgaaaatttcagatccaatagagtcggacaaaaattcgaagacaggtgttatattagaggcttatgatgtacggcagagtaaaacttga

SEQ ID NO: 55627 - DNA, 423 bp, Acinetobacter baumannii
atgaaagcagaaaaggaacaccgtgtacctttatctcccgaagccctctcattgcttgaatccattaaactgtatacccagcctcaggattttatcttccctgcacctcgcagtggtggcatgctttctgatatgtcactgacagctttgattaagcgaatgcatgaacaaaaacttaaagaaaatgccttaggctatattgatcctaagcaaaatcgagtgatcacaacacatggtttccgttctactttccgtgattggtcagcagataaaactgattaccctcgtgaggtctgtgagcacgtattagcgcataaactaccagacgaagttgaagcagcttatttacgaggagcttatctagaaaagcgtaagggattaatgactgattgggccgaattctgtagtacacactttaactag

SEQ ID NO: 55628 - DNA, 258 bp, Acinetobacter baumannii
atgcgacagtttacgtctcttcaggttgcgatattagcactcggaagtttatgcttttcttcagcttatgctggttctaccttagttccaatgtctgatgctgagttgtcagctactcgtggtcaagccttgatgagtatgtcctatattgcgcctaccgatgctgcaagtaattctaatactaacggaaacatgggcttctatcgacttgctctagatgcccaattagaactgaatgccaatattaaaaaattatag

SEQ ID NO: 55629 - DNA, 387 bp, Acinetobacter baumannii
atgaataaaaaatatagtgtttctcctcaagagctttctcgtcgtttacgacaacaaaagaaagaacttttagcgaacaatcctaagaaaattattgaacctcaatatattcaaggtgttcatggttctaccatgcagttcggagtgttagtccacaattggcgtaatggttggaaatggttcagtaatttagccttcgctggcatcgttgcaattcaaactttttatgacaccttgccacctgaattaattgcaacattaccagcagacgcacaatccaaaataactttaggtttggctattttgggacttgttggccgttttataaatcaaagtaaacctaagcctttgcctccagcatctgatgcttttaaggaggaggcatga

SEQ ID NO: 55630 - DNA, 501 bp, Acinetobacter baumannii
atgtctatcacttttgatgaagtgtttgaacggactattggtcatgaaggtggctatgtaaataatcctaaagaccctggtggggaaaccaattggggtatcacaataaaaacagcgcgagaaaatgggtatatcggttccatgcgctatatgaagcgtgatcaagcaaaagagatttaccgtaaagcatattgggagcgcgcgaaatgcgcacaatacaattctgcaattggttttcaaatgtttgatgctgctgttaatcatggtattggtaatgcgattcgtatgctacaacgtgcggttggcgtagctgatgatggtgtagttggagacattactttaggcgcaattaataaaaaatcgctcgatgatgtcttggttttgttcaatgctgagcggctagagttttatgcaaaactaaaaacattctcagaatttggtcgtggttggactcgtcgagttgcaagcaatttacgttacgcagctggagatacgccatga

SEQ ID NO: 55631 - DNA, 330 bp, Acinetobacter baumannii
atgaataaatttattatagtaagtagcatactcttattagctggttgttcttcttttaagaaacttccagcttgtgatagtcctgaagtcacaaatattcttaaaaatgcaattactgaagtaccagctttcaagatgttaggtgtaacgaatattgaaattaaagatattggagaaaggccatcttcaacaagagataaaaagatttgcagaggaagtttgttcttaggtgaaaacttaggttcacaagtaatttattattcagttgattggcaaaataaagataaaggcgaattttgggttcaaacaatcccaaatccaacagaataa

SEQ ID NO: 55632 - DNA, 657 bp, Acinetobacter baumannii
atgcacaattttgtttctgatcggtttaaatccgagcgaaagaggttaaacctgagccaagaagggttaggaaatttaattgaagtaagtgagtcaacagttaagagatgggaaaatggtgcctcaatccctagtgataaactgattctctgtgctcaacatggttttgatattacttatattcttctaggtgacaggaatattgagcctagtaaatctgacgagttgttttgtggggaatttgctttagtaaatgtatatgatgtggctgtctctgctggagacggtgctgttagctttggtgcaactcaaccagttagtcgtttagcatttaggaaagattggttatcaagacatggactttatgcaaaagatttagtcattgtctatgctaaaggcgattctatggaaccaactattcaagataaagaaccattgctagttaatacccttgataaagacttaactgatgggtttatttatgtagtcaggaatcaagagaatttttgggttaaacgtgttcagcgtcaattcaatgaattgttattgttgtcagataatgaaaaatatttacctatgaaacttgatttaaatgaagctacagatattgaaatcattggcagatggataccaccaagtcgtgggactttttattga

SEQ ID NO: 55633 - DNA, 213 bp, Acinetobacter baumannii
atgacatctaattcagaagcactcacacctgagcaggtcaaaaaaaaccttcgtgctcaaggcaaaacccttaaacaagttgctctagaaaacaacctcgaacctagcgacgtttacaaagtgatgaacggatcacgtaaaggtctttatggcaaaggtcatgagattgctgtgttacttggactaaaagcaaaaccagagactgcgtcatag

SEQ ID NO: 55634 - DNA, 162 bp, Acinetobacter baumannii
atgaatgaccctatgtctctgattagtaagctcatatttgcactatcaatctttgcttttgttggttggtactttgcagagcaagacaacgagattcttcgtcaagaacttgtttcccttaaatacaacatgactggtgatcgctatgacctcaccaaataa

SEQ ID NO: 55635 - DNA, 297 bp, Acinetobacter baumannii
atgacctcaccaaataaatcggcaggaaaagttttaaaagttttgtttgctcttcgaggccattacgttttcggacttagcaataaacaactttcggaaagtttgaacgagtcaccgacatttattacgcgtgctttacaaacacttgaagctgatggctgggcggaaaaacgcgataacggcaattacgctccgagcatgaaagccgtcaaatttgcaactgcgtgcaaagaagaatatgaccgcgttcaagcccgcattgatgaatacaaccaacgtcttcacacacaattttaa

SEQ ID NO: 55636 - DNA, 876 bp, Acinetobacter baumannii
atgagtaatgaagttagcaccgaagttgatttaattcagcgtcacactcagtcagttgcgggcttagcaacccaattaggttacgacggaactcttactgttggagcactagaggacgaaattcgtttctatcaacgtcgtactgtagaagcatgtcttgaattaggaaagcgcttaatactgcttaaagaaatgacaccgcatggtgaatttaagcaacgtacagacatgctcaatattaatgaacgcgccgctcgtagatttatgtcagccgctttgaaattttccaaaacggacaatttgaccgttttgaaagcagcaggaaatcaatcaaagttgcttgagcttttagtacttgatgatgaagaaattgcggaattaagtagtggtggaagtgtcaacgatatcacattggatgatattgaccgcatgacaactagtgaactccgcaaaaaaattcgtgaaattaaagccgataaagaagctacagacttacttcttcaaaagaaagaccaaaagattaacgagcttgatagcgaattaaccaaggcgaaaagcccagttcaaatcaaaaaacgtgctgaaagtgaagctcagcaacttgccaagaaagctcttgaagaagccaataccgcatgcctaaccatgcataacgatactgttcgttttacgaatagcatcaactctgttttagacacgatcaacgaaaacggtctcttcaatattcaagaacaagttgaagcagcagtagttgcagcattccagcaaattgctcaaaccagcgtagaactaggcattcaaattgactttcagtcgatggtctcacctgactggatgacagctgcaagtttaactggttcaagtgtggagcaataa

SEQ ID NO: 55637 - DNA, 213 bp, Acinetobacter baumannii
atgggtaatctgcctaaattctatcaagttggtacatgtcattataatcttgatcaaattgtcaaaatagaatcaagtatagaccttagctccgtattagttaatttctcggatggttctgaagtagagtttccgttcgatagtgaagatgaatacaatcaatttatccatttaataagaagtataaatttttcttcagatttaaatttttaa

SEQ ID NO: 55638 - DNA, 192 bp, Acinetobacter baumannii
atgactgaatttcaaaaaattacgcatgagattagacagctccaaatagagctaaatcacacaggcagttgcacaaccaaaggcctaacagaagaagagatcgctcacttagatgagcgattttttttggccatagcaaagcaaaataaattaattgcacgactcaacaataaaccagaaggcttcttataa

SEQ ID NO: 55639 - DNA, 468 bp, Acinetobacter baumannii
atggacgataaagagtatttttggctaactcggaaaaaagaacctaaaaccaagcctaaatccagaccgctacctaaagctactcaaaagtacttagaggcagaggaagaatttactgaagctttagacaatctggaaattaaatacgaaaagaaattccagtttaaatcaacaaagcattggcgttttgattttcatttaattgaacatcgtattttagttgaaattgctggcggtccctggtcaggtggacgaaagggcaagctggcaacaaaggcgtggagtatggaccgttacgatgttgctgaagaaatgggatataccgttgttcggttagaggcagcaccaagatttaagattaatgaatctggtccattacagatccaagctcatttcgcaagccaatggcttaaaaatttaaagaggcaaatatttaatggatcagatcagaccatttcctccaactga

SEQ ID NO: 55640 - DNA, 477 bp, Acinetobacter baumannii
atggcggctctaaaaaaagaggtaaaactctttatagttcgctcacttgccgtatttaatacacccacagaaactgctgagctcgtcaaccaagaatacgggataaaagttactaaacagcagtgtgagaaatacgacccgaccaaacgggcaggcgagaacctgagcgaagaattaagaaaagattttgaaaagactcgcgaaatgtttttgggtaagcctgaggcaatcccaattgcaaatttagcggtgcgtttacagcgctacgaaagccaatatcaaaagcacagtagaaaccgtgtagcagctttaagcattcttaagcaagctgctgaggacataggcggcaagtacacgaataagactgaaattacaggcgctggtggtggtccattacaaagcgaaaatattacctatgtgactgctaccgatgagcaggtaaggcaggcgatagatgaactcgagaacgaatattga

SEQ ID NO: 55641 - DNA, 852 bp, Acinetobacter baumannii
atggaaattaaaaatgaaattttaaaagattacgaagattactgtcataaaaaattagttagtgagtttggtaattataaggctggaacaaatggaccaattcatttatatcaacgttataagtacagaattattaacgctcaaccgagagaggtgattgaacctcaaaatttagtcatacctgctgaacatttaggtgcttatcaaaaaattattttagatatagaaaaaggaaactctttaaataaatatcaaagcagaaaccttaaaaagctagattataatgatgatatgttatctcattggagaatccagcattttcatttaggtaatgttgtggaaagtgatgggtatatggaaagaacgtcggatttattgtttatccacttttctaactctcaagcacacattattggtattttctcacatggcgattggtgcgatttagatatcatcgaaactattcatgaaaattggcctaatctactaattagttttaagtctgaatcgactagcgaaccattgacagaagagcaatataaaattttaagacgtaaaggctacaacacaacagttagagtaaaggatggtacagaatatcacccaccaggttttggtgttgttgctaatggatcgcctgtagaagccataacgaatgttcagaggattttaattacatttgagaactcatttgatgcaatttctacgaatattgatcaaatattagaggctgaccctcaaaaaagaacaactgaaatagcaactatcggtttggagatggatgaggctaatcaaagatttgtttatataattaaggaaacaggccatagatttaccttagattacgaataa

SEQ ID NO: 55642 - DNA, 813 bp, Acinetobacter baumannii
atgacaacgataattcagatcctgaaaccccacctccagcaggcgaagaaacgtaaaaaaggtcgtaaagcttctaagccgagagccgtgcacgtaaaccgccgtgtagagctttattacacacggcaattactggctatctcaaaatattgtcaggaacaaactaaggaattagttattcctacagtaggccagaacatcggagatgcatggttctctgacatgatggcggcgtttagggaaaagctcacaaagtatgttgttgaggtttcccgtccgttggccacaaaggttgtgactgacacccaaaaggaagtggacaagcaaattgcagagcacaccaaaacaattattggtgtggatcttacgccgttttatcgagctgctgatatccaagacgaggtagatctaaacattacggcaaatgtcagtttgattaagtctattccgcagcaatatgccgataagcttgaggtattaatcaccaatgctttgcagactggacaaactaatgaagagttggccaaagctattaagcaattaggattatctactgattatcgtgcacgtcttattgctagtgatcagatgggcaagattaacggccaaattaaccaagcccgacagctttcaatgggtgttgagacatacacatggcaaacggcgaaagatgagcgtgtaaggccagatcatcaacataagcagggcaagacatttagatgggattcaccgccagatggtgggcatcccggtcagcctattcgttgtcgttgcacagctttgcctaattatgaggatattttgattgattaa

SEQ ID NO: 55643 - DNA, 438 bp, Acinetobacter baumannii
atgaaattcaataaaaaagccaatctgatcaagctaatccatgttggtaaaacaaaacttggtttagatgatgagctttatcgagacattcttattagcactactggtaaaaccagttcaaaagatttgaatctagcacagcttgaagctgtgctggatcggttcaaacaacttggctttgaagttgaatcaaaaaataaatctggcgttaagaacttagcaagtgatgcgcaaagcaaattgattcgtcatttatggttgcaactacattcagctggtcaagttagaaataaagatgaaaaagctttagcaaaatttgtagagaacaaagttggtgtgagtgcattgcaatttatgagcagccaccacgcagacatgatcattactcacttacgtcaatggtgcaaacgttgcggcattgaaagaacagaacaataa

SEQ ID NO: 55644 - DNA, 213 bp, Acinetobacter baumannii
atgggtgagtttttgctaggtttcatcatagcgtgggcattatgccatcgttattcccacatcatgattgcaaatgaatgtgaacgtctaggcggatttttcgtcggcgaaaaaacctatttatgtaatcaaataattgataactcacaggataaatctacacctgaagcaattattgaagcagagaaaggtgcaaaaaatgaaattcaataa

SEQ ID NO: 55645 - DNA, 225 bp, Acinetobacter baumannii
atgaatgaattgctgaattgggcaacagtactcgcttactttacggtctttctaatgggcttaggttcttgctttaaagaggctaaattggcgtggaccactcgaaacaaaactggcttaactatatttgagaaacgttcatataaatttaaagcaggtgcatcaatcacattggcttttctagcaattataggtttgttccaagctttccaagggacggtgtga

SEQ ID NO: 55646 - DNA, 180 bp, Acinetobacter baumannii
atggcaacaaaaattaagggcttagacatgcttgaaaagcacggtttaagtgttgtccgtaaatacaacatttgcggatggttcgagtatcacgttttgaatgaggctggtcagagaatttcacggcatacagttcaacaacgtgcaattgatatagctctgaacacgcttcaagcataa

SEQ ID NO: 55647 - DNA, 273 bp, Acinetobacter baumannii
atgaataaatctgacttaatcgcaaacatcgcaatggacgctaatttaactaaatcacaggcagcagctgcactacaagcagtggaagatgcaatcgctgctgctttagctgaaggcggaagtgtttcttggattggcttcggaactttttccgtaaaagaacgcgctgcgcgtacaggccgcaatcctaaaactggcgaagagttacaaattgctgcggcaaaagtaccttccttcaaagcaggtaaagcacttaaagaggctgttaagtaa

SEQ ID NO: 55648 - DNA, 147 bp, Acinetobacter baumannii
atgtacacagttaaagcacttgaaccgcaactaaatgatgatccgcaagccctgtttgcaatcgtccgtgatgacgacgttttagtcggtcatttttaccgccacgaacatgcagaaattgcatgtgcagcacttaaccaaaattaa

SEQ ID NO: 55649 - DNA, 504 bp, Acinetobacter baumannii
atggcacgtaaatcactcaaagaaccacaacttcaaagttgggaagcagttgatcaaacattggcacaaatggctgatatcaaccgtgacatcgcacttgaagaagctgcttgtaatgaacaggtcgacaagctcaaggaagcaaccaaacaacgtcttaaaccgctattggaacgagttaaggcgtatgaacttcaacttaaagaattttgtgatcaccgcaaaaatgagtttttgcaaatcaaaagtaaaaagctgacacacggttcggttggctaccgcttatcaaccagtgtgactattcctgatcctgtttttacttgccagatgctcaagcaattaaagcttgaacactgcatccgtactaaaaccgaacctgataaggagtcaatcaaacaactcacgcctgaactaatcgctgaaattggtgcaactcttaaacagcgcaacaactttggttatgaaattgaaaccgttgatccagcagctacagctgctcactaa

SEQ ID NO: 55650 - DNA, 318 bp, Acinetobacter baumannii
gtgatcagttcattcaaaccagaaaatgcgccagtaccaacagagcgtcgagctgctgcaccacaagctaaaactgaagctgaacgtgcagctgagcaagctgaacatgaacgtcaaaaacatgaacgtccaaacatcaattttaaagaaatgatgggcttcacccaaatgaatgagaagcagccagaacgtgggctgaagaatattccaaaagaacaacttatggcgcatgtcgttaaacacaagcaaccagatgaaactttagaacagtgctaccaacgcttaaaagcagctgaaacacaggagcaaacaaactaa

SEQ ID NO: 55651 - DNA, 306 bp, Acinetobacter baumannii
atggttccaactaaattttgttatgcatgcggtcagcaaattgatgcacgtgctgaaatttgcccaaaatgtggtgtaagacaacaagacgcaaaagtaaatggaaagaaaagcaaaattgctgctgggatttttgctctatttcttgggggtataggagttcataagttttacttgggcaaagtcggtatggggatactttatttgattttttgctggacgttattgcctgcaataattgcattttttgagggcataatttatctatgcacctctgatgaagattttgccaaaaaatatggctga

SEQ ID NO: 55652 - DNA, 465 bp, Acinetobacter baumannii
atgaaaaagatattatttgctttggtggtgggatctagtttagtaggttgtgcaacgacatataaagcgcctgtcacattaaatcaaagtgcaagcgagcaagtgagcgctacgaaggatcaaatttttaaagcagctcaacgtgcgttagcaattaatggtgaacagattatgagcgctaatgctgatgctggagtaatctctactgcagctcgtgattatcgccttacaccagatttagcagattgcggaacaacaatgggcattgattatttaaaagataatcgaaccagtactaaggttgcttataatattttaattgcagataattctttagatgttcgcacaacattgcaaggtgattataaagttggtgatgtaactcaaaatatcactttaacttgtgtttcacgtggtgttttggaacagaaaatgattcaaaaaattaaagctgaaattaaatag

SEQ ID NO: 55653 - DNA, 264 bp, Acinetobacter baumannii; identical to SEQ ID NO: 47503

SEQ ID NO: 55654 - DNA, 177 bp, Acinetobacter baumannii; identical to SEQ ID NO: 47776

SEQ ID NO: 55655 - DNA, 288 bp, Acinetobacter baumannii
atggaagatttaagctggcttcaagatatgattgctgatgatgacttaggtcttttaaacgtaaagaaaaagacgtctggtctaacggctgatgaacaattggtctcaaaatttaatgaaattaataattttgtgacacagcatgggcgtgtacctgctaaggatatgaaaaacatttctgagtttatgcttgcgagccgtttagaagcaattcaaaccaatccagagcaatacatggctttagcagattatgatgaacataatttgctgccacaacatcaggattaa

SEQ ID NO: 55656 - DNA, 1932 bp, Acinetobacter baumannii
atgcaaaatataattgaagtgaattaccaacaaactggggaaagcacctcaatcaataatatggggatgcgagctatgcaagctcgtgccttcgaatctcgtaatagtcagtatttactcttaaaggccccacccgcatcaggtaaatctcgtgcattaatgtttttgggattggataagctacacaaccaaggattgagcaaagttattgtagccgtacctgaacgctctattggtggttcatttgccagcacaaagctgagcgaaagtggtttttttgcagattgggacatcaaacccgaaaataatttatgtactgctggtggcgataaaagcaaagtaaaagcctttaaacgttttatggaaggtacagatcaaattttagtatgtactcatgccacactaagatttgcctttgaagagcttgaagatcatgtatttgataatacattagtggcaattgatgaattccatcatgtttcagcagatgctgataatattctaggtaatgttcttaaagctttaatggacaataccaccgctcatattgttgcgatgacgggttcatacttccgtggcgatagtgttcctgtacttacgcctgaagatgaagcaaaatttgataaagtttcttttaactattacgaacaactcaatggctatacctatttaaagtcattaggtattggctaccacttttataaaggacgttactttaaagaagatgacgaagggattattgctctaaaaaaagttcttgatactgacaaaaagacgatcattcatattccccatcctaattcaggtgaatcaagtaaagataaatatgatgaagttgacgccatccttgaaattattggtgagttcattattaaagatgatcaaactggaattattacgataaaacggtcagatggaaaacttttaaaagttgcagatctagttgaagaagatggtcgtgataaagttgttgaatatctgcgtaatattaaaactgtagatgatcttgatcttattatcgcaattggtatggcaaaagaaggctttgactggcaattctgtgagcatgctttaacaattggttaccgtggatctttgactgaaattgtgcagattgtgggacgttgtacacgagatagttcgaacaaatcacatgcgcaatttaccaatcttattgctcaaccagatgcacaagatacagaggtaaaatttgcagtaaataatatgctgaaagctattactgcatctttattaatggaacaaatactcgcaccaaacttcaagtttaaaactaaacgtgatgatgaagatattgttccgccaggaacactcacgattaaaggttttaaagaaccaagcacggcaaaaacaaaggcgattattgaaaatgatcttgtggacctaaaagcagcaattcttcaagatgctaaagtgattgcaggttcagcaggtaaggttgagcctgaagtggtgaataaagtccttatccctaagatcatccaaaccaaataccctgacttaacgaaagctgaacttgaagaagtgagtcaatatttagtcgttgactcagtgattagcacagcagaagtcaaagaagttggtgataaaaaatttattcgtatggcggataaatttatcaatatcgaagacctgaatattgatttaattcaatctgtgaatccattccaaaaagcgtttgaaatcctatcaaaagaagtcacagtcaatgtactaaaattgattaaggaggcaatcgaagcaactaaaattaccatgactcaagaagaagctattgagttatggcctaagttaaaagcttttaaagttcagtttggtcgtgagcctagtctagaatcaaataacttaattgaaaaacgtttagccgaatgcctaatctatattcgtgagcaacgtagacgagctggagtgtaa

SEQ ID NO: 55657 - DNA, 336 bp, Acinetobacter baumannii
atgtcgcacttcaagttttactctgcccttaaatcagatattagatattcatcttcactttgttataacacttttccattacccgctatttctgagaaaatagaaaacgaattgaatgaaaaggcattaactttacttactttaagagaaaaatattcagataaaacattaactaagttatacaatccgaaatccatgcctgaagatttaaagtatgctcatattcaagtagatgaagttgtagataaagcttttcatcataaaggaacagcatctgatgaatcacgattaaatactcttctaaaattatatgaaaaatctaaaatgcgagaataa

SEQ ID NO: 55658 - DNA, 855 bp, Acinetobacter baumannii
atgtccaaggctaagaagaataacaatctcctgatttcgggagactatcctttaattgcttcgcctacgcttgcaaaagcgtttggcgtagcggctgccaattttctacagaaattgcattattgcttagaaaataacgaggggaaaatttttaatggaaaaaagtattggttccatagctacgagcaatggcaagcgacgcttggcgtgtatagcgtatcaacaatcaaacgaattgtggcaaagttaaagcaagctggaattcttgtgattgaaaagttagcacagaataaatggctgcaaaccaatttctatacgattaactataagaaactcaaacaattcatcaaagtcgacaatcaacaagatcatcaggctaaagtgaaatcacccatttctgctccagtcgctgcaccaagattacaaaagtcagcaccagcacatactgttcaaccgagcacactaattaattcgattcaacaggcatttcaaaatatcaaggttagatcaaatagatttgcaccaacattaaaagtggcaaaggaatcccgtatacgccccgaccttgtcatgcgtgaatcttattcagttgcaggattaagccaaccactccaccctgcggcatccaaggaaatattaaaaaatatggatatggactaccgctgcttttatcaagcactgcgacaacaacgggtagatattgcttatgatgatcaccgtattcaacaactgttaaagtatcagaagcgaattcttcaacatattgtatatatcaaacaaaattttgcaggacatgagcgttatcaatggcatacgcttgaacaattacagatggaaaactattttaagaaatag

SEQ ID NO: 55659 - DNA, 948 bp, Acinetobacter baumannii
atgtattattttcatttgagtcacaacgttaaaggtgatggtcaaataaaattgagtgatggtgattcaaagtatagactctcaaaaaatgcatatcactatattacgcgtactttatatttttcaaagcataaaagtgagattgaagaacttgaatattgtgcatcctataatatgccgatttggtctgaaaatcatcctgaaaagttttggtatgcagcagatcaatatacaagtgagactagacgaacctcatcacatattacaatcgctttgcccaaagaactggatagaaataaacgtatcgaattatctgagagactgatgtatgagttttgtggtcaatataaaatgccatctacaatcgcaattcataatcatgtggctgcgcttgatggacagtcagaacagccacatttacatctattattttcagaaaaaagtatgttggataatattcaacgttcaccacagcggttctttaagcaatatcgtcaaaaaaatcctgaaaaaggaggtgcattaaaaattactgcggatgtgcttggatttggtcgtaatatattatttcactaccgaacacaaactgaaaaaataataaatgaatttttagaaaaatatgcacccacaaaaattatagaaattcatggtatggaaatcgaagtgagcagtgcagtatcgtgcttatctaacgaagattataataaaaaacatggaacccatttaaaagatgtcccacaaattccgaggtcgttactctatagcactgatcctgaagatcaagacaaggtagcagaatatagaaagaacattcgggaaattcgtcaaaataacctatatgaactttataaaaatgagtatgagctagcgctggcgaaaaaacgtgaacaggaaaatcagaatagaccccaacttgatcaatctaaaaaatttgattttgacttctaa

SEQ ID NO: 55660 - DNA, 663 bp, Acinetobacter baumannii
atggttttaaaaatggctagaactagattaacagtagatgaaattattttaagtgttgaaacatacttaaaacaaatagcaagacgtactcattcagatgagtcaatactacaattgattcgatcaaaaactgcaaatcaatttacagaagaagacattaaaaatttgaggaataaatatcataaagttttagaattaaatagattagaagaagtaatggacactatctgctcaatcaaaaaaagtgatcgctctgatattgaaaaagacattgttgattttagtggatatgaagaccatttctctcagactgatgaaagattaaaaatagccttaaggatgctaaaaaactacaatcgaagagttcctgatttaataaaacaaaaagcacatgatgaaatcaaaaattcatttcatagttcttatagacaagtaaaacaaaagataaaagatcgaaagcaagagaatcatgagaaattttttcttggaagtgtgcttatatcattttttaaatcacaaaatattgaaatgaattatcttgagaatacacttaaaatgatagagctttatcaaataaaaaattattttagaaaagagctgtttttagaatcagaaatcaaagaatttaaattttcagagcaaggtagaagcttggcagagtaa

SEQ ID NO: 55661 - DNA, 270 bp, Acinetobacter baumannii
atggctaattatttacatgaccaaaaatttttaaatcgaggggatatcgtacatctagattgtgatactcaatgtaattttatgattatggataatactaattttcaaaattatcgtaatgggcgtcaattcaattactatgggggacattacacccatttcccagcacgtataaatgtacctcatactgggacatggaatgttgttattgatttaggtggtggacgcgcgaatattcgttacaaccttagctatttgactgcaaactaa

SEQ ID NO: 55662 - DNA, 204 bp, Acinetobacter baumannii
atgatggatattaagatttcaccaaaaaatatatcaaatattgaaatacagttagatgatgtaacatatttttccaatacagtgcctattaatggatcacctatgggattgatgacaaatgatgttgaaataaataaaaagctaaagcaaattttagaaaatgctttagcctcaatcgaaattagtttgcagtcaaatagctaa

SEQ ID NO: 55663 - DNA, 135 bp, Acinetobacter baumannii
atgcataatctaggcaataacaaagccctcaagaaacttgccggaatcaaagggctttggattgctaacacaaggagtattaacagtgaagagtatggtgcaagtaatggggggaaatcaagcctgcgatactag

SEQ ID NO: 55664 - DNA, 381 bp, Acinetobacter baumannii
atgcatgttattgaaattgtctgtaaatatgcatgtgatgcctatcttcattattgtgataagcctaatgatatgggttatttatattttttaaatgaggcaaattattttagaggtttattagttgctagtcatgcagataaaatgactggcaagcaagagctaaaggataaaatggtagatctagcaaataagagacatgctgaaaaaaggaaaaaagataataaaaatttacaagaagttaaaaaaatatgggacggatcaaattggaaaagttatacggagtgtgcaaatgaaattcatcgtaatcaactaatagaagaagaaaattatagaaaaatatatgatttggtctcaaaagcagcaaaaatgaaaaaataa

SEQ ID NO: 55665 - DNA, 213 bp, Acinetobacter baumannii
atgaaatttaaagcaaaagacaaagtggtttatgaagctgattacatccctaacaaccaagtgatgaccatcactcgtgggactcataagtcacatggggggataaatcaagttcgattgttattaaaaggtggggaaggcttggcgctatctagtgatttacgcctagcaactgaggaagaaataacagctggccaccgcatcaaaaactaa

SEQ ID NO: 55666 - DNA, 336 bp, Acinetobacter baumannii
atgaatacaaatgtttgggctgaactagaccctaatgaactgccttttattgacaaggaaattggtccagaagatttcaaaactcaatacctttgtacttgggatcctggccatgacattacccatcaacttaaagatgaccagcgcaatattgatgaagctattaaccaagttcaagcctgtatttgttcattggaatataacgaaactagatccgcaagaaaggaggcaaaagaagtacttcgagtgatacgcgcaaacttgaattgggaaaaatacgatgaactaaaaaataaggtcatcaaattacaaagcttactttttaaagctggctga

SEQ ID NO: 55667 - DNA, 177 bp, Acinetobacter baumannii
atgaataaatttattatagtaagtagcatactcttattagctggttgttcttcttttaagaaacttccagcttgtgatagtcctgaagtcacaaatattcttaaaaatgcaattactgaagcaccagctttcaagatgttgaaccgtaccgggtttgtcggagacttttttatttaa

SEQ ID NO: 55668 - DNA, 888 bp, Acinetobacter baumannii
atgagtaatgaagtagttactgaagttgaaattcaaaatcatacaaaggctgttgcaggtttagcaacgcaacttggttatgaaggagccttaactgtaggtgcattggaagatgaaattcgctttttccaacaacgtactgttgaagctgttatggagcttggcaaacgcttattaatcctaaaagaaatcacccctcatggagaatttaataagcgtgttgagatgttgaattttactccacgtatggcacaaaaattcatgtcagcggtattgaaattctcaaaaacgaattcgagttcgcttttgcagaaagctggaaatcaaacaaaattgcttgagcttgtaacattggatgatgacgaaatacaagtcatcgaacaaggtggaagtattggagagctttcattagatagcattgaaaccatgtcggcacgcgaattaaaagacgaacttcgcaaaattaaagctgataaggaagctgctgacttacttcttcaaaagaaagaccaaaagattaatgaattagatgcaaagctcaccaagctacagagtccagttcaaatcaaaaaacgtgctgaatctgaagagcaactcattgctgcaaaggctttagaagaagccaccagcgcatgcttaatgatgcacaacgacacagtgcgcttcaaaaacactatcaactctgttttagacacaatcaatgaacatggcctttacaacatccaagagcaactagaagcccttgttatcagcgcatttcaacagattgcccaaactagtgttgaatttggaattcaaattgattttgaaacgatggtgaacccagcatggttgccgcctgcggatcaagacgctactccatttgatgcaacaaacgtggagcagtaa

SEQ ID NO: 55669 - DNA, 1362 bp, Acinetobacter baumannii
atgacaaaggaatcagtcatagataataccaatctgtctaaatttcatatgaagatgaccattgcgagtacagcaggacagctgtgtgatggttatttactaggaattattgctcccgctttaccactctttgccgctgcaaatttaattactccaacattattaggaatgattggagccgcaacactactcggtgtctttttaggtgcacttatttttgggcgattaactgataaatatggtcgccgtaaactatttattctccaattgtttttgattttaattttatccttaatgcattggtttataaccgatgctacccagcttctcattattaggtttttactaggagtggcgataggtggggattatgctgttgcaggcacattgatatctgaattttcgcctaagaaacatcgtgctgtactgatgtcacttgcaccagccatgtggacggttggttatgttgcctcattttttattggtgctttatttgtaggagaaaatgcatggaaatggatgcttgtttcaagtgccgtccctgcattcttcgttttacttctgagattaactactccagagtctccaagatggttagcgatccaaggtagaaaaaatgaagcactagctattatcaaaaaatatgttaatccaaatgccactttagcagatctagatacaggaaaagagacgcataaagctggttatagtgtagtactttctaaaaaatatcgtggaagattattttttatgagcagtatctgggtctgtcaggtatttccatattttgcagtatttacctaccttccaaccatcatgaaaaatatctctaaacatcaaagtgtttctgagtcactactggtcaatacctttctagttgttggttctattttaggtctatttattgtaaataaaatcggacgtagaccattagcaattatgagctttatgctccttacattctcaacattatatattgctatagggtattccgctctctggatcattgtagcgtttagcctttttgctatggtctcatcaggtgcttcagtattagatgttgtttatccagcagaactattcccaacagaaattcgtgcaacggcgacaggtgtttgtgttggtatcagccgtctaggtgctgctctagggacatttcttgttccaattggaatcagctcctttggaaccaatgcagtaatgatggttgcatcattagtatgtggtgttggacttttgatatgcatattgtatgcaccagaaacaagaggattggctttagatgatgctgcttcagtaacagatgaggattcatctgcacgcaaatatcataaaattgtcaatggagataaatatgaataa

SEQ ID NO: 55670 - DNA, 1407 bp, Acinetobacter baumannii
atgaataataaaatgatttttaatggacaaaaaattacgggtaatggacaggcttttgaagtaattaatcctgcaaactgtactgtaatttcaaattgtaatgaagctgatcataaacaaatagaggaatgtgttaaggcagcaaatgatgcattccagaaatggaaacatattgatgataaatgtgtaaggcatagtcttgagcaagttgcaaaagatattgctgaagaaaaaaatgatatagctaaaattattacgctagaacaaggcaaaccattgcagttagctcttctagaggttgatttggctttatattggatagaaacaattaaaaattatgagattcctgttgaccatattgaagatccaatggggaaaaaaatggaagttcataataaacctttaggagtagttgcctctattactccttggaattggccatttgttattgcaatttggcatattattccagcgctaaaaactaagaattgtataattaataaaccttctgaatttacccctttaagcactattaaattagtcgagataattaatcgtcactttccatctggagtttgtaatttaattcttggaaaaggagaggtggggagagcgctaactgaacatccgcaggttcaaaaaattacattcactggatcaacaaaaactggtatttcaattctaaatgggactgttggccaatttaaaaaggttgttcttgaactaggtggaaatgatgcagctatcatattagatgatgtaaatattgaatctgtagctgaaaaggtttttcaaagtgcatttttcaatgcaggccaaacatgtgcttgtattaaaagactatatattcatgaaaaagtatatgacccatttgttagtaagctaagtgaactagctgataagcaaaaagttggcgatggtatggaatctcaaacaacattcggtccagtgcagaatgaaattcaatacttaaaagttaaaaatatcttgaaaaaagctattaccaatggagctaaagtattaaataatccacagaaaatttcagacagtggatattttatttttcctactcttgttggtgaagttaatgaaaacatggaaattctaactgaagagcaatttggccctatactccctatagttaaatatagcgatgtaggtgaggttataaaagatattaatcgctcagaatatggccttggggggtctgtgtggagcagtaatatagataaggcaaagactattgctgatcaattagaatgtggcacggtttggatcaatagtcatgcagatgtgtctccattggcggagtttggcggatggaaaacctccggaattggctatgcttttggaaagtctggtttattagcctatactaaaaaacaagcgatacatattagtaattaa

SEQ ID NO: 55671 - DNA, 612 bp, Acinetobacter baumannii
atggcacaacaggcagttgcccagcatgccattagtattcgtttggcttgtaaagcatttggcattagtgaaacctgctaccgctatcaagccaaactcagcgatgacaatgcactcattgctgaacagctcattgaactcactgaggaaaattccgattggggctttggtttgtgcttctcgtatttacggcatgttgagagttgctgctggaatcacaagcgggtttaccgcatttactgtgagttggcactgaatctgcgtattaaaccgagaagaagactaaaacggcatgcgcctgaaccattgaaggaaccaatccgagaaaatcaggtttggtcattagattttatgcatgatcagctttccgatggtcgcaagtttcgattattgaatgtgattgatgattaccgccgcgaaggcctagccattgaagcagggttctcattgcccacaatcagggttattcgtacgttgaatcaattgctggagtggagagaaaaaccgttagtgatccgatgcgataatggtcccgaatttatcagtcacgaatttgtgcgctgggcgactgagcacggtattcgtattgaatatattcaaccgggtaagtga

SEQ ID NO: 55672 - DNA, 1542 bp, Acinetobacter baumannii
atgccgaatatgaatatggatgaactcttcagtggcagaacagcattaagcacggatcagtggcgcgagagtttaatccgttcgatcggcatggaaccggcttcgttaaaagaggacgtgcaatggcacctattagcgcgtatggttccgttcgttgaaaataactataacgtttgtgaactgggaccacgcggtaccgggaaaagccatatttacaaagagtgttcaccgaatagtattttagtctctggtgggcaaacgactgtcgccaacctgttctataacatgagtagccgccgtattggtctggtaggcttatgggatgtggtagcttttgatgaagtcgccggtatttcctttaaggacaaagatggcgtacagatcatgaaagactacatggcctcaggatcttttgcccgtggtcgtgaacagatggaagcctcagcttcgatggtttttgtgggtaatattaaccaaagtgttgaatccttggtgaagactagccacttattggctccttttcctgaagccatgatcgattcagcattctttgatcgctttcatgcttatatcccgggttgggaaattccgaaaatgcgcccggaattctttaccaaccgttatggcttgatcgttgattatctggctgagttcttccgggaaatgcgtaagcgtagttttgcggatgccattgagaagtactttaagctagggaataacctgaatcagcgtgatgtgattgccgttcgcaagacggtttctggattgatgaagctgctctacccacatggtcaatttaacaaagaagatgtacggcaatgcctggaatatgcgctgcaggtgcgccgtcgggtcaaagaacagctgaaaaaaattggggggatggaattctatgatgtgcattttagctatatcgacaatgacaccctagaagagcattttgtttcggtaaaagagcagggtggaggtggacttattcccgaaggtcctgctaaaccaggcttcctgtataccattggcctcagtaataagggcatgccaggcttataccgcttagaacttcaagtcactaaaggttcaggaaaattggcgacatctggcttatggaattcaagtagtgccaaagaacaggtcaagattgcttttgattacttcaaggccaatgcatcccggatctcggggggcagtaaggtgctggaacatgatttccacttacatgtggtggaattacagaataccggcccgctcagccatcttgctctgccaagtttagtggctttcgcttctggcctgttaggacgatcggtacaaagtcagatggtggtactgggtgatatgagcttgggtggttcagtgacaccggtggaaagtattgccgaatgtctgcaagttgcttttgatgcgggtgccaagaaggttgctttaccaatgagtagtgcggcagatatcccaacgattcctgtggaactgtttaccaagttccagaccagcttttatgcagatccggtggatgcggtgtttaaagggctaggggtggattaa

SEQ ID NO: 55673 - DNA, 228 bp, Acinetobacter baumannii
atgggtaaagattacgactatgtacgtaatgaaatggatctaccccgattaagagcgttaagtgcgtatcagcaaagtaaccctcccgcacatgttgggatacaacggctttgccgtattttggaagcatttatgggtattgatggaacgccgccagctattaccgtttcagatgatgacgaagacgatatgctggaagttttgtcgaattttccgcagggtggttaa

SEQ ID NO: 55674 - DNA, 1125 bp, Acinetobacter baumannii
atgtggccaaatgatactaaaaatatggctaattatttaatggcatgtatgcatttggaaacaggtggttcatttgatccagcccaacctaatggtttaggttattatggtcttattcaatttggtccagatgttagaaaagatttaaataatatctcggtagaaaaacttactaaaatgagcggggctcaacaattagatctcgttaaacaacatttcacgagatctgatcggcataaattaatgaagtcattaacagatatgtatttgtatattaattatcctaatgctttattgtctggtaaaaataagccaaatgatattttatatgagggtggtagtgagagaagtgcttatcatgctaatcctgcttttatgaaggaaaaaggagaatatcaaaatatttttgcttatagaaaagataagaatggtaattttaaattagataagaataagaaaaaaattcctataagggggtttgaggatgggaagacatatatctgggaggttactcaagaaataaataaacatcttactacaggtttagacagtaaaaataaagaaaataatttcgcttgttcaattaaacctgtacagcctatacaagatatatgtccgaattgccaaacaaaacatgtagatttgagtgcatctgtagagtggatttctcaatttacccaacctagaccaaatgtagcttgtgctcggacatgtgtattaattttgaaaaatagtaagcttagttcatcagctggttcaccaactggactatttcaagtagctttggaaaattcgaatcattctacaattgaagcaacatcaaattttcaaaatggattgaattatttggataaagaacttaatgttggtcatcctgttatgattggtgtagatcataaacttggatatgggattaatgaaggaacaacagatcattttattgtagttgtagggcgaggatgtgaaaatggaaaagtttattatcgtttttatgatgtaggaacacgccataaagaaaaaggaacaagtaatagtaacaagctttatataattaatggatttttacggggtaaaacagcttataatggaagcacttatacgatgacacaagttagaagaaattag

SEQ ID NO: 55675 - DNA, 777 bp, Acinetobacter baumannii
atgattgagtctctgggctataccatgggcatagaggatttatataaaactggtgttaaattcggtaagcagtttgaacaccaccatgtagatcttggctattactgggatgatgcatggcggggcgaaggaacaagtaacggtacttattattctaacgttattacagaagctgatgcgtatgtcgtaaatggaacctcatataaagaacgtaattcttcggttgtaaattatacctacagtgataagtatcaagactggaattattcaatcggtttgtctggatattatgcgcacctgaaggattttgaacaaaataaaggttcaagaaatctattgggaatacattacgcaacaaataatgataaatatggtttgaaatttgtcagcttttatcaagatgttgatattaataataaactgatcagtttgggtggctatgatggaaccttcaatatggccactaaaggtatgttttatagtctagatttgagctataaagtgccacaaaaatatttaaatgaaaatattactaattggactttgtatagcaattatagcttatacgataaaactgaaagtgattttaaaagtactcaacgacttgtacttggtagctcttttttcttgaataaaaacttttatatttcaacagaatggctttttggtaaaaatgatccctatattgggggaagcagctatacacaaagtttagcaagtggtggaacaaatcattgggaaaatcagctcaacattgatattggctactatttctaa

SEQ ID NO: 55676 - DNA, 1131 bp, Acinetobacter baumannii
atgaatcaaattgtcaatttaaaagaaagcctcaaagacctgattgatcgacaagtcgagggtgaaaccctagagcgcgcgttttatgtagatgaaaatattttccaagctgaattacaaaaaatttggtacaaggaatggctttttgttgccatgagctgcgagctaaaggaacaaggaagctggattacagttgaagttgcacagaactcaatcattattacacgtggtatggataacattatacgtgcttttcataatacttgccgccatcgtggttcaaaaatctgcttaaaagagaaaggtaagaaccgtaatctggtttgtccataccatcaatggacttataacagccaaggtagcttaattgcagcgcgcagtatgcctgaagattttgataaatcactttattctttaaaacccgtacatttagaggaagttggaggatatatttttattaatttatctgaaaagccagaatcatttgaactgtttaaagatactgtttcaccttacttactaccgcacaatttggcagatgcaaaagttgcatatgaaatgacacttattgaagaggctaattggaagctagtcattgaaaataaccgtgaatgttaccattgcaaggtaggtcacccagaattattgaatacaattgctgaagttgaagatataacaaacgcaaattgtccacctgagtatattccaaagtctttaaaggataaggctcgttgggatattcaaagtttaaaatatgaaatgagagttagtcctgaaggttggcagattgtccgagtgcctatgtacaagggtttatcttttactatggatggacagattgcctcaaagaagctgatgggcgatttaccagactttgatgtgggctcagttagattattgcactttccaaatacatggaaccatgctttaggcgaccatgcaatttcatttagcgtattaccaattgggccgaataagactgcagttactacaaaatggttagtacacaaggatgctgtagaagggcaagattatgatttagacaacttgcttaaagtttggttggcaacaaatcagcaagataaagaactcgcagaacataatcagctaggtattaattctatggcttga

SEQ ID NO: 55677 - DNA, 252 bp, Acinetobacter baumannii
atggatatttttaatgaattaaagactcgaccaatgaatagctatcgctggctacttgttggtttgtgtatcttactcaatatcgtagatggatatgatgtacaagtgatgtcatttaccgctgcttccgtatcaaaagagtgggctttatccggttcagtattgggcattgaaccgtaccgggtttgtcggagagtcaatattctgagagactatcccgatgacaaaaccaaactatacccccgaaattag

SEQ ID NO: 55678 - DNA, 1878 bp, Acinetobacter baumannii
gtgccgagcggctatctggacaatgttggcgctgatcaaggaatcaaggggtcaggaagcagcacagatgatacgacgccaggtgttgtgatttctgcaccgggtgcaggtgagactccgaccttgtatgttgatggtgagaaggtagctgcaagctatgatcctgtaaccggtacactaacgcctaccactccgctggcagatggttcacatcaactgacttatacgctgactgatgcagcaggcaatgaaagtgcacagagcccagcaataacagttactgtagatacattagcaccaactttatcaattagtacatctgatttggtgctaggatcaggtgaaattacaactattacgtttgaatttagcgagcccgtaattggatttgtatctacagatatagttactacggggggaacactaagtaatttgattcaagttgatgcaaatacatggacagcgacttttacccaaagcggatcagcagcaccaagtattagtatagcgaatggtgcttatagcgatgctgttggaaatgcgggtattggagatgtactagatggtacggatggttttatttttaatccagcagcggttgacctgatcggagcgatcacgattccagcggacgtgaacggtgacggcattatcaatgccagcgaactgggtacggatggcacagttgatgctcaggtggccttaacgggcgcgacactgggtagcacagtgaccattaacggtacggcctacacagtgacccaagctgatttggatgtaggcttcattactgcaccgattagcgtgacagcagatggtgcattgacgattacagcgacagcgactgatgcacaaggcaatgttgacagcagcagcttaagcgtgactgtggatacagcagcggttgacctgatcggagcgatcacgattccagcggacgtgaacggtgacggcattatcaatgccagtgaactgggtacggatggcacagttgatgctcaggtggccttaacgggtgcgacactgggtagcacagtgaccattaacggtacggcctacacagtgacccaagctgatttggatgcaggcttcattactgcaccgattagcgtgacagcagatggtgcattgacgattacagcgacagcgactgatgcacaaggcaatgttgacagcagcagcttaagcgtgactgtggatacggcagcggttgacgccattaatgataatgtaacgtttgatccaggtacgtttgtaagtactatttggggcgcaccaataatagctcaggatattaatgttcttgatacctctattattggtgatacttcaatgaatgttgagttttctgttcctagaaatagcgcggatattggtacaggtcatgaaggtgatgttgttattcaagtaagccaagacaatttgatagcagttgcttctggttttagtgtattggtggaatattttgatggaactaattgggtacagtacaccacggctacaactacaaatggaggtttaattgctgatgcgctaggtttaggggttctagggattgtagatgatggcaaaacaatagctgtgcatctgacaggcgtgccagaaggtcaatatcgtgttgtagtgcagaacgatagtagtgctattggtgatttgttagacgacttaacattagcacaactgggtgaccaaggtattttattaggagctgacaatcaggatgctgtattagatgcggtagaaactgccttaaatggtcaagtattaactttaggaactttagtaagaaatgttttagaaccactgttaaatgctgctaatgctgctggtgaaaccttggctgtaactgatatcgttgcagcaattgtgcaaatatga

SEQ ID NO: 55679 - DNA, 417 bp, Acinetobacter baumannii
atgcctcaaagcaaaattgatgaaaaccgcaaacgcatacttaaaaaagcttatgacgctgaaactcttgagcaagttgataaagcaattgccaagaagaaaccagcctatgacggccagcttaatgctatggcagatgttaaagcggttgaagttccgacttacatcaaacgtgctggtgagcaagtcactacaactaaacaacgtcgtgaatctgcacctatttcaacagtagaagcagcaaaagaaatccgaggcttaatcggtgacctgtggaccacggatcactacaaggccctcaaaaaatcttatccagatggtttagtccctgccgatgcagtacgtgaaattgctgaagcaatcaaggctgaacaagaacttccacaacaacggccacaacttcgtgttgttggttaa

SEQ ID NO: 55680 - DNA, 219 bp, Acinetobacter baumannii
atggctgattttgcagacgttgcaagcactttgtctgaacaggatttagaccatgcacttgccaacattaaacactttgaccaagtcagtaactatgaatgtgaagactgtggtgcagaaattccagagcgtcgtcgcgctctgggcaatgtaaagctttgcatagactgtcaaacagcagttgaaagcaaatccaagcatttccgaggtggtctatga

SEQ ID NO: 55681 - DNA, 393 bp, Acinetobacter baumannii
atgaaaactagatgcccagcttgcggagcaacaaacagcctagatgccctattagggcatggtgaagccagcaaagcgtttgtagcttcactaaatctggttggtgatttagctacgccactggtcaagtatttgggaatgtttcgctctcaaaatcgtgagcttacttttgaacgtacggctaagttacttggcgaaattgctgcggatattaatgcacagcaaatcaaacgtggtcaccacagttacccagctcctaaagcagcatggatctgggcaatcaacacaatgattgagcgtcgtgaccaaggcaagttgcagttgcctctgaaaaaccacggctatctatatgaaccgtaccgggtttgtcggagacttttttatttaagttaa

SEQ ID NO: 55682 - DNA, 231 bp, Acinetobacter baumannii; identical to SEQ ID NO: 47478

SEQ ID NO: 55683 - DNA, 279 bp, Acinetobacter baumannii
atgcgtatcagcatcaaaaaaccactttctgaaaatgcagtaaagctaatccttaaaaaacttatctcgtttggccctttggctaaccaatcacttgaaaactcaattatcggaaattatcagggtgtatttgagcctcgccaaaatcaaattcaggaaaacccacaatctcataacgttcctgaagaaccgggttatttcactcaaatgtacgctgagagcaaccgttcaaacgtgattgacgttacgccagtgtcacaagattttggaggctattaa

SEQ ID NO: 55684 - DNA, 393 bp, Acinetobacter baumannii
atgcttgaagaaatattaaaacaccgccctaaaggtgcgacacattgggatgtaggaacttactacaaaaaggatggtgataagtggttttactgggatcgtttgtggttccgcgtagcagacataagcacattgaacatgtggatgactacattgccagaggaaaaggagccagccatgagtgagtttgagggtaaatctggaaagtgggcttgggagattcaaaaagaacaacaagcgaatctggatgagcttaaaaaatcaataagtgaaatggctcagaggtacagagttgaggcacatgaattaagtcgtataagagattttgaaaagtctcagatgtatagccattttgctagggagttggaccatttgctgaaaggtggtgcttga

SEQ ID NO: 55685 - DNA, 459 bp, Acinetobacter baumannii
atgaataaagtttatgccaacgcagaggcagcactgaaagatgtaattgcagacaatcaaacacttgctgttggtggttttggtttgtgtggaattccggaaaaactaattgttgcagttaaacaaagcggtgtaactggtctcacatgcatttcgaataacgcaggtgtagatgatttcggtttaggtatattgcttcaaaccaaacagatcaaaaaaatgatctcttcttatgtgggtgaaaataaagaattcgagcgccaatatttaaatggtgaattagaagttgaacttactccgcaaggtactttagctgaaaagttacgtgctggaggtgctggaattccagcattttacacacaaactggcgtaggtacactcattgctgaaggtaaagaagaacgtattttcaacggcaaaaattacattttagaagaatctttaacagccgatgtatga

SEQ ID NO: 55686 - DNA, 1272 bp, Acinetobacter baumannii
atgaagcggatcgatagtgtaaatgcgcgacctgacatgtttggtacaggaaaaaaaggtttccattcaaatgaagatgttcccggacaagatgcaacttatctcacacctgaatggtgcaatatggttcaggaagagattgcaaacgtacttgagaagcatggagttgttttaaacccaaataatcgacagcagctctatgaattattagcaacttatccagacctagaaaacctcgcagcagcaattgaagctcgctttgctgctgaagctgcctttaataaaaacgcacgtaatgagctacaagctcagattactgcattactcaattatgtttcatatccaagaatccttgcttcaggtgtgttttattacaatggcggcgaaggtggcggtacggtaacgatgattggtggtacagatggctggattgctgataatgacaagattaaagcacctgacatctataatctaacagatcgtaatattggtatatttttaagccctgaagcagccaatgaagcactttcatttgaccgtgatataaatagctttaaaccaaagatttataatcgttcaggtacaaaccgtattggttattctggtcaggtaagtttccaagtactccaacataagaatcctaatagtacaactgttgatggcgattatccggctggtttatatagtttcgttctacaaccgggtgaaacgaagctctttacactgatcggtgctggaggtggcggtggtgcatcacgtcgatctaataactcttcatatcctttaagcaatgggcaagctggtgctgatctattgcttaaagttaacggggaaaacattgctgttgttcacggtggcggtggtggcacccaaggcgtatggagtaacggttcagcttatgataatgggcaagctggtgctgttggtgctgtagacattattggtgcatttgactcaacgacaatcactcaaggtaaagtaggcaatgcaaccaaggaagaccacacaggtggtgcatctgtaagtcctattgctctatttggtaaaggtggtgatggtgctatgggaattggagatgaaggttggtcatttggtggtggcggtgcatcaggctctgttcttgtggctcaatacactaataatagtacaacaaatcaaacaatcactctggttgttggtcgtggtggtgctggtggacagaaaggtggctatgattcagatatcgtaggtagtaacggaacagatggatttgcacgagttgctagtgtttaa

SEQ ID NO: 55687 - DNA, 468 bp, Acinetobacter baumannii
atggatacctacgattggaaaatcatagatcttcttgaaaagaatgcaaacttaacacatcaggaaataggcgatttaatcgggctttcagtatctcaatgttgccgtcgaaaaaaagcattggaagatgcaggcattattgaaggttatgttgccaaaatcaataaggaagcactgggtttaaatattgcagcaatcattcacatttcattgaaaaagcacgatgaacattcgagaaatcagatgctgaactatattgcttctgaaaatgaaattcatgaggcaatttctttaagtggagattctgactttattttgaaggttcatgtggagaacttaaataagctctatagctttgtgacacataagttattagtaaatgattttatttcaaatgtgaagacacatattattctaaaaaaacataaagaatacaatgtgtttaactcatctgatctttttagttga

SEQ ID NO: 55688 - DNA, 1320 bp, Acinetobacter baumannii
atgaaaaccattaaagctattccgcaaatggtcaaaatgagtggatggaatgctattttgcctgaacgtacaccattcccagccttagaaggtcagcataattttgactgggttgtcattggtgctggctatgcgggtttatctgccgctagaagaatcgccgagcataacccagaccaaagtgttgcattggttgaagcatttgagattggtgaaaatgcttctggtaaaaatgctggctttgcaattgatttgccacattatgcaggtaaatcggaaattgaaaagaataaggcaatggaggaaataaaattatatcgctatggaattcaaatcctagataagctcatttcaaaacatcaaattcaatgtgactggcaaaagcaagggcgtttccacgctgcggtagctcatgatgtagggggagaaatattaaaggactatcgaaaaagtattgaaagctggggggaggactttgaatattatgaaaagaaagctctatatcaactgctagggactgaatattactcttcagcagtttatacctctggtacgtatctacttaatcctgctgctttagtacgagggttggctggttcattaccaaataatgtaacggtttttgagaactcacctgttatcgaatttgatttagagtctgatcaaaaatatatccgaacacaaaaaggtatgatccggttgggtaaagccattattacgatcaatgcctttttacaaaaatggggtttttataaaaatcgtcagatcccaattgtactttatgcaagcttaacagcaccgttgtcttccaaagaggttaataaactaggagaacttgataactggggaattacacctgcacataatactggtggctgtacagttcgcttgacccaagatcaacgcatattaatgcgacatggatttaacctctctccaaatttgacagaaagcttgcacactcttgatgttgcaaaaaataagcataaccaattgattaaacagcgctttccgaaaatcgaatttaatatcgaacatacatggatggggtggctttcactctcggcaaataatgctccgatatttgggaaaatcaatccagatgtctttgttgcgtcttgttgtaatggtaccggaattgtcagacacactgttgcaggcacactaatctctgattatgcaatgaatatcacaaatgactatacatcgatatatctcgcagatggtacttcatcattggtgccaccgcgtccatttttagatttaggttttaaattaaagctttttttagaccgaaagaacatattgaaagaggaataa

SEQ ID NO: 55689 - DNA, 339 bp, Acinetobacter baumannii
atgagtcaattaattaatggaagtgacgtcatttttcataagcgaaatgctgaagaaaatacgtcaaatgaggaagcatcaatcggctgggcggtaaatgatgtttatccaaatgcattaccttgcggctttggacggcttcatgatgcagaatgtccaataaaacagcttgattatgatgaagttctttatttgatttctggtgaattagaaatacaaattaatggacaatctcatcaagcaaaggctggcgatgtatttaacctaaaaaatggtgatcaggtgaagtacattggtaagcaagcagtattcttttttgtgacatcaccaacatattga

SEQ ID NO: 55690 - DNA, 321 bp, Acinetobacter baumannii
atgagcgattatcgtgttgatactcaggtcaattttgatgagatgaataatcgcgttaggtttgaaataagacgcacgattaacgctcttactttgcgcttacagcggattgttcaggaagacatgttaagtggccaacgacttaaagttcagactggccgcttacgtggatccgtttcatcaaaggtggatgaggataaggattcgatagagggaaccgtgggagctggtggtgctttggtgccttatgcacctgcacatgaatttgggctaaatggagctttgaaccgtaccgggtttgtcggagagtcaatattctga

SEQ ID NO: 55691 - DNA, 192 bp, Acinetobacter baumannii
atgccttttaaatatcaggcaccagaaggttataagccaaccaaactcgttattgccgggcaaaacctagatatcaaaaatggagttttagaatctgaggatgacattatccatattttaaagcccttaggttttgagcgttatgttgaagtggttgagccaaagaaaacggcggcctctgctaaagagtaa

SEQ ID NO: 55692 - DNA, 384 bp, Acinetobacter baumannii
atggacgtacaaacgtttcgccagaaattctcgactgattcgagtttaatgtctttgccagatgcaaaaattcaagatgctttagaagaggcggatctgattgtttctcaaattgagttcggggcattaaaggaacgtgctgtaggtctatatgcagcacatattcttaaagtgggtactgtaagtggcaatggtgctgcttttggtaccgcctcaagcatgacaattgcgggccaaagtgtgagttattcacgatcatcgaaagaagctttctatgatctcagcatgtatggccaacgctaccttgcgttaaaaaattcaattccaattgatgatggaggtaccaaccctaaccgtttaggcgttggtgcttttgtcgtatag

SEQ ID NO: 55693 - DNA, 444 bp, Acinetobacter baumannii
atgttgaatgaaacagaaatacttatggctatagaacgcctgataagagaagtgagtcaggtattagagaaaggtgatcaaacgaaacgaagtaccatacaaaaacttagggcatatgcacggcaaggatgtgatttggttcctgcatttaaacagatgttcacccgtaatcttcaactgatgtttccagtcaatcaatttattcgagtcattgaggtcgtagatcgtctgaaccagcaatatggctggccacacactgaaattccctatacggatgaatatatccaaatttgtagagccttgtacgtatcacaagcggcatggcgtcgagatcagaataatttttacagacaagaatatgacaatcggttcaaactggaacaatacctgagaaacattatccaaaagcatcgtaaaactttatgggttcgggaagaactttga

SEQ ID NO: 55694 - DNA, 1308 bp, Acinetobacter baumannii
atgaagcaaaagaaattgctcaagtatattgtggttgctattttactaggagtattgacgggttggatctgtcatcacttctttaatgagggcgagcaactgaagcaaatcgcttcttatttcaacatcgtcacagatatctttttacgtctcatcaaaatgattattgccccattggtatttgctacaattgtgtgtggcattgtgtcaatgggcaaatcaacttcaattggtagcatcacactcaagtcaatgacttggtttattaccgcttcgtttgtctcacttgccatcggtatgggtttagcaaactttttccaacctggcgcggcgctagacctagcattaccaacagctcaacaacttagtagttcttctctcccaacaactactggttttaccttgcaatcattcttgagtcacgtgttcccacgcagcattgcagaagcaatggcgaacaatgatattttacaagtccttgttttctctattttctttggttcagctcttgcttttgtaaatcagggcaaagaaaaagactcagttatcattcgcttaactgatgaactcagtaaaatcatgttccgcattactgactacgtaatgatgttcgcaccttttgcagtatttgctgcaatcgcttcagcaattacagtacaaggcttaggcttaattgttgattatggcattttaatcgcagaattctacttcggtctgctattactttgggtcattttgttctctgttggcgcaatcgtacttaaaaaagatatcttccgtttaggtaaattgattcgtgaacctgtaacacttgcttttgctacagcttcaagcgaatcagcctatcctaaagttatggatgctttaaataagttcggcgtgcctaaaaaagtgactagcttcgttttaccattaggttattcatttaaccttgatggctcgatgatgtacaccacatttgcggtactctttatcgctcaagcttacaatattgatctgagcttcactcaacaaatcttgattttgttaacgcttatggtgacaagtaaaggtattgcgggtgtttcaagagcttctattgtggttatctcagcaacactcacaatgttccatttgcctgaagccggtattctattattgcttggtattgatcagttccttgatatgggccgtactgcaacaaacgtagtaggtaatagtattgcgactgcagttgttgccaaacttgaaggcgataaagtggctgatactgaagaattaccagagcctgtattaattaaatcaactcaagaacaaacaatcgcttaa

SEQ ID NO: 55695 - DNA, 543 bp, Acinetobacter baumannii
gtgtcctcaaatgaagtaatagaaaaagatgaattaaaagctagaactgaaaggtataagattttatttgatttatataaaagtgaatatgagactttaagaaatgaatattataagtctgaggataaggcttctaagtacctaacatcattgacggtattgtcgggtattttattggtgctatttaaagatgtgatcattgactttcatttgaatattttaacttttgcccaaataactcttttagtttttttgattttgtccctttctgcttcttggcgatttatattcatggtccttaagccattcgagctgaaaagctttccgtttactcaagaaggtattaattatttcaatagtgttaaacctgatgttttttattattcgatgactattcagtatgttgaagttatcgatagctacaaaacggcaatcgagttcaagaatagttatttgaaaaaggcattttctgagataaaagtttcagggttgttattattgatattacttagtgtcatatttattgataaagtatggttctaa

SEQ ID NO: 55696 - DNA, 813 bp, Acinetobacter baumannii
atgacaacgataattcagatcctgaaaccccacctccagcaggcgaagaaacgtaaaaaaggtcgtaaagcttccaagccgagagccgtgcacgtaaatcgccgtgtagagctatattacacacgacaactactggctatttcaaaatactgtcaggaacaaacaaaagaattggttattcctacagtcggccagaatatcggtgatgcttggttctcagacatgatgacggcgtttagggaaaagctcacaaagtatgttgttgagatttcacgaccgttggccacaaaggttgtgactgatactcaaaaggaagtagacaagcaaattgcagagcacactaaaacgattattggtgtggatctaacgccgttctatcgagctgctgatattcaggatgaggtggatctaaacatcacggcaaatgtcagtttgattaagtccattccacagcaatacgccgataagcttgaggtattaattaccaatgctttgcagactggacaaacaaatgaagagttggccaaagctattaagcaattgggtttatctactgattaccgagcacgtcttattgctagtgatcagatgggcaagattaacggccaaattaaccaagctcgacagctttcgatgggtgttgagacatacacatggcaaactgcgaaagatgagcgtgtgcgcccagatcatcaacataaacagggcaagacatttagatgggattcaccgccagatgggggacatcccggtcagcctatccgttgtcgttgcacggcattacctaattatgaggatattttgattgattag

SEQ ID NO: 55697 - DNA, 177 bp, Acinetobacter baumannii
gtgattgaatatttaaaagcagattggcaaggtttagcagatgtacaacttgcgacactaaactgggtagattggttcaataaaaagcgtgtacacagtgcactgggttatgtatcgccttttgagtttgaagcaatgtactatgataagattaacccgttaggtcaggtggcctaa

SEQ ID NO: 55698 - DNA, 624 bp, Acinetobacter baumannii
atgtataatttaataacaaaaagagatttacctttttttaaaatttcattactgggtatttctttaatgatttttgcacaatttttagaaagctttagaggaggtcgaagcgactttggtttagaaaatcctctatcaaaatttatttatgtacaaagtctaacttatatattgccatcaatagtaaatagtttacatgcagaatggcctccattgacttatgtaacaatgttttttcctgtagctggtttgttttcatcgttaggtttagtgacaggaagccaaaattataattcaggcgctttttttgcttatacattaaataactctttatttgataatgggtttggtttagggtggtctgtttttttagacttgtatattttaagtggacgtaattatttgttattaagttttttttcttttatattaggattagttttttgttatttaatagaaaaatctaaaaaaaatgtattgtttttatacgtattattgtcttcgcttcctgcttttatgttcgcaccacggagtttgatgtattctattagttctggtttaatttattcatttgtctgtttcctccttatttttatttttgttattgttattaaaaagagatag

SEQ ID NO: 55699 - DNA, 246 bp, Acinetobacter baumannii
atggttaatccaattgcttatctaaacacaacaacagatacggcaccatactggtatatccgtcatggaatgcttgatcgagatacgtcttttgcaatgcaaatgatcttatattatgcggttaccaatgatcctaaagttaaagatacaaacttcaaactcccttatctaactggccatgctggtaactacgatgtacaggaagcttttaaatggataaatgaaaagttaaatacaacacagtaa

SEQ ID NO: 55700 - DNA, 429 bp, Acinetobacter baumannii
  misc_feature (405)..(414): n is a, c, g, or t
ttggcgaacgctgatcttggttatgaatggcaatacaatgcttctcgcaatgatagtaatactggcaacttaaatggtgttagttactctgctggaccacaacttaccgcatctaaagaaattgctgagaaatttccaatgtatttacaaacattgaatttaaagcttcctaatggacagcagttaacagctgagaatatgccggatcagattaaggaacaaattaaatctgaaattgagcgccaacttgcgaaaggaacacctgtacctaatttcggtgagaactttgtctcaagcaaagcaactctcgttaatgattggctcaaacatgatggcagtaaagttaccgaaattgattatcaaaaatttctaaattatgtggcagcgaatcaagcactcaaaacnnnnnnnnnngttttgagtgcttga

SEQ ID NO: 55701 - DNA, 786 bp, Acinetobacter baumannii
atggcaacttcagctaaaaaaaatgctaaggctaaacaagaaaccacatctacgagtaacatcaaaaaacttattggcttaattgaccaacttgaagaacatattattaaaagacataaatttccctatggtttgccatcagcctatgccgaacactacaaagcttatttacccgaacaaatggaacctatcagtgaagaaatgacggataatgaccgaaagtggttttatgaacagcttgatcaaggcttattaaaagaatcgccagaacaaaaggctctccgtcaacaggcatggagattacccccaccattacttcgaggtaaatcggaaatttacatctacattcccgaagaggaccgacttgcccgacactatggcgaaatcgcgactgaaattcgtaaattcaaaaacttggtatcaactaaaaccagaatattcaaaaaaacagcacaacaagctgagaaacattttgaagaagcatttcatctctactccaaacattatgattgttctttctatatctacacgctatcagaagatatctataaacagattaggcaatctcaattagcccgaaacagccataaaaaatcccagagggtaaaaaaaacttacctctcacttgttcaacgttttattaccagtaatcaaaaaacttactcaagtatggatacggttctaggagccattgagcagcaagctatctcaaaaattccagaatacctcactcaagaatacaatgaaccgtaccgggtttgtcggagacttttttatttaagttaa

SEQ ID NO: 55702 - DNA, 639 bp, Acinetobacter baumannii
atgatcaaaattgatacctttgatactatgcaaataaagaagtcctttaccacgctaaaagggcaagaaagaataaagcagatcttaagaaatgctgaaatagtttttcttactaaaggttattccggatttagtatgagaggagttgcaactcaatcaaatattagtttaagtactttgcaacattattttcaaaataaagatattttattaaaagctttacttaataaattaatttgtgactatatacagcgtattgaaattttaattaatttgaatgcaaatgaaccacctttaattcggtttatgaatattatcactaatataatttatgaaatagagcaaccgatcattacaaatgcatttaaagagtttttctctatttcaaatcatttaccctatgtctatgaagctttgtcaatcatacaaaagtataatctcgaacttatctataaaatcatcctccccatccataataaaatatcttcagaagaatataaagaaagagccattattataattactcaacttaatggatatttagttcaacattcgaacaaaaatacagatgaaagttataaagaatttttaagaagtatactgttaaaaaatatattaagattagtcagtgaaccataa

SEQ ID NO: 55703 - DNA, 534 bp, Acinetobacter baumannii
ttggcatggtggaccggtacatattttgccgagcaaattcgctcaatacatagttcataccctttcattgaaattattggccaagctggtgccggtaaatcacgtttaattgagttcctatggaagttaagcggtcgtaaagaatacgagggttttgatgctaataaatcaaccaacgtggcgatttaccgtaactttgcccaaatctccaaccttccagttgtattgattgaaggtgaccgtaacgatgcacaaggcaatagtgtcaaacaagcaaagtttagttgggatgaactcaaagatgcttttaacggccgagcaattcgttctaaaggcctaaaaaccgctggtaatgaaacatatgaaccacctttccgtggtgccatcatgatttcacaaaacagcgcaattgcggcatctgaagcaattttgacacgtacattgcacctttcattcgaccgcaaagggcaatcacttgaaaccaaacgtattgttgatgcactggaccgtattgaactggaagaagcatgttga

SEQ ID NO: 55704 - DNA, 309 bp, Acinetobacter baumannii
atgtcagatgtattatttcctgaattgccgggtctagaatgggatctaactaaaactcccatgtttaataccaagatcatgcaatcagtaaatggtcgtgaattaagagcaagctttcaatcttttccaaagtatgaaatttcactgtctttcggttttttgcgagaaagaaatggtaaatctgaattacaagttattgaaagtttttttctagagaggagaggatcatttgattcttttctctataagatgcctgaagataatgaatttaattgcacatttgttggtgatggcattacacagaagtga

SEQ ID NO: 55705 - DNA, 321 bp, Acinetobacter baumannii
ttggttgctggtcttgcgggcaagataaaatctgctcgaggcggttacgacattccttcaggcgtaaatccaattacacagcttcatgaagatgagatggttttgccgtctcaacatgcaaataccattcgtgaaatgggtaatgctttacgtaatggggcaagctttggtgcagctgcagttgctgaaggtgccggtgcaggcacgacagtttttaatattagtgccattgatgctaaaggagttagagacttcatgaagaaacatggtcgagatttagcaggcggtttaaaaggttacagtcggaactttggaaaataa

SEQ ID NO: 55706 - DNA, 234 bp, Acinetobacter baumannii
atgagttatccagaacatttcacaataaagaatatccgtatggtgaatgaaaatacctgtgaaatctacatgctgaatgatcacaagaaaaccatgaaggcatggacggtgcaatgtacacagggggttgttcatctattccatgaacgtttgaatcagttattacagtcgacacaaccattccagagcttgttgcaattaaagcaatattacaaagttgatgttttatgttga

SEQ ID NO: 55707 - DNA, 318 bp, Acinetobacter baumannii
atggcatggattgtgttgctgtttgcgggaatattggaaattgtctgggcttattccatgaaactttctgaaggcttcaccaaaattattccaacagttcttaccttattttttgtcatgctaagttttgccttattgagctattccatgcgttcattgcctttgggcatagcctataccatctgggcaggcattggggttgtaggctcttttcttgtgggcatcatcattttgggagagtcagcacatccagtccgtattttagcagccatcctgattttaagtggtttaattctaatgaagatcacaacagaatga

SEQ ID NO: 55708 - DNA, 867 bp, Acinetobacter baumannii
atgacaacattaacatttcaaaacgtgaaacatattttagctgcctctttactgagtttaggtttggttgcatgtgacaaaggaactcaatctactgaaaaaacggccgataccacacaaactacgtcaagtattgaacagatcaaaaagaatggtgtggtacgaattggcgtatttagcgataaaccgccgtttggatatttagatgctcaaggtaaaaaccaaggctttgatgtagagattgccaagcatgttgctaaagatctgctgggtgatgaaaacaaagtggaatttgttttaactgaagcggctaaccgtgttgaatatttaaaagccaataaagtagatattatttttgcaaactttaccgttaccccagaacgtaaagaggtggtcgattttgctaagccttatctaaaagtggcgctcggtgtcgtttctcctaaaagccatccaattaccgatgtagctcaacttaaagataaaaccttgctggtaaacaaaggtacaacggctgattcattcttcaccaagactcatcctgagattaaactacaaaagtatgagcaaaacactgaaacttttgatgctttaaaagatggccgtggtgctgcgcttgcacatgataacttgctggttttagcttgggctaaagaaaatccaaattacaccgttggcattaccaatttaggtgagcaggacttaattgcaccagcagtgaaaaaaggtgataaagagttattggactggttaaaccaagatttagaaaaattggcaaaagaaggcgtgattcatcaggcttatgaaaaaaccttaaaaccagtctatggcgatacgattaatccaaaagatttattggttgagtaa

SEQ ID NO: 55709 - DNA, 345 bp, Acinetobacter baumannii
atgactattgagcttgaaccatatcaagtgtttttagttctatcggctgtgctaagcgcagtcgctggaatgatcaagctcatgggtagccagattaataaaaacattcagcaaaactttgaatcaacaaatcagaagattgaggaagtgtcacgtcaagccataaaaggtcaagaagaagtccgggagcttgaacgtaaattccttgaatttaaagctgatatgcctttccgttacattgcccgtgatgactatattcgcggtcaaaccgttattgaagccaagctggatgctgtagcagaaaagcttgaaaaagttcagattaagcaaggaattaacccatga

SEQ ID NO: 55710 - DNA, 357 bp, Acinetobacter baumannii
atgagccaatggaagcgaaattttcgacgtcagttagctaaacaaaatgctgtaaaaaatcagcttgtggctaatgaatcccaatccattcaaggtgtgccagtcaagctcaaaaagcgctggatagtagaaaattggcgcagtggttggttatggctatcaaactggattttgctagttattgcttgggtcggatacaacggtgttccacctgaaattatagcgcttataccagaagctaatcgtgaaaatgtcataccagttttgtcagcactcggggtggttttccgatttatcgaccaaaaccggaagaaacctttgcctcctgcatccgatacctttaaggaggatgtatga

SEQ ID NO: 55711 - DNA, 534 bp, Acinetobacter baumannii
ttgactctccgacaaacccggtacggttcagtttttcgtactcactttaatcgagatccgaatggcctagagctttactacctgcatttctttggtgagggtggtggaccagcatttttaaaggctaaggataatgagctttttgttgatgtggccacacgctggagtaaaggcaatcagaaaaagactgcaagacagattgcagaaggtatcacttcaagtcatcaattcaatggtatgaccgtaggacaagtaaaggccaaatacgaaaagcgctggaacgaaatcgcaagtctttatagtgatgttagtccagatgcttcagtaagatctactgaagtccgagggagcgaatcagagttcccacagtttgagtctgatataactgcgccacctgcttacaagtcccaatctgatgctgaaattgaagcaatgccttttgtactcagtgcagatgagcatagtgtgaagtcactccaggaagagtttgaagccctatcttctccattgaccaaggaggatctggaatactga

SEQ ID NO: 55712 - DNA, 1002 bp, Acinetobacter baumannii
atgattgcagctgacttatggatgcctcgatccaagcgcctgaaacgaccgtatcagcctcgttacaaccgggattgctttggtgaactgatccaaattgatggctcacaccatgactggtttgaaggacgcgctgctaaatgctgtctgctggtgtttatcgatgatgctacaggaaaattgcagcatttacgcttctgtgagtcagaatcaacctttgactatatgatttcaacacgcttatatgtcgaacagcacggtaagcctttagcgttttacagcgacaaacattcagtctttagagtgaatcaaagcagcaagaaagacaccaagattacccagtttggacgtgtactcagcaccctgaatatcgatatcatcttcgctaattcaccgcaggccaaaggccgtgtggaacgggccaacagaacgcttcaggaccgtctgatcaaggagatgcgcctgaaaggcatctgttcgattgagcaagctaatgtctggctaccctgcttcattgagcagttcaatcagaagttcgccaagatggcttttaatcctaagaatctacatcggcctatcactgaaacagccgaagagttagatgatatttttacttggcgtgaaccccgcagagtcacgaatagcctgacgattgcttatgataaatgtgtatatctcctggaaaacaccgaagaaaatcaaaggttgatcggtaagtatcttgagttcctggaatacccggatggtactgtagccatcatgcataatagccgaaagatcaattacagcctcttcgataaattaagtcagctgaatcagcgagagattgttgagaataaacggttgggtgctgttcttaatcatatccaacaacagcatgaagaactggaacagcaaaacaaacgtaatcgttctcaaaagatgccaagcagacgtgcacagaaaacagcaattcaagaacgaaatctaaatcctgtgcttgacttggaaatgtccatatag

SEQ ID NO: 55713 - DNA, 192 bp, Acinetobacter baumannii
atgccttttaaatatcaggcaccagaaggttacaagccaagcaaaattgttattgctgggcaaaacctagatatcaaaaacggcgttttagaatctgataatgacattatccatattttaaagcccttaggttttgagcgttatgttgaagtggttgagccaaagaaatctgcagcatctgctaaagagtaa

SEQ ID NO: 55714 - DNA, 300 bp, Acinetobacter baumannii
atgtataagatacctaaagtggttattcctgattccgctaaagaatataggcctcccaaagttaaattaacgttagaagaaatcaagcggctttcagacgacgaattaatgatgctcttaagcggtgaaggccgaagcggaattatcccagcaccccttctacaagctataagttatgagttaacttcaagacaaataaaaaagtccagcaaaccacactggactatcatccctacttttattgttgcttgtattgcggcaatcgctgctattgtttcaatttatatttcgctaagatga

SEQ ID NO: 55715 - DNA, 444 bp, Acinetobacter baumannii
gtggatagcgaagcaatctatcaggcgttgtttgaaaggttaagcacaagggtagaaggattgattacggtaagtcgccgtttacgtcactttaaccatgtaacaccagaacagcgcccagccatgtttattacacaaggcaatcagcaagaagtcccggtacatggtttagattcaaaagttgaacttgctgctgaggtttatctctatatccatgaggctgatagagcaaagcccccatcatcacagatgaatattttcatcgatcgtgtacgtgaagctattaaaccagaccatcctgattttagtgagtatcaaaccttaggaggtttggttgagcactgctggatcgagggcaccgtagaagtatatgaagcagtagaaaacatgctagatgatcaggcgattgccattatccctatccggatcctcacaaccaattaa

SEQ ID NO: 55716 - DNA, 702 bp, Acinetobacter baumannii; identical to SEQ ID NO: 54624

SEQ ID NO: 55717 - DNA, 288 bp, Acinetobacter baumannii
atggaactgtatttcgaatgggatgaggctaaaaaccaaaagaatcagaaaaaacatgatgtatcttttgaaacggcaagcctcgtttttgaagatcctttacggatctcaatccaggatcgacataccaatggtgaagaacgttggcaaacgatcggtatggttaaaggtgtactgatgttattggtggctcatacaatcattgacgatgatgactgtgagatcatacgaatcattagtgcaaggcaagtcactaaagcggaacgcaatcaatatgagcatggttag

SEQ ID NO: 55718 - DNA, 312 bp, Acinetobacter baumannii
atgagcatggttagatatacacgcaaagaactgaatgaaaatttcagtgacaagcaagatgctgaaattaaacgcttgcttgcgaaaggaactgtaccagatgaacaattagatctatctgacattcctgagattaccgactggagtcatgctgttcgccatgggcaattttatcgtccagtgaagcaacaaacatctgttcgtctagatgcagatgtacttgcatggttaaaggctcaaggcaaaggctatcagacacgcatgaataaaattctgcgtgaagcaatgctagaagatcttaagaatcattga

SEQ ID NO: 55719 - DNA, 354 bp, Acinetobacter baumannii
atgaaaaaaagctatattttactattgtcattattctctagtgttcatatttttgcttcaccagagaaaccactttatgcaatcgttaaagataagagtatttgtatttatactaatgatatagatacaaaaccatataataatcaaatatatttatatatgggcgggattgtttctggccaaaattataaaagtacatacagcaagatttataaaaatatcaaaatgccaatagataaaaactcttatatccctataccaagttcttattttaataaagcaataccttttgatgttactttagacaggctttgttgcacaaacctatctctaaaggcttattccacaatataa

SEQ ID NO: 55720 - DNA, 540 bp, Acinetobacter baumannii
atggtggattttatccataataataaagagctgtacggagtcgaggcgatttgtagaattttaccgatcgcaccctcaacctattaccggactctagatctctgcgatgagaagcattgcttcgcaagggaacatcgagcaaagcgagatttacatgacttgcatcatgctgaggagattaaacgaatttggaaggaaagttcaggtcggtatggtgtacgtaaagtctggcaaaaactgaaacgtgaaggctatattattgcacgctgtactgttgctcgattaatgaaaaagctaggtatacaaggtgtttggcgaggtaagaacaaacaaaccacccgtagccgagatgaccaaaaacgagcagatgatttagtgaaacgtaattttactgctgatcatcctgacccttgcgaagcagtgcttctcaggtcagtgactttacgtatattcaaactcattcaggctgggtctataccgcctttattattgatgtgttctcacgagcaattgttggctggaaagtatctacacgaatga

SEQ ID NO: 55721 - DNA, 192 bp, Acinetobacter baumannii; identical to SEQ ID NO: 55691

SEQ ID NO: 55722 - DNA, 267 bp, Acinetobacter baumannii
ttgattgaatccgaaaaagattatccttctacttgggctgcaatcaccgcaattgcacctaagattggttgtactcctgaaacacttcgtgcctggcatcaaaagcatttagatcagcaaaatcctattaaagtacaacagatatctgaccaagaaaaaatgaagcaaatggaacgtgaaattaaagaattaaaacgtgccaatgaaattctacgcaaagcagccgcttttttcgcccaggcggagctcgaccgcccacacaaataa

SEQ ID NO: 55723 - DNA, 1263 bp, Acinetobacter baumannii
atgatgaagagaaatcaaaaaaatcatacacgggaaattcatggcagaacaaagtgtccttgtgaaagtgggagaacatacgcgcagtgttgtaaacaaattgatctaaagtggtgtgttaatgataatggaatggtgttgaaaaaaatttcattaacagatgagccaataaaacttttacaacaagctgaagaacacttctttcaagtgtttgaaaggaagcctcatagaaatgatccagtatttcttgctaaatatctgctctcggatgttgatatgcagcgtgaaatggttagggttatggaaaaggctgaaatagggcctgaattcatttacgcttatcaaaagacgggtgggcttttattgacagaggaaaatgaaaagctagcaacaggcaaggatttagaagattggaataatgcaattgatgagtattttagtggtgtttctaaaaaattaagtaaattagagattttattccaatcttttactgaggagattttcgcttgtattatttgtattggttatattttggagaatgcaatattaaagtcagcaataaaagaaaaaagttcaagtaaattttttactgtggatgactatgtgctcttacatgtaacgcagactgcaaatactcttagggcgattgatgtattgttaaatgaaagaatgagtggtaatagtttgcctttagtgagacatatatatgaaaattatatccatattgtttttgcgctgaattgtcctgatcaacttataaatttaattgatgtacctttggggttgtctcaaggagtatatgtatatggtaaaaataataagggagatgagtatagaagagtaattattagaaagtctgatggaaagaaatttaagggacatatttcaaactatttaatgttaaatagtagtaaatataaagaagatactttgctatttaattttttatataagtttttatcagattacacacatccatcattaaatagtctttctttaagagtagataatgatggtcaaatagatcatttgaaaaatagtttagaagaagaagctaggttttattcgatatgcttttcggggatggttctagatcaaatgagaagcttgaattgtgtttcaaaaagagcaaaaagagatattgtggtgatagtacggagaattgcgagaaaagctaatgaattgttggatgagctatatgctaacgagaaacctgagcatatcagtatattacaaattagaatgtcgaaattgggacactaa

SEQ ID NO: 55724 - DNA, 555 bp, Acinetobacter baumannii
atgtctatgctgattggcattttcttattggtaataattgctgttgctgttatgaatgttttaaagaaaggggaaacaaaaaggggaaagcgcaatccgatcaaaggaaagcggattattacaatgaatgaacaaccaacatttttaaagttaagagaagctttaccagaacacattattttggcacaagttgcattcagtgcttttatgacagcacagggatatacaacacgtaatttatttaatcgtaaagtagctgattttgtagtgcttgataaatctttcaatattattgcaattgttgaattagatgattcaagccataaaggaaaagagcatactgatgctgaaagagacgctttaatcaatgaggcaggttttaaagtaattcggtataaacgaactccagaaactgaacaggtacatttagattttggcattactaacatatcaaccactctaacccctattccagaaactaaaacgaaatttgtatcggattcaattattgttgaaagggacgatctatcagttcaaacacccgaattaaagtag

SEQ ID NO: 55725 - DNA, 255 bp, Acinetobacter baumannii
gtgaattcaaaaattatttttcaagatcaagtcagttttacgcaagctgccttcaatgaagtaactcgcatcatctctcagcatggcgtttctgtactggattgtctagtcccagctttaaatactcagcaatgtttagaacatctggcatttgttgcatctgaatatggctatgactactcatttattgatgcccatttagaaacttataaaaaagcaaatagcgaatttcaagacgcttacggggaagaataa

SEQ ID NO: 55726 - DNA, 1224 bp, Acinetobacter baumannii
atgatcaatacatgtaaaaatacggcagaaagcacccccttttataagatgggggtaacgaattctcgcatggcatctgaagagttcactttccctagaaatctcgataatcagaaagtaattaaaactgaagatggcgtattgccagttttacattctgttccatgcgatattcatggcatagctgctgttgattgggtgacttttagttttggtcaagaaacctttggcgaaaaatatgcattccttgaaccagaggaagttgacgaatcgcttactgaagcgattgaaacatggctggatcagattctttttgagatcttcggctttggacttgccgttaaacgtgacaaaggtatgcatttccatacttactcatacgaattacaagataatttgggcatggtcttatatggccatgctaacaaaaagatttctgtacaaatcaacggtactggttgtgccttagctcgtaaaggttgggaatcacaactttataaattcttaatgcgtggatgtaaacgtcctaagcttaatagaattgaccttgctcatgatgatttcgaaggcaatcacttaacagttgatttagctgattcatgggacaatattgatggtttctggtgtggtggtcgtgaacctaatgtagagcataaaggtgcttggaagcgtccaaacggtaaaggtagaaccctcaatattggcaaccgtgatagcggtaaattctgccgtatctatgaacgtggcaaaaaggaaggtgatgtactaagcctttggacacgtgcagaggtcgaatttaaaggttctgaccgtttcatcccttttgatgttttactcaatccaagctcatatttcattggggcttacccatgttttgaatggcttgctaaagagcttactcaagaaatgatttcaccagaaaaacctgaaatcgttaaaaagcaatccgtgattaattttgataaatcaatcgaaattatgaaacatcagttcggcaaatatatccgtcaattctcaaaaattattgccagtgatgaactggtagcaatgctttcatcttcaaaagatgaagtgccaaaacgccttaagttttctcatgctgctgtgatgcagtcgttacgtattaatcaacctattcagtcactaaatgaagactactcgctattcgtgggtgtccctttagttaatcaaactcaatataaggattttattcatgcaatttaa

SEQ ID NO: 55727 - DNA, 312 bp, Acinetobacter baumannii
atgcaatttaaaactgaaatgatcatcttgggggcaaagtcatctaaaggtgaatttaacggtaaaccatatgattcaactactgtgttttatcaagcggatttgcaatcaggcgaaaactttgtaggtcaggttggtgaatcaattaaatggggtacatcatttaattttgagcgtattaaaaatctatcatttccatttacctgcactgccacaatggaacaagtttctaatggtaaatcttcagtgctgattttggttgatttagacctaagcaaagtttcccaatccacttctgcaaagttagcttag

SEQ ID NO: 55728 - DNA, 177 bp, Acinetobacter baumannii
atgtaccaatgtgcccaaattgaccaggctacaaaccagtgccttacatgggtgcaagttggttttctaggattacccgaaatcacgtatgaccaggcgggtgatatagctgtaggcatagcaatttgcattgctgttgcctggggctttaaaaaaattggtcgattgctcaaataa

SEQ ID NO: 55729 - DNA, 237 bp, Acinetobacter baumannii
atgagcgaacttaaaactgttcaatctcaaccacaaactaaacgtttaccacttgcagttgttgttactggtgcatctgcattggcaatgactaactttgctaacgctgcaattgatgtaactcctgttacttctgaactaagcgatttaaccactccaatcggtcttgtaggtgctgcttatctacttgtcatcgttgcgattaaagggtggaaaatcatccgccgagctttgtaa

SEQ ID NO: 55730 - DNA, 1299 bp, Acinetobacter baumannii
atggttaatcgtcttagttttcgtaatttgcgtattgataattttaagttaatcacctggctacagatcttcattatagccattacgcctaacttcattttctttcaatcagctaatgcaactactgttgcgggtgaaggttggtctgtaactaagcgtttagtgcaaggtgcaacaacattctatgacggggctaaaaatgtagttttaaatggtaaaaactatgctgctactggtgctgctgcgattactccaactgctagtcaagtcagtaagatgattgtgagaactggtgctgttgttgctgttgatcttgcgattaaagcattaatcggtgcagttgattatgtgatggatcctgcaaacaatcaggttacttatcgggaagtgaaagacggacaagcaatttattatattaatgtttcttcaccgggatgggatgctaattttaaattcacttctgtagttgcagcatgtaatgcttatgtttctatctataattcttcggttagtgctgcttatttaactcttgtttcaactacacaaacatcttgtattgttgatcaatatagaaaatctgatgatgctttgattgctaaagattattctattactgtttcagtgatttctggtgtaccgacagaagaaaagcatttaccttacgatgctgtagcatcacaggttattagtgatgctgttgcaaataaagctgaaggcaaagcatacgtttcatctgtggctgacacagcattggaagaagatgaacaaaagcaaattgttcctgcaaatgacatggttcaacaattaaattcatctcaggctattccaacctcaaatactgctcaagggcaagctgtacctcaaacgaatccagatgacccgactgctcctaaagctccgccgactgacattgcattaaatttccctgtgttttgcgagtgggcaccgactgtctgtcaagctgctcaggctgctattgatttccctaaaactgttgctgactactggaagaaaacagataaatggatgaatgaatccgcatctgatacatcagaaacaaaaccagaagttaaagaactagaactaaattttgatgatggtagtcgaattaatttcgatcaaacttgcccacagccacaacctattcaggtcacttttatgggtgttacccaggacgcaagtttttcttttgaacccttatgtaacttcatgatcatgattcgaccttttgtcattggatccgcctatttaattggtgcttatatagttatgggcttatcacgggggaatagtgagtaa

SEQ ID NO: 55731 - DNA, 285 bp, Acinetobacter baumannii
atggggaaaatactttatacagcattaactttgctgctcggatctgctctcaaacgtgttcttttgggtgcgggaattggactttttacaacacatgttgttcagggcttaatcagtatttatatagcccgtgcaacacaaaatatgagctttggtacatcaagcgcacttgcgtttttaggcatgtgtggcggtgataaagcaattggcattcttattggtgctttgagcacttacgcaattattaaatctgcccaaataggcatacagaaattatcaagttaa

SEQ ID NO: 55732 - DNA, 1065 bp, Acinetobacter baumannii
atgataattttggttactggtacaccaggctcagggaaaagcctatttgttgtttcaaagatattagaactacaaaaacaatttcctgaacgtcagatctttgctgatatcgaggggcttcaaattgatggcgttgaaaagtcaccagatgactggagaacaactccagataattcaattgttatctatgatgaagcgcaacaacatgagcgtttcagatctggtacatccgctaataaagatgatgtagtacagaaattacaagtacatcgtcatactggtcacgacatttggttcatcactcaaagccctagattcttaaatgcgtttgtcctggatctggtcggcgaacactatcatttacaccgtccatacggggcaaaattggcaagtgtttactactggagatctgtgcgtaaacagccacaatctttatcgtctcgagagctagcagagaacgaatttctatttaaataccctaaaaacctgttcagctactacaagtctgctactgctcatcatgtaaagatgaagttacctaaaaagctaggttatgttgtttttgggatcctggcattagcagcctatggtggctattcatacttcaagcctggcactcaaaagatgattaacccatcggcttttacccaggcaaatactcagcaaaaaccaaaagaaattgacggatccggattgactccagatcaacgaaaagacctggagaatccaggcgaaagaaatgcagaacttcaagctaaaaatgatgtccggatggagacaattgcgattaaatataatcccaataaaccatttgacgttgaccaatcgcaaattgaatacacagttacagcaaaacccgtttttagtggctgtattaaaaagaatggtcgttatgttgcatacactcaacaggggactattttgcatgatgttgcgcaatcagactgcaagaagctaatagaacagaatgacagaccatttaactattttgctcaaacacaatcagcagagcgagtgtctacgagcgaactgacacaacctgcacaagcaccttcttctctctga

SEQ ID NO: 55733 - DNA, 993 bp, Acinetobacter baumannii
gtgcaatatctaggtatagatatttctaaaaataaatttgattgttgtatttttttgaataatcaaaaaaagaaaactaaagtatttgataataaccactctggttttattaaattaaatgaatggttacaaaagttagaaattgagatattagagttagttgcagttatggaagcaacctctatttatcatgaaaatttagcttattttctctactctaataatattaaagtttgtgttgctaatcccgcgcgagtacgtaagtttgctgctggtatctcagttctaactaaaaccgatgaagtagatgcagaggttttggttaaatatggtgaactcgctccgtataacatttggcagcctgattcagatcaacttcgtttgttaaaacaattactactccgtcgggacgcttatacttctgaattaaatagggagagaaatagattagatcaagcgtattcgaacaatacgaattctaaacttattgagattattcaattagatattgagaatattaacaataggattcaatatcttgataaattgatagatgaaactattgatgatgatatttctttaaaacaagatttatgtttacttgaatctataccagctattggaaaacgtactgccttgacattattaactttattcaaaggtaaaagttttacaaatgctggtcaagctgctgctttttgcgggcttattcctctacaaaggcaatctggctcttcaattcgtggtgtttcaaaaatctcacgttcaggctcttctaaaattaggtctaaattgtatatggcagctgtagttgcaattcgtcataatcctcatattaaaatcatatatgatcgactactaagaaatggcaaagcaaagatggctgctctttgtgctgcgatgcgaaaattaatccatattgcgtttggtgtcctcaaacaccaaaagccttacaatgaaaatcttataggttttgcaaagattccttgttga

SEQ ID NO: 55734 - DNA, 843 bp, Acinetobacter baumannii
atgcgtgcatatttagaccttctacaacatatccttgataatggcggtgacaaaggcgaccgtacaggcacaggaacccgttctgtatttggtcatcaaatgcgttttgatctctctaagggttttcctttactcaccacaaaaaaagttcactttcgttctatcgtgattgagttactttggttcttaaaaggcgatactaacgttaagtacttacaagacaataaagtcaccatttgggatgaatgggcaacagcagaacaaactgcccgtttcgaccgcccagaacatgagcttggcccagtttatggccatcaatggcgtaatttcggcgcaactaaaaatgccgatggtacttataaccaagatggttttgaccaaattaaatggttaattaatgaaattaaaaccaacccaaattcacgccgtttaattgtctctggctggaacccaaatgaggctggacaagttgctttaccgccttgccatacgctcttccaattcttcgtacaagacaacaagttgtcatgccagctttatcaacgtagtgctgacgtattcttaggcgtaccatttaatattgccagctatgccctactcacccatatgattgctcaagtgtgtggcttaggtgttggtgattttgtttggacaggtggtgatacgcatctttatgcaaaccattttgagcaggcaaaactacaattgacgcgtgagccattaccactttgccaattaaaacttaatccagaagttaaagatattttcgacttcaaatttgaagatatcgagattgtaggttacgagtcacatccggcaattaaagcaccagttgcagtataa

SEQ ID NO: 55735 - DNA, 387 bp, Acinetobacter baumannii
  misc_feature (366)..(375): n is a, c, g, or t
atgacttttttatcgtgtaatgaaatttatgaactcatgacagatctagggtatacacaaactaatactcgtaaatatgctcatgaatttaaattaaaaaatggtcaatatatttatgttaagcgattggaagataatcaaaaaagagtatctgagccgtctagactaatgatccaccctaaatatattgatcataaagatgagctgagaaaattagaaaaagtagaattcaattttgagcaaaaaggaaatatgaattctgcctttgctaaatttccaaaatgtgatctatcgaagtgtgatggcaatcctacacggtatggaataggagctgtctcttatacacatctgacgctgccgacgaannnnnnnnnntatagaaagtaa

SEQ ID NO: 55736 - DNA, 519 bp, Acinetobacter baumannii
atggctaaaggttttgcaattcataatgctattacagatcatggtggagttattccatctacacaatcgagaagttctcaaatggggaatttatttgttagagctggtgatggtcatatgtgccctaaatgcaggtgttggtcagtagttattaaaagtcatgatcatgtgatttttgatggtaaaccagtagcatatgtgggtgataagctatcatgtggcgcaacgattcaaccacaacagtctcatgttgtaggggaaagtggcagtccttatagccaatcatcagataatacaaataattctagttttgttcctacccttcaatatggccaaagattcttattgcaagatgagcttacaggagaacctttaagcaatatatgttatgaaatagagaaaggtggaaatattattcatgggaaaacggatgaaaatggttttacagatttaattactagcgaaaataaagaagaaatccaaattcatatcatatatgaggaacatgaccatggctga

SEQ ID NO: 55737 - DNA, 705 bp, Acinetobacter baumannii
atggctgatatttttacaaataagaatcagattgatactcgtgaaaaaatattttcaatgagtgaaacacttgaagaaatgaagaaaaaaggccctgcgccaacaaaaacaataaatattgtgaccagaagaaggttaactgatagagaaattataatgtgtaaatcagtctttaaagattcgattgactataaaaaaatttggatcgttatgggaggctttgtacagagtttatccggtaatgctatcactccttttggttatattattacattaccacgaaaagattatatagagaataaagactttactgtagcacgtcctgaactaaaacactggtttatacatgaagttacacatgtttggcagaatgtattaggctttcaaggtatgaataaagtaaaacgagtttgccgtggtgaatatttcaaaacagttagctctcctgatgcaagtagaggtgaagatatatcaccgtatgcgacagatttaagtggtagagacttgtataaaaaatttaatgaatttaactatgaacaacagggtcgtattattgaactttattttgatgctaaatttttaaaatactcagatcctcacagggcacatcatcaacttagccttaaattagagcgtcatgttttatttacgttaaaagaatttttagaaaatcctaataacaaatcactattgccgaagagttaa

SEQ ID NO: 55738 - DNA, 174 bp, Acinetobacter baumannii
atgacgctattaggtggcattcaattgttattcattggaattttaggtgaatacattggccgcatttatgctgaagttaaaaaccgcccaaaatatattatttctaccgaacattctcgtactaagcaggaacattcaatcgcccaccaagaaaatacgttctctagtttctaa

SEQ ID NO: 55739 - DNA, 1053 bp, Acinetobacter baumannii
atgacacaacaaaaaccttttctcctagcgttgaccgatggtaaagcaggccatgaaactcaaactcaaggaatagtgcaactactgaatcaacagcaagagtatcaggtcgaatgggttcaattaaatctacctaaaaaatggttgtatcgtgttttgaagttactgatcaagttttcaataaatacacagtggttacgttatttttttgatgcccaaaccctaagagcattagagcagaaacaggttgcttatattgtatcggcagggggaaactctctacttgccaatctactgctcaaacaacatttacacaaagatcagtctgtgaaaaatttggccgcgagttcattacgggggattcgcgctgacttgtttgatgtggtatttactattcatgaacaacaagctgttttgcctcattatttttactatccaattgcaccgaataaaatgagtgctttacctctaacacgcgaacaagccctagaacatttgggtattcaaaatgctgaacaaacgattacaattttgattggtgctgacactaaaacagtaaagattggtgaggcggcacaatgggcaaatgttttacagcaggttcgaaagcaatatcctacagcgagattgttactgacgacatcacgaagaacatcggttacttttgaaaaagaattgcagaaacttgccgagcagtatggcatttttcagccctatgaccagttaacatgggtagcacaagggcaaagttgtgatattaaggattatattaaagcggctgattgggtcttaacgagttcagattctacttccatggtggctgaagtggtgatgtcggggagcaaactgctggttctttataatgaagcgacgatacaggatccacatattaaacaacaattgaaatttttggcagcacagcgttggttatacttgcttgatttgaatcaaaaatatgatttttctgaggttattagtgcattacaggctgaaaaccatacggaaacaatgactagaaagttagcatttattttagataagcagtcaggttaa

SEQ ID NO: 55740 - DNA, 150 bp, Acinetobacter baumannii
atgattttaaatgccttacaaggaaaagccttaaaggtgtatggctatggtcgacaaattcgtgactggttatttgtagaggatcacgcacgtttgctttatacggtagccactcaaagtattgtaggcgaaatatactggtggtcataa

SEQ ID NO: 55741 - DNA, 252 bp, Acinetobacter baumannii
gtgccaaataaactgggagatgtagcgcagaacaaagatctgatcacatatgtgaaagaccgctcagggcacgatgtatgttatgcaattaaagcaaccaagatcaaaaatgacttaggttgggttccgtgggagtcatttgaaactgttttgcataaaacagttgaatggtatttacacaatactaaatggttgtcacacgtccaatgtggtgaatatcagtcttggttaaacaaacaatatcaaggataa

SEQ ID NO: 55742 - DNA, 159 bp, Acinetobacter baumannii
atgaaagttactgatgaagcatgtcctacaacgaatgcattatttgtacattacttaacagattatgctttcgatggtgcaggtgaaacggctgttttagaaacagatacgatttcaccattaaatatctatggtaagaccaaggcattaggcaaataa

SEQ ID NO: 55743 - DNA, 405 bp, Acinetobacter baumannii
ttggttcaggcatttctaattggtgaagagtttattggtcaagacaatgtttgtttgatcttgggtgacaatatttactatggtcaacgttttggcaaaaaattagaagctgcgagtaatcgagagtatggtgcaacagtatttagttatcatgtaatagatccagagtgtttcgattttgtggagtttgattcatctagaaaagttttgagtattgaagagaagccattaaagtcaaaatcaccttatgccgtgacaggtttgtatttctataacaatcgtgttgttaaatttgccaaacaagtaaagccatcctcccctggtgaacttgaaatcacgaacattaataatgcttatctagaggactcacttaatgtggaacttttaggtcgaggctttgcctga

SEQ ID NO: 55744 - DNA, 1020 bp, Acinetobacter baumannii
gtgtttgttagtgttattgtaccaagttataaccacgcgcaatatttagaagacagaattgagagcattcttaatcaaagctattcgcaatttgaattaattcttttagatgatctttccccagaccatagtgcagcaattttagaaaagtataaaagccaccctaaagtttcacattgtattattaatcaacaaaattcgggttcaaccttttgccaatggaataaaggcatgcatctagcaaagggcgatctaatctggattgcagagtctgatgatgttgctgacttacaatttttggaaaaattagtccctcattttgaagaaaaccctaagctagttcttgcttacagccagtcttaccgtatgaatgcgcagggtgaagttacagggacctggaaagattttacagaccatgttgactcagaattatttggcaatgattttgaaatgtctggccttgagtacatcgaaagatttttaaatgctcaaaatactattccaaatgccagtggtgtcattttcaaaaaacaaacttatttcgatgttggtggggccaatccaagcttacgctttattggggattgggaaatttgggtaaaaatcgtatctcaaggcgatattttctttacccacgtatgcttaaactatttccgctatcacgacaccagcgttattgcccaggcaaaaaagaaaaaagatcattttgaagttcgccgtcaggttatcttgcttcgtcaaaacatgtcacaatttttaaaaggctattgtaaaacacaccctgaagcaaataaggcttaccgcctcaatcaaaaaagcttatctatagaattaaggaaaaatgcttctttagccattcgacgtcgatactatgacagaattattccaacaagtgttattgcccttcagaccttaccattctatgttattcctttttatatactgaaattacttgtgcagttcattttatcaatctgtttagttgcaccatacaagatgctattaaaacaaccaaaataa

SEQ ID NO: 55745 - DNA, 258 bp, Acinetobacter baumannii
atggaattaaaagcttatttacatcgaatagaaaacattaaagcgattcatgatctagatgcagcaggactcgaccatcatgtgattgccgtgttcttgtctgccgaaggtatttcaatgacagctcaggaggtaaccactatcgttaatacgtatgacgcctttggtaaagtgaaattaccaagtaaaaaagtgcaggcactgatcaatgccaaaaaacttggacaaaatgatgagaccttgccgtgccctgtttaa

SEQ ID NO: 55746 - DNA, 2607 bp, Acinetobacter baumannii
atgaatattgcggcgcagcctccagttcaggcagatcaaacagtttatttaaaagattatcaaaaacctgcgttcttggttgaatcaattaatcttgatattcaagtctatgacgataaaacaattgttgattcaacattggtcatgaagcgtcaaactgctggagacttagtgctactgggccgtgatcttgagttgcaatctattcagctcaatggccaagatcttactcctgcacaatattcactcgatagtgaacaactggtgatcactgatgcaccagatgaagtcattttacaaactcaagtgattattcacccggaaaccaacactcagcttgaaggtttatataaagctggcgacttatttgtaacgcaaaatgagcctgaaggtttccgtaaaattacgttctatccagaccgtccagacgtactttcagtttttactacacgtgtagaagcagacaaaaaatatccggttttacttgcgaatggtaacttgcttgaaacaggtgaagttggtgaaaaccgtcactttgcgatctggcaagacccgactaaaaagccaagctatttgtttgcttgtgtgattggtgatttagctgtattgaaagaccgctatacgacttcggaaggacgtgatgtcgctttagaaatctatgccattgagaaagacattccaaaatgccatatcgcaatggaagctttaaaacattctatgcgctgggatgaagagcactatggccgtgcctatgatctcgacaactatatgattgttgcggtgagccagttcaacatgggtgccatggaaaataaaggtttaaatatctttaacacctcatgcgtacttgccgatgaagaatacacaactgacgcagcgattatgcgtgtacagtctgtgattgcccatgaatatttccataactggacagggaaccgtattacttgtcgtgactggttccagttgtgcttaaaagaaggcttaacggtattccgtgatcaatctttctcggaagatttacaatctgctgcggttcaacgtattgacgatgtcgctgttcttaaatcgcatcaattcccagaagatgcaggtccattgtcgcaccctccacgcccagaccactttgtcgaaattaataacttctatacagcgactgtttatgaaaaaggtgcggaaattaaccgcatgatgtcgacattattgggtaaagaaaaattccgtcagggaacggatgaatatttccgccgtcatgatggacaagccgtaactgttgaagactgggttgctgcactctctgcaggttcaggtgttgatttatctgcattcttaacttggtataaccaaccaggtacaccaaagcttgaagcgaaaggtgaatatgatgcagcagcgcaaacttatcgtctaagctttaaacaaagcctaaaagcgcatccgaaatatccaaacttaaaagctgtcccaattcctgtagcgttggcattatttaatgcgaaaacaggtgaacaatatacgctccaaagcgaaagcctatttgtaaatggtgttaaagatggcgtgtatttatttgaccaagatgaggcaactattgagtttacaggggtaactgagcaacctgttgtttcactactacgtaatttctctgcacctgtaaatctggtatttgattacactgatgaagaattagcattcttaattcaacatgaaacaaatggttttaaccaatggcaagcaacacaaaccttgcttgaacgtattttgttagaagatcactctgcggatacctatattcaagctattcaaagcacattgcctgaattagttggtcgtgatccacttttagcatcgcgtttgtttgatgtaccaactgaaggttatttaggtagccgtattgatcaaaactatgcaccagccgatattcatgtaaaacgtgaagccttactcaatcgtttggctcaagagctgggttcgttctggaaagatacgtaccttacactggaccctgacttgcaaaaagaattttctttagcgatgggtgtacgtgcattaaagaacattatgctcatgatgatggcgcgtcagggtgaccaaagtgcatttgaattagcttacgatcaatatcaaagcacagggaatatgtctgaacgtttaggtgcgctgcgtgtactagtgtggcaaagtgcgcctcaagcacaagaagccctagctgatttctataaccgctttaaagacgaagcattgtctttagaccaatggtttatgattcaggcagcaaacccaaatgccacagttgagacaattgaatatctaactcagcatcctgattatgacttaaccacaccaaaccgtattcgcgccgtgagtggtggtttgtcaaataaccctgaaaatacgtggggctttggtgtagctcactttattaatcttgcagaatatctggacgagaaaaacccgattttaggttcacgcttattacaggtgttatctcgctggtatacgcttgccgaacctcagcgcactcaagtgcaacaggctttacaagcattgcagcctaaagtgaaatctaaaaacgtttctgaaactttaaatagtatgctgagcgtttaa

SEQ ID NO: 55747 - DNA, 1065 bp, Acinetobacter baumannii
atgagaatagaacaaatgcctggatatgaatatccagtattagcttattggctagaatattggcacgaagcaaacaaatggcaaattatagaatataaacttttacctgacggaatgctaaaatggtataagcaatactatgaagtagaatctggctgtataaaaagctcttgtttcgatataaaaaatgatgcattagcttatgtaaattatgaaaactctcatatatcctcacgagtagctacattaaaattatctgaaatagagaaaaattcaattgaactaaaaattgagaaggctatagatgcaaagaggagactcatgtatgaagaagaattaatgcttacagcagctataaataaatataaaaatgcccagagaccaaacttggaagatataattctcccagaaaaagaagaaaattttaaaaatgatttatttaatcaattacaagaaatgccatatttaagaatggctctagtcagagcaggaactaaatatggaataatttatagaaatttaaaagatgaatggtctaaaagttatcaacctaacaagaaaacactaatttatgtagagagatcaaaaatagctaatgcttttaatttaaaaggtgatgaacattggggaaaaactaaagcaaagattagaaaagaattacttccaattgctagtaatcttttgcaactagaaagcgtaaaaaaacttttaaaagaagctcaagcaaaaggacaaaaagtacttgtttccaatggttacgtgttttggtttgaagaggatggaaatattggatggcaaattaaacaagttaaacccactgaatcatcaaatactttaggggaaactatttggaaagaaggaactattttatcaaaaaatcatggtcgtttagtaattttaccttatattaaagagaatggagaatatgtgcaaggacacacaaaaaatgcacctcatgatgggcctgcaaaacctagagtgccatctgaatatgtggaactaccttttgaaatacttgaagatgatttaatgataggtttatttggggaactaaaatatgaataa

SEQ ID NO: 55748 - DNA, 996 bp, Acinetobacter baumannii
atgaataaatacagaaaacaaatagaacgtagttttttgttcgaagatataattaaagatttattagtaaaacttaaatataaaaatgtaacacaatatatagaattgtcgggaaaatattccgctgacattatatttggtgaactcaataatttaagtgttgttgaaataaaggcttatagacctttatcaaaaccctctatgagtgtaattgaggaagctcttaaacaacttgaaaaggtcttagaatcttccaataagttccaaaatggaatattagtgatctcaacttatttagatcatgaacgttataataaaatccacccgaatatagaaatatgggatttagataaaatacttaacctagctaaatatttcccagatattcataataaaataattgatctatttgaacttgatccttcttataaaatagctattgaaacagcaaatgatttgattgaagcaaaacaaatcattgatcaaatttctttgattcctgaaggtagaaataatgcatcaaagtttgaagactggtgtattgaagctttaaaatatttattttttgaatatttaacagggtggcaagaacaaagttcaacaacggatggtttacaacgaagagaccttgtatgtcgtgtaaaagactctcaaactgaagtttggcaatttatttcgcatactttaaaaagcagatatgtagtatttgaatttaaaaactatacagataaaatcacgcaaagagaaattattactactgaacgttatttataccctatggctttaaggaattgtgcttttataatttctcgaaaaggagtctcctcttctgctcagacagttattgatggtgcaatgagggaacatggtaaacttattatttctttatctgaggaagacctaattaaactgttagagggaaaagacaaaggggaagatccaaatgtttatctttttgataaaattgataggtttttaatgggattaaatagataa

SEQ ID NO: 55749 - DNA, 1290 bp, Acinetobacter baumannii
atgaagagtcttagaatagattggttttttcgtttaaaagatatccaagattttgttgaatatggaagttattcaattgaggaatataacagattagaaattttttcagatgatgcggtaaaaaatctattaaaaagttgtgtgccaagttattttaataatagtaattataaacataatttaattgatgagttcgtaaattcaattcttgatttttttgattgtgattatgatagaggttatcaaattgaaaaagatgagttaaaatcttttcttcgtcaaaaaaatataattattaaaaattttaataatgattttttagtagaagatccaacaactaatgaactttcagatagttatccattttatcatgaaatttgtttgaatgatccgatatatactaatctagctatgagtgataattggaatgatgcctttattgatcattcggataatttaataaatagtgaaaatgatataaaggttcaattacccaaacagatagaaattctctctaaaaattattatttcactgtttttgatgctgcttgtcttatttctttagatgaacctgatatcatttatgatattaattataatgataattttatgtatagtgaacataagcttgctataaaagttattgaaaatgggattaaagctaagaaactagagattgacaaagagggaatgattccaaaattgtcattacaaaatttcttattagagcagaatattttaattattgggtttaatgataatttacctattaaaaattctacagaagcagaacaactaacaatctcgaagttaaatttacttataaagaatttaaataatgaaattgcaggtttaaaagaaattgtcgataggaaggatgttgaagttgaacagttaaaaaatgatattcaaaaagaaagggagatttctgttgtatctcgtgctaaccaaaaccatgcagaaaaagaaattataaaattacaaaagcttgttaaacaattagaggctgatcaagtattagaacagacagaatataatgaactattatctttaatttttgatgagtcagctacagaaaggtatgcacctgatttagtgctttcaattaaattatgggaatcaatttatataaacaatcctaaaaatgatagccacagtaataaagctaatggttggattactatgaatactggttatgacctatctagaccatctgctgcaaaattaagagaaatcacaactccttttgtcaattggtcaacacatagagataaaaattataaaaaataa

SEQ ID NO: 55750 - DNA, 249 bp, Acinetobacter baumannii
atgggactattagaattagccaagagaaatttagatgagtatatatctattattgagactattaactttttagctataactaaaaatactcctgttaaatatgttgcactttttttgcttagccaaagatttgaaacagatatatccacatatgaggtggataaatattatatagttcaatcgaatgatgaatataattggggagtatttaatgaaactaataatattttaagaaaaattgcgaaatag

SEQ ID NO: 55751 - DNA, 1215 bp, Acinetobacter baumannii
atggctaatggctttccaggtggaaactttagaatcgttaacaaagaaacaggtgcatgtatcgcaagcgcatacggtggacaaacccatggcttacaagatgctgtaactgcacgtggtgagacaggtgttttaccttattctcatacaaacgaccgactatttacggtacatgacaaggttaaaaatatagacgaagagctttggtattttgacagccgcgtatataacggtggtcatcgagagaataagctatacaacaaagttaaagatatccgctctaattgggtgctcggtgctcgtgttgaaacaaatgcgattgcatataaattattagacaaggacttagaaaatttccttagtcttttaccaaagcaagatgaagaaactctcgctcacttaaaaaccagtgattgtcttgatattgttggtttattagagacatttattctgagtaacggcgaagaaacgattaaatcggaacttgttggtaaacttgatgagactaagctgaacgaatatttaaatgctgtactcgctcatgagtcaattcgtcgcatcgaacaaaagttctatgaatatgctgcctctccttggctctttttagatattcctgaacttaaaggtttgtctgaaaatcctttcgctcagcagaatgaacaaatctataagatcattcttgcctctgtacaattagatgttttggatcataaagattggacttcagattcagagttccgtttgtatttacgccatgacaatatcgatgctctactaaaaaatatgaagaaagagagcattgcggagcttcgtgaaaaagcatatatagaatatgcaaatactcaagacctcaaaaaagaagccataaaagtccttttagagcttagaaaaactctagatttacatacgaatgaaaaaaatatggatacggtcaaaaagattttaaaggtaagcttaaaatcaaatgagtcttttgaacaactgcaaacagcgttaaacagtaccaatggtaaagaaataaaaccagtgaattggcatagcggcgatattttcttacaaggggctggttgcagcggtacaactaattgggcatttgaagatggttatatctttgtagaaggccaaccagatgctgtactaacgcatctctggggttcatctgtaggtattagtcaacgatctaatgatccgagacagcgctgggaattaaaataa

SEQ ID NO: 55752 - DNA, 1236 bp, Acinetobacter baumannii
atgccacccaaatatttaattgaaaaggtggcaaagcagattgatagcattgcaactccagcaggaaaggacagtgtgtttgcttctccattaaagcaatttccaaacaacatttcgaaagcagaacaagagcgtttaagccgtgaagtactacaggtcatagaccagaatgtacggcctgcttatcaaaaactcgggacgtttattcagaaagattacttaccctatggacgacaacacgagggtatatggagcttgccaaacggtgaagagctctatagcttttatgtagaaaacaatacgacaacctctgaaagccctgaaactattcatcagctcggattaaaagaagttgctcggatagaagcggaaatgctgaaaattgccaaagcacaaggtttcaatgatttaaaaagtttccaacaatcattaaagacaaatcctgcggttttcccaaaatctcgtgaagaaattttagagatttatcgtggatatattgcccaaatgcaaccggagttgccgaagctgtttggtttgttaccaaaaaataaagtcgaagttttgcctgtagagcaatatcgagaaaaagaagcggcaggtgcggagtatcaccaaggcacgcctgatggttcacgtcccggacaagtatatgtaaatactggcgacttctctgaacgttccaaaatatcaatggaagcgactgcttaccatgaggcaattcccggccaccatatgcagattgatattgcccaaaacctgccaaatttgccgatgttccgaaagcaacccaaccataccgcttatattgaaggatgggcactttacgcagagcaattgggcaaagatgtgggtttctataaagacccgctttcagactatggaagactatcgagtgagttgttccgtgcttgtcgtctagtggtggacactggcgtacattataaaaaatggacccgtcagcaaatgattgattttatgcgtgaacactctgctttagatgaacctgatattcaggcagtgacggatcgctatatcgctattcctgcccaagcattagcatataagatgggccaactcaaaattttagagctacgggaactcgcgaaacatgagcttggagaccgttttgatatcaaagcattccatgacatggttttaaatgcaggaaccttgcctttaaatatactcgatgcccgtattaaaaattggataaaggaacaaaaagcggcagcttaa

SEQ ID NO: 55753 - DNA, 522 bp, Acinetobacter baumannii
atgggtgccgtactacttactttagcaatcatttttactcagttgtctcttattgcatttggtggtgggaatacgattttgcccgaaatgcaacgtcaagtagtcgatattcatcattggatgacggcgcaagaatttagtgcgttgtttgccatggcacaagctgcccctggtccaaatatgatgattgtacctttggtagggtggcatgtagcagggttgtctgggctattggtgacgtctactgctaaatttttaccgtcatctcttattactgtatttgtgatgagaggctggtcaaaattcaaagataagaaatggcgccgtgttttacagcttgctttacaacctgtcactgtgggaacggtacttgccagtgcttggattatctctgaggcagcggcaataaatactttacttgtcattatggtggtgattgcaactttattatctttaattaaaaaagttcatccattgcatgttttgattgctggggctgtatttggtgtggtcttactctag

SEQ ID NO: 55754 - DNA, 561 bp, Acinetobacter baumannii
atgaaccatgttgagattgccgtgcagaaggatactgttcctacttgcacagagttatttttaggttttttaacattaggtttaattggatttggtggtgtgctgcctttagcccgtaaagttattgtagagcaaaggcattggttaagccctgaaaaattcactgagttacttggtctgtgccaatttttaccgggcggcaatattattaatttatcggttgcgattggcatggagtttcgcggtgtccgtggagcagtgagctcactcattggtttaatcttcgcacctaccgtaattgttgtacttttacattatgtctatgagcagttccaagacaacttaatggttaagcacctttttgaaggtttaggagcagcagcagcagggcttctggttgcaacaggtttgaaaatgcttaagcgcttattacgtaatccattagcaatctgtgttgtggtagcggcaattgtcagcattgcttttctaaaaattcctttacttttgactatgctgattttacttgcgttttattcagccatcatttggaaacgtgtgtaa

SEQ ID NO: 55755 - DNA, 903 bp, Acinetobacter baumannii
atgctcgatttatataagcttcatgcctttgtagtggtggttgaagaaagaaatattactcatgcagcaaaccgtttgtttattcaacagccacctttaacgcgtttacttaaaaaacttgaacaagaactcggtacacagttacttattcgtcaaccgcgcgggattgaaccgacggaagcgggtttagcattatttaaagaagcacaacttttattagaacatgcccgccatattccccaattggtccaagatgttagccaaggtaaaactggacaactcaatattggctttacaagttccgcaggtttgcatccgctcatttcactcgtattacgttcatatcgggaaatgtaccctgctgtgcaaaccaaacttgaagaagcaggcagtcaaaagcaactggactggttaatttcagaaaaacttgatattgcctttttaagagcgccgattagccgagatattggtttgaagcatcttcatatattaaacgagccaatggtggtggccttacctatcggccatccgcttacacagaagaaaaaaattagtttaagtaacttgtcagaggaaaattttgttttataccgtcgctcttcagggcaaggcttatatgacaatattttatatagctgctatcaggcaggttttagtccgcgtattattcaagaagcgccgcgccctacagcgaccctcaatttagtggctgccggtattggaattagtattgtgcccgcttcaatgcataacttttgggaccatgaaatcgtctatcgcgagtttgatgattcaataaaactaaatgcgcctatttacttaattacacgagaaaatgaaaactcagctaaagtgtcaaacttcattgaactcatgcaaaaactattacctacaatgacctaa

SEQ ID NO: 55756 - DNA, 1035 bp, Acinetobacter baumannii
atgactaaacaagggctttcctttttagatcgaaacctgacgctatggatttttatagcaatggctttaggtttagcgattggagttttctttcctcaggcatctgtgtctttaaatgaattaagtgtagataacgttaatattccaatcgcaatcggtttggttttaatgatgtatccgccattggcaaaagtggaatatgcggctttaccagaagtatttaaggataagaaaaccttaactttatctttgatacaaaactggattattgctccagttttaatgtttatccttgcgattgtttttttgcataactatccagagtatatgacgggccttattttgataggcttggcacgttgtattgcaatggtattggtctggaatggcttagcttgtggtgataaccaatatgttgcagctttagtcgcctttaacagtatttttcagattttattttttagtacctatgcatggttgttcttaactttcttgccgccatattttggtgtggcaggacaagtgattgatgtcaatttctggaccatcacacatgctgttttggtgtacttaggtattccattcttaatgggtttcttgacacgtttgattttagtcaagtcgaaagggttggaatggtatcaaactaaatttttaccaaagatcagcccgattagtttaattgctttactttttaccattgtcgctatgtttagcttaaaaggtggtgatgtggtgagcttacctttagatgtattacgtattgcgattccactcacaatttactttgtcgtaatgttctttattagcttctttatgagtaaacggatggggaataattacccacgtacagcggcaatttcatttaccgcggcaggtaataactttgagttggctttagctgttgctattgcaacttttggtttggcatcaccagttgcttttactacagtgatcgggccattggttgaagtaccagtattgatctcactggtttcggtttcactttggttaaagaaaaagtattactcttaa

SEQ ID NO: 55757 - DNA, 330 bp, Acinetobacter baumannii
atgatcaaccaagtcgatttctttaaatgtctatctgaccaaactcggttaaatattcttaaattagttctaaataaacaaaatatttgtgtctgtgagctaaccgaacagcttgagttgagccaacccaaaatttctagacatttagctttgttacgaactcatggcgtattactggatgaaagaaaaggacagtgggtttattacagcttaaatcctgatttacctgtttgggctttagatattctaaaggtgatagaaaatgacgagagtgggacaaaagtaaaacaacaagatcagtctttcatcacgacaacgtgttgtgattaa

SEQ ID NO: 55758 - DNA, 1119 bp, Acinetobacter baumannii
atggaaaatgataaaatttatttaagtgaatcggaagtatatcaattaactggtagtgtaatacatagtatttctgaagatttaaatcgatcaatttataaaaaattagatggtaaattgactatcgtatggagagagagtgaatcttttaatgcctctgcacaaatattaaataaaatttcggagccacctaaccataggattactattaactatggtttggttaaagaattataccaagatgtaatacactatcatgaatttgctgaaaatattcattatcaacctgcaatactttcactacttaattctattacagagatgcctacacttccaaaatgttttaataaaaaagagtctataaataatatgtttatggcttgtctaacttttattttttttcatgaattaggtcatctcatgcaacagcatgcaagaattcgagctaccttctcggagcattttgttgaagattttatgatcagtgagtgtgaggcaaataattcgacaaaattaattggaaagcaagcagctatatctcatactacagaattagcggcagatttcagtgctgtcacaagatgtatttctgaattattcagacatttttcagatgaagaaattgtaggtaaagaccatggcggtattccatttttaggtgcagtgcaattatttgttagtgggatatcatgcttattttatagatttagaggttttgagtcttctcatttagaaacagtaccttgtggatcacacccttttccgttaatcagacttgaattaaaccttccacatatatatgaaatgttgagttttccaatagttaacgaaatcatgggatgtgatctagatcgaaaaaaaatagttgaattagtcactcgtgctgcatactcaggggcttatttttggttggttcgtgcaggagatcattctcaagaaatacctaaaaactatatatttaaaggtatactaaattcagatgaatcaaaaaaatatactagttgtattattcaaacttgggatgaaattgaagacatgatagattcatataatctggatgagctaccacttactaaaataactttcactgaccaaattagagaattaattcagcaataa

SEQ ID NO: 55759 - DNA, 1941 bp, Acinetobacter baumannii
atgtttttaactaatcctagggatgagcgttggaaagacattgttcagttagcacaacataatggtgggataggtcagcaggttcgtaacgtagcactgccttttacgagagggaatgcacaagttaaaatatggttagagcaaatttctattagaaaattgggtgactgggaaattaaagaaaatttgcgtacacaaaaactagaaaagaaaaaacaagaactgcaggctgaacaacagaaattttatcgtcaaaacagcgaactattacgtaatggtaaatatgaggtcattttggctccagcaaaagcatatttaaaaatgtttagtgatatcgatagtaaacccgcgcctcaccaatgtattgcagcatggctaggggatgaaatatcaaatatttgtatggaaggatttgaaaactttctaaccaatagtgcaccaaaagtaaaggctgaagatattctggaaattagaaaagaaggtagggtttataatgaatgctttatcctcgttgtagcattagcagagcgtgttcggaaaaatattggtttgagtgatttgtctaatgagcgcttatttgctggttattttacattaatgaatcgtcgatatgaccaagatgtgaaaatttctgaagtattcgaagaaattgaaaatgaattgctaagacgtggacgtttagaagaagcactacaattattttatgaaccattatttcaaagtagatttactcatattcagggtttaactaatattctgagtggagcgaaatataaaaatttcaatattgaattagctaaacgatggatggataaatttccacttattgagcttaatccagaatcagaattaatagatagtttgctttatgcaggccagtttgattttctcaaaaaatttctatcccaacgtacaaacttggaaaatattgaacagaagaaaaattggattggtataggcttaattatagattttgaagaaacaattaaacaatttcaaaaagagttatttgaaagagattttatttggactattagagataggttaaatggaagatatcgagaaaataaagcgagtcttcaactaagtattaatttattagaatggataataaatacatttcgatatgaatatcctgatgttggtcatcctagaggagtgtattcaggggataggcaaccttgggatgctgctgactttcttaagggaattgttgcccagttagctaaaaatcctagtgatgaagcttctagagcattagagcgacttaaaaatgcagagcaagatagttatacagatttaattaaaactttacagtatgaacaaaagcaaatacgagttgagagtttatatactcctcctacaattgaacaaattaaagcaatttcagaagacttaccccctcagtctatctctgatttacaagcttttattctagaggaactagctttagttcaagctaaaatcagaagtgatgatgcagaatcttggcgtggtttctatgatgataatgctaaaccatataaagaagagcgctgtcgagatcatttgataggattgctccgacaaggaagtaacgaagtagtttatgaagtggaagttcatgaagctgatgataaagaagctgatataggatgcactgtagggcaattacgtttgccaattgaagtaaaaggtcaatggcatcctgaattgtggactggtgctgataatcagctcaataaactatatgtacaggactggcgtgctgagggtagaggtatctatcttgtgctatggtttggcttgaggaatgatcataagaagttaaaaagtagaggtaggggaaaacttagtcctactactactgatcagttaaagcaaatgttgattgaaaatagccaagctgcaaaatctggacaaattgaaatagtagttttagatatcgcaagattaaattga

SEQ ID NO: 55760 - DNA, 1227 bp, Acinetobacter baumannii
atgacaaaaagttctactacacaatttgattgggatattgtacctagccccgatgtaattaaagctctatggaaagaagcaatttttgtttttgacactaatgttttattagacatctacagaagtcaacctgaaactagaaatttactacttgagacattaaaaggtttagaaaacaaaagttggctaccacatagagttgcatacgaattccgtcgcaatcgtagatcagttattgccgaagctaacttcaacttgagtgaattgcaaaaaacttttgatgaaaactttcaggatttcatcagtaatgtagaaaaaaacttaaataatattcgtaattttccggccgatgcaatttataaaattgtaaactcttatcaagaagcaaatacagagaataagaaaagtattgaagcaattgttcaagactttccaaaatttaatgagcatgatgaaattttggaaaatataaaaaggatatatgtttcaaatgttggtctaccttactcgtctgatgatttagaagaaattattaaagaaggaaaagaacgaatagcaaataatattcctccagctcttacggattcctccaaaggaactgaagaagaccaactaggagacttcattatttggaaacaaataattgattattctcgaaaaaataaaaaaaatataatctttgttacatcagagaaaaaatcagattggtggattaaggaaaaaggtagaagactaggattaccctatatactgctagaagagttttcaatacaaaccaattcacaaaaaattcacatgtatcatgtcacacaatttttacagatgtacaaggaaaatatcaatccaaaaattgaagtgaatgcagcaattattgaagatattaatgctcttcaaaatgaaaaaagtgaaaggctagccattatcacttcatacaatgaagaatcatcagttgagaatccttcaattcgagaggggacattaactatcaatttattaaaggaagcctataaatttacaagcacgattacactaaaagataaacttccacagacacctgacaatatctgggtagatttaatcgaatccccagaagcattaaatgaatgtgatattcgatgtttaggtagtacaggaactagttatgacatcaactttcatttaaaatcctatcaattaaatcaaaaacttatcccaggaaactatgtgttaaagttcagaacagcatag

SEQ ID NO: 55761 - DNA, 234 bp, Acinetobacter baumannii
atgaaactagacccaaaactattagaatttgctaaaaccatgcgaagtaatgctacagatgcagaaagcttaatgtggcaattacttcgtactaagcgatttatgaatcttaaatttcgcagacaacatgtgattcaaccctatattgtggatttttactgtcatgaatcgagtttggtgattgaacttgataatttgtggaaagtgagttctcaactgaaaaaagataagtaa

SEQ ID NO: 55762 - DNA, 564 bp, Acinetobacter baumannii
atgtcagataaaggtaaatatagaactagaaaacatgcatctttcaccattcacaatactgataaaatcattttaaagaacaaatatattcctcattttcaaactattgaatataaccctttaaatggaggaatagctcgtcatttcactgaaatagataaaaaaactattgaaaatccaatttttaaaaatttaatgcagtttgcctattttactttctcagaaataaaaatggaaaactggtttatagaggcacatcaatttcgtattagagcaaagcctaatgatacgggtaaacctactccagaaggtattcaccgtgatggtgttgattttgtacttatggctctcatcaatagagaaaatatccaaggtggtatgactaaaatttatgaccttaataaaaaactcaaaagtgaaattttatttgaaaattttcttgatattgcactcgtagatgatcatcaggtttatcacagtgttactgaaatacaagtagatgatattcaaaagaatagtattgggctaagagatgttttagtcattacttttaaaaaggtataa

SEQ ID NO: 55763 - DNA, 654 bp, Acinetobacter baumannii
atgaaaaaaatggcatttattgatatggaaggtgttcttattccggagatatggaagcacttttctcattatttcaatattcctgaactcgcagttactactagagaagtggcagactataagcaattaatgaatcagagaatcaatatactaaaaaataaagatattagtttaaataagctcttagaagctattgccgaacttgaaccaaataatggagcaaaagattttttaaaatatttacagttaaataaaaattttgaagtaagaattatttcggattgtttttatgaatttctcgaccctttcttaaaaaaaattggcattccttctaagcatgcatattgccattacctagaagtagatagtcatggaataatagaaaaagtacattacttacgaaataaaggtaagcatgaaataatagtaaattatcagaaaaataatttttcgatgaaagatagtattgcaattggtgatgcctttaatgattttacgatgttgcacctagtagatcatggctttttatttcagccttccgaagatgttagaaaaaatgctcctttctattttcatacaatgcaaacatatgaagatattattaattacttgaataatttaaaatatttaaaaagaaataattttcaagcctag

SEQ ID NO: 55764 - DNA, 1101 bp, Acinetobacter baumannii
atgattacatcgcagaattcagaaacagctgaactttcgacagaacaattagtcccagtaaaagttctagcattaaatggtggtggtgcaagaggcctatataccgtcagcgttttggcacgacttgaagaagttatcgaagataaatttaatattcaaaatgtaaaaatcggtgactattttgatctaatcacaggtacatcaattggcggtattctggcactaggtttggcaagtggaaaaagtgcaagagaattacaagccaaatttgagcagacagcacctttaatctttcccaaatggcgctttattcttcaaggttggtacaaggcttttttaccaatttatcgaagtgaacctctctatgatgctgtaaaaagcatgattggggacaatattaccttcaaagatttatccaagcgagtaatggttccaaccgttaatctatctgcaggctgtccacgtttctttaagacacctcatggggaagatttcaataaagacctggatataaaacttattgatgcagcattggcaacatctgctgccccaacttacttcaagccccataagattaatggaaactactatgctgatggagggttggttgcgaataaccctagctacattggattgcgtgaagtcttaatcgatatgaaagtagattttgcaaatgtttcaattcaagacatcaaaattctaaatattggtactttgaatgaaaacttctgtattggtccagagactcttaaaaagaaatctcacaaaggttatttcggattatggggcttaggtaaacgccttgttgcaagcacaatgacagcaaatcaggatatgcagaaaaaaatgctaattcgagaattacgtcatttaaatatagagaagaactatatcgaaattgatcgtatcattccaaatgaagcttcaaatgacatagttttagataacgcatcccaacacgctttagaaacgattaaagagtggggttccgaggacgctagcacaaatttcacccaaaacaaagatttacgagagctctttatatcaccaacaaaacctttcgtgagaaaagttagtctaaacaagggaaaagcagcatga

SEQ ID NO: 55765 - DNA, 1302 bp, Acinetobacter baumannii
atgacttggaattttcacagctactatacgaatcgtgatacgggcttgatcggtcagctaatcctttcggatggtgaaaaagaatctcttaaagctttacgtcagattgtacgtgaacgtacacgggatgtttttgatgaagccaaacagcttgtgaattcatctaaacattactatacagctctatcatttcgtgccgagtttgtgggtacaaatttcaaatatctatcaccagatgatcaaaagattctatctgaactgattatggatctgtcggaagatttaaaaacagaattcttgaagctaagcccacgtttttggacccaaggtagcttcatgtatgacacgttaaatcgtccatataagcctacacaagaaatggacattgatgatggtacatacctgccaatgcagttctttgaagataaaccagcaattgggcatcaacttttattgctattggtagatgcctcgcttaaatctttggctgttgaacgttatggatggtcatttgaagctaaggatacatgtggtcgcattaaaatccctgcaaaaagtgttcatattgacgtaccaatgtatgcaattccatacgaaaagttcttggaaaaagaggttctgttacgaaaggctgcgaattctcaaatctttgccgaaatgtatgatggaatttcagctgctgatcatgcactctatgatcagcttgagacagactgcgtaaatctagcgatacgtaaagacgatgcaaaatggattaaaagtgatcctaaagatgttcacttatggttccaagatgcttgccaacgtacaggtcagcatttacggaaagtatgtcgtattcttaaggcttggcgtgatgctggtgattggcaagaaagtaatggcccctcatccatttcactgatggcagcagtagtagatattctagatcgtacttctgtagatcctaaagattttggattattgatgctgactgtagcaagaaagcttccaaataccttccgtaacggtgttgaaagtcctgatgaaaatgatgatcgtccattgtttcctccatactatgagcatgaagcaaagcacaatgaagtcatgacgaagttagaagaactggtatcttcacttgaagctgcatacgcagcccgtaccaaacaagatgctttgaatattctaaataatgagtatggcgaccgtgttcaggatataagtcttattgtgtctcagacagctgcaccagcttatgaaagcactccacttaaagctaaagaagctgccattatcagtacttcaatgaaaagtggttga

SEQ ID NO: 55766 - DNA, 1740 bp, Acinetobacter baumannii
atgcttgcttgcgggtatcaacacctagcaatcagacaacgtcagaaatatgaagctttaactgacatagatgataaaacccttgtatatcttaaagaatattctacatctaagggtacttttactattgcgttagagtttggttatgacacatatacaattttgccgtgggcacacatcatcagcaaaccagaacaacttgatgatgttctgcttccgcatgtcaataatggtggttatctttgctatgtagaacaactcgaagcagattgggatccgaatgatattggcaacttgtatcagactgtagatcgtcagatccaaataaccctagataactccattaaatcattagaaaatggtcatgtagatcaaattgaattagaaggtgagtttgtagcgtattggaaagctgagagagcaacctatgttctgtcagatttaaatgcactgaatggtgaagtagcctctctaactcgaaatatatctactgatggagctgatcaccttgaatctattttgtttgggacacaacacaaagatattcaagagaaatggcttagccagagagatctcaaggagtttgactcccaaaagctcaatgtatttattctcaaaattagaccaacacgactttctggagttcattggcctcctaaagatgcaaaagctttattcaagtggctatctctcgtagatcataatgctaaggcccatttgataaagtattttgtagaacatccctataaacatcatctgattgttttggaggtagataagcaagatacattcggggtgatatttgaactgaaccaaacagcggtacagcttacgacctatgctaattctagaaaaaaaggaaaaggtggtcgtaaattcgagttaggacgggcaagttcagtccttacaggtaagtacgctttcaacaaatttcaacgaatttcatttgtaaaagcggataaagactcaattctttctcgaaaccgatctcgacctgagattggagatctacgcaccaagaaaattgcactaattggttgcggaacgattggtgggtatgtggctgagctattgattcgtgctggtgctggtatgggaaccaaaagcttagatttatatgatcacgacaagtatggtccacataatttcagtcgtcacacattaaatagtcgtgattttggtaaatacaaatcagaagcacttaaaaataggcttaaaggctcaactcatcttgtcaccaacatcgaagcatacaaatttggatttcctttcttaaaaccatatctgtcattatatgatattgttattgatgctacaggtcgtgcacctgtttcaaaacgtctagcctatttggtccgacaaattaatggtaccaaaaaaccaatcattatccatgggtttaatgatggtaatggcattgcttcaaaggtctttatagatagcttggatggttgctataactgtctatgtggtgatatagctttctataaaaatggtgttgatagacgttttgagaatttattaggcgttaatcaaaagaaagtctcatgtggtaatacatacacaccgtatgatgcagcggtaagtgttatgaccgcagccttgattcaagaagcagctttatcaactttggagcgtgaaagagattggaattataaagaacatatcttcatgggcagtcgcactaaaaagccgacttggatcagaaaacaaatcttttgcaacatctgcaatgtttga

SEQ ID NO: 55767 - DNA, 462 bp, Acinetobacter baumannii
atgtttgataaagagcttgtgttccaggctcaggatcgatccctagttgtgatttccactgaggttgccaatatattggtatcataccgtcaattaagtgattctagccaagaaagtgctggagtgcttatcggtgaacgtagaggtgttcatattgttattaagatgctatctgagccaagtatttgggatatcagaagtcgtttcatggtagatcgtgtcagtaggcatcatcaacaggccgttgatgatgccttcaaaaaaagtgatggtgaatggcattatttaggtgagtggcatacacatccagaagatgtaccaaaaccatctatgacggactatagcagttggcataaaaatctaaactcatcagatcctctaattttgattattactggtagatcaaatttttgggttggcaagaaaatcaatgaaaaaattgaagtgttacaacaattataa

SEQ ID NO: 55768 - DNA, 1812 bp, Acinetobacter baumannii
atggacttaacagatggacaactggatgtaataaaagctgaaggacatttactggtaataggtggtccaggttctgggaaaactactatttcaattataaaggcagcacaaataattgagtcatctctagagcctagccaaaaaatattattccttagctttgctcgtgcaacggtttctcgtgttgtagaagcaattgaatacgagcaacgaattcctctttctattaaaaatcgaattattgttgacacttatcatgctttcttttggagaattttaaagacccatgggtatttacttgggcttcctcgcaaattagaaattcttacgccatcgcatgaagctattgctctatcaacaattagatcaaagtttcctaataaaaatctttcgaatgaacagaaagaaaacaagaaaaaggacgagcttgaagaaaaaaatagattggcaattgaagaggggaaagtttgttttgatatgttcggatcatttgttgtttctcttattcaaggcagtgagcgtataagaaatctgatagctagtacatatcctgttattattttagatgagtttcaagatactaatcatattcaatgggagatagttaaggctttaggtcttagcagtagattaattgcattagctgatccagaacagaggatttatgattggataggtgctgatccagcacgacttacccattttcaagaaaattttagttcagtaatggtggatcttactacagacaatcatagaagttcaggcacagagatagcaatttttggtaatgatttactagttgggaagttccgtcaggaagcatatataggaatggattttgattgttttgaatcttttccattgccagccatgacaaaattagtaaccactatttattcagcgcgcaaacgactaatggatgcaaatattgataactggtcattagctatacttgtacctactaaaaagttaatgcgtttggtgtctgatactttacgtcaaccaccttcgggaatggccgaaataccacatatcgcggcaattgatatggatgcagctattttaggagcggaaataatttcttttcttatgcatcccataaaaaataaccagcatttttcatattttattgatttattatgtaactattttcaaggcaaaaatggtgatgcgcctactcaaagtggtttgcaagaggctgaaagtatccgtaaagcatattttgattttttagaaaaaaaggcgcaaggaaaagaaataagaagatcaagtattttggtgaaaatactagatacttacaatgaagtaaatgctgttgttttaatggggaatccagatgaagattggaaaaatattagatctattttagagagtagtgcttgtaagcgactaaaagaaattgcaactgaagttagaaatatacgtatattgaatagagggtcacaattgcgtcaacagcttaccgaagattggcaagataatagatatagcaatgcattagcaattattcgtcaggcttttgttcaggaacatttttcaagaaactcgaaacctgaaactggtgttgttgtgatgaatatgcataaggcaaaagggaaacagtttgatgaggtaatcatttttgaaggatggcctaattatgtaaaaggagaaattgtggcaaatcctaatcggattgtaaggtctaatttaaaagaaaatattgatagccaagcaagacaaaatatgagggttagtgttacaagagctaaaagtagaaccacaattttgacaccaaaaccagatatatgcgtgttacttagagatatttaa

SEQ ID NO: 55769 - DNA, 1818 bp, Acinetobacter baumannii
atgcatattgttagtatagaaattcaaaatttccgaggcatacggaaaacaaaactgctacttcctgaacacgcggtacttataggagataataatacgggtaaaacaactttgcttgaagctttagaccttgttcttggtcctgatagactcggtagacaacccgtaattgatgagcatgatttttttagggggatttatacaggagttataaatagttcatcacccatagaacaaggggaaaatgaatccagccaacccgatgttagctctgagaatgaagcaccaaaaattattattgaagtagtagttataaatcttactgctgaacagaaaagagagtttaatgatgtaattgaattttgggattctataactaatcagattgttcaagatgctgatattgcaagaattgataataaaaatattacagaagcattacgtgttacttttcatggttggtatgatgtggaggaggatgattttaagggggcgacttattttagtcgtagtctgattgaagatccaaaaccgatgctttttacaaagaaacataagtatttatgtggttttttatttcttcgaacgatacgaactggttcacgtgcactaagtttagaaaggggaagtttgcttgatattatacttcgattaaaagaagttagaccacagatgtgggaatctactttacagacattgatggaggtttctgttgcagatgatccaagtttaggaatctcaccaatattggagagtattaataccgcattaaataaatatgtccctaaggagtggggggtaagacctcatctaaaagtttcaaatttaacacgtgaacatctaagaaaagtcattaccgcatttattgctactggagatggaacacatgctgctccattttaccgacagggaacaggtacaattaatatgcttgttctagctatgttatctcaaattgcggaatcgcgtcagaatgtaatattcgcaatggaggaacctgaaactgcaatacctccatatgctcagaaaagaatagttcatgaactatgtaaattagcttctcaaacaatttttacttctcattcaccttatgttttagaagagtttgatgcatctcaaacaattgttcttaccaatgatcctgatggaacattattacaaagacctatagaactaccaagcagtataaaattaaaaagatatcgccaagaatttcgcactcgtttctgtgaggggttattagctcgacgagttctcattgctgaaggggcaacggaatatacagcattttcagttgtatgcagacgtttagctgaacttgatcctggaaactactcgtctttagaagctttaggtatttgtataattgatgctgatggtgagactaatatccctagcgtggctgagctttataaatcattaggtaaaaaaacttttgcgatttgtgataggcaaaatagtaataataaggacctaattgaagctcaggtagagatgcttttaatgcatgaagaggttgggatcgaggacctaattcttaatggtgctaaggaagaagcattaaatcgatttgctaagcaactagatattcctcaacatttacaaagatttaatttagaaacacagaccaaagatctgttgaaagaatatttctgttggtctaaagcaaattgggggattgctgatttccttgctcagtgttctaaagatgaaattccactatggctttgtcaagcagcttcaaggttaaaagaggcttgtatgccatcaatttctgatgaaaatcttacatctattaatacagagcatggacgttga

SEQ ID NO: 55770 - DNA, 891 bp, Acinetobacter baumannii
atgtataaattattaagttccgatatagaattatttaaaaagcaatctttaatttttgttaaaaataggccgtgggattcaattgttacaaaaattggcatgtttattcactcttctaagtttgagcaatttattgtttttgatggaaatatagatgaaacaggggatatatatgcagatggagaagatccctttaatagtgtttctaggagtttgtgtgatagggctattgaaattcagaaagagaattatatcagaacaaaagaaataatttggggtattacctttactttgcattttgatggagaaataaaagttgagtataatccaagaatacctgaatggtatgagggtaatcctacgattgaccttgacgaagaaattaaaaaagaaaccttaacagatagtagtactcagtcgaatatatatcaagatggtgtcaaaagcttaaatattcaatctatttatctagcatgtcgtaaagagttagagctaaagactttaaaagcatcaaatgattggggtatgaatattgtagatgagtgggatattgatcttgttatagggggcataacatttaatattggtgatcgacaagagttttttgaaattaatgtgataggaacttatgatgagagaaatcaaacatttatgtgggcatgggaacatccttctattccacaggatctgcaagaagtggctttaattgttaaaaagtacggagaacaatatgaaattgctgagttacaacaacaattagtttattgtagtgaagaagaagcatggaactttactgctttagcagcacatttggcaaaagctgatggagcatatcgaggtaaagtgaatggtaattggatttatattgtttttaaaaatgacagtaaataa

SEQ ID NO: 55771 - DNA, 5307 bp, Acinetobacter baumannii
atgctaaatatcgattcaggcaataacctgaatgtaaatgctaaagaaattattattaataacggcagtctagcatcttcacctttaatcgttaataccaaaggtaatatcaatttagcagcaaacacccgcattatggatgattcacaaggtggggatgtctatattgatgcggcgaatatcaatcttgcagcgggatcggaactcaaaagtaaccgtggtacagcaagcatacaggtacaaaaagacttggttgcagccaaaggcgcaaaactgattgctgccaaagatttaaatgttttaagtaatggtaagttatcacttacagagaaccatatacaggcatctttaggttcaattaatctacaagcaaattcggctaatacccaaaacctgattgatcttcaaggggggacaatttatgcgggtaaagatcttaacctttatagttcaggagatttaaatctaaagaatcttggattttcacttgaaaacgctgcaacaagagttaaaaacattaaagcctatagtggacgtgatctggtctggaataatgctgacaaggcacttcctcttattacaggcatggttcagcttgatgcagccaataatttaaccgttacggcaaaagaaatctcgaataaagacagtattcaactacatgccaatcaaataacactcaatagtgcactgacttcacaaaagaatattgatgtgagttctgaaattgctgatcttgttttaagtcaggcactcaaggctcaaggtgatattaatctaaccgcacttgctggtggagttactgcaaatagcttaaaggccacatcttcggctggaaagatttctatactcgcgaataaaaatctgaatttaaactcgacccagacaagcaaggcgatgccttcagctgataaagatgaactaacaactgatcagacggttattagtggtttaaaaggggtgacgcttggctcgattggtgatggcaccgttaacttacaatcagtacaagttaatgcgaatcagggtgatatattagtttcgagtaataatggaatcaatctaaaagcgaatacagatgtagttgttactggggatacgggccgatttaaaacgataaataatgttctaaagggacaaaccgtttcgatagaaaatagcaaatctgatattaaaatccaaaatacagacctcagctcgactgttggtaaacttgcgatcaatagtagagcaggcatgagtacaattatcgatagcgtattaacgtcaaaaggtaatactgaactctacgcaaaagatttactgactttacagggcgtgaatgctacttcagaccagcatctggcagtaagctctggtcgtacggtttatagcaatgctgagtatacgccagcgaccaaatggattgcggataaagtaactaacttaacatctaagggcgtgacctctgtaacggctacaggaaaccaagtattacaaaatacaaatttaaccggtggagccgttttattagaggctggcggttttattttaggtcagactggattgaacttgaatgcggtcggaagtgatttacttaagaatgatacaaagttaaatagtttaaatggtgacctaactattcaaaccaattctaacttaaccattgatccaaaagcttacagcttaaaggctgttggtgatattgagcttgtttctaaagctggtactttgactttaaaaggatatggggggactgcggggaatggatcggaacaagttgttaagttggatacagcaaatggtggtatcaatttagagggtgctaaagttgatattcaaggttcacaattaaccgcgcaaaaagatattaagatcgtttcaagtaaagatgatgtgctgattgatggggtgaagaacagtttaataaatagaaaaaaacaggagaaacttaatgaagctaataattttaaaaaaaatataacggatagtttagctctactaaaatcacagcaattttttactgattatgataatatggttacagcatatgaagattatacttctagtaattatgattatagtttgtatatgaaacattataatctttataatgattttatttctaaatatccagttagaccaaacccaagacttcttatattcggatcagataaaccattattccatagtattttttctgaaccgcaaagaatgactcgttttgatgcattgtattcatttgaaccaaaatatgatgaaaattatttaaggagtttacaggctgaagttgatttctataatacgggaataaatggctcagaacatgctgaagcgaagttaaattcaaaatcaggaaatattaatattacttctgctaaaggtttatctattagtggaggaaatatttctgctcaaacgggacaggtgaatttagaagcaagtggtgttttagccgaacaatataaatctacaattaataatggggctaatcagccacccaaaacattaaatgcaagtatcattatcgatggacatacagatttttatgagaaaggtacagaaggtgaaggaaattatagcttccgaacattagtcagtcctaccattattaatggtgataaaggagttaacataagcacggtaggcaaaactaaagaggataatttagttttacaagccacaggtattacctcaaaaaatggtgaagtaaaaatagaatcaaataaaagtattttatttgatgcagctattgagcaaagctatgacctgaccaccacgactgaaaagaaaaaatcatggggcggtttaaagaaaaaatatattacgactgtttctgaaagtaatgacacaaatgcagcttcagttgatatttctgcaaagaatatttctattgaaacgaagaaactagatccgtcagtagatgctaaaactccagataataatattgatatttattctgggcgttttactgccgagggtggaacaatttcgattaaatctgggggaaatcttaacttttacactgtggaagagtcttctagcagtacagtggatgttacaaagaaaacctcatattctaaacttatctcacttttaggttcatcaaaaactacaactaatacaacacgaactcagattagtgaattacctgcaaatttaaaagcagattatatcaatacgcaagcggttgataagacgaagcttgttggaacagagtttgaatatttaaaaggtgcaacgattgaaacaggaggaacacttgagttaatagccgctaagacatctattacagaactcttaaaaaaagaaaaaagctcattagcttggcaggctatgcaggataaaggctcaattactgaaactgctcaattaccgagttttaatggaccagttttacctacctttaaagcagcaggtggtttgagtgtacaagttccaataagtgaaaaagatgctaataaggtagagatacgtgatgcgattcttgatttatctaagcaaccaggaaatgaatatttaaaagaattagtaaaccgaaaagatgtagattggcaaaaagttttattaactcaaaaagattggaactataaacagcaaggtcttaccgctgctggtgctgcaattattgtgattattataacaattgtgactatgggcacaggaacggcagcagctgcaggtgcggctggaggaacagcagcaagtggaactactgttggtttgggcgcaagtatgattggctctgctggtataacgacaactgcggctggagcaattgttccatctacccttggtgctatggcaaatgctgctattacaagtttagcaactcaagcaggtgttagcttaattaataatggtggtgatattggtaagacgcttaaagatttaggaagtaaagattcagttaagagtttagcaacatctattgttacagcaggagttttaagtaaaattgcatcaattgatcagatgaaagctttgcaggaaactgctaagtctggagaattctttacaaatttatcaggtagagtgggacaagttttggttaattctactgttagtgctagtgttgatacggcaattaatggaggtagtttaagtgaaaaattaagtgcaagtcttgtggcaggattgagtgtagcattacaaggttctttagctggagaaattggtgaaaatcttgatcttggtagtaaagaactttctgaccaaattttgcataaactagctcatgctgcagctggttgtattgctagttcattacaagaaaaatgcgaagctggagcgattggggctgtagttggagaaatggttgctggatcgtttgatatggaacctgaaaatgacggagattatagtcaagctcagctaaataaagttaaaaatgttggccaattgatttcgggtgtagttgctgcttcagcaggatatgatgtaactgttgcttcgcaatccgcatcaactgctatagaaaacaattggggtaaagtactttcatctactggtaaagctgcctataagatttttaaaaaagctactgaattacaaaaagctggcaagaacttaaatgataccaatgtttggaaggatattttaaaagatactgctacaggtgaatatcaagatatgttgaattcttttaaaacagcatttagtgctggttcaactcctcttgaaagaacttgggcattaattgatctggcaactggaattgataaaaaagatgtcaagattgttcaggatctccttaaagataggaatactattgcgaagcgcttaccaaatattaaaaacggtcaattttttgatgataaaaaaatagaggaacttgcaaatcggggggacgttaaaaaaattcatcaaatagatgtgggggcaaaaggtggctgggctaagcaagctaatgggaagcttgaaggaaattcagcttatttgttacctaatggtgctgcgtatgttaccgataatagcgggaatgttaaagaggttactgccaatttaagaaatattttaatggatcgaaataattatcaacaaagtattgctggtaaaagtggtatttctggagatcaaggagggcatttaatagctgcatcccttgggggttcaggggatcgtattaatttagttcctatggccaaaacattaaataacggtagttggaaagctatggaaagtgaattagcaaatgcggttaaactaggcaaggatgtaaatatgaaagttgcagtaggttatcccactggcagtagtagacctaataaatttatagtaactgctactattaatggaaaatccactaattatcaattttcacagtaa

SEQ ID NO: 55772 - DNA, 3876 bp, Acinetobacter baumannii
ttgttaaaaggagtagagggggaaattgaattttataatcagaacgtatcaggttactcacattcaggtacaaaaattttctcaaatttaagggatataaatattacatctgctaaaggtttgtctattagtggaggaaatatttctgctcaatcgggacaggttaatttggaagcaagaggtgttttatctgagcagtataaatctacaacaatcactaactcagaaccaaagatactaaatacaagtattattattgacgggcatacagatttctatgataaagggaatgaaaatgatgaaaattatattatgcgaacgttagtcagtcctaccattattaatggtgataaaggggttaacataagaactgtaggtaaaactaaagatgataatctagtcttacaagccacaggtattacatcaaaaaatggtgacgtaaaaatagaatcaaataaaagtattttatttgatgccgcagttgaacaaagttatgaccgtacaacaactactgaaaagaaaaaatcatggggaggtctaaagaaaaaatatattacgactgtagctgagaacaatgatacgaatgcagcttcagttgatatttctggaaaaaatatttttattgaaacgaaaaaactagatccatctgtagatgttaaaaatccagataataatattgatatttattcggggcgttttactgctgatggtggaaaaattacgattaattctggggggaatcttaacttttatacagtcgaagagagttctgatagtaatgtagatattacaaaaaaatcaacgtttgctggaattaaatacaatacttctaaaactaatgcaactcgtacgcaggttactgaattacctgcaacattaaaggcagattacattggtactaaatcaggatttgatacccgacttgttggaaccgagtttgaatatttaaaagacgcaactatagaagctggtggtaagttagacttcattgcggcgaaaacatctattactgacctagttaaaaaagaaaagaattctgtagtctggcagtcaatgcaagataaaggctcaattactgaaactgctcagctaccaagttttaatgggccagttttacctacctttaaagcggcaggtggtttgagtgtgcaagttccaatcagtgaaaaagacgctaataaagctgagttgcgggatgaaattctaaaactggctaatcagccaggaaatgcatatcttaaagaattagttaatagaaaagatgttgattggcagcaagtccttcttactcaaaaagattgggactataaatcacaagggttaacggcggctggtgctgctcttattgtcattattgtaacgattgctacgatgggttcaggaactgctgcggctgcaggagctgctggtggaacagcagcaagtgggactacagttggtttgggtgcaagtatgattggctctgctggtataacgacaactgcggctggagcaattgttccatctacccttggtgctatggcaaatgctgcaattacaagtttagcaactcaagcaagtgtaagtttaattaataatggcggaaatataggaaaaacacttaaagagttaggcagtaaagatgcagttaaaagtttagcaacttcagttgttacagcaggggttttaagtcaattaagtaatacagagctaatgtctgatttgtctaagatgacaaaacaaggcgagtttatgaaagaagttgtgggaagaacaactcaaggaattataaatgctggagctagttcactggtcactactgcaatcaacggtggaagtttaagtgagaatttaagtaatgctttgcttactaatactgctatggcattacaagcatcattgtcaggacaaattaaattacttgaaagtaatgaattagatatggactatgtccttcataaggttgcacatgctgctgcaggatgtgtggcagcatcaataagtagatccgaatgtgaatctggagcaattggagcggcaataggtgaaattgttgctgaacagatggacaaatcaattgatagtaagagttttaataatgataatgacatccaaaactatcaacaaaaagttcgtgatgtttctaaattagtggcgagttctgttgctactttggcagggtatgatccaaatacagcggcaaactctgctgaaatcgcaattttaaataatagacaattaaatcaatctgaaataataaaaattagaatgttagctgcaggaaatgctaataaggaagcacgttataatattgcagcatgcgctttggtgcgttgtgctgaaggttatgaaggaacaacagagtatgcatttttaaagagaatacaagatgctggtaattctgcagaatttaaaggtgaaagagatatattagttaaacaaaattttagaacgcctattatgggtagtatgactacaaatcagaagctttttgaatattctattcttgatagaaatctagataaaagttcctctaattttagagagttaaatggtaaatatcagattactactcgtgcaggtggtgccgtaatggttgttggtgggggcgtggggttagctggctctactgctttaggctcaacttgtgttacgggtgttggctgtttagttgcattagggggatttgtttcatctgctgacctagtaatggctggagctaagcaagcttggtctggtaaatctatagatacaattggtgctcaggttattagtgctacaacagggttaagtacctctcaagccgaaatgatttatggcatgttatctatggccagtgttaccaatagtgttagaactggtgcaaagcaagctgtacaagagcaaagagtgttgattaataagcccacaattactaattgtgtaaatggaacaacttgttttgtagctgggactttaattgaaacaaaaaatggtctcaaacctattgaagaatttaatggcaatgaattggtatggtctagaaatgatcttacgctggaatacggttacaagcctgtaattgcaaaaaagattacccataatcaaccaatttttgaggttgttgttcaaaatgcgttaggggaaagagaaactttcaaaacaactgaagaacacccattttgggtaaaaaatattggttggcagaaggcatcgattctttctgaaggaatgactttattagatagaagtaataatgaattaacagttattagccaaaaactgttagcaaaactggacactgtttataacattgaagttaaagattaccatacttatcacgtcggcaagcttggagtttgggttcataatgcacagtgttgtgatctgatatatcaaaatattgtaaaagaaacaaaatatggtgtgattagtaatcgtaaattagataaaaatgcaattgatttagatcttagtgtggtaactcgaggacaagtcaagcaaattgctaaaaatggtgatcctctgggagttaagacagaagcattatttgaaaatgttgtgaaagaacagggcggtaaagttttatctggtggtaagtatggaagtaataatggctatgatcatgtcattatatttaaagatgctcagggaaatacaaatttgactatggttgttgatagcaaacagttaggtcaaaaaggaattaagttagatcctaaagctgctggtggtaacatgcagatgtctagtgaatgggatagggctgttcttgctaaattagacccaaatagcgaggcatataaagctgtcttcgctgctcgacaaaatggcacattggttaaaggtgcagcatatgttgataagagtgcagaaaagttaatgttagttcgtattgatccagcaacgaaaaaataa

SEQ ID NO: 55773 - DNA, 864 bp, Acinetobacter baumannii
atgaataataataaaattgcgttagtagtgatagtgtatggtaaagcattagaagatgctatgactatacaaagcttgctaagctttgaggaaaaattggagcatttacttatcgtaaataatggcccagcagtaatagatgaaaatagtgcagtgctgacttcattggcacaaaaacaccaccacgttgtgttagaaaatcaggtacaaaataagcctttgagttggatttataatgactttatccagcaatatgatgctgattattatgttttatttgatgatgatactgaaataaatcctgagtaccaaagaaaaatatttattatgcaaggggtagatatagagttacctaaaatcatttctatgaatgataaagcacaatattatcccttagttgatggggtgatagagcaaaaggatggaataatctctaatgcaaaagaaatattctcaattggctcaggtttggtgatttctaaagacataaaacaatattttatagaaaacaaaattgagttgttcgattcacactttgctctctatggggtagattttagtttcttcagaaagattaatcatatagcaaaacaaaaaaatataattttttcaatttcttccaatacatatattaaacactctttatcacgtactgaaaaagaaacaaatgcatggcgtgataaagaaagattatatgacttagtcttgacactaaaatactattattcttacgctgaattacgaattttaaagttatttttcaagaaaatattgggtggaaaaataaaagatgcattgctcattttaagcactgcatttaatggtgctcatccaagatgtatgaataaagtattgaatgattga

SEQ ID NO: 55774 - DNA, 936 bp, Acinetobacter baumannii
gtgttagaagataggattgatattgcattagctacatacaatggagaaaaatatattacagaattattggactctcttgatcaacagacttatcaaaattttattgtacatgtttgtgatgatggttccaaagatcggacaatagctatttgtgaagcgcattctttatttaaaaagggcaaactagagatccatgaaaaaactggaggaaatggtgcttcaaggaattttattcgaacactttcctactgtaaaaatccatatattgctttgtgtgatcaggatgatttttggatccctaccaaacttgagaaaatgttggttaagacccaacatgaagaaggatcagaaaaaaagccaacattaattttttcagatctacaaatagtggatgaaaaattacatatactttcaccttcttactttgcggtttcttctaaaagtaatcaatgttccactccatttgattttttgttgagcaaccatgtgcctggttgtaccatgatgtttaaccaatcactaaagcaagtatttgaacctattcctcaagaattcaggatgcatgattggtggattattctcatagcagctttttggggaagagtcatttatttagatgaaagcttaattcaataccgccaacatgggaataatactgtaggtgcggtaggaatggataaacctactttaatacaaaagcttcgtacagtattgttatataaaacgatactattaaaagtagatatggtgagaaaaagtttcttaccttatatccagcaaaaagagattcaacaagaaaaactttctttggagcaaagaaaatttatagatttattgcaaagacgacttccgctttcaaagagactccagatttttagtaaaacagtaacaggcgaagatcgtttactcagttttttagtttggtgtttattatga

SEQ ID NO: 55775 - DNA, 807 bp, Acinetobacter baumannii
atggcatttattgaacatgaaagtactcaacaaagtcgaggtatatatagtggaaattctagtgaagaagatgctaactattttttatcttatttaaataaagtcattattcctgcctcaaaagagttttctattcgcttagatgataataaagtgcaactgcatcatgtattttcatttaatgcgatactagcacatgctattgattacatggtttttattgcaaaaaaacattcacctgtcagaagaggtgattttataaaagattttgatgaaagatatgccgttgatggttgcaaacatataaataataaattttctttacttgatgcagtgaataactctttcaaacatgttgcactggatcctaaaaaaaatgcgtcctataaagaactttttcaaatatatggtgagctatctttccattgtcttcaagaaaaagaaggaaaaattttctttaatacagaacattacatgtttgactactcaagattagttttaagaccaattgcgaaaattttcgattgcaatttaataaatataaatgatgttgatgattttattaacggaagaatttgtggaaccacaggatatggttctttttcatatgattatgaaccttatgatgctatcgataggatgatagatgcttgtaatgctgaatgtatggattgcggtgaggatggaaataactgtgattgtcagaaatttatttatgcaaacaatacagggctatattcccctaatttagataataacttcgaatttagtagtgtaatgtctgaaattagtggaacacgtgaatga

SEQ ID NO: 55776 - DNA, 372 bp, Acinetobacter baumannii
atgcctaagatacatattttagagaggcctctaaaaatttcttcaaatggtgataattattcagaatatacaattcttccagcagggacagttttatatgatgatagtgattctttaaatagaagagttatggtttatttcaatttacaaggtgtcgattttaattttgaagagcaagatcctgaaatatccaagcaaccaagtgaaatacgttctattagaagtacagagctaagtgatattttaaaaactattcctttaactaagaaggatatctatttaattattgaatatgatgacagtataaatgactccgtacgttctattctctttaaaaaatataaaattgatccatcagagtatgaaaaataa

SEQ ID NO: 55777 - DNA, 738 bp, Acinetobacter baumannii
atggcgaataattcaacaacaagtactacaacaaatacagctaatccaccgacccagaaagttcctttgaaaccagaagctgagttacatctattagtagggagtgcatatggggaaggagatagagagtcgccatatggccatactgctgtttatattaagttgaaaggtaaggattatatctatgattttggtaggtatggtaagacgaaacctgaaagctttggtatttttactttagagggcgctaatagtccccgcggggaagggatattaaggatttggagtagctttgacgcttatattgctgatgaaaacagtcaagggataggaacttcaaaaactaggacaactcatgcctatggttatagaatttttgatagtcaggctatgctggtattaaattattataataatttattgaaaacagctacattaagacgaaatgaaaaatactataaaagttatgctttatctcaggactattttgctttggcccctaattgcactactcaaagtttagaagcaacgaaaaaagcaattccaagtatggcaaaatcaggccatatgtttgtaaatgctgagaaagtattaccaactacagtaaagttagcatttaaagcaagtaaatatgaaatgccaaaatacctatttttacccgataatttaaatgattatttaatgaagtctcctgatgtaaaagtagatattaaaaatacatatcatcttaaaaagtag

SEQ ID NO: 55778 - DNA, 996 bp, Acinetobacter baumannii
ttgggtaacttaagctatccaaaagacaaggcggaaagcgatggtcgtggggaaggttttgaactcagaactgaccagtggggcgcggttcgagctggtagcggtttactcgttagtacccacaaacaggatcaagcccaaggcgtacaccttgatgcaagcgaggccaagcaacaaatcgaaggcggtctcaacaatgccaaggcactcagtgaagttgctaaaaatcagcaaactgatccattggaaatgcttgagaacttaaaaacgttcatagagcaaattgaagagaaagaccaagacaaagctgctgcttttaagcaagctttgatgatattaactgcgcctaacagtattgctctagccagtaacgaagacattcacttaagtgcagatggtcagctcaaccaaactgccggagatagcatcaatctgtctactcaaaagaacttgattgcacatgcccaaaataagattagcctttttgcagcgcaacaaggggcaagactgtatgcaggtaaaggtaaagtcgaaatacaggcgcaaggcgatggagctgatttaattgcccgtaaagctgttcaggtgatttcgactgaagacaaaatcgaagcgaccgcagccaaagaaattgttctcaccgcaggcggctctcaagtcaaaattactggatcgggtatttttatgaccacgagcggcaagtttgaggtgaaggctggacagcatttgtttatgggaggcgggagtgtgaatactaatattcctgcattgcccgatttgagaattaaaactgagcatcgtaatttccaagctatagattcatctaagaatgaaccattagaaggaataccttattcaattttgaataaaagaacaggaataaaatcttatggttttaccaatgagaaaggaatgacgaaaactataaaatctgctgaaaatgatgaattagttgttaattggttcgaacaggaagatagggtaaatggcgaataa

SEQ ID NO: 55779 - DNA, 876 bp, Acinetobacter baumannii
atgattaaaaaagcagttttaccagttgcaggtttaggcacccgttttttaccagcaagtaaatcgatacccaaagaaatggttacagttgttgatcgtcctgctatcgaatatgtagtacgtgaggcagttgaagcaggtatcaaacagattatttttgtgactcactctgctaaggttgctattgaagattattttgaccatgactttgagctagaaactacattagaacaaaaacaaaaatttgacttacttaaggaaattactgacattttacctaaagatgtgagtatcgtaagtgtacgccaaccgaaacctctaggcttaggacatgccgtactttgtgctaaaagtattgtcggtgataatgactttgctgtgcttttacccgatgtactagttaagaataaatcagggaaaaatgatttagcccgtatgatagagcgttatgaaacagtacatgctgctcagattatggttgaagctataccagataacttagttaatcaatatggtattgttgatgtgccccattcaccagccgctggtgaaagtattgccatgcaaggcattgttgaaaagcctgctataggttctgcaccgtcaaatttatcagtagttggacgttatattttaccagcaaaaattatgcaacttttagaacaaactcctaaaggtgctggtaatgaaattcaacttaccgatgcaattgccctattacagcaaacagacgccgtagaagcttactgtatgcgaggccaaacttttgactgtggtagtaagttagggtatttaaaggcggtattacattatggtgttgagcacccacaattagggcaagcatttaaaatgatgattgccgagttagaacaataa

SEQ ID NO: 55780 - DNA, 603 bp, Acinetobacter baumannii
atgttaaaaaggcttgtagatattatcattgccctatctgccttaattcttctaatgcctgtttttttgattgtaatttataaagttaggaaaaacttaggttcccctgtctttttcttacaagaacgtccgggcaaagacggtaaattatttaagatgattaaatttcgttctatgaaggatgcggttgatcaatatggcaatattttaccagatgaagagcggattaccccttttgggcaaaagttacgttctactacactcgatgaaatgcctcagctgattaatgtacttaaaggcgatatgagtattgtaggaccacgcccacagttacctgattttttacaatattacacgccagaacaaatgcgccgtcatgaagttcgtcctggtatgactggacttgcccaagtgagtggccgcaataatttgagttgggaagaaaaatttgagctagatgttcagtatgttgacacgcagagtttatggctcgattttaaaattatgtttaaaacagcagaagtcatgttgaaaaaagaaggaattaacgcaccggatcaagcagtaggcgctagtcgtttcaccggttcaagagataattaa

SEQ ID NO: 55781 - DNA, 807 bp, Acinetobacter baumannii
atgtctaaagtcattgcttcaattgttttatataaacatagctatgcagagttaaaagcaacactagacagtttatttgctaccccaagcattgaaaaagttattttggttgacaaccattcaagtaattgggctgcaacacttcaacatcctaaagttgtttatgagaaatcagcaggcaactttggctttggttatggacacaatatcgctattcgtaaatatgcgtcagaaagcgattattttcttatttgtaatcccgatatttgcttcaaacctgagcaatttgctcgattattagattttgttcaaagccgttcagaaggtttgtttttaccaaaaattgtctatgataatggtgaagaccaacatggtgcacgcttattacccacccctttaaatttatttgctcgtcgtttttcaccttcttttgctaaaaagcttgatcaacaatatttgttaaaagattactcacttgatcagccatgtttcgtaccttacctttcaggttgctttatgttatttgatgcagaaaaacttttagcaattaagggattcgatgagcgtttctttatgtatatggaagatgttgatttgtcacgtcgttgtgcagagcaatttggtgccgtttactatccattagcacaagtagtccatgttcacgaacaagcatcatataaaaacaaacaattacttaaagcacacttaaaaagcgcgatacaatactttaataaatggggatggatttatgacatggggcgtagtaggcttaacgcaaaatgtttagaccaaatctctaaattctaa

SEQ ID NO: 55782 - DNA, 891 bp, Acinetobacter baumannii
atgaatatatttgcagtaattatcacatttaacccatctttggaaaatgtaaaaagattagtcgaacaattgtcgagccaatccgtgattccttgtattgtagataactactcgaccaatcaggattcagccgagctcaaaaatatttctgaagcaaaaagtatattcctagaaaaaaattatggtattgctacagctcaaaataaaggaatcgaatttgcaatagctaatggtgctgactatattctattttttgatcaggacagttctattcctgatggctatgttcaagccttatatacagactatcaatacttgcaggtacaaggggaaaaagttggtgcaattggtccacgatttattgatgaccgttataactttttttataaaaccattagtgtgaccaaaagtggctttagagaaaaacatgatgtatctcaaattacaaagcctttgcattctacattactcatttcatcaggttctttaatttcggttgaagcgctcaaagcagtaggcctcatgcgtgattattattttattgattatgtagatactgagtggtgtttgcgtgccgagtatttaggttataaaaattttgtttcagctcaggcaattatgcgtcatacaattggtgataatgtcttaaatctaaaattttttaatgttcctgttcattccgcatttaggcgatattttcgtgtgcgaaatgctttctatatgatgcatgaaccacacgtaccatctatgttggtggtccgagagatgctctttaatggtattcatcagataattttaatctgttttgaaaaaaacaaatggcaatatattaaatcatattttagagcattaaaggatgggttagttatgggacaaaagaaagatgtctaa

SEQ ID NO: 55783 - DNA, 222 bp, Acinetobacter baumannii
atgagtatcccattagttattgtaggaatgctttatgcttttcttaaggttattggtatccgagaggatgtatcagactcagatgtagttcgtcttaatgatgctatgtatatttttgataacttaaagccaataacagctcttattggaaatggttggggtgaacatataggagatagggcaaaaattgaagttgtatttcttgaaattttttttttttag

SEQ ID NO: 55784 - DNA, 408 bp, Acinetobacter baumannii
atggccatttcaacatcagaacaagatgatgtcgtcagcgagatcaacattacccctctagtggacgtgatgttggttctgttgattgtgtttatcgtcacggcacccttactgaccaatactgttaaggtaaacttacctaaggctgccccaacacaagtgacagatcagaccaaggcagtagtcattagtgttaatccaaaaggggaaatttatctggataaagataaagtcactcttgaacacttcgaacaggccattcaaacgcgtaaagcagccaatcctaaactggctctgaacctgaatgcagatgagacggttccatatggtacggttgccaagttactggccagcatagaacgggtaggcgttgataaactatcagtcattacatcgcctaagtcttaa

SEQ ID NO: 55785 - DNA, 798 bp, Acinetobacter baumannii
atgacaacacttgtttataacgataaaagaagaaataactatgatcattttttagatttattagatcaaactcatatcaatcgttatcaagatttcaacattacctttgaatataaaaaactggctgaacaaatgctgtcagaatgtgaatttatggacgcatgttcgcttgaagaaaagcagaaattatttaatgaaattaagataaagcatctttatcaagggcaagtgctatattcgagaaatcaagactgtcgtgaactcatcattgttttaagtggtgtactcaaattaggttggaattcatacgatgggaaatatcttattcatcgttttatccctacaggcgcactattaaatattgtctatcttatttctgaatctgcgctagagcatgaatatgttgcacacgaagcaactgtgattgcgaccattccagagcatatctttaagtacaccatacagcacaattcacgcatgctatatcaggttttaaaattggtatgccaaagaacacgtcttttagacaatgatatctatcacacatctacacaacctttaaaggtacaaattgcgcgacagctcatctatttaatcgaatttttttcgactcaaactcaaaaaggcatcgaggttttattaaaactctcacaagaaaatttagctgaacttttaaaaatatcgagacaaagcatcagaaaggaaattcagtggtttgttgaagaaggcattatagaaacaaaatacaatcatatctctgtaaaagacatcgacaaattaaaagccttactgcactaa

SEQ ID NO: 55786 - DNA, 909 bp, Acinetobacter baumannii
atggcagatttattaataagaaaaccagtgagtgagttaatcgatgtaattcctttagcaggtcgtatcggtgcacaaattaatggtgttgaattatcttcaaacctcaaccctgaggtcttgaatcaaattaggcaatcattgcttgaacataaagttatttttttccgtaatcaggaacatttaaccgatcaagagcaagaaaagtttgcagaattgcttgggcaacctatttcacatcctactgttccagtggcagagggttcgacttatatatttgaacttgattcccgtcatgacggtcgtgcagacgtttggcataccgatgtcacctttgtatcaaattatccaaaaatcagcattttaagggcggtaactacacctcatcgagggggcgataccacatgggcaaatacagaagcagcctatgatgaattgcctgagccattaaagctccttgccaatcagctccgtgcgattcacaccaatgattttgattatggtggttttcgcccctccgcaagtgatgaagtcgtaaaacgccatcaaaaaatctttgcttcaacggtctacgaggcagaacacccattggtcagagtgcatcctgaaacaggtaaaagaaccttaattttaggccaattttttaaacgatttgtaggtctgactgctaaagagtccaacaagctatttgaaatttttcaagatcgtattaccaaaccagaaaacacgattcgctggacgtggaaggacggagatgtcgctatttgggacaaccgtgccactcagcatttagccgtcaatgattatggtaatgctttgcgtattatgcgacgcgttacgttggcaggcgatgttcctgttgatatcgatggcaaagagagtaagcaaattaagccttctacgtcttaa

SEQ ID NO: 55787 - DNA, 1068 bp, Acinetobacter baumannii
atgaaaccatcaatttttaaaaaattgatcttgctgagcttattggcttttggacatgccagttatgctgaaagccttaaaacaatccgaattggttctcccgatttgactgctggtcaaaaacacgcgggtggtggagttgttgatgtgctttacaacaaaaaatggcttgagcaagaacttgcaaaaaacaatgtcaaagtggagtggcacttctttaaaggtgctgggccagccattaatgaagcattggccaacaatcaactggattttgcctttttaggggatttacctccgatcattggtaaagccaatggactagatacccaattacttgttccaacggcgcgcggcatcaccaattatctagcagtaagatctgatcttccgatcaaaaatttttctgaattaaaaggaaaacgcgttggtttgttaagaggaacagcagatgaattgtcatttgtgagtgcattgaacagccaaggtttaaagctcagcgatgtgcgagtggtcaatttagactttaacgccgtcaacgctgctttggccgcaaaaaaaattgatgcgtcatggggaccttctcgattttttgcgttacgtgacaaacacatcgttaacttgcctataagtagccgtcaattaaatggtgcaggatctactcaaggtgtgtttttagggcgtcaatcgtttattcgacaacacccaaatgaaacacaacaggttgtgactcaggtggtaaaaggactgaattggctctcaaatgagcaaaatcgagtaccacaagtcgcactcttttttacccaatcgggttatccggcatctatctatgctcaggaacttaatggtgtaaatctgaagtttttatattcaccgttatttgatggttattacacccaacaattgcagcaaaaaattactttggctacgcaacaagggttgatacgcaaaaatattgacgtcaaaagctggattaatccgttatttgtaaatcaagcactcgaacaatcaaatttaaagacctactggaaaccaactcagcagtacgaatatttgaaatcagtgaaataa

SEQ ID NO: 55788 - DNA, 2289 bp, Acinetobacter baumannii
atgtcgatacattcgaagaatgtagcgcgtgatccgttcacgtcagcaactaaacaaaaaattttaaatttaagtctgctttcgctgagtatcttgtcagtttgggggcaagctcatgcagaaacagtctcaaataccacacgttcttcagaggatgtggctcagttagaaaccgtagttgtgacagcaacgcgccgtgaagaatcactccaaaaagtgcctattgccgtttcagtcattagtggaaaggaactcgataagcaacagcggaactcacttgaaacattggtaacacaagtaccgagtgttaactttcgggctggagcttccaataaagatacttctttatttgttcgcggtattggaactgttactacttcaccgggtgtggagccttcagtctcaacagtgatcgatggtgttgtgtacagccgaccagggcaagcaacacttgatttgttagatgtggatcgtattgaagttcttcgtgggccgcaagggacactttttggtaaaaatgcatcggcaggtgtagtcaatattgtgaccaaaaatccaaccagtgaaacctctggttatattgatgcctatgccactaacgatggtgagcaacgaattaaactaggagcatctggtacattaattcctgaaaaattaactgccaatgtctcggcgctattaggtaattttgatggcaatgtagacaaccttacaaccaatcaagatgttaatggctataaaaactatgggtttagaaccaaatttgaatatacgcctaccgatagtttagttttaggctttactgccgattatctgcataaaaaaggaagtgccccaacaggcattgtggttaaaaataccgatgccaactatgcagcagcattatcgcctgttgtggcatctccaaccaatcgaagtacggttgaaaatactcaagcgtcgactgatgataccaatcagggtgtagcgcttacggcagactggacattaaccaatcatcaattgtcatcgattacagcctttcgccaatggaaaaacacacagattggtgacagtgatcagcttgctgctccgacaccaaattttgctggaattgccgatttagggcatgttaacagtaagcaattttctcaagaaattagaattaagccgctcgatcatggcttctttgattatgtcgcgggtctatatttttcaaagaacaaaaacgatgagacttatcaacgcgagtcaacttggtacaacaatgcttctaatgcttatgtcgtagattttggtaaggcaatctataacacagacagcaccaactatgctgcatttggcgaaggtacctttcatttcacaaatcggttgagatggattgctggtttacgtgttactcgagatgagttgtcttatgatcacagccgagtttcaactgttccaagcagtgtaggtgtccgaaatgccattcgttcttcatttagcagtgatggatcgaccagtgaaactggagtttcaggccgcattggacctcaatatgactttacaccgaatatattgggctattttacctattcgagaggttataaaggtcctgcatataacgtttattttaatatgcagcaaaatgatacgcctgtcattgatccggaaacggctaactcttacgaacttggtctcaaatctcaatggctaaataatcgtctgcgtgtcaatgtggcgttatttaacactgattatgaaaactatcaggcaaattttagaaccctcgatccaaatggtttcccgataacccgcttggttaatgcaggaagtgtctctacctatggggctgaaattgattcggtatataagattaatcccaattgggcattaaacttttcaggtgcctatacacatgcacgaattgatgacttcaaatgtccagctaccgatacttcgtgcccaaatgtaaatggtaagccgctaccattttctccagattggaaatttaatactcagctcgatcgctattttactctagcaaataacaaacaaattgaactttcaacccaatatgcgtggcaaagcaaagtgcagttcagtctcgaccaaaaccaaaacaccattcagggtgcatatggacttttgaatgcgagcattgctttagctgatactgcttctgactggcgattggcattgaatgtacgaaatataacggataaatcatatgcaaccttactgagcaccaatggtagccgtattactcgtcaagtccctagagatgatgaacgctattttggcatttcattccgtaaaaatttctaa

SEQ ID NO: 55789 - DNA, 1386 bp, Acinetobacter baumannii
atgtctagtacgcctcgtttttttcgaggtgtacgcccatccattggactgattaaaatgagtaatccttcgtctacaagaaagcttcaccttaatttatttttagacggttatggccatcatttggccagttggagacatccagcgagtcaattaaacctaagcccctatgagcgctacttaaatgcagcaaaaatagctgaagaggggaaatttgatgccattttttttgccgatagtctagctgttgatccagcaactgcgacatcaggcaaaattcgcggtaacgagattgagcctcttacattactttcagcaatcgcgacacaaacccgtcatattggactcattgggacagccacaacaacttacaatgagccatatcatctcgcaagaaagtttgcctctttagaccagatttctgctggacgtgcaggctggaacctcgtcactacagattttgcacttgaagcgaaaaatttcagcacaaaggaacatgtcaaacatcaagaccgctatgcacgtgctgaagaatttcacgatgtcgtaaaaggactttggaatagttgggatgaagatgcagctattcatgataaagccacaggtattttctttaatccagataaggtacacacgctcaatcattgcggtgatatttttcaggtaaaaggtccactcaatattagcccaagcccacagtctcaccctgtggtagttcaggcaggcagttcagaacgaggcaaaaatctggcagctcgtaccgcagatgtcatttttactgcgcaatccaacttagccgctgcacagcaattttatagcgatgtaaagcaacgtcttgaagactttgatcgccaagaacatgagttagtggtcatgcctggcgtctatgtgcttgttgctcatacgaatgaagaggctaagaaacagcaacagcttttagatgagctcgttgatgatgacattggccttgggcttttaggaagaatgttgggcaattttgacttaagcggtgttgatataaatcagcctttagcttccttagatttatctgaaacccaaacggggcagcaaagtcgccagcaattaattcaggcactcgggcaagagcagggtttaaccattaaacagctctatcaacgtattgcatcgggacggggacatttttgtttggttggaacgccagaatatatcgccgaccagcttgaagagtggttcgttaatggtgcagcagatggatttaacattatgccggccgtcatatcaaatggaattagagactttgtcgatctggttattcccatccttcaacagcgcaatttattccgcaaagaatacgaaggtcaaacattaagacaaaaccttggcctcttggctgctaccgaataa

SEQ ID NO: 55790 - DNA, 999 bp, Acinetobacter baumannii
atgtatctcgcaaattcagaaagatatgattcattccaatatcgaaaaattaaaaatagcggtttggtattaccaccattgtcacttggttgctggcataactttggagatgacactccaattcagcaacaaaaatcggtactttacacggcgtttgatcatggaattaatcatttcgatctagccaataattatggaacaccctttggaagtgcagagaaaaatattgggcactttttaaaaactgacttcaagccatatcgagacgaactcattatttcgacaaaggcaggctgggacatgtggcctggaccttatggacaaggtggtagcagccgaaaatacctaatggctagtcttgatcaaagcttacagcgactagggcttgattatgtcgatattttttattcacatcgctatgaccctgaaacaccacttgaagaagcagccaagacacttgccgatattgtgcagcaaggtaaagcactctatgtggggatttcatctggatatacaccagaattaactttacagttaataaaattgcttcaggcctatcacgttccacttactttgcatcaaccgatttacaatttttttgaacgtcagattgagcagggtttaacagagaccgctaagcaagagggttttggtgtaattacattctcaccactggctcaaggcctattggctggacgatatctgaatggtgtacctgaagattcacgtatcgggcgtggtagtcgttatttacagtcagagcatctcgttgcattgaagctacagcaaatacagcagttaaatgaaatagcaaagcgtcgagaccaaacactggctcaattgtcattatcatgggttttacgtgatgaacggattacatcaacaatcattggtgctagtcgaccagagcagatcatcgaaaacttaaaagcattacaaaacactgtgtttagtgcagatgagttgactcagattgacgctattctaaatacgccataa

SEQ ID NO: 55791 - DNA, 1236 bp, Acinetobacter baumannii
gtggattgggtaacgggcctatattactttcagcaacagttagacaatacgactttctctttatatggagatacggcggacgcattctatctttacaacgttccgagcgtgagaaccttaattgcaaatggccaatcgaatattttgaataatcgagattcatattcatatggaacaacggaaacaaaaagctcagcagtatttggtcaaagtacatggcatgcgacaccgaagttagacatcaccacaggtgcacgagtcacctatgaagataaatctgccagtatctatagaactgaccctattgggggtacaccagtttcgggtttaagtgcggcagagcgtaatttactaaatgcccagctcggagcatacgactcgggtgaactgaagcaacatggtttaagttactctggcttactgactggcagctatcgtttaaatccgagtacactggcctatgcaacgtattcacacggtgagaaatcaggtggctttaacctaagcattggttctgcaccaacagctggtgctaactcgttaaaggttgatcctgaaaaagcagataactatgaaattggattaaaacaaaattttcttaataataccttacagctcaatagcaatatattctggattgatgtttctgactatcaaactacaagctatgaacaagtcggtaactctgttgtgagtgtattggcaaatgcaggcaaagtacgcagccgagggatcgaactcgatgcaacctatcaacctattcgtcgccttacacttaactttaatggttctcttaacgatactacctatacagaatataaaaatgcccctgctccatccaatatcagcattccaacaggcgtaaacacacaagatctgtctggagagcgtgtatatggcgtaccgaaatggattgcaaatttcaatttccgttatgacttagctgagcataataactggcagccctatgtttcgggtagttatgcttggcgagattggtcatatggctctttagataataacccgtacagtgtcattaaagcctatggattaacaaatgcgagtctaggtgcccgacatcgtattggtgaaaatgaactggatgttgcattatgggtaaaaaacctcgccaatgaaacctatgtaactaatacatggaactcttctaatggtattgttctcgctagtttaggtcagcctcgtaccattggtgcaaccgtgaaacttagcttttaa

SEQ ID NO: 55792 - DNA, 378 bp, Acinetobacter baumannii
atgcaaatgaatatgatgtgtgcacgacgtgaatttaaaagtgcacaacaacgatttgatcatatgacaatggtgataaaaagctacttagatagtggggaaattattaataaagaagctttgccatacatacaagaaagaaaaggtaatccctttgcggcgatgatggatattgactccaatatcgatggaaatatggccggtgtgtggatatttaataaagacctaaaaaattttaaaaaactagcctatgtctattcgaagctcagcatattgaaaagtgtagaatatagtgacccaatgccattcttttttcgttcggattacactaatgtaaaagaacccatgtttcatatgctcatgagtgatagtacctaa

SEQ ID NO: 55793 - DNA, 219 bp, Acinetobacter baumannii
gtgaggaatattgaggaagtagcaaatgatacagaggatttagatgatgaatatgatttaaatcgtcaaatgatttacaacactttactgatgctagagggcaaacaattagagcgattaaagcagcgtagtttaaaggtacttgaggctccagttcctcaagttaagcaatttgctaaagagctcgaattaagcaatttgctaaagagctcgaattaa

SEQ ID NO: 55794 - DNA, 351 bp, Acinetobacter baumannii
gtggcttttgcagagcaagatatagatgggatgaaaaaagcattagaaccattttttacaaaaaaaatagcgcaagatgctgctaaacatacactagtgtattttgatttttatttacagccacaagttgtcatatacgcaaaactagcttcaatacacggttttgatttaggaatagatcatgagattgcacccaaagagctaatccaatatcagccacttcctgaagaggaatatcaggatattgttgactttatgaagccatataagttgtcgtatccgtatgaatatcttcaaaactggattgattactacactcataaaacagatcaactttttcctttggcataa

SEQ ID NO: 55795 - DNA, 3606 bp, Acinetobacter baumannii
atgtttaaaaaagttctgattgctaaccgcggtgcaattgcctgtcgcgtaattcgcaccctaaaaaaactcggaatcgcttcggttgcagtttactccgaggccgaccgtgactcgttacacgtgactttggccgatgaagctttcttgattggccctgcacctgcacatcaaagttatttaaatattgaaaaaatccttgaggttgctaaacagtcgggagcagaagccattcaccccggttatggttttttgtctgaaaatgccgagttttgtgatttgtgcgaaagccaaggcattgcctttattgggccaacttcaagccaaatgctcgattttggtttaaaacatactgcacgtgagctggctattaaaagcaatgtgcctttacttccgggtagctcattactagctaatgaagccgaggctttggccgaagctgctcgtattggctatccagtcatgctgaaaagtaccgcgggcggtggtggtattggtatgcgtctggtctggaatgaaactgaattaaaagatgcctaccaaaccgtatcttatttagcgcaggtcaattttaaagatgcaggtttatatttagaaaaatttgtacaacatgcacgccatatcgaagtacaaatttttggtgatgggaaagggcaagttttagccttgggtgagcgtgattgttcggtacaacgccgtaatcagaaagtcattgaagaaacacccgcaccacacttaaatgaacaacaacgtgaccacctccaaaaagttgcgattcaactcatgcagtcggtgaactaccgctcggcaggcacggttgagtttgtcatggacaccgaaacccaagaattttatttcttagaggtcaacacgcgtttgcaagtcgagcacggtgtgaccgagcaagtgtttggtgtcgacttagttgagtggatggttactttggcaagcggtgactggtcagcacccactgaacagttagagccaacaggacattccattcaagttcgtctttatgctgaagacccgattaaacagttccaaccaagtgcgggcctgcttacacatgttaaatttgacccgcaagcccgagtcgaaacatgggttgaaacaggttcaacggtgtcgtctttttatgacccaatgattgccaaaattattgtaactgctgcaacacgggatcaagccattcaggcaatgagtgctagtcttgccaacacgcaggtagcgggtattgaaaccaatctggaatatttgcaaaacattattgcttgcgatgtgtttgctttgggtactcaaaccactcgatttttaaatacgtttgaatggaaaattcagaaaattgaggtgttgcaggctggcattcaaactgccattcaggacgtaacagggcgattaggttattgggatgttggtgtgccgccatcaggtgccatcgacccactcagtttaactgtagcaaaccagcttttagccaatgaaccaaataccgcaggtcttgaatgcaccttgcaagggccgaccttaaagtttcactgcgacagccaaattgtcattacgggcggtgatatgccttcaaaacttgatggcgaactggtgccgatgtggcaaaccattaatgtgaaaaaaggccaagttttaaaatgtgggattatccgttcaggttgccgtagctatataggtgtgaaaggtggtttcgatgttcctgagtatttagggtcacaggcgactttcactttagggcagtttggtgggcatgcaggccgtaatctattaattggcgatatgttgccaattactgaatattccgctcaatcgactacagctttagctcaagcgcaaattcctagctttacccaaaactgggaaattgcagtcatgtatggcccacatggcgcaccagattttttcaccaaacaagatattgataccttctttgccaatgagttcgaaattcactacaactcaagccggacaggcattcgtttaattggcccaaaaccagagtgggcacgtgaagacggcggtgaggcaggcttacatccttccaatattcacgataatgcttatgcgattggggcaattgattttactggcgatatgccaattattttgggtccagatggtccgagcttaggtggctttgtttgccctgcggtagtgattcattccgagctttggaaaatcgggcagctaaaagcaggcgataaggtcaaatttgtacccgtgagttatgcgcaagcaaaagcacttgatcaaaaatatcatcaaagcttaaccgcgactgatacaactcagatcgattttaatccagctattcaagcagaaccagacactttaaaagatgcggttttagcaactttagaaggtgaagctgacttaccaagcgtgacctatcgaccagcaggaaatagctatttgttggtggaatatggcgagttagtacttgatctaaatttacgttttcgtattcatgcactcatgcaatgggtcaaagatcaaaacattcagggtattatcgacctaacaccgggtattcgttcactgcaaattcactttgattcaatccagctcgatcaacttgagcttttacagaaacttcaacaggcagaagccgaattacccgatattcaaaatatgcaggtgccttcacggactgtctatttgcctttggcttgggaagattcacaaactcaacttgccaccgaacgctatacacaaattgttcgtccagatgcgccatggtgcccagataacgtcgagtttatacgccgtattaatggcttagcttcaaagcaagcggttaaagatgttgtctatagtgcaaactatttggtgatgggtttaggcgatgtgtatttaggtgcacccgttgcaacgccgctcgatccacgccaacgtttagtcaccacaaaatataaccctgcgcgaacttggacacctgaaaatgcggtcggcattggcggggcgtatatgtgtgtgtacggtatggaaggaccgggtggctaccagtttgttggtcgcacgacccaaatgtggagccgttaccgtaaaaatgccaactttgaagaaggtaaaccgtggttactgcgcttttttgaccaagttaaattttatgaagtttctgagactgaacttctacaaatgcgtgaagactttaaggcggggcgtctacaacttcgtattgaagatggtgtgcttaacttaaaagaatacaacgagtttttaaaaacacatcaagacagcattcaagcctttaaagacatgcaacaagctaactttgaggctgagcgccgccgttggcacgaagcaggtttgcaagaatatatttctgaaagcctagatgctgttgatgaaggtgaaaccgtggttattcctgaaggaggctgtgcagtcgaatcacacatgccggggtcaatctggaaaatcgaatgtgcatcgggagatattgttgaagaaggtgcaactcttgcagtgattgaggcaatgaaaattgaaattccaattattgcgccggaacgcatgaaagtagaaaccattaccattgaaaaaggacaaaccgtaaaaacggggcaagtgctatttactttggcaccagtcgcttaa

SEQ ID NO: 55796 - DNA, 969 bp, Acinetobacter baumannii
atgcatgctggtatggtccgccagctcatgaatttttatttaaatgaaactcaacattattatttttttactacacactcgaatcatcttttagatatggtagacgagtcagaccaagttattatccaaaaatttgttaaacagcctaaatctgaagatcccaaagaatttgaatttaaaatttaccgttgtgatagagatcgagacttactcgcttcattaggtgtaaaaccctcctcagtttatttagccaactgtacaatttgggtggaaggcataactgatcggctttatattacaaaatatatggaaaaatatttaagtgaattagaaaattcggatcttgaacaatataaaaaatatcgacgtttcatgcccaattatcattatacatttgttgaatacgcaggaagtaacttaacacattggtcttttagtgatgattatgcggatcatttagaagataaaggcttaagtgcaaaagctgttgcaagtgaaatgttattaattgcggacggcgatattcagggaaaagctgaacgtgtgagtatcttaaaatctgaattaaacaaagaaaattattatattttagaatgtaaggaaacagaaaatactttgcccaaatcatcaatagttcgagtagcaaaagtccgttttcctcgcatgaagcctgagactaaaaagagctatgatatttcacttattgacggtattactgatgaaaattactttgatcatgcaaattatggaattggaaaattaattgattcaaaaataaagaaaccgtcttctactacaaaaaaaactgcatttgcagatggtaatggtgtggggactataaaatataagttagatttttgccgcgaaataattaaagattttgatgaaaaccctgactggcagcttacccctaaggcaaaggcactttgtgaaagaatttttaagcatatagaaaaatgtaatcaataa

SEQ ID NO: 55797 - DNA, 261 bp, Acinetobacter baumannii
atgcgccctgttactgaaatagaaaataaacagccctatatagagcgggcacaaaaggactacttcagaaatattcagaactttaatgtaaaaagtatcattactggcgagtctctttatcatgaacttaaagtccatctacttggtgaaccagaacaacgcgaccttataaaaagctatgaaaataaacttagccaatatttttttgataatgagccaatctcactattcctaaacatgatcaagatgttgttaatataa

SEQ ID NO: 55798 - DNA, 420 bp, Acinetobacter baumannii
atgaataataaattatattactggcctgaaaacgttcataattatacttctgacaatgaagagaactataataaaattcttgaaataaaaagattaaatttttttattggtaaaaataatgctggtaaaagtaggtttctaagaaatttttttagtagtaaaacaccatcccaccgttatcaaataaaactatttagacaacttttatctgtttcacaagaacttcaagaagaagatgaatataaatatttaaaagagagaggctcatatagtgatttcctttctcaattaaaaagttttcaagaaaccttaaattattctgtcgatagttcggccgaacaatttaaatactgccttgattacttaaatagtatgggacttttacataaatttggctcaagtcaacataccaataattaa

SEQ ID NO: 55799 - DNA, 1947 bp, Acinetobacter baumannii
atgggtgatatttatcagttgctaaaacccaaaaagggatatgcatatactaaggaacaaataatagatgcctcattagtaaatttacctatacctacagggaaaaagttaaaaggtaattctagagttataggcgatgtagatgaggaaaccttcaaaattatcgttgatacaattatttctttatgttctagatttaatctagaatatcaagaaatggcttatacactattaatttgtttagctgaatctggtttcaatccagatgcagctgctggaactacaagtgcatcaggccttgctcaatatacaagatcaacagcagatgcttttaaagcaagatcaaaatcaatactaggttttgaaatagacatgagcggaacaaatgtctttgatgcaaatataggttgttatggtgttttagtcgcttttttatttaataagaatttggctctgaaatggggttttaaacctaatgatgataaatattggcaattgatctatatgcttcatcatgatggccctggttattatgaagatgaccgaggaaaagaacgcgcattgagatttaaatggcgaaaagatgctatagatacttatgagcgggtttttaagaaaaatttacttttattaactgcattgttaaaacaaaaagttgaaacaaagttaaaacttacggatcatgaaggtaaagcaattgaaaataaaaattatattatagctacagttaagagtcctgatagaaaaaagcctactcacttgtcaatgaatagaaatgaaaagaaagagataaatgtagtatttggcaaaaccaattccaatggtgagtcatctccagttcattcgagaattggagacgaaattattactcttttattaccagataattttaagaaattaattaatacaaaatcagcggggaattatgtagttaaaaagggagatactttagaaaagattgcaaaaagaaatggtactagtgtcgagcagcttgccaaggataataatttaaaagataaaaataaaatatctattgggcaacaacttaaagtaaactctgatgtaaaatatatagtaaagcaaggagatactttagaaagtattgcaaaaagaaatggcactactgttgagcagcttgccaaggataataatttaaaaaatattaatagaatagccattggacaagaacttagagtacataaattcctaagacataaaccatctaatagcgctttaaaggatatttttggttctttaggattagataatataaatttagatttaataacattttccaaaaatcatacagctaagcctaaaggtagttctagtaatacaactagtaaaagtaaatcaaatttaatagagttgagaacaccggtaagtgctgaagctgtaaagcctaaaaaacaaactaaacctgttatagaacaaaataaaacacaatcaaacgggaataataagactgtaaaagtagatgtaacagatggtatggctgttatttatacatttcaagatactgaatatggaccacatgatgcaccaaaggtcggttatacagttttttatgatcacttaggtaataaattatacagttttaaaactggtagtagagtatcaagtaaatctaaaaaaaatgcagatggcccttttagtggtttctatacatatattgctggaggaaagcgaaatagtaagttgggagctgcctatggaactacaaaaattatgaccacagatagccgtgcaagatgggtacatggcgggggaagcggtttaagtgatccatatgctgagaaacaaggttggagagtcactatgggatgcacaagagcacaaaatatagatgttgaaaatttggcaaaaaaaattacagaatttaaaaagcaatatcctaaaataaagatcaaatatattcgagatagtaaaggaacttatcctaaatga

SEQ ID NO: 55800 - DNA, 1293 bp, Acinetobacter baumannii
atggctgaaatatttcttctccgaaagaattctatgaagatatctattggtaaatacaaaggttttgatcatcaaaatgacttctatatttcaccacttacattaattttcggtaataataatgctggaaaaagtagcattacccgtttattaccctctatatctcaatcaactggaaaaggtctaaaaaagatacctttttatccagcctctttatcagggaaacacaatttaaattttttttactcagattcccagcgttctaagttatcaataactattgataactatgaaatggagtatacgtttttaaaattatctaacacctcaatatgcgttgaaaaattagttttaaagtgtgaagatttttgtatacagcttattaatgaccttgaagatagtttagaattttactcttttatacataacgatagaaatatagattgtaaagtacaaataatatttgattcgatgattcctgagatagttcgctgtgatgagcaacaattcgatgagtatcaagatatatatcggcatagttcaaaatttgatgacttttttaaagatatcaaagataaatgttattggattggaccattacgctatttaccttcttctgttgaatatgctgacatttcaattgatcgattaaatgttgatggttatggcgccactcaagttctagcaagcaattacattaaaaaaaataatgtttttaatactgtaaatgattggtttattcaattatttgaacattcattaaatatcgaattgatacagccttctggtatagaaacaacattaatatctctttctttgagtcctattaaaaatactgaaataagaattccgttatgtgattgtgggatgggtgtatcacaaattcttcctatatttgtacaattagcattggcttataatggtttgttaggttcaaacccaatcatagttattgaaaacccagagttacacctacatgatgctctacataaaaatttagggatgattttttcagaattggtagccaatagtgttatacaaccaaatttagttatagagactcattctgaaaatatacttttatctctgcaaattgcaatagcagaaggaaaaataagcagtgaaaaaattaatattaattgggtttataaagattcagaacaaaaaagttgtataaagaaaatatctttcaattctaatggactgctctctgatgatacattgaatgaaagtttctctacaacatcgaaattagcgaaaaccttatttcttgccgcaagagatcatgaatga

SEQ ID NO: 55801 - DNA, 294 bp, Acinetobacter baumannii
atgaagtttattttttatgatgaggttttcacttcaaataattatcaaacgttacttttatgcatccttacaatatgtgaatctacacgccatcatattatgatattagatgaagatggagcagagtataaaaaattcttatgttttgttggcaatacttctaatctcatacgaggaataattaaaaatgaccctagagaatttattttagaggactctatcgtatatagggttaaaaatgataaaacttgtttctgtctcttatacacatctccgagcccacgagactcctga

SEQ ID NO: 55802 - DNA, 1110 bp, Acinetobacter baumannii
  misc_feature (1071)..(1080): n is a, c, g, or t
atgaaaaataaattagggattaataagcaattttttattgcttttagtatggtgaatttgagcatcactttattgtctgtatttgtaggctatgttgtttataactatgcaattgatcatggatggctttcattaagttccttgcaaggagactttacagattttcatcttgttgactggatttggctaggtatagtcattttatgtggttcaattatttctttaatcattggaatgcagttagcaaaaagatttattgtgcccattaattcattggcagatgccgcgaataaaattagtgagggtgatttatctgctcgagcaaatgatcaaaaagttcactccacagagatttatacattaattttaaattttaatgatatggctcaaaagcttgaaagctctgtacaaaatgcacaagtatggaatgctgctattgctcatgaattaagaacacccatcacaattttacaaggtagattacaaggcatcgtagatggagtttttaaagctgagcccgagctaattcgaagtttgttgaatcaagtagaggggctgtcctacctagtagaagacttgaggacattaagtttatttgaaaataaacagcttaagttaaatattgagtcagttgactttttgagatgtgttgaaaaagtaatacggatgtttgatgaaaaacttagacaatcaaatttcactataaattacgacatttctaatgatcttgtatcttgcgatgcaagacgtatggagcaagtcttaatcgcgttgattgataatgcaattagatactctaatcctggaaatttaaacattaagtcttcagttgaacaaggacaatggattttagaaatagtcgatgaaggaccgggaattcccattgaatatcaaaaagaattatttaatcctttttatagagttgagcaatctagaaataaagctttaggtggaacggggttaggtctggcagttgtgcaagccattgtgttagctcactcgggcacaattagatatgaaaaccgaaatagtagaagtgtttttacaatagctctgccaatgttcaataannnnnnnnnnttttacaatagctttgccaatgttcaataa

SEQ ID NO: 55803 - DNA, 1395 bp, Acinetobacter baumannii
atgtctaagtcggctgttttatctcgtggatttatgatttccaccctctcgattactttaactgcatgtataagcatgcaatcacctcaacccactgttaagtctaatattccacaaaatttcgctgaaacttattctggtccttcaattgctgaacaaggatataaagcctttttttccgatcctcgtttattagaagtcattgaaataagcttgaataataatcgcgacttacgtacagcagtgttaaatattgagcgtgcccagcagcaataccaaattaccaaatacgaccaacttccgacgattggtgcgacagcaaatgccattaggcaagttaacccttcggtaaaccctaacaacccttactctacgtttcaggtgggtttaggtgtaacggcgtatgaacttgatttttggggacgcgttcaaagtctcaaagatgcagcattaaataattacttagcaacacaaagtgctaaagactcaactcaaattagtttggtgagccaagttgcacaagcttggttaaattattcttttgctacagcaaacttaaatcttgcagagcaaactttaaaagctcaacttgattcgtacaatctgaatcaaaagcgttttaatgtcgggattgatagcgaaatacctttacgccaagcccaaatttcggtcgaaacagcacgtaatgatgtcgcaaactacaaaactcaagtttcacaagcacagaacttgttaaatcttttggccggacaagcgattccgtcaaacctgcttccaactcagtcggttaaaacgattactcaagaaaagaatttctcgactggtttaagtagcgatttactacaataccgtcctgacctgaaagtcgctgaatatcagcttcgtgcagcgggtgccaacatcggtgcggtaaaagctcgtatgtttccgaccattacacttacgggttcagctggatatgcatcgactgaactcaaagatttatttaaatccggcggctttgcatggtcagttggcccaagcatagacctacctatttttgattggggaacgcgtaaagctaatattaaggtttcagagatcgaccaaaaaattgcgctttctgaatatgaaaaagcgattcaggcttctttccgtgaagtcaacgatgccttagcagcccatgctcatattgaagaacgtttaaatgcccagcgccgtttagtgtctgcaaccgataccacttataaactctctaccgcccgctttagagctggaattgatagttatttgactgttttggatgcccagcgttctgcatatgcggcacaacaaggtttattggttctcgaacaaaccaaattaaataatcaaattgaactctataaagccttgggtggagggttaaataaataa

SEQ ID NO: 55804 - DNA, 2007 bp, Acinetobacter baumannii
atgaacatgctagtatttccactacgccaatccctgtgtattctcagcctatttagcattttaattacaagtggctgtcagttggtgagtttgaagaaacaaacacttcacaccactatttctaacgaacgtaatagtattcttacccaaaaaaaattaagtgaagccagtctaaatgttttatatatgtctggtatggatgcaaaaatttgcatgcagactccagaaacatgtattgctgatttagagaagattcctcaaatacagggagagcaatttttatctaccgccagtgaactctatctctcaaaagctttggctctttcggagtcttatgattgcaaaaccaataataatataaatgctaaaaatgaagaagcaaacaagggcgactgtttggaacaagaacttcaagctttagataaaagtattcgctatagctatgcttatttatttaagtcatctcgccagccacaagatcgtatttttgataaccgacaggtgcaaatccgagatttttataatcaggcactcaaccaattagtaaatacctatagtgaaaaaaatgcttctgcaacaattccctccgagataaaaattggtaaaagtacatatacgattgatattgactcttatcaaagactacaaggtaaacagctggaaaaattcacctcaagttacaacatgaatttttctggtttaagaagcattaaccgtcgtgatggttttggctcagattttgttgcggttttacacgctaatgaagacccaaaccaaaaagaaaatcaatatattctggattcattaaattacaattatccaaatggtatcaatccaaatattcataaagcccactaccttgcttctacactggtggcccaaccaaaaaatgaggtagcgtcccaaagcgacatattaaatagtccagatttcaaaataaaaatttatgacccatacaatgtagagaaaattaatgttgcaggtaaagaatactctttagcagcaaacttctctgcgccttatggtctatggctagccgaaaataatttaggtgcggccgcatatttaactctgattgatggtaatcaacgtttaaatatgccgcatttatatatgcttgaaccttacaatcccaataagaaagtcattgtattagttcatggacttgccagtagtcctgaggcatggattgcagtcactaatgaaattatgggggataaagttttgcgtgaacattatcaagtttggcaagtattttactcaaccaatatgcctattttagaaagtcgctttcaaatttatgctctactcaagcaagcctttgcatctcttaatccacaagacccggctgccagtaatgccgttttaattggtcacagcatgggaggaattattagccgacttttagtgagtaatgccgatatttcaaaagaagctttgcctatgatgagtcaacatgcacaagcacgtatgagaaaacatccagtcattggtgaacgtttaagaatgcaggccattccaaactttgatcgcgtcatttttcttgctgctcctcatcgtggaacaagctatgccgatcgctggtttactgtaacagcacgaaaaattattcgattaccctcaacatttttaaaaacattaaccgatactttgacgagttatgacgatgaccttaaagactttgtaagaacaatcaataataaacttcaaaatggtcctagtgacttaagtaataaatctgagtttatggaactcacctcaggcataacgcctaaagaaggattagttttccactctattatgggcaatatcacaaaaagcgatgatccgaacaccattacagacggtattgttccgtataaaagtgctcatttggatggcgccatttcagaaaaagtcattaaaggtggacattcaattcaactcaagcccgaatcagtcttagaacttcgtcggatcttaagtcaacatttaatagatcatggtttatataacttaaagaactaa

SEQ ID NO: 55805 - DNA, 597 bp, Acinetobacter baumannii
atgacgatgatggaaaacaaaataggacgaccgagtaaagctcaggaaaggtcttatgaaattcttcaagctgctgtttcagttgtggcgaaagaagggctagaaggaattacttttgccaaagtagcggaagcttcaggcatgcaacgtactctcgtacatcattatttttcgtcacgttcagatttaatgaacgctttcattgaacattacatttcgaaaatgggcactgagattattcatcgttttagtgggaaaccattgagcgagcgaatcatcatgatgttcacacccgaagtgtatcggactcaagatgatttaatagtttggtttgagttggtggctcaaagtgcgagaaatccgtttatccagcagatgctccatacactttggacaaagcactggcttccggattttgaaaatcaattggcacaagaatatccaaaagcgaccccagaggcgattagctcagcgacctatgtcattgtttgtttatttgaagcttattgggcgtttagtattcaaggcgtcactgatcaacagagacaaaagcaaatggagcaaacggtattaatgattttaaatgggctaagctaa

SEQ ID NO: 55806 - DNA, 756 bp, Acinetobacter baumannii
atgaaaattcttggtctagatgcgggtagccaaacggaagctactacctcaaaaatcttagcgaatagtgaaatgacacatgctgctattttagaaattgtaaatatctgtgggttggttgcatgtattgtattagcacttgccggctggatctacggcgcgaaattcctcaaaaaaaagaattttttgcttggtttagagtggtgggtagtagctttttctgcgaccaactttatttcctacatggtcacaggttggaatgttaatttttcaattaccatgtttctcgattcattctctcgtagtttcggtatgccagttattggtgtacttggtctaatggcactgacccataattacaaaccatctacttttaaagaaattctgctattcacattttcatttgccggaacttttgtggtctttctggcagattttttccaagaaatacgcccgtatttttacgtcatcacgtggagcattcttgtgatttatctactctatttcattatttgcttggtacgtgccggagagttttttcatgcactggccaccacaataaccgctgtagtgagtttagcagtagccatcgtatatgactttttcccgatccctggcgacgatactcatatgattttcatgacttgggctttcgtgacgtggggctatgccatcattcagttgtattacgcctatgaagccctagaacgcgtacagaaagtttctattggatcttttatcccagcccgccagtaa

SEQ ID NO: 55807 - DNA, 1374 bp, Acinetobacter baumannii
atgaattattcaaatgaacaagtgatgagtggcaaccctgaatctatgccatttcgtcttttaggtggctggatagaacagcctagcgaccttcaacctgagctggtcggctctgtcagcgcagatgtcattgtggttggtgctggttttgccgggttgtctacagctcttgaactcactgctcgtggtgcaaaagtggtcgtgcttgagcaagagttcggcggttttggtgccagcggacgtaatgcgggctatctgcttggtagtatgggaattgaattcgaagtgttcgccaaacgcctcggcgttgagcgtgcaaggcagtttgtcaatttctacgacgagggcgtgacctatgttgaaaaacgtctggtcgagttaggcatcgattgtgattacaatccttctggcattatacgcgctgtcatagatccttcgcaggaaaaatggctacgccgcagtatgagagttggcgaagaactagggtctcgtactcgctttgtagatcaagccgaaatgcgtgctcgcgggattccaccagcctttctgtttggtagtgaacagcgcggcggcacgctaaaccccggtaaatacgtgagtggtttacgccgtgcagctattcaggcaggagttaaaatttatgaaaaaacatcattgctctcttatagcgaagggccaatcattacctgcaaaaccgctcgcggtagtgccagcgcacccatcatggtgttaaccacaaatgctttcacacctcagttgggactactacgtgataaggttgctccaatacgagtctcggcaattgaaacccaacaattaactccgaaacaattggaatcacttggctggcctaaacgagaaggtattattacaccgcacctcatgatggaaagccatcgtctaacagcacacaatacaatggtattaacggttaaaaagttaaattacgtctatggctcaaagactccgaacgtaccagatcatgacgcctatgcggcacttgcacagaccttatatgaacgtcaccctacactgaatggtctcggcattaagcactgctggagtggctacgttagcgtggcttatgactttttgcctgtggttggatcaactggaccacatcaaaatattatctatgcagcgggctgtacgggacatgggcttgcgactcagtcgctcatgggacaacttcttgccgagaaaattaaaggagtagaaagccctattctgaaaaacttataccacaagactccatctacgctacctgaaccactgcagtggtgtgtatttaaaacagggttcaaagcagctgcattctatgaccgtctaactgaccgcaaagcgcttgcagctaataaggattcagaaacctaa

SEQ ID NO: 55808 - DNA, 297 bp, Acinetobacter baumannii
atgaagtcattccttatatatgactctttaataaaaagatatattttattaactgtaggattaattgttattgccttgatgataggtatcttttttaaagggatacttgaaattgattttgcgattggggttatttgcggctatttaaatatttttcttttattaaagaattatagatttccacttattcctgaagttgaagaagatagtgacgaccttgttatatacgcaaggttgactcttcttcttctttttgttttgacagaatttggttttttaattgtcgcattgttttaa

SEQ ID NO: 55809 - DNA, 615 bp, Acinetobacter baumannii
atggcacaagataaagtattttcaccgacattaattccctctttggataacgaagttaaagtctgtcatgcggatgaattactagatcctcttttatgtaatagcattgttaaaatcctaaactaccatactacagtgccttatacttttatgatgaaccaagcacaatgggactgggtaaaacagcattatccatttgagcatgatcttgcaatacgctttggtcttgaattcgatttacgtcaattttcagatgaagtattgggacgctattcatttcatacaatgatgtatttaaagttcactctatatgctcaaaagcactctaggaataaaggtgctgagatgattacagagcttacaaaggatacctttaaagctcgtatggcaattgctaaacaaaactttggtgaaataatagatttggcattatctaatgcaagtaagcctgttcttgcagctaatgctttagcaacgtttaccaacaatggaccatatggtattaacgaatatatgtacaaaaatgtatttggtcgtccttatgatcaagcaactgtttcgttatatattcagaattaccactactctccacctaataaccgcttctcaatatga

SEQ ID NO: 55810 - DNA, 489 bp, Acinetobacter baumannii
atgaaaattacattaataccaatacttttactttcctgcttattcctgacttcttgtaaagcttcaacagataaagaagacattgataactatgtgaaagtagaccttaaaaattatgcgactgacaattatagattgatcattgaagcaaataagaatgtgaacaatgagcctgctttgaaaaactctttgtttaacaattcctatgttaagttagaaacagcacggagccttttaaatgatgagtatccagattgggttcaaggcttagataaaaacggttatgactatggtgacctcaacacaatatgttggatgactgtattcatggaaaattacgtgaacaaagttgaaggtccatacaaaagccagcttaaaaatgaaacagtaaatgatgttcacagtctttatggtgaaagaaagaaaattattaagttacgcgacagtaaagataaaactgcccgaaactttgtagaagtatgtgaatag

SEQ ID NO: 55811 - DNA, 477 bp, Acinetobacter baumannii
atgatagaaagccaaaaagtagttgaattaataagtttaatcgcaaatatttgtacaatcttaggttttattattgctttaataactttaatttacttatttttagatcaaaatagtaaaataaagctcaatacccgaagaaattttctaaaaaaaacatcttggtcaaatgaaggagatatagcatctgaagacttgatatttttttcaataaatattgaaagttcaaacacatataatttttatggaaatataaccacatctaattattctgaaaaactaacattttattttgaaaaagcatatcgtcaatcatttaccattagaattcataaaaatataggatggagagatgtagatttggctagagcaaaaataaaaatgataactcctgacctttttgaattcacacttttaaaagggtttgaacaagataattttaaaccagattttccatataaaacaaaaatttggtaa

SEQ ID NO: 55812 - DNA, 969 bp, Acinetobacter baumannii
atgattagacagaatttagcaatcattctactttcaagtattacattaactgcttgtgcaaaatcattgaataatacagatgaacctcaaacccaagcaactaaacaaaatctctcaccagagcaacaaaagaagttgcaacaactactcgataaaacaaaaaagaaccttgtagaaattaaaggtggtacttttatgatgggggattttggtgagcaaaaaagtccagataaattaccatacgatagtgatgctgatagcaaacctttacataaagtcactttagacaattatgcattaagcgcaacaaaagcaacttatgctgactttgatatatacactgaagttactggtcaagaaaaaattggtaaatttgatgagctatcaattcaagatcgacttcctaattcagcagcaggagtaaattggcaacaagctcgaaactattgccaatggttaggaaaacaacttaatttaaaaatggatttaccgacagaagcccaatgggaatatgctgctcgaaatcgaggacaatacattctttaccctacagacaatggtaaaatcgatactggtagaaacgtttggagttttgaacaaaggcaaaaacaacaaaataaattaaatgcttttagaaatattcctgagttaatgaagtttcctgcaactcctctaggtctttatgacatgattactgataattatgagtggatgctagactggtatgatccacaatattacagcaaatctcctgaaaaaaaccctcagggacctgcaaaaggtagtctcaaagttgtacgtagctcaattccttctgaaggacaatctctacaaatgtttggaggcttcactttcagtagacatgctattcaccctatagaggaccctaaagctgctaaagatgaattaacaaaaaaacatcatcttgacttaaaccaaaataattctgtcagatgtgcggttaattaa

SEQ ID NO: 55813 - DNA, 3006 bp, Acinetobacter baumannii
atgaatccttatactatttttgaatatacaatagtcttttataatcaaagaaataaagaattaccaaatgtaaaatatagtataatctttttctgtgaagatggaacaaaaaagacttatgagggtgctacaaacccaaaaggacaaacaaaaccaattccattaaatcaaaatggaaaattgcatatttttgttgaggggcatgaaactattttcagtcctaagaagactataaaacctattttggctgaaggaagcaatatagttgaagtaaatgatataagacttaaaagcaatacttcatttctaacaaaagctcaatatgaactcatgcagaaaaaaacaagtaaagatttggaagagttaaggaaaaatgctaaagcggttaaacagaaaaatttttttaatttatcgaaaataagaccaacttttcctttggatttggcagaagaattaaatgaaagaattaatatgtcttatgaggaatatagaaaaaagaatactcatatcgtaaaaaaaacaaaatatcttaaatttaaaaactatgctttatatagatttgtcgatagtgctggaaatggtattccaatagtggattatcaaatattcgctcaaggccagagtagacctttaataaatgcaaggccgggaccacctgataaaaaaggatatacccaattggtttacacacacctgaaaagtagagttacgtatactttaggaactgctagaaaaaatagtgaatggtacgagccgattacctgtgtagataaacaaaccatttatcaaattatttttccgacttcaatagcagtaactcagcctgatattaatcataaagaaaatatggaggcaagacaaaaaccacctatagtgattaacccgactacaaatgaagtgcttattttgccgcctgcagtctatgcagaatttgataaaaaaaccaagatattatctgatgcagtgagagaagttcataagtcgaatgcaaatctgataaaggcaattcaaagtcgtgatttggatgaaatcaaagaattagaaaaacgtttaaatataaatcaggaaaaagccattgaaaaaattaatggtgaatttaagcaaacagctgatctaagagaagtgtgggtggtagagaccacaggtaaaacaaatgaaaaaacatctaaatataatttaaaacgccgttatttaaaagttacggaatatgaagagttaaaagcaaaacgtagaaaccctcaaacagaagtagatgtaactgcaaatcaatatactgtacaacagcctgcacaaattcgtagtagctttgaaaaactttcgcagcaacttttgacagtaaaagggaatgccggaagtgatgagaaagctgtttataacctgataggcggtttgggtggcgaaattgcagaagagtataaaaatagtagggatgttacagttactcaagaagcacaatggatgcgtatggttgctggggcaagtggtgaaggttcaataagtgctgcaccaaaaggagttagtattaagacttctggagatatgtcagctaaatggacactatttgaaggcgttaaagaatggcgtaaattttatccgtgcgaaacaggctggaaacttgaatacgataactatgatttaggaacaatccggtttttaattggggcggagatatctggtttttcaggagcaaatttagggatcgctggcaatctatctgttgatatttctcatcaaggagcagctcaggttataaaagctgtagtaagaccgccagaaaggtcaatgagtcaaatggtagatcgtaacaaaaaacctatgtttcagccggcacaaggaagtttaaaaataattggtaataataatcaggaaaatgcgcagaatcagggtaatatcagtattaatgcttttgctggagttcaaatacaggggctacttaaaggggctgtagagtggtttaagcctaagggggatggtagcggtgaaggagaatttgtggcgattgcttcagctgcagctggcggtggtgttagtgcgggcgtgggggcgcaaggccagtttcaaattggatatgatcaaacttcaggtaattttaaaatattggtagcggctcatttgtgttggggaatgggagcaaaaggtgtggcatcatttgttgtgggtacggaacatttattaagttatcttggttttattaaatcccaagttgcgcacgcaggatttaaaacgttactttacataaatgaagcggcttttttgttagctgcacaagttctggcttattgtataggtgagaatcatccagtaatcagtgatataaatagaattgcagcttcatatggagactggattagaaggctagatattgatcaagggcgctataaaactgcacagaatattaactctagttctggaaagaaggagttattatatgctacaccagagactaaaggaatattattatatgcagtaactcattggacagatagaactgctcctatttttgatatgaatgttaaattctcagatatgaaaattgaatttttcccaactcgtaagacagcagtaatcaatatttttaaaacatgtatttctacagaagagtgggaaaatacgattcaacatattcatccacgtggtaataagcttactcaaactcaattaggtaaagttgagggagatattattcgttttcttaattatggaaatgatgaaaagtatgctgaagatataatccgttgtctaaattctgggattgaatataaaggtactcaaatcaatgcatggcttcaggattatttaaaatatcgtaaaggagcaaaaaagatagcaggttctttgaattacatgttggtaaaaaatcaggatgataaccgatttaaacagctagaaatacagcagggtgtatggggtgattcagaggaaataacactaatagcaagtaatttaaatgttttatcgccttttgatcaagacgatacagataaatatgaaacatataatgtgtaa

SEQ ID NO: 55814 - DNA, 714 bp, Acinetobacter baumannii
atgtcttatcctataagtcacatacaacaacatatacagcaactcatttttgaacagatccattcagcgtttaatcaaaaaccaaatattgctggaacactacatggccagcgtcgtatttatcaaggctgcttagaacgtcgaacttctctttttcccagccgcaaagctggtggttcagttgctttagaaagctttctggaattggcttatgctgtacaactagaaagtcatcctgcggttgaatcttatcgaacacaggctttaaaaattccgattgggcaaaatttagaactttatcctgactttctgattcgtactcaaaaaggtgattttgaagtccatgaggttaagccatccattcaacatctatccctagaaagccttcaacgctttgagagactagcttcaattttggcgtcaataaatatcccttttaagttagttgatgcaaatacattaccccaacgccaatccctaacacaattattgcatctttattctcgcggacatttccatgagtggaaagtattggagattgaattagcacaaaatcttctgcttagccatgaactaaagagtttagagcaagcttattcaattctggaaaaaaatgaattatcccctcaacttgcagactatttattttttcatcaagccatccaaatcaaaaacgccaaaaatcataatttaataatggagttaagcatatga

SEQ ID NO: 55815 - DNA, 1848 bp, Acinetobacter baumannii
atgaatacttctattccaattccaagcataggtacacgctttttatttcatggctcacaattcgaaattagttttattggtaatggtatctgtcgttattctgctattactggcggacgcatttttcaaattccatatattcagtttgaagaatggtataagactggtttaattgaatatgaattcagtccaaaagaactccttattgatccacaaatgactacaagccttgtccgtaagtttaagtacgtacaagcagcattgatggaattacagcacccaacagcaactcaaccattaatacaaattattcagaaaattgcaaaagaacttgaggatcaatctcctcctgatccaagaacagttgcacgctggatacataagtatagactccataataatgatccacgagcaatcgaaaagaaaaaatcaggtaatcatcatttacgtttttctatagaaattgaaaggcttatccacaaagggattcaggatatatatctaaaagaagaacttagagatggtaaagatgtagaagcttatctacatggcaaagtactggaggataatttagtaaagcacaaattaccaaatttgcgcacaattcaacgtcgtattaattgtttagatccatacgttattttgaaagcaaaaaaaggaactaatgctgcaaaaaaagctcttaaagctgctggtcgatcaatatcaagcccccatgttttagctttagttgaaattgatacacatgatctcgacattattatcattgatgaaagtggcgcaattcttggacgtccttttctatcatgtgctattgatgttcatactagaacgattgtcggtactcatatcagtttatatcccccaagtgcattaacgacgatgtgcgtcatcaaagatatggtctgtcgtcctaaaagaggcttaccaggtggcgtaccatcacaaatcattccagataatggtattgagtttaaaaacaattcttttgcccgactttgtgaaacattaaaaatcacaattacaccatcacaagtaggtaccccaaataataaacctcatattgaaagtttttttagatcattaactaagggcatcattcaaaaactaccaggaacaactttctctaatccttctgcgaaaggagactacaatgctgtaaaacatgcaaaactaacattacaagaagtaaaaaattacatagaagaatggataaatggggtttattacactgaaattcactcagaaatgaatagagcaccgattaaagcctgggaggatgctataaagattgtaaaacccatttcacttttgccagaagaagcaaatattttatgtaggaaaccacatcaatgtacaattaaaaatggtcgcgtattatttgattatttacactatttttcacatgttctatgcactttagaagaacagcaattagtaaaagttacagtactaattgatgaaatggatctcagcagagtttatgtagttgatccgactaacaagcataatgttattatcgcagaatcaacagaactcgaatatactcaaggacttaactattttgctcaccaagaagcaaaaaaaataaaaaaagaaatggctcaagcagacatacaacgcttagggaaaaatgccaatttactcgctcgatggaaattattggagaaaatacagaatgatttacataagaaaaaacctaaattaagaagacttgctatagatattcctcaagagatccagaatctttctaaatcagtcaaacaaaatgacattctgacctctcctccaccaaaaataatccaagaatccaatcattattcctctttttcctctatggatctttaa

SEQ ID NO: 55816 - DNA, 951 bp, Acinetobacter baumannii
atgaataacaagtctatttatgagcgcgtcgctcaactcaatcaatttgtaatacgtcaccctgagtttgatcatgcatttaacagtattcaagaatgtatgaaaaaaagtactgcatataatgaaccaattggaagccttctacttgctgatggtgggcttggtaaaacaactatctgtaaagctattgttaagcagatgcccccatctacacgaatagatggggcttacgaaaaaacaattacaccaacattttatgctcatatcccatctccagcatcagtaaaatctgtggcaggtaacttgttacaacaactaggtgatcccaatccactatcgggtagcgcagcacaaatgactacacgactatgtaaactgcttgaacaatgtgaaactaaactagtgtttttagatgagtttcatcatttatttcgattccagaagacctctacaaagctaaatattattatctgcgattggattaagtctctcgttaatgaaacaaaaattagcttttgtctggttggattacctcaatttgcaccacagctcgaaatggattcccaactcgcacgaagattccaatatcatttccatttacatccattgactttagggagttatgactccaaagggattatttttccattcttagcagaaatcgaaaatcaaaccaaagttcgctgtagtgtctcatttgaagatcaattagatagccctcttcttgctcaacagatctatgctgctacaaatggtaatccatcattcatcaagtcattgttgagagacagcatactttttgcattaaaagattttcgagaaattattacttctgatgatttcagtcaagcttggcaacagggaacaacggctcaagttagtttaactaaaatggaccctttcaaaatgtcactcagcgttttggcaagtcagatgaggatcgctttatga

SEQ ID NO: 55817 - DNA, 1986 bp, Acinetobacter baumannii
atgaaagctaattctttattaattaagccaataccttatcctgatgagagtgcggccagtcttttaattagggcagctgaaaaaaatggattttctagtgtttttgtactatgccaatctcaaattactagctattcaaaatcgcttgatagttctgtaacacatcaaaaaaagtttggtaaattactcaaactattaggtttatctaatgactatacttctttggcatttcaacttcagggatcaactcaagcaatgcctagagcatatggcaaaatatatattgaatatagtttattccgtaaagattgccgtgcattctgccctatatgcttaaaggaaaaatcttattggcgacgtcattggctattacgcccctacactgtttgtctaaaacatcatattatactctatgactgttgccctagttgccaaaatgaattagggattgggcgaaacaaaatccatatttgtaatcattgtggacaagatctacgactcgtcacttgtaaaaaagccgatgctcaagctacacaatggtttatgactcttataaataacaattgtcagcaattttttgacagacttactgactattggatagctcttgaaaagtccgactggtgttcaaataacatagaaactgattatcatcgcattcaaatggcttatgagtattttacagattatgagcagtccaagaaaacgctcagtcatataatcaatgctaaaatcccacaaatacatccagaaatccaagtggtttattttagacgccaaaataaagaactaaataaatatatagattcagtattaccattatgccgtacagtaactgtttcggctccaaagcattatgagcagtattttaaaattgcagatgtgtgtgccattttacaaatttctaatttcagattatacaatctgctcgataaaagaatcattcccgttaaacgatcaaaatttacactcattagcagtaagcatattgaacaagttcttttaagtggtgtgcacaaagaccatcttaaaacacaaagagatatatctccccataatactcatttactagacatagctgagatcgcagttcggttacatgtacatcaagaagtcattcggaatctaaaccggactggctggttaaaaatggagaaaaagaaagttggtagttatatcaaaactcttaccaccgaatctgacttggagatattcaataaaaattatattttagtaggcactcttgcatataagctcggtgtaaattcaactaatctagcggaaaagttaagacattatggcattaatccaattggtggacctcatattgatggcctaaaaaccactctttttaataaagatgatatagctcatatcacaacaaaaatgattacaagtcttgagcattatcatacatttacaggtcgttcatcaaaaaacagatctaaacaggactattatgaatctgactcagaactctatgtttcactaaaacacgcagcccaaaagcttcttatcagcccttctagagtagcagtgttagttcacaataatattctaagaaaagacgaacacaaccataatgcagttatggtagaaaaagcatcaattcatactttacttaaggaattacaccgtacggattttatttcattaccagaagccgccaaggaattagactgtgcaattaactggttacatatcaattggatcaagaccagttatgtaaaactctatgattacatgtactggcagtttgtcagtataaaagatatcaataaagtcaaagtaatccaaaaagaatatatgacagcaatcgaagctagtagttttttgggtatgcaccgcactcacattattaatctcaaagcccaaggaaaaattgattcagtatcttttggtgaatcaaattctttaaatttatatagacgagaagatgtattaaaactatttgaacagcaaaatgatggcgacagcttgacctag

SEQ ID NO: 55818 - DNA, 189 bp, Acinetobacter baumannii
atgagcaccatttttgacccgattgtgtctgaatttgaaagttcagatcacggaacagaatacaacgcatggtttagagctaaaatagaaaaggcatctgctgacccacgcccaaccgtgccacatgaccaagttgttgcacgcctaaaaaagcgtcgtgaggaaagaggagcaaatactaatcgttga

SEQ ID NO: 55819 - DNA, 3258 bp, Acinetobacter baumannii
atgctagaaacacaaactttcgaatttaaaattttaaatgatgatgcagctattgaagacttatttgagcataaaactcatcaacactcagctgagacattacttcaagttatcaactcttctaatggaaatatcactattggtttagaaggctcatggggagcaggtaaatcaacagttataaatatgtttcaccaggatctaattcagaaaaacgaggcaagtttattctttttgtttgatgcttgggctcatgaagatgaaccacttagaagaatatttttagaaagtcttattcaaaccatcgatccagatgaaacaaataatgatctacaagagcttcaaaagcaattaagcggtagaaaaaagactgtagatgttagtgcaaaaaagtctgcttctagactaggtaagcttttgtctgtttgtgctttcgcagtaccagcagggatagctttctttaataagctaaattttgataagttaagttttgactcaacataccctatttactggaccttcataatctttttccttttatctttaattttcttatttagtccagcatgggtactcctgtattggtctaaaaggggggatattgatccacttacaaatcaaagaaattgggatttcttcagaaccgaatcaacagaaaactatacccaagatatctctgagcaaggggaacgaacatcaatagaatttcaaaactattttaaacaaatattagaaattgcttttaaatcaaataactatactaaagcacttattgttatagataacttagaccgtgtcgatccagatcaagcaaaaagtatctggtcaacacttcaaacattctttcaaaatcgctcactatcgaatgagatagctaatctacaaaacaaaatatggtttatcgtaccctatgatagagatggcttctcagcaatatgggataaagataaagcagaaacagcagcgtcctttttagacaaatgcttccaagtccgtgtagaagttcctcagcctatcacatccaattggcttggatattgtcgtcaaagcattgatcaatcattaataggttggtcccaagatagtaaagatacattgttgaacgaatatagtcggattgttgctataaaagatagcacccctacccctagaaaaatgcgagcttgggtgaatcaagttggtatgaacggctataagtggaaggagaaattttcaactaaatctcttgcactctattcctttttacaccttcaatatagtggaacagagctaaaaaaaatattagtagaaaatgacaccaacaagttatcttttagcaaagatatatcattaacatatgaattagctggtttactatttggtgtcgaaaaagaaaaaggagctgaacttttattaaaagaaattatattaagtactttagatgagttagtcccaagtaatcttcgaaagcttgttgatgagcataaaagcgtattctggcttacatggtcaaccaattgggatatattttttgaaaagaataatgcatttgaatctggtaaattgaatcattttacaaattatatatgctctgaatttactactgatgaccaacaattgttccaatatatggaatatctcctaatacaatggaaaacaataaaagctagcgattgggagctaaatgaggcatgggaatatagtaaaacattagaaacactaatttctttcctaggaaatagagatgaagatataaagtggctttcagaaagtattaaaaaattatgcgttcatgtcacatcaaaaccagaaaatattaaaaattctgaccctttaacagaattaagagcactaattgatactattggttatttaggtagtacctttcctaccttaacttatgcttcattaaacaagatacaatgggcaaaatggttagctcttactaaaagtcacaacattcgattcccagaaattactcctaatccaaatgagttttcttcttggagtgttgatgctttaaccaatgtcgctcaaatacaacaagaggatgtaaatctacttattgaaacaattccctatataaaaaataaagcgaaatgggaaggagtcataaataagttagtggatctctttagtacaccttataaccaaagagtgaaggatattgatgagctatatgaattatcatttgcacttctttctaatttttctttcgaaaatttagagaaaatattaaagacacacgtacatttaaagcaaactattggcactgaacaaataaaaaataatgcctcgttatattacttagttgccctgctctttactgaagagatccaaactcaaaatcaatttgaaagacccgatataaaagattattggaaaacatcttctcaagaaaaaattacacagactattcagtttctagctaaatacaaccaacttggtcgtatctcaagaattgcccgtaatgaagaaaatcttttagcacttgaaatcatcaaatcaagcgagcatgaacagttatttggtataaagtctgagactgctctttttattgatgaatataactcatatcttcaagatacacagcagatcacagatatcattactaaaatatgttccatgggtggattcaacgacaatgtgcaaagcgaatacaaggatagccctgtaatttatagtgaatgctcatgcttatttctaaaatatggagaccagccaacacagagtaaagtcattgagctcatcaaaaatatcaataaagaaaattgggagaatgatttaaacaaggataagaagctttgtgatttctttaactatccaatccagcttgactacaaatttagtgaagctttctttctatggttatcacaagttatcgctaagggagataagactcagaaagaggtttggaaacactttgataaaatttcagaataccttttagataaggaagataattttagcaaaatatctaatgaatatttccaacagcctgaagactttattgatgatactgggttccaatacctaagcatgtattggcaagatatctctataatttcactggaaaaagtggctgaaagattgaaggtatggttggacaacaaccaatggaatcgaatttattggttactgactaaaaaatccgttaaaccagaaaataaatctgaagggctgatttcaaggattattacaaaattagaagaattcaaatctgaagaagactctccagaaacaaaagcattaaatcaactttatgatatctataaataa

SEQ ID NO: 55820 - DNA, 252 bp, Acinetobacter baumannii
atgcgctcaatacacgaccctaggtatcaagaccttattaagaaacttatagaacttcgtgagtcaaaaaatgtgactcaggttgagcttgcgcgtcgtttgaagaaaccccaatcttatgtttcgaaaattgaaattttagaaagacgtatagatgtgattgaattaatagattggttaaatgtattggaaactgatatttcagattttctcactttttgtaatgttttaaataaaaggcttagaggataa

SEQ ID NO: 55821 - DNA, 546 bp, Acinetobacter baumannii
atgtttaagattaaaaatttaccaataattctatgcgttatgaccgtggcatcttgtacaacaaaatttcaagatacaggtacatctacctctgtgaaacaaatgttgaccaatgaatggcatattcaatcatatgactcttcaaaaccgctcctgatcaataatgaatttgaaatgcgagtatctacctactcatcccctatttttattcatcaacaatgggtagagcaattagcatcaccttataaaaagctacaaggactatgtcgcagacaaaatgggcaatttacttatttaggtgataataactcggtaatgataaatgctggatcagtaaaaaatgggcaaccattacctccacccgatcgtttaacaactgaagtacttacacaaattcgtaactctaaatggattggcgactattcttgttcaagtaatacagaaaattggaaaacctccattaaagcaaccagctggagggcgaaaaatgatggaacaaatgcttggcgatatataactcttacaacaaagattgataaaaattaa

SEQ ID NO: 55822 - DNA, 807 bp, Acinetobacter baumannii
atgaacgaaaaaaagaagcgtgggcgaaaatcaaaaaatcctgtaaatatttataaaactaaagtgtgggttgaatatttaactcaaactgcaaaagtgaatgtgaattctttagaaaaattgatcggtgagtttataaaagagccaatagacaaaccttatagattaaggcgttatcaaaatgggagtcatagtccagagcttgaatatattgatttaatagaaaggatttaccccggttctaaagacatatttgagcatgttctatgggaggttttgtcttcatttaatcataatcaagatgaaataaatgacttaattcaaaaattagaaccacgagtaaagtttgaacttatcagtcgagtagaagtgaagcctataaaaagaaaaccttttaatgaatatactgttgagtctttaacgaaaattgggtcaattgactgtcttgtcgtagcaatattaatgattcaagaatcgatttttttaggatcagagaaacttcgagaacttgctttagagctgtatgcaggattgacagaaaaaatagcccaaaatcccttattctttaatatacatcctgagctatttgattatattgataaaaatttcaagcatcacatctttttagcaccaaacataagactttctgcagtaattttttggcaatcatatagagataatttatggtcagaggagatgaagcaaaagtctgaaattcttgaagcaagtaaaagagtaactcctaacaaagagacttcaccaaaaactcgcatagagtcttcggagatgccttcgtattttgattaa

SEQ ID NO: 55823 - DNA, 246 bp, Acinetobacter baumannii
atgcaaactcatcaacaatccagattattggtagctgaaataaaagaaaaatatggcgaaattatcggtggttatgatttagcaaaattattgggctataagtccacggcttcttttcgtcaggctatttctagaaatcaaataccattttcaacattcaatatagaaaatcgtaaaggcagatttgcttatacaaatgatgttcttgattggctaacaaatctaaaaaacaaaggagatatctaa

SEQ ID NO: 55824 - DNA, 690 bp, Acinetobacter baumannii
atgtaccctttcccacaaaacaatagaaataatttagctcaatttatttgggaacaaatagaaaaagcttttcatgctaaacctaatttagcttcaacacttcacggccaacgaaaagttttccaaggatgttttggccggaacacagccttatttcctagtactaaatctggtggagcaattccacttgaaagtcgccttgaattggctcaagcactctgccttgaacaaagtccccaagtgaaaagtttccgtactcaggccataaaaatacctttatcaggtaatcgtttttcctatcccgactttttggtccaaaacatcgatggatcatttgagatccatgaagtgaaaccctctatcagggctctggcacaagaagagctccagaagtttgaacaagtctctgagatacttaatcaaatggggatattgtttaagcttattgaccaattcagcttaccaacaacaaaacagcttcaaaatcttttatatctttatcaaagggggcataaacgaaactggacacctttagaaattgatcaagcaatggatgcactggaggaaactattttccagaacattgaagcaatatatagatcacttcaagaatcggatttaccttgtgaattaggcgactatttactttttcataaaaagatcaccatagatacagatggaggaatttaa

SEQ ID NO: 55825 - DNA, 1884 bp, Acinetobacter baumannii
atgccatcatcattatttattcctcagccaggttttcgtttcgcttttagtaatcaagatgactatgtttttgagatcactaatgttacttatggtcaaattcgttacgctgctgtaatcggtggaaaatccttcaccttgtcatctgaagcgtttgagcaatactataaaaacgatgaaatcaaatgcatttttgctcccgaaaaattaatcatcaatccggaaaaatgtagcgaaattcaacgtaaagaacgatatgtaagatctgcactttacaaactatatgaacctacagccttaattcccttaaaaaagcttattgatgagattgcaacagaacttggtgatcaagtccctccttctcctagaacagttgcaagatggataaataaataccgtagtagttgtcatcataacctcagtttaagtaatagttataaaggtaatcagtcacttcgattccctccagaaatctatcaaattatgtctcagggtattaatgaaatttatttaaagcctgagtatagaactagtaaagatgttcaagcatacatattaggtaaattgatagaacaaggtgtatcaacaaaatatttgcccagtagaagaactgttcaacgttatatagaaaaattagatccttatttagttactaaaattaaaaaagggagccgtatagcacataaagcttttcaagcatctggtaaaagttgtcccagcccctttgcactttatatggttgaaattgacacacattatttagatattattgtgattgatccattaacccatcaagtactcgggcgaccatacttggcttgtgctattgatgtatattcacgtgcgattgtgggtacatatataagtatgttcccaccaagtgcgatgactactttagctgttattaaagatatgattacgcgcccaaaccatggactacctggaggaattgcatcaatcattattccagataatggaattgaatttaagaataattccttagcaagagtctgtgaacaattaaaaattacactcacaccctctcaaattggaacccctaataacaagcctcatattgaacgttttttctcaacattgaccaaaggagtcattcaaaagttatctggtacaaccttttcaaatcctggtgaacgtggtctctacaattctaggaagaatgcaggctattcactactacaagtaaaagaatacgtaaatgagtggatcaatgatgtctatcagcaatctattcatagccagactggaagaacccctattttaatgtggaatgatgcaattgagcaggtcaaaccatcttttctaacagaatctgacgccaaaattatttgtcgtaggcctgttgaaagaacaatcaatcatgggcaagtacaaattgatggattagcttactattcccactcattaaaagtattagaaacaaaaagaattaaaaaagttaccgttttagtcgacgatcttgatcttaacattgtctatattctttcgccgaatgataaacaagtggtcattcaagccgactcaacaaatccagaatacactcaaaatttatctcggatagtgcatctagaagtacaagaaagaaaaaagcttatggcagattcagatcgacaaagattagggaagtttgctgatcttcatagcttatacaagcttatgcaagacatacaaatcgatcttgtcagaaaaaaaccaaaactaaaacaaatcaaaattgatattccaaaacaattgcaacagctagaagaaaaactaggcttaaacacgagtaacaatcaagaagacctaaaaatctacgagaaaatccataaagcgaataaagcgtctccaactagatttggctcaatggaggtaaaaaaaagatga

SEQ ID NO: 55826 - DNA, 945 bp, Acinetobacter baumannii
atgaaaaataataatagttttgaatccgttagttatcttaatgatcttgttattacttcagaggaatttatgaatgcctatacaggtattcagcaatgcgctgaacgtagtattgcttataaagaaccaattggaagtatgcttctatctgaaggaggacttggaaaaacaactctatgtcatgcagtaatcgctcaaatgccaaattccataaaaatagagaatgatcgacagaaaattatcattccggcgttttacgttgaagttccctcacccgcaacagtgaaatcattagcaatcacaatgctaaataaactaggtgacccaagttatgacatcggaacaacaaaatacctcacctcaagacttacgtacttacttatacaatgtgaaactaaactggtttttttagatgagtttcatcatctttttgatcgtaaaccaacttcaacaagaatgaatattacggttggaaattggataaaaactctagttaatgaaaccggaattagtttctgtcttgtagggcttcctcaattcgcagaccttattcaggttgatacccaaatcgcaagaaggttcccttttcactataaattatctccgcttaccttaggtacaaaagatatctgtggcacgatttactcgtttcttcatgaaatcgccaataaagcacttcaacataatactcatttcagccctgagttagatagctaccttttaggtatgcaaatctatgcggcaaccaaaggctatcattcgtatgtaatgagcctggtccgtgaaagtatgatgatcgcatcagaagatggtagaacgaccgttactcaaaatgattttagtcaggcatgggcacttggaataaccctatttattagtgattttaaacaagatccctttgctatgagtctcagccaattagcatcaaatataagggaaatataa

SEQ ID NO: 55827 - DNA, 1983 bp, Acinetobacter baumannii
atgaataatgaaggtttacttatacaaccaattccctatgaggatgaatccgctgctagctatttactaagagctgcacaacttaatatgcattcatcagtgtatacgctaataggcaaagaaaattttgcctacttgactaagcaagcaccaaactgtgatttgacagatcttccccgcttcaaatttgctctacaagttttagggataaattcttcttatcaaactgtagctttagaacgagtaggtccaaccagtcgttctccaaaaagatggggacagctagaaatcaatgaaaaccttctgctacatcatgaattttcattttgtcctgactgtcttaatgaacaagcttattttaaaaaaatatggctctttagaccaatttatgcctgcccaatacattctttattacttctagacaaatgtcatcaatgtggtgaggcagttacacttgcaaagggtcatattacgttatgcccttcttgtaaaacggatcgaacgaaagcaccaagaattttttgtaagacagcacatattgttcattggtttataagaattttagcagaagaaaatactgatttttttcaagagtttacttcttactggacagctttaaagaactttgctgagtttcaagatacattatctgatgaagaatacacaaaaataacttacgaatattttactgaccttccaagctcgataaaaagattaagcacgtggatcaacaatagaatttatctagcccatcccagaattcaacttcttccttttttaaaggaaaaagagaagttccactacttttgtgactatataaaattagtggaagaaaaatgttctcgctataaaatcactagctctagattagaagagctttttctatcacaggaagaggtaaggcttgttttaaacattggacgtaagcgactgaaaagtcttgttgccgatgattttctgaaggtaggtaaaaactactatggtcatgaagactttaaaggctcatcaattgagaagcttttaattagaaaaaataaatttatagattatgaaatgtttactccacctaaaagtacacacaggggtaagctaatacaaccaactatttctgagattgccacaaaacttgatattaattttgagacagcaagaaagctaagtaagactcattggctcctcggagataacgtatctatagtcaaagttatctcatatgaaaaacttgaagatttctataaaaattatataactgcctcaagcttggctagaaagcttgaagttaatgccacaaacttagttgagaagcttttgagtattgatatatctcctgttagtgggccatatgttgatgggttacctattaatatttatgaaaaatcttctgtagaaaacattaaacagattgatattaattcaatagtaaactacaaaacacgcacaggaaggcataagaaagacgccaagaattcagtaagagctcactgctattctctacttgaagctgccacattattgaaaatcagtgcgcgggctgtatcatatttgatacatgcaggttatctcacaagaaattatctcgatcctgcatctgtaaaagttgataggatatctttagactcattgaaacaaaaaattgagagtgaagactacgtcagctttgaagcagcggctgagatattaaattgctcattgaattggttgaaccagtattggtgcaaaacaggctttctaacaattgaaaagctcgtattttggaggcttataaagaaaagtgagttgaatgaagttcttaagttaaaagatgaatacataactggggcagaagctagcaccctacttggtatgcgtcattcatatatcactaacttacaaaaacaacagctgatcaaaccttattatcttggtaaaaatgataaaaagatcagattgtttaagcgagaagacgtacagaaattaaaggactcaaactattttaaggcttaa

SEQ ID NO: 55828 - DNA, 444 bp, Acinetobacter baumannii
atggcctcacgtttaactttatttctcaaaagtacggtggctaatatggcaatgactttagagcaagctagacaagctatcgtggaccgaatgatgagttttacagggatttctcaagatagaatccagtatccaaatgcaccaggttttacggtaccaaaggacggcgtctggtgccgcttaacgattgcaggtggcccgagttttatttcgggtattgaagataaaccttgtactcgtcgtaccggtaacatcatgattcaatgctttgatcgattacatattggagagaaggctttaacggttcttggcgatgctttgcttgcacattttgaatatttcaccaccgaacatttagaatgtttgcatggtcaatccatctatgcgggtaaagatgctgatttcattcagtataatgtgaccattgggtataaggtgaattga

SEQ ID NO: 55829 - DNA, 348 bp, Acinetobacter baumannii
atgttagaaaaacttttatatactttggggttaactatttctttggttctattagttagttgtgctaaacaaactgaaactaaaccgcttccaccatcagttgaagagcagttcatgcaatctagccagcagattaacaagatgcttgatgctctagagaaccgggaagtagctttgaatgttaagcgggagatattgtgtaagacatatccagaggtctataagaaccaatatatgccagcattactcaagctttcccctaatgtatatacaaaggaaactctcttaagagattatgaggctgtgattagcttttataaaaaagcttggtccattcattgtggttga

SEQ ID NO: 55830 - DNA, 504 bp, Acinetobacter baumannii
atgaaaaaattattaactgcatgcttatttagtttgggtttagttggatgtgcaacaacatctggaactgccccgaaggtttcaacgagtggttttgatgggtcaaaaagagtttcaattgatggacatggtgctgcatgtgatcaaatggtttgtccattaattggtgctatttggtcaagtaatagtcctaatcttgttggtttaaagatctcagttataaatagtattgttgctattaattctgttgatttgaatgtggatggggaaataattaaattaagagaaagtacactaactgatttttctaatgacatagttctagaatctagcaaggtttttgtaaccgacttatctactgttgataaaattctcaactcaaaaagagcttggattcgagttaatactagcaagggactaatcgaaaatccgattattgatggttctaaggatagtaaggcttaccacgcattaaaacgttttaaagatcaagtaaaattttga

SEQ ID NO: 55831 - DNA, 399 bp, Acinetobacter baumannii
atgtacaagttaaagctaaatcctcagaccagcggctacggcgtaacaccaggtgatgatgtgaaacgtcagcagatggatggcggacgtggtcgctattacatcgatgtaaaacgtaatagccacattgttgatgtgaactggaatttaaataaatccgattttaataaaatgatggccttctggcggatctatcagaataagccagcttcattctttgcagatctggtgattgatcagggagcacgtcagcaatatcaatgcaattttattccaaactcgttcaagaccaatgaagtcaacggcaacctttaccgggtaaatgctcagctcgaagttgttcaaaaccagcctaaccttactgcagatatagcattaattaaagattgggaggtctga

SEQ ID NO: 55832 - DNA, 918 bp, Acinetobacter baumannii
atgaatataatgacttttgataattgtttttcagctcactttgaaacttatagaaaatctgtagaaaaacagaccggcaatgctcgacttggaattttccttaatcatatctcacctgttatcggtcaactaaacatgagtgaaattaaggttcagcaccttcgtcccatcttcgataaacttgaaaatgaaggaaaaaccaaaacacttcacaaaacccatgaaattattagccaaatttttgactatgcaatagttgttgaggaatgttgtgagctaaatcctgcccaaccgcttaaacgttttttacctaaacacgttgaggtgaaccatccatttttagaagagtttcaaatgcctcttttctttaggcaaatcaaatccaaagggaaactttcatttcaagctaaaatagcattgcttttgattacgtatactgcagttagatgtaatgaagcagttaaagcgaaatgggaagaatttgattttgaaaatagactatggtctataccggctgcgcgtatgaaaatgcgtaaagatcatatagttccattatcaaagcaagttattgaattattaaaaatgtggaagctaaaatgtagggattcagaatatcttttcccaaaattaaacattggaaataaacatgcttatatgcaaagctggtgtttaagccgcgcaattagccatactgaattttataaaaaacaaacaattcatggattaagacagagattttcaactagttgctatgagtcaaatttgtggcgagatgcagctattgagatgtgtttggcacacaaggttggcggtgtggctggtgtatataataaagctaaatatattgacgaacgccgaaaaataatgcagtggtatgcagataaagttcagctatgggtaaaaggatttattgattaa

SEQ ID NO: 55833 - DNA, 366 bp, Acinetobacter baumannii
atgaaaattcaagaagctatcgaaattcgcaactctcgtaaaaatgtaacggcttttcttcatcgtagtgacatcgctcaaattgaagcattgttgggacaagacatcattgcaaaacctgtagtttgggttgaactatgtaatcaagtgattgatgcttacgacaaaaaattaatcaaaaacaaagcattttcagaaatttttgaaatacttcgtgaagagaatactcaaattcgaactgaaaagtatcgcttaagtgcgagtggattgtttaaatacgatgaatttcaacgagcatacatctttgtgaaaccttgtagccgcaaagatttcaacctgcactatgcaaatcaatacatagattaa

SEQ ID NO: 55834 - DNA, 231 bp, Acinetobacter baumannii
gtgaccattaaattcgaaccaggatacacccctgcaaacttacgaatgcttgtagaaaaactgcaagccgctggtatgactcaacaacaaattgcggaagaaattggtgccgcccgatacaccacgcttgcaaactggatggctaacttcgaccaacctcgacatagaaatatgccacaggacaaatggaaaaatattttagaattatatttttcaaagtacttgacataa

SEQ ID NO: 55835 - DNA, 279 bp, Acinetobacter baumannii
atgattgtatttatcatgaccttaaaaaactgggttccacctactgctacagaaattcaatcaatcattgatgatcaaaatattagcatcaagaaagcagcacacatggcgcgaataggtgaacgcacatttaaacaatggcttgatccaaacgatactaaagcacccagccaagcagcttggtcaatgtttttatatgaactgcgttcaatgaaaatgggttacaaaaatatagatcacttatttgaagcactggagagccattatcgtgaccattaa

SEQ ID NO: 55836 - DNA, 522 bp, Acinetobacter baumannii
atgactacttttcatgaatctactattgatgttcatgctcatcatttcatggcggccaatgaaagtgctaaacgcgaatttattaattctgctgtttgggcaaatatccaatggttgatttttcttctagataacgactttcaagactgttctttgaatgatcatgattattttggaaacatggatatcaaaaaagataatcacaactatgttatttcttttagtcaatggaattattctgaccgaaaatattttgatactcaactcaccctcaaaataggagatcatttcggtatgttacgttctctgctatacaggcttgctccaaatgaaaacgcatcaggtaacttgttccattcttatatttcatactttgaaaattttcttggtgaaaagatagaaggtatgacaatacaacgtgctatcactttcctcgatatatgcttccgcaatagacctatgtttgcaataaaaatgaatcacagcagcacaacttataatttccatgtagtacgcagataa

SEQ ID NO: 55837 - DNA, 198 bp, Acinetobacter baumannii
atgttcatcttgcgcttcgccaaagctttagtcgctttgtcttgctcaggtggcgtttttttatacctatacaaaaccaaaattacctatttgcctaaagctttacttcgccacttcagtcgtgacttagaaagtgccccttatccagcatttatttgtatagatatttctactcatcaatatttgtttacgatttga

SEQ ID NO: 55838 - DNA, 918 bp, Acinetobacter baumannii
atgaaaaaatttctatggtggggaataagtttatacttcagtataagcttacaggtagctgcttttgctcaaagcaatttatcaaatatttcttttaatcagcctttaaaatataggattgattatatagatccacgttttgaattaacgaaagaacaatttattcaaattggtaaagaagcagctgaaatttggcaaaaagaaactgggaaaacctattttatttatgattctcaagcagagcttactattaatttagtattagacaaccaacaagctactcaaaatgaaagaaaaaatagtataaatgagctattaaagcagcaggaagaatggagagagaaaaataaagctattcttttatttaaacaacaaattgatcaggaaacctctcttttgaataaagaaaaagagaatctcaagtgtaaattcgaacaatatcaaaaagatgtatctctttttaatcaaggaaactatgggcaatttactcaaagcagtttaaacaaacgccaagctgagttaagccagctttcgttagaattacaaacaaagttttctcaacatagcaataaaatagaagtgcttaatagacaaattaaacaaataaatcaacaacaaaacctgcttaatcaatctattgagcaatttaatttgagcacgacttctggttcaaaaacttttcataaaggcttatttagccaaaaccaaattcagatttatggctttacttcattcgatgatctgcgcctaacacttgctcatgagtttggacatgcattaggtttaaaacacaccgatgatcctaaatctttaatgtaccctcttttaagagagcaggatattcataacttcaaattaacaaattcagatttagatctattggctacattatataattcaaatgacgaaaatcattaa

SEQ ID NO: 55839 - DNA, 1824 bp, Acinetobacter baumannii
atggtggatgaacttattctgtctcgtagcgatttagatttcatattatttgactggttaaaagtagatttattaaaccagagaacacgtttttcgggtcaagatcgctttgactatacttcagttttgaatgtttatgaaagtttagcaactgatctatttgccccacacaataagaaaaacgatattaatgaacctagctttgatggagaaaaagtcacggtaaatccagaagtgggagtcgcattacgcgaattttctgaggctggattaatgaatgctgcgcttcctctagaatgggggggaatgagtcttcctactacaattgaacgagctggtatggcatatctgctgggtgcaaatgctggtaccgcagcttacgcctttttaaccattggaaacgctaatcttttaattacatatggtgagaaagaaattatctccccctacattagtgctatggcggcaggcaaatgtttcgggactatgtgtttatctgagccccaagccggctcaagtctagctgatattcgtacacgtgctgttcctactggagatggtcgatatcgtctattcggcaataaaatgtggatttcgggaggagatcatgaaatttccgaaaatattctacacttagtgcttgctaaaattcctgatgaaaatggtcaaattccgacaggggtaaaagcaatatcattattcgccgtccctcggaaagtgcttaataaagatgggcaaccaagtgaaagaaatgacgtagttctggctggaataaaccataaaatgggctatagaggcacagttaattgtgttttaaattttggagaaggaaagttcactcctgaaggtgaagctggagccttaggacacctcataggtgagcctggtaaagggctggcttatatgtttcatatgatgaatgaagctcgtatttcggtgggattatcagctgcggcattaggttatacaggttatttgcatgctcttgattatgcaaaaactcgtctacaaggacgaccaaaaagtgacagaaatcttaactcttctcaagtccccattataaaacaccctgatgttcgcagaatgctattagcacagaaggcttatgtatcaggagctttagccttatgtttgtatgcagcaagattggtcgatgagattaaatccgttgaagataaaaaagaacaaaataatatcaatactttactagacctattaacacccgtcgtaaaaagttggtcttctgaatgggggctagtcgcaaatgatttggccattcaagttcatggtggatatgggtatacacgtgaatataacgttgagcagttttatagagacaaccgccttaacccaattcatgaaggtacatttggtattcaagctctcgatttattagaccgcaaaacacgtataaatgatggtttatctatgaggttgttaaatgaacggattactaaaacagttcaccaagcacttttaatagataaattacataatcacgctacacagctaaatgatcattggcaagaaattcttaaagttactgagcaattacacgccttggatgatttagaaatgcaattagcaaatgctgttaattatttagaagcttttgggcatttagttgtagggtggttatggttagatcaagcaataactatacatgaaatgatgaagacatcatcgagtagtgatttcttaaatgggaaattagcagcttgtgattacttttttggttgggaaatgccaaaaatatccagttggttggcagtactggatccagtggaaacaacaccactgaatatgcctgagcaatggttttag

SEQ ID NO: 55840 - DNA, 477 bp, Acinetobacter baumannii
atgggtgatactctatcgaataaaactccgatttcaattgctcaactttttgaactgcaaggcgaagtacttggagtttctgattggatcacaattgatcaagcaacaattaatgcgtttgcagatgtaacacgggattggcaatacattcatgtcgatactgaagcagcaagtaaaagtccgtttggaggcaccattgcccatggattccttaccttatcgttgttatctgctatggcttcagaagctttaccgcagattaaagagctaacaagttctataaactatggaatgaataatttacgttttattcatccagttcatagtggaaaaagaataagaggtcaattcttattaaaatcaattaaagagaagtctattggccgttatcaaatggttgttgatgtaactgttgaaattgaaaatgaaactaagcctgcgcttgtcgcagaatggatatcacttctcattttatag

SEQ ID NO: 55841 - DNA, 909 bp, Acinetobacter baumannii
atgattgatttaaaaaatcgtgtagcaattgtgactggtgcaggtgcaggccttggaagagagcatgctttattattagcacgcttgggcgcaaaagttgttgtaaatgacttaggtagtgatgttcatggtaatggtggttcaactactgctgctcaaaaaatagtagatgaaattattgctgcgggtggtgaagcaattgcaaatggtgcatcggtaactgatgcaactcaagtagaagaaatggtaaggcaaacaatgtcccgttgggggcgtgtcgatattttaattaataatgccgggatcctgcgtgataaaacatttaccaagatgtctttagacgattttcgaactgttatagatgttcatttaatgggagctgtaaattgcactaaggctgtatgggatattatgcgcgagcaaaaatatggccgtatagtcatgactacttcttcttctggcctatatggaaactttggtcaatctaattatagtgctgcaaaaatggcgctagtggggttaatgcaaacgctagctcttgagggagaaaaatacaatattcgggttaattgccttgcacctacggcagcaactcgtatgttggaaggtttattacctgaggaatctcttaaagcacttgcaccggctgcagtgagtccagccgccgccgtgttagtgagtgaagatgccccaacaagaatgattttatgtgcaggagcgggaagttttgaggctgcacatattactttgactcaaggtattcacattggaaacagcgacgagacagcacatatattgttagagcgattaaatgaagtatctaatcgtgcaggtgaaattgtgcctatttctggctttattcaaggtaatttagagctggataaagctggtttaaaagtaggggaataa

SEQ ID NO: 55842 - DNA, 765 bp, Acinetobacter baumannii
atggcaacaaatctttttgatttaactggaaaaatagctttagttacaggagctagtcgcggtattggcgaagaaattgctaaattattagcagaacaaggcgctcatgtaatcgtttcaagtcgtaaaattgaagactgtaaggtcgtggtagaagaaattattgcagccggaggtaatgcagaggcatttgcttgtcatgttgggaaaatggaagatatatcatctatttttgaatatattcgtagtcagcatggccgattggatattcttataaataatgctgcagcaaatccatattttggtcatgttcttgatacagatttagccgcttataacaaaactgttgaagtgaatattcgtggttatttcttcatgtctattgaagccggtaaattaatgaaatcacaaggaagcggtgtcattgtaaatacggcatcagtaaatggattacagcccggcgatagacaagggatctattcaattactaaagctgccgtcatcaatatgaccaaaacttttgcaaaagaatgtgggccatttggtataagagtaaacgcattggttccgggttttactaaaacgaagtttgcaagtgctttattcgatgatccagaattatatgaaaaactcatggtagatattcctttacgacgccacgctgaaccacgggaaatggcgggaaccgtactctatttagtttccgatgcagcgagctatacaaatggcgagtgtattgttgtagatggcggatacacgatttaa

SEQ ID NO: 55843 - DNA, 693 bp, Acinetobacter baumannii
gtggctttaattacctttgttaggcatgggcaagcttcatggggtgcagataattatgatcaattatcgataaaaggagctgagcaggctagggttttgggtaaagtttttgatgatcaagctaaatccttcgatattgcatggcgtggagaaatggttaggcactatgaaaccgcacaacattgtttgagcgagatgcattcttctctggtcgctataccacatacaggactaaatgaatttgatcacgagcaaattttgttgaatttagacaagaaaaaatacgcggataaatctaagattattcagtttattaaaaattcatctcatccaacaaagacaatgggagagatgtttgctgaagctgtttatcgttggcagagtggagaatatgacaccgattacactgaaacatggacgcaatttcagaatagatgtgtgagtgcgtttacagatattgtaaatagttcaaaagggaaaaatgtcatcgtttttagttctggcggagtgatctccgtgattattcaatctttactgggtttaagtgatcgcgcgacatttagattgaattggtcactggtgaattgtggtattactcaaattcttagcgatactaaacgtcatagtattttaagtatgaatgaacatcagcactttcgtgaacatggcataaatttattaacttggcactaa

SEQ ID NO: 55844 - DNA, 1062 bp, Acinetobacter baumannii
atgagtactatagatgtaggtggagctgttcgccgaggtgaagagttagatattgaaaaagtagatcagtggttgaaggaacagaacattgttttaaaaggtatgccacaaattactcagtattcaggtggggcatctaattggacatatcgaatacagtatgaaaatcgagatctgattttacgacgtccacctgcaggaactaaagctaagtctgcgcatgatatgcaacgtgaatataacgttcaaaaagcacttaagccactctatccattggtgccggatatggtggcgctatgcactgatacaaatattattggttgcgatttttatgtgatggatcgaattgaaggcgtaattacaagagcaaatcttcctgaaaatttagacttaacacctgaacaaatgcatcaactgtgtattaatgcaatagatgctctaattgcacttcataatgtgccttataaaggctctgatttagagacaatcggtaaaggtgatggatattgtcgtagacaagtagagggttggatacgacgttttgagcaagcaaaaacaccagatattgctagttttaagggtatacaaacttggttgttagaacacataccagatgatgtaaagacctgtgttattcataatgactggcgtcttgataacgtcattctagatcccaaatcgcctaccacactgattggtgtattagattgggaaatggcaactttgggtgaccccctaatggatttaggttgtgcgttagcctattggatacaagatgatgatagcgttttattaagaactttgagacgacagcctactcatttgtttggaatgctcactcgtcaggaagtggttaaatattatttacaaaagaccgggttacaaacggataactggaatttttatgaagttttcggtttatttcgtttagccgtaatttgccagcaaatttattatcggtattaccataaagaaacacaaaatcctgattttaaagagtttggtcgttttgttgaagctctatttgttcgttgtatgcaattgacttggcaatcgaaatag

SEQ ID NO: 55845 - DNA, 1263 bp, Acinetobacter baumannii
atggattttgaacttagcgctaaaggcaaggcgtatttagaaaaaactaagcaatttatggataaagagattattccaattgaagataaattttggaaagaagtacatcaaacatgtgatccagaagattggactacgtggaaatggccggtagctttagaaactctaaaagctaaagcaaaatcagctggattatggaatatgtttctgcctgatgaaaagcttggagctggactaagtattcaagagtatgctcacattgctgaatataccgggcgtagttttttagcacctatggtctttaattgtaatgcgcctgataccggaaatatggagcttttgtggaaatacggaagtgaagcacaaaagaagcaatggttagtgccattattaaatggcgaaattcgttccgtattttgtatgactgaaccggatgtggcttcaagtgatgcaaccaatatgcaagctacagcaatagttgatggaaatgaaattgttttaaatggtcgtaaatggtggtcatcaggtttaggagatcctaatacgaaactcttaatttttatggcacatactcctgactcatcaaaaggtcatcatgagcaacattctatggttcttgttcctgttaacacaccaggagtaaaaactgaaagaatgttaccgatttttggtgatatcgatgcgccgcatggtcatggagaggtttgttttaataacgtacgcgtacctattgaaaattttattggtggtccaggtgaaggttttgcaattgcccaaggccgattaggtccgggtcgaattcatcattgtatgcgatgtgtgggagctgcagagcgtgcattagagttaatgattgataggggaatgacacggattgcatttggtcaacctatcttggaattaggaggaaataaagaaaaaatcgcagatgctcgaattgctattgaacaagcacgtctaatgacactttatgctgcttggaaaatggatacggttggaaatactgctgcaatgacagagatttcggcgattaaagtaattgcaccaaatatgatgcaacaagttatagatatggccattcaaatgcatggagcgatgggagtttctaatgacacgcctttagcacgctttatgggaattgctcgctcattaagactcgccgatggtcctgatgaagtccataagagagtaattacaagaattgagctcaaaaagcggggttatggacgtaattaccagccattaaaaggaaagattgcttaa

SEQ ID NO: 55846 - DNA, 954 bp, Acinetobacter baumannii
atgcacgaagataataaaaaggtagcatcgcttgcgagaattgatctcaatttattccgggtttttgctacgatttataaagaaaaaaacttaacacgcgccagtgaacaattgttcttaagccaacctgctgtaagtcatgcgcttgcacgtcttcgtgaacattttaatgatccattatttattagagatggacacggcgtaatgccatctatattagctaaacgcatatggcctaatattgaacaatcactatctttaatgaacgaagcaataaaaagcactttagattttcaaccggaaagagacttaaaaaaattaacaatcgcaatgattgatgaatttgaacccatactacttcctttaattactcaacatttttcaaaattcaataaagatttaattataaatagcgtgcgtattgatagaaaaaatttacgtcaagagctagtgtcaggaagaattgatttctcgatagacgttaatcacttagtagaggaaggaattgctcagcaaacatgtttgaaagataaattagtcattatgtgccataaagaacaccctattttacaatcgagtataagcatagaaagctatttaaatgcaaaacacattacggtatctgctcgaccaacaggcagagtatttgaagattttattttatcaaaacatgggtttaagagagaaattaaacttcgctgccaacagtatcagaccgctattagcatgttggctcaaacagagtacttacttacgatttctcacacgcaggcgttgtatcataaaaaaaattatcctgatgtaaatatctattcgattccagcaaaaattgaagggtatgaaatgaatctttattgggatgaggaaaaatcaaaagaacaagaaatcgtgtggtgccaggcacaattaatagagattatgaatagtctccagagtcagtttaagaatgactaa

SEQ ID NO: 55847 - DNA, 1617 bp, Acinetobacter baumannii
gtgaataaaacatggcaaaagacatatgatgaattaggcattcctaacgaaattacattgccaccagtaagcacttcaatgattgagattttcgaaagaaatgttcaaaaattctcagataaaacggcttatatttttagaaacgaaaaattaagttatcagcaggtagataatttatctttacggtttgcggcctatctacagtcattaggactaaaaaaaggtactcgtatcgcggtgatgttaccgaacgttttacaatatccgatctcagttatgggtattttgcgggcaggactaattctagtaaacgtaaacccactctacactccaagagaactcgagcatcaacttaaagattcaggtgctgaggcgattatcttactagaaaatttaaaaggcatttttgagcaagttgcatcaaatacattggtaaaacatttatttatagtaaatctggaagattctttgaatcatccattcatagatcatactcaagataaattaaattcttttaatagaggattaagatatccctcatgttgttatacaaaaccaaaattaaatttggatgatacagctgttttacagtacacaggtggtacaactggtgtgtctaaaggagccgaattaacacatcgcaatttggttgccaatttattacaaaatgatgcagtttatagtccggttttactcacaggcagtcaagatcatcaaaatatgatttgtgcgttacctctttatcatatttttgcttttcaactttctatgatttctcagtatgtaggttttgcttgtgtattaattttaaatccaagagatactgcaagcctgatagaggaaatggttaagcaccctcctgtattatttccttcagtaaatacattaaccaatgctttaatcaatcatgaaaatattaaattagtagattttagtcatttaaaattatcaagtagcggaggaatggccacattgccatcaactgcaaaagcttggtatgaattaacaaataaacctctattagaaggttatggtttatctgaaacttcaccggttgtcacgattaatccaccgactcttaaagagttcacaggaaaaataggtatacctttaccctccactgagattgcgattcttgacgataatggacatgaggttccattaaaccaagagggagaaattgcggttaaaggtccccaagtgatgaagggatactggaaccgtcccgaagaaactgcgaatgtgatgacaaataatggttttttccgtactggtgatataggtgtaatggattcagatggtttcacaaaaattgtagatcgcaaaaaagatatgattttagtatctggctttaatgtttatcctaatgaaatagaagaagttgttagtagacatcctaaagttctagaagcagcagcgattggcgtcaaggatgaaaaaagtggagaagtacccaagctattcattgtaaaaaaagaaaatgatttgactgaaaatgatattttcacatttatttcagataaattaacagcatacaagcaacctaaatatattgaatttttaagtgaactacctaaatcaaatgtgggtaaaattttacgtaaagagttgagataa

SEQ ID NO: 55848 - DNA, 855 bp, Acinetobacter baumannii
atgaacatccttactcaggatctccttgatttacttgagctaagagaaatcgattctttaatatttcaaggaaattgtacacaagtcttcggttcacatttatttggtggacaacttttagctcaatccttagtcgctgcagcaaaaacaacagatcgtcctgcgcactcattacatgcatattttatacaggctggcaggactgatattcctattctttatcaagtatcttacttgcaagatggttcaagttttagccgcagagaagtaaaggctttacaaaatggacagttaatttttatcgctctcatctcttttgcacattttgaacaaggccctgagttccaagtcctctctcctgtttatccttccccagactccttacaactagagcagcatcataagttacaagtgattgaacaagtcccagacaattataaatcaatatttatgcaaccttttcaattagaaattaagccaattgaatttttaggttttaaagcagaaagtaagtcctcttcttatgcagaatattttcgtacttatgacaaattaatattaaatatagactctgtgattttacatcaagctattatggcctattattccgattacaacctactttccatttctcttttaaatcatggaattagctacttcgatgataaaattaaagccataagtttagatcatattattttttttcatcatgactttagagttgatgaatggtctctttatgatttaagtacaaacattagttcacaagcaagaagcttgaactacggtaaagtatggcagaacaataaactcgtctgcagtactgttcaagaatgcttattacgaacgatttaa

SEQ ID NO: 55849 - DNA, 1422 bp, Acinetobacter baumannii
atgcgtaaatatacaggattttacattgatggtaagtggttggatgaacaaggtacatctaacattgaagtaattaacccatctactggtgaagttgctggtgttatttctgaaggtaccgaaaaacaagttaataatgccgtagaagctgcaaaatgtgcctttgtcagtttttcacaaacttcagtcaatgaacggcttgaacttttaaaagcaattacgaatgaatataaacaacgtgaagctgaaatagcggctgcaattagtgaagaaatgggggctcctgattggcttgctagtcaatatcaggcagcgatgggcttagctcatttaaatactaccattgaagccctgtcaaagtttccttttgaagagcaaaaaggtactactcgtatattaagagagcctataggggtatgtgggtttattactccatggaattggcctatcaatcaagtggttgtaaaagttttgccggctttggctactggctgcacaatggtattaaagcccgctgctcaaaccccattttctgcatggcttctaacagagatttttgataaagctggtgtacctgcaggcgtctttaatctagtaaacgggcatggtggtaaagttggttcagctttatcatgtcatccagatatagacatgattagctttacaggctctactggcgcaggaatttctgtggctgtagatgctgctcctacggtaaaacgtgttcatcaagaattaggcggaaaatctgccaatattatattagatgacgctgatatcgctcaggccgtagataatggtgtcaaagcaattatgatgaatacaggccagacctgtactgctccaaccagaatgcttattcatgaatcaaaatatgaagaagctgtggaacaggctcgtaaaacggcagaaattattactgtgggggttccatctagtaattcttatatggggccactttcatctaaaaaacaatttgatactgttcaaaaatatattcaaattggtattgatgaaggtgcaaaaattgttgcaggtggtctgggttctcctaaagggctagaaaaaggtttctttgctaaaccgactatttttgcgaatgtaacgaattctatgagaattgctcaggaagagatctttggaccagtacttgtcatgattccttattctaacgaggaggaggcgatcgcaattgccaatgactctccttttggtttagcaggttatgtacaaagtagttccatagaacgtgctcgaaaagttgcatcgaaaattcgggcgggacaaatctatttaaattatgctccgttagattttgaagctccttttggtggttataaacaatctggaaatggtcgagaatggggagaacaagcactgtatgaatttgttgaaataaaggcagtcgttggctttggataa

SEQ ID NO: 55850 - DNA, 1320 bp, Acinetobacter baumannii
atgccttatgttcgaaagatttatgtaaattacactgactgtactacaagacgagtacaaactttaccatcgattcttactgaaaaaggtgtagtgatttctcacctaaggtatttggcgtggttcaactcaaaaagtgaggcttggaaagaacgttcaagttttgctttgcaacttttattgaaatatatcaatgctgtaccaaatattgaaagtgccacgatactactcaaatcatttacagaatccttagtcacagggacaattaattataaaacccttaccgatcctctcggtctttattggcggcctagaacaatcactgacactaacaacttattatttcacattacgcactatactgactttttagctctacaagatgaatataaacttccaagagctaacccttttcgtaaagcaaccagttatgaggaacgccttaattggtgtgcttattaccacaaacaagcgaatgtattccttagccatttaacgaataaagacaaagccaatatcacccaacaacaagtacgtttggttggttcattaccagaaaatcaattcgatacagaatatgcaatccgttttccagaaaaccaaatcgagaaacttctctatttaggttttgagaaaaatgggctattcgactataaatcacaagctataacaatgcttatgaattatggtggattaagaaaaagcgaggtttttcatctttttatttctgatattactttacatccgaaacattctaaagaagctttggttcgtgtttatcatccaattataggaagttctcctgatcctaattatagaaatagacaagagtatcttctttctaaaaccttatataagccaagaaatacttactcattttctgaacgactatactcaggctggaagacacctttattaacttctaaagatggctactttgaagtactttttaatccacctgaaaaagcacaagaatttctagcagtttggataaactacttaaaatatcaacgtgttgagccacccaaaagtaacccccatccttttgcatttactaatagcttaggggcaccagaaacaattaaaaacttccaaagacttcataaaaatgcagtagaacggatcggcctagaatgtaaaaaagaacttggtacaagtgaacatggccatcgacatgcttatggcttcagggctagaacagcgggtctagatcaaatagcaatccaaaaagcaatgcatcataaaagtcctatctcctgtttagtctatatcaaaccaacactggaagaagtccaagaaaaattaagaggtataaaatga

SEQ ID NO: 55851 - DNA, 2757 bp, Acinetobacter baumannii
atgataaaacactctaatctaagaaacattagtgagctagaatctagaacctcttattcccccttcccagattttgtagacttgaaaaaaacttgtaagcaattaggcataacaaattcagttagttataaaagaaattatcgccaacacaatttacctgcacatcccgaacgtatttatgatgagtggataagttataaggacttttttgatattccagaatttattgcttatggagatttaaagaaaattattcataaacaaaacttaaagaatgcaaaagaatataaagacttcgtaaacaaacaaaatgattcatcaataccacttgatccacaaggtagctataaagatgaatgggaaaattggtttaaatttttagggaaggaagaaccatttaaacccgattttatttcttctgaatatcatgagtgggctattaaaataattgaatttatgaaagtagctcgaggtggcggtacaaaagaaagtcatttatgtcgatttgtacgcctatatatagaaagatttgataaaagtaaatctccttatacttttcttattcaaaaaaaattcgatgtaaaacccttccgaaatattcttgaaaatttcggatctgatcatatgagaagaaaactcataattgcggtaaatgagtttcttgattatatcattaataatgacctaaccattgaagacgaagatacaggagaaattgtacgcgttgataacgctcgtaatccctttactctattactagctcaacagaatatttcatcttcctctttgcgctctgaaacaactaaaccttgcttacagtatcattttgttaaaaaagtccagaattggatcattcccacagcggcaaaaaactttagagatcttagccatttacagaaatttgatgctgattgggttaagattaattccaattttattgatcctaatgacaaagattgcgtctacaaaagaatagatgatcaatactatttatggtgtccaattgactggatacatacatatgctttaacaaaggtaccattacgaggtagacaaattgcttataatgactctggtgaggccgataagtacattgctgatctcaatgaacataatcaaatcatttggatagaaaatccgtcactatttgctggcttgactaaagagcaatcctttataaaacgtatgccaaatgggcaattgggtatgtttactactaccaataagactaataataatggtttaggctataccgttccttggattccagaagatcttgcatattggttaataaaattaagaaaatggcaacaaagatataatgctattaaggcacccagcccatggttagattgccagcgaaccaatttaaatgagttacaaagaaaatctaaaggtgtaaattgctttttatttagaagatttggcgattttgaaccggcagcagtgtcgaatgcattaacacctcgattagcaactgctctttactatatacaacctactaaccttaacttatcaactcttgaaggtaatcctgcaacaataggcgcatataaatcaaagtataccccacatagtatgcgtgtaagcctcataacagcatatgtaatagagatgggcatgcctatcgagatagttatgaaaattgttgggcatagttcagtaattatgtcgatttattattgcaaactttcccaacaagatataaggacgagactagaagaaagtgaaaaaattattttaaagggtgaagcagaagcaattcaacacacaattgaacagaacaaaattgaagatatcaaaaatcaactagttggtagcaacgctgaactattacaagcattaaataatgatataccttctggaaattatatttttagagactatggtatttgtccttttgcagcttcaagatgccaagacggtggagagttaattcaaagtagctcattctatactcctacccctcaaggttatttaggtatacaaaactgtattagatgcagacattttattactggaccagcattcttagggggacttctagcgattgcaaatgaaattttactgcaagcaaataaccaatcagatgcatgtagccaattacagaaaaaagttactgtattaaatgatgaaattaataaattagagcaagaagaatatatagcgaatcttaaacaacaagagttctttggtaaaacacaccgctctaagcttgaaactgaattacgtaattttgaatcagaatatgagttaacagcaaaaaaattagatatgttgttatgtgatatccaagctatatatggacatataactcgttgtcacaacttaataaatagtattcctttaaatccaagcacaaatgagttaactcttattaagatgcgagacgcagaacttattattgaaatggaggaagtccatcattatcaacaacttcaggaagtctgtgaaaatgcagtaatctataaatcatgtaatgctgaccaggcaatttatccaagaacgcaattgattgatagaatggctatatttaatgaaattatgcctagtctttttaccctaactaaagaacagcaactcatggctggaaaccaaatttttaaattattaataagcagattaaaaacttgggataaagtacagcaagtaatagactgccatatcaaattcactgaattagcagatactgagcaaatttcaaagtcagatattgaacttatcatggcgaattcaaagaactttattgagggctaa

SEQ ID NO: 55852 - DNA, 612 bp, Acinetobacter baumannii
atgagtcctgaagaactacttaaacatttaaaaagtgatgcttcaagcaaaatacagcaatcactgacagctatttatgatatttgcatggaacaacaagaacgtggaatatatgacttttctatttctacaattgcaaaattaggatacaaacgtggagttccccaagcacaaagtatccgtaataaaacaggtgaaaaataccgtgctttgattcaatcgtttgtggattccacatctaacaataaaaagtttaaaaaactttctaaacaagaagctgattggatttccgaagttgaaaatcctaaacatcaattattaattagaatcatggcctcagagttaaaagaagcacaacagatgctccgagaaattattcccccaaaacaaagaattgatatttatgatcataagcatatgatatgtgaccaatcatttaaattaactgaccaagaagttcgatctttgcaatatttactatcatctgactttcagaaaaggtggaatttgaaacccacagaatatggagccttagtagatgaaaagaatctgcctgtgtttaaggtagcaactctagatgcattgcgtaaagctttggaatatttatcatga

SEQ ID NO: 55853 - DNA, 468 bp, Acinetobacter baumannii
atgaaccgtaaattattaactgctgaaggatatcaacgtttacaagatgaacttaatgacttagttcgtaaggaacgtcctgagattacaaaaattgtatcttgggcagcaagtttaggcgatcggtcagagaatgcagactaccactacaacaaaagaaaattacgagaaattgatcgcagaattagatatctaaccaaactatttgaagtcgcgcataaagttgaatatagccctgaacaagatgggaaagcatactttggggcatgggttgagttagaaaatgatgaaggcgaaacaattaaatttcgtatcgttggagatgaggaaatttatggtcgtaaagactatatttctctccaatcccctattgcgaaagcctgtttgggtaagtctgtaaatgacgaggttcgggtactgacacccacagggttaaaaaactggtatattattaacattaattattaa

SEQ ID NO: 55854 - DNA, 870 bp, Acinetobacter baumannii
atggtggtagagcaagtgaataaaattaaaaaaaatgtaactgtgcgttttttttcgatcgaaacctctcagtccttttttaagaattttattgctaactatttagttagttataaaagtgacctgcactcaagaatttttactattaaacatactaaacatttagtaaaaacagtatcaagtgatagcaaaaaattttttttaacagttgtaaaagagcgaaatacatggcaggcgaaagctacacgtgatggatcaatttctagtctttcattaaaccaaggaatgatcggagatccctactatttttgtgtattgcctgataaaaaaataatatttggtttcacaactgggcctattggtagtttaaaaagtgttgccaaatttgctctggaacaattcaattccgataggttgacgaaattaaatttatcgttaattcctaaagaaaaagaattttcccgactacttgaattaactaattttaatagtcttcattttaagattaactcttcatctttagtagacttaacagaagatgctccccagctaattaaaaatttaggagcagctccttacatagaaaataatattcaactttccttagacttagaatgcagtgaagatcccgaaagtatattaacccaggaaagtttaattgaaattgttaactatctttcagatagtgaaacatgctcagtcttaaaagttaaaggtataaataaagatggtaaaaaagttaatctagatttcggtaatgcatttataaattacaagaccgaaatttcaactagaaataactatattgatgaaagcacagcatctaatatcttaaatgctgcactagaaatagcggatgatatcaactag

SEQ ID NO: 55855 - DNA, 1332 bp, Acinetobacter baumannii
atggtggattttgttgcaccattagagcttgaagaagctgcagactatattgaaaagtttattcatgaagaatttagtttagctgaagcattaagaaaaggcgtagcctttcattatggccctcttccaagctctgtaagagtgatgattgaaagattagctaaagaagatttaattaaatatatagcttgtacaagtacattggctgaaggtgttaatttacccgcaaaaaaccttttcttaaagaatccattacaccaaaatatcggtagagagtctgaaagattagaagatgttaaaattaataatataaccggtcgcgctggaagaatgattgagcatttctctggaaatatttttttaattgaacccgaagagtggaggtttcaagattattttgaggaagatagagatgaaagttataaaataccaacttattatcgaactttaaatgaaagttttcaggatgtaataactgctctttctggagggtattcacattcaaatgaagatcaatatagtttatatacaattgctaataaacttattaaggacttcacaaatgaaaatttatcttcaactctcgattcaaaagatcttaaattatctaaatctgaattagatagcctaatctctgctgttaaggaagctagtaataatcttaatgttgctccttatcttttacagactaatccaacaattggttatattcaacaaaataaactatataactttttgaaaggattggaacgtttagatgagtggttgataccccatccaaaatctcctagtttatatgaaaagttagtatctattatttataagttagaggaactaggtgtatatgtaattagtgatagttataatattgaatttattgttactattgcatataaatggatatctggaaaaagcttaaaagaaataatatcagagcagataagatggggtaacgataatttagatgagaagccgagtattaatacttcagtaagaaatgtaattaaagttattaataataatattagatttagattggctaatgcattaagttgttatcatcttttgctatctaaccaattggaattgagagaaattgataaacaaagtattaaaattcatacctatcttgagataggtgcttgtgatgaaaggatgatgaatttaattaaaataggcttatcaagagaagcagctaaagaagttgatgataaacttgaggggaatatagtgatagataatatttacgatttgattgaactgttagatagtggtgagttagataatgtgcatcctataacaaaaaaagaaatcaaatatatatctagttga

SEQ ID NO: 55856 - DNA, 1164 bp, Acinetobacter baumannii
atgaaaataacagtagttggtacaggctacgtgggtttatcaaatgcgatgttgttttctaaacagcatgaagtgactgccctcgatattgatgccacaaaaattgataaacttaatcaaggcatatctcctattcatgacgaccttattcaagagtatttgattgataattcaaattttaaagcaacattagataaacaatctgcatatatggatgcggaagttattatcattgccacacccaccaattacgatgaagcaagcaattatttcgacactagctcgattgaatctgtgcttgaagatttaagtcatttgaaaagcaatgctattattgtggtgaaatctacaattcctgtgggttttactgagcgcatgaaggtaatgtatccgacattgaaaattgttttttctccggaattcctgcgtgagggtaaagcactatatgacaacttgtatccatcacggattgtggtgggtagtacttcagaagtgggtaaattagttggtcagctatttaaaaatgctagtttaagacctgatgtagatgtactacaaatggatgcaacagaagctgaagcagtaaaactcttttctaacacttatttggcaatgcgtgtcgcctattttaatgagttagattcatattgtgcatcacgtgggctaaactcaaaagatattattcaggctgtaggattagatccacgtattggagcacattataacaatccgtcgtttgggtatggtggttattgtttaccaaaagacacaaagcaactgctagctaattatcaagatgtcccacaaaatttgattggagcaattattcagtcaaatacaacacgaaaagattttattgccgagcagattttggcaagaaagccaaaagtggttggtgtatatcgtttagtaatgaaacaaggttcagataactttagacaatctgcaattcaaggtgtaatgaagcgtctaaaagccaaaggcgtagaagtcattgtgtttgagccgagtttaaatgagtcaacattttttaactcacgtgtgttgaccgattttgatagttttaaacaagagtcggatgtaattattgcaaaccgtatggtgagtgagctcgaagacgtcattgacaaagtttatactcgtgatttatttggtgaaaattaa

SEQ ID NO: 55857 - DNA, 1068 bp, Acinetobacter baumannii
atgaaaattttaattactggtggcgctggttttattggttcagcggtcgttcgtcatattatccagaatacagaagatgaagtattaaatgtcgataaactgacctatgcaggaaatttagaatctttaatttctgtggaaaataatccacgttatcagttttctcaaacagacatctgtgatcgtgctgctttagataagttatttgaaacattccagccagatgcagttatgcaccttgctgcagagtctcatgtggatcgctctattactggtccttatgcttttatcgagactaacgtgattggtacttatcaaatgttggaggcgagccgtgcttactggttaagtctaagtgatgaaaagaaagcagctttccgttttcaccacatttcaaccgatgaagtttatggcgatttagaaggaactaccgacttatttactgaaactacatcatactcgccaagctcaccatattcagcaagtaaagcaagttcagatcatttagttcgagcatggaatcgtacgtatggtttgccagtgttagtaactaactgttcaaataactatggcccattccatttccctgaaaaacttatcccactcatgattttaaatgccctacaaggcaaatcattgccagtatatggcaatggtcaacaaattcgtgactggttgtttgtagaagatcatgcacgtgcgctttatacagtggttacgcaaggtactgtaggtgaaacatataatattggtggacataacgaaaaagctaaccttgatgttgtacatgcaatttgtgatctacttgaagaacttgcaccacataaaccggaaggtgtagcacagtataaagatctgattacatatgtgaaagatcgtccaggccatgacgtgcgttatgcaattgatgcgaccaaaattaaagaagaactcaactgggtaccgaaagagtcatttgaaactggtttacgtaaaacagttgaatggtatttaaataacaaagagtgggttgaacacgtccaaagtggtgaataccaatcttggttaaacaagcaatatcaaggataa

SEQ ID NO: 55858 - DNA, 894 bp, Acinetobacter baumannii
atgaaaatcttattgcttggaaaaaatggacaagtggggtgggagctgcaacgcgcgcttgcacctttaggtgatgtcattgctttagatcgtcatggtttagatagcttgtctggtgatatgacccaaccacaggcgatttatgacacgattttggcagtacagccagatgttgttgtcaatgcttctgcatatacagcagttgatttggcagaaactgagcaagaactagctgatattatcaatcaccaaactgtaaaagcggcagcagaagcctgtcagaaaacaaatgctttattggtgcattattcaacagactatgtttttgaaggtacaggaacgaccgcttttgttgaaactgatgcaattgcgccattaaacgtttatggaaaaaccaaagcattgggtgagcaagcgattgtagatagtggctgccgttatttgatctttagaacctcatgggtgtacgcttcaagagcaaaaaatttcttgaaaaccatgttaagtctagctcagcaacgtgaagagttgtctattattgatgaccagattggtgcaccaacttcagcggagttgattgcagatatcactgcacatgctattccccaaacaatagtggacgcaaacaaagtcggcatttatcacttggtggcaagtggtgagacttcttggtttggttatgcaaactacgcctttacacaagcacgtactttggggcaagagttggcgatacaaaaggttaatcctattccaacaagtgcttacccaacgcctgcaacacgaccacacaattcacgattagataatcagaaaatacaacgcactttcggcctcactctaccagtctggcaagaaggtgttaaacgagcattaacggagcttttaaacaaatga

SEQ ID NO: 55859 - DNA, 645 bp, Acinetobacter baumannii
atgagtaaattagatttaagacgtttgaatgggcaatatctaaaagctactggagttgacttctcctattccaatttaagtaatgcattattacttaattcagagttaaatatgtctagatttcaaagtgccattttaattgacactgactttacaaatagcaaccttctttatgcaaactttaaagagtctgatacaagattttcatcttttaataaaagcacattacaaggtgcaatattaaataatgcagattttacagcctcaagctttcaagatacttcattttattatgcagaaatgaaaaactcattttttaatcaatcaaactttttacatgctaaactcaccaaggctaatataagtaattcagattttttagatgctaaaaaccttctacagtctacaattgatgaagcttgtatcgaatataattctccggctaagttaccaaaaggagtgaaacagcctcctaacatatgtgaagataaaacagttcgagcggcatttcgtgcaaccgttggtgctattggaataataacaacattaaagggttattgtaaaagtggtgaaattatttttagaccaccagattcaaaagtaatgcctgaaaataatgatacattttacataggaaatgaataa

SEQ ID NO: 55860 - DNA, 1530 bp, Acinetobacter baumannii
atggaagagttagaacaaaataaaatatttttgagagatttaattacagatgggattgggacgattagtcctattgagccttgtcgaactctaaaagtgataatgtccattccagaagagattccttttaaattttctagagatgaacgctatgaaatttatagaaatttaatacaggattatcctgttctagaaaatttttatgataaaaagtttaggggactaaaagactctcttacacaagatgaacagaatactttagaggggttattaaagtggctaacagaagagctgcgtgtttgggatgaaactgaggataaaaatgccaaacgattagcactgatttttatcatttctaatattctgattgaaaatatgtgggacctaatcccatttaatgtaataaataatcctaagataaataattttttagaggggagagttgataggtttcaacgcaatattgtaatccctcaacaacagcaagtgcctatctgggaaaaagaagcagctcagcaatacatagaagcgattaaggagagagattggcaacacttggctaataattggcatatttggggaaattctccaagattagagcaggccaacacttttcaatatcaaatatttttatttctgttgaattactctccagaacaactaataagtgctactgaacaatatgaagactttattagtcttatgctcatttgtagagagcatagtttttctttacttcaacgtttccaattggctttagagtcaacaaatgagctttttagatttgccttacttttttcattagaactcaataatgatcaatataatggtttaacagatgaggaagctgattgttttgcacaaattctgcagaaaattggaagtaatagtgatcagttaaagcattggttgataatatttaatcgttatccagttagatttccaattttagcagaaggatttggagtttatgtggttaagtatgcttctgaagcagatatagatttatatttggaaactataaaagttgaagctattaatccacaacatggttatcatgatactagacaaattctaggtaagacctttcaaaaaatagcagaattcgctgaatgtgatgtcagaaaactattctggagtaagtgttattgtaaatggttagcttggaattttggtcaggtagaagagcattatcatttaagtacagtgcatttaagtaatatagattatgccttggtgggttattttattgaatgccaagaacaaggtgatagagaagaagtagtccagaatattttaaaagatatcgatagtatttttacaaaaaattggtacggctcacaaagtggcattacaacagagttttataatctcttgtctaaattacagcctgtttgttatgctagtgaggttggcgaagatggactaacttcatggttaatgaaacctgagagatcgtatcatcctactaaatttcaaacagatgaaagatatagggttgccttcgctcttagagatattgaacaataa

SEQ ID NO: 55861 - DNA, 1614 bp, Acinetobacter baumannii
atgctggatgcttcacactatataaattctatatttgaattattaaagcctaatatcattggtttctataatcagtttgagattataactatttttgcgatacctaaatcgaatggaacgtctgagccttttaatgttttgactgtagttgtcgctcaagaagaattaacgaaagagcttcagcaagaaattttattaaatccaaaaccattaagaataccaggtttaaaagatctttcttttggaatagtaaaatattcaatagatgtagaagaaacaagagcccttttgatgagtttagctcaaaataatgtatgggctgcgaatcaaaaggatttattattctcaaacagccttgatttaattcctagaatatttgtcccacctgatgctacagaagaagtaccacttaacaaagtactaaaaaataatttttggagtggttcacatgtttttgagtggtttgatacaacaaaagataatttcaaagttttcttcgatcggcctgatttattgcaacagttatctgaagaaattcagaaatttataccaattaaattagcaagtgtatcagaccgactaggtaatcttatcgttcaattgccagtcaccattgctatcacggacttgcatcatacaaaacaaggtaatgcattaactttaaaaatagcttggcatcctaaatcatcttcggaaggtaaaaatctagtttttaattgcattcgcttggatgatagaacatgccaagatttctactcttgtcgagttgagactaacgaagtaattattcctatgatgcatgagagaggtgtgcatcgatactacttatgggacgatgatacaaaaattctaatagcagcttcagcaaaaagttcctttattcacgaattttcaatgaatagtgcaatgattgagcatgaacctagaagtttttatatcaaaaagagcagcacagatagagaactaattcgtatcagtattagtacaaatcaatcatttaatataagtgctaatagcgatgaatcgaagatatcaaaccgtacatggacttcgcagcggttatatgagcatgaaaaagcggatttgttaaagcagaagaagttgattcaatacaatcgtaatcagtctgctaatgcatatgatgatcttagagcacttattcaacgtcatggacaagagtcaatttatctctgggatccttatttatcacctcaagatattttacgaactttattttattgttcacattctaattcaaatttgaaagctatcacaggattggagcttccaccagatactgataggcaaacaaaaatagatgtaatgaggagttatggtcaagagctagaagctagttgtgaaaataagtttggtctgaacttggaatttagagctaagtttgaacagtacggctggtcattccatgatcggttcattatttttcctaaaactactattggacctagagcttggtcattaggcacttctgtaaatagtttaggtaaggctcatcatatttttcaggaggtatctgatggacgtctaattgctgatgcatttgaaagtttatggactactttagatcatcaggagtgtttagtatggaagagttag

SEQ ID NO: 55862 - DNA, 498 bp, Acinetobacter baumannii
atgagcgaaattgcaccttccattatccagataaagccatacattcaaaaaagttttgttttatctgaagttatgtctatcaagctagttgtaccatcaactcacatgcttgtcccttatgctttagaaaagatttccgctggtttcccctcgccagcacaagattatgtcgataaagcgctcgatatgaatgagcacttaatcaaaaacgcaacttcaacgtttattgtcaaagttgcatcactatcaatgctcaatgcaggtatagatattgatgacgaattgattgtggatcgtagtcttgaagcaaagcacggcgatattgtcgttgcactaatcgataatgaatttaccgtaaagcgattaatgatcgatgaaaagggaaaatggctaaaagctgaaaatccggattataaaaatatttatctacaagaaggccaagagttgtttatctggggagttgtcacctgcgtaattaaaatgataagaaaatcatga

SEQ ID NO: 55863 - DNA, 636 bp, Acinetobacter baumannii
atgtgcgccaactacgaacctatatccaaagaccgggtacacctactagatctgttcgaaccaacattcgactataagaatgatgtttatccgggttatgactgccctcttattttttccaaagatgggaatattgaatggcgccaagttaagtttggcatgatcccaccttggaaccatgatttaaaattttctaaatatacttacaacgctagaacagaaactgtagataaaaagccaagctttagacatgcatgggctaaaagccagtttgcgttaatacccgtagaaaaaatttatgagcctaggtatgtgaatggtaaagcggaaagatggggaatttatcgagaagacggcttaccttttacagtagctgctatttacgattcgactgtaattgatgggcagcaagttagatcaatgtctatgctgactatcaatgcagaccaccacccttttatgtcacagttccataagcctgaagatgaaaagagatctatcatcgtcattcctgaagaatatcgagaagattggttgaactgcaaaaaagaggatgctgatcagtttttctttgagatgcccctaggtgaatttactgccgaatattttcctaaaccaacaaaatcagccaattaa

SEQ ID NO: 55864 - DNA, 720 bp, Acinetobacter baumannii
atgttaaacaaaaaacttatcattgtttttttaagctttacagcaacttcaccattagttcaagcagttgaaattaataaggatttaaatctaaatttcactgctacggctatgtcagaatatcgccgttcaggttttgatctgagcgatggtaaacctatagtacagggggtggtatctctcgctcataaatcagggtgggatatttctgcacaaatttctaattatgatgtagttgttgtaccagcaaaatatgaaatagcttacacggcaggttattttcatgcctttaatgaaaaagtatatgtttactcctcgttaggtcaaactatctatcccaattgggctgatggcaacgtaactgaatggtttatcagtgcgaatgcttatggagctttttttaattacttttatgattgggggaagaactcaaatgctcaatatcgttatataggttataaatataatttccctaatgatgtctggcttgatatgcgttatggctataatgatctaggtatgcaattaagaaatgaggatggtgatatccgtcataattacagtactcgtaaggtagagttaggaaaaaaatataatgatattaattatacactctcttatgttgataccgatttaacaaattcagaatgtacacaaatcatggcttatggagataaatgttcatccactgtagtatttggcataaaaaagactttttaa

SEQ ID NO: 55865 - DNA, 1377 bp, Acinetobacter baumannii
atgagtcattcaggcccaataaataataatggtgcccaacttcttgctcgcttagatcgtttaccggttatggggatgcactacttttgggcattattgcttgcaatcaatttaatgttggaatattacgataatgcaatttttgcatatgcttctccaaccatcaaagctcatacaaattatagtacagaacaaattggtcttataggaagtatgttttttgtgggtatgattattggagccttaattggtggaagattatctgacaaatttggacgacgctccattatggtgtgggctactcttctctactcattcggctcacttctgaccgccctttcacccaactatgaaataatgctgttttcaagaacaatcacaggagtcggcgtacaggcagcaacttcagttttgctcgtatatgtgtctgaaatgtttcctagtaatactcgtggtcgttttatgtctgtggtcacaatcggtttcgcattttcagctgtagccgcttccgctttagcattgttctatttacccaacagtggtgataatgcttggcgtcatcttttttatgtcggcagtattggatttctcattgctccttttatgcgtttttatattcctgaatctgtgcgttggtacattgccagaaaaaaatatcagcaagcagaaacacttattagtcaatttgagagacaagcgatattaaaaaataaaatattagaaacgccgaatatttcatttgtagaacattataaagaagcgaaactttctgatctcttcaccaataaagccgttgttcttactattattgtaatgggtatcgggtatttcggctcaacattagcatactacttatttggcaattgggcggtctattcttttgtctatggtttaaattattccgaagaaaaagcttactatattttctttatatggaacgtgatctactgcgtaactccatttataaccatgtatatacttgatcgttttgaacgcaaatcgttaattttagcaatgtccgtattaacgactatcccactgattgtactaggaatatcaaatataatgtgggaattaattgttgctggcggtattgcttgcatagtgacaggtatcattattagtgggtactacacttatattcctgaatcattgcctacaaaattacgcgcattaggaagtggaattattatctccattggccgctttggaggtgccgtctctggagtcctaggtgcttggttatttacccacggcggtatacaaggagttatgttcactgccgcagcattgtatattctattcgccattcctgtgatgttatatggccccctcaccactaaccgctctcttgaaatagtcaacagtaaagaataa

SEQ ID NO: 55866 - DNA, 408 bp, Acinetobacter baumannii
atgcaaaaacaattaattaatcccggtttacgcaaagagaaacactacgatccatttcatttttcagctgctgtacgtgtaggcaatatgatttgggtttcgggatgtgtaggtgaaaatcttgaaactggtgttctagaaccatctatggaaaaacaagcccgtcagacttttgagaatataaaagaagtgctcaatgctgctggcgcaaaaatgagtgacatcgtggaaatcatcacatttcatacagatcaaagaggagaaattgccgaatttatgtccgtaaaagatgagtatttgccagagaattatcctgcttggacaagtataggtgtatctcaactagctcggccagaattcaaaatcgaaatacgtgtagtagcggtgattggctgtggagatgaatga

SEQ ID NO: 55867 - DNA, 843 bp, Acinetobacter baumannii
atggaaattaagcctaccaaaagtcagatagacgcttttcgtaatgacggagcttttctttttgaaaattgccttactgaaaagcaactttcagactgctacgaaatatttaaatggaatatggctcatccggggccaagtaattttcgtgctttagatggtaccaaacttcaaacccatatagataatgcaaatccattatctaaagataagttagataatttagtaaaaaccttgcctttcggtaagatttttcaagaactttggggatctgaaaatgtttggtatttcgctgaagaaatttttgcaaaggaaaatggtaacagcggtcgaggaccttggcatcaagacacagccaaccttccatgggctggcaaacattggggtaatgcttggattacttttcaatcactacccaagaaaaactgtttagaagtcattcgtggatctcataatggtatccaatatgatggttcaagtttcagcaatccagacgatccaacagagccattatggggtgatggaacttaccctcgcttaccacatattgatgaagaactatcaaaagatccaaatgcttacgatgttttatcatgggatttaaaaccaagagatgttgtgattcttcatccaagagcattacatggcggagctcctgtcgacgaacagtgtccaactagacatacattagttttacgtttctttggcgatgatgctacgtttcgttgtttacctacttcaaatccaagccatgcacgtaatggatttctttttagagaagaaatggaaaaactgaatgaaggagatctgtttagatcaccaatttttcagaaaattgcttaa

SEQ ID NO: 55868 - DNA, 3333 bp, Acinetobacter baumannii
atggatttagatgagactaatagattttcatattatataaaaaatgacttatcgcaaattacagaacaaattcttcctatttttgatatttattatacaggacaaaagggtaagtactatttttataatcttgtagaagctttaaattatggccatggatatgcaggaagtgatattgcttatggtggtcaaggaaatgacattatcttggggtcatctgataaagattttttatatggtggggaaggagatgatgctatttatggaatggatggtggtgattatctatatggaggagagaataacgatatcgtatatggcggggatgggagtgatgatcttactggtggcaatggaaatgataatcttgttggtggacttgaaagagatatcatctatggcggtgaaggtgatgacaacattcaagctgatttagagaatttgagagatatatctgctccaccaattgaatctactaattataaccgttttggtaatgacttggtttatgggggtgtgggaaacgataagatctggggaaatctaggcaatgatgaaatttttggtgatgaaggtgatgatgaaatttcgggagatcatctaaccttagatgggcaatatcatggagatgataagttatttggagggaatggggatgataaactatggggtgatggcgggaaagatataatcgaaggtgagaaagggaatgataaaatttcaggagataatatttcattagatggtagataccataatgaagacattctatatggtggagatggtgaagatgcgatttggggagatggaagttcagatactatttatggaggaaatggagatgatgaaattgcaggagatgattctggtttagatgggcaatatcatggtggtgataaaatttatggaggcgatggaaaggataagatttgggggcaaggtgatgaagattatatttatggaggagatggagatgatgtaattgcaggagatgagtctagtttagatggacaatatcatggtgatgataatatttatggaggtaatgataatgatgagatcaatggggatggtggtaatgatcaaatctatggagatgacggtaatgatagaatctcaggagataattcagctttagatcatcaatatcatggaaacgatcaaatctatggaggtttaggagatgatcttttatggggaaatgggggggcagatactatttatggaggagttggtagtgattatatagaaggagataatagtcagttagatgctcaatatcatggtgatgatacactttatggtgatgttgggaatgataatattcgtggtgatggaggtacagatatattatatggtggtgatggagatgattatctggtaggtgatggtactaataatcatacattcgatggtaatgatcaactttatggtggtaatggaaaagatagtttatctggttttgatggtaatgatattttagatggcggagctggagatgatatcatttttggtggaaaaggtgatgacacttttataagtaatcaagggaatgatcaattatctggaggtgagggaaatgatacataccatattcaagtaagagattcggaagttaaaattttagatagttctggagaaaaccacttttatttagaaggaaattttaatctttcaaatataaatatctatcattataagaatgcggttagtcttattagtccaacaacaagtcaagatcctgatgctgttttaccccagtttaaattaactttttttgatgatagtgaaactcaaccaacaattgatgggggaattatcacagatgaatatggaaacaacgttacgggcggttacaatcaatatcttcattttagtcgcaatgaatataatgtaaatacaaatttaaataatactattcagaatgactatgtgattcatatcgatacctatttaaaagaacgtgaaggactaagttataaagttttgaatgggtcttggcatggtgttcaaggattatatttaatttttactaatagttatattaaagatgataatttaatttatcaaaattctgatttaagtgacattgttgatattcaacagattagaaataatgttatttcatatggacaatatcaggctaatgaatatcacttgttaggtggtaatgaccaaactactggctctgagagtgaggatattgtttatggtgggattggcgatgatactatcaaaggccttagtggttcagatcagctctttggcgatgtagggaatgatagattagagggggatactggcaatgactttattagcggtggcactggtaatgatcagctttttggtggtgaaggtgacgatcagttagaaggtggtgatggaaatgacattattgaaggtggtgagggcaatgatattattaaaggaggtattggcagtaatcagcttttcggtggtgctggtgaagatcatttagaaggtggggatgatgatgactatttagaagctggcgatggaaatgacattatcgagggcggtactggcaatgatcaactttttggagatattggtagagatgtgctttatggcggagatggtgatgataaattatacggtggagatggtaatgatcttttaaatggaggaaaaggtaataatattttagaaggaggaaatggggaggatatctatttatttgatatatttagtcaacaaaacactatttatgatggggatgatagtatattaaagtttaatggaataagttcaaaagatgtaataattgaagtggtgaaagatgatttaaatattcattataatgaaagttcattagttacaatttctaattttatattcaaagggaatatcaaggaaattcagtttgatgacttgactttaacaaaagataaattaaatgaatcaataacaataacaaaaataggagatggtggtgataattacttgggtggctttgctgagtttaataatatcatatatggtagtgatggtagtgataatatatctggtggaaaattattaaattatctttatggtggaagtggtaatgattcatttcaagtaaattattcatactctcaatcagaatttaatttatttggtgggttaggttatgattcatacaatttaaatttaggtgcaaaaacttggattgaggatgaggactatttggggattataaatgttgattcacaaatctattttacattagtagataatgtttttattcgctcaccaaatagcagttttgctgaattgatatctataaataactgtctcttatacacatctccgagcccacgagactcctga

SEQ ID NO: 55869 - DNA, 1533 bp, Acinetobacter baumannii
atgagttcatcagatcaaactgctattactgatgttttaattattggtgcagggatcgcaggtattagtgctgcttatcatttaaagaaatatagaccaaacacaacatttaaaatattagaaggacgtgatgaaattggcgggacgtggagtttgttccgttacccgggaatccgctctgattcagatatgcaatgttttgcttttggctttaagccatggaccagtgaaagaacttttggtagtgcaaaaatgatatgcgactatctgaaagaaacaatttcagagaatgatattgaaccgcatctttgtcttgggcattctgtaacaagtgcagaattttcatcggatgaaggtatttggacaatcaaagttaaacagaaaaatcaaaaaaatatcaccactttgcattccagattcctacttatgagcacaggttattatgattacaacgctggctacactccagatttcaaaggcactgaagactttcaaggtcaaatcatccaccctcaacattggcctgaaaatctagactatacagataaaaaagtagtcgttattggtagtggcgctactgcagtgacattaattccagctatggctgaaaaagttcaacatatcactatgcttcaaagatctccgagctacttaatggctcttcctagtgtagatcctatcgctaatactttaaataaacttttttcaccaaagcgagcttttaatttaattagaggtaaaaatattaaattaagtagagcagtttataaattaagccgtcaattcccgggtgccatgcgccgcttattaattgcagatgtacgaagaaaactacctaaaggctttgatgtatctactcatttttcgccaaagtacaatccgtgggacgaacgtctctgtgtagtacccgatggagatatgtttaaagcaattacttctggaaaagcatcagttgtaactgatcatatcgataaatttaccaaagaaggtatcttactcaaatctgggaaagtattagatgccgatattattattacagctacgggtttaaatgctgtgccatttagccgcattcaattagctgtggatggtaaagcaataaactatcccgacactacgatatttaaatctatgatgttgtcagatgtacctaattttgcgttcgcatttggctataccaatcttgcatggaccttaaaaattgatcttatttggagacatttctgtaggcttttagagtacatggataagaatcaatatggaacatttacaccagtcatcagtaatcagcatatgaagcgtatacctcttattgatatgaactcaggctacattcaaagaagtattgcacaatttcctaaagctggtactgaaggtccatggactttattacaggattatgagtttgatcttgaaagacttgataagggacctgtatttgataaggaattacagtttagtcagatcacaccaaagaaaaagttgactatagttacgaacccttcctcagaagaagcgaaagcacaggcttaa

SEQ ID NO: 55870 - DNA, 924 bp, Acinetobacter baumannii
atggaaaatatcaaattcacaagtaaaggagttacatgttcagcatggtatattcctgcaagtaccgataaacatatgaactcaaaaggcagaccatgcattgtcatggcgaatggttttggcggtactaaagatacaggtttattaagttttgcagaacccttaaataaagctggttttgatacatttatttttgattatcgtggttttggagaatctggcggttatccaagacaaaatgtttcctataaagctcaacgtgaagactaccaagctgcaattagaactgtacggaatctgccttatgtagatcgaaatagaatagtactttggggtacatcttattctggtggtcatgttattactgttgcagcgcaagatcaaaaagtttcagctgttatttctatgaatccagcaacagatggtttagcagctctttttcaagttttccaatatggcggtttcaaacaattaacaactgctatagctcatggtttgaaagatcaatttagagcaattatgctacaagatccgcatactattccaattgttgggcaacctgggacggctgcaatgattagtacacctggtgcagaagaaaattataaatcaatggctggcccgacgtggcgtaatgaagtctgtgctcgagcagccttagaagtaactagaaaccgacctatctcttttgctaaaagtataaaatgtcctgctttagtacaagtaggagtcaatgatcaaattgctccacccgatgctgccagaaaaactgcaaacttaatgaaaggtcctaccgaattaattgagtatccaattgatcactttgatttttactccaacccatggcaagaaaagttacttaatgatcaaattaactttttagataaacatctaaactcagctgttaaaaataattttaattaa

SEQ ID NO: 55871 - DNA, 771 bp, Acinetobacter baumannii
atgggaaatgaaactgcgatattaacgaataagattgctcatattttattaagcttaagtagttctaaaaatggtatgcgtttaaaagatttagtacttgagacaggtattgcacatgcttctacacatcgtatattgaatgatttaattaaaattggatttgttcagcagctagagaataagatataccaacttggtcctgaaatatttactttaggactaagtgcacctgttcctatattagacctaaatactttagaggaatttgcgcaagagttggcagatgactgcggcgatttggtttgtattggattaaagcaatttaatggagtacgctatgtcgctgtttgtcaaggtgaaaatcctatttttccttacactatacataaaggtgatttgaaggcctttacggcgacttattcaggtattgcacttttagcttatttaaaagaagaagagcaaagatactggattcaaaaaccaaaattagatgctcctatagaatggatttcagaaaatcatttacatttaaggaaatctatatctgattttatagataaaatgaaaaaggataaatatatatacgctcaaaacttagtctacccaaacatcagtggaattacgacgattatcccatcccaaaatggaggagtgccatatatgacgctttctatttcagctagtacagaacgacttcaaccagaagatgcaaagaaattgataccaaaaataatgagtactgcaaataaaatgtcaaaattaatttattaa

SEQ ID NO: 55872 - DNA, 1332 bp, Acinetobacter baumannii
gtgatttatcaagaattaaaattacacttagagatagtgaaagatactattgcaaataatccaataaaatatttttttgatagaaaacatcagttgaaatctggcccaattatatttagtgcagtgagtgttttcttcagtgcttatagtcaggcttctgcacttgaacagtcggggcaatcgatattgccttttttagaagctggtaattatgcagaagcaaatgcttacgcaattgatccttctgtttcaggtgtagtccatgatcgtccagatcttggcagacctaaccagagtcgtgatacaggagatattgggcaaaataatcaattttatacagccgcattaaagttgcaactcacagaccaattcagttttggtttactttacgatcagccttttgctgcaaaaacagaatatccagttctccctaataatagttattctgatgagaccagtcgtgaaggtacatctgtaaatgtaaaaagccaaaatctaagttttattttgggttattcacctattaaaaactttcaagtttatggtggacctgtttatcaaagtgtagaaggtgatgtttcttttagaggaatggcctataccgaagcttttaatggatataatgctaaatttaaagaacagggaaagctaggttggctagtggggggaagttatcaaattccggaaattgcgcttaaagcagctgtaacttaccgttcaaaaatcaaatatgattttcaagttgatgaaaatatctttggtgagccattacaatacactgcacctgcaaaaacaaaagtcgagacacctcaatcagtaaatgtagatttccaaacaggtattgctgaaaagacgcttgcttatatgaaccttagatgggtgaattggaaaaaatttaatattcgtccagcgcaatacgatgcccttacagcaatgtatatggatgcattaacggaaggggcatataaacaaggtattgatttggattcttatcaaaaagatcaatatagtgtaacgcttgggttgggacaacagttaacagaccgttggagtattgcatctgatattggttgggattctggatctggtcatcctgcttcaacacttggaccagtaaacggtttttggtcttttgggcttggtgctcaatttaatccagcgcctaattattttattgcggctggcgtaaaatatttctggttaggggatactaaagctgaaggtggggggtacttcttaccaattgaaggtattaaagagttttcggagcaggctgagtttaaagataatcacgcaattgcatatgcattaaaatttggatatcgcttttaa

SEQ ID NO: 55873 - DNA, 1803 bp, Acinetobacter baumannii
atgccaatgtataaatcaccacttcgtgacattaattttgtattaagcgatttactcgaatttgaatcactctatgcgcaatatcctcagtcaaaagaaaaaatgacccgtgaaatagtagggccatatttagaagtagcctctgaattttgtgaaaaagaattgcatccattaaaccaaataggcgatcaacaagggtgtaagcttcaagatggagttgtcaccacgcccgatggttttaaggaggcctacaaaaaatatatagaattaggatttccctctctaacaggtaaagaagcgtttggaggacaagaattcccaggattattatggatcgccatttcagaaattttgacgtcgactaactgggcttggggaatgtattcaggcttatcccatggagcaatgtataccattgagaatcatggaacagatgagcaaaaaacaaaatttttaactcctttagtttctggagtatggaccggaaccatgtgccttactgagtcacatgcaggttcagatttaggccaaatccgaactaaagctgtcccgaatagcgatggtagttatgctattacaggggaaaaaatattcatttcagcgggtgaacatgatttatctgaaaatattattcatattgttttagcccgtttaccgaatgctccaagtggcactaagggcatatcgttatttattgtgccaaaatttaatcttgatgctgatggaaatattgatagccgtaatggagtaatctgtagctctttagaacacaaaatgggtatccatggaaatgcaacatgtgtattaaattttgaaaatgctaaaggttttttaattggtcctgaaaatcgtggcttgaattgcatgtttaccttcatgaattcagcacgagtttttacggcggtacaagggttagctgcatctgaagcttcctatcaaggtgcattggcatatgcaaaagaacggttggctatgcgttcaatatccggtcctaaatttccggatttacctgccgatccaattattgaacatcctgctgttcggaacatgcttttaacacaaaaagtttttaccgagggttctcgtgcattagcttattatctgtcgacttatgtagatattgctgaattagctacagatgagtctgaaaaaaaagtagctgaagataaattggcattactgactcctattgcaaaagcatttataacggagttgggagtagaagttgccaaacatggaatgcagatttatggtgggcatggctatatttctgaacatggaatggaacaaattgctagagatgttcgcatttcaacactctatgaagggactactgaaattcaggcaatcgatttattaatgcgtaaagtcattggttcaaagggaagcttattattcttattaactgatgaaattcagttttttatagaaaaatatcatggaaatgggggtacaggggctatgatatcgaagcttgatgtcctagttaaagaatggctcgatttatctacatttatccaaaataaatatccagaaaatctggatggaattggaggagtcgccgtagactatctatattattctggttacgtggtttttgcttatttgtgggcaaagatggcgattgtagctcaaaataaaattgaccaaggaacccaagatgagttctattctgcaaaagtttctacggcgcaattctattttgatagaattctaccgagaactttaactcattcagcgttgattaaatcaaatacagaatcattatttaaactaaattctcaatcattcaaatttgattaa

SEQ ID NO: 55874 - DNA, 387 bp, Acinetobacter baumannii
atgaatatagagcgtcatgtatacacagaagaagaagctgtagagcttcgtagggcccatactttagcaaaaagtattttggagcattcataccctcaaaatatcattgaggaagcagagaaacgatatgaagaagaacttcaaagaataattagaggagaggttacaatagaagaagttgaatctgagttactgcttaaatggaatcgaaaagtggcactccaaatgaagtttgaaaaacttgagcaagagcttaaagaagggcaagaaattcttaataactgggaaaataaagaacaaccaatgtttgagcggcataaaaactgtgtagagggaatattatgtagacttgaagatattaaaagacaattaatagaagaaagatga

SEQ ID NO: 55875 - DNA, 972 bp, Acinetobacter baumannii
atggttatacaagtcgaaaaaatcatggctgaacatgaattacatcagcgtgcagaacatgaagagcaatattcttatggaagtgcattttgtaatggacaatacgtaccaatacaagaagcttccgtgccattaatggatgcgggttttttacatgcagatgccgcatatgatgtagttactgtttctagaggtgcttttttccgtttagatgatcatttggatcgcatggaagcatcatgtcaaaaattctttcttgaaaatccgtatagtcgcgaagaggttagagaaattcttacaaacctcgttaaattaacaggtttaaaagatgcttatgtttggtgggccgtaacaagagggcctttaagcagtgcgagtagaaaaaatcctgtattgcaacaaaacgctatgttcgcttttgtatcaccatacttcttccaagcagatgatgagcgccgaacaaatggtttagaaatattaattagtaaacactacaatcgtatttctgaaaaagctgtagacccaacagctaaaaatttccattggatggacatgaaacttggtctttatgaggctcgtagtcaagacaaagattgggttgttttgactgatggtaacggttatctaactgaagctgccggtgccaatatttttgctgtaaaaaataatgaaatttatacgccagattcaggctgtttagaaggtattacccgaagaactgtgattgaattggctaatgaattaggcgtaaaaacacatataacaaaagtgaaagaggaagagcttttagaagctgatgaagcattcacttcaagctcagctggcggagttatgcctattcaaaccgttgatgatgtggttttaccaattgcacctacaaatgaaaattcattagctgctaaattacatgatttgtattggacaaaacgttgggatggttggttagcgacgaaaatcaactatgattcttaa

SEQ ID NO: 55876 - DNA, 1185 bp, Acinetobacter baumannii
atgattgatgcagtaattgtttcaacagctcgtacacctattgggaaagcatttagaggtgcttttaatgctacgcactccccaacaatgttagggcatgccattaaacatgccgttgagcgcgcaggcattgaacctgatcgtattgaagatgctgttattggttcggttttaaatgcaggaacggcaggaaataacatcgctcgaaatggtttattcgctgctggattaccagcggtgattggtgctcaaacaattgatcgtcaatgtgcatctggtttaatggcgatcgctaccgcagcgaaacaaattatgtatgacggtatgcaggccgttattgctggaggtcaggaaaatatttctgctgtacaaagccgatatatggaatgggtgaaagctgaaatggatccgaatgttttagctcatcagcctacagcttatatgccaatgttagaaaccgcagagtttgtttcaaaaaaatatggcatttctcgagaagttcaagatcagtatgccttagagtcacaattgcgtacagctcgtgctcaggcagccggaatatttgataatgaaattgttccgattacaactcagatgatgataacggataaaactaccgggatatcttcatttaaagaagtaacgttaagtcaggatgaaggtaatcgtccaagtaccacattagagtcattaaatagtttagctccggtcattgaggggggcgtaattactgctggaaatgcgagccaactgtctgatggtgcaagtgcttgtgtggtaatgaatgggaaattagttgaacagttagggatagaacctttaggtatttatcgtggaatgactgttgttggaaatgcgcctgaagaaatgggtattggtcctatttatgcgattcctaagctacttaaacaacatggtctttcaatagatgatattggattgtgggaactcaatgaggcttttgcttgccaagtattatattgtcgagatcatttaggcattgatccaaataaatacaatgtaaatggaggaagtatttcaattggccatccatatggtatgacaggatcaagattagtggggcatgctttacttgaaggtaagcgacgtggtgtgaaatttgtcgtggtttcaatgtgtattggtggaggaatgggcgctgctggattatttgaagttgtataa

SEQ ID NO: 55877 - DNA, 1116 bp, Acinetobacter baumannii
atgaaaattagagcagctgttgttaaatcagttaatgagccatatgaaatagaaactcttgaactcgctgagccattagatgatgaggtacaagtcaaaattgttgcttcagggatttgtcattctgatgatgctgttcgattaggtcatgctgcctatgaatttccaggcgtattagggcatgaaggtgctggtattgtcaaaaaagtaggaaagaatattaaaaattttaaagtcggtgatcatgtcgttttagcttatgcatactgtaagcagtgtaatcattgcatgcatggattgcctgcagcatgtacagattggatgactttaaattggggtaaacatcgtgatgatggttcagccccatttaaaaaagaagatggtacagaggtcaataatttctttttccaatcatcttttgcgactcatacaaatgttaaagaaactaacttaattgcagttcctaaagaagcagatcttcgcttacttggtcctttaggatgcggtttattaacaggttcaggtaccgttcttaacggtttgaaaccaacaactggttcttcaattgcaatttttggtactggtgcggtaggtttagcagcaatgatgacggctaaaattatgggttgctcaacaattattgcggttgatatccatgattcgagactgagtctagctgaagagctaggtgcgactcatgtaattaatagtagatctgtagatgcagtagaaaaaattaaagaaattaccaaaggggtgggtgttaactactcaattgataccacaggaatatctgaggtcatgaaagcatctattgatgcattagcaattaaaggagtagctgctccagttgctgtgacaaacaaggaccttactgtgaatacactagcagatcttgttgtatatagtcgaaaggttattggtgtggtcatgggtgaagggattccacaaattagtataccccaattattagaatttcatgcccaaggaaaatttccttatgaaaaattaataaaattctatgattttgacgatattaatacggcatcttctgactcattaagtgggaaaaccattaaacctgttttaattgttgatcgaagttatgcagcatag

SEQ ID NO: 55878 - DNA, 327 bp, Acinetobacter baumannii
atgagcagtttaagaattagtgcttcaattactcccacattaactggtgtaatgattgcaacggctttaggtggtgcctctattaacgcatatccaactcctaatatgggtattccacctcatcatgaagcattttataaaacctctcagtttgatataaatagtacttcagaaactttttcacctttggctttatctaattcaagtgagataaatgaaattgataatttaatgttgcaggtttttgaaaaaatttcaaaagactcaaaacccttagatgaaaagtttgctaaaatactttcagataatatactagatttattctga

SEQ ID NO: 55879 - DNA, 282 bp, Acinetobacter baumannii
gtgtgttatatcatccaatataaaagacatcgtgaaaatgaaaaaattaacagatcagctgatgctcaatcagcatttgctgatcttttcacaaaaagagttatgttatatggtgaaacttatatccatattacaaatactgaaaacaatgagataactcttcaagaaaatgccctcagttctttttcttactccatgagtttacctctacaatatttcaccgaccctgtattattagaatatcaaagactattttttatgaatgaggggggaaaagaatga

SEQ ID NO: 55880 - DNA, 858 bp, Acinetobacter baumannii
atgtcattaacgaagctaagtaaagacacagaaatcaatgaaattgtttctaccatcatgcgagatggtggagtaattattgaaaattttcttaataaagaacttacccaagaaatttatcaagaattatctaaacaattagatagtatcccggatggtgaggatgaatattttgctggtactaaaacacgaagaatgagccgattattttcacgtttgccacaaatgcaattagtggcaatgaatccagccttttttgaaacggcaaaagctatcctgcaaaagcctttacatttttggagtggtgaaaacagagtagaacttattccagatgttcaaattggaatgactcaagccattcaaatttggccaggtcaaaaagctcaacctctgcatcgtgatgatgctgtatggatgtggcgacatccgatatatgggcgcgaagcacgtgtacaaattatggttgctgttactgactttactgaagaaaacggcgctacaaaagtgattccacagagccatttatgggatgatgaaagaggacctcaaatagatgaaacagtttctgcagaaatgaaagcgggagatgctttaatctggattggatcaacttatcatggcgggggagaaaatattagcaatgagcctcgaattggtttgactatgtcttacgatttagcttttttaagacaagaagagaatcattatctttctatgtcagctgaatcaatgagtaatttttccgatgagttgaaaggtctattaggctggaacatgagtagtacatttgttggatttgtggagcatgagggcaaaatgatgaatcctcttgatttagtaaatgctcaaagaaattaa

SEQ ID NO: 55881 - DNA, 645 bp, Acinetobacter baumannii
gtgactaatttacgtgcaaaacgaactcgtgcgcctcaacaaaggcaaatagagagaactaatcaaattttggattgtatggaagctttgctaaaggaaaaagaaataaatgatattaacttagttgaaatttctgaattgacaggtatcgcattaccttcgatttactaccattttccaaataaaaatagcatattggttgctcttactgaaagagttcatgaaaactggagacaaaatattcgttcacaaattagtccggatattgaatcatggcaagagttaatttgccagtttatatctattggtgcgaatcatcttagagagaactcatatgtaccgaaactcatcttaaataataattcaccaatggaaactagagaggttgattcaaatcaatgtgccgctttagcaatcgctataatggatagtctagataattactttgaagggattaacaaagcgcgttacacagaaaaaatgattattgctgtgtatatcttagatggaatttggaaaaatgctttttttcagtatggctcgttaccagatgaaattataaaggagtcccaaagagcactgatttcttatctaagaagttatttcccggaagatttcgaaccaaaaaagtatctagaggcttaa

SEQ ID NO: 55882 - DNA, 612 bp, Acinetobacter baumannii
atgacaaccgctcctcgccgccgtagaccaaaacatgatccaaaagaatctgagcgagaaatattagaggctgctgaacagtttttaagtgaacatcatttccgtgaacttaatgttgatgaagttatgcgacgcacgggtttaaaacgcccagcgttttatgtccattttcgtgataaaaatgatcttactttgcgtcttgttcagaatattagtaaagaattatttaagatttcagatcgatggttagaaggtaataatcctcaagaagatttacatcgggcgttagtcgattctgtgaaagtttatgtagagcatggccgtttgttaagagcttttgtggaagctgcaagtggtgatgaacgcgttgagagcgtttatcgtagtttaatacaggaatttatcaacgctgctgcacagcatataaaagcagagcaacgagctgggaaaattagaaaagatgtagaagtagaagaaacagcaaaagctctaatttggcttgaagaaagatatctttcggaagcttttgggcactcttcacaagttcaaccagaggttgtaattcgggtattagaaaatatttgggtttcaaccttatatggcactaattaa

SEQ ID NO: 55883 - DNA, 201 bp, Acinetobacter baumannii
gtgggctcggagatgtgtataagagacagtatcagtagtactctatcttctgaagagttacttgaactcaatacaggcttcgggaaaaatattgctgaggctgttttttctttggatgtccctgacgaactaaagaaagaggacattgacgcatggactgaagtcaatggtatcatcactagaattcaaaatttaatgtag

SEQ ID NO: 55884 - DNA, 306 bp, Acinetobacter baumannii
atggggctgatttatgtaattttattttcactaattaatataggtttattaccgtttaatctattttataattgggcttcaggtactaatgagtttttctttcgtggagatgagggttactttttttataaaggttttttctttctcggtatcgggagtatatactgttttatttataaacgttatttaatcttttttttccttctgttttgtattcttctatcacagacaaggggaattgtattagtaacattagcagtttgtgccttctgtctcttatacacatctgacgctgccgacgaatag

SEQ ID NO: 55885 - DNA, 138 bp, Acinetobacter baumannii
atgaaattggaatatcaagttaatgatcaagaaatagattggcagaaatggttaggattagagattaccgatgagaatttatttagagataatcttttagaaaaaaaatgtatcacaaaaggtttgatacatttataa

SEQ ID NO: 55886 - DNA, 861 bp, Acinetobacter baumannii
atgaaccaagaagatattgattacttttatgagaaatatggtcagccaattgataaagttgaagctaccgaggacattataaaaaaatatcggggtaaactacctgaaagtattttagaacaatggcaattgttcggttttgctggttatttgaatggtttgtactggattactaacccagatgattatgctgaagtgatttatgactggttagaggatacgccattacttgatgatgatgtctatcacgtgttggcccgttctgcatttggtaagttgttgatttggggcgaaagaagttttaatcgctattatattttaacaatggaaggtgtcttatatgattatggggtacgggatcaagaagcagacttttatggagaggatttctttttctttccaacaaaagattcattagaccatattgataagaatggcaaaaagctatttgatcgggctgtaaaaaaactaggtgttttaaaggccgatgaaatgtatgcatttgaacctgctttggcattaggtggtgaagagtcattaacatatttatcaaaagtaaatcttcctgttcatatgaagttgttaaagcaggtgactccattaattttcgaaaactttgaaagtttaagcaaggctctatatggtacatcttacagtgtggaagatttaataactggacaagatgccgagtcgcaatatcacgagtcagttcaggctggagaagtttgtcctaaaactggttattggacaacgccagttcaaccaaatacacgtcattattataagaaaggtgaggttcttcctgaaattaaggaacaagactggggtgaagtgtactggtattgggatggtgagaactga

SEQ ID NO: 55887 - DNA, 2826 bp, Acinetobacter baumannii
atgtttaataatatttcccaagttttagagagtataggttttctctcacagcatcgttcggtgtatctccagttttcagatgcatccctgaatagtcaggtttttttacaacgtatagatgggcaacattatcttaatcagggcatgacagccgagctgatttgtttatcaaccaatgctcatattccactcaaaacatttattgggttgcaggttgctgttgatcaagtaacagatcgaggaagttttttccgtactacaggtattattactggagcatcgcaagggcaaagtgatggtgctttaactttatataaacttgccataagtgatccaacttatctctggcataaacgcagaaatagccgtgtgtttatgaacaagagtgtgaaagaaattagtgaaattctgtttcaagaatggcaggggaaaagtccattatttgcatctagtctgactttagatttgagcggcttaaaacagacctacgatgtccgtccttttgttatgcagctcaatgaaagcgactatgactttttaactcgcttatggcgtagtgaaggtattagttggctcattgatgaagcagagcttaccgtggcgagcaatacggacaatattcagccacaaaaattacgccttattgatgacaatagccagtatcaggcactgactagaaggacaatccgttaccatcgtagcagtgcaactgaacagtttgacagtatgaccagtttgatcgctggacgtcgtttgcagccgacttctgtttttgtgcagcgttggcagtcagatgtgttacagcaaaccgatggggcaggcagtgtacaaagtacacatcaacatagttcaaactatgacaaccaaagcttaagtcttgaagatgcatggcactttagcccggcatggctgcaggatttaaacggtgaagatggtgcaacctcagcaagtaatcaacaactggaaaaatttaaccagaacttaagcgcttaccatgatgctcaatccaagcagtttgttgctcaaaccacagtacgggatacacaagttggttactggtttgaactgaatgaacaccctgaaattgatctgcatagtggggcagataaagagtttctgatcattggtaagcattactacaaccaaaataacttaccgaaagacttaaaccagcaaatacaaactttaattacacaaagccattggcaatctagtcatacaaaagagcggcaaggcaatcaactgattttacaacgtcgccatatcaagacagttcctgaataccagcccttacaagatcgccctcaagcctctgtacaacgtgcccgtgtagtcggacctgaaggtgaaagtatctatgtcgatcagtggggacgcattaaagttcgtttcttgtttacccgagctaatgaccatagccatgatggaggcgcggggagtaacgacaacgatactgattcggcttgggttgatgttgtaactccgtgggctggaaaggggtatggggcacggtttttaccacgcgtgggtgagattgttgtgattgatttctttgatggcaacattgatcgaccatttgtagtgggtcgcattcatgaagctgaacgccacccaacccagtttgaccagaaaggacaactccccgacactaaaaaactcagcggtattcgttcagaagaggtcgatggtaaaggctttaaccagctacgttttgatgatacgactgggcaaatcagtgcccagctacaaagcagccatgcggcaagccaactcaacttaggcaacttaagccatccaaaagataaggccgagagtgatggtcgtggagagggctttgaactcagaactgaccagtggggcgcggttagagcaggtaaaggtttacttgttagtacccataaacaggaccaagctcaaggcacacatttagatgcagccgatgccaagcaacaaatcgaaggtggtcttaataatgctaaggcactgagtgaagttgctaaaaaccagcaaactgatccattggaaatgcttgagaacttaaaaacgttcatagagcaaattgaacaacaagataaagagaaagctgctgcatttaagcaagccttgatggttttaaccgcacctaacagtattgctctagccagtaatgaagacattcatttaagcgcagatggtcagttaagccaaactgctggggacagcattagcctaagcacacagaagaacctgattgcacatgcacagaacaaaattagcctgtttgccgctcaacagggaacacggctctatgcaggcaaaggtaaagttgagatacaagcgcaaggcgatggagcagatttaattgcccgtaaaggtatccagattatttctacagaagacaaaatagaaattaatgcttctaaagaaattgtgattacctcgggtagttcccaaatcaagattaatagctcaggtattttcccagtcacgggcggcaaatttgaagtgaaggcggggcagcatgtgtttatgggtggggcaaaggcgaactatattttaccgtctttaccaacacaagaaatcaagacagatgacttattgctggaatatttacatagcgatgggacaccagttaaaggtgctgaatatgaggttttattatctgatggttccatccgtaaaggaaaactagatgcttcgggtaaggctattgtgagtggtgtacctgctggacgagccaaaatccaatatggggaagaccaaagtaaagatgagtttccagctttagaagtagatgactggtttactcaacttggaagcagtacaaagactggaaaagaggaataa

SEQ ID NO: 55888 - DNA, 840 bp, Acinetobacter baumannii
atgaagaagttaaatcaaataatgtttgcaatgattgcagcttcggcagcattaagtgcaaatgccgctcatgtattggttgtattgtctgatgaaggacagttacagctaaagaataagcaggtttttaaaacgggcttttatcttaatgagttgatgcagcctacaaaaatgcttttagatgcagggcataccgtaacatttgccactccaaaggggaaagctccaacgttagatgagtcatcaaataatgcaatgtattttaaccaagatgaaaaagcattaaagcaatatgcaaatttattgcatgatctaaaattaacatctgctcaagattctccagttgtgagcctatctcgtattgaacaaattggtgtggggcagtttgatgctatttatattccaggtgggcatgcacctatgcaagatctattaaaagataaacaacttggaaaagtacttacagctttccataaagctggtaaacctactgcgttggtctgtcatggtcctattgcattaatgtctactttaccaaatgcctcggaagtagttggtcaactcgaacaaggcaaaccagtaaaaactggcgaatggatttataaaaattatcagatgacagtaattagcaatcaagaagaagagcaagcgaagagcttattaaaaggtggtgagatgaagttctatccacaaactgtattagagtcacttggagcaaaatatcaaagcaatacgaaagcttggtcgccaaatgtagtggtggatcgtgaacttattactggacaaaatccagcttcggctgttcttgtcggtaaaactttattagaaaaattaaaataa

SEQ ID NO: 55889 - DNA, 1872 bp, Acinetobacter baumannii
atgtctaaatcttttcaacctactcgtctggtaggggctatcgctattgcgatggggtgttcacctgttatttttgctgaagatgcaacagatgcaactcagcttgacccaattgttatcactgcttcaaaaagtgctgaaaaagcaagtgaagttccagcgcgaattactgtgattgatcagaaaactattcaacaatcaccgcttgctgacttaggtcagctcttacagcgtgatgctggactacatgtcctacagcaaggtggaatgggacaaaactcatccttatttattcgagggacaaattcaacacatagcctttttttaaaagatggagccagcctcaatactgctttggatggtggagcaagcattccatatattgatttaagtgatgctgcgcaaattgaggttttaaaaggacctgcatccgttcaatacggtactgatgcaattggtggcgttattaatattcgtacaattcctccaactcaacaaaaattatttacaacgactgaagttggtgaaaacaaaacctataaatccttaattggtacagatattgtttctaatgaaggagtatatctccaagtaagaggccagcgacaagaaagtgatggtaccactgttacaaataaatcagatcaaaaagcaagctatgaccaaaaaggttatagtgctaaaattggttatgaattagatcaatatggtataaatacaagtataaacgaaaataaagggacaaacgtttactacggtggttcccaagattttttgaatcgtctaatcaataccaatgcctattatcaaatttcaaataatttaaaaatcaatgcaagatattctaattttaaagatgaactaacaggaaaaagctctctctattactttgatacagatcgcaatgaaggtgatttaaatctcaaatgggattttaacaaaaatcaaaatctattaataggcgcatctattaacaatgccgatgttaaaagtcttgcaatcaaaggacaaaagcaaagtctcgactcaaatggatattatatccagcaccaatttaacagctcaaatggcattcatactcaaacaggcttaagagtagaagaaaatgaacaatttggaacacatacagtaggacaacttgcaggtcgtattcaacttaccccactcactagtatttatacaaatgttggcacagcatttaaggctccaacaggtaatcaattatattacttgtcagaatcagagtggaagggaacaacttatattacaacaggtaatccaaatttaaagcctgaagaaagcatatcttatgaggttggaatagatcaaaaattagcttatggaatttcaacttacgcttcggtctatcacacaaaagtaaaaaatctaatacaatatatctcagcctttgactcagtaaataatatatcagcatcaacttatacaaatgtaaataaagcaaaaatgactggtggtgaaattggtctaaaatggaaaaacaatgatttatttttcactacagaatatggttacgtaaaaacagaaaatgacgaaactggttatgaactgatccgtagaccacgtcaaaatctcacattaactgcaggcttagaaaatgaaatttatggtttaagcgtttctttagttgccaagtctcactctaaaatatctgaatctagttcatcagcaatgattccaggatatgcgactattgatttacatgcgtattggaatgcaactccaaatatcaaattatttacaaatgttgtaaatgttggcgatgtaaaatataaaacatcttattactcagcagatgagttttacatcaatggtggccgccttgcatcagctggtgtgaccttaagctactaa

SEQ ID NO: 55890 - DNA, 141 bp, Acinetobacter baumannii
atggattatattgatgaatatcatcaggataagtttcatgccacaattctagaaaccgaaaatattcgggctgtagatcatcaatttcaatttctgctaaaggggcttggagttgatcttttatttctatttgttgactaa

SEQ ID NO: 55891 - DNA, 1143 bp, Acinetobacter baumannii
atgaaaaaactatttttagtagcaatattattggggttgatggggtgtggggacaataaccagagcgatacttctcaatctgatatacagacgacacaattacaaacaacaaatttagcagtaccaacaacatctaataacaagttagtagcttcatcactaatgctgagtccagcaatatcacctttaggtggttggtctattactaattcgacagttatgggggcatcgacattaattgatacggtaaaagacactagagtttcagctgcattagtaacacctaatgcgaagcaagtggcagaagtgttacgtggcgggatagctggagttgccttagctattgcagttgatcagttacttgatgctgttgattgggtaatggatcctgcgaataatcaaattcgttataaagttattaattatgatcaacaatatcgttatagcaatagtgaagttttagaatatactggaattcaatatatttatactattgctgaagcagaaaatgctttcaaaaaattctttagtgtaattaagagagattatatttttggtggttgcaagattaaccctaatataaataatcgtattgattgtatgtggggataccctaacgaaacacctaccagagttgttcctttttcaccctctaaaaatccagactatggtgaaaaaaaccttcctcttgaagccgttgctgaaaaagttatttccaacgcagatactggtagtttagacgctcaagtagcaactaacgctgctacgcagaatattttaaatgatgctgttcaggctgaacctgttgttcaggagctggagaataatgccaaaaataattgccttagtggaattactaatggaaagggcgattgctgggtttgttctagagagtcttacacacctataagggctagagtagtctatgctaaagatgttactaatgggttaggaggatgtagtgctggaatgaattccagtcaattgctcactagatataatgcttatactgagctgggagctgctagagatgcagagaatgcatgctggtctccacaagatcaagaacatttaattcaagcaagagcggctaaagtaaccgctaatgattgtaaaagctatctagggtttctaggacaataa

SEQ ID NO: 55892 - DNA, 2418 bp, Acinetobacter baumannii
ttggagcatacagcaacagaggaaggtttaacttatgatgttatagtaaatgatgttgatttagttaaatcatcatatttccataaaattgtgaaaatgcatggtgactttcaacatcataatattgtatttaaggaggatgactacttaaaatatgctgaagaattccctttaattgaaaactatattaaaagtattttatctacacatgttgttgtttttataggttattcttacagcgatgttgatttgaaattgataacgaaatggattgaaacgaaatcaaaagtcacacctccaaaatatttattcagttctagatataatgaagctgaagccagttatttaaaaaatcatggaattcaattcttgaacccaaagactgatgaggaatctagtgttaatgatattttaatagatttttttgatttaattagtgaaaaaaatgaattattgaaatatagaaaaataataaataaagataatttgtcttttcctgaaaaaatattcttaatggatattttgtatcaaaaaataaaaatactagatgaactcaaagctatatttcctaaacaaattaaggagctttttagtaattctactattgaatatcatataggatgctatgctttttatttgatttctgatggtgttttgacaactgatcatgatgatttggttagacgttattacaaattgatacatgagattattgaagagaatagaaatagtgataatgaaattacactaatagtcagaaaaattttcaatatttttaaaaaagcaaatattttatttgtgaagttcaatagtttggtagatagtaactatttaaatataaaagaatatctaggggattctaatattgatgaagattccgagtatttaactttctctagtaaaggtgaggctaatgatttaattttctctgaaaaatatgaaaaactgatggaaaaatcaattaataaaatttcattgaataaaaaagagggaaattttatagccctagctataaattcatttaataatgaagtatctcagttggcgagaagatcaaagataactgctagtggaaaatttatagataataagaaaaatcaaaatggtaagagtgaaataaaagtatttaaagattattttgatttttatggattgatggataagaaagaatacaattttattaatgcttttttaaattttaatattttaaatgatatatatctttgtgttaatgaaagaaaaaatataaatgaagagcgattgaaaagtataaagaatggtggcttttctttagattcaaatcaaacggaaggtgtattgcttataaaatcatatttagattttatgtataaaaataatatagcaatggaaaaatataaaaatgtgaaagccctttttaaaaatcatataaattataaattaaatcttatagatattaattttaaaaaatatgatgttaatcctttatttaactttagtgaggaggaaaatggtccaaaagttgaaatagatattttagatttatttatttttcttaatttttctgaaaataaaggtattgtaaaaatactaactaaaatagttgaagttttaaaaagagatgaatcttttaaaattgaggatttttttgaaaaagattttgatttaaaagattatttttttagttgtatagataacttacttcttaaagaaagttcaaatgatttggagaatgttttaaataatctaattgttctgtcctctgtatgtgattgggagtcaggaggacttttgctagataaatttaaagaaatatttttaaaatcaaataatagtgaagtcattgaatctgtaaataaatttgttgcttttaattctcaaatttttaaaagtaaaaatatggattatagtccatatatagatttcgttataaatttaattttgcaaaataagataaatttatggggttatagatctttagagagagggaatttatctaatgtttttaattatatgtcttggagaaaagattatagtaatattgatttagttgaagcttttatacattatttaaactcacctgttttaagtgtggaggataggcatttttattcgatagtaatattgccatatttactttatgtttcagatgctaaggttaaagaaataataaggctatatatttatgattatctagatggtaattctaatgaaatgaaatttgaattatttttgctttgcatgtcatatgatgatgaatttttaaaaataatatcagatgatgtcagaagtaaatattttgtggagtttgaaaaatattgtaaggaatcatttaggtttaagggttattcattaaatagtattgtactaatttatgcaaaagaggatggtattcaatatgatttctttaggaatatcaaaaataaatttaacttataa

SEQ ID NO: 55893 - DNA, 918 bp, Acinetobacter baumannii
gtgcaggcattattactaatattcggatatttttttgtttggtgtatttatattctagctttgttattgccttactatgttgcttattcaattatagaacctcatagctttatggggacagtaggtgtttttattttaggctcagttattgctcctttaattgttatggcagctataacagttctaggaacaattggtctaagttttgatgcgctaaagaataaattttcaaaatcgaattcctatgagaaaaatttaaaaactgtttatacagaacctgaaagaagaaaaggtaaatcacttatttattttttaattttaattatttttgtatgtgtaggaattataatttatttattgaattcaccgaaaagctatgttgagcaaccagcctacagtgaaactgatagcgtatatcaagatgagaataaatttaacaatcctataaataatattgattatcaaactgagagtagtgcttcctatacgaaggatattgatatttcatctcaagaagagcaacctaaagtattagaggaagagttaaatgaaagtacttcgacaaatcttagctcacctaatttaacaactttaggaccctcacacttaaaattagatatccatttcattgatgaaaaagggatctcttttaatatggattttaaaaatgctaacagacctgaattaaatacttctggaacttgtacttatactaaaaatcacttagaaggagaaactagatactccaagcttatagataaggagttgtcaatatatgctttatatgagtgtgataatggaagaacaatagaggtttctaagtttaatgaattggatcaagatcacttaataatgactttaagtttaacgaataattccaatagagttttttatagtggtgaaatggttgaaccataa

SEQ ID NO: 55894 - DNA, 753 bp, Acinetobacter baumannii
atggattttagcgattatattgtttatgtagatgaaagtggtgatcatacccttaatggctataatgcaaagtatcctgtatttgtcttagctttctgtatttttcacaaacggtattatacagaaactgttattcataaattagaacaattgaaattcaagcatttcgggcatgacattatcgtgatgcatgagcgagatatcttaaaaggtactggagatttcagaaattattcatcaaaagagcaaaaagaatcgctacttaatgacttaacgaccttaatgcaagaaacaaatttcattcttatttcatgtgtagttagaaaagaccttctaataaaaaaatatgccactcccaaaaatccatatttcattgcattggagtttggtcttgaaagaatttataaatttttagtagaaaagaatcagcaaaataagaaaacatttattgtttttgagcaacgggggctgcaagaagacagagatttagaacttgaattcagaagagtatgtgatgggaataattacgataagatttgtttacccttcgaaattaaaatggcttcaaaaaaagttaattcttctggtctgcaaattgcagatttggttgctcgaccaataggaaatcatgttttaaaaccttttcaaccaaatagagcttttgacgtattaaagtttaagttctatagttctaaaggaagacttggagcaggtgttggatatacaggttacggtctgaaagtattcccataa

SEQ ID NO: 55895 - DNA, 486 bp, Acinetobacter baumannii
gtggtatcgattgtatatgtttgtgtatcgttaacactgctgctgttacctgctgcatctgtaaacgttactttggcatcaatcgtcttatctgcatccgcagtcaactcactgcctggtacgcttactgtccacgtgcctgctgtgctatctacagttgcagtatacgtctggccattgatcacaacagtaaccactgtatttgctgcatctgccggaacatttttcaatacacctgtaacagtaacgttgcctgatgcttctgatgcattaatcacattgtcagctgttactgagtcaatcgaaaaattgactgttcctgtatttggtgcagctgtatcaaccgtcacaacacctgtatcagtacctttattgcctgcagcatctgttgcagtcacggtaacggtgtgtggaccgtctgcgagtgttggaagtgtattgtctgcaagcgtccatgtaccgtcaccattatttactgctggatag

SEQ ID NO: 55896 - DNA, 510 bp, Acinetobacter baumannii
atgaatgcacaaaaaggttttacattaatcgaactcatgatcgtggttgccattatcggtattttggcagcaattgcgattcctgcgtaccaggattatacagttcgttcacaagtgactgaaggccttaatatggctggtggtgttaaaactgcagtaaatgactattatacagatgttggttcatggccagttgatattcaggcagcagtctgtggtaaaaatgctactacagcatgtgacgggggtacaagtactgattataaaggtaactatgtgtctgagattgctgtagcatctggtgctgtaaatataacttatggtaacaaagcgaatagtaatgcattagataagaaaatcttaacacttattcctggtgtagatacggctaaaaacgtaacttgggtctgcggtaatgctgcaacacctactggtgttactttagcggcaggtactaaaaatgctacagatattgatgcaaaatatcttcctggttcttgtaaaaactaa

SEQ ID NO: 55897 - DNA, 711 bp, Acinetobacter baumannii
atgagtaagcgtgttaagttttttatagtacatataactttttcagctctaattcttagttcactgctttgttgtatttttcttgtgtggtatccctctcctttgagtaaagcgacaggattagaacatatattatttttattggtccttattgatgtcattatggggcctcttttaggtctattagtttataaagaaggcaaaaaaactctaaaattggacttgataattatttgtattttccaaattattgcattcctttttggtagttaccatatttttaaaggtagacctgtgtggatagtttatagtgtggatcaatttgaattgatacgtgacaatgaaattgtatctaaattacataaatctcctttaacaggtccaaagtttgccgctattcagtattccaatgatcttcagttgaaacaaaaagaaatatttaaagaattatttgaaggtatttctttaacacaagatccccaaaattataagaatcttgaccaagttaaactacaaatacaaaaaaaatctcaaaatttgaatgaactggaaaaattcaaccctaaacagcaggtagaaaatattttgaaaaaatatccagaagctaatgcatgggttcctttaagagcaaatgctgtagatatggttgttttaatggataaaaattcagctcaagtggtgaaaattgtagacctacgaccatggaaataa

SEQ ID NO: 55898 - DNA, 1158 bp, Acinetobacter baumannii
atgaacacatcatccgaaatatacagatatttagaaagcataaaattaagacttgaaagtggtcttactgttaaccaaccaatcaacattaacgatgaagatatcaacttaagtcgtactatcgaagtatcaaaaaatcacttaaataactatattgatgaatatatactttactgtgattttataaaagatgatgatctaaacaggatattgaaaattgtaactagaatttcaactttactagatgattttgaaaatacacctgtaaatgatagtcaagcaaaattaagattgattggtcaaattttggataacattagtagattagaaagcatcactaattttaccttttataataatagaagaataagccttagatccatattaaatcttattaatttagtgagccaaaaaatagaggtatttaaagaccttaatataaaaaatattttagataatgcaaatacgagtgaattagatgaaattgtatctacttttattaaaattcataatggaggaagtaattatgattatcttgctcgcgatgtggttaatgcacaaaaagttttccagttaatcatagatagaataagaaaattagaagtaactgaaacgattgaagttttagaggaaaaagcagttgatataaaagaaaaatatggattgtatagtaatgaaaatttaatagaggcctttaaaaaagaaggtaatttacatgtcaaagaaatttctgattacaataagctaatcttaaccctatttagtattattctttttactctagcgactttagttattctatctttaacgacaaatatatttaatgaaatcaaaaagatacaattttacggtttttatatttcgttatttttatttatcacagcattattaacttatttaattacagagcgaaaaagattattaaatcatcagcattattgcacaattagccaccttgaacttcttgcattagcaccctacgtggctcaaattgatgataagagtaaacaggataatcttatagttcttctgggtgatcgttattttaaaggtcctaatccctcaacaagtaatgatgaaggcacaaataatataaccacctccaaattaagtgaagttattaaattagttcaagaagttaagtcaactattaaataa

SEQ ID NO: 55899 - DNA, 477 bp, Acinetobacter baumannii
atgcgtcaaatcattactagttttattctagctgctatagcaaccaccacttttgctgctcaaccagctcaatgggcgaacaagtatccattcgataaaatagaaggaaaaactattttccagacacaggaattcaaaacaattctgggcaaaatgccagtttctttacaaaataaaatcgtaaaacaatatagtacgaccagtgatattaaaaaatcaggctcatccatcttagttactggctgtatgccccatatgtgcaatacggctggatatatctttatttacaatactaaaagtaaagaatactgggttttagttgatgctatgaatgcctcttatgattacgaaaaaacatattgctattcatcaagtccaaatttgtccagcatgcctatagctttttataacgaattaaaacaatacgaaggtgaagaatatctaaatcgctatatggaaggcaaagtatgtaaataa

SEQ ID NO: 55900 - DNA, 4899 bp, Acinetobacter baumannii
atgtcgtcatttttcgacttaattaatacatatagaacaacagcaaaaacagaacgagaaaaaggcacttactttgagctgctctgtatcaaatactttgaaaatgagccttactatgccgacttgtttagtaaagtacagacctacaccgagtgggctaaagagcaagagctatcgggtaaagatacgggcatagacttagtcgcaacgaccaaagacggagaatttcatgccattcaatgcaaactatacgatgctgatcgtaaggtcaccaaggctgagattgatagcttcctagctgcggcatctaaaacctactttaaacgccgtatcatcgtcagtaccacacacgaatggtcagacaatgctttggcgacccttgaaaaccaagacccgcctgtcaccaaaattgatttggacacgcttgcacagagtgcgattgattggtctctgtttgcggaaaagaaagaagttgtattcaagcccaaaaaagaactccgtgaccatcaaaaagcagccttggcaaacgtaaaagctggcttgtatgagcaaaagcttgaacgtggcaagctcatcatggcatgtggtacgggtaaaacctttacaagtttaaaaattgccgaagcatgtgcgggcaaaggcaagcgtgtactattccttgtgccaagtttatctttgctttcccaaacgctgacagagtggacacaagaatcgacaacgccgttgcatagctacgccgtatgttcagacaccgaggttggcaagaagaaaaatgccacagcgattgatgcagtgacaacgcttgaacatgagcttcaatatcctgcgacgacggatgcgaaaaaacttgcggagaacgtagaaaagcatcacgacgatgaacacatgacggtcgtgttctcgacttatcactccattaataccgtcagcgatgcgcaaaatgagcatcagatgcatgagtttgacctcatcatctgtgatgaagcacaccgcacgactggcgcaacgcatgatagcgaagatgattcgaacttcgtaaaaatccacgacggcgggttcattcttggcaagaaacgcctctacatgaccgcaacgcctcgtatcttctctgacgatgtgaaggataaggcaactgactttaccctgtactcaatggacaatgagaagctctttggtgaaacgctttacactattaacttctcggaagcagttaagcgtggtctattagtcgattacaaggtgattgtccttacggtcgattcagacacaatcattaacaagattggtagtacgatcacagagaacagtgaaatcgtagtcgatgatgccgctcgtattgtcggctgttggaaagccctatcgaagcaaggtattcactctgacgttgaagaagacacagcaccaatgcaacgtgccttggcattctgtcaggtgattgaacagtcggagaaagctcgtaaacaccaagttagctcaacacgtattgcaaacatcttccaaacggttgtagaagcctaccaagaagcagaagccaaagaaggcaatgaaatctcacatcgtttgatttgcgaagcacagcacgtcgatggcgcaatgggtgcggataagaaagaacagaagctcaattggttgaaagcaacgcctgagcctcagtttgatgaaaacggcgtagaacgtccaatttgtcgtgttttaagcaacgttcgctgtttgtccgagggcgtggacgtacctgccttggattcggtgttattccttacgccacgtaattctcaagtagacgtggtgcagtcggtcggtcgtgtgatgcgccttgcaccgaacaagaaacgtggatatgtgattcttcctgtcgtgattccaccaggtgttgacccaaacaaagcattagacgacaaccaaacttataaagtggtttggcaagtgttgaatgcgcttcgttcgcacgatgaccgtttcgatgccatgatcaataagatggatttaacgggcattgatcgctcgaagatggaagtgattgccatcactgacaaagtagcggcaaaagcgaagaaaaaagcagcgggtaaaggcggtacaacgattggtacagccaagaaaaagaccaagaaagaagaacttgaggatgcacagcaatccttcagttttgaatcgggtgagattgagcgtgctatcgttgcaaaagtcgttcagaaagtcggtaatcgtcaccattgggaagattgggcaaatgatatcgccaagattgcgcagactcacatcaagctcattacagacatccttgcacgtcctgaatgtgaaaaagaacgtgccgtctttgaagagtttgcgtatgagattcgtgatgaccttaacaatgcggtttcggatgctgaaatcattgaaatgttggcgcagcatttgatcaccaaacctgtctttgatgccctttttgatgaatacagttttgcagcgcataaccctatggcaattgcgatgcaaaaagtattggatgttttaaaccaacatcaccttgaaagcgaaattgaagcattacaacgcttctatgacagcgtaaaaatgcgtgcgtcaggcattgatagcgcagagggcaaacaaaagatcattgtggaactgtatgataagtttttccgcaatgccttccctcgtatgaccgagcgtctaggtattgtttacacgcctgtagaggtcgtggactttattattcacagtgtaaatgatgtcttaaagcaagagttcggcaaaagtattgcagacaaaggggtgcatattcttgacccattcacggggacagggacatttatcacgcgcctattgcagagcggtttaatcccagcgaatgagttgacctacaaatacaagaatgaaattcatgccaatgagcttgtgttgcttgcctattacattgcggcaatcaatattgaagcggtctatcacagccaaatcattgatgactacacaccatttgaagggatttgtttaaccgatactttccaaatgtatgagaaagaggacttggtcgatcaagtgcttgttgataatagcgcacgtcgtaaacgtcagaaatcacttgatattcaggtgatcattggcaatccaccttattcggcagggcagaaatcagtaaacgatgataatcagaattttagttatccaaatttagatgcccgtatttcgtctacatatgcaaataaatctaaagctacctctactaaaaatttgatggactcttatattcgagcaatacgttgggctagtgatcgtattgaagagcaaggtgttgtcagctttgtaagtaatgcaagttatgttgatgccaattcaatggatggtctaagaaaatgcttagttgaagaatttagctctatttatatttttcatttgagaggattaagaggattaagaacttcaggagaacgagctaaaagagaaggtggtcaaatttttggacaagggagtggctctgctattgcaataacgctaatggttaaaaatcctaatgcaagcgaacatgggaaaattttctttcatgatattggtgattaccttagccgagatgaaaaattatcaagaatttcagaatttaaaagtgtaaatggcattacagcagctaatggatgggtgaatattattccagatcaacatggtgactggttaagtcaacgtgatgatagtttcactcaatttataagtattggcgataagaaagataaaaaagcaacctccctgtttttaaattactcattaggggtaggtaccaatagagatgcttgggtctatcaatctagtaaaagtaaattggtaagtaatgttaaatcgtttataaatttttatgatcataacatttcatcatctgagcaacccatttatgacactacgaaaattagctggtctagtagcttaattaattattttgaaagaaaaataaggattcagtttgatgaatctaacattcgtcaaagtgtatatcgaccatttcaaaagcaatggctttattttggggggcatttaactcatcgtgtcggacaaatgccacatattttccctaataaggagcttccaaatcgagtgatccttataaaacaacgatggactaaagatgggcatctcgccttaattacggatttatcaccagatttgcaatctgatggtgggtcacaatgtttcccactctatctctacgaagaagtgaaccaagataaaaaagtaggttcaggcgacttattcgatgaatcgcttgatttaactgtgactgaaaccaaatatgaacgtaaagacggtatcagtgacgaaggcttacagcatttccaaactgcctaccctagcgaacaaatcacgaaagaagacatcttctattacacctacggtttattgcacagtgaagaataccgcacgcgctacgcggacaacctcaccaaagagcttccacgtattccatgcgtgaagaaagctgaggacttttgggcattctctaaagcggggcgtgaccttgcgcattggcatctcaactatgaaactgttgagccatacaaggcaacattggatacaggtagcacggcgtacaatcaattgaccgcagaagacttctatgtcgaaaagatgaagtttgcgaagaaaggtgaaaaaggtacggtcatttacaacaagcgcataaccatcaaaaacattccattagaggcttatgattatgtggtgaatggtaagcctgcccttgagtgggtgatggaacgtcaaggcgtttctacgcacaaggacagcggtatcgtaaacgatgcgaatgattgggcaattgaaaccatgaacaatccagcgtacccgcttgagttgttcttacgtgtgattacggtcagccttgagacaatgaagattgtgaaggctttgccgaaattggatatttaa

SEQ ID NO: 55901 - DNA, 159 bp, Acinetobacter baumannii
atgacagcgctacaaatcactgaagcacaatttatttccttagttggacaagcaagcaaagatgaatccattgaactcgattcgctcaatgtttttgagtgtaatatggggattctcattcaaagtgcagccggtgagtatcttttaatcgttaaataa

SEQ ID NO: 55902 - DNA, 1233 bp, Acinetobacter baumannii
atgaatgcaatctctgttcttaattacacattgcctgccaatatcgtaacttcaacatatgaaagtgacgccgaaacgctgagaaagttaaagtgcctctattggggagaggacttaacagccaaatctatgagaaacgccataattattgacggtcgtggagatgcagaattagatgccgaacttgagcaattgttcttagacgtgtctagtcaggagagcaaatccctcgttgtttctgcacaaatgtcagatgcagatttatatcagcggcttaatgagcttcgcgcacgttatgcaaactatgctgaatacgcggatatgttggaaactgaaatatacagtgacatccatagctatgaactgccagcaatgaatatccgtgtggaaacggtaattgactttattgacttgcaatttagcgtttccaaagcaacgactcgaagcaacattaaaaaatatttaaatgaaaaaatgggcaaagcctattttattactgacgctcatggcattgaacacccgaatgggcatgacttcatcgtccgagtgcatgatgttaaaacatacagcgacctaaaacccgtgattcatcatttgaagcactttggcatcaaaaaagatgagcttaaggttaatcggattgaagtctcaactgacttctacggcgtaaaaaacaaggcttttcttattgcgctattcaagtcattggcatacacggaaaatgcctgtaatgagcgtctatataagaatgagactgaacgattacctaatcaaccgtacccattattgaccatgttggatgaaggttactgtattggtgttaatcctaaaggtgcacctatttattatcgactgtattacaaaattactgacaacaaagagcctttgccctctcatgagcatcgctgtagggcggaagtgaattgtgatgtagaggcacttggtgttgataatcacctaattaatttagcagaaatcatgcaatgtgcatttgaacagctcaaactgaccaagctgaatagcaatgcgacaattgaggacaaagaacattatcgtcaatcagtctctatgttcggtgcacgcaatgtcgcctcttacagcaagagtcgacacaaacggacattcaaaccgtacatttcaaagaatggcgaaattaatacattgatcagtaagcaagtcagcaatctaaaacgtaacttcaaagggaaaatcgcaaaaattcttcattcctga

SEQ ID NO: 55903 - DNA, 219 bp, Acinetobacter baumannii
atgcaaaatatgacagatcaaattgttagcgagattgtgctcaacattctgcaagagaatgatggaacttttgatttgagcaccccatcaggtatcaatcaagtatcagaatacgccgctgactattacaaagtggcggggggggatgtcacagcagcacaaatcaaacgcgaacttacacgtcaaatcaaagcgtttaaagaacccgatcttatgtaa

SEQ ID NO: 55904 - DNA, 246 bp, Acinetobacter baumannii
atgaaatacttaagccaatggcaagcggctgaattacttgctagccacttgaaaggtacaccaaatgaatggttcggttttttaacaaaaaatagccgtaataaccgtgatgataattatccatacaaaattacagtccatgttgaacagggaaaacgagcgtacacccgagaagctttattggagtttgtgcgtgtcaacctgacaccacacaatgcgcgccctaaagttaaggaggtggaataa

SEQ ID NO: 55905 - DNA, 300 bp, Acinetobacter baumannii
atgtcatctaaaaaagaattaacgcctgatcaattagctaactcagatcatcttcttcgtatcaaagaaatttgcagtcatggtgaacgccgtgaacgcatctttaaagataaaaatggaaacatcagaaaaatcaaaggaaagccggctaagaaaggtctacttccattaggtgaaagtaccatttgggaaatggttcgtaagggagaatttccaaaaccaatcaaactctctgaccgcattacagtttggaaatcatcagacattcttcaatggatgaagtctcgtaacttggtatag

SEQ ID NO: 55906 - DNA, 780 bp, Acinetobacter baumannii
atggaactggatttcttaactattgatcaagtaatttcgatcttaagtaaagaatcaggtattcaatatgaaacccaaaatattgccgacttggtaataaacaactctttagaacctgttttttggttcgatggttatataggtgagttacatgacactttcattgaaaatggtattgatgattgtagtctcgcaaaactctctagagtaaaaggcttcctaaagccttttactgctcataaacaagatatatataatttgatgctgcatgaaaaaatagctatagacatatcgcttgtacacaaagaacaaagactatctgtaatattatctgactgctctgaagacctaattaatgaagtcctaagctatacgcgatacgatgaaaaaaagaagcaactaataaacgaagcagttctcgtcgaaaatttcccgctgataatacatgacctgacttcaaagggtgcaactacatcggtacaagtgacactcaatcaactaagaatcacgaaagaaagtctacatagatggataaagttcaagggtaagactaaatcagatcgaactttgattgctgaaaatgaaaaactcttgaaaattattggtgcaatgatcgcaggactcaaaaaatcttctaaatttggtaggactacacagaatcaactgatctcctttatggaggatgccgtccaccttagtgatgcaaaaataaaagatgacactattaagggagtttttgccaaagcaaacgataaaataaaaaaatacaaaaaaccataa

SEQ ID NO: 55907 - DNA, 1269 bp, Acinetobacter baumannii
gtggcaaaacaatcgaataaattgactgctaaaaccgttaaaaacctctcttatactcctaactgctcaaataaatacgctgacggcggcggtctctacctacttattactgccaatggttctaaatattggcgcatgaattaccgacgcccagtgactaaaaaagaaaatactttagcaattggcgtatatccaaccgtaacacttgaacaggcacgactaagacgcgatgagtttaagaaaatgttgtctgagggtatcgaccctgctgaggaaagaaataccctcaaacgtcatcaaaaagccgagcttgaaaacacttttgcaaagtttgccgctgaatggttagaaatccgcaaactcgagggtaaagtggatagcgaaacgatacgtaagctaaacaaagacatattgccatttattggtaacatgccggtgacaaacctcactactgagcaactagagcgtgatgtaacaagtgcacttgtcgagcgcggtgctcttgagtcggcaagacgtgtcaaatctattataaatatggttctaaaactgccgttaaagcgcaggattatcacttataaccccgctcctgaaataaccctaccaaagcctaaaaagggacaccataacgcaattacaagcgagacggctttaggagagctattacgtaaaatatggcgttattgtgctgaaaacccacgagcacgtaaaagaaccgaacttgctatcaagctctcggcatacacctttcaaagaccgaatgaaatacgtggtttgctttgggaatcagtagatttcgaaaataagtacctttcatttgctgctagtaaaacttatcaagatcatatcgtaccgctctcacgtcaagcattcgatattctgaaagagctagcagacatgcggacaacctcaaagtatgttttcccaagtattaaaacgccgtcggaatgcatcagtgaggatacattgcgtcaagcattaaaccgtctaggctttaaaggaaaacattccatacatggtttcagggctacggcgcgaactttacttgatgaggaaattgaatttcggacggacattgtcgaacatcaactagcacatactgtcaaagacccaaacggtacagcatataaccgtactaaatttttacgccgtagacgtgagcttatgcagctttgggcggactacttagacaccctaagacaaggcggggatgtctctattttcaaacctcaatcagatgagaagattattaagtttaaaacagcatag

SEQ ID NO: 55908 - DNA, 753 bp, Acinetobacter baumannii
atgtcaccatatctcaatcaaccaacgcaacaatggcagagcattacagataatttaatagctagtcatcctcttacgttacaaaatattcatgatgcagtttttaaagcttggagtgatgtctggactactgttattggtggacaaagcggttaccgactaattgacgcttctcctttaccaccagctcaagtaataggttatttattggaaatgcttgttgctaaagaaattaacttgattaataacaattttatttgggggcaaggttctcaaaaggatattcattgcatatcaaatgataatttttctattgaaatgaaaacctctggccaattaggttataaagtttttggtaatagaagttatgggcaaacaggaactacaggtaaaaaagataaatcgggcttttatataacggttaactattatgacactacaattactttaatccgatttggttggattgatagctgggattggacatctcaaactgcaagtactggacaagctgcaactctaagtaacgatgcttatgcacataaattaaaaattatacatggtccatataggttgaaagccccagttcaaatagttacaggtattgggcctagtgtaattcctgaattacatgccttaggaattattactatagaagatctattttataaacataatttacttacaaccaagaagctcacaaacgcctataatagggcttatgagctttatggatacttattgcagccctga

SEQ ID NO: 55909 - DNA, 867 bp, Acinetobacter baumannii
gtgaacagtctaaatctattccacgaggataaaccagaacaattttacattggttctgaacagttcaaagcagttacgtctgctttaggaaagccttatttttctacagattcagtagctatatataatggtaactgcttagaattattaaaaaaaataccaaaaggttctattgacctcacttttactagtccaccctataatattggaaaggaatatgaagatattctttctgttaaggaatatgttaaatggtgtgagcaatggttaggacctattgaaactattactaaaaataatggttcttttgtcttgaatgttgggtatctagcatatggtaataaagctaaatgcttacctattacttatcttttatgggataagattaatatgtatctccaacaagagatcatctggaattatggtgcaggagtttctgctaaaaaattcttagctccaagaaatgaaaagcttttgtggtatatcaaagaccccaaaaactactgtttcaatctcgatgaaatacgtgatccggatgttgcttatcctaatcaaaagaaaaatggaaaacttcgttgtaatccattaggaaaaaacccttctgatgtttggcgtattgcaaaagtaacatctggagcaggtcgagcatcgaaagagagaactcctcaccccgctcaattcccaatggaattatgcagcagagtaattaaagcattttctgatataggaggattagttgttgatccatttttaggttctggatcaacaatggcaacctgcatacaagaaaatcgttactgcattggttttgaaatcagagaagattattgcgaactagcagctaatagaatttcagggctgcaataa

SEQ ID NO: 55910 - DNA, 168 bp, Acinetobacter baumannii
atgagcaaagaaacccctgctaaaaatacacgactgaccatcagctttccagaagaaatttattctcagctggaagtaattgctaaagataaagatgtatctattgcatgggtggttagagatgcgttgaaggtctacttgcaaacttctagtcaaggtaaaaagtga

SEQ ID NO: 55911 - DNA, 342 bp, Acinetobacter baumannii
atgcagaactggaatagttatcgagactcgttgcttcaatacgtcgcagaatttgcaaaactagcaccagacaccatgcgtggtttaagtgcaatggaagcaggaacgagtaaaattggtcagcttgatgcaaaaacccatgagcttattgcacttgccgttgcagtgaccacacgttgtgatggttgcatttctatacatagcaaaaaggcaattgaagcaggtgcaaccaaagaacaaattgccgaagctctttctgtcgctatttctttaaatgcaggtgcagcactcacctattctgcacgcgtattagaggcaatagaaaatttagcagagcattaa

SEQ ID NO: 55912 - DNA, 771 bp, Acinetobacter baumannii
atgagtagattttctttaaaagttgctatcgttactggtggcggctctggtattggtaaagaagtcgcaattcgcttggttcaagaaggtgctaatgttgtgattggtggtcgcgatgaaaataaattgcaaaaagctgcccatgaaatagatccgacaggtgaaaaagttcgctactttgctggtgatatagccgaccctaaaactgcaaaaaacttagtaaaagtagcttctgaaacatttggtggtgttgatattcttatcaataatgcaggtgtatttaacccaaaatctttccttgatattactgaaacagaatatgtctggtttttagataccattttgaaaggcaagttttttatggcgcaagcggctgctaaagccatgcaacaacgtggaggcggcgcaatagtacaaacaggttcgctttgggcattacaagctgtaaaagcaaccccgtcttctgcttactcagcagcaaatgcaggggtacatgcactcactcataacttagccattgaattggccgaatcaaatatccgcattaataccgttgcaccaggtgtagtggaaacacctgtttacaacacgtttatgagcgaagatcaggttaaagaggccttaccgacttttaactcgttccatcctttaggccgcaacggtcaacctgctgacattgccgaagcgattttattccttgcatcatctaatgcctcatggattacaggaactattcttcctgtagatggtggtgtgatggctggtcactaa

SEQ ID NO: 55913 - DNA, 585 bp, Acinetobacter baumannii
atgttcctaattgacggtattgccgttgcatgtgttggtgacaaaacaacatgtccaacacataaagttgttgcaaccattgtgtctggcgatccgaatatgcagattttcggtaaagctgcagctcgtgttaatgtctctctttcatgtggttgtaagcttctagctaaacaaaatttggtcgttcaagacaacggcggtggagccgcatcttctgctgctaaatcatcaccaaccccaatatctcaaaaacaaccaacaacagacagctttgtaaaagatgagtacgagaattactacatagagaacactaaaaccacaatggttccgtttaaaccttggctatatccatacgatcaagataaagcaacgttattcggtttagctatgcaggctatgtctggtgcttgtacatttgaagtctcatataaagttgaaaaacaaaatctattcgtgactgcaactttactaccccctgttttaaaaggagatgcaacaatttaccctcaagcagcattgcgtctgtttaaagataaaaagcaaataggtgatgttgttagattgaaagtggaaaagggatactga

SEQ ID NO: 55914 - DNA, 702 bp, Acinetobacter baumannii
atgaaaaagattattttattaagtttggtttttggtttggtagggtgtaataaaaaggagaataccaactccatcattagtaatgaggttagtacaaccgcttctaacgtagttgctacaccaactgataaagaaaatactttgaataattgggtttataacgaatcaaatgatgagatgcgcggcatcaaatcaaaatttgccagtatcacatcaattaatgatgttcatttttcttcaccttatgaaggtggctccaagcttcttattactttgcgtgaaaaaacaggacaacctctagatgtgttatttgtaataagtaagggacagtatgcctgcgacactatttcacgcaattgctatgcttcatttaagtttgacgataatacggtagaaactgtagagctagatagtactgccgatcatgcgagtgacgttttattcgtgagaaatgacgatgatgccaacttattcattaaaaggcttttaaattccaagaaacttatcatagagcttccattttatcaaaatgggagtaagcagtttaagtttgatgtatcgaatttaaaatggaaccctcctactgttaaacagacaaaatttcaagcagattggggtatagaggagatttcgggatctgctgaagaggcagcagctgcagcggtggcggcagcgacagatataactgaaccagttaaataa

SEQ ID NO: 55915 - DNA, 864 bp, Acinetobacter baumannii
atgctgccttttgcctcaggtattccaaacttaaatcctagatgggaccaaattcagggaggtggaaatgcagcgacaggtacactaactacttctccaactgatatgacccctggtcgagtattgcgagtgggtgattatggttatggcaccttcagcactcctggtggttataccccagctttggatatgagccgtattggggggatcttcaccatattaaatggtgtttatgctggtgtagcaatttcgactaattcaactgatgggataatttttgctggtagtccaactacaactgcatatggtcagtttattggggtcgtaagaagttcaactttacctaatactacacatatttttaaaacagaccgaaatacgactgtagatggaaatggttttattaaagcagcatcacctattgtcaagttgtttagtgatcatattgaactcaatgatgaagctgaaaggcagccaattactttagagaaattaggtacaggtgattacttaattaaagggtcactcggctttgctaaggaaggctggtatatcgaaatccctaaggacgctaatggcaatacagttgttgcagtagtttatgaaactcttgagaacggtgatatttcaattaagacgttcaaacgtaaattcgatattgaaacggccgcaattattgctgatttaagcaatccactcgaaataccagaagggcgctggattgatattcgtctttttgaggagcctattgtggtttctgctgcaccaatggaatttcagccaacaaacttatctgaagctgtagctgctgcaatggctggggtagaacctccggaaatctcagacacagacgaaacactttaa

SEQ ID NO: 55916 - DNA, 333 bp, Acinetobacter baumannii
atgaaagcaactaaattaattagagataaagggctgaaatacgcgaaggaaatcgtagattcagccccttctaacgcaactgaatggaatgagggttatgagttccaatgtggtcaaagtgtagaaatcagcccagcagatcgtgagaagtattttgtagatttggttgagcttaaacgtctggtggagtcggttgatttggttgaatcatggggtggcattgaggacttaaaactatatgacttgtctcatagcaaagataaacctgaatctgctggatacaagttgcttcatgcaattgctgattacgaatcaatatacggaggcgaatga

SEQ ID NO: 55917 - DNA, 912 bp, Acinetobacter baumannii
atgaatgagttggctcttttcgcaggcgctggtggcggagtactcgcatcttatctcttgggatggcgaacagtgtgcgcagttgaacgtgatgcctacgccgcacaagttctggcgcaacgacagaatgatggaattctcgaagctttcccaatttggtctgacattacaacttttgacggaaaaccatggcaaggaattgttgacgttatatctggtggatttccgtgccaagacatttcatccgcaggaaaaggcgcagggattgaaggtgaacgttccgggctgtggtcagaaatggcacgaattatcggtgaagtacgacctagatacgtgttcgtggaaaactcaccaatgcttgtttccagaggacttacaagagtcatcagtgaccttgcccaaatggggtatgacgcgcaatgggcacgtttttcagcatctaacttcggagcgccccatatccgtgaccgaatctggattgttgcccactcccaaagcatcggatgcgaagagaatggattgccaatcggagaggaacaggaaaagtccttgtttggaatcaacggtgaaaatgttgcctacaccaacggctcagcaaatgggaagcaatacttcaatgcggaaaaaaggcgaaacagccatgagccgatatttgatgtggccaacaccaactgcgagcgattcaaacaagtggagcaacgagtctttagccgaacgcaaagagaagcgtcgtcagatccgtctcaacacagcagtttcaccagagggtgggaatggtgggcgattgaacccgaactgggtcgagtggctgatggggtggccaatcgggtggaccgacttaaagccattggaaatggacaagtttcaatcgtggctaaatgcgcattcgaatatttaggtggtgcaaaatga

SEQ ID NO: 55918 - DNA, 1002 bp, Acinetobacter baumannii
atgaaagcagaaaagcgtagaagaaaagtttattacaaatcagttaacatgcctgattccaaacataatcttcaaactttattagagagagcgttaagcacaggcgctttacactatttagcaaaagatcggcatcaattaattaatagcgattcaaaggactttatactgttaaatcatcatacaaattttcaaggtatgttttttggccaactcgtatttgttgagtatgacaaatcacaaacctatttgcggctagatgagaccactcaagaataccagatagaaccactggatataaaatctattcaacctaaagatgaggaaagtgaggaactaaaaaatcagtttatcaactctattctttacttcggtgtttttgaaaaccatttagtattaatgcaatcaccttcactcaaaagcaatcacttagaagattacctcaaatggctattatctaacgcttctctactagatgtaacatcagtactagctttatgtgatacaataaataaagagtctcaggaaaaaatgaaaaaaaatcctgctaaatcacttaaaattggggctcctatagaaacctgtttagatgaatccaagcataattcaaaagtcattgaacaagcaaaatcagcatcttttaatttaacaggaaaagggatggagattttaaaaactgtacttggtcaagataagctgaaagatttgcgattagaagacgggcttgatgcttcaaacctcaaaatgtatgtagtcatgacctatgatagaaaaactactgaaagtggacagaaagtcattgacactgtagctactgcattgagacacttgccagatgacgactatcagattgagctaaaaaatggtgggactatcaaagcaggtgagctaagaatatcttcgaacttatcagttgaaattcttaatggaactgtaaacgagacaaatctatggtctcaaatgcatgcttggttaatgagcaacttaaaaccaaatggctag

SEQ ID NO: 55919 - DNA, 519 bp, Acinetobacter baumannii
atggaaactccagttaaacgaattttcgttaatagctttcattcaattgcaattaccgttgcaattattggagtattgtccttttttatccttagacattttaatataagtttatccaaggagtccttaacatggtgtttaacatttattatggctccaattgctatactttttcaatcaatgaatgctcttaactctactggagaaattaaagatttaactagttccgaatcaaaacgtatagatcacatcttaagtacgcgcggtcgaatgactagaaattctatactcttttatgtcgtctttgcttttgttgctggcgcacttctttggttaaaagtagacactaaaattagtttttcacttattctaggtttattaattactggttctttaagtattgctggagcaattcaagacaatcttgaagcctctcagtttaaaagaaaaattcaagcaagagccaatgagaaagttgaagctgacagaatactaaagaagttaaaagattcgaaatga

SEQ ID NO: 55920 - DNA, 318 bp, Acinetobacter baumannii
atgataatttttctaggattgatagaaaattcccgaactgctgaacaaaacttacaaaactatttaagcgggattcattcggtggggcaagttagctttaaacatcaaatgagaataactgatcttttatgcgatgttggaaaagcacaaaaaccaatgattgaatttatggagttaaatagagaaaggtttggcttaaaagatcaggatgttatggctgtttttccacttgatcgacaaaaattacaagaggaattagaagaattaaaaggtactccttatgaatgtggtaagcagagttataaacatctgttgtga

SEQ ID NO: 55921 - DNA, 357 bp, Acinetobacter baumannii
atgaaaaaatatgttttttgggggcttgtgatgagcctgctttcagcttgttcaaataatgtattaaacgctgaagctcctagagcagctcaaggacaacaagatttagaatctaggcctctagtgcttagcacaagtaaagaatgggatccgtcttttgattgcgacccagttaaagcgaagaaactcgtaggaaaaactgacttaacagaaaagcagatcctatcgacgactaatgcgagagtttatcgaagtgcttatgttggggagccagttacagaagaatttcgcccagacagagtcactatcgttatcgatccaaaaactaaaagaatagttgctagtatgtgtggttaa

SEQ ID NO: 55922 - DNA, 1155 bp, Acinetobacter baumannii
gtgactcaggcacattttaatggtgtaagcggtttaattgcattttccacccaattaaacactgtttctcaaaatattagtaatatgaatacacctggttataagggtaaagatagttttttaaaaaatgttgaaagcaataatggggcaggtctaggggttagttatgaaggaacaagtaccagatcaaaaaatggggactccaagcaaactggaaatcaaactgatttatatattaatggtaagggttactttattttaaaagattctaaacaagatatttattacacaagagctggtcaatttaaatttgatgagaaaggtagtctagttgatcagtctggtacctaccatgttatgggttttgatggggcgagtttggttgaagttaatataaacaattatttatccttgccacccgcacagacaactgtacttgacattaatggtactttaagtacatctgagactagtccctacaagctaagtaatgtcaatatttacgatgctacaggttctttaaggaagttaacggtcaactttgaaaaacaaactgatacaacaaccgtaggtagtaaatggtcatataccataattgatgaaaataataaaacattaaatacgggcgttataagctttactttagctggtactgtacaagaacaatttttagatgttgatctaaattttgataatggtaaacaaaaactaaagctagatttaggtggagttagtgtagtttcagttggaagtagcaatatacaagctacagcgactgatgggggaccaagagctggtatagtaggttataactttggtgaagatggtgttcttgaactaagttataataatggacagaagaaaaaaacaaaccaaactgttggattagctagtttttcagatgaaacaaaacttgtgcaagatcaaaatgctttttttcataaacctgaaaatataaatgtcaaatatagtaaacctgatttagaatattttggaaaaatacaaggtggatatattgaattggcaaatatcgatttagcgcaggagtttggtaatattttaatcattcaaaggggatatcaagctagttcaaaagtgatgaatgtggctaatgaaatgttagagcaactttataattcatctcgtggtggttaa

SEQ ID NO: 55923 - DNA, 414 bp, Acinetobacter baumannii
atggctatagatgctcttggtaatagtttaaatactgctagtagtgaagtaagtagaagtaacttaagtcagaatgattttattaaattatttatgacagaacttacttttcaagatccactagagcctattaataatcgtgaatttttagctcaaatggctcaatttacaaacttagagcaagctagacttacaaatgataatattagtaatcttgtttctattaatgccacattacagtctttaggtattattggaaaacaagtagaaattataactaatagtggggcaaatataactggaacagtttcagctgttaatttttctcctgaaggctcattaattagtgtaaaacaagcagatggtaattttttgaccgatataaaactatcacaaattaaaacggtaaggtga

SEQ ID NO: 55924 - DNA, 993 bp, Acinetobacter baumannii
atgaataatcagatccctaagcatcttcaagaaaaaaagaaacatcattatgtatggggaaattatttaaaaagttgggctttggatggaaaaaaagtttggagaagaacagaatcaggcaaagtggattgctatgaaattagtggaatattgcaccaaaaggcattttataagcttactgatttagatccggatcatattttaatagtgagaatacttttctctaatagtcacccaactataaaaaagatgattgatcaatttattaactttagtttcaagctgcaagtaattgagaatacagttccaaatgaaattttagaagaaggtgaaaataaatatatattaatagcaaaatcaaatactttagaaaatatttacactgatattgaaggtaattctcaagaaattctttatgccttaaaaaatcaagatttatctatattggataatgataaaaatatgatgaattttattattttcattgcacatcaaatgactagaactaaatctatgaaagaacattgtatagcttatataaataaaaataatccaaaattaggatcaaaaatggaagagtgttggtggcttataggatattttcttggacatacttttgggggatccatttatgaaagtagaaaatcggataagcattgtttgcttattaataatactgaagaaccttttattacatcagataaccctgtaataaacatccattctgcaactgaagataataattttactcccttagcctatgatgaaatggatatttactatccaatatctccaaaaattggatatatgattaataattctaatacttttggagaaggtaaagtcgaagttactcttgaaatggttaaaaaactaaatgaaaaaattgctaaaaatgcatatactcatattgttggcagtacagagcaaattatcaatacatataaaaataatgttgggaattggatgaaatttataaaatcacctaattaa

SEQ ID NO: 55925 - DNA, 414 bp, Acinetobacter baumannii
atggctcaacattggctcgcctatcacaaagcacactctaaagataatccttttccttacactgcccttggtcagcctatcgtctatatgaaaaaagaatttaacttacatgcaggtgatatcatttggatgattcaaggcgaaaaggttaaccctaaagagactctattcacattagtcgattgttttattatatatggcaaaattacgccacctgctatagtttcgaatgattttaaatatgcgtataaaggtaaaaaatctttattggcatcgcccatcgaatgggataagaccaataaagattggattgatatacataaagagtttttaaaaaaaagaccagggttattacctgcgacaaattctttagttaatgccttaaaaaatattagcggtattactaaattttaa

SEQ ID NO: 55926 - DNA, 1365 bp, Acinetobacter baumannii
atgagtgagaacccatatcctgaacttaaacgtcctattgctcgtttaaaagatgatgcaaaaaaattaaagaaagctttaaatatttctcagaatgaagctctgaatataattgctactcagcaccactatccagattggcaaactttagacttctacaatacacctcgtaaaccaactaaacagaaaattaaaccgcaaaaagttgcttatccagttattggtgaagaactcattcaacataaccgggaacttttagcaaaactcggtctagatcatagtgatttaattattactgcaacaggcatcaaaaagtctattatggatgctgttgcaccattacgagagtattttaaacttaatcactaccatgattacagtctccagcaacaaggagaaaaaattctaaaacctgccaagttaattaccgctaccactattattgatactcaagtcagcttatatagacccagcactaaaaaaggtgatccaagaatttggatttataagctaaaagagcatgtgcaacctaacgatgttttggccttagtcctagttaaaggacttttatatgtatttaacatctctagaattgatttaaatacccatttaacactactaaatcaatttgtttatcaagtagacgaagttgcattcgaactattagaaaaactaagggctattgctaaattaggtcccttaaaagccgtaaaatctggggatactgcaattggcatgacaattgaacatgccttaggaatctcagcaaattcctctaagaatcctgactacaaaggtattgaactaaagtctgctcgtgaaaaagcaaaggtacagaaaaccagatctactatttttgcacaagtagcaaattgggaacttagccctttaaaaagtagtggtgcaattgtagataaatatggatatatgcgtgaagatgatttaaaactttactgttccattagtacaaaaactattaattctcaaggtttaagttttgaatatcatgaagataaagacttattggtagagaaacatcacattgatggtgaggttgctgtttggaaaggctctactttacgtcaacgtttactagagaaacataaggaaactttttggataaaagccgagtcaattgaaattgacggtactgaacattttattcttaaatcggtaatacatacgaaaaaccctttagttggtcagcttatgcaacttttagctgatgggattatcacaatggaccatttgattaagcgtaaaaatggtacaggtaatgctaccgagaaagggcctctatttaagataaatgccaaacatcttgatcttttatttcctgaacaaaaggaatattcattagaataa

SEQ ID NO: 55927 - DNA, 1578 bp, Acinetobacter baumannii
ttgaaccatattgagttatttgcaggctgtggtggattgtcattgggactagagtctgtaggctttaaattagttatggcaaatgaactatcacctatggcagcagaaacattcgcctataatttttttaatgaagatcttgaaaaattaaataataaaaagagcaaagttaaatggttaagcagtaaatttacaaatgaggatataaaatctagattaagggaagaccctagaacttttccagagctaaatgaagggcaatcagatctagatgatcattcagatttaagtggaaagttaatcataggtaatattgtccaacttaataaatggcttgagaaacatccctttcaagttaatgatcttagtatggcgtatggccaaaaaggcggacttgatcttgtttcaggtgggccgccatgccaaagctttagtatggcggggttaagacaatttagtaataatcggaataccttgccttgggaattcgcaaaatttgttcaaatgacgcaacctaaaattgcgttacttgagaatgtaacaggaatcttgcgagcttttgatgtagaaggtaagaagttctatgcttggtttgaagtagctaaagcattcgcacagataaattacatacctttatgcttacatattaatgcgaaatatgctggtgttgctcaaaaccgcccaaggtttatattggttggcatcagacatgacgtttttgaccaggtttattcatcttttaatgagtatgaaaaaaaactttattcacaagcgataagctttgttgataatttaaaaaaaggattacaagtcgaatatggcaccttatcttattttgatgttgaatatgatgaacatttaacattattcaaaaatacgttcttgaatcctttgatcaaatataaggaaagtgaatttactgttaaagatgctattgatgatctgagaactaaaggtttagaaaagtctaaatatattgaactaattaattctactttaatgccttatagtaagggtgaccctgtacttcggaatcatgatttaagaaacaatggtattcatgttcaacgaagatttaggatttatcaaatccttcaaatgttagatagtacaactaaaaaagaagctcttgatttacttaaaggaaaaatagataaagtttctgagtcaacagctaaacaattgttgaattatgattatctcattgagccaaatacatatgagaaattcgaatcaattgatagtttgataagttactttaatgagcatcaaactaaaaaacagacgcaaaaagctttaattgcaaatcagccagctcctgcagctctatctattccagatgatgcttgtcattaccatcatgatgaattaagaactttgacagttcgtgagatggctcgtatacagtcttttcctgaccattttgtatttagatccaaagtcacgactggtggccaaatgaggcaatttgaagtaccacaatatacacaagttggtaatgctgtgccgccgctattgggacaagcgttagggcacgttataaaagcaatcctagataaatatcaaagttctaattag

SEQ ID NO: 55928 - DNA, 444 bp, Acinetobacter baumannii
atgactcatgatgagtattcttcacctcgctcaaaaatcatgtctagtattaagagtaaaaacacaaaacctgaactgatagttcgtcaaagactacatgctttaggctttagatatatcttgcacgacaagaggttgccaggaaaacccgatattgtcttacctcgttataaagcagtaatacaaattcaaggctgcttttggcatgggcatgattcatgttacttatttaaatggcctaaaagtaggcctgaattttggtatgaaaagataaataaaaatattactagagacaaggctaatcaggaaaaattattagagttggggtggcgagttctaatttggtgggagtgtaatatacgtagttcgcatgattttgaaataggtttaacaaagacggttgagtggattaaaggcaatcagtcatatatggaaattagatga

SEQ ID NO: 55929 - DNA, 384 bp, Acinetobacter baumannii
atgaaacttagttttattttaccagctttatttctagtattccctttaacaacatatgctcaagaaactacatctcaacctcaaattcaaaccactgcaaatccacctatttgcttaattgagggtacaccttcagcagagcactataaatctattaaacgtattaaagctgcgaaaggaacctatggtggctttgaagaagtaaaacctaaattagctaacgttgcccgtaaatatggtgcagatgtggtaattaattatcaccaaagccaaagatttggcttctggccttggcgtattgttcgtccagtactcacaggtactgctgtgaaatggaatacaccatttaactgtgctgccttaggtggtaaagaaattcgttaa

SEQ ID NO: 55930 - DNA, 462 bp, Acinetobacter baumannii
atgaataaaattttcctatccctcctattattatcattatcaggctgcgctgtgttatttccacctgcttataatcctgatgctgtgatgtcacatttcagagaaggtcaagcgagcaaagattccttctacgttagctataaaggtaatcgtggtagctcaccagaacaagcaagagattttgttgttctacgcggtgctgagttagtcatgcaaaatgattttcgctactttaaaattcctaaaatgaatcaaggcacgcttgtaaactctaactatcatattgcttctggggtaagaaatgatacctaccaacctatggttgaagcacaaattataggagtcaaagactctggagcagatagtgaagtcttagatgcaataaaagtagcgaaagcattaagaattaaatatcgacttagatataaattgacgccattagagctaaaatatagctattaa

SEQ ID NO: 55931 - DNA, 321 bp, Acinetobacter baumannii
atggcatattctgatactcctagccttcaaacatcgtgtgaaaatataagcgtacaagcagtaaaagttatggaaaggagacaagcaggtgtaaccttaagtcaggaaaaagaagccctcagaaaattcatgggaatacgtaagtataattctgaaagagtaaaatccgcatttgaaacagtcatgaataaaattttaattgaagtttataaggagaatatcaaagaaaatgactttaaaaatgaaatgatgatcagtcgctttagacaaaaaattttcaataaatgtttatctggtgagcttattgatgagtcaatataa

SEQ ID NO: 55932 - DNA, 429 bp, Acinetobacter baumannii
atgggtagaatattattatcttttataagtttattgattattagtccagtgtacagtgctgatgattttttcgaaaaaaaaccttctattttaattgctaaagatgaagaggctcaaaatactaaaagtggtgagagtgttgttttttttgagtcagcaatgcaacaaaaaataaatcgtacaaatcaaatttttagaagggctgagcgagataaagatgttctattccaaacgtcaaatatgactgattatgataaatcacaatattacagagaaaataagtttgctaattatagaggttattctccatacattgaatctacacctaatagaaaagtaatttcagaagaagaatatgaacagctaatggagcaaaaaagaaaagagagaaaagttgatcgaagcctttggtacctattagataagtaa

SEQ ID NO: 55933 - DNA, 1323 bp, Acinetobacter baumannii
atgattttggataaaaaaagacatagagagtataaattacttttaatagattatgaaaaaacaattcataaagtagtaaaatgccctcattgtaatgataacttaaaaatatatgaagttataacttcatcttataaaacatcttttggagtaaaaattcctgagcttaatgaaataggttattgggttgagaaatgtaaaagttgtaataattttttaaaaataaagttgaataatcctgatttattgaaaaattcatatggttgtagtaatttttatggttttttcatagatgaagatttttttgaatttaaagataatattgccttagataatataaaggaggtcgaggaagaacttgttgataaaaaaatttttaaaatagactcttttcaaaattataattttaatgaatattttttgtatttttgtggaaaatgtaataatagtctggaggttaagatatttgataagttaaaagctaataaaaaaagtatatttaaagaatatagtaattatattaactggtcattagctagtcgaggttattgtcccaagtatattgttgtaaaattaaatattgagtgtgattgtggagaaaaagtcaatgctttcttatatgataagtataaggaaaatttaaatataaacttggaagatagtattttgttggctaatgtgactaatactacttctctagataaaattatacaaggggtatttactaaaacagatataatgaattggttatataagttgcttgtgcgatggaatcttttatttgacaccgtttacttgatttctccatttgttggacatcagtttttaaagaaagataaaataattgatacttggactaaaatatttaaatttttagatcctgataaaagtaaaattatagtaagaggaagtcaattgacttattttaaaaaatcattcaatgaacttaatgatgtgaagtatgaagatttagttaaatttaatatcgggtcacgattcattaatgagtcaaaaagtaataataaatttcatgctaaatttttttgtggaataaagaaggataggtgtgaagttatgagtggttcaagtaatttagttgaaggtgtttcttacgaagttattaattttaatactttttataataatgaaatattttttaaaagatatttggagccattaggtttggataaccctagttattccaatgacttaagtgaggggtgttctttattttttgatgaggataatgattttaaaattacacatgattctcatattaataaagaaaaatgttcaaaaataatttttggtattgatagttaa

SEQ ID NO: 55934 - DNA, 2715 bp, Acinetobacter baumannii
atgactaataatttaggaagccaatggtataaattcgactttcatacacatactccagcttcatttgactacagagattcccgtgatatttctcctaaagagtggttaaaagtcttgatggaaaaagagatagattgtgtagcagttacagatcataacagcggtctttatattgatgatctaaaaacagcttatacacaaagtatgcaagagtcgtggtttagaaaaataactatttttccgggatttgaacttactgtttctttaggcgcaactcgtattcatttattagctatcttcgatccttctttttcaagtaatgatctcacactgattttgggacgttgccaattaaacggaggagaaatgggagatcctgagaattgtttttcgacactttctatcatggatgttgttcggcaaataaattcttcaaatggtattgttatgcctgctcatattgaagggtctaaaggacttttacacaatattgtaaatacttcacctgatttaaaagcaaatttgaaattatttgatgttgctcaatttattgatccaaatattttaaatagtagtcaacttcatggtgatctcaaaaaagattgcaaacatttagcagttgtacgaggctctgatgcgcataccttagctcaattaggtgaaagttttagttggattaaaatgggcgaaagtaatattgatggcttaaggtatgctttaagagataaaaattattgtgttcttaatcaaatagaaagtccaaatcgacttccacatgcctatatacagaatttaagtattaagcaaatgaaccattgtgggagaaaagaaaataatattcctacatttcaactccatccattattcaatgccattattggtgggagggggacaggaaagtcaacattcattgaatcattaagattgtctttagggaaatcacaagacacaagtgacttagaaaaaatacacagtgaaatacagagctttattaatgaattaacaaatagtaatacggaaataaaaatatctgtaaagagtcatgctactgaatattcttcaaaatggtctaaaaataatcctatagaattttataaaattgatgatggaaattttcttgtagatgaaggaaatattaaagatcgattcccagtgcatttatatagtcaaaaacagattaatgcattagcttcacatcccaatattttattagagataattgatagatcacctagcgtcaatacaaattattataaagatttaataagtattaaaaacaatcaaattatgaaccttttagcggaggagagggcattaaaaaactccatatctatggagggatcactgaaatctgaattaggcgctataaataccaatattttaagttttcaatcaggtggtcataataatattctaattaaccatgaagtctgtatgaatgttcaaagagctttaatatctagtcttgatatgagtgacttaaatgaaaagttatatcaaatttctaattcacaattacctaaactaatactagataatattaatagcttgaaagattcaatgaaaattgaattgtcagaaattaataatgtattcatatgtgagttattggaaattattcaagaatttgaagctttaaaaataagactagattcagcaattttaaagactaaattaaagtatgaaaattcgagctgggctttatttaaaaatgaaaatgagaaatcctatcaaacaatgttggaagattatacatctaaaggaatgccttttaataatgaacaatatgaaacatggaataaacgtaagcaagaaattgttcaaaaattatcagaaattgaagatcaaaaaataaggctacaattcaatacacaagagtggcaaacttgtatggttgaaatcaaaagattgagagaagtaattcaacaaaaaagacaagaatttattgactcggttttaagtaataataattatgtaaaaatgtctattttaccttatggggaaacagaaaatatagagtcaatatttagagaaattattggcacttcttcaagttatataaatacaatttataataagcaagatagggagcggacacttcttaatgagctaattcattgtgaaattggttcaaagcttaatgctaaggaaaatcttcttaataatattacaagtttaataaatggtaattcactgcctcaattttatattgatagtagatttataaatcatctaaaaaatcgatatcaaagtcaaccagaattttggacaagattattaacctggtttccagaagatttgcttgaagtaaaatattctagaaaaggtgatggtaaagagtttgttaatatttctaaaggttcggcaggtcaaaaagcagctgctattttggcattcttattaagtcatggtaatgagccaattattattgatcaacctgaagatgatcttgataatgaacttatttatgatctaattgtaaatcaaatacacagcaataaaaacaatcgtcaaattattattgttactcacaaccctaatattgtagtaaatggagatgctgatttagtaaatgttatgcatttccataaaggacaagttgaaataaaaaattgtggaagtttaattcatgaatcgattcgaaatgatgtatgtcagattatggaaggtggaaaagatgctttcagaaaacgttatgaaagaataggtatataa

SEQ ID NO: 55935 - DNA, 246 bp, Acinetobacter baumannii
atgaaaatatttgcattaattttttcaattctttggatcatttctgttagtgtaattttgtattttaagataaccctttggggacttgatgctaataaccttagccttattctttcagcaatttatgctctcataacatctgttatgtatttttatccttccagtgagggtgcagttaagcaaacagctaatgctgataataaaagtacaattactcaggtcggaagagattacaaggataagtga

SEQ ID NO: 55936 - DNA, 741 bp, Acinetobacter baumannii
atgcgcctacattttattgttcatgaagaatttgaagcacttggtgcatatgaaacttggggaaaaaataataactttgaaattacatattcaagagtatatttaaatgaagaattaccttcttctgttgaggaaatagactttcttatcataatgggtgggcctcaagatccagatacaacaaccgatatgtgccctcacttcaattctcttgctgaacaagaggtaattaaaaaagcaattgaaagtaataaagttgttttaggaatatgcttaggctctcaattaattggagaatctttaggtgccaagtttgagcatagccctgaacgagaaattggtaaatttcctataatgcttacagaatatggaattaaaaacccaaagttttcacacttagggaaaatgacagaagtgggccattggcataacgatatgcccggtttaacaagcactgcaaaaatcattgcttttagtgcaggatgcccaagacagattgttgaatattcaaaattagtttatgggctacaatgccacatggaattaactcatgaggtggtggaattactcatacagcactcagtagctgaattagatcaagctcataattataagttcgttaatagccgtgaagaattacgtaatcacgactatcaagagatgaacgagaacctatttatttttcttgataaattgaaagaagaatatttaaacgaaaataacagagaaaacccttactaa

SEQ ID NO: 55937 - DNA, 1122 bp, Acinetobacter baumannii
atgaataaattacattcacctgaaagccttcgtggtatagcatgtattgctgttgttttttctcatttatttggtgttttctttcctcaactacacaatttttatgagtctagtttaccgaaatatgaaatagcagaatctatctttaactccccttttactttcttctactcaggtactggtgctgtttttgtattctttgcattaagtggatatgtattaacactatcttcgctcaaatctaaagatagtataaaaaggttctgggaatcagtaataaaaagatatcctcgcctagcaattccagcaattggctcttgtttatttatgtacctagctctacacatcgatatcgatgtatctaaaacatctgagtggtttcaaacagttaagttagttaattactcattttttgatgcactttatactggtgcaatcggagctttcgcttttggatcacaaaaatataatcctgcattatggaccatgcgtatcgaactaattggttcattcatcatctatatcgcttgcttaattcaagtgaaacccatgtttaaacatttattcctcttattaatttcaattgcatctttcaaactttcactcgttccaatgttaggtattctaagtttcataattggacactacttttatttttataaaaaaacattaccagaatttttatcgatccttatttttatcctaggcttatatttatgtggtgcacataatttaagccagagctatactttattttctaatcttttaggtgaaaaaacctatgatattctcaatttttttggtggattcttaattgttcttgcagttttaaagtcaaaaattattgataaaattcttgataaaaaacctttagtatatttaggaaagatttctttcgcgatctatcttgtacatatcactgtaatttatctagtatgtattcctatttttaatttcttattaagaaattcatacacttttgcatcgtcagcaatactctctagtattatttcttttatcgtaatcctcgtagtctcatcaatatatagtagatatatagatgatatatcaataaagttttctaataaattagcccgaatttttattaaaaaaagctcttaa

SEQ ID NO: 55938 - DNA, 939 bp, Acinetobacter baumannii
atggctgcagcaattaaatcagacggactttataaaggaaataaagtcgtacctaatgcaatggattacattacggaaacggcaactaaaacaatttttcttaaaaaactctatgctcttgcgggcgaagatgcaaactatataacagatgctaattcagtcgatatttttgactctttaaacagtcatcgtttaagggttaatgaagatggaggtattattttatcgcttgctagtactttgcgtgctctagtatttgcgaaaaagaatttaattcctgccactaacttttcagcttattcgattgattttggggttaaattgtttggcagcagtaatactgttacaaagctttatgatttgtctggtcgagatatgaaagttttgataggtgcagtagaacgatccactgatcaaggtcataatgtattaaaaaatacagcaatttctactcttattgccttatcttcaatggcgggtaatcagggcatgatcttaggttcaagtcttcacgatgctgatgctggttcatcttcatctcaagctgtaagaggcatgtttatgtccgataatccggcatcttcaggtgtctctttaggttaccttgagtcaaataatggtggttatagtagactttattatcgaagagcagctgatggtcaaacaaccaacgtgtcttatgaccagacaaatacctataaaagatacactggactagtcggttatttatcaaactcaaataatcgggtggaaatatacgaaaatggtttattgaaaaatgcgacaacagctgctcaggtagatattagtcaagctacaatttatccaaccatctcggccttgtccttaaactcatttctgcgtgaatcatggattatccgttcaactgatcagctcttagctatctcacttagtaattatttaaataaaagctcttaa

SEQ ID NO: 55939 - DNA, 1752 bp, Acinetobacter baumannii
atgacacaattaccaagcgcagaatcctttgtcggttctggagtaactgaaagcggtttcaaggccgcgcaaacgcagctaattgaatatattggtgtacttaatggaaaagtcgaagcaaatggtgcaggccattacggtgtagatacttatgcgacagcaaatgccattaaaggttctttgccagcgggtaccatcattgaagtaatgaatgatccagatatcaccaagaatggatcttatacttggaatggaacaactctcactttatccggatatgatccttaccagcgttctaaaagctatacggatcagcaagcaccaatctatgccgagaatgcagttctgaaaggcacggaaagcttatacaaaactgattcaaataacctctacgagttccccgatgctaacggaaacattccacttatcgtagatgagatgggcaatgtaataggaggcgatttccaaacagaagacggcagtttaagtagtattgccaagatggtgatctatctggatattcccggtgttgcaatcgcattcgcagatgaagaatttaatattttaagtgtgattcgagaggatggaactgtggttcattctatcgaacctactacttacggtatttcagaaattaggtcaggaatggcgagcaatgaggttgtaaatgacatagcaacggcatttgatcaagacttggttgcaacagatacccctttaaaattttcagtgaccgtgagccctttccaagctgacggcacacgtcatcaaaggatggctagtgctattaaaacgggaccaaatcgcctatatgttgcttttactcagtttagtactatgagtactgatcaagcggatgggcggttagttggaaggtttgtagattttgatttaaaaagtcaaacagcttctgtttcagaaacgatccctattattggtgaacagtacggaaataattatagacatcctcatttcattcaattgcgcgacagaatcctaatgatttttaacggtgctattaatgaactctttgtttatgagtcatttgataattgtgagacatggcaattaaaaacaatgattgattgtccacctgatcagccttgggcactagcgattgatagtgctgtattgattgaagacggtcgttataaaggccgtattgttctagctttattcagatatcaagccgatggcttggtaggtacagtttatagtgacgacagtggtaagacatggatccgaggccaaaacatttatggttctcagctattccctaattatccaattattaatgaaacttcagtagctcttgattctcagcagaatttaatttttgtgatccgcaatgagggaacttcgcctgaatcacgatatttaatctttgctaaatctacggatggcggaaaaaccttacagatttttgaacaaatgcaaagaactccagctctagcctgtcaaacaggcttaaagcaaacatcgccattaatctttgatggcatgccacgaatcattgccacttgtccgacaagcggcggaggtaatcgagaaagctttcgttttagaatttcttatgacaactgtatgagctgggcccatgaatacaagccctttgctgatacattgagagtaggttattcaaccttaatacctcttgatcaaaaaacctatgcactggtttatgaagaagggaccatgaacgcttcacaatcaatcaaaatcacatttctgaacttagcagaggtattataa

SEQ ID NO: 55940 - DNA, 645 bp, Acinetobacter baumannii
gtgtcaaacgtattatttccagaattacccggtcttgaatgggatctttcaaagactcctatgtttaataccaaaatcatgacttccattaatggccgtgaacttcgggcgagttttcaggcctatccgaagtatgaaattgcgatgtcttttgcctttctaagagagtcaaagggaagagcagagctacagcaattggaaggtttttatattgatcgccgtggctcatttgattcttttctgtataagatgcctgacgataatcagtttacttgcaccatcgttggggatggatcaaatgaatatcaggtatataagcaagttgggcaaaccaaacagtttttaggaaatactgagccagacctaaccgaagatcgtgatcctttaatgtgggatccagattcgagtaaaagaatgtggtcaaacgaagatcaattactttggtttacaaggtttggtttaaatgccgatggaacaattacttttgcacaacctctggcagtaggtcaaaaagtaacagtatctggtacatattattaccgatgccgttttaaagacgatgaacagcaatacacaaactttatgtataagttgtggaaagcttcaaaaatagaacttatcggtacgctaggaaataagatatga

SEQ ID NO: 55941 - DNA, 363 bp, Acinetobacter baumannii
atgattgatgataaaataaactcacttcgctctgcaattattacgtctaatgataatttagatattcttgaagtacttaaagaggctttgcctgaagggtattcttacgaaagggaagtaccagaaataaaaattggtatagaatatgttgatgttatcaatacacctaatgacaaaattcatattattgtttctgaagataaaaagtctgctaaaaccttaaatgttattaaccaggatactctagatgttcagccatctatagttaatgatgaactttcgaaattagcagttaaacttaataaaacagaaagtgtaagtatgcaagttattgcatctcacaatgatttaataggcaattaa

SEQ ID NO: 55942 - DNA, 336 bp, Acinetobacter baumannii
atgaaaaaacaaccatcagcaaatgacttaaacgttttaaatgaaaaacttaaaaatcttgatgactcaataaaagaattattagagtcaacttatgaattttttgataatgatcaatactatagtattgaatcagcgtttctacttgatcacgctctaaatataaaaatgcatttttttaagtcatatccggaattggcaccggagcatttaaaagatgttgagcataaccgaattatccatattgaaaatactcaagtatcccatacacgcgaaaagaaccccgaggatagcttggatcaagttcagcctaaatactcaaaaaatgagaattaa

SEQ ID NO: 55943 - DNA, 231 bp, Acinetobacter baumannii
atggtaaataaaatgaatatatgtgttggtggtgaattggatgggcaaaagatagaaaaagaaggaagattgcttaaagcatctgatatcgacccatcgtttaaaactgagtactacaagcaagtttttaaccgcgacaacacagtgttccatttctggttaccggtcggatctaatttgcacgtgatgtcagaaaaagtcttagatattttaagagcacctaaaaactag

SEQ ID NO: 55944 - DNA, 558 bp, Acinetobacter baumannii
atgcgttgtattagtacatttttagaaaaaattgatcatgaaatgcctaaatacaatgaaattaatattaatcgtcaagcttataaaattgatggaaattcaggcataaagcttcattgtcaaaaaggtgagcttaagtcagtagattattttgataatcatccagtaaagggttttttatacctagagtttagtgatttgatagcaagtgatgaacaaattgcagctaaaataaatgaaattgaacaatcaaatttatctaggaagttaactaaagaacttagaaaaaattacactagttctattcaacgtgaattagttcaaaaaatcaaggatactcttcatttgcaacaattaatgggtgagtacattgaaaatattcctgagttctttcaaaccttaggtaaattcgttattgtcattgcgccaatagagcaaggtaaacgttctgatgtatcaagatgcattgataggtggagatcagcaatacttacaagcatgcctaaagatatgtttaatgaagtaatatttattactttagatgtttttactgcttaa

SEQ ID NO: 55945 - DNA, 708 bp, Acinetobacter baumannii
ttgcataatgttgtattcgtagagtctccaatttattggaaattaagaaagcctttaatggaaattcagaaaagaactagaggcaattcattattccattttaaaaatagccagtctgaactttcaggcattcctaaatttttctttgatctcatggatttgcttagtctagacattaagtcaaatgatgaatcaaataatttctctaatgttattcaagcaaaaattaataaagctttatctggtgaattagtaatttctgaaactggagaaatttattttaatgatcaaggttgttcaaagaatattaatttaaacttaactgcaactggggtcactaatttaggtattatcggccttttagtcaaaaagaatatcattgctaaaggtagtttcgtgttcattgatgagcctgaagttaatttacatcctgcatggcaaaaaataatggtagaaagtctttatgagttaagtaaaaatggcattaatgttgtaattgcaactcatagtattgatatgattaaatatattgaaaatattatgtatgagttagatgatgagcaggttaagtcccattttgctattaacagactttctaatgatggtgtatcgataacagaaaaactgagcccaaaagaatcactactacgaataaaagatgacctaggtgaatctttttataatatggtactggaaactggttggtaa

SEQ ID NO: 55946 - DNA, 1347 bp, Acinetobacter baumannii
atgagtgatagtgtaaataatattgtcaataacattttaaaaaaactaaatacctcttcctttttacaatattcaggaaaagttaaagaaattaaaggggttagtattgaggcagttggtttaaatgttagcattggtgagattgtagaaattattcatcctaataaaatgaattgtatgtttgcagaggtaatttcggttggtgaacaatctttcactataatgccctttggtgacattcatggtttaaatcttgaatgcaaaattgtatcctcaaaaaaaacaattcaaattcctgtaagtctcaacttgcttggtagagttttagatgctttaggaaatccaattgatggtaagtctttaccagaaaatgtagagttcatctctaaaaacctaatacctataaatcccttgcaccgagttccaattactcaaaaattaaacacaggaatcaaggcgatagatttatttactccaattggaatagggcaacggataggcatttttgcaggaagtggagtaggtaaaagtactttactaggtatgttgtgcaaatatgccacagcagatgtgattattgtcgctttagtgggagaaagggggcgagaggtcacagattttatttctaacgtattgggtgagcaaggtttaaaaagatcaattatatatgtcgctacagcagaacaacctgctgtttttcgaagatttattgcttatacggcaacaacagtagctgactggtatagagcaaaaggttttaatgtattactggtaatggattctattactagatttgcatatgctcaaagagaaataggtttggctgcttctgagccaactggattaagaggatatccagcttcggttttttcacaacttcctcctttgattgaaagaggaggagctttagtagggcaaggttcgattacatcaatctatactattttagttgaaggtgatgattataatgagccaatatctgatcatatgcggtctattttggacggccatattatacttgaccgtaacttagctgataaagggcatttcccagcaatcaacgtattaaaaagtattagtcggttatctagtattttacatacaaatgaacaaaaaaaacttattgctcagttaaagaaatatttggctttatataatgaatacgctgatatgatccagcttggcgcatatcagtcagggcaaaataaattacttgactgtattattcaatataaagtagaaattgataaaattttaattcaaatggagagtgagcatataaaaccagatagtagctggataatgataaaaaatattgtctctaaaattgattctctaggtgaatga

SEQ ID NO: 55947 - DNA, 696 bp, Acinetobacter baumannii
atgagtaatcatgatgtgtcttctagattgagagaagttttaaagagtgataaaaaagtcactctgggtgctatggttgacaaggttagcgctcaaaaggaaattaaacagaatgtagaaatgaaaaatgatgtatcatcaaaaaaagaaagtggggatgatttaagggagaaagaactatctattttaaaagagcaatatgctaatgaattcaagaaagttgttgagcttgaaaaggcaaggctaaaagatattcatgagaaaaaaatacagttattagaaagtcaatttaaatctaaaatagattcccttacctcatgtattgctgaatttagaaaaaaaactgagtctttaaattcctctttagagctcattgcgataaaaactatagaagaaatcttaaaaaaaatgactatagatttagctaaacacgaggaatttattgctgatattataaaaaaagccttacttgattataatcgagaagaaggtttaactctaaaagttaacatacatgactatgagatgattaaaaaaattatttctgaaaataatttattagcaaattataatatagtaattgagaaagataactctttaatatctggtcagtatttaattgatctaaaagaatctatgttagatattggggttgtacagcaatttgataaagttaggcaattattaaatgagtga

SEQ ID NO: 55948 - DNA, 426 bp, Acinetobacter baumannii
atgaaagatcaaaatattgctttacgcagttggatattaatgttttgtagtttaacttccgatgagcaagaaaaaattcgtctaaaattggatgagtctgaagttgaaaagttggaagagcttttacaacaagttcaagcactgggtattgattctaaaaaaatatctattaaagattttattgaagataacttaaaaagctgggattcatattctgagttattaagtaaagttatgcagtatattcctcctgtttggtatgtcttacttgaagataatttttttaccgaagtttctttaaaaaaagatcctgcttattacaaagagtatatgaaatataaagaaatttttaatcaatttaagttggcaccaaaaatgaaagcttcgctgagtaattatttttatgagaaagtaatatatgagtaa

SEQ ID NO: 55949 - DNA, 1332 bp, Acinetobacter baumannii
atgaatttttggggtaaaaaatccgtttttttcataagcggactatctattattatcatttgtttcataggtgcttgttggtggtttttaaagccaacatatgtacctctattacaacagaatgataaaaatattcaggcaaacgtaattaatatcttaaatacatcaaatattccgtatgtatttaagaataatactattgaggtggaagaaagcaaaattggtgaggctaaaattgctttagacaagggcgggttaagtaatccagatacggttggttttgagctatttaatgaaactgattatggtatgtctgattttgctcaaaaaattaactttcaacgtgcgttagagggagaattagcacgatcaattatgactatggatggcatgaaatatgctcgtgtacatttgacgcctgaaaaagatacgatatatgaagttgataaagccacagctaaagcatctgtggttatagagactttaaataacactcagttaagtagagatagtattgaggggattcaaaacttagtttcatctgctgttaatggtttagaagctaagaatgttgtacttttgaatcaacaaggagagataattagcaataatttagccacttcctctaactctttgaagcgttcagaagatttagaagcaaaaatagaaagtaaggtaagaagtatcttataccagtctttcaatattaataaagtcagtgtgtctgcaaatgtccaaataaatttggacaaaagaaaagtagtgcgtgagaagccaattttatctgatgctggaatcttattgctaaaaaagaaagaaacctcttccactattttaggggcagataatacaaattcttcgcaaaaggatagttcacatgataatgaatatgctatcggtaaagaaacttcagaaattgaatatggttcagaaagaatcagtaaagttaatgtaggtgttattgttccaagtacattaggtccaacgcaattacaaaatattcaacaagttttagaagctggattgggtattgataaaaaacgcggtgataatttagttttagtaagtagtatgattcctgctgaaacagtacaggaccaaaagacaaagaacgaattattaaaaacagataatgaaaaaaaggcaacaattcaaagtagcctaacaccatttatgataattgttattttttctttagtcatactagttctctttttgattttaaggtttgtacagaaaccttctaaaaaggtagttgaagcagattcattgacagatgaagaaagagagaaaattctagttaatttaaaatactggttaggtaaaaattag

SEQ ID NO: 55950 - DNA, 297 bp, Acinetobacter baumannii
atgtacaaccttgaaccaataagcttagataaagtcacatcatttccaaatataaaaagctcttttgtttcttctaaagaactaaaacacttaagctttttggatatattaaatagaaatgacgctttgtatgagaacgcaactgataaagtgatgaaatatgcggcaggtgaaaatatacctgtacatgatgttatggttgctatggaaaacgcaaaactatcatttcaatttgctgttcaagtaagaaataagttagttgaaagttatcaagaaattacacgtatgcaaatttaa

SEQ ID NO: 55951 - DNA, 402 bp, Acinetobacter baumannii
atgcagctgtcttctaatttatctattcaagatatagtttcattcggcttaagacatgaaaaggctcgagttgaagctgcaagttataatattgcaatagctaatgttgcgttacctaataaaaatgctaattcagtattgcatgttaaaactaatttatcttttttaaatgatatacaaaatagtatccatatagaaagtacacctggtgctaatactaaaagcgtatatgaaccgaatcatccattagcggataaaatgggtatggttttttatcctgaagttaatactgctacagaaatggccactttggtttctgcaagcagagcatatgatgcaaatattcgtatttttaatacgattaaggatatgaccactaaagcatatgaaattggaaaataa

SEQ ID NO: 55952 - DNA, 345 bp, Acinetobacter baumannii
atggatagtattaatagtattagcaatacacttttaaatgctatgaacatacaagatatgcgagttagagttgcgtctacaaatattgcaagtcttaatttagtggatcaaaaaggaataaagtttgactataaacgtctattaaaagatatatcagctcataacttagattataataaattagatattgagagatataaatctaatactcctaaaagcttaataaagttggatgaacaaacttttgaagcagttgctgcaagtggacgctatcaaggtattgccgaaatgttaaataggaactatggattaatgcaattagtaatacaaggaaaagaagggtaa

SEQ ID NO: 55953 - DNA, 1104 bp, Acinetobacter baumannii
atgaaaaaaatattaattggtatagtggctttattttgtctaaattctgctattgctgctataagtacagttcggttaaaagatttagttcgtgtacaagataatcgagaacatgtattaattggttatggattggttgtggggttagctagaagtggggattctgacagaaatagcactactagacaggcactggtaaacactttaaagcattttaacgtcaatattaatgaacatgacttgaattcacgtaatacagcagccgtcatgattactgcaaaaatgccgccatttagtgaagttggtgataagttcgatgtagaagtatcttccataggtgatgctcgaagtcttttggggggtactctaatcttaactcctttatatggacctgataataaattgtatgctttagctcaaggtccacttgcaactggtggttatacatttgaggcgaatggtaattctttccaaaagaatcatgcaacagttggacgtattcctaaaggagcatatctagaaaaagctattgaaaatcagttaccacaagataaattggtgcttattttaaatcaacctgattacacaactgcaaacagaattgctcaggttatatctcgtcaaggcgtagtgaacgtaaaagttgtgcatgctggaaaaatagaaattctagttaatccttatacgccaataccaaatcttatagccaatattgaacgcttagaggttgagccagatcaaatagctaaaattgtaattaatgagaaaacaggaacaattgttgctggttcaaatgtgcgtataggtgaagttaatatttcacaaggaaacttaaatataaaagtcgatacagagtatttagtttcgcaaccaaattttattggacgcaattataatcataatatttcaacagaagtggttcctcaaactgatttaaaagttacagaggataaagcaaattttgtttctcttccaaaaggggcaacagtagcgggattagtgcaagctttgcaaaaaattcacttaaatacaagagatatgattacaattcttcaagcaattaaagatgctggcgctttaaatgctgatttagtaattcagtag

SEQ ID NO: 55954 - DNA, 573 bp, Acinetobacter baumannii
ttgattaataaaattgttcttattgtgagtatcttattaactactcatgcatctgcacaaactagtttaattgatactgagaattatcaggctttgacgagtgataggcgtgcaattaatgtcggagatattttgacagttcttgttgctgaatctacttcagctaaatcatcagtaggtaccaatgctaaaaataaaacgaatttatctttctcggcaaatactttaactgccaaggcagatgctggccttggaatggaagggggagcaagtggtgagggtaatacgtcaagacaaggtcaattaagaacagttgtttcagtacaagttatagaaaagctttctaatggatatttaaaagtagcaggtaatcaagaagctattattaataatgataaacagcttattcaaattagtggttatataaggccagatgatattagctatgacaatactatttattcgtaccgtttagcagacgctaaaattcaaattaatggtaaaggtgtagcaaatgatgctcaaaaattaagtattttttataagctttttcattggttaagattaatatga

SEQ ID NO: 55955 - DNA, 687 bp, Acinetobacter baumannii
atgggttttagattatcacttatttttttatcatttatttctagctctgtaagtgcatgtttagatctaaattatgatcagcttattacgcaggctaataagctagtgtctgaaaaaatagaaagtgatagtaggctgtcatctcaactcttccccttgtttaatatttctaatcattcctattctcaaattaggctgatcacttctatttttcagcctagagttggatttgaagtaatggattgtgatcctgagattggtaagcaacagttaaaaatcttatggtttcgtccagaaattaaaacaaaagcttggatatttaagcaaaatgcgatacgtaaccaaccgctctcaaaaattgaaataagttatgaagatattgaccttattaaattaaaagtaactcaggataagttagccttggggccttttgatgaaaaaatatggcttgttgaagcagcaaaaatcaatactcctattctaaagagtcatttaaagactgctccattggttgttagaaatcagacagttaaggttattgctgtagctaataatattatggttgaaacagaaggggtggcacaacaatttggacaatatttggaaaaagtgagtgtgcggttaccaacaaataatcagctcattagggctacagttataaaagaaggaacagttaaaattgattaa

SEQ ID NO: 55956 - DNA, 756 bp, Acinetobacter baumannii
atgattgacgcaataagtattgcaaattctggattaacagctcatcaaaaatggttagatacaatttctagtaatatctcgaatatgcaaactatgggatataaaaaagaaaacgctcagttttctaacctcattgctacaaataattttaataatgttatatctcagcagggaataggtgtttctttagagaataattatactgattttaaaaatggggatgtacaaaccacaaatcaaccttatgatttcgctatacaaggtaaaggtttttttgaaattgaacaacctgatggaagtttagcctataccagaattgggcagtttcatgtgaatgctgaggggagacttgcattatcaagtggtgaagttttaacagcagatattcgtataccatctgacgtagaacatgtaaaactaacttctgatggcattttaagcggtaaagtgattggtactggtgaagagttagaactcggtaaaatagagttagtaagtttcaataatgatagtcagcttaagaaaatgggcaatggtttgtatttaccaacccaattaagtggtgagccacaatatggtgaaatgaattccgaaggcatgggaacggttttacaaggacatttggaaatgtcaaatgttgacctagtaagtgagatttctaatttgattatggcgcagagagcttatcaattaaatgcaagagtattacaagcgggtgatcaaattatggaaacaattaataatttgagacgttag

SEQ ID NO: 55957 - DNA, 726 bp, Acinetobacter baumannii
gtgacagacccaattatgcaattgtctcaagttatccagcaagagttcaatgctttaaaaacagtttcacaaaatactgcaaacttaaatacagttggttatagaagtgaaggagtgtttagcactttagcaacaccatcatcaaataatagaactttttctgatatagaacagaggcagatggtatcttatattaattcaaataatggatcatatataaatactaacagagcacttgattttgctctatcaggtaaagggtggtttgttgctgctaataaagatggatttttaataacacgcgatgggcattttcatgtcgataaaaaaggctatctattaacagaacaaggtttaactgttttaggcaaagaagggcagccaattattattgaggaaaaagatttagactcattaaaagttgataataaaggttatattcatggtttaaataatgatataatattaaatcaaattttggtagtacatgcagagagtaatgatattaaggcagagggcaatgctttatattcagcttcgcaagtaagacaaatagactctaatgaatatcaattatttcagggtaaattagagcaatcaaatacaatgatgagccaagatatggtgaaaataatggaattatctcgacatattgagagcttacaacgagctgtaaatgcttatgataatttgttagatagtggtattaatcaattaggaaaataa

SEQ ID NO: 55958 - DNA, 2070 bp, Acinetobacter baumannii
atgattgataagaataaatttaaattcgagttttataatctcgcattagtgattggggtaataggtattttattagtactatttactcctgtacctacatggttactagattttctgttattaacgaactttacagtggctttaattattttattattggcacttgatacagagaaacctttaagtttttcaactttcccatcgttactgcttattacaacattatttcgcttagcattaaatatctcatcaactcgcttgattttagatcatgcagatgcaggtaaagtgattgcggctgttggtaattatatggtggcgggaaatctggtagtcgggtttgtcgttttctttatcttaatcattgttcaatatattgttatcactaatggtgctcagcgtgttgcggaggtcgcagctagatttactctggattcattacctggtaaacaaatgagtattgatgctgatctaaatatgggattaatagactcagatgaggcaaagttacgtagacataagttagagcaagaatcaaatttttatggggctatggatggtgcttctaaattcgttaaaggtgatgcaattgccggtgtcgtcatcatcatcattaatattattggtggcctatctattggtatgcttcaaaaggggatgggctggtctgaagctttacagcattattccttattaacaattggggatggtattgttacccaaattccttcattagtaatttcagttgctgcaggtattattattacacgtgcggctacagatactaaattaggtcaagctttggggaaccagttctttgcttatcctcaaactattgtggtagtcggtgtagctttaactttaatgctatttttacctggattacccgttctaccgattttaattttactgttaatattagctggggctgtttggtattctatcaaaaataagaaaaagcaagctaacagtagtgatggtggaaatgaggataaacaggaaagtttagaacaaaaagatttaaatagtttaaaacctgctccatttgagttaaaaataagtccgaacttagagccattcattttagatgaggcaagttctcttattcaaagatatgctactttgcaaaaacaactttcattagatttgggcgtttttttgccgaagttatctatcaatgtagataaaagattaacagaaaatcattatcaaattctcatttatagtgctgtggttgcaagaggaagtgtcaactttttaaaggttttagctattaactctgggaatgcttctatgagtagtattcaaggcgatgaaactaaggagccaacttatggattgccagcactctggattgaagaaactcaaaagcaacaagcacgaactttagggtttactattgttgagccagaaactgtaatagtgacccacctctcggaaattgtaaaacgctatttaagtgagtttctgactcgagcggaaactgaaaaattgatacagcttcatagagatagtatgggaaccttattagatgaactcattccttcagtgctaacgtattctgatattcaacgtgtcttgcaactattattaaaagagcaagtgagtataaaaaatatggagaaaattctagaagtacttattgatattgggcgtattaataaagtacctgaggatttagctgaaaaagttagagaaagattagggtccattatttatgagaaatttcttagtcctgatggtaatttgcaggttatgacaattgcgcctgaaattgagagtcatatgctagctatggtgcgtgtgaataatgaaagtattttgcctccacaatatattgataaatttcttagagggattgtgcaagaaacagaaaaacaattagcaaataatgttcagccaattttactatgttcaccttctattcgcagacctcttcgcgccatgatatcgagagccattccacatgtagaagttttgtcgatagctgagttggggcaatatgtgcaagtttcgtctgctggaattatttctattcctgagtttcattcaatggagatgagcgcgtga

SEQ ID NO: 55959 - DNA, 1074 bp, Acinetobacter baumannii
atggaagatcaacaagaaaaatctgaacaagctacaccttataagttagagcaagctcggaaaaaaggtaatgtacctaagagtattgatttactttcttttgtagtaatttcagctttccttgcaggcttcatagcgctatcaggcgatattgcttcggaaatattcaggcttactcagtggtggttaggtcatacagatattttagttcaaaacaacttggcaaacgtgcattattgggctaacaaaagtgtatctaaaatattaaatgtacttgctccattaattttaattattatggtttttgcagtcgctataaaccttgcttatagtggttttgttttttcattcacaactttaaaacctgattttaaaagactagatcctataaagggacttaagaaaatattttctaagcggatgtttgttgaggtagttagagttattgtcaaaggcctattattttttgtggctacatatttttcaatactttatattatccaccaattaatgagtgatctaacaagaactcctcaatcaatcgtattattttttagtaaatctatagttgtcttggtactcagtttactagctgtaatggcaatttttgcaatttttgatatgtggtatgccaaaagagaattttcccgtcaaatgcgcatgagccataaggaagttaaggatgaatatcgtcatagagaaggtagtccagaattaaaatcaaagagacgtagaaaccaacaagaattttttaataaggtgaaagcaatttctcaagttaaaaaagctgatgttgttattattaaccctactcattatgcggttgcattaatctataaacctgaaaaaatgcatgcacctattgttttagcaacaggaacaggtatgcttgcctcgatgattaaacgtgtggctcgtaagaatcaggtgccaatattacatcgaccagttgttgcaagatatatttatgcccattgtgtagttaatcaatcaataccagatgaaatacatcatgatgtggttgatatatatcgctgggtcattgcattaccaaattcgaagttgaagttttaa

SEQ ID NO: 55960 - DNA, 732 bp, Acinetobacter baumannii
atgttcggtttccttgagtttatgacagttcttttattgtcattacgtctgcttccaatttttgtagttatgcctttaactatttttactcgggcacctatattttttagactgatcattgtcttggcaatttcagttattttgtccggattagttccgattgagcatagtgtaatcacaatttccttaatcataagtgagtttctcttaggtatagtccttgcatttggatttcatacagcctttgcaagtttagatttggttggaaagttgctggatttacaaattggtattaatacagcgggcgtttttgatccttcctctagtcatttaaatggtgtcatttcagatttgctcattgccatcgctggagttttattttttatacttaatttgcattacaccttattaaatggattggttgccttatttaaggtggtacctttaggatcttttaactttcagttattaaatataaaaaaactagtcagtttaatgggggagcagtttatttttgcttttattatattgttacctgtcattttaggggtgtggttggtagatattgctttcgccataatgtctagatcaatgccacaagctaatatttattttttggctctcccagttaaatttattgctggtttgtttttgctcatgttagctatgccaatgattgtccagaatatacctcgactttttgatgagcctttaaaactgattctgttttaa

SEQ ID NO: 55961 - DNA, 264 bp, Acinetobacter baumannii
atgaaccaagatcagctcttatatttattaaaagaaacattattaacaactgcaatggtcgcagcaccattattattagcaatcatgattgttgggctattggtaagtattttacaagttgccactcaaattcaagaaatgactctaacatttattccaaaacttattgtttcagtagtcatattattggttctaggagggtggatgataaaccacttacgagctttcgcagttgaaatgtttctaaaagcagctaatttttaa

SEQ ID NO: 55962 - DNA, 1188 bp, Acinetobacter baumannii
atgataacaacgaatgatttcgaacgtgaagaacaacttaaacgttggttaagttttttagagcaggatcctcaaaacggtcacttaattaattctatttttgagtctgctttaatagtcaataatgttgatgtgcttcaacacatgttggaccacttaaaagaacaacaacttagtgatcctcaaataaaccgcatggctagcttagtaagtttacagttaggtaattttccagaagctatcagttttagccaacatgttttaggtactgagtttgaaaatacaactgtattacacaatctcgcgtatgcccaactgtatatgaatcaatacgaacaagcatatttaacattacaacccttaatgagttcttctgcattagtagaagcagatacttatgtgttatatgcgagaatattacatcatttagaacaacctgctggggcaatagcatctttacgaaatgctattaatttaaatccaagacatgctgaagcattaggcaaccttgcgttattgcaatatgaaactaataataatttttcagattacttaaacgttaaagaaacagctcaacaagctttagctatcaacccttatcaatttgaagcgctattagcattaggtgaagtacaacttaatgaacgaagtatttctgctgcgcaaaacacttttaatttaattttagaacactatcctcaagcaggtcgtgcatggtctggtctaggtcaactcgaattttacgaaatgaatcttgagaaagctgaacagcatttgcttaaagccgtagaatatatgaataatcacgttggtacatggcatgtattagcttggtgctatatccttaagcaagatattgttaatgctgaaaaagcttttgaaatttctttaccattaaatactgaatttgctgatagctatggtggcttagcagttgttgaagctatgaaaaataacgtctcgaaatcgaaacaactcattcaaaaggcttatgatattgatgaatacagtatggcagcacagtatgctgaatatgttttattgaataatgcaaaccaagcagatgcggctcaacagaaaatgaacaatattttgatgagacgagctccaagtagcgaaagctcaggtcaagtgttagtccaagactggttaaacaatcatccaaactttcaaaaacatttaaactaa

SEQ ID NO: 55963 - DNA, 642 bp, Acinetobacter baumannii
atgaagaatttcttatctccttttgatgcagatgaaactttaaaacttgcaatccatgcaagtgaacatggagatacccattctgctattcgttatttaactgaattattaaatatccaaccggatcatggcgcggcttgttattttctcgctatgcaatatgcagaaattggtctatttgagcgggcaatcacaactttacaacacgctgttgagattaatccaacatttgatatcgctcaatttcaactcggacttttatatttacaaactcagcaaacgctacaagctgagcaaatttttagtggcctatctctaagttcacatgatcctgcccttacagcattttcacttggctatttagctttatttaaagaacaaatccctaatgctattcatcatttccaagagggaattgcagtttgttcaaacgatgctttaagtaatgacattaaacgtgtaatcgctcaagttgagaatgcagctctaaattcatctattcctaaatcgagtaatcaagatatagctcatattaatgaaacccagactgaacaagctagcaccactactgaacacaaaacattaacggggtttttgggtgcttatttagatactattgatgaagataatggtccacattga

SEQ ID NO: 55964 - DNA, 399 bp, Acinetobacter baumannii
atgacaattgatagaacagaattatattggtcttcactatgtaagttaagagcggaattgcgctgttggatccatatagttcggaagcaagattcttcgactgagaaaggtcgatgggggcaaatgttaacaatctctatagaaaattatttagaagggcctgatggttttgtttcttttaaagatatagacgtagtagagatttcaataaatcgtcttaggggaggaatggcaaatcggccattagagatgattgatataaaagctgaaatcttagaagccttacaaaagactcaactctgttgggaaatacgtgaaagtacttgggttgttgataggttttttgaagaggagcctgtaacagtgattgctattttaaatccctttgattacagttga

SEQ ID NO: 55965 - DNA, 1932 bp, Acinetobacter baumannii
atgattgtggtggcggttgtggtgactgtagtcgtttcttattttggtggaccacaggcaggagcagcagttgcaaaaggatttacagccttaggagcctccgcatcgacagcagcagcagcaggaactgtggcaacagcagccacagcggcggcggcgggtagtgttgcctcgcagctggctgggcaggctatgggagtagatggtaacttctcttggacacaagttggtatagcagccgtaaccgctggcatcactaaaggtgttacaggagccttgacatctgcaggagctgtaacggcccaaagtagctggacaagtatagctgcatcagccgttaagactggagttgttaatggtgtaatcaattatggatcaaactatatagcaaatcaggtatttggaaataaacaaggttttagctgggcggcattaggatcatcgattgctggttctgtagcggcatcgggtttgggggcaagcggggtatttgatagtctaggtgaggtcgcaaatccttacgcatatgctttggctggagcaaatctcggagcaattatagaagataaatggtttggtggaacgaaaccagattatttaaatgtatcaatggcagcgatcgcaaatacagtagggcgtcagtttggtggatatatttcaaacaagttaagtgatgcaattgttgtaaaagctcaagaacttaaaccagaagaaattttagtaaacaatgaaaatgattttctgaatatcgaattagcaggagtatcagatactgataaaaataattttgttgaaagatttaaatctgatgagtttatgcgagatctcttatttggagataaaggcttaataacacttagtaatgatgaacaaagaacaaacctaataaatgccagttcaaattaccaaaaacatcaaaagatgatagacggtatgtttgatagtgctgaaaatctgaaaattgctttaggttcttcagcaggtagtgatggaagtacaggttacttttcatatgggggagaaaaccgaacacaagtagtatatggcaatacctttggtatgactttgtttgaaaacgctagtttagtcaaacaggggattgatacgtttgttaatcaaacaggcattgatgtagaaaagctttctttagctgcgtctattgtaatgtttggtccggcggcagtagcgaaggattatgccctaaatggaataattaattattttggtggagatcaaattgctgcaggaaaagatactttaaccttaggtatgacagcttgggcttattcttctgacttaagcctgatgagatcaggaattagtgcggaaaatttcgctttagcgaaagcaggtttaaatgattcatcagcattagtaagagaagaatcacaagcagctatatatagacgagaaggaatattaaagaatcagcaaggagctggggatttattggccatattgagtctggctgcaggggcttctgccagtgcttatggtatgatgagcattggttctaaatacactcgtccaacagatgtaccgaatagtcaatttggtggagtaggtgatagagcaaaaaactggtcaacttataaaactgatgctgaaagacgacctgcgagtgtgggtgataaacaatttttaacttcagatgcagcacttgcagaagctctagaaagtcatggaattgatccaactacagttgaagttactaagatgtatggaaagaatccaaatcttgttggtccaaatggtcaaccttgggaaatggttagtggtcttgacaaggatggagatattatcgaatttcaacatcatgcaaatggacactacttcgaggataagaatcagttcgagttacctcattatcatggtccaaatggcgaacatctaacttatccatctgaatatgatcgaaaaaatgaaaaatag

SEQ ID NO: 55966 - DNA, 972 bp, Acinetobacter baumannii
atgaaaaatattgctgttattgggttgggtaatatcgctacccgacatcgtcgtaatattaagttgctgtttcctgaaactaaattaatcgtgatgtctgctagtgggcgaatgccaacagagtcagtaagtgatagtgactatatagcacaaagtattgatgaaattgttgagttaggagttcaatttgcaataattgcttcacctgctcctttccatgctcaacatgcaataccgcttattaaagctggtattcctgtattaatagaaaaaccagttgctgttacccagagtgatgctcaagccttgattgatgcagaaaacgagtatcaaacgcctgtagcagtaggctattgtttacgttatttaccatcagcacagaaagtaaaacaaatactgcaagagggtattcttggaacactctataatgcatttattgaaattgggcagtatttaccagattggcgccctacaaaagattatcgtgaaacagtctctgctaaagctgaattaggtggaggggttctattagagctaagtcatgaactagattatacccaatggattttaggggcgcttattccacgacatgtcattttacgttcttcagaagaattagggttagatgtagaggataatgcagatctcttaatgacaacagaaaagggtactgttattaacattcatttagactttctgcaacgtcaagctcaccgtaaatgtagatttattggtagcgaaggatgtattgagtgggatttaattcaaaatgaagtcgtacttattacagctaatgggcgagaaataatttatagcgcgcctgagtgggataagaatcaaatgtatttagaaatggttaccgattttgttagaaaaataaacgggcagccaaaccaatcaattactttacaagaggctgaaaaaacaatagggcttattgtaaagatgaaagaatttaaaatggaaaaataa

SEQ ID NO: 55967 - DNA, 642 bp, Acinetobacter baumannii
atgaaaaaactggcaattattggttcaggtggcttcgcaaaagagttattagatttagcaatagatcaaggctaccaccagatatgttttttagagagaaatgctaaggatggggatgctttattaggttttcccattttggcagaatcagtgattcctacgctgactgatacagtatatgtaataggtattgctgatccaaaaaatcgtaaaagaatatatgaaacttatcctgatttgacctatccaaatttgattcactctcaagcatcgcttggatatggtattcgagaattgttagaagatagtaaaggtattgtgattgcggctggagcgcggattacaaattcatgtcgttttggcaattttattatagtaagttttaacagcacaattgggcatgattgtattcttgaaaattatgtttctattatgcctggtgccaatatttctggatgtgtacatttaatgcaaggtacatatgtgggaacaaatgttgctgttttgccggggaaaaatcccgagcaactaaagtgcttaggtgaaaattcagttataggtgctggggctgtggtggtgaaacatacagaaccaaataaagtctatattggatcacctgctaaggaattaagacgtgattag

SEQ ID NO: 55968 - DNA, 588 bp, Acinetobacter baumannii
atgttcgcggctgagcgtctcaaatttagttttatatttttagtattagcactattggtagccaaacaatggaaaagaataattatattcggtttggctttatttacgcatgttcaatcggcgcttttaattgcaactttttttatttcaaaggttcttgataaaaatactaaactctgggttaaaataataatatcattaatttgcataataggctttactggtgcttttttattaatgcaagaacatattgttaataaattaggagcttactctgaaggtactgaagaagatggaaatggttttataagtatgattaaaacaggtgtttttatatttctcgccggtatatctacttttaggattttacctgtaatttctggtataccacttgtattactctcttattttcttgggtcagaacgtattggtatgttagcgtttatactgtatgtatgtgctgttatttattataagaaaaaagctgatttgttattatttttagttatgctttattttacaataaaaactccatcttttattttgaatatccttaactatggtgttggatatatttcaaatagttaa

SEQ ID NO: 55969 - DNA, 420 bp, Acinetobacter baumannii
atgattgatttgaataaggaaagagagacttttgaggcattaccgcaaattaaaggaattttgattgctggagaatttttcttttccaccctaagtatgaattacaagcccaataactctcaaaatgaaagccacttgcagtgcacgtatttcttaaatggcgcttggtatgcatggcaagaaaaagcaaaagctcaggcggtgcaagcttggatacctgtaaaggagcaactacctgaattagaaaatgacgttctggtggtatttaagggaaatattatccaagcaggcctttatcaaggcgaagaaggccttgcttggtggagtgaattacttgatggctgggatttagattttgagaaagttaactgctggaagccactaattgaaatgccaagcgaatcgggagctaaacaatga

SEQ ID NO: 55970 - DNA, 441 bp, Acinetobacter baumannii
atgaacgtaaaagttaactcattcaactcatttgcatttgtcagcatggctactcttgcaatctctggtggatctttagtagcttgccaattgcagccagctttccaaacaaaagaagtcccttctctttttacacctaaaactcaaccaagtacttacggtgtgttaaccgcgaaaatcacaggtaaacattctggcgttgcagtcatcaaattagatagcttccgtttaaacgttagctttgattttgaagctcatccagacagttacggcgttccgggttctgaatttactgctgtttatattactcaactcactgtaaatgaaatcactgatattaacggtaagtcatataacgatttcaccgaatttgaagacatccggaacatcaatggtcttctaaaaggcttcatcgaacgtaacaagttggtggaggcttaa

SEQ ID NO: 55971 - DNA, 672 bp, Acinetobacter baumannii
atgtctgatttggcaactcgactcaaagaagctcgtactaaagctggtaaaagtcagtatgaagtagctgaagcagttggtattaaacaacccacatatcaagccttagaaagcggtaagagcttgaagtctgctttccttccactgattgcaaactacttaggtgtagatgcgtattggctaacaactggaaaaactgaagatggtttttcagaaagtgattttgtaaaacctaaagtggttcataaaggaagagacaattacatttggattgacgtagtggaagctaatttttcatgtggaccaggtgaatctattgaatttcattttgatgcaatcaatggagcaatcccttttccaccatcattttttaaagaaaaacgtgtcactgcagattgcatgcgaatcatcaaagctaaaggcgatagcatgatggattacatcaaagatggtgacttggttggtattgatatttctcaaactgaagttattgacggtgaaatatatgctgtttacttcgccggtgaaggaatgttgaagcaaatttttaaagaggctgatggttctctaattcttcatagtctcaacgaaaagtttagagatcgaaaagtaaccgaagagaatggtaaaaactttaaggtaatgggtcgtcaattttggcgagctggttaa

SEQ ID NO: 55972 - DNA, 231 bp, Acinetobacter baumannii
atgagccaaaatctcatcgcaatctatgaaaaattagttgagttcttaggtggccaaacaaagacagctcaagtcctacttataaaacaaccctctgtaaatgcatggcttaaaggaaaaaaccaaatgtccgaaaagattgcattgcgcgctgagcgtgtaactaaaggtcgttttaaagcctatgagctttgtccatcactttcagaattcgaaacaataaccgcttag

SEQ ID NO: 55973 - DNA, 489 bp, Acinetobacter baumannii
ttgcgatgttgcgtcattgccataactccagctggttgcatagccttcctggtcaactgccagaaccttgcggcctgccttgtcatagtaggtataactgctgttgcctttggcatcctcaacccgaatgatattgccattgccatcataataggtcttttcaatggcactctgggtgatgagtgcacccttgccctggctatcatattcatagcttgcaatattcgggctaatcacactggtctgacgtccaaccttgtcataaccatattcaaccacacgcacattgcctgctggcgccgtcggtatagtgcctcctgcctgtgccggcaagctgaccggcgtttcatagctttgcagtttggtcaccagccccgctgcattatattcccagcgagtcaaaccacccagcgggttcacttccgcgatcttgcgcgcgttcttatcataatagctaaaggtcttggccccgttggcctcggtttttaa

SEQ ID NO: 55974 - DNA, 282 bp, Acinetobacter baumannii
atgggttctactaactttgagttaaatctaaatcctttgtttaagagacttactttttctggcattgatttcatttatctaatgatttctaccatgcttggttttagctttgctgctcttgttttcaccctaaatcagccaattacccaagaaacaattaatcttaaaaaagtattgattattcttattattatgttagttggactagcaataatttatattccaaccttcatggtaattccacatcgtgaaaaaatttcagattttaaaaagaagaaataa

SEQ ID NO: 55975 - DNA, 648 bp, Acinetobacter baumannii
atgtctactgaaaatcttatcgaactagggaaaagactagtagaagaatttaagttagaagatagaaccgatacattatctcaatggatgcttcattatttagcagaattatttaaacggtatgatctatctatctctcctgaagaaaagcatatagcatctgtcgatatcagagatactatttttaagttgtgggaatttcgctacgaatacgctcactctcaaagtagttttaaaaatatagaatcactggtctcaactttaaaaaaattaaatttagataatgatgatgtggtctacacaggactaagtaattttagaaacgcagaaaaaaccacagatcagactagtcctgaatattggtacgattatgctcttaaacttgataaagcatcaaggctattgataagaaattgcatacttaaaggttatgcactcaatgaaattgataatcaagaaattgctgaaattattagaaaaattgaggcatttgatacttatgaaggtttgtttaataagttttataatgaagaaaatgagcaagaaaaggatataaaaaaaattaaaggaaatatttctaaaatagaggagttgatggatgctttagcagagttaaaaactaattatgaggaaaaactaatatcataa

SEQ ID NO: 55976 - DNA, 6240 bp, Acinetobacter baumannii
atgggaaatgcagatttagttagagcaagtagagatggggactattttcattacttatgggctgcaagaaaagctcttctacttttaaatcctttatcaggattagatgttctaactattgaaggtcccagtaaatctgaattccaaaaagaaattgaggatggtgaagaaatcgttgatgtaggtgaatactatggatctaataagttttcggatgcttctaagattgtttactcacaactcaaacatactactgtacatgaggaggatagatttcaaccaagtgacttagagaaaacttttaaaggctttgcaaaaagatatcaaaagtttttaactattgagcctaagttagaggtattaaaaaaattagaattccatttcatttctaatagagcaataagtaaagacttttataaatcaatttgtgaactgcaagaaactggaaaagttactaaaacaactaatttggaaaaattagagctgtacactaatttgaagggcacggatttagaggagtttattaagttagtaaaatttccatcccaagaacctaattatatagctcaacgggagattcttgctcaagacgttgcttattacttacctggggacgatgttaatgctcctaatgaattaaaagatcttattcatcgaaaagcacttagcgaaaataaagagtcaccagaaattacacgatacgatgtacttcgtgcactcaaaactaacccagatgatttgtttcccgtaaaaaacttaataaaacagttagaaaaaattgtagatagacctattgtaaaaacgttagtagacactatcactgaatcacgtagccaaaaatttattattcaagccgaaggtggcgttggtaaatcaatattaagtacgcaaattcaaaactatatcccatctggatctttatcaattatttatgattgttttggtaacggagattacagacaatcttcatcagctagacattctcataaagttgctttagttcaaattgctaatgagttagctggattgggtttatgtcatccattaataccaactacaaatgcaggtcctactgaatatatcaaggcatttttgtttagattaaaacaagtatctgaaagagtgtctgttgataaagctcagttatttatagtgattgatgccgctgataattcacaaatggcagcagaggaattcaattatggtcgatctttcataactgaccttctgcaagaaattttaccaaaaaacattaaaataattgctttatcaaggccttacagagtgaatcttttgatgcctaagcaagatgttgaaattcttgatctaataggctttacagaagatgaaactaaacaacatttaattaactactacactgaggtttcaacacaagacgccatagaatttcatcgacttactagtggaaacccacgagtccaaagcattgctttagaacagaacttaactttgaatgagattctttcattctttggaggaaccccaaaaagcgtagaagatacaattaaagatttgttagacaaggcaatttctactttcaaagaacaaaactactccgaatcagaagaagttgatttactgctcacttcaattgctattttgcgtccattaattccactgcaaattttatctgatttaactaatatcagggctgatcaaataagaagtattatctctgatataggtggtcatccaattcgtcttagcgacaataatattcaatttgttgatgagccaactgaatcttggttccgtgaaatttacaagccaaaagatattagtatactaaatgaatttattcagaagcttaaacctctctctgtaaattctgtatatgctgcttctgtattacctcaaatcttgatggatgcaggtaagtttgaggaattagttgaactatctttgaattctgaaatgttgccaactaattcgaccttagaaaaaagaaaggtcgaattgcaacgtttacaatttgcaattaaagctggcctaaaacttggtaaatatacagacgttgctaagttgtcattaaaagctggtggagaggttgccgcagagactaggcaatatcaattactggaagaaaatatagacctagtcggtacaacttttagtgataatcaaattttagagttaatctctgaaaaagtatttaaaggtggttcatggcacggctcgaaatacattactgaggctaaacttctctcatatcgagaagagttccatggagaatctcgtagtaaactgcgtattgccaatgaatggttaactagttggtttaatcttccagaagatcaaaaacataatcaagaaatagaatctaaagagattagtgattactttattaccttaatcactttagagggagttgactatgcgattaattggcttcgtagatggcatccaaaaagtgtaagttataaagtagctaaacttgcaactaacgagttaattaaacttaatcaacatgaagttatacaacaaatcttagataaatcaggtaataatatatttttaaatttaggtgttgtagagatacttaaattaaatcactgtgttatacattctaagagtttttcacgagttttaaaactcctgagttatgacaaagtaaaacttgatattggtataactcccattctttattttttagaagtagcttttaagcaagaactttgtgtttctacagaggcacatcagattttatcgaaatatctcccatcccaaataccatatgaaattacagatcgatatgggctctcagatagagtaagttatatgaaagcctatgctttacataaagcctgggaaagcaagtcattagaactaattgatttagtaactgaaagattaaaagaggaatttttaaaggatacgtcttatagctcatcagaggaaattactacattaaaacgagatgttgcagcagttttaccgtggtataaattatatgctcagtcaatcattgagccaatcttgcctgatgagcttgattctctgattgaacaagctaaatcggactcaacaaaggctcaggggtattcctatagagaatatggtcatcatcttgaaaatgaaattgcaaaaatttggtttgatattttaattttaaataatcatcttagccaagagacttacttagaaatagagaaccattttaaagaagaaatttatcctcatacacgtaattctttcacatttgttttagcgcttctcaatgaacaatatggattagaggattactgttatcaaaatgttgaaaaaaacttagtaattcttgaaaccagtgatgatcatgcagaaacattggtgaatgactatatgtctattgctcaatcaatttttcccctagatcaaaaagaagctgctgcaatattaaataaagcaatagaggtaagtagtaaactaggcgaagaaaatctacaacgatggaatgcattactttgctatggcgtaagagctggacaggagcaaaataatagaaaaccacaactatgctatcgttttagtcaatgtgctgaattgtcatataaatatgtacatagagataaacattttccatgggattacacagttgatgcaatttatgatttagatcctaattcagcatttgctattgctagtcgttggcgtgatcgtagatttggagatgaagatagaatattgggtaacttagtagataaattgcttaaagaacaacttatctcacccttaataccattggcttttaaagcaatgggaggtatatatgatttagataatttattaaattccattaaatcattaaatttagaagatgaattaaaaagaaagattttacaaagcttctatctttacattgttgtaccaaatccatcagaaaaacatattagtggccttagagatttggttgaggcatttcatataacagaacaaactgtccaagactttttcatatctctcagtaattctgagttttatgttcaagttgaagaacctcattcttcaacttacgaccaagaaaagtttgattgggatgtgttttttgaaagttatactgactcaaatcgaagtgtcgattttaattcagcttttaatgattttcagaaattagaaaataagcattggattaaaagagctttttatgtacagctttttcaaaaaataaatccgtcacaagcaatatcattgatcaattggtggttcgataatcctagaaatggaatgtatgacttagatgatcttttaaaagctataccatctcgctttaaaaggagaatgtcatttttagcagttttagattcgaacataaaacaatttttgaaaacacatcattctgatttttatatagatacttatggaagtaatctgaaattacatattttaagtgagttaacagggaaacctaagactgattatattcaatctctcttagaaggtatgagtgaaagctctattactttagaaagtgaaagcttatttaggatagctcatttacttacacctatgattgcacctaatcaatcctgtgaggttttggaatatggtctaggcttactggaaagtgatttgggatcagatatcgcagatgggcaatggcgtgaggaattggcaccaccagagaatataataaaatctatatcaggttatatttggtctggcctagcatctcctttcaatactgttaaatggcaagcggcgcatactgttaagttactttgtgattttgagcaaagagaattattgtctaatttaattaattttattagtgataaaaattaccgaagtttttatgatcacaaatttgaattttatcaatactctgctactcaatggttacttaatgctttattaaaagtgtcatatagccctaataactttttggctgaatatgttgaaatatttaagcagctagtagatccaaatcgaccacatttgatgattcgacttcttgcttcaaaaattcttctaaatctatttagtttaaagcttataaccctaaatgaagaagaaattaaagcctatcagggagttggtaaatctaattttagtaaagtagaaagagaagctattgatctttcaaaatattcagaaatgaatcaagatgaaattgattcatttggtattgattttggtccttactggcttgatccattaggctcaatgtttgggttacatcctacacacatatactttgaaacaactcaaacattaaaaaatgaaattggatttacggataagcgtaaagccaatgatgcacgtcataaaatgaaaatttatgactggcaacaagtaagacatagccatggttcaaggcctaaagttgaagatttagatttctatctgtcttatcacgcaatgatgattacagcagataagctactgcaaacaagcccattacttgaaagtgaatattcatggagagagtttgatgactggattagacgatatgatttgtcctctctagaaccttattggctaagtgattttagagacccatgtcctcgaataacaacagagtggctcaaagacgataaagaaaattctataaattggtcttacagttgcgcttctattgattataacgatgcgatttatcacagtgattcagaactttgtttatggggtgtttggtcagaagtaaataatttcgatcaggcaaaagacattcgtatccgctcaagcttagtgagcccagaaacttccagtgcgctttggagaagtttacaaagtgctgaatcaagtcattcttatcatttacctagtgcaggtgatgaacagtttgaacttgatgaagataatttccaattaaaaggatggatttctgagatagaaattgatctatcaaattttgatgatgatttatggggagcttcgttaagatatgagattacccaaccatcaagagagatcatttctttaatggatctatcctttgattcattaagaaaaaattggtttcacgaaaataaaaaggttataaatctttctatttggggtaaatataaaaatgaatattatgaatattcaaatggttacaagctaaaagtggatagaaaattcattcttgaacttcttgagaaacttgatatggatatgattatttctgtagatatcgatcgtagatataaatatggtagttatcaatcaaaacaagattcaaaaggactggatgagtatttaccaagtagtaaaagagtttatttaatgaaaaagaatggagatatgtatgtctactga

SEQ ID NO: 55977 - DNA, 954 bp, Acinetobacter baumannii
gtggaaaatatagaacctatttataaaaaatttattcagggtaagcgtatttctttaattgaacagaaacataaaccagattttgtttttgtggtttttggaccagcttattggaaaccaaaagctaaaacagtacaaggttttgctttagggaaaatgttatatgagaaagagttaggagtagactttaaagaaaaatttttaaatttgattaagaaaaaaatttttcaatggtctcaaagctatttgttagtggaaactgagttagtcaaagcaaaattagcaaattatctaggttattcaaaagagaaaatttttgttattggtaactcttatagcccgaattttaaaaaaaatgtattagctaatgaagaccgaattaataagcaaaaagatatttttcagattcttgtgcctggaagctattatccgcataaaaatcttgaacgaatcattttgtctcttatagaacttagaagtagctctcatcttaaaagtaaaatcaaagttttatttactattccagagaaaagttctgattggagtaatttattagcacttgctaaaaagcataatgtggatgacttgattacaacggtgggttttgtacagaattcacaatttgcagagttatatctgcagagtaacgctataatttgcgctagtctggttgagtcatcgacagctgtattccctgaagccttcttagcgaatagacccttactcgtaagcgaacgtcctttcgctaaagagttatgtgaagatgctgcgatatattttgaaccattagatgaaaaaagtattgctaatgcaatcttagaactggtcaataatgaggaactacagcatttattagtagaaaatgggaaaaaagttctactgaaaaattatccttctgcagatcaaaaatggaatttgcagaaaaatttaatcacacatttatatagcaaatag

SEQ ID NO: 55978 - DNA, 297 bp, Acinetobacter baumannii
atgttattgaaagataaattaaaatggatagaaaataaattatccttaatctcgaacaatactcaagataatcaattatctgagagcgaaaagaaagagtggcaagatatttttattgaaataaaaagattgtggacggaaatagatagtgaaattcaaaaagatattgtaaagacgcgacaaattgaaaggaaaattattgaaatgattgatgcatttgataaagatgatattttaaaagcaaaaaaaatagcttgggaaatagctcatatgtatactattactgaattgaaatga

SEQ ID NO: 55979 - DNA, 315 bp, Acinetobacter baumannii
atggcgttaagagaaaaattaggtgaattagaagatgcccttatgacactagcgcattgtgctccagatgattataacgaatggcgacttgagtactttcctactcaacaagccattcatgaagaagaaataaaggacttaagagaattgtggtctgaaattagaccaaaaattaaaaaagatctggtgaaagccgattatgttgaaattaaaattcaagaaatgattgatgcttttgataagggggagaagattgaagggagaaaaattgctagagagcttgctgatttgtacgatctcgctaaattgaaataa

SEQ ID NO: 55980 - DNA, 1866 bp, Acinetobacter baumannii
atgattgtggtggcggttgtggtgaccatttataccgcaggggctgcatcagccgcattaggtgcagcgtcgagtgctttagcaggtggtgcgtcagttggagcagctgcagcggcgggtgctgctgctgctggtactgcgatagcatctggagccgcatttagtgctggtataggagcattagcgggagcttctattggtgcggccatggtgggtgcagcggttggaagtgctgcatctcaactggctggtaaggccatggggggggtggatagtttctcttggtcacaagtgggtatgtcagcgttaaccgcgggtgttactgctggggtgggagcgggcgtaactaatttagcaaaaagctatagctgggctcaaactgcggcaaaagccattaatgctgttaaaaatggtcaagcgagttttactcagggaattggcgttgccgcatataatggtgcagttaactatggggcaaattatattactaatcaggtgtttggaaataatcaaagttttagttgggcgtcattaggttcatcgattgctgggtctgtagctgctactggactaggttatactggtgtattcaataagttaggtgcagttgctggtaattatgcttctggaatagctggagcaaatatagcatcagctattgatgataagtggtttggtggagcgaaaccggattacttaaatgtatcaatggcagcgatcgcaaacacactagggagccagtttggggaaagcataagtgataatcatcaaaatttatcaaatgagatgcttggtctgcaaaaaaaaggtttcttagatgaagataatggaatatctataaatagtattaaccaagaggaggatatgaatatttctagaaggtggttgcaagacgatcttctagagcagattagacttgatgctgcaattgaaataagtatttttgattcaaaagtaatagaaattgcaggaggaaatactagagctccgaatagagctactgtacctcttgaggcaaatagcaaatttgatagcatactaaatattgttgctgatccattgggattattaggtgaagttccaaagaatctggaagttgcaagtcaattaagtaaggcgaggtatgatgatcttgcaaaaaaacaggtaaagctattacaagatgctattaagcaacagagtaatgggaatataagcatcgccccactagaaagaaacatttctgcagatggtcgacaaagtatagattatggtcgctcaatagataagctgttgggacaatatgaagcagttattgaacataaccgattagtccaaacttggggtgaggattataaagaaatacggataggcaaatctcaaatgacagttaaagaatttgagaaaagagtttatactattcagcaacaagcaactgataaagcttatgatttggcaatgaaagaggttgccccactatttgcaaaagaacttatggctcaacagcctcaaaaaacaaattttcctacaagaataggacaagaaatagataagcttgtgagacgtgatttaagattctttgcaaaaagtgaaggaatttctgagaatagtaagtcttatatatggggcgtgaatcgtaggttaaaagatcctatgactaagcaatttggaattccagataaccgtgtcggtatgaacttatatttagatacgactatagctttgaaatctcatgctactcctcaacttcagaagtggaatcaaattcgcccaggtattatgattattgtgcgtccaacacaaatagggggctcttatggcgtaccaaatgttaactttcaagcacctatgattccaaatccgatttataaatcaagtaaatattaa

SEQ ID NO: 55981 - DNA, 390 bp, Acinetobacter baumannii
atgtctacgcgaaaaccccgtcaggcacgagccaaagtcactgtcgataccattattgaagcaggttttattgctgtagcattgcatggaccaagtggtaccactacacgtcatattgcagaaattgcaggggtgagtgtggggtcactctatgagtattttaaaaacaaagaagaaatttatgatgcgatgaatcactactttgtgagtgaaattctcgacatgattaaagagctaactcctacaattttagagttggagttagaacctgttattgaaatgattttttatacgttcagtgatttattaaagaaaaataatgatcgttatttaaccgttttacgttatgcaggtgagttgcaatacgataaatatattccaaaaatttaa

SEQ ID NO: 55982 - DNA, 225 bp, Acinetobacter baumannii
atggaagtcatcatgaagtatatgatgcataatcctaaatatttaaaaattaacaatttacctgtaattacctatatttgtattaatagcggtatttttaacgttgcaaggcatcttattttacccaacccatttattagttttgatgaaatggtgcaggggctaaccactatgattatgagttatatcaataccgaaatggcacgctcagaagatcaatcataa

SEQ ID NO: 55983 - DNA, 723 bp, Acinetobacter baumannii
atgtttgatatgcgtttatctcatgagcgtggtgcagcacatcatggctggttacagtcgaaacacacgttttcatttgcaaattattgggatccgaaacaagttggtttttcagatttacttgtaattaatgacgatactgttgctccatcgaaaggttttggtactcaccctcaccgtaacatggaaattatttcttatgtgcttgaaggtgcgttagaacataaagactcaatgggtacaggttcggttattgtgcctggtgatattcagttaatgagcgcaggccgtggggttgcacatagtgaatttaatcactctgctcaagaaaacgtgcacttcttgcaaatttgggtagttccaaatgaagttaacacaacaccggactatcaacaattgcatatttccgaggaagacaaacgcggcaaattgcacttgatgatttcaccaaaaggtggcgaaaaaactttatccatcaaacaagacattaatatttattcaggtctttttgatggtgaagaaacagcagagtttgcaattcctgaaggtcgttatgtttacctacatgtggcaaaaggccgtattgatgtaaacggtaaaacctttaatacaggtgatgctgcgcgtattcgcgatggaggcaagttatcatttaccaatggtgacaacgctgagattctgatttttgatatgcgtccagaagaagttccaaccatgccataa

SEQ ID NO: 55984 - DNA, 648 bp, Acinetobacter baumannii
ttgcataatgagttcaatgatgcgcttaaagatgttgaataccctgtcgatttataccgtttcttgggtgaaaacttctttaaatatgtgtttttgaaattcccgcaaccgcttaaattatcgatgatggccggtattgagcattttactgcggtacttgccgaatacatgatgaagcacgaaaagaatttctactattcagatgatgcaaaaagccgtgctttatggatgtggcatatgcttgaagaatctgagcataaagatattgcctatgatgtgtatcaggttttaaatggtaattatccgttacgggcaacgggctttttaatggctttcattaccattttagggcttattccaacagcaactttatttgtacctctactgcgtaagccaaaagaactgttgaccagaaaattctggaaagatgcacgtcgtggcgtcaacttaatttttagtccaaaagatggcgtatttggtagcaccattggtcagatttttgattacttacgtccagacttccatccaaatgatcatgacacgaccgaatatctggagtattacaaaaagaaattacttaacgagggcggtgcaattgcgccttactttgtgaaggaatttacaccaccagttcgtgcagtttcataa

SEQ ID NO: 55985 - DNA, 201 bp, Acinetobacter baumannii
atgtttaatccattggggtttgttaataagattgtggtttataagtttccgattgaaaataatgcatgttttaaatttgtgagctcttatgaaattcttgagttgattaggttagctgaagaggatgaaataatgcaaagaaaaagacttgataaatataaaaataatgatgagtattggttagatgagtttagagtttga

SEQ ID NO: 55986 - DNA, 258 bp, Acinetobacter baumannii
atgagtttagagtttgaaattattaaatggaattttgaaatgaatagttatatttttggggattttatacttatgcttttaattactttggtttttataggctcactaattttttcaattgttaaaattataggtttaaaagaaaatccttatattcattggtttgataaaattttaattattatattttatcctttttcaattgtagtatcttttttattttttattatggttgtaggattgattttttattcataa

SEQ ID NO: 55987 - DNA, 468 bp, Acinetobacter baumannii
gtgattttcaattcacctgagaattctatcaccatagatataacgcgtgataaactttatgaaaaaatcactccttattcctatagagatattcgcaaaaaaattgatacattattaaataaaacagatgttaacaaagaaccaatcaataaaatgaaaagtaaaatcttatcgatattagattctcaacaggattcaaatatcgatgaatttactatttcaaattatttaaatatgcacccccgaacattaagaagaaaactccattctgagggcgtatcatttagagaaattattaatgagtataaaatgaatagagctatttttttaatatcctctacaaactacaattataaacaaattgcatttatgattggctttaaaaacaatgcaagctttagcagagcctttaaaaaatggactggaaaaacaccacaagaatttaaaaaaaatttagattatgaataa

SEQ ID NO: 55988 - DNA, 855 bp, Acinetobacter baumannii
ttgctatctttagaaagtgttgaaattactaaatctgatttggaaagattccttactttaacagaaaataaaaatcttttaaaaaaggaaatattagagttatataagaagggaattctaagtgagtttcttatacaatttgaagtttttagtaaaagaatatctatagattcagctaaaccttacatgagtgcattgttagaatctgctgatttagtagatgagaatacatcagaggcttttacccctttcagtctatcaacctatatttatagattatttaatttgtttttggaaaaaatagataataaagatgaaagaggaagattggttgtagaaaattttaatgaaaatcatgggcttattgtaattgcgcaattactactttctgaagaaaagagtaagggaagtggtgatgaattattatttaatgaaaaagattttaataatattaaagaaatttttttaaataaattaaaagaatatgcttattgtaatagtgaatcatttataagtaaaaaatctttcttaacactattgtatagatggaggagttggggtgaggaaaaagaagttgttgagtgggtagctacaaaatctaaggatatcgaaggaatgattaagattttgagaggaatggttcagactacaacttcgtatatatcaggcgatgattcatcaataatcaactatcatattaaaggcgattatattaatgattttttgggaattgaaaaggtagagaaaatgattaataacatcaatctttctaagcttagtgaagatgatttaagagtcattgaattagctaaaataggtatagaaagaaaaaataataatgaagatattttttaa

SEQ ID NO: 55989 - DNA, 531 bp, Acinetobacter baumannii
atgcggaccatctgccaacactggaagtgtattgtctgcaagcgtccaggtaccgtcaccattgttcactgctgggtaatccacgccatccacagtcactacaactgtcgcagtaggatcatcaattgtaccggtcaatgcaggagttgtatcgttagtcgatacatccgcgaaagttactaccggtgctacaaggtcaacgataaagccgtctgtaccgtcaagtacatcgcctgtaccaaggttacccacaacatctgtgtagctgccatcagccacggcaatacttggtgctgtgcctgtaccatccggtgtgaacactgctgtccaggtgatgttgtccgttgtagtcaggccagtcaatgtaccgcctacaaccgtgatgtcacttacatcaaagcctgcaaccgcctcactaaacgtgaaggtaatgttggcatcttcacctgccgcaagtgcaaggtcatctgttgtgatcgcaagtgttggtgctgtcgcatcaacagtcactgtacctgttaccggagttga

SEQ ID NO: 55990 - DNA, 162 bp, Acinetobacter baumannii
atgtctgctgaaactgtgcctgtacctggcaatgaagtgttgcctgcagggtcagttgctgttgcagtcactgtatcgccatccaccaggttacccgggtttggtactgaccagctaccatctgtgcctgctaccactgttgcagttgtgccatcaggataa

SEQ ID NO: 55991 - DNA, 138 bp, Acinetobacter baumannii; identical to SEQ ID NO: 50167

SEQ ID NO: 55992 - DNA, 435 bp, Acinetobacter baumannii; identical to SEQ ID NO: 26756

SEQ ID NO: 55993 - DNA, 600 bp, Acinetobacter baumannii
atgataatctatggtgatgtagattcaggtaattgttataaaatcaaactgttactatccctattaaatatacatcatagatggattcatgttgatattttaaataaagatactcaaacagcagagtttctatctttaaatcctaatgggaaaatacctgtattagttttagatgatggacgggttctaagtgagtctaacgctattttaggctacttggctgagggaacggaattgattcctgcagatccttatatgaaggcaaaaatgtatcaatggatgttctttgaacaatatagccatgaaccatttattgcagttgctcgttttattaataaatatctaggattaccgccagaaagaatagaggaatatcataaattacaacccaaaggccataaagcattatctattatgaataaagctttagtagggcacgactatcttgttggaaataaatttacaattgctgatattgctttatatgcatacacgcatgtagctgaggaaggcggcttcgatttaaagttatacccaaatattcaagaatggtgtcaacgaattcaaaaatatccaaaatatgtgagtatggttgaataa

SEQ ID NO: 55994 - DNA, 429 bp, Acinetobacter baumannii
atgccccaatatttaaaaatagctgagaaaatatatcaaaatgttaaagaaaaaaaaggctttacggatgatccgatggaagatcttaataatttgatgattgaactcagacaagaaataaaggggacaaaattaaagcttttatataattatattgattttgccgaaatactcattaaacctttgcaagagtcaaaaattaaattggatttaagtcttattcctaaaagtaaaaatactcaggagtttgtactttggcttgctggttttattgagcgaattaccacaggtggacaagaaaaattacctccaattcgagctaaaattactttacccgcctatgcctatgaagaaacttacccttcgcagaaaaagcctgtaaataatggggaagaaataattgaatattttaagaaaaatcaaagttaa

SEQ ID NO: 55995 - DNA, 210 bp, Acinetobacter baumannii
atgcgtactttagcaatatctactcttctccttggtacggtactcagccctatggtttttgcccaagatgataatgcccttcactacaatattgtaaatgttcaagcagaagcttctcgccaagtttcaaacgatgaaatgcatgcaactttatatattgaaaaaagcaataagcagctgcagagctttcaaatcaaattaaccagttaa

SEQ ID NO: 55996 - DNA, 456 bp, Acinetobacter baumannii
atgacacagtatctcatgtttgcggaaaatatttataacaaaattaaagatgaggaattgttttcacatgactgtattgaaaatatgaacttacttatgacatgtatacgcagagaaattgagggaacagaatttaaattaaaatataattttattgattttgttgaattgtttagtaaacaattagatgaatgtaaagtaaaaatagatgttagtttgattcctcctcataattcagaaggtgagtatattttatggttagctggatttatcgaaaaaattacagaaggtggacctaaaccacctccgcctataaagaaatttattccagagtatatgagcttgaaatatgaattagattttttacccttaaatgaggaaaaaattcaaaacgaaggtaaagaaattacggattactttaattcaaagctttataaggcaacttttaagaagtaa

SEQ ID NO: 55997 - DNA, 594 bp, Acinetobacter baumannii
atggatgatatcaatataaggattgcacatcgaatacgagagctgcgtttagcacgtggatatactttagatgtattagctgcccgttgccaagttagccgttcagctatttctttaattgaaagaggagaaacgagtcctacggcagttgttcttgaaaaactagcaaatggtcttgaagtacctttaactcaaatttttacgaatgaagcagggaattcatcatctcaaccgcttattcgtcggaatgaacaagctgagtggcgagatccggaaactggctatatacgccgtacagtttcacctccgaacttaaaattacccttccagattgttgaaattgaatttccgcctcattctcgaattacttatgaaactaatgaaagctctagagtggtacagcagcagctttgggtcgttgaagggaaaattgaaattcaattaggtgaaacttcttatgcattaggtcaaggggattgcttggcaatgcaattagatcaacctgtcatatacagtaatcattcagctcaagttgctcgttatattttagtcgtttctaatcaactggtgcccgctcttaaggaatctttatga

SEQ ID NO: 55998 - DNA, 435 bp, Acinetobacter baumannii; identical to SEQ ID NO: 26756

SEQ ID NO: 55999 - DNA, 330 bp, Acinetobacter baumannii; identical to SEQ ID NO: 46639

SEQ ID NO: 56000 - DNA, 1038 bp, Acinetobacter baumannii
atgttaaatacaaatgaaaaaaataatgcgatcgaatcacttgatctatcaaatgcttcagtagatatcattactaaactcattcatgagagaaaagtatcttgtgaagaacttgtgcatcattacttcgatactattgaaaaacagcaagctttaaatgcatttattagcacagataaagcttcagcaattcaacaagctcaatattgggataaatacctactgagtggaaaaccgtgtccagctttgatgggtattttaattgcggttaaagataatattcatgttgcaggttttccaaatagtgcaggtacgccagctttagctcactttaagcctcaaacttctgcccccgttattcaaaaactcattgatcaaggtgcaatcattgttggtaaagccaatatgcacgaattagcctttggggtaacaggttataatactgccatgcatatagaaggtgttgtgggtacacgaaatgccgtaaacccgttacacattgctggtgggtcttcttcgggtagtgcggtggctgttgcagtgggcatggttccgattgctatgggtacagacacaggtgcttctattcgactgccaagtgccttaaatggttgtgtgggttttcgtccaacggtaggacgatattcacaagaaggtattaccccaatttcacatactcgtgataccgctggcccaatagctcataccgtatctgatgttattttaattgatgagctcatcactcaagagccaagaaaagaatcattacagtctcatcaaattcggctcggtattaattcatacttttggaatcatttagatgaagacgttcatgaacaggctcatattgcacttgagcttttaaaaagtgcaggagtcgaaattattccagtcgatatgccaaatttagaacaactcaatcaagctatttcattccctgtggctatctatgaaggcaagtatgacctaattcaatatttgaaagatcatcatgtaaattcttttataatatacctgtggtttttgtatttttattaa

SEQ ID NO: 56001 - DNA, 720 bp, Acinetobacter baumannii; identical to SEQ ID NO: 49337

SEQ ID NO: 56002 - DNA, 435 bp, Acinetobacter baumannii; identical to SEQ ID NO: 49446

SEQ ID NO: 56003 - DNA, 435 bp, Acinetobacter baumannii
  misc_feature (381)..(390): n is a, c, g, or t
atgctgttaaaagttggtgaattggctaagcaaacaggacttactgtccgtgctcttcatcactatgacgatatcggtttacttcagccttcggcccgttccgatgctggttatcgactatacacccctaaagacatcactcgtttgcatcaaattcaagcattacgagggctgggtatgtcgctagccgaaatctatacggttcttgaagatcccaatctagcacttttaccgattattgatcggcagattcaagcaattgatcaaagactggcagagcagaagaaattgcgaaatcagcttggacaattgaaatctcagctcatcaatggtgaagaacttgatttggaggattggctaaatatgctggagcttatagcnnnnnnnnnngcttatagcaatgtacgagaaatactttacgcaagaagaacttga

SEQ ID NO: 56004 - DNA, 1185 bp, Acinetobacter baumannii
gtgaaatttgtcgtgtacagagtattattagtattcgtttttatcgctggccctagtatttatttacttcagaccactattcaaaacactgggcagtatatctctaacctttttaccatgacattcaatttatatgcttatcagccgaatggatggattgggggatggacgattttatattgggcttggtggatttcttggtcgccatttgtaggtatgtttatcgcaagggtttcacgtggtcgtaccattcgagaatttattgtcggggtactcctcattccaacaggctttaccattatctggatgggctttttaggaaatgctgcgttatttagcattatccatgaacatcaaaccactttaattcaggctgttcagcaagactcgtcagttgctctatttgagtttttaggacacttgccatggtcaggtgtcatgaatattctggcgactattttggtggttttattctttgtgacttctgctgactcaggggcattggttactgactacttaacagcaaaaacagaaaattcacctacttggcagcgcctgttctggacagtgcttatggcggtgctggctattattttactcttggtgggcggtcttgcggcgcttcagtcttcaatcattatgagtgcgttgccttttaccgtagtcatgctgttaatgagttggggcctaataaaagccttgcatcttgatgttactaaaatgatagcaattcaagaggctcgcattacaccacgtgccattcataaccctagaagctggcagcagcgtcttggtttaatcatgcattatcctcatagtgaagaagaggtgaagcaatatattgaaaagcaggtttcacgtgcttttgaaaatattcagcatgagtttagacgccgtcatcttgaggtgtcgattagtgaagtggaagatggtatgcagcttcgagtcgatcatcatcatgaaattaattttatttataaagttgtttcacgtgaaacagtacctccaagttttttaattggtcgtacagaagcagaagacggtcagtattttcaagctgaggtatttttgagagaaggcggacaaaactatgatgtaatggactggactcaggaagatttgattcaggatattattgatcagtacgaacgtcatttacatttcttaaatatcgtacgcagttaa

SEQ ID NO: 56005 - DNA, 900 bp, Acinetobacter baumannii; identical to SEQ ID NO: 41587

SEQ ID NO: 56006 - DNA, 711 bp, Acinetobacter baumannii; identical to SEQ ID NO: 45638

SEQ ID NO: 56007 - DNA, 171 bp, Acinetobacter baumannii; identical to SEQ ID NO: 51532

SEQ ID NO: 56008 - DNA, 1008 bp, Acinetobacter baumannii
atgcgtttttctcagttaaaagtcggggttattgctgcattactttctgtttcatcgtttgcagctcaagaattcttaaacgtttcttacgatccaactcgcgagttatatacagatttcaacaaacagttcggtacttactggaaacagcgtaccggtcaagatattgagtttaaacagtcacacggtggttctggtaaacaggcccgcgctgtaatcgacggcttaaatgcagatgttgtgacattagcacttgctgctgatattgatgaaattgctgaaaaagcaaaattgcttccaacagactggcagaaaaagttaccgcaaaactctactccgtacacatcaactatcgtgtttttagttcgtaagggtaaccctaaacaaattaaagattggggtgacttaatcaagccaggcgtggaaattattacgccaaacccgaaaacttctggtggtgcacgttggaactatcttgcagcttgggcttgggcaaaacatcaagcaggtggtaacgatgcaaaagcacaagaatttgttcgccaaatttataaacacaccaaagttttagattcaggcgcccgtggtgcaaccactacatttgctgaacgcggaattggtgacgtattactggcttgggaaaatgaagcacatttagctatccgtgaacaaccaggcaagtttgagattgtgacgccatctttatctattttggctgagccgccagttgcaattgttgaaaaaaatgcagcgaaaaaaggcaacttaactattgcaaaaggttacctcaactatttgtactcacctgctggtcaagaaattgcagcacgtaatttctaccgtcctcgtaatgcagctgtactcaaaaaatacagcaatgtatttaagccattgaaacttgtcaccattgataaagaatttggcggttggacaaaagtacaaaaacaacactttgataatggtggtgttttcgatcaaatcgtgaaaatcaatagtgcagagaagtaa

SEQ ID NO: 56009 - DNA, 330 bp, Acinetobacter baumannii; identical to SEQ ID NO: 46639

SEQ ID NO: 56010 - DNA, 549 bp, Acinetobacter baumannii
atgaaaagaggttattttaataataagattaaggacagcattttttttaaagagaattcaaagaagtgggttttatcaatagagtattcgacacctatttggtatgacttgataatggatgagtgtgaagagtataaagagttttataaggaaatattaaatgaccaagttgaagcctcaaaagattgtaatgaaaaagagtttatttactttttcacatctagacctaaagttaggtttgatctctcacggaaaattaaaattggcaagaatattggtgaaatattcttaaatttaattatcaattgttcagaaaaaagaaaagttaatattgatcatgattattggcgagatttcaagaaaataattattaacgaaaaatttataacttttaagttcgatgaagatgttaaaataacatggccaattcatgtttttttatatgaatataatgttgaattaggtcttgaaagtgaagtgcattatataggaaaaacaaaagaccccgtcgtggttattccgatatgctttactacttgttgcatttaa

SEQ ID NO: 56011 - DNA, 750 bp, Acinetobacter baumannii
atgactcaacgctttgctttttcaacttcaaaaactttgttagcagttgctatttttacttcaatgacaacaagtcatgctgaagaaacggcagaacagcaaaattcaaccaatgtgttacccactatttctattcaagcacaaaaagaaaaccccacttcttatgtcgcaacaaaagcaaattcagctttaaaatcagatgcacctctatttaaaactgctcaatcagtttctgtcgtcactcgcgaacaacttgaccaaaaacaagcaagaactttagcagatgcacttgaaggtgttgcaggcgtagaagctgggaaacttggtcgccgcggttgggatgatttcattatccgtgggcaaacttcttctgactcggtgtatgtcgatggtttaagggtaggccaaaatacttatgttgccaccgaactatctggtatggatcaggtacaaattttaaaaggtcctgcttctattaatttcggtttagttgctccgggtggtatggtcaatttagtgactaaaagaccagaagcagaaagctttgcacgtgctagcatgacttatggtagttacagccttaaagaaggaacattcgatttaaactacagcccaaacaatagtgaaaaaggtgctttccgtttaaatggacgtatctctgatcaagatgatccgaccgattatgtttatgttctctgtacacgacaaatttcacagaacccttatcctatcagggttctgccttcttaa

SEQ ID NO: 56012 - DNA, 546 bp, Acinetobacter baumannii
atgaacattgaacaatatctggacgagttaattaagcgtgagggcgggtacgtaaacaacccagcagatcgaggcggtgaaacaaagtacggtattactgaagcagtagcacgtactaacggctttaagggcaacatgaaagatttaccgcttgatgtggccaaagccatttataaaaagcagtattggacagatccgcgatttgatcaagtgaatgtaattagctcgttagttgctgaagagcttttagatactggggtaaattgcggtaccggatttgcaaaaccactcttacagcgtgctttaaatttgctgaataaccaaggtaaagcaggttggccagatttaacagttgacggaatttatggtccagcaactcttaatgcactcaaaacttatctggccaagcgtggaaaagacggcgaaaaagtcctggtgcgtgttcttaatatcatgcaagggcaacgttacattgaaatctgtgaacgcaatcctagccaggaacagtttttctatggttggatcgccaatcgagttgttatatga

SEQ ID NO: 56013 - DNA, 411 bp, Acinetobacter baumannii; identical to SEQ ID NO: 45960

SEQ ID NO: 56014 - DNA, 3831 bp, Acinetobacter baumannii; identical to SEQ ID NO: 46054

SEQ ID NO: 56015 - DNA, 6534 bp, Acinetobacter baumannii
gtgtttcctaaattacacactggcagcacaaccgaatcgactattgagttttacggtacatatggcactggtcgaattccaacaattcaaaaattgcagatcgaagcaggtaataaagctacagcgtggagcccaagccctcgagatactcaaagttcattaaatgcaaatgcggaagcgattaagcttactcaagctgaagtgaagaagcatggtgatagtttatcttctcaaagtttagatatttcaaaacttagaaatgatctaactataaccaataccgaagtaagtaaaaaagcgtcaactgaagcattacaaactacaaattcacaagttactgaacaagctggtcagattaaagctgttactgaacaggctaatactttatctgcaaatcttaacaagtccgcaccggctggtacgaacttgttgattaactctaacgtagttggaaactacgatggcgtttcatatcctcatttacgctataagcttggtgaagactgggaagtaggagcaaagtacactcttctttggtgtgcagagcatacacgtggtgctggtgacacaaactcaaatttagctgtatatgctggtggaggaagtcagtttttacagcaggttattaacacttcaggtaaggtaataagcaaaattacttttacgaagacttcagctggtaccgccaaagaagttaacttttatatgcttagcagaccaactgcagacaagcaaagtgttggtactgtgtattgggctgtgttagttaaaggggatttcataactacagataattggattgcaagtccttacgacttcaatgcagcattcgatcaagtatcagcaaatttaaatgaatttaaacaaacgtatgttactgaaagtactgctttagctaaaaaaactcaaaacttagaatcaacaattaatgatcctgtaaatggtttggctgcacaggctaaacaaatttccgaccggatgactaaatctgatgttgatagcgcaatatcaactgcgaccgaagcattgaaaacaagtatcggtggtaagtcttttgacaacatcgttatcgggggtaatgtcgaaaaaagtaaaacgggtggttatttacaagtatcatatcccttagcaaaaagtttaaatgcacctggtattactgttaccgtcagagcaaaagttacctttgataatggagggaacaatgcagccaatttgcgtgtatatattggcggaggtaatgtatttaatgcagatgcacctattttttcagctagtaaagatatctacgaatttaccttaactacaatttctagaacagacgcaactgttgttaatttttattgttttccaaattcttcagcaaatgctaatgccactactacagtgcattgggtagaagtttatgaaggtaataataaagcgttaaatgataaggtaagtacttcaactctaattaaggattactcttctaaagcagatactgctcaagcaataacttctgcaactgaaacccttgaagctaaatttcgtcaaaaatttggcgatttgtggactaatagttcagcaacactagatagtactcgctacaccaaaacagaaactaaccaagctattgctgaagagagcaaaattatcaaagctgctatttcttcaagtggtggtgacaacataattaaaaatggtgatttctcaagccctttaggcaccttaaattggcgtcaaaattctgctgtggcaggtaatctacttgaagtttataaagattcaaaaggtgctacttgggggcactttaaatctactgatacaactacatactttaaagggtttattgaaactctgacattggcagatggtttagagatgaatcagaagtacacattgtcatttaaagcaatgtcgttgacagctgcacagactcaaattttattaattatacaccgtcgagattcatcaggtcgtaataaccaaattggtactacatggaataacatttcgactgataaagaaacattatgtacttatacctttgatacaaatattattaatttacagcatattaacttaattttatattcgcaagtaggttttgctcctgactttttaattagagaagtgcaacttgaaaaaggtgagttagccactggttttagaaaaaatcctcgtgaactaattaaggatcttgaagctaatgcttctgcaattgaaggtactaaagctgatgttcaaaaaaacggtgaaaagattacttcacttgcagagaattatgcgactttaaaatctactgtagacaataataaaactgctgtagatggtaagtttcaggaaattaattcaactattagtgataatcaacagaacactacacagtctattaataacttggaatcaagttataaacaattaaatcaggaccttggtcaagttttcaattaccgtgtttattcatgtggctggaatggctttttcacagggattaaaaacttaaaaggtgaaatcaaatcagtagcttcagcacgtggtttttcagtccatgttttagcagctgatggttctatagcttcttcaactagatatgatacttatgcagctgtagcaaatgctacggcaatgagtaacgctatttctgcgattccaaatgacacctttgttatcgttacaaactacgacagtattggtgtaaacctagcaccagttaagaatgcattaatttcattaggtgccaatccattcacacttgatcaaataacgggtcgggatgcatacattttagttggtcagaaggggattggttcaggtcgtggtatagaattgcatgcaacaccagatactggaccaaatggggctaagcaaatcatgcttgcaatccaagtagttagtggtatcccgattggtctggcaaacaatagtggaaacttacaaaaggttttagaaaaccacgcacaaattcttcaagaaaaaattacaagatctgatgcgaaagaagtatttgctgaggaaatcaaagtttttaaagcacaacttgatactttacgttactcagaagagaactggattttacttggtgatgatactaaaaatttaagtatttctactggtacaaaccgaactgtagctgtttgggaactgcaatataaacacaaggaaattccaattgataaaggtgatccaatagttgcgagaatcaaatacacagcaactgcaggattagttggcgctacatgtagtattcaatttcatggtgcaacttatagtgttgggttaccttcgtttgttgtagctgcaagtggtgaaatagaacttactggtattttcccaaatgatttaaaagcctctgcttatgaagctattccactaggtttacggtttgataatgctccatctggtggaacatttactgtaactaatatgtttatcagccgaggtaattcagcgccaaattttaaaggcggatttagatcatctctaaaacaaaatgctcaatttgttgaagatacttttatcaaggctgatgttaataagggagttatagctcagcaaatccaacaatatgatgcaactgtacctggtggtttatcttctgtagtaaaaacaacaaaagctacagctgaccaaacatcaaaggatctagctacacttagaaatactgaaatttctcagcttcaaacaagtacaaataatcttggttccgcattagaaaacacaacaatgctggcgatgatgattactaatggaaaattgttgcagggagacgtaaatttcaaaaaaggtaacaatggtgtatctgtctataacaatgccggcaatgggaatgtgacagttactcgagtcgcgaaaagttctgataaccctactacctcaacccatgaaattgaaattaaaaccattggtgctgccagcccaacatggggtggatttgttcaactcgtttatggccgtgcaaatgctgtttttgttatcaagtatttaatcaagctaccagttggatataaattggtgaatgctggtaacgcaatggggacaggggcaattgatcgattcattggcaatactgagggtacaggcaaattcgaaacatatattcgaatgattaaatgtggtgctgtaggttctttctctaactcaggacatgtttatgtggcgggaggatctacaccaacagctactgcgcctttagtttggaccttagcccaaatcgagcaatatgacgttactgattacgcttcagctgacccgactttacaggactttgtttcttcagccacagactctatatcaacattaacgaacttcaaagaaacttgggctgccaaacttactgaaatgtcttcaaaattagacagtaaaaacggcgcttatattttgaatgcggatataacaaatactaatgttgagcgtgcaattgcagcatcttcacagaaaattacttctgaatataccaatgctatgagtgtgcagccattgagttcaggtgcagggaaaattttcgttaagcctttaacttggcgtcaagcaatcactacttcgggtacattggttattaagacaccaattacagttggtgcgtacatgaccaaggttaaaatttctggttataactacaataacaaagaagataatattttcgatctggatttggcattttatgcttatacgtcaacagtgccattttatccaaatatgacgtcacgttcttttggtattaccttagatgaaaataatgctacgactaaaggcctggctctagctttagatagcaataataaggtgtgtatcttaattaccaaaaaagatgcttggtcttacccagcaattacagttgagtcggccactattactcatacaaatccgccagattactttaaagatggctggacggcggccattgaaacggatttatcagtttataagtcagttacgccgtttacagtgacttcaatgatggaaaccactgcaggttcacaagccaaagtagatgttccaatgtctcaattaagtgatattgcagctgataataaactcacaccagttgagaaaaaacaggcgaagttggtttgggatacactttatcaaactgatgcaagcttgcgagctgaggcagtcacttatggtatatcttctactgcctatgcaacggcattcagtactttaaatacatatttagcagctttattcgcaaatatgaatgtaactagtacgattgaccgaaaccagttcattactaactttgcgaacgtgcacaacgcacgacaagcattagtacgtgcaatctcggagaaggctaaagaaatagctgatactgccaaggacatagcttctactacaaaagcaacattagagcgtgattacatgacgtctaccaagacgaatgaagcaatcgcatcttcaacagaaagaatgtctgcactgtattctgcaaatggtcaaaagatcatggcttcagtactcgaaacatggcaaaaagattggttagtaaaaactccaagtgggaataggcctgaacttagtttagttgcagatgcaacttgtcgtgggggatatgcactaagaattggtaataacgtaggtaatgatgaagcctggttaaattggttcacatctttgcctatcgatgacaataaatattaccgagttaagtatagattccgccgtgtaagtggtaccggagttgtttatgttggtgcgacctgtcaaaacgccaataaaacaaaatatattgctcaagataactctgaaatcaatgatatcggttcaagtcactatttagtcgcaggtaccgcaccagcgttgggaacttggataaccggtactgcttattttaaggggcgatctgctggtgcaagtgcaggtgctggcactctactaagccctaaaacatttgctaataaagctgctttctttacaccagtattcattggtaactattccggtaaagctggtgaagtggatctagactttatcgatattgaagatgctgacaacattgctgattttgaaaatttcaaaaccacatatacaactgatgtgggagcatatgctggtgcattacaaactttggtttctgtttacggccaaaatgctatcaagcttaaatcacaagctgatttgatcgatggtgtgaaaggtaagtacgtaatgggaatggataacaacggtgttttctctggtttatccatggtaagtgaacaaaataatggaactgtccgaacttctataggtttccaagctgatagaatttttttcacaacaggtacttcttctactaaatatatgccgttcataattcaagacaatcaggtcattatgaatagtgatgtatttattaaaaatttgaccgcagcaaacttcaaagcgaagtctttaacagctgaactgtttaaagtcgataaattgagcgcgattgctggtgagttgggaactttaacgacctataaggatcctactaagcctaatggcgcgagaatggtgttaagcggaagtttaattacggtatacgatgataataatgttgtcagggttaaattagggctgtggtag

SEQ ID NO: 56016 - DNA, 399 bp, Acinetobacter baumannii; identical to SEQ ID NO: 45732

SEQ ID NO: 56017 - DNA, 1047 bp, Acinetobacter baumannii
atgaataagattttatttggtgattgccgtacgttgatggcacaaatgattcaagaaggattgaaagctcaaacatgtgttacttcacccccatattttggtttgagagattacggtgttgatggccaattaggtttagaaagtacagttgacgagtacgttcaaaacatggtcgaagtatttcgcttagtacgagaacttctgcatgaagatgggaccctttggttgaatcttggtgatagttatgcaggttctggcagaggtattactcgcacaggactaaatgatggcaagaacccaaaaacgaaagggttaattttaccaaagcaaaatgcagctcaatcgaacttaaaaccaaaaaatttgattggtattccatggaaagtagcttttgcacttcaagctgatggctggtatttacgccaagatattatttggcataaaccaaatcctatgcctgaaagtattacagatcgttgtactaaagcacatgagtacattttcttattcagcaaatctcgaagatattactttgatcatgtagctatcaaagagccagttgcagaaagctcaatcaaaagactttctcaaaaccttgatgaccaacaaggaagtgaccgtgttgttaataagcataacggtccaatgaaagctgtttactcgagatcttcacgagatagttttaaacgctctaatagcaagagagctgttgctcatcctaatcaaagtatgggtactcatcgagcagatcgcaaagaaagtaattatgacctacttacaagaaataagcgttctgtgtggcaagtctcgactaagccatataaaggcgcacatttcgctacattcccaatggatttaattgagccatgcattcttgcaggatctcgagttaatgacgttgtctttgacccattcatgggatccggaacaacagcagctgtagcactaatgcataaccgtaattatttagggtgtgaattgaatcctcaatattacgaattgcagcaagaacgctttgagaaagtattaaaagagagggccgcatga

SEQ ID NO: 56018 - DNA, 267 bp, Acinetobacter baumannii
ttggtttatgtcggaaatccgaatagtgaaatgcaaaatcagctctcttgggcaaaagagcaacttgaatcacaaggttttaatatcacctcgaatacgttggatggtgaagttgataaggcaattatcaattacgctgaacagcatcaaatcgatttgattgtggttggggcttatggtcattcaaagatacgtcaattttttattggcagcaccaccacaaaagtgatcacaagcgctaataaaccagtcctgttactacgataa

SEQ ID NO: 56019 - DNA, 1092 bp, Acinetobacter baumannii; identical to SEQ ID NO: 45995

SEQ ID NO: 56020 - DNA, 156 bp, Acinetobacter baumannii; identical to SEQ ID NO: 46103

SEQ ID NO: 56021 - DNA, 711 bp, Acinetobacter baumannii
atgagtcttaaaatgaaagagaaatatcttttagaaaagaatgtgaaatacattttgttttcacaacgattaacagtaacgggtcttagtaaattatccggggtgcctcaacctacactcttccgttgggaaagtggacaatttcaagcgcctactattaagacagtagagaagttagcgaaatggtgtggtttaactacagaagaattgctctaccaagatattgaaaaaattttaaaaaataaaagctctgattccaatcttaaacttgataacaatgttgatcttaataataaaatcaacatagaaggagatttagtacctgtgatttcttgggtagcagcgggttcatttacagatgtacaaactgtgttaaaggatacggaagtaatagaatggcttccaccaatgaaaaaggctggtaagaatggttatggccttatagtcactggatactcaatgtatccaaagtttgaacctggtgatcgaatatatgtaaatcctgattatcctgtgtttgatctaaaaaccaatgatcttgtaattgttgcatgtgcaggtgaatcagaggctacttttaaaaagttaattattgaaggaaatgaaaaatatctagaaccgcttaatacaaaatggcctgagcagattattaaattaactgagggttgtaagttggtaggtaaagtagttggtatgcatagggagttttaa

SEQ ID NO: 56022 - DNA, 288 bp, Acinetobacter baumannii; identical to SEQ ID NO: 51268

SEQ ID NO: 56023 - DNA, 354 bp, Acinetobacter baumannii
atgagtgaattatatagcagtcaagctgtcaaagatgttcttaatgaaagagaacgccaaattataaaagaagggtatttacctgaatttgataatctctatgaagcaaatgaattgccacgagctgcatcttgttacgttgatcatgtagtaagtagaggttgggtttataacagcaaagatttcggccccgaagtgtatatggatgaggatgctgcaggatggtggccttttgctgatactttctggaaaccaaaaagcccaagacaagatttggttcgtgcagccgctttattaattgcagaaattgaacgactagatagagaagttaaagcagaaagtaaggaggggtaa

SEQ ID NO: 56024 - DNA, 141 bp, Acinetobacter baumannii
atgattcaaatttataacagcaaaactagaacttttactgtgataggtaaacgaacccaagttttcttaaatgtatcacttaatgaaactgaagctttgctcttcaaagcgaaacttaaagattccatttggagattctaa

SEQ ID NO: 56025 - DNA, 501 bp, Acinetobacter baumannii; identical to SEQ ID NO: 46382

SEQ ID NO: 56026 - DNA, 642 bp, Acinetobacter baumannii; identical to SEQ ID NO: 46106

SEQ ID NO: 56027 - DNA, 843 bp, Acinetobacter baumannii; identical to SEQ ID NO: 46107

SEQ ID NO: 56028 - DNA, 1953 bp, Acinetobacter baumannii
gtgagtgttaaatcaattttcattcaaacacacgcaccacatcaaagccgattagtacatggttttgactccatggtgaatagtggtgcttgttcaattgggtttattaagggtgattaccgtcaaattaatgctttagtcactgaagattacacggaaaatgatttctggcgtgttgtaaatttaaaaggtaaaaagggtgggatagatgcgtttgattctgttgcggtattaggcgctatcgatgaccagcatgcagctgatttagctatactgcaatttggccgaatgtttgatgctagtgttacagatgttattgaaacaaatcaatttggacttaagcgccatttatcatcacaacaatttaatttgacgggttcaaaaccgattcaaagatggcaactagaacaattacaaaatgttgtagcagctgaaaaacctgaatgggatggaatcaatttaatttctcatgagggtgatacttctaagttgttattagatatgcaacgaaatgatgatcacagccaattattaagtaaatttgatgggttacctacgcttttatctagtctaggcgtagaagaagctcattatgactctattatcgttgattaccagcatttagagcagctgtctgcaattttgcatcactctatggatcagttttcaaaaactggcgtcaaaatcgttaacgttacggaaagtaagccatttaagcataaaaaagtccttcaaattgctcttacttatgattttgatgacggccaaaacttcacaatcctttttcataagccagatcgattatcaaaaaaaattagtccagcagattcattaatttcatggaagattttaatgaacaatcgggatattacggctgcaattcagcctaatcagggagaaggaatatcaattccagttctcgctggtcgaattatgaagttgattaaccaaaatagtaatcgttttaagcggttacaatctaaaaaagcagaaaaggccaaggctttagcagatgctgaactacgtctcgagcaaaaacaaagtcaattaaattctttaagtgcagaaatttccaatttattaaatgaattggatcagttgcaaaatacattgttaaccaagcaatctgaagaaaatgaagtaatcattaaagagaatagtctcgataatgagttaccagatagtatttctgatgaagaagccgaacgtttaaaagccgacttaaagcgtttaaatgctgatcctgaatgggcaggtgaagatggtttacgttaccaagcattctttgaacgtatcaataaggctctagagggggattctgatgcagtagtttgggcacgtgaatggatttctgatctagatgaccaggctttggctcaacagcaagcaggattagaagcaaaaaaacttattgatgccgaaaatgaagctaaacaaaaaagagatgaagaagtattagcagcacgtacagctggtatagctgaaaacaaaatgatgcaagcatggttagacactttggaaaatcctgaagattctaacaacatagactttatggcttgggtttcagatcgccgtggtgaattcttaaaaaactggaatggggccgaaggttcaccagaatatttaacagcattttatgaatattcaagagcatgggcagatgaacatttagcggatcgcctcagaaataaagagccagcccaaaattcagataatgaagaatttaaagaactaaatgctccgacagaagttgaaggtcttcagcctagtacgacaaatgatgaaggtaatcaactttaccgttcagtaattgaagggcaggttaaagttaatcttgagttattagagcaaattcgagatgaagcagaaaaagacttaaatgatccacttcttattccagcggtgacagagctcttgaatcaagtacaaaaaatggaagcggagaatatctaa

SEQ ID NO: 56029 - DNA, 210 bp, Acinetobacter baumannii
atgagtaagaataacggaaaacaattcctggaaggagatcttcttggcagtcaacatatgactgagcaagaagaagagaaattgcagcgctcattgacaaatcgtcatattcaaatgatcgcaatcggtggtgcaattggtactggattatttatgggggcactgttgcaaatagtcggtggtgataaacttatcatccccttttgctga

SEQ ID NO: 56030 - DNA, 642 bp, Acinetobacter baumannii
atgaaaaagtatttaaccctatttatcattggctcagcacttctaagtggatgcagcaatgcatctgatagcactaaaaattcagaagtaaaaactgagacccctgcgcctaaagccttatctgctgaagatcagaaaattattaataaacataatgagtacgttcaaaaatactctatggaagataaagatgtctttcaaaagcatatgcgcgagatacttcctgaggtcgataaaatcacggataagcgaaaacgtgagcttcttcaaatgaatatatatatgattttgaatgactatgataaagcgcatgctttaaatgataagcagcttgcacagaaaccaaatgacacagcacgacttacatttagatgtcagttactttcactacaagggaaagaagccacttcgattaataggtgctatgactatgtggcagaggttctaaaagtagagctgaacaaaccagaaaataagaaggacccaaattataagcaagctgaattttcatacttacttgtaaaatataaagctgggcaccttgaatacaaagagaaaatgaggaaattcattgatagtacaaatgatgaagctctaaaagcctctttacaaactgtctacgatgcagaaataaataattaa

SEQ ID NO: 56031 - DNA, 843 bp, Acinetobacter baumannii
ttggcaaccccatatataactattggctgccctactactggagggggccaagtaatctcaggaaacagttcgtttctaattgacggcattgccgttgcttgtgtcggtgataaagcaacctgcccaacacataaaattgtcgcaacgattgtatctggcgatccgaatatgcagattttcggtaaagctgcagctcgtgttaatgactctctttcatgtggttgtaagcttctacctaaacaaaatttggtcgttcaagacaacggcggtggagccgcttcttctgctgctaattcatcaccagccccaatgtctcaaaaacaaccaacaacagacagctttgtaaaagatgagtacgagaattactacatagaacaaaataaaacaacaatggtcccattcaaaacgatgttaatgccatacgatcaagatagaacaaacttatttggtgtaatgtcacaaatggtatcgggcgcttgtaactttgaagtaacccaccaagtcaaaaaagatcaactctttgtaactgcaaccttactacctcctactgttagagctgatgcaacaatcatcccacgtgctgttcttcgcttatttaagaaagataaacagataagtgacacaatcactttaaaagtcggtaagggctactggaatacggcaaatgataaacaacctgtaggtagttgcgaggttaagctacctgtaccagacttagaagtaattaaggcaaagcttacaatgaaatatgatgcgaaatttgatggcggtgtagtcgtaacttctcccccagacgtaacttatgagtttacaattacttcggcggcaagacgtaaagcatga

SEQ ID NO: 56032 - DNA, 708 bp, Acinetobacter baumannii; identical to SEQ ID NO: 46560

SEQ ID NO: 56033 - DNA, 165 bp, Acinetobacter baumannii
atggcacagcctgccattccgcctaagaagcctgaagcgacattggcaacaccttgccctttacattctcggtttttatcactggtggtatctgttaaatcgtcgacaattgttgcggtcatcatggactcaagtaaacccacggctgccaaacctagtgaatag

SEQ ID NO: 56034 - DNA, 285 bp, Acinetobacter baumannii
atgagtaaccgtgaagaagcacgtaagcatttaagacatgcacattcagcacgggcggatgtttattttactgggattatcctaatagctctaattgaacgactgggaattaaagatttgaactccttatttctcatgtctgaagctgtacgtttacccaaaataatgacatggggtaaacacaaaggaacgcctcttaaagaattaccgcgcccatatatctcatggctcctgaataaagaagaccttgacccacatttgcgtaaagcgcttcaaaatatttaa

SEQ ID NO: 56035 - DNA, 576 bp, Acinetobacter baumannii; identical to SEQ ID NO: 53551

SEQ ID NO: 56036 - DNA, 720 bp, Acinetobacter baumannii
atgacattaaaggaacttgaatactatatcgtttattggattactaaagtttatcatcagaagaagcattccgctttaggaacatcacctattgttaaatgggaagaaggtgtttgggggacgaagacgacagcaggtacaggtttgaaagaacgtgtatcagatgaagataccttgtttattgattttctacctgaatttgaagcgactattcagcgtacaggggtgcagaaagataacttattctattttgcagactgtttaaggcaatgggttaattctattgatccagaggacaataatcgaaagcgcaaaagaaaattcttgtttaaacgtgatccgagggatatttcacagatttggttttatgagccattttctaatacctattttaaagtacccactgcaaagcgagagataccaccgattagcttatttgaatataagcaggttcagaactatctcaaaagtgaacgtcaggatgttcagaatcaggatgagatttacaaggcgattttgcatctacgtgatcaacttaatcaggctagaagcttgactcgaaagcaacgtcgctcaaaccaaagaaaaaaggaaaatgcaaaagccattactcagctatccgaacagaatcagtctaaaaaggctgtagtttctgaaagccttcagacaagtgatgatttgtggagtactcctttaactgcatttgatgatttaaggtga

SEQ ID NO: 56037 - DNA, 576 bp, Acinetobacter baumannii; identical to SEQ ID NO: 53548

SEQ ID NO: 56038 - DNA, 576 bp, Acinetobacter baumannii; identical to SEQ ID NO: 53551

SEQ ID NO: 56039 - DNA, 558 bp, Acinetobacter baumannii; identical to SEQ ID NO: 48543

SEQ ID NO: 56040 - DNA, 213 bp, Acinetobacter baumannii
atgtttaataaggatggtactcagccgccaccaattgaatacttaatgcgattaaaaatatatgcttttgataaagctgcaagaaatcaaaaccaatttgaaattgagcatctagtttcacttcaagcaggcaatttgccccttgatgcctctaataaagcacataccattgttactttaaatttcatcaaaatgtttcccaacttaaaataa

SEQ ID NO: 56041 - DNA, 213 bp, Acinetobacter baumannii
atgtttaataaggatggtactcagccgcctcctatagagtacttaatgagattaaaaatatacgcttttgataaggctgcaagaaatcagaaccaatttgcaattgagcatttagtagcacttcaagccggaaatttacccctagatgcagctaataaagcgcatgccattgttactttaaatttcatcaaaatgtttcccaacttaaaataa

SEQ ID NO: 56042 - DNA, 294 bp, Acinetobacter baumannii
gtggaggagaagtatcatcaaccagaattacacgaatacaggtacctaacaagcacagaacaaatggcaattcatcagatgcttatttcttatgttcgcgaggagaattgccgctttaatataatcatggccggcacagcagagccctacaattttgtcaagctaacaagtattaattttgagaatgaagctgctgccatatgggtccattttgaaaccatcacaggtgagcaaatagctctaccaattgattttctttcaagaattgaattttcaggcacacaagaagtttag

SEQ ID NO: 56043 - DNA, 339 bp, Acinetobacter baumannii
atgtttcaaaaaatcatagaaaatatcaaagcatggtacaagggcgatcccggtgatatgagatgggacccacgtaccgatacttatgtaggcacaagaaaaccaagtaagcattgggctgcaaatttattatctcatctcgctgattttttcttcttgatagctaaatcaattaaaaaacaccccagcaccttcataactcagcttttagcattcattgctatccttgtttcgtgtttttctatttatcttcaatattatgtagatgatgatgagtacaaacgctgcaccatagcacataccaataatcaagagattacattgaaatgtaagaaatga

SEQ ID NO: 56044 - DNA, 240 bp, Acinetobacter baumannii
atgcttgaacttactgtaattgatgtttctagtgacaaacccgaacctttatatgcaagacaatttacgacacaccctcgtattggtgaatggatcgatataaatattgatgaagaaagtacaatgtttgaggttgttaaggttgctcactcaacaaatggtggcgactctgatttgtacgtaaagcgtctagggttagcctttgaagttgttctggatctgtgcaataaaaatgattag

SEQ ID NO: 56045 - DNA, 771 bp, Acinetobacter baumannii
atggataactacaaaatcaaagttaaagatgaagctagctcagatgaagcaagggatctatttaaaaagcttggttaccatcctgataactcttcatatgaaccatatgtggaatgggttgcagtttttgaagatggtagcggaagtttctacagacacaatatgaatttgaatgagtgcgtagaaattactatagctcagcttcgagaccttgttgtgttgaagcgtaatgatgtgagagatgcgaattacacctatgctggcaacccagtcttaaagcttgaaactcaagactataaagtttgggatgaagctaaacaggcatggcttgagcacgttggctcacaaacagatctgcgtagaggattaaaagcaattccaaaagcagaaaaagacccagccttgattagcggtgctgatgcgttgcgagctttggctgatgggaaggatgttcaggttagaactgagctaacaacaaattgggataacgatacagcaacttattcagtcgaagagattcttgcagaagaaactgcggaaactgatgactacagcagtatgaagttatttttccgcctcaaaccccaaaccataaagcttgaactagaaatccctgctccatacaaagcaaagattggcggtagagaagacacatcattcgttttgaacgttggcagacatcagtactgctacaacaacgaagaagactacacgaaggcacgggatgctttggagtccgtttttgatgcagcagtgagaggtactaactaa

SEQ ID NO: 56046 - DNA, 384 bp, Acinetobacter baumannii
atgaatatggtagttaacaagccggagttgctgtgcccttctttcccaatgcttcaagtgtctggtgagtttgaagttaaagacaacacagttttatttgagctggaaagtggttgtgcaactttgaaatgcaagattgttgctgatgttgttaaacaagttcgtgtagttggttctctaatgaatccaaaggatagtaaagaccagttttacgaccaactcgttgtagatgatcgcacacatgttgaagttgttggcactgaatatgtagagacaccaattggccttctatttcaacttacatcaacacaagtggctgaattaaacaaacagcttgaatactacgccgaagaattggcagatgaagaagcgggagtggtgtga

SEQ ID NO: 56047 - DNA, 669 bp, Acinetobacter baumannii
atgagtattgcaacattaattttaggccaatcaggcactggcaaatcaacaagtcttcgtaacctaaatccaaatgatgttttgttgattcaggtagttaaaaagcccctacctttccgttcggctgaatggaaatacctatcaaaagatggtggctctatttatgtaacagatagtccagaagtgattatcaagcgtatgcaacaaacttcaaagccaatcatcattattgatgattatcagtatgttatggcaaatgaatatatgcgcagaagtactgagactggcttcaacaagttcactgaaattgggcgcaaaacttgggatgtattcacagaagcttcaaaccttgcggacaacaagcgcgtctacattttaagccacacagaagaggctgaatctggcaaaaccaagattaaaactattggaaaaatgctagacgaaaaaatcacattagaaggaatggtaaccatctgtcttcaaacaggtgttatcaacgaacaatatatttttcataccaaaaacagcgggttaaacactgttaaatcccctatcggcttatttgagtctgaccatattgaaaacgatttagaggccgttgatacagctatctgtgattactacggaatagcaaaaactgaaacacaaacaactactgaaacagcataa

SEQ ID NO: 56048 - DNA, 660 bp, Acinetobacter baumannii
atgggtaactatcaagcatttaatttgaatactgaatcagcaaaacaagctgatgcaggtggacgtattgaaactactggtaaatacgttggtgtaattaaatcaatggagtttgtaacctctaaacaaggtacacaaggttttgaaatcaactttgagtctgattcaaaggagtttacaaacttcactatatggactgtcaaagctgatggtactgcactttcaggtgtccataaaatcaatgcgattatggcttgtgcgagtgttaagagcctcacacctacggatcaaaaattagagaaatatgattttgatcttaaacaaaaagtacaacaaacatgtgtggttgcgcctgagatgactaataagcgtattggtgttttgctacagcgcgaaaattacttaaatggaagtggtcagcaacgccatcaaatgaatttcttcgcttcatttaatgctgatagcgaattgatggctaaagaaatccttgaacgtaaaacttcacctgagctactgcctaaagctcttgatcgtttaattgctatgggtgatgcacaacgtgcacagcaaaatgcaccgcaacaatctggtggctatggtcaatattcacaaactcaaggtaatcaatcttctgatttagatgacgacctaccgttctaa

SEQ ID NO: 56049 - DNA, 516 bp, Acinetobacter baumannii
atgacaactttatatgacattggatatgacctagctgaacaggttgagcgaattcaagatcttttagctgaaggtgcaagttccgatagtgaagaagttcaactgttgctggaaggcatggttgctaaagaaggcgaatggaaagaaaagtcaaagcgtgtggcaaagtttgtccatcaaatgatgttggaagaaaaactgatagctactgaggcacagcgtctttctgataaagccaaacgtattaaaagtacatatggatatcttcacgatcttttactagatcaaatgcttgagtttggtgtcagtgaaattgaagatccagttctttcaatcaaggtaaaagaaaatccttggtctgtagttgtaaaaaacgaggaagaaattccggctcaatttaaacgagaaaaaactacagtcgaagtagataagcgcgccctactcaatgctcgtgaatctatcactgatatcaaaggcattgagttcattagaactaaaaaattggcatttaagtaa

SEQ ID NO: 56050 - DNA, 540 bp, Acinetobacter baumannii; identical to SEQ ID NO: 25035

SEQ ID NO: 56051 - DNA, 288 bp, Acinetobacter baumannii; identical to SEQ ID NO: 25034

SEQ ID NO: 56052 - DNA, 1065 bp, Acinetobacter baumannii
atgagcaagagaaccaaagacaaagacctggagaaactcgacgtaatcaaagactcaccgcaaatgagcctgtttgagatcattgaatctccggccaagaaagacgactactccaacaccatcgagatctacgatgcgctgccgaagtacatttgggaccaaaagcgtgagcatgaagatttatccaacgctgtagtgacacgacaatgcaccatcagaggccagcatttcacggtgaaggtgaagccagccatcatcgagaaggatgacggaagaaccgtgctgatctacgcgggacagcgagaggaaatccttgaggatgctctacgcaagctcgcagtgaacgggaaaggccatatcatcgagggcaaggctggagtcatgttcactctgtacgaactccagaaagagctctcgaagatgggtcacgggtacaacctgaacgaaatcaaggaagcaatccaggtttgtcgtggcgcaacactcgaatgtatcagtgatgacggtgaagccttcatcagctccagcttcttcccgatggtgggactgaccaccagaggtgagtttcgcaagaaaggcgggaacgccaggtgctatgtgcagttcaacccgctggtaaacgaatcgatcatgaatctgtcgtttcgtcagtacaactacaaaatcggaatgcaaatccgctcccctcttgcacggtacatctacaagcgaatgagccactactggactcaagcatcaccagattcgccgtacacgccatcgcttatcagcttcctgacccagagccctcgtgaattgagcccacggatgccggagaacgtcagagccatgaagctcgctctggaggccctcatcaaacaagaggtcataagcgactacgacgcgaaccagatcaaggatggtcgcagagtcatcgacgtgcggtacgtcataaggcctcatgagaacttcgtgaagcaggtgatggcgtccaacaagcgtaagcagcagacagagctacgggccatcaagcacggcatgatcgaccacgacatcattgatgaaccccaacgtaaggggagatag

SEQ ID NO: 56053 - DNA, 282 bp, Acinetobacter baumannii; identical to SEQ ID NO: 25032

SEQ ID NO: 56054 - DNA, 435 bp, Acinetobacter baumannii; identical to SEQ ID NO: 25031

SEQ ID NO: 56055 - DNA, 1116 bp, Acinetobacter baumannii; identical to SEQ ID NO: 25030

SEQ ID NO: 56056 - DNA, 609 bp, Acinetobacter baumannii; identical to SEQ ID NO: 25029

SEQ ID NO: 56057 - DNA, 522 bp, Acinetobacter baumannii
gtggaatttgattacgacaagtcagtatcaaacgcacatcttgaggccgcaggctggggtatggatgcctttaaccactccaacccatttgagagtcatgtcatctatgtgcgtgactaccgcaacgatcacatccgcctgttcaccatcaagcaggctgacttcgacacgataaagctgccgcttcaccttacctccgacatgctggctttggtgatcgctgagttcgtatcgaaggcagcaaaagggaagttgaatacgaaggagtccgacacgctggctcctgccttggttggctatgccaaatcaacagaaacctaccggagctggcggagagtttctggagcaacagagcgattgcatatggtcatcaatatctatgcgggttctgaattgctgagacctttcatcgctcgggctcctgagaccgtcctgacgacccaagagctactggtcttctcatcacaggttaagagcatggatgtatccaatcatccagagtggtttaggggccggaggtag

SEQ ID NO: 56058 - DNA, 522 bp, Acinetobacter baumannii; identical to SEQ ID NO: 25027

SEQ ID NO: 56059 - DNA, 474 bp, Acinetobacter baumannii; identical to SEQ ID NO: 25026

SEQ ID NO: 56060 - DNA, 294 bp, Acinetobacter baumannii; identical to SEQ ID NO: 25025

SEQ ID NO: 56061 - DNA, 855 bp, Acinetobacter baumannii; identical to SEQ ID NO: 25024

SEQ ID NO: 56062 - DNA, 960 bp, Acinetobacter baumannii; identical to SEQ ID NO: 25023

SEQ ID NO: 56063 - DNA, 861 bp, Acinetobacter baumannii; identical to SEQ ID NO: 25022

SEQ ID NO: 56064 - DNA, 429 bp, Acinetobacter baumannii; identical to SEQ ID NO: 25021

SEQ ID NO: 56065 - DNA, 360 bp, Acinetobacter baumannii; identical to SEQ ID NO: 25020

SEQ ID NO: 56066 - DNA, 447 bp, Acinetobacter baumannii; identical to SEQ ID NO: 25019

SEQ ID NO: 56067 - DNA, 519 bp, Acinetobacter baumannii
atgacgacgaatactcaaaacgcgaacgccaaccaggttcggtctttacgcgacatgcttgtccccgccctgttgttctatgtggtgatgacggccatgtttgtgggtcttgacgcattcatggataaacccaccagcatgaacctgccatttatgccgttccttgtctcgatggtgagttttaccagtgacgcacgtcgagcgtgggactggcgaaacgggaccaaggttgtagctgtattgactgcggtaaccatgctgttggcattcatctatcagctcgcggtcggagagatgaatctcttaggggttggtatatacccggccacagccatccttctgttggcaatctcctgggtgattcgcgctatcggaaagacagcacctttccagttcctggggagacacctggcgcggtttggtgcatcgaagtgggtccagcgtaccgccgcagtcattgtgctcgcgggaggccttgccatcactatctatgcctactggcttaaccacgggagctga

SEQ ID NO: 56068 - DNA, 228 bp, Acinetobacter baumannii; identical to SEQ ID NO: 25017

SEQ ID NO: 56069 - DNA, 858 bp, Acinetobacter baumannii; identical to SEQ ID NO: 25016

SEQ ID NO: 56070 - DNA, 189 bp, Acinetobacter baumannii; identical to SEQ ID NO: 25015

SEQ ID NO: 56071 - DNA, 528 bp, Acinetobacter baumannii; identical to SEQ ID NO: 25014

SEQ ID NO: 56072 - DNA, 273 bp, Acinetobacter baumannii; identical to SEQ ID NO: 25013

SEQ ID NO: 56073 - DNA, 303 bp, Acinetobacter baumannii; identical to SEQ ID NO: 25011

SEQ ID NO: 56074 - DNA, 351 bp, Acinetobacter baumannii; identical to SEQ ID NO: 25010

SEQ ID NO: 56075 - DNA, 549 bp, Acinetobacter baumannii; identical to SEQ ID NO: 25009

SEQ ID NO: 56076 - DNA, 195 bp, Acinetobacter baumannii; identical to SEQ ID NO: 25008

SEQ ID NO: 56077 - DNA, 372 bp, Acinetobacter baumannii; identical to SEQ ID NO: 25007

SEQ ID NO: 56078 - DNA, 471 bp, Acinetobacter baumannii; identical to SEQ ID NO: 25006

SEQ ID NO: 56079 - DNA, 336 bp, Acinetobacter baumannii; identical to SEQ ID NO: 25005

SEQ ID NO: 56080 - DNA, 489 bp, Acinetobacter baumannii; identical to SEQ ID NO: 25004

SEQ ID NO: 56081 - DNA, 498 bp, Acinetobacter baumannii; identical to SEQ ID NO: 25003

SEQ ID NO: 56082 - DNA, 264 bp, Acinetobacter baumannii; identical to SEQ ID NO: 34918

SEQ ID NO: 56083 - DNA, 933 bp, Acinetobacter baumannii; identical to SEQ ID NO: 34919

SEQ ID NO: 56084 - DNA, 1464 bp, Acinetobacter baumannii
atgagcgatattacacagcaaatggacaaacttgagattccaatcaagttgtcctttccagtcatcaacgttagcacttttgagctgggccgcgcagagagcgttttctctgacattgcaaagaaagtcggcaagcactttattgtaatgccattcaagaagctgcctgatccaggcacgatgaaggcaatggtggacgagtccaagaagtcctccaaaaacggagttgtcgtgttcgacactttctttttcgaccgccaacgtgcaaacccggaaacactcccagccctcaagtcatcactgacctatctggagaatgaggggatcaactacatcatcgctggcaaagacgtcttcaatgaagagttcgtttatcacatcgatctcccggctatgagcaatcaggaaatcctgaaactgctccagacctgtgaagataacgtgaaagatggtggagtcttcgagagcaacgaacgtgctgtcatcgcaaaccacgccttgggcttgtcacacacccagatgaagaacgtcttcacctactccgcttacttgaaattcaagggtgaagaatacctgggcgagatccgaaaagaaaaagctcacatcttgcgtgatgtcggcctcgatgtgcttgaggccattgatattgggaatgtcggtggtctcgaaaacctcaaggagttcctccagatacgtaaagccggttgggacaaagaccttccggtaaaaggtgtccttctggccggtgtacctggtggtggtaaatcgctgacggcaaaagccgctgccggtgtacttggcactaccttggttcgcctggatatgggccgtttctatagcaagtatctcggtgaaaccgagcgccagttcaatcgtgcattgcagaccattgagcagatcgcacccgttgttgtgttgattgacgagatggagaagttttttggtaatgccgatggcgaacacgaagtatccaagcgcctgctgggctctttcctctactggcttcaagagcgcaagaagaagatcttcattgtggcgacggccaaccgggttcagtcgctgcctcctgaattgatgcgagctggccgctgggaccgagcattcttcattgatctgccaagtgtggctgagcgccagaagatttttgagatccacctcgccaagcagaaggccaacatcgccgcgttcgatatgcctacgctacttcgtaccaccgagggatacaccggggcagagattgaacaggccgtcattgacgcgatgtatctggagaacgctcaggacaaagagctcaacaatgaagcgctggtggatgcggtcactcgcattaccccgaccagtgaaactcgccgggaagacatcaaccagattcgcagtttgcgggatcaaggcttctatccggccaataacttcgatgttcaagagcagaatggctctggacgcaaacttgccatcgaggactaa

SEQ ID NO: 56085 - DNA, 330 bp, Acinetobacter baumannii; identical to SEQ ID NO: 34921

SEQ ID NO: 56086 - DNA, 393 bp, Acinetobacter baumannii; identical to SEQ ID NO: 34922

SEQ ID NO: 56087 - DNA, 195 bp, Acinetobacter baumannii; identical to SEQ ID NO: 34923

SEQ ID NO: 56088 - DNA, 1185 bp, Acinetobacter baumannii
atggtgatgagaaggacagggcgcgtcccccttcttttgctggttggtctcatggtcgcagctcctgcggcctttgccagtgactttgtgactggcgttatggtggggcaaatgctctcagatgactcaggcagcaagaagatagaggacactggcccggagagcaaaacggtcattgattaccatgacggtcagccagttgtgaccaaagtggaggccttcaaaagcaataaatggcgcaaactggatggccctcagggcggctattttgtttgcccaggtgaataccgtagctattcgggaaggctgcgatgccgtattcatgatgacgggtttaatggctttatgggcggtatgactgatgctcaggagctgccgctccaagaagctctgaccaagttggaaggtaaacccatctccctgcaaaccattgaagtccacggcaacaacctggcagtcaaataccagttagcaccaccagcacaaacgcacgtcaaaactcaggatctgggggtggtcaagcaggatggtgaaacgcagaaggctgccagccaacaatcagcgtcatccatagtgactgcaccaaagagtgaacctcccaagcagattaatgctgcacaagacactgaccgcaataccagtgcgtttcaaagtccgttcgaggaggtaagtgactccatgatcggtctaatggatagctctttcgtcaaagtcatagcgggattgatgctggtgtttggggttgctagtggaattatgaggcagagcccatcaggaattgtgatggggataatgcctgcaattatgatcatgaccgcgccaacggttattcgtaccgtattcgatacaggcgcggccagtaccaagccagtggaagatagcggaagctcatttcctttcttcttggtggcaatagtaccggtgctgattttctttgcctatagagcttttatgaataaccggagcgactccgaaattgatgagttgttaagagaagcccgacgtgcagaaagggctgaacgaccaagcaatgagcctccctcagtggatgaactccgtgagcgccagcaacaaaacacagaaagagaaccggtggttgtcagctcatcagctccggcaccaaaggtgcaaaaggaagagccaatcgaagtacagccaggcaagcgcaaaattattttggattag

SEQ ID NO: 56089 - DNA, 213 bp, Acinetobacter baumannii
atgattgcgttctatgttattcgcggactttgttcagacgagtcaaagattgcggcatggactcgtgtttggcgttgccagtggaaggtgctgatcgacggtaaaagctatggcccattcagcagtcgtgcggatgctatctcgttcgagaaggacgagatctacaaacaaggcaaattctttgccgatgccactcacgaggcggcagtatga

SEQ ID NO: 56090 - DNA, 429 bp, Acinetobacter baumannii; identical to SEQ ID NO: 34939

SEQ ID NO: 56091 - DNA, 564 bp, Acinetobacter baumannii
atgagtgagagtgtgcgtcggtcaacgccgatggtaaagattaaagtcctgccgagtttcgtaggggttcccttcccgtcggtgctacttatcgttgcggggctccttaatggccctttgtggggctttgccgcattcgtctttcatatcgtcatcaagcggtacatctacagagaataccggaggttgccatatccgatgccaaccggctcaaggcctatggatgagttgagcgatctccttgtaaaggggataccggaggaatttttccggcggcttgacgcagcttgcagctctgatgcgtcagtacaaataacctgcccaaagaaataccggctgctcaaaatgtcgttgaatcgctatgccaaccgcgctggttgttacccgcagttccgggagggggatgaaatagcgattgaggtaacagagcagagaccaagaaaagcaggagcagggaagggctttccaagtattcaagatctgaaagcgtcagagggtgttctgagtgaaccggagcagcctatcgaaattcagaaagataagcgcaagattatcttggattga

SEQ ID NO: 56092 - DNA, 570 bp, Acinetobacter baumannii; identical to SEQ ID NO: 34936

SEQ ID NO: 56093 - DNA, 546 bp, Acinetobacter baumannii; identical to SEQ ID NO: 34935

SEQ ID NO: 56094 - DNA, 363 bp, Acinetobacter baumannii; identical to SEQ ID NO: 34930

SEQ ID NO: 56095 - DNA, 1245 bp, Acinetobacter baumannii
atgagtagccagctagaactttttcatgtccaagaggcgtatgccaaggccgataagccgctatcgaatgaggagctctacgattcagtggcagagctcgctggaatcccgaaaagcgctctgaatgaacaaagtgaaattggcaaggcaaagatcaagcggagcaagctgaaaagacagatacgctggtatcagcaaaccctcaagtcgatgaaccttctccagaaggtggacggcgagcggggtgtctgggagctctcaagcaaaaccaagaagggcctgcatgaagcgcttggtggcattcgacttgtcgcctattcaacaaatcttgggctggcggtgtggtcaaacaacaagagctttttctctgacctcgatgagccggtgcatctgtgtgtgacatctccgccgtttccgctccgaatacagcgtggctatggaaacgttgatgaagccaaatgggtggatttcataacccaggcgctcgaaccgatagtcaagaacctggtgccaggaggaagcgttgtcctgaatgtcagcaatgacatcttcgaggccaagagcccctccagatctctctatgttgaaagaatggtgctggcgctccatgatcggctcgggctgtctctcatggatagatggccgtggatcaacctgtcaaaaccaccaagtccaacccactgggcttgtgtgaaccgttaccagttgtgtgccgggtgggagcctgtttattggttcaccaacgaccctgacagggtgcgttctgacaacagaagggtcctgatccctcatacagagaaacatcagaagctgatggctcaagggggggataaccgagtggtcagttatggtgacggggcatatcgactgagagggaacgcattctctaatgtcacagaaggacggataccgaaaaacgttatccagcgcggccaccgttgtgcggatacgctggagcttcggagaatcgctagagaactggggttgccaccgcacccggcaatgttcccaacagacatacctgagatggctatccgctttctgacggaagagggcgaccttgttgttgatccgttcagtgggtcgaataagagcgggttggccgcagaaaggaataaccggcgctggatcgcctgtgacatcattcttgagtacattcgtacccaggcggaaatgttcaccggctttgatggattttggattaacccagccatagcaacagtgggcgggggagcgttgaattaa

SEQ ID NO: 56096 - DNA, 432 bp, Acinetobacter baumannii
atgagtttaagttttattgcaagagtcttgcgccaattggcaattatgtttgtcctctccgtgcttattgtggccggatatatctactatgccggtaaacagcatcagcaggcagcaatcaacttttggggtgagcaataccagcctgatgccatctcgacgcaaattgattgggggtttatcggtaactgggttattcctcgcggggggccaattatttctccgggcattgctggagtgtgtcccaatacaccacttcccgttgtgcctcttataattggtcctgatggccggggttacgttctctgtggtattggaagtgaggctgtctctaccagctttgatgtcaatgacatccaggatgaagaaatacgaaacacattaaaaacgatgtttgaggaagaatttgaaaaaacagttaagggggaatga

SEQ ID NO: 56097 - DNA, 591 bp, Acinetobacter baumannii
atggcggtaatggtgcggtcggacggccgggctgccgcctcggcggggccgagctggacgacgctgccgatgcgggcgtcctcgagccgctcgagcgcgatgccggcgatgtggtgcgtgcggccgtcgatgccgtccaccacaacggtcaggttctcccccagttcgtcggacaggtgcttgtccacgacgcggccgacgatgggcgtctcgggcgctccgtcatggatttggaagctcatgggatcgcgttcgccgccctgcgggccgagcgccttctgcatggtgcggataatgtcgccccgctctccaagctcgcgcagggccggttccatgtccttgctcaattcccaaacgccgggcgcgtgctcggtcgccagtcccatcttctccagcttggtaagacggcgcaggcgcagcgtgcgctcgaactgccgcctcggcgctgccggttcatggcgtaggtcgaggaaacgggcatcggcttcctcggccatggcgcggtcgattcgggtgaagcggtcttggtcgacgtataggaagaataaacgcccttttcacccaagtccaacagctttggaccgcagttga

SEQ ID NO: 56098 - DNA, 1035 bp, Acinetobacter baumannii
atggccggcatagttggtggaatcgcgcagctcggtcgcggcgccgagcgcgtcgctcacccgcttggcggtgcgttcgtcgttcgtggcaaagctgacgcgcacatggcagttgtcgagaatggcgttattcggcccataggcgcgctcgatctggttgaggctctgcgcgatcaggaagcctttgatgccgtagcccgccatgaaggcgagcgccgattcaaagaaatcgagccggccgagcgcaggaaactcgtccagcatcaacagcaagcgatggcgcttgccggaggtggtcaattcctcggtcaaccgcctgccgatctggttgaggatcaggcggatgagcggcttggtgcggtttatgtcggatggcggcacgaccagatagagcgtgacaggccggcggctgccgaccagatcggcaatgcgccagtcgcagcgtgccgtcactcgcgccaccacgggatcgcggtagaggccgagaaaggacatggctgtggaaaggacgccgctgcgctcgttctcgctcttgttcagcagctcgcgggccgacgacgcgatgactggatgaacgcccgcctcgccgagatgcggcgtatccatcatggcgcgcaaggtcgcctcgaccgggcggcgcggatcggacaggaaattggcgacgcccgccagcgtcttgtccctctccgcatagaggacatgcaggatcgcgccgaccagcaggctatggctggtcttttcccaatgattgcgtttgtcgaggctgccttcgggatcgaccagaatatccgcgatattttgaacgtctctgacctcccactcgccccgtctcacctccagcaacgggttgtaggcggacgatccggcattggtcggatcgaacagcagcacacggccatgcttcgcgcgaaagcccgctgtcagcgtccagttttccccttttatgtcgtggacaatagcagatgccggccatgtcagcagcgtcggcaccaccaatccgacgcccttgccgcttctggtcggggcgaagcataa

SEQ ID NO: 56099 - DNA, 366 bp, Acinetobacter baumannii
gtggctagggcacctcatggtgtcccggcaggagacggcccggccgctgcttacgcccggcgagatcatgcagctaccgcccacggacgaaatcgtcatggtcgcgggcacgcccccgatccgcgccaccaaggcccgctatttcgaggacgcgcggtttcaggaacgcatcctgaccccgcccaaattggtcgccgctccgctgacgtccagcccattggatttcattgcaaggctggccgccctggtaccgaagcccagagtcaacctaacccgcttccacggggtgttcgcacccaacagtcggcaccgggcgttggtcacgccggcaaaacggggcaggggcaacaaggtcagggtggctga

SEQ ID NO: 56100 - DNA, 264 bp, Acinetobacter baumannii; identical to SEQ ID NO: 34912

SEQ ID NO: 56101 - DNA, 489 bp, Acinetobacter baumannii; identical to SEQ ID NO: 34914

SEQ ID NO: 56102 - DNA, 5532 bp, Acinetobacter baumannii
atgatcaatttcaagcctaaaattccggcgatgcttggggctctggcggttcttaccgctggtgctgctcatgcagagctgctggaatacacctttaaggctccagatggtacgcaacggtctctgactccgaatgccaactatgccaacccaacgggcaatatctcgtttgccttgagtgccggtatcgaccgaaaggtaaagatttcggtgattcggtcggatggaacagtggtttcgacagcgaccagccaccttcttggggctactgatcgcatcacagtgggtggaaaatcctactatggtgcggaacttcaactaccggctccttccgagggagtctacaaactaagggccgaaatactggcgtcagacggaagttccgttcagactgatgaatacccgcttcaagtcgatacgacagcgccaagtttggcaaacgtgacagtaaaaggggaatggaaccgggcgctttctgatggaacgctactgcgaggtcctaaccgattttcaggtatagatgtgtctgcatctgatgccggttcttcggtttcctctatacaggcgtatgctgtagatagcaaaggcaagaggagtcctgttgtctcggttaattacgccaacggccaaggccagttgttgaactggagcactgtgttccctaatggggaggatctatatacgcttcatttcgaggccctggataaagcagggaacaaagggtcaatagcctatcctattgcttgggattcagtaggtgcaaagtctggagagaatcctgagccagtagcagtgtatgaccctaagaacccgcaggcctcaacttttaaggttaatggtcaggccctatcaggttttgcgccttatcagaacggaatgaccatttattccgatacctacagggtgctctaccggatacccaaaacaaactcctatccttcttcaccttacggtgctcaaagcggtaactggtgtgattataaaaactgtattgaaggcaatatcattgccgaagacggtacatatgattatcggcagacgcaagctgatgtattccagcaacatgggacaaaaactaagtcgtttattatttacgactgggttatgaactctcttggtaatacatccgtcagtgtgaaagctgatccatcggttagcttggctcccatcggtaagtatgttgaatatcttagggatgatggtcagtgggtccgcggtgaaaccattaatatgagctcagttaaccattataaaaaactgagatttcatgttgagccgagaccttacgctcaggagttatggggatcttggttgcctactactaaaattccggcaaatgcttcttatgcagaagtggatacggatatatcgttcagtgggcgctcatgttcatggcctggatattggtctcgaccggaagggaagcctgaacttccgtctgatcggattggggcaacgttctgctatgaccttaaccctcctgaaattgctgggttagaacgaaatgggcggatttttaaagctcatttccgtgagcctgattcatttgacggttggggtgttaaccagtgggttatttctaacaactcaagtgcgtctgcgataacctcgactggcgaagaacgtccgttgtctcgtactgaagttcttcgtagtagcacaaatgattggtttttcacattttctgctgagaatctgtcagagggcacatataccggcatatctctcgtagctaaagatgctttcggtaatgaggttaagcaggtattcactggctcccaatatgctatgagcatagataattcagcgccgacactaaccgtatcgatcagtgatggagcaccaatccagtctttggatgatgttgtaatcaccttgactgatactgccgacccgagtcctaagctgacctctattgccctcgtcggaggcccagccgatgacaaggtgcagttgtcttggcgtgaggagtcgaaaggtcgattccgccttgagtacccggtaatgttcccgtctttgaaggaaggggaatcttacacgctgactgtttccggtgaggacgcacaaggcaacgcggttcaaaaggcggttggcttcgagtacaaaccgcgtcaggtgatgctggcggatgggatggatggcaaggttatggtccccgctgtcactcatgaatttgttcatgcagatggcaagcggatcatcgagaccaagccgctgacgctcagtgatggtgctgtcgtgacaggttcatacgacgtgtttgcgaccctccgttctgatgcgaaagtgccgctggtggtgaatggggtgcgtatcgagccgggccagacaatggggatcatgagccaacatgatttcggtgcgtcaggtggtcgtttgagcattccggttaaaccggctgttcctgatgtggtcggctcttccagtcttcttgtcatgacctccgcgccgaactcacccatcttggttgtggacatcaatacctggaaagggacggccaagctctcggctgaatcatggacaattcgccaggttattgacccggtgaaaatctatgccctgccagagtcgggtgtgccttgccggttcaccacgaaagaggatgtggctatggccgcagacccaattcgtgacccggtgtgtttgctccaatgggacagaactccggatgaggctgaacaaactacgcaggacaacaacgggatgaaagttgccgggctggtggggcaggctgtgagcattggtgaacaacctgtcgaatacagcctgtacctgttcagtggtgacggttccaaggtaaaagttgggtctggctctcagaacctgacggtaactactgcctatggctctgttggttacaccccgattgatgacattgctcaggtgaatcgcgtcattgaagactttgatgtgaacttcaagcagagcaaaggtcctgattgttcaatcactctcagtgctgaccgtgcgaaaaacgaggccgcgaacaaagctgttggcagtgcaagccgcacctgtctgttcgagtggcagcagatccccgatggactggtccaagacccgttatcggaatctccttcgttgtcaggttccctggccgagaacggtgatcaccctctggggtggcgggtaagtattttcacccgtaacggcactcgggtgacgttgaacgacgagactttcaatgtcgaagcggttgacccaccagctccgaccgttgaactagcctccgactacaacttcaaagacaacatctacttggtgccgatgacaggtaactacctgggtgatgccattatcaactctgaacgagctgatctggatattgccatatcgcgcaactctgatgttcttgagtctgagaccttcactccgggatggggtgccaccaataaggtgtatcgccgcatcaataccgatgagcgagcgttgtgggaggagaccacctacaaggtgaacgcggcctacaacaaggtgcctgatgtgaagactgaggttgtctaccgggctatctctgcaccttctgacagtatccgtcctatcgttgaagttaaaggtgataccgcgattgacacccaggcattgccggttagggttctcatccgtgatcagtacaaacctgatggtgactatgacgctaacacgatgggggtgtggaaagtacgcctgatccagcaaaaggcctacaacgagacggttgcgctcactgattatgcggaagcatcgaacggtgaagctcagttctcagtagacctgtctggtgtggatacttcctccgtccgtatcgctgctgaggctgttctggaaagccctgttgagggttacaaccgcacagagttgtctatcagacctgccttcttgacagtgcttcgtggtggtgccatcggtgctggcgtggaggctcgcaagttgtctggtgaagctccgttcactgctgtgttcaagctatctttggacgaccgtcaggatctccgggctaccggccaggttgtgtgggaaaccagtaaggacgacggtaaaacctgggagcagttcatcccagaagatcgatacaagtatcagcttgtgaagaccttcgacaagggggagtaccaggttcgggccaaggtggtgaacgtcaactcaggtgcggaaaagtacaccgaagcggtcagtgttgtcgcttacgacaaacctgatattgctgttatcggcccgaccacgttgtttgtcggaagtgaaggcaagtacacagcgaacctgacgttgaacgatgagccaatctccggtggcaatgccattgttgagtggtctactgacggtggcaaaacctacgcgcagacaggggatagcatcacgctttcgagcgatgaagaaacccgataccgcctgtgggctcgtgtgcgctctgccactgcaccggctgatgacggctatgcctatgaagttgcgaaaacggcagttgacttccgagcagtgaaggccccccgtccttacgtgacagggccgcgagtcattgagaccggtaagaagtatgtgttcaaagccgaaaccagcctgccttaccgtgggatggacgtgaagctgaacgggttcttcacgctgcctgatggctcaattgtgcagggtgatactgctgagtacgtgccttcggacactgacctcaaccaggctactgtagaaacgaagtacaccacctggatcgaaggataccgagatcagggtgcagaagcctcgcatagcctacgctcccgcgtgtggcagtatgtatggccgagcttcggaatgcaggtcaggaagaacgctgacgtggctcctgcgacgatcaccgcgtcagtgcggccaattgccttcaacggcaagctggaagaaccgacctacgagtgggagttgccggaaggcgcagtgattcaggatcagcggcaggatattgtccggtcctttgtgatcaatgagccgggcgattacaacatcaaggtgactgtccgtgatgctcgcggccatgaaaccgtgatcgagcaaccgctcaagatcggccaggcagagccctatgctatcgacctgcaatactctggctcgaacaaatacgagcgtgagcctctggatgtgctgttgcgaccgtacatttctggcggccacccacgcgaccgtatttcgactcgcgtctactcggtagatggtacgccgttggaaagcagcggttactacggcagagcaactctgggcgctggtgagcacagcatcaagctgaaaataacctcagaaatggggcatgaagctgagggcgaggtgaacatcaatgtggcagagaacaagttgcctgcatgtagcctgagctcacgagagaccgttgggtcgtggatcgtttatgcgaactgcgaagataccgatggccgcatgaagtcctacgaatggaccattgccggtgagttgcagagcatcagctctgatcgagtgactatcagcaagggcacctatgaaacgatgccgaccatctctctggttggggtcgatgactctggtggcaaatccgaagctgttaccatgaactaa

SEQ ID NO: 56103 - DNA, 177 bp, Acinetobacter baumannii
atgcggtcaatctgtaacctgacctctcgaagtgcccaaaatggacagttacagcgttttctgtttagcaaaggtgagctatatttgaatcatcttagtcgctctgcggctataggtgagatagctggtctccgaaaacaaacagcatctagtcttatgccgtatggcattacttaa

SEQ ID NO: 56104 - DNA, 699 bp, Acinetobacter baumannii
atgaattcaaaaattaaagttttattaatagataccattggttggattacttcgatttgtatcatatttttctttttcactctttggctatattcctataatcaaattgataacccattaaaagaagcttggtctctaacagtaagtatactttcagctttagctactattggggcagcaataattgcagctaatttatttaatgattggagagaatctcaaactggcataaatagatctgaacttgctaaaaatacacaaacatctttatataaacttgtaagttaccttgattattatcatcagtatgtaatgacacaaaaacatatatttatcgcaaaaagcttccctgaaattagtcagaatttcatcaatcaggcagaaaaaatagctaacgaatgtgaagaaagaagaagtatttttcgcaatgaatgcgaagagctctataaacaatttctaatcgatttaaagatttatgaaaagacttttgacactgatcttaatctagatttatctcgaatccgatattacagaggatctattggaggaatgctaagagacttatcacaatcaaaatcagtttttgaattaaatagaatgacaaatcatatgaagacttctaaaaaattatttaataaagaaatacttgatatcgtaaattctgaaatgtctcaatatattaatttaaaagtaaaatag

SEQ ID NO: 56105 - DNA, 849 bp, Acinetobacter baumannii
atgaaaatattaaactttttaaaaaataaaattacgtcaaatgaactagctgaaacaattgcacttagtttgattttctatatagtcttggtctgcttcgctttatgtattggcttagcacttacaacgttttgtgaaacagataaaaaagagatacctagtgttgtttcaaatatgtttgtttggtccgctacactgattgcacctattatagcaatcctgttattaaattcatggagataccaaaaaaactttgaagctgattcaacattgttgaactcttgtgaggaaaatttaattagatttaaaaataaaatttatccaatttgtcaagcagtaataaaaattcatgaggtaggtagtcaagatcatacatattatcttgctcactctttattccgccgtccccttaaaatttcagatgaatgtcttaatgacttttatttacacatggaaaggtatctaaattacaatgaagatactgagttaaagaaactttttaatgaatattatggaattgcaaatgattttctatatataaataagcaaattattagtgattgctactctcttatctattatcaattaaaagagcagcctttaggtaacggatgggttgactctaattttactataatctttccagaaggatctccacaaaaaaggcaaattgaaagccaatattctaattttaattatcattatgataatactggtattaatatggaaatggataaggaatcaggagaaatgatatctgtacgtaaaacatacaaagaatattacgatttaatggatagttattataagcaattaagcgctaagattagtgaaattaatagagcataa

SEQ ID NO: 56106 - DNA, 192 bp, Acinetobacter baumannii
atggatgagttgagtcttttaaatttagtaatgcgtataacgcatttgtcttatgggtctttcaagctgtctttgttaataaagacagcttttttttataatgtgcttaagtattttttagagtttggcttgattgtagcaatcgagattaatgcattgtgcactcagttctatgatttgatcaggggctaa

SEQ ID NO: 56107 - DNA, 264 bp, Acinetobacter baumannii
ttgagcagccacaatactctacaaattgaagcaattggatgtataaggtgcgatatctgtgatcaatcaactcaatctaattatggcgtactgaaagcagattggagctcgaataccaatgataaaaaagataaatatgaagttcacttatgtaaatcctgctttttaggaacactttcttatttaagaaatcagaaaaaattaaatcacttatttgacgaaaattttgactttaaccaattagataatcttggcctaagttaa

SEQ ID NO: 56108 - DNA, 495 bp, Acinetobacter baumannii
atgattgaagattactacactattcatcttaaacaatttgagctctttatttcatataaagttattcaaacttggatggcctatagacaacttgatcacaaggatctagaggcatgtggtgttctgatcggcaatcaaaatgtctctaatcaatattggattgaagatgtgactgaacctatgcctacagattgccggtctacgcatagattcatattaaaagatccagggcatcagaaaaaagttgatttagctttctccaaatcaaatggaacttctatctatctgggtacatggcatagtcatccgcaagcaattccaaccccatcaaatattgattatgcagactgggaaagttgtatatctagaaaccctgatcggcagcttttctttgtaattgtaggttttaaagttatacgcattttctttttccacccccttcagggctgggttaaaacagagatcaatgatcttcaaatacttaaaggactataa

SEQ ID NO: 56109 - DNA, 1806 bp, Acinetobacter baumannii
atgactaatacttctgctgatcaaaataagcactcttctgatgaaaataaagtaaaacctttatgggagattcttaaaccttataaagataaatatttacaagtttggtggtatggagggatggcaaaaggaaaaaggcctggagatcagccacaggtccatgtcttattcagagaagttttagacgatttcagccccactgataattttattcagattaagacaaatattacagatcttgtatcttggcgagttgactcaatttggcatcagcaacgaaagattcattttctaaacaacgatatctatgagtttgttattgatcatactgatttcgaattcaaatttttaaaaatctatgagaatgtggatgagaagaagagaattaactttctcaaaaagcgagaagaatgcgaaatagtagattcgaaaaggaaaaaaaattgtatatcgttcaaattgaatcatcctgagtttgatgaacttttaataccatgtctagaatttctcactagagcttatggtttatcaactgagctcattcgagtgcttactacatacaatgaaagtgaaagagaatctcgattatacactccccacataggtgagaagggactctggactgtgcttctcggagatgatattactcgagcagaccatgtttttgttgcatattataaatataccgaaatggctaagaatgctacacgcattttatttagtagtattgtagaaaattctaattttaaacaagccaatatctatccaaaagttgtcccttggcatgatgagaccttacctatcagagtatcaggattccgcttagctggaacaaaaacatttgttgtgacaagaatcagaggaatgaaatccccaaaggatgaccatattagaataatacctaaagtaactgaacgtattaataccaccacagacactgaccatcccaatccacccttacctcaattgggtagtggtgacattaatgtttctacaaatccaggtggtcgacgtccaccttctaatcatgaattaattgaagatgacttcgaatggatagatgggggccctactagtgagttaagtaaatataaatataaaaaacaggctaaacgtcccaaaaggaaaaagaaatatatagaaacacagacgataagtactggagccccagataattcacctgatgtattaaatagccaaatagttccttcaaccaaagattcaaaagaattccaggcacctgaagatggccgaattattgggctatggaaagcatgccttaaagcaaatgaaataagtcccgatataatacaaggtgttaactattatacatttgaaaaaggttttgacttttctgagcttcccatgctgatcggtttttttacagaatctgaagttcagacacacaaaacatggtgctatgcaaattcattcaaaactcagataagaggagcattaattatcagattaaatgtatctcagttagaaccggtttatatttttgatatacaaccagcaacgtatacctctactgtagaaggcgagaccctaacaaaagaaagaggacatgcaggtttaattttccgtatgaaacaagaaaaaaatctggaacaattcatatctgatttgatgtatttgctccctctcaatgaaggctcatacccacaagaagtttttcaaagcctattagtcactcaaatatttttattcagacattcacatacaaaaggattaaccgagggtgaatcaactttattaaacgctttaagaaaaataggcatagacaaaatttcatttaaaaactga

SEQ ID NO: 56110 - DNA, 264 bp, Acinetobacter baumannii
atgacttcatggaagaagataagctgtaccttacttctacctattgtaatgagtacgataagctgggcaaaaccaactttgccagaaacaatgcatgcccttaatgatagtgagttaagtaaaatcacagatcatgagcatgttgataaagcttcaagctctcatgcacatgagccgcctatggaaaagaaagaggcaatacagaatttaactaaaggagacgctatacaaaaattgtataaaacgtccaccatgaacaagtaa

SEQ ID NO: 56111 - DNA, 1434 bp, Acinetobacter baumannii
atgtctcaatgtgatgaatgtggtcgaagcgttgataaaatccatagagtttataaaaagaacaacttttgccatacatgctatataagggtttttaaaaaaagggattgcccatcatgtggtaagttagctcgtttatataaatatgacccttcggcaatttgccagaagtgtgaaaataaccggccatgtatacgttgccaacgcattgattaccctataggtaaaatgactgagcatgggccagtttgtaatagctgctcagtctattttagagagtttcaagcttgtgaacgttgtggaactctctctcaaaaactatctagaatcagtcgttttgccgataatttgagaatatgccctaaatgtgcaactcgagatcacagaacttgtccgagttgtagtcggtatcgattacttgaatttgagcctctttcaggccaaatgtattgcaaaaaatgtttaacttttccaccccatccttgtctttcttgtaagcaagaaatctctgcgggacgtggaaattattgtgaaatatgctcgtggcatcgggctttagaacgaaagactacaaaactaatgagtgatttagaagattttaatcttcagacatattttaaaaattatactgaatggctagaacagagattaggcgcacataaaacagcattacttattagtaaacatatttatttttttcaggaaataagtgatctttggataaaacaggtacccagttatacagtacttttacaaagattaagaccaagtgggatacgtaaatatcttttgcctatgcaatggttgagtactgtacataatcttcaaatagatattcaagcaaaggaatattgctcggagatcgatcagttgaataagctgttgaatagctgttcagagtccttgtttagttctcaaattcttcaagattattataaggtgctcattaagagagtagacgacggtaaaataagtattcgctctgcacgattagcaatgaaaccagcagcagcgttgatgtttcaagtaagtaagtcaagatttgatatgccacaagaatggcatatcaaacattatttatctgaacatcctggtcaagctgctagccttgtcggatttatagtttttttgaaaaaaagttatagtgttaatttaagttattcatttataaaaaattctaattttttaaaggaagcaagaaatcataaactagaaagagagatcttaaagttaattagggcccctgaagagagttttgatttattgcgatgggtaaaagtctgtttaaagtattttcataaattaaatgcagttcattgtatggaaatacaactaagtatgattaatgatattgatgagggcttagttataaacttcagaaaagagaattattggatacctaaaagaagtatttttgtggcttataagggatag

SEQ ID NO: 56112 - DNA, 1086 bp, Acinetobacter baumannii
atggtatctaccgtagagccttattcttgggcaatccgaacacctttatttcaggatgaggctttatcctcatggttgattcgggctgccctcggctgcggttgtgacccattgagcttaaccggagtactttggcctggatggagagtatggactgtagatattgataaagggcttcatcaaaagtattcaaaaatattgagctctaaggctagtattagtcaggatcaactaaataccgctacttttaagaatttattcctacaaaatagtgaaatagaacttaattcatggattcttgcgttaggaacaagaaatcgtaaacataaaggtggttggcagtattgttctgaatgcttgctggaagatcctattgcttactttcggttgaattggcgttgcgtttggcaagttgggtgtatcaagcacacacaacgtttattggatcaatgtcctcattgttatagtgctatacaaccccgattattagaggcgccagatcgaataatatcttgctgttcagtctgcaaaaaatatctttttaatgtgaaagtaaatgccatagatcaaagtgcattgaagtttcaaaaagattttgatctgtttttagcacagggatatgcaatatatgcagatacttttatttctttgtctgagtggttgaacgtagttcaattattcaatcaattcattagaaaagttttaataggatctctagagagtaaaggatgggcatttttgaatactttagatattcgtgttcctcatattcctctcatatcaaccggtttagtcctcaatcaactttcagtattggaaagagaacgtattttttcttgtatctatcaacttttaaaagtgtctcgagaaaagtttattaaaacggccaattctttaaatatgaatagagcttctttttgggataagagataccaattaccagaaattttacagcctattgaaaagcacttagataaagtttctcgaaattatcctttaataaaagcatccccagatatttctaaacctagtagtaaagaagcagtattgcgtagagttatgagattaaaaagaaaaatcacataa

SEQ ID NO: 56113 - DNA, 690 bp, Acinetobacter baumannii
atgtacaatcaatcatgcgacacagttaagataatacctgctagaagaaagattggtaatacacgcattagtgtatctggcctttatccttttaaaaaagattctgcagttgcttttgaatctacattggaacgagatttcctcattcgtttagaagttaaccctaatgtcctagctgttgaatctcaaccatttaccattgaatattttgacgatggaaaaaaacgggtttacacccctgattttcttgtaacgtataaacatgataattttcttccatttattcctccaaaactagttgaaataaaacccatagaagaattacgtattaatttgcatctatggaaagcaagataccgtgctgctatgttgatctgtaaagaagaaggttggaaatttcatatcgctcatgaaggacgtatccgagatcaattatggatgaatgccatgtttttgcaaaagtatcgaaaaatggagttttctttaactgattcaaagcacttactgaactatgtacaagatcgaggagcagtaacttttgagaccttactctctaggcattttcttggtaaatgggaaagagcaaatgggattagtcaaatttggtatttagttgctcatggttttttagcatgcgatttaagtctgcctttacagccttctactgaactttggataagtgggaattaa

SEQ ID NO: 56114 - DNA, 495 bp, Acinetobacter baumannii
atgaatgcacaaaaaggttttacgttaattgaactcatgatcgtggttgccattatcggtatcttggcagctgttgcattacctgcatatcaagattacaccaaacgcgcaaaagtaacagaagggttatctttagcgggaagtgctaaaacggcggtagctgagaatgcggctaatgcagctcaatatgataaaggttggacctcgcctacagctacagcaaatgtaaaaagtgttgctattgctaatgcaacgggtgttattacaattacttacgatacgcctgtctctgatgctgcagctaatactttagtgttggaaccatatactaccgatggtgctggtaaagctgcgggattgcctgactctacaaaagcttacactccgccagaagctcaaattcaatgggcttgtttagcggcaggtgctaaagctaaagcagggactacggctggaactttaccttcaaaactagctccgtctagttgccgttaa

SEQ ID NO: 56115 - DNA, 762 bp, Acinetobacter baumannii
atggtaagagtaagtatagtgttaaagatgactaaacgccttaaattctttctaagccacatatctatttctattttactggctttaataattattgcttgggtctttcttatttggtacccacaaccgttagctcaagcagttggtgttactcatatttttctgatgatggttgctatagatgtagtattaggtcctatactaggatttgttgtttataaagcaggtaaaaaaacacttaaatttgatcttgcggttattattttgattcaaattactgcattaggatatggtttatatagcatcgcccaagggcgtcctgcatggttagtgtataatgtagaccgatttgaactagtgcgtaataatgaaattattgatactaagactccagacgttcaagtaaaatttagggaaccttcatggtttaaaccaaagtttgcagctatcgaactagctaaaaataatgaagagcgtagtaaaaatatatttgaagaagtggttggcggcatttcgttagcacaacgtcctgaacgttatgtagccttagctcaagctaaatcacaaatacaaaagcgtgctcaaaatttaattgaactagaaaaatataattccaagcagcaactaaaactagtcctagaagaatatccatcagccgatgcttgggttcctttaaaagctaatgctatagatatggtcgtgttaattaataggagttcagctcaggttattaaaattgtaaatctcagaccttggaagtaa

SEQ ID NO: 56116 - DNA, 408 bp, Acinetobacter baumannii
atgtttgacacaaaaattgcgctgattgtccgtaatgatcttgcgacgtggcagagattaaatgtggtggcttttttggcaacggggattgcctctgctgtacctgaaatgttggggaaaccttatatcgatgcaaatggctatgagtatggcaacatgctagggcaaccgatgttggtatttgagggggatttatctggtctacaaaaagcacatcgcaaaggaatagagcaagatttaacgataattccctatgtacatgccatgttttctacaggcaatgatgaggataatcgagctgtatttttggccgaagatgcgaatcaattaaatttggttgggctagcattaagaggacccaaaaaggcagttgataaggcaattaaaggactttctttgcatcaataa

SEQ ID NO: 56117 - DNA, 636 bp, Acinetobacter baumannii
atgctgggttgtttttgtttcagtagatacgttatggaaatctttttttataccttgagtgtgatgtatagccccggtccagtaaattttatggggctaaatgctgggcttaccggacaattcaaaaaaacgatttatttttttataggtgtcggttgtgcaatgctgatgttattcatgatttttggatatcttggggctgcaatcattccacaaaatgccttgcactatattgcgttgtttggtgcactttatacgttttatctttcatatcaaatgttaaagtcagatatcgatctgagtaatgagaccactgaagttcaggtgctttcgttctggaatggtttttggatacaagctttaaacccaaaaggaattttagtgattttgcctgttacaaccattatgtaccctaccgcacatatcattggcgttcaaatcttcttcgtatcattgctcatttcactgggtgcagctggcgcgccctgcctttactcttgggcaggtgctgtgttaggtaaaaaaattaaaaataaaatctggtttaatcgtataaaccaagccatgggattgatgctaattatctctggcatatttatgctttatgattttttgaaaggcatgaacctaatttaa

SEQ ID NO: 56118 - DNA, 819 bp, Acinetobacter baumannii
gtgattgaattacccaatgcaaatgattggattgttagaaattctgaccctaatagtcttgaacgaattgaagccttttttaccgatcatgcttatgagtcgcatcgccacgatacttttgccattggtcgaacattaacaggtgttcaaagctttcattatcgtggagagatgaaacatagcttaccgggtatgacgatggttttacatcctgatgaaaaacatgatggagagtcaggtagtcgagacggttttagatatcggatggtgtacgtagaacctgcaacactacaggaaattatgaagggtaaacctttaccattttttgaaaatggcttgagtcaggatccccgtttatttaaagcaactgatgttttattacagggaatggaccagcatattgatcctttagaaaaacaagatgctttatatgatctggcaaccacactttacgaaatttctggtaataatcagcgaacctcacatacttatgactatgtcgcagcggagcgcgctagagaatttatacatgcctctttatatgaaaatatctctttagatgatattgaaaaaaatgtgggacgagaccgctggagtctttcacgtgattttcgactactgtttggtacaagtccacatcgatatatgactatgcgtaggctggaagttgtgaagtcttgtttgatgtatggagagtccttaactcaagcttcattgattgcaggattttttgatcaaagccatatgacacgtcattttctaaaagcatttggtttgacaccagctagatggcggatgatcaataagctctcttcttaa

SEQ ID NO: 56119 - DNA, 903 bp, Acinetobacter baumannii
atggacaaatttgataccttgcaactttttacccgcatcgtagagctgggtagttttagtcaggcagccgatcagctaaatatcccacgtgctactgcaagtaatgccattaaggagttagagaataacttacagtgccgtttgctagaacggacgactcggcatgtaaggccatcactagatggacaggcattttatgaacgctgcatacaaatattatcggaacttgatgatgccgaatcatctttacgcaatgtaattgctcagccccgtggtttattacgtgtcgatttatcaggcgcacatgcaactaaaattgttttacccaatatcgatcaatttcacgagttataccccgacattgaactggtaatcagtacgggtgaccgcttggttgatctgattagggaaggcatagactgcgtggtgagagcgggacgtttggatgattccactttaattgctagacatttggtggatatgccacaggtcatttgtgcaagtcctgactatttaaataaacatggaacgccagagcaaccagaagatttattatcacattattgtgtcaatttcttttcgacatcaggcggacgaaattatccatttgaattgatggtgaatggcaaaaaacaagattattttttgaaaagctggatcgcggtaaatgacgctgaaaactatgtattatctgccttacaaggggctggcttaattcaagtaccgcgctaccatgtggcaaatgaattaaaaaatgggcatctggttcaggttttatctgagtgggaaatcccgaagatgtcagtttctgcattatatccgcagcatcggcagctctcgccacgcgtacgagtttttgtcgcttggctgagtgagttatatacgagttatttttcaaaataa

SEQ ID NO: 56120 - DNA, 246 bp, Acinetobacter baumannii
atgttattcaaaaaattcgctgttgctgctgctgttgctgctactttagctttcgttggttgttctaagaaagaagaagctcctgctgctaacgctgcatctgaagctactgctgctgcatctgaagctactgctgctgcatctgaagctgctactgctgcttctcaagctgttgatgctgctgcatctgaagctgctgcttctactgctgccgcttctgaagctgctgcttctgctgcacactaa

SEQ ID NO: 56121 - DNA, 429 bp, Acinetobacter baumannii
atggatattataaatagtattaagttgatttttatttcatctttaattttactcagctcaggatgttctatcttaaaaagtgaccctcagctaattggttcgattgagtcaaaaaatctactattcagtttcaaaaataaagatacagtaatcttagcctatcaagttaatagtttagaagagtttgagaaagatggtttaacttataaaaatattcttaaatatcaaaattatgaaggttttaagaaaatctcaattgaagattataaaaagaaaaatattctagataatcatgcctattatttaatagtgacaaaagaaggaacagtcttacaaacctttgggttttgtattaaagataaaactgtttatcttcaagaagacaaaaaggatgatcaaggttttacaaacaaatgccacaatttataa

SEQ ID NO: 56122 - DNA, 684 bp, Acinetobacter baumannii
atgtttgcagatgagttgaaaagtattgagtttattgatgtattaaaaaatatattaggttataaggataatagtaattcaaatattactatcattgacttgagtgatgttccttttgaggtactgactataactgtatctgtaatttcaagacttatttttgattatggatatttttataaacgttatcgttttgaaaataatccctacgaaaaaattaataacgatgtacccattttaatggtatatgaagaggctcataaatatgttccaaatagtgagctaactaaatttagagcatctaagatagcaatagaacgtattgctaaggaaggccgaaaatatggaataacattaatgttatctagtcagaggccatcagaaatttctgaaacaattttttcacaatgtaataattttatctcaatgagacttaccaacccagttgatcaaaactatgtacgaaaacttttacctgactcactcggtgggattatagatatattgccaagtttacatcaaggtgatgccttgttagtaggggactcaattgttcttccttctatcgtaacaattgatcgctgtgatcctgaaccatcttctaatgatattccttattggaatctatggaaggaggaatggaaggaagtcgagtttggagctatttgtcaaaagtggaaataa

SEQ ID NO: 56123 - DNA, 450 bp, Acinetobacter baumannii
atggataagtgtagagaagagtttgagaagcaaaagtactggattgggctatttagagcagatgtcgactttgatatgactcttgggaaatttggaagatatgtttcaaatggttcaagaagaattgatgcaatgtacttggagtcatttaacgaaaagtgggaagcatgggccaatgcatggcagtcacagcaagcgaaagtggaggagctggaaggtaaacttaaacaggcttatgaagatgttgatacgtttgcagaagcgtatgaacgtgagtgtggttttaaagctcagttggcaaaggataaggcagagctgcaaaagcgggtggatcaacaaggtctaatcattgcaaatgttatgtctattgcatcagaccttcaaaagagctggtcaatgtttgagattggcaagaagttagagcaagcgctcaaggtagggaaaaattga

SEQ ID NO: 56124 - DNA, 210 bp, Acinetobacter baumannii
atgcgtgtaaataaacagaatgaaccagtcttgttcggggcaatgacttactcacagattatgagacttagatcagcttatgaactgggagtacgagaccaagaaactcgcttagctcactctctatacaagaaatttcaaagacgtggctggttgaagcgtttgaaggcacgtagcgccatgacaggacatgacaaggaggcggtatga

SEQ ID NO: 56125 - DNA, 381 bp, Acinetobacter baumannii
atgatcgaatcaatgactccaagtatgtacatcaagcaagactttagcgcagagattgctgcatgggttgctcaaggtaatcaaattacagtcctaggtcgtggtgagagtacgcataacaaagcattcaacaatgcgactaagaagactgcacaggatgctatgcgtcgagtaatggctaattctgtagctcagacacgcaatgctaaagacccattctttcaagttcgcatgaaggccaaacaggaaggccaactctattttgatggaaaggcgtgtattaagtgcaaatcaactaagcgctacgtttcatctaacaagtgtctccactgtgtcaatgagtctaaccgtcgttacaaggagcgtatggcatgcgtgtaa

SEQ ID NO: 56126 - DNA, 1236 bp, Acinetobacter baumannii
atggaatttgtttttaatggtttttatacactaatttcggcggtcatcgttctattgttgggtcgctttcttgtcaatcggattgattttttaaaacgttataatatccctgaaccagtagcaggtggtttggtcgctgcggtagtttctttacttgtccacactttttggggatacagtattgtttttagcagtgaattacaaaccagctttatgctcgtgttctttgcttcaattggtttaagcgccaattttatgaagcttaaagagggtggtactgctttagtcatcttcttaatttgtgtagcctcatttattgttgttcaaaatgctgtcggcatgagccttgcaaccttattgggtctagatccgcttattggtttgattgcaggttcaattactttaactggtggtcatggtacagcaggtgcttggggtgaaattttagaaagccagcatggtattcagggtgctttagcgttaggtatggcaagtgctacgtttggcttgattattggtggtgtcattggtggtcctttagccaaattgctcattaatcgttatagccttgctcaagcaaaaaccaatgctgagattcagcagcgtgacacgcatgttgaacaaaattcagatgatcttgcaccgtttgaaaacccgcatcaagttcgtttaattacagccgacaatgcaattactacgcttggtatgtttgcagcatgtttagcatttgctgaatttatgactggctttagtaagggaacttggtttgagttaccaactttcgtttgggcgcttggtggcggtgtaatcttaagaaatattttagaaagcgtgttgaaggttgatatttttgaccgcgcgattgatgtgtttggtaatgcctctttatctctttatttagcaatggcattgctttcattaaagctttggcaacttgctgacttagctggtccacttgtggttattttaggtgctcaaacactgactatggctttatatgcagcatttgtgactttccgtgtaatggggaaaaattacgatgcggcagtattggcagcaggtcactgtggtttcggtatgggggctacaccaaccgccgttgcaaatatgcaggcaattaccaatatgtatggtccatcgcataaagcattcttaattgttccgctttgtggtgcattctttgtcgacttgattaatgcaactgtgattcagcttatgttgaaatttattgcttaa

SEQ ID NO: 56127 - DNA, 471 bp, Acinetobacter baumannii
atgtcttttattataataatttttattttctttgtttttgcttatattttatttaaagttttttctaaagttagtctggaacttcctgaaagtaccctaaaaatagctggtaaaatatttacagagaacaaaaacttttttgaacatgaaattattgtaactttataccaagaagaactgataactttagtcggtaaccaaaatggtgatagaactaaggtttttaaaaatgctgtaatatgcctagaaaaagaaacagataaaatcgcagtctatatagatactttaagagttggatatcttaataaaataaatgcttcaagttttgttaattttttaaaaataaaaggttttagtgataaggatgcttttgaggttgatgcaattataataagtgaaaaaacaagcaaatggagcgtgaagctagatatcccttatgatatggagaagtttaggtttgataaatattaa

SEQ ID NO: 56128 - DNA, 1002 bp, Acinetobacter baumannii
atgaaaataaatcaaattatattgtccaaattacctaaaggtaagctagatatttacgatttctctataaaagaaattgatctgccttctgctaaagatggtgagataagcgtacgtaccctatatatagcattagatgcggcaagccgagcttggatgcaaggcgatacttatcgtcccgcattacaagctggagaagttatggctggtattgctttagcagaagtaatcgaatcacacgtaccacatttagtaaaaggagatcttgtcattgctgagactggctggcagacacatgcgactatgtcagctgataccttgtttgccctgcccaaattaaaaccattaacatatttattgagtatttatggtgtacctggactaactgcatattttggattattacgatgtggtaaggtcgaaatcggtaatacagttgttgtttcagctgcggctggtgctgtaggttctattgttggtcaaattgctaaaattaaaggctgtcgcgtaataggtatcgcagggagcacatataaatgcagtcttctcacaaaggatttcggatttgatgaagctattgattacagcactgggaatctggaagataagctacggttaatatgtcctgatggtatagatatatattttgataatgtcggtggaaatattttagatgcagcattatccaatatgaaaaagggtggaagaattgtttgctgtggtgctatctctcaatatgattcagatacacccaaagccaatgttatcggtgtacctggacaacttattttaaaaagtctcacgatgaatggctttttactatttgattatttgaatgagcaacctcaagcctttcatgatttgagtaggtgggtatcttccggcaaattacgggttgtagaagagattgtcgagggcttagaacaacttcctaaaagtctggttggcttactcaatggcgaaaatattggcaaaagaatagtgaaaatagctgatatatag

SEQ ID NO: 56129 - DNA, 966 bp, Acinetobacter baumannii
atggaaagacaacaaattcctattggctcaaattttggcaaaaatagtacagctgaagatgtactagcaagtattaatttaaaaaataaacatgttgttgtaactggtggtcatgcgggtttagggctagaaactagcaaagctttagctcactccggcgctttagttacagttgcctctagaaatgtagaggaagcttatacagcaacaaaaaatattccaaacattaagatcgaagctttagatctaagtaatctaaatagttcgaaaaacagtgtttgggagttttctcaacggttattaaaacaagacagacatattgatcttttaattaataatgccggagtaatggcttgtgccgaaacacgcgtaggcaataactgggaattacaatttgcagtaaaccatttaggccattttgctttgaccaatcacctatggccccttttaaaaggtggtgcacgtgttgtaacactgtcatcagcaggacatcaattatctccaattcgctggaatgatattcactttagatatgagtacgatcattggctagcttatggacaagcaaagacagctaatgcgttgtttagcctttatttagacatattaggtaaaaaagacaatgtaagatctttctcagtacatccgggcaatattgctacctcccttcagcgtcatttaacacacgaggaaatgtttgcaatgggatgggtagataaagatggtaatcccactattggcgatctaaaaacaccgcaacaaggagcagcaaccacaatttgggcagcgacagcccctgaactcagctcattaggcggtttgtattgtgaagactgtgatatagcaaaattaaaaagctgtacagaaattacttttaaagatgtagaagcatatgctgttgatactgagcaagctaaacgcttatgggagttctcttcggaattaactggcagtaatgcattctaa

SEQ ID NO: 56130 - DNA, 909 bp, Acinetobacter baumannii
atggatgctctatcgcatgttttatcattattgaaaataaaacatagtaatggtgctggtcttgatgctggtggggactgggctatcaattttccagcatatgatggaattaaatttaatgctgttttgaaaggacaatgttgggtgaaaaacccagatgatgagtcttttcttgttaaagcaggagattgtgttttacttacgcgcggaaaaccatttattgcagctactgatctgaatctgccgacagttgaatcttccactgtttttgatatgaatgttgggaaaatatctattttgaatggtggtggtgatttttttctaataggtattagttttgattttgaaggtgatacttggggaatgcttacaagtgctctaccttcttttgttcatctgaaaaatatttctaaccaggtttcagttttaaaatgggcaatcgaacagcttagtcttgagctaaaagaagagacattaggaagtgagctaatgatcagccatctagcacaaatcatgctattacaagttttaagattctggctaggaccaggccaaaaccgatatactggctggttagcagcactttcagaccatcgtttaataagatcaataaatgctatccatgagaagccgacgtactcatggacagtcgcagaattagcagctattgcaggtatgtctaggactacttttacacaacattttactaaagtagtaggccattctccttttaactatcttacaaattggcgaatgcagcttgctgcagatatgttattaagaagcgaaagaaaaataatcaatattgcatttgctgttggataccaatctgaagcagcttttagtacagcatttaagcgtagatttggcttttcacctacacagtatcgggccgctaaatttaaatag

SEQ ID NO: 56131 - DNA, 774 bp, Acinetobacter baumannii
atgaaatcacaaatgaaagaaattgaaaaatatgttggatattatttgcttgtatatatttgtgttcttatagtctgcggattttttcagtatatgacggtatgtcaaggaaagtctttacagtgcaattttagtatagatggtataaataaaattctaactataacagcaactattttaacgcctatcattgctattattggttttttatcatggcgtaatcaggaaacatataagaagtctcaacaacttatagagttaattttagacaaaacgcgtgaattacataccagttggcataaaagccgagaatatgatgggtttagcctatttcaacactactgtgcaaggaaaattgtaggaactgattattcagaaaacttagaatctttccaaaagataattaaaaaaaatgaaaaaaatatgattatcttcagtgatttaatgttcttgattgataagctttttcatgaaactaacttagacttttcaaaactagataaaataattgaaaatgtgggtatcactttagaaaaaaatattgaagatttatatgactttcagcttcagctggaccaaattaaatatggtgaagacccactcttgataaaatcagaaattgaaatgcgtcaaatttgcgacaaattagataattattgcaatcactttatgggaagaaaaaaggaagaaactaaacatgattatactaaagaaattaatgacacgattttgaaaataagtagagaagttataagacttaagaaagaaatttaa

SEQ ID NO: 56132 - DNA, 1005 bp, Acinetobacter baumannii
atgagctcaaatcccacaattaaatctcaccaagaattattaagtttatcaggttatgaagaaaacttaacaataaccccattaaacttttctaaagtgattgcagaatacgaaataagagatgcagaactaaaatgttgcttaactgatgaacatggtaaatgtggtcaaggccacttccatgggtatgtaatcgcattgaatgacggttctttaagtataatgggcaaagactgcgcccagaataaatttcaagctcatgaaaatgtaatgagtagtattaggctattcaagaagacaaaagaagctgaatccaaattagggcgagtacaaaattatcttgatagaaaatatgaatatatccaacgaattaaagatttagaggaattaattaagagtgtacatagtggatatgcaagattaaattttgaattgggtgaagatgtaataaaagagctaaatcgccgttataaagcacaaaaaccaaatattttagtcaaaacatttagggtagaacttgaagacgatgatgaagaaagattaatttaccaagcaactcataaaattggacatattccacatttatctctttttgataaaagagagcttgatatccctgatagaaaagtaaaatggttaaatgaagctttaagagatgcagtaaaactttctgaccaaataattgatggtcaggaatttagtcctgctgaattaagacgaaaaacgggagcaatattagctcaactagattcactggatagatttgaaaatgatctcaaacaaacacttaaggagatggagaacttttttactacagatccaataagtttatgttatttaactgatgggcataggatgcaatcacgtatggctgaatatactatgcaatttagaggtataagcgatagaacttctgcagtattcttaagacaagttgaaattcatttttgcactaaattaagatgtgaccgcataagagcagatgaagccggaagttattggtaa

SEQ ID NO: 56133 - DNA, 822 bp, Acinetobacter baumannii
atgaatgatagtacggatgtagatattgattacagtgaatggtccgaggggccttcattgatagcaattcgcggtgaagatgaacccaataatcaatatcgattaggcacgcgggaatatgattggcaccaccatgtccgtggtcaattattgtgtgttgatacgggatttatagaagtaaaaacatctcatggttcatggcttttaccgccatcaagagcaagttggatacctccaggcgtatcgcataaagttaaagtgagcggcgctctgagtggttggactcttttcatgaccccgatattgtgttcagatttgcctcagaatccttgtgtgattggaatcagtgagctattacgggctttggcaaagagagcttctgagtggaataagttgggtgatttagcactcgatcaaaaaaatataattgcagtcattctagatgaaattcgtctttctccccatgaagcactacatctacccatgcctcaagatcctcgtttagagcgagtgctcagaacgatgctggcagaacctgattgtcaacgtagccttgatgagtgggcctcgtacggcgcaatgtcttctcgaacattgcgacgactcattcttgcagaaactggtctcagttttgcgcagtggcgtcaacaggctcaattaatgcatagtctggaattactagcgcgaggtacttcagttgcagaagtttcagaagtttcagaagtgttgggctatacatcaccaagcagttttattgctatgtttcgaaaagcactaggtgaccctccagcacgttacttttcaaaacacagactcccctag

SEQ ID NO: 56134 - DNA, 1209 bp, Acinetobacter baumannii
atgaaacaattacatatatcgattattggcgctgggattggtggattatgcttagctcaaatgcttaaacaggctcatattgcattcgatgtttttgaacgggattctgcgccaaatagcagaacccaagggtatcggatacgcattgatgctgatggtcaacgtgctctagctgctagtcttcccgaatcactctataccttgttccgcgagacagcatctattgctgcatcggctgggcaatttttaacgccgcaacttgaaagtactctagaggagcgcataccggagagctggcgatcaaatacagacgaagaaaaccccattaaagatgaagatcttagagttaatcgccaaactttaagagagatcctcatgacgggtattgaagaccacatccacttcaatcacgcattcgaccactatgttttgaaacaggatggtcgtgtcgagatttattttgataatagaagtccaatttcttcagatgctctagtgggtgccgatggagtaaattcggctgttcgatcacaattagctcctgatgcactacctttagatacaggctcaatttgtatttatggaaaaacacaactcaaaaaactcaatgaccatgcactggacaacggtatgagagtcatttttgcaaatggatttaccgccatttttgatgacatatgctttaaagccccgttgccagatattgccgcacgtattgagcctcaatgttcacttactcccatagaagactatttatactgggcgcttattggcccaaaatcacgctttggcattggtcactcaacggtttcacagcaagaactacaggcagttcttcacaaagtcatgtttgatgtcacagaagactggcatctcactcttcagcagatcatacgtcaaacagacttatccgccgtcgctatgctaccgatacgaaatggccgtccagaaattgtatggagaacgggtcctgtaacattgctaggagacgctatacatgcaatgagccccgcaggaggagtaggagccaatacagcacttaaagatgcgagtcttttaggcaatatgtttgccaaaatagcttcagaaaatggtgaaattacaaatgcgctcaatgattacgagaaacaaatgcgagcttgggctatagaagctatagcaagctcaaatcgaggagcagaaagattatttaaaatgtctactgcgtga

SEQ ID NO: 56135 - DNA, 429 bp, Acinetobacter baumannii
ttgtctagactctcttttattaatacgggaaaagttaaaaaaagtgacacaaatattcatggtttagaattaacgtatttaccatataattcaaatgatcatcttaaatgtatcatgaaaaaagaagtaaatagttgttctaaagttaatttagttaaatcatctaatctaattaaatattatccatttatttcacctgcatatggcgatagcattgttctgcctgaaacagatgacagtaaacaaataattgtttctccttttgaagacaatgaagatgaaggtccacagttagaaatttctattattaatgcttttggtgtggtagaacaaaaaactatatctgcaaacaaaaatgtaataatcgataaaaactataatttaatttataaagaagggaataaagaaaaaatattaaaattaaaataa

SEQ ID NO: 56136 - DNA, 366 bp, Acinetobacter baumannii
atggcaacttttttaggaataagtggtttaatagtttcgattactttaggcgacttttttgttaatattctttatggttcgcattatttagtttggatagatatactaaatattataatgtttgcggggttatttacttacttgtcagtagtaaatgggtatttaatgacaagcctcggcctaataaaaatacaactcccattgtttctatttttaactatttttaccttagtcttatgttggactttaataccagcttatggtttgttaggtgcagcttgggctactgttgcatcttctgctgctcagttcattttgagtacattaattttatatatgaatatggtgagaaaagtagatgcgtaa

SEQ ID NO: 56137 - DNA, 1080 bp, Acinetobacter baumannii
  misc_feature (435)..(444): n is a, c, g, or t
atgcgtaaaaaagtattgcatgtaattactaacttttcagcacttggcggtgcagaaatgatgttgcaaaagcttattcttgctcaaccagaatttgatcactaccttatttcacttcttagtctttcagatatttatgaagaaagtttaaagcaagttaaattatcaaaagcattgaattggaaaattacgagtacagcaagaacaatatctagattagctaaagaaattgatagtattcaaccagatgtaattcaaagttggatgtatcatgctaattttatggtaactattgctaactctttttgtagacggagttatccaatatattggggtatacatcattctttaaattcaatttctgacgaatccttgagtacaaaagttgcgatatatttgaataaatatttatcaaagaaggctacaggaattgtnnnnnnnnnncagcatacacaatttggttttaaaaataaaaatcaggtttttattccaaatggaattgatttggaaaagtttagatttgttgagagagactttaataatcctattacaattggctttgttggcagaaatcataaagcaaaaggaattccttatttatttgaggtgatgtctgcttttaaagatgaccctagaatagaatttagagttgctggtaaaggactatctttaaaagataaagaggttgaagacttatctaaaaagtttgtaattggaactaatgtcactttgcttgatgcagtcaaagaaatggaagccttttaccatggtattgatgtcttattaatgacttctattacagaggggtttccaaatgttttaattgaggctatggcaacaggtgctatttgtatttctacagatgtaggcgatgctagatatattattaataacagtaataatattgcgtctatacatgatgtaagtaaattaataaagcttataagtgagtatattgatatgaatatattaacaaagagaaatatttctgaggaagcatatactcatgttaagaacaattatagtttagggattattgtgaatgaatataaaggtatatggcagttaaagttaatatga

SEQ ID NO: 56138 - DNA, 1839 bp, Acinetobacter baumannii
gtgatcataagaagtctaaaagttgaagagggattttttaatgacttagagattaagttcagtagtggacttaatgtactagtaggggggcgaggagttggtaaaactactgctattgagcttctaagatttgggttgggtgctataagtttaactggaaatcagttaaataatgattctatagcaatgtccattttaaaatctacaggtcgagttaatatagaggttgaactagaagaaggccgttcaattatagtttctagatcagctcaggatcagtacccaattcagaatggaattattaaatcccctattatattttcccaaacagagattgaaactattggtttaaataaaacaggaaggctttcattaattgatagttttattgataatctaaatgaaaaaaagtccaatataaagttgaaaaataataaaatttgttctttatatagtgaatattttgaaactaaaaaaaatgttaatgatttatatgagaaaactttaccattaaatggtttgaagctgaaagaatcagaacttatagagaaatatgaagttattaaaattgataaagtaaatttagataatgttcaaaataaattgagtggtttacagtcggaaatctcaaaaataagtgtatctattgaaaacaataaggaaattaggaaaaaatatttaaataaaattcaaaaaataactgaaataacttatcttaatcaagattcattaaattttttagaaagaataaatcatgatgaaagaggatttgaattatttattagtaatttgcttgaagaacaagaaacactaaataaaattttaagatttaatactgaagctataaattttattgatagcaaaaatataggattagatgaaagaaaaagaaatctagaaatagaatctagagataatcgattaattttagaaaatagcatacaaggttctagcgtaatattaagtgagttgggcctggtaagagaaaatattgctaaaattgaaaatttgaatgaatttttgattttaaataaaaataaaatggcagaaatttataacgaaattcaaagtttaattgttgatattaataatattaaaaatgaaatttatgaaaatagagtacatgtagtaaacttgctaaatgagagtttaaatccatatgttaaaatttctttaaataataatattgatatagatgattatttgagtattttagagttaagcttaaaaggctcaggaatgaaatataaagaattacttcctttagtcgcagaaagaataccaccagcatggttgttttattatgtagaaaataaaaaatatgaagattttgctaaagttgttggaattcaaattgatcgagccgcgagactgctttcatatcttgatgataataatatctctgatattttagtatcacaaaaagaagatgttgctgatttttatctactagatcatggtaattataagccgattagtgaattatcaattggacagagatgcacagtcattttatctataataatggaaaataagaatagaatattaattgtagatcaacctgaggatcatttagataatgagtttattgtaaaaactttagtgaactctattaaaagaagatcaatttattctcaaacaatattatctagtcataatgcaaatattccagtattgggtgaagctaaaaatataattaatttggactccaatggtagaaatggatttattaaactgcatggaccagttgaagaagagcctataaagagagtcattgaatctttaatggaaggtggaaaagaagcttttgaatatagatctaaattctataaagagtaa

SEQ ID NO: 56139 - DNA, 897 bp, Acinetobacter baumannii
atggaattaaatgaatttttaaatattttagataaagcttcgcctgaaaaacaaattcaattaattaatgattttcgagaaaatcactctgagattgagtttgaattatttgtcgaaaaatctaaaaacaggctttggtatcataatgtaattggcttcttaatttatcaagataaaaaaactaatattaccttagttgaaaattgtgattcattggaaatatataatgataatttagaaaatattgaagatgtaaaaagtagagcaattgctgagaatcttagttttgtaatacatgaattacagccaattatagggtcaattgatctttttgcttcacaggagattgagaattatgaggcgtctaaggtggccggtgaaatagattgtcttcgaggattagtggaaatgttttcagcttggagaaaagctgagaatcctctagtttataaaagtataaatatcaatgcattagttcgtgaggagatcactcgattaactcctatttataatgatgaaattattaataatataaaagaagatctaatttttgatgtagatatttcactgttaagagtaattatttcaaatggacttaggaatgcttgcgaatcaactttacttgtaaaagatagatcaccccaaaaaatatgtataaatggtggtactacagataaatttttatggattagtataatcgatgatggtcttggattagcagatgagcagcctaatttattaaaagttaataattctacaaaatctaaaggaaggggattcggtttagcaattatttcaaaatctttggatgcaatgaaaggtagtttgaatttagagaattcaaaacctaatggggcatgtttttatttccaaataccacgaatagataagttatga

SEQ ID NO: 56140 - DNA, 1410 bp, Acinetobacter baumannii
atgaatttattatatgtagaagatgatattaattggtatcgtcacacagttgaacctgaattaagaaagatttcaaacaatataatgcatgctgctaattatgagcaagctttagaattactttcattaaatagttttgattatgtcattactgatcaatcaataccttttaactcatcttcaactaaagatgatataaaatatggattacagttaattgcacatattagagagagttatccttcattaccaatcttaattctaactggtcagagctctgaatttgctgttgagaggtttgtagaagatcaaccattagtatttttctgggatggaactaataaaggactaataaagtccagacctaaagatagattacgtgattcattagcgataatagcatcagcaaaagatcaattagaagcgattgattctattattttggatttattgaatgatttagaattaacactttttcaaaaacgggttataaagttatttttaaagcataaaaatgctgcgggtgctgaaattgaagcacttactggaggctattcttcagctaaagttcttaaagtgaagttgcttgatgagagtggtaatccttttttatacgcactagggaaaattgatactcatccaaatgtagataaagatcaatcaaattattcaaattatattactcaactccctgtaggttgttttccaatactactaggcacgtactttgctggttgtggagattttaaaggagtcttttatcaatttgcttccaatcactgttctgactatttcaaattacttataaataatcaagaggatgctttaactgttgttcgaaaatcttttgatttattaagcaattgggttcagtcacccaaagttgagaattattcaattagaagtatcagacaaaaaatttgtagtgattcaaaattagagtcagtaaaagaaaaaattggaatagatttagatactattgaaaatacagttataagatcaaaatgggctattcagcattcagatttgcatggtaaaaatattttagtttctgaagacttaaatccgatttttattgattttggtgatatatcatattcacctgctgttcttgatattgttactctagaattaagcccttattttcataatgattgttctcatcactttataaaggatttagatttttttgagaattggtttaatgattcttatcatttaaataattcaccatttcctgaaatttctgtacatttgagagaattaaaaagatcgcgttgttttatgacttatgattatgcagctgtagtgtatggttatgctttacgtcaacttacatatacagatacaaatcatgatatagctataaaattaattaacagtgcaatcaataaatttaagtcactttaa

SEQ ID NO: 56141 - DNA, 177 bp, Acinetobacter baumannii
atgaatgcgattccaactttaactccccttgccatgccgtgtaacagcagttttgaagcaaaagattgggaaattttatcgagccattggtatcccgtcgcacgtattcaagatgtctccaatgcacctcaaagagtcacactactaactactagacgtcaatatggccctctataa

SEQ ID NO: 56142 - DNA, 555 bp, Acinetobacter baumannii
atgacagttaaaaacttcttcgacgctgctcgagtgattgcaggcggcaaacttacacaagcacaagtagatgatttaaataagatggtcgataaacttgcgccttctggcatgactacaagtgatgttggtgtagatctaatctcaggatttgaaggcacaagattcaaagcttatgacgatggggtgggagtctggactattggaactggcactacagtttatccaaatggtgtgaaggttaagcaaggtgacacttgcacacctgaacaagcaaaagtttactttaaacacgacttggctaaatttgaaaagactgtaaatgcatctgtgacagtgcccctaaatcaaaatcaatttgatgctttggtttctctgacttacaacattggcgcaggtgctttaaagaattcaactttgctcaagttgcttaataaaggtgactatcaaggtgctgctgatcagttccttgcatggaaaaaggcaggtggtaaggttttacccggtttagttcgtcgtcgagaagcagagcgagcactctttttaaagaagtaa

SEQ ID NO: 56143 - DNA, 396 bp, Acinetobacter baumannii
atggaaccagtttccacaagcggtttaacagcaattttaaaattttatggtgcagcaattatggtgactttagcagttgctttggttgctgccgttgtattaatgacacgaatgccacgatcgcctcaagaatgggcggtaggtttaatttgtactgttgtatcaagtcttgctggcggttcgctaattattatgaagtttagtttgcatgcttgggcaactgatacatggggatggtttgcaataggtggacttttctttgtatgcggcttacccggttgggctttgattaggtgggtctttaatttcattgataaacaggaaggcaagacgattgtcgaagtaattaaagaaattaagaaggctaagaatgatattacaggcggtgagccatga

SEQ ID NO: 56144 - DNA, 738 bp, Acinetobacter baumannii
atgagagataatatgaaatttttcttatcaatatttatatttagtacattaactttggtaggatgtgattcatctaatgtaaaagttaaaagttctaatagtgagttaagcaaatatcaaaaagatgcagaaaatggtgaccctgttgcccaatacaatatgggcgtagtatatcaacaaggtttaaatggtgagaaagtcgatttagataaggctgtttattggtttgaaaaagctgctaagcaaggtgaagaagatgctaaatataatttgggtgtaatttatattagagataattcaaaatatagaaatgttaaaaaagcaatggaaatttttttagaaggtatggataaaaatgacgcagaatcaattaatcaattaggaattatatataaagatggtattgatacttctgtagattatacaaaagcgttatctttatttaaacaagcagcgaatttaggatcgaatagtgcacagtttaatctagggataatgtattttaaaggacaaggtgttaaacaagattttactgaagctagaaaatggtttgaaagagcatatcaaacaggtgaaaatattgacgcggcttatacccttgctggaatgtattatgaagggagaggaggaagtaaagatattgaaaaagcactaaatttatatcagttcgcagctgatcatggagaccaagaagctgctaaaaatatagaaattataaaaaaagaatgtggatgctga

SEQ ID NO: 56145 - DNA, 261 bp, Acinetobacter baumannii
atgctaacgatgttggtagaagtaattatggctgtttttattgctaattttaaagtatcagaacaccctattataaatataatagtacgtggccttttggtggcagtaatcggctcttttatagcattattttcttcaatcctagaaggttgggatttttcgattgggtttgctttaatattcagcctgataattggcttggccgtaagtatttttctgttcgcggtagaggctttttttaactatattgataagaaatga

SEQ ID NO: 56146 - DNA, 300 bp, Acinetobacter baumannii
atgaaaaaaattgcaacgaatcaattgaatcttgaagatatacctatgaactacaaatggaatagttttgttcagtttgctttaagttttgatcctagattagagatggatcaatggagcgaaagtgattatattagtccaagtcggttgccaactgaatcggattctataataggattgagaggctatttgtaccatcttcagagagtaaataatcaagatattaatgatgaaaatactttaaagtttagagtggaaaaggcatatagtttattaagagaaaagttaagggaatcttaa

SEQ ID NO: 56147 - DNA, 477 bp, Acinetobacter baumannii
atgagcatgaaagatttaactgaagcctttaaactaattctggaaaaactagatgatgctgattttattaatgggtgttcggatgagttaatcaataaggctgagcaagttttagatattaatttccctcaaacctataaggtttttttgaaaaaatatggagctggagatattgctgggcaagagttttatggagttattgatgaagactttgaaaattcatctattcctgatgcaatttggttaaccctacatgatcgagaaaaatataattttcctaagcacttacttataatttcacaaacttcggacggttattattatgttttagattgttctaaaatgaaggatgaagaggagggagctgtatatgaatgggaatggaatccaaatatttctaaagagaatgatacgtgggttgaagttgcaaaagattatggagagtttattttaaatttaataaagtcatctttataa

SEQ ID NO: 56148 - DNA, 126 bp, Acinetobacter baumannii
atgaacgatgtaaaacctgtggttaaaccaaagcaaactttaaaagcatttttagtcgaattgcttagcgtacgcgcaggcgtatatatcaaacaaaacaatcatccgaataaagcaaaaggataa

SEQ ID NO: 56149 - DNA, 540 bp, Acinetobacter baumannii
atgaaaagaattttattactaacatttatgtttttttatttacttactccgacttatgctcaagaagtaaaatataaaaatattgtagttaacctaaaagatcagtgggatattagcaaaggtcaaaatgaagagctaattgcaataaaacaagcgagtaaacaggcaattataatttcaatatattatcccaaaggtatagaagagggtatgcaatatctggttgcttcgctacaaattcctaaacaaggattagtcaaaatgaaaggtgtaacattagttaatgaggatattaatattccattgagtaatggtatgaattatcaagctaatgtatttacaaccaactttgataaacgttttcttattagtgcttcatcaggtactaatgctggagttatcttagtaacatatgaaggcgaaggtaatgatacaaataaagcgattaatgattttaaaagtttaataaataatataaagatagaggctcctaaagatggattcctttttaatcagaatgatttattgaaacataactaa

SEQ ID NO: 56150 - DNA, 990 bp, Acinetobacter baumannii
atgaaatttaaatacttatctcttgtagtatgggttttctgctcatctgcatttgctcaaaactttgttgaaaatacagatatcactgatcaagtgaatgctgagcttaagaagaacaaatttgtctctatcccatctggcgactttaagattgatgctaataaatcaattcaaccacctagtagctcctcaatcaaaatgcaaaatagcacacgactatttgtaatacccaatcgtcatgatagttctcgagtatttaaagtatccaatgtgaacaatgtcaaaattacaggtggtcaacttattggtgataagtacacccatttaaatggtaaaggtgaatggggtatgggcattgagattcgagactctcaaaacgtctctgtttcaaatatgaagatttcaaagatgtggggagatggtatttacattgcaaccaatggcgctaatgcaaacaaaaatattactctctcgtcattaataatgaatgacaacagacgccaagggataaccataacttctgttgatactttgaatgcatcaaacctaaggatttctaacactggcggcaccaaccccgccaatgctgtagacattgagccaaataacaataaagcagttttacgcaatataaattttaatgggcttactacctatgataatgctggcgtaggattccaagtttctttgaagcattacaacaactcacctaaacctatctctatttcattacgtaatcacaacgataatgggtctaattttggatttgtaattaacggcctaacctcacctgttaaaggatcaatcgacattgatggcgtgaaatataaaactaataagaagaataatttctgctttaatagttggcaaaacaacgtcactgttaatgtaagaaacattagctatgataaggaaaatacattccctaaacattcatggtgtttagactacaatcaagaatctaagatcaaaataagtcgggtccaataa

SEQ ID NO: 56151 - DNA, 1125 bp, Acinetobacter baumannii
atgattcttaaagcgaatagaatatttggcatttcgccatttgtaataacctcgattattcttattttcatagtaagtattcctgcgttggcagttttacgagttccattaattttgggccacatatttgttttttatggatatgttttttattcaaaacaaaggcttgggcttaattttggtatagttgttctattaactcttttgctttatgcacttttacaaagcttagtattacaggatgaatggattgtaatagcacagtcaattggaatggttttaatccttatgctaacaacacagatagcacagattaatgctgttcaattttatgatcataatcggatgggaaggttagctagaaagctattaataatttacccattcttctgtgtgagttttaatgcttggtcagatactcgtagtgctggtttatttatgaaccctaacattacagctcatatggctgtgatgttgttgccattcataatgcttgggattagaacctctaaatttagattgcttgctgttcttatagcttttgcaatctcgattgtgacagcatctcgtagtgcaacaatggctttagcactaagtatcgggacatttgcacttttcagcttttttccacgtttgcgctttatatcaattcttcttatagttctagccgctactttaatctctgcatatggtgtggatattgtatccgcagttattgccaagtactcaattactggtgattcacgtcttctttatactggctataactcacgcgatattttaatgcaaattgccattgagcgttttaaaggtcaaccttggtttggtcttggtttcgatggtgctaaattcgaattagatggtcatgaactaggaacgcacaacggtcttttagacttgttattgcgctttggtatcatggggacatcaatattcgcaatctttatgttgtacctaggctttatggttagtagacaaaagaaaccatttaaaccagtgtcagtaatggctcttgttgcaatcatgtctttatcaacgaatagctcaacattctttgtatttaactacttattcttgtatgtagtcgtactaatttatgtcggctattttaatagaaagaattaa

SEQ ID NO: 56152 - DNA, 933 bp, Acinetobacter baumannii
atggaaagaaatatctctttagatgttctaaaagtaattctagctttttttattatcgctttacatgggaagatttttcaagacattaatcctgaactttcattttttactgtaaatggaatatttcgtataggtgtcccgatttttcttatagtttcaggtttctttttttactatgtaaaagatctaacagtttgggtaaagcgagtatttgcactttatgcgacatggatggtgttttatgcctacttctattttgagatgccaacaaatatttcatctttagctaaagatttattgttcatcttcttcgggtaccatcacctatggtatcttgctggaacgctcttaggtggcatacttttatatttggctaggaatttaagtacgcgattgcaattagtttctgcactagtattttttattggtggggtaagtatgcaatatgtaggtaatatgcatgtattgccaagcatcctcgacaaggcttttaacttttatccagtccatcgtgattttttaacggtttgttatccatttttaatgctgggatttttgataaagaaacatgatatagctaacatgttaaagcatggatggttatttgcatgcttagcgatagctttactttatgtagaggtgtttttcaactataaattcataagctcaaccgaaccattagatggtatgttcgccctatttattgcttgtccgcttatttttttggcttgcatgaatatgaatatcaaagggaaaggaaaatcaatagcattgttctccacagcgctgtacttaattcatccattcttccaaaatattttacaacaatttaatgtaaactctgttagctcatttttactgacaatcttatttagctctatagcatcagtatttttgatactactaagcaaaaaagtaaaatttattttgtga

SEQ ID NO: 56153 - DNA, 504 bp, Acinetobacter baumannii
atggctaaacgctacttaccgttctataacaatgctagatttattgcgctagtgttagtagccttttttgtcattttttcaatatctttcagatatttggatttaaatatcagtattagcttaacccaattttcgtttgttttgcttttgcccttaagtcaaatttatttagcctataagggcatgctagatgcactcaaacttgatggattaagtcagtctgagagagacagattaacttcaacagtagatatacgaagtaagtcgtccttatatgtagctattctttttattgttattgtttttagtatatttgtcctaaattcaataaatttacttactgaaaagcatttgttggctttaatcctatcaatcgggctttcttcaattgttagcttttttttggcttggagtgatttaagagaaatctcaatgttggaaaaaactcttaaagcacgtaaagaatcaagggaagctaaggcaaaggtactaaacaataaataa

SEQ ID NO: 56154 - DNA, 1002 bp, Acinetobacter baumannii
atgagcaaaacaatagttaaagaaaaaacagttcactataagaaagtggattttttaaaaggtgccaatttaggtcacttgctaaagacgcagctacttgataaagattctttttattataaggctaggaatcggcaacaatatgtttctgcaactaaagatgattttattttaataaatcacgctagttcacaccaaagtatgtttttcggtgagctaattattgttgagtctggaaaagctcaggccgtattgaagattgatagtgatgaagccacagaatttccaattaaaacctacttaactgaagatctgccagatgacgaggaagagtcatcagaggttgctcgtaaagaatttattgatagcgttttatattttggtgtcattgataatcatgtggctataattcagtctcggtcattaactgctagaacactagaatcatatttgggttggcttttgggagaagcagccaaagctctcccagagaacagcgccttaattttaaaggatgctccaaacccagcaatcaaacaaaagcttgaatctactccagcaaaaacaatctcaatctcatctgggattggttcaaccgaacttcaacccattcattcaattgaatcaaatattccagccaaaattgactacaaaatagaagataatgttgtagatgttttgaaaacggcgtttggtgtaaatttagaagaattaaagcttgaggatgggttggatgatgctaatcttaagctgaaattaactctaacttataaccggcgcacatcaaaaagcggacaaaaagttattgatacagtagcttcatctatgagacataatgatgactatgttattactctagaagatggaacaaaggttactgctgataatttaaaaatgagtggaaagatttccgttgaaacgattaataataaagtttataacgatgggcttaaagttcagttgtataattggatgaccaccaatattaattttggcgattaa

SEQ ID NO: 56155 - DNA, 765 bp, Acinetobacter baumannii
atgaagaatctagaaactatgggtcagcgtattcgcgccttacgaagagaaaagaaattaacccaaggcgagttggcaaaaatcgtcggggttagtgcgcctaatgtcactggttgggagaaagatgcttatgctcctaaagcagacccattaagcaaaatggccgcttatttcggagtgtcgacttcatatataactaatggagatgaaagcggacctaagttggatagcactgttgcgcaattgaaagttctggatatcgaagcttttaagaaaaaatacaatattcccgatagcgaagatgctgttaaatttcttgaaatacctgttaaaccattccccacccaaaaaagatatgttcctgttaaggcttattcaaagatgggcatggatggctatttcacagatatgggttatgaaggcaatgctggagatgggtatgttccaactcactcagcaggaccaagagcctatggtattaaaggcactggcgactcaatgtttccagctatccgtaatggatggtatgtggtttgtgatccagatgcggaactcgtgccgaatgagtttgttcaggtgtgcttgaaggatggaagatgcacaattaaagaatttgttggcataaatggcggggttttaagcttactttccgtgaatggtggtgagcgatttttctttgaaatggatgaggtagaaagcattacagctattactgacatcgtaccaccaagtcagcacagacaagaacatccttattcgcattaa

SEQ ID NO: 56156 - DNA, 402 bp, Acinetobacter baumannii
atgtcgtcagtcagcattgctgaataccgcaagttatttccgataaataaaaataaaaagcggcgctcagcaaagcaagttgccagacaaccaagtgtgggtgaaatggttctggcaacgcatttaagagcatgcaagattagttttgaacaggaatataagttccaccctgaacgtaaatggagagcagattttttaataacgggtacaaagattttgatagaggtggaaggcgggatctggagcggaggtcgccatacaagaggtaagggctatataggggatatggagaaatacaactccgcagcaatgatgggttttacagttttacggttcagcacagagcaagttaagtccggtatggcattaaagcaaattgaattattaattaagggtaaatag

SEQ ID NO: 56157 - DNA, 753 bp, Acinetobacter baumannii
atgttggttgaaaagtttgattttattgagttacttcgccttgctattgctcaaggcaaagctgaaggaaagaaaatttcgaaagatgtagttttaggtgaattagcgctgttatcgccagctgcaaagctttgggccactgtcttgattgaaaaggttgattttgagcgaatcgcaataattaccccagcacaaaaacagactgaaactttttacagtaagtatgactttaattttcaaaccgaacgccgtattgaagatattccgggtaaggttgagtttgttcgtggtgagattaaatccggtaattttttccgtgcgagaaataaattagcggtaaagatttatgatgaaatggtaaagaaaaaatttacccctactaattctcaaggtgatcttactaatctggcaaaaggtatggctgagattgttttgcgtggacatgtttttgttaaggctatgtgtggagcatgccaagggttgggtaaaattgagacatttggtttaaatggctttccaaatggggccatgttttgtgggaagtgtaatggaactggaaaacgaccatatactttgaaagagaaaatgaatattgctggcattgatgcaaccaaaacagcttatataaagagttatcagaagtttgagctgtttggagaatcaatcgttgcagaatgggaaaatgaaattagatcgcgtatttcacgttcatttcgttttgaacttcctgatactcaagaaacttatgcttga

SEQ ID NO: 56158 - DNA, 1218 bp, Acinetobacter baumannii
atgaatctttcaaatccttttagaccaggagcagggcatatgcccccatatcttgctggtcgtgaagctgaaaaagatgagtttttgaagttattaagccaaactacaataatgcaaaacctagttctaactgggttacgaggcgttggtaagacagtcttatctgaaacttttaagccattagcacagggagctggatggttatgggtaggtacagatttgtctgaaacagccagtattagcgaagaaaatatagctataagattgttaacggatctttcgcttattacctcttctattccaataggtattgaaacatcgcattcaataggatttgtacaagaacaaaaaacacaagaattcaaaactctaaatttcgaagtattggttggaatttacaaaaacacaccaggcttgcctacggataaattaaaagcagctttagaaactgcatggaacgtaatgcaaagctctggaattagtaaaaaaggtattatctttgcttatgatgaagctcaaaatttatcagaccatgctagtaaggaacagtatccattatctttattattagatactttccagtctattcaacgcaaaggtattccatttatgttggctttaacaggattgccaacattattcccaaccctagttgaggctaggacttatgctgaacgtatgttcagagttatttttttggataaactgaacgaacaggatgtcaaagtagcaattacaaaacctcttgaagggcatccaatgatgctttcaactgaatctatcgatattatttgtagaatttcaggtggatacccttattttgttcagtttatttgtcgtgaggtatatgatttatttataaatcaatatgagaactccaaacctacaagggttcctcagcaagaaattattatgaaactagatacagatttctttgctgggagatgggctagagctactgatcgacagagagatttattattcgtagtagcattattagacaattgtgatactgagttttcagtgcaagaaattttagaaaaatcaaaagagttagaggatgcgaaaccatttagtgcaagtcatattaatcaaatgttatcaacattaattaattctggtttaatttacaaaaatagatatggcaagtattcatttgcagtcccattactaggtcaattcatattaagacaaaaatcacaaatgggtattggctga

SEQ ID NO: 56159 - DNA, 390 bp, Acinetobacter baumannii
atgaatcattctatgtttgatactgcttcatctggattagcgttaaatgaaagtggggttgaagagcttaaagttagagtaggtacagctcttattgctaatgtttgtaacccaggtatcaagattacaggcaattacaataaaatagctgtagcgcctaccagaaaggtatcaaataatataagggttagtaatggtaataatgtaatatctggttcaaataatattattataggtcgaatcggtttgagcctaactgtaaatggatcaaataagaatttttctggtcaaatagttgggactgtaacatgtggaccaggaataggtaatgattacacagtctttgagggtggtctgttctcgaagtgcttagttcttaaactatattaa

SEQ ID NO: 56160 - DNA, 3177 bp, Acinetobacter baumannii
atgttgaacagtattcatcaagttttagatagtttgggtattagcccgcagaaacgtgctattcatgttcaatttacgtctccgatattgaatgaccaagtatttctgcaaagaattgatggtgtacatgcactcaacgatggtttaaaagcagaacttttatgcctatcgacaaatgcaacgattcaacttaaatcttttattggcgttcaggccgctgtagatattgtgacggagcgaggtgagttaactcgcgttacaggcattattactcatgctcaacagggccaatcagatggaagtctaactttatataagctgaccttagaagatccaaccgcattatggaaatatcgccgtaattcacgtgtatttatgaataaaagcgtggttgagatatgggaaatattatttaaagaatggcaaactaaaaatccgctatttgctgcaagtttaagtttagatttaagcggtctaacacaaacttatgatgtgcgtccttttgtgatgcaacataacgaaagtgactggaatttccttacacgcctacttcgtagtgaaaatatcagttggctcattgatgaagctcagcatattgttccaagtacagatacatctattcaagctcagaaactcaggttaattgatgccaatagtcaatatcagcctttagaccgtaaaacgattcgttaccaccgtagtagtgcggtcgaacaatatgacagtatgactcgcttaactgctgagcgctcccttcaacccaatgttatgcatatacaacgttggcaagcagaaatattagatcaagaagaagggattggaagtgttcaaagtaagcatcagcatagtgaacattatgacaatgctacacttggcttggagcaagcttggaactatgcgcctgcatggattggtgacttaaagggtgaggatggggttactaaatctggaaatcaacaagttgaacgattaaaccagaacctccacaattactacgaggcacaggcgaaacgctttattgcacaaacaacagttcgtgatacctatgtgggctactatttcgaattaaatgaacatccagaaatagatcagcatgaaagcacagatagaagctttttgattgtttctaaaaatttctttaatcagaataatttacctaaagatttaaatgatcaaatcaatggtttattggcgcaaagtaactgggcaattcaaaaccccgagaacagtgatgaacgccaagcgaatcaactgattttacaacgtcgtcatattccaacaacaccagcttataacccgcaaattcatagtccagtcactcatccacaacgcgcaaaagtggtgggtcctgaaggcgaagaaatctatgtagatgagtgggggcgtattaaagtccgcttcctatttacgcgtagtgatgaccatagccatgatggtggagcaggaaccaacaacaatgacaccgattcagcttggattgacgttctaacgccgtgggctggagaaggttatggtgcgcggtttttaccgcgtatcggtgagatcgtcgttattgacttctttaatggcgatatcgaccgaccatttgtaatgggccgaattcatgaggcccagcgccatccaaccaaatttgataacaaaggtaagcttcctgatactaaaaagctcagtggtatccgttctaaagaagtgtcaggtggtgggtttgggcaactcagatttgatgatacaccgggacaaattagtacccagctacaaagcagtcatggtgcaagccagttaaatctggggaaattgagccatcctaaagataaagcggaaagtgaagaccgcggagaaggttttgaactgcgcacggaccaatggggagctttgcgcgctgggcaaggcttattggtatccacccataaacaggataacgctaaaggagaccacctcgatgccaaagttgcgaaaaagcaacttgagggtagtcaaactaacagtaaagcactgagtgacattgctaaaaaccagaaaaccgatgaaatagaatcgattgaacagttaaaagattttgcctcacaaattcagcagcaaatcgctaaatttgaaaaagctttacttcttttgagttcaccggatggtatagctctaagtagttcagaagatattcacatctcggctgatgcacaaatcaatcagattgctggagacagcattaatataagtactcaaaagaatgtgattgcccatgcccaaaataggctgagcctttttgctgctcagagcgggctaaaagctgttgctgcacaaggtaaggtagaaatacaagcccagtcagatgctttagatgtacttgctaataaaggtatcaccatttcttcgacagaagactgtattgaaattagtagtcctaaagaaattgtaattactggtgcaagttcacaaattaccttaaatggttcgggaatctttccaaaaactggcgggaaatttcaggtcaatgctggacagcatgtgttccaaggcggcgcatcggcaagtgttcaatctagtttgccaccgccaccaaaacgtgtacaaggtgtacttgagttatttcatgaatatgcacatggtgagtttgtaaaaggtggaagttatagggttgtcgataacttcggaaaagaggttactggcaagctggatgataagggatttgcaaaagtttctggcttagcaacaggtgcagtaaaagtcttcttcgaatcagatcaccgtgatccttgggatactgcaagtgactttaaacgtccagttgagtggccaaataagaatgatgcggatagtgagcaatcagattcattaattgcacaaatgagtaaaacagcccagtccaaacttggtgaattatctaaacaattaaccaatcctacgaatattatgaaaattattcaaactgcacaaagcataaaatctgaaggagcaaaggctttaatgccaatgttaaaaactcaggcgcagggattagtaactgatcaagtgaagagctttttaccaatttcagaagcaggtcaaaaaatagggaacagcattgaacttacatctattcaaaaaatgaatgatttcaataaatcaggctctattgatggcaatagtttggtcaataatacgcttcatcaatatttgcaaagcccttttaaaaagaattcatag

SEQ ID NO: 56161 - DNA, 252 bp, Acinetobacter baumannii
atggaaaatcaaatcgttgtacaagaaaaacgcggagttgtaagtctacgcaacgcttctcgttatggtttgggggctgttttatcagcgggtattttaagcagtgcaagcgcagcaactttagttgatgaacaagctgctcagtttaaaactgatggtactgcaatggttacagcgatcggtgttgcaatgatttctgttgctgttgttgctgtactcattaaatgggcgaaagctacattctttagctaa

SEQ ID NO: 56162 - DNA, 1584 bp, Acinetobacter baumannii
atgaagttttttaaatatttagttttcataattataagcttattttctgttcaggcttttgcactttctggttatcgttcaggtagtggtgattgtgcagaaactaaagaagctgcttgtgcatctgcctttgctaatagacctttgtcgtttaaaaatgcttatcgatatgaagtcattggtgattattgtaatttttatgaaaaaagatttagttcatcaggttcatatataggtgatgcttctgtttcatcatcatcttttgcagtgtgtgatgtcgtaacaaagtgtccaaattcaggttatccagttccaacatattttgagccgaatacgccgatcccattgcgtgcatgcaaacagaatcctgacggtacttattgtgtttatgatgcatctgacaaagttaatcctttagttatttctactggtaaatatcagatggttactttgagttctattagctctattccttcaccatcatgtacccctgaattttctaaatctacatgtaatccaaaggatccatatggaggatgttatcaaccgcctgatgatggttgtaaccgtttagcagatggttctatttattgcccagagggtacacctccgccacctattaaaacgggttgtcagaatggtgcgacttattgcgacatgcccccaacaggttgtggttctggttatgtgccgggtagttttaatggtaagcagatttgtgtaaagaatagcaatccacctccgactgatcctattcctcagccaccagaaccagatcctactgatccacctgatcctaatgatcctccgcctgcatcttcaccacctccagctattccgcctgagagtagtactattttaaggtctatacttgatgctattaatgcggttaataacaagctgacatgggttaaagatgaaatcgttaactctgttaataatgtttctcgtactttaggtataactaatcaaaagcttgatgctgttaattcatcagttaaagaaactactgctgctgttaaggaaacaaccgctgctgttaataatgtaaaagctgctgtagatgctaatgcaacaacggtaaaaacggctgtagaagccaatgcagataaggttaaaggtgctgttgacgctaataccaactctacagctaataagcttaatgaagtcgttaatgcaattaataataagcctgttggcggtggtggtggcggaactaccgatgttaagcctgttgttgatgctattgagaaacagactactgattttaaagatatgatgaagactgattcatcagactttgatacatcacagtatgagaaaattggagatgcttcagacgatcctcgctatttaaatgcccagtcagaagctaccaatgcacttcagaatttatctaataaattaactttttctaatactgcatgcgtacaggactttacggttgattttccttattttggttcttttgtagttccaatttcccgttggtgtgaactcttagcactaataaaaatattgatacatctcagtacattaattcttgcttttagaatgcttgattcaacagtgagggctatctaa

SEQ ID NO: 56163 - DNA, 204 bp, Acinetobacter baumannii
atggcaaagacatttagatttactgatgaagaagaaaatgcacttaatgaagtagcattaaaattgaatagagacttggtaaaagctggaaaaaagccgttgcgagatactgagatattccacgaaattattaagcaaacccttttagaaggctttatagaagtaactagagatgggacagtaaaagtcgaaacaaaaaaataa

SEQ ID NO: 56164 - DNA, 1227 bp, Acinetobacter baumannii
gtgcttgatcatcttcgtttagctatccctgtcataccaacccatgttcgttgtgttgacggcaaacaccattattttaatggtgatatccgtgatttcggtttgcccgcagcgactcgacatgttggtagggcagatgatggttctacgactactggtgatctttaccatccttatgaatcgcttccgagcgattacacggatatggcaatgaagttctatgcaaatacgatgaatacatttccgtatgttgaaattaaagcttcacctttgaaactcttgcagggtcataacgtttacggttttgaaagtattcatcttggtgcaactgaaatgcttggcatgttagccgatgcttatcctgaattattaccaatcttagattttgaaaatatcgaggttttacacctagatacaacgtattttgtacgtttaccgcatcagaatatggtgcaaccagttcttgattatatgtctaatatttctgttggccatcgtaaggctaaacaggtcaagtatgacaactatattacgtggggcaatgaagatggacgttatatccgccctaaagcctatggcaaatttgaagaagttaaatctcagttaagtaagatccagaagcaagccgataaaggttgtatgcgctctaaagcgttagttttagctatgcatgatgctcttaagttttctaatgcctgtttacgttttgaagctcgtatttgtaagacatatctaaccaagaatggttatccaagtaatttgtggaaattgatcgacttacagcgagatcaaccaagtttattagccaaattatggcatgtagcgtttgacccgatttttggcgcattaaagggtgagaatatgaatttttctgatgatggtgaaatcttagaattacttcgtgcaaatctttttactattactaaatctggtaaaaaaagtacgactaaggcagataatgcctttaaattctactgcttacttagacagatgggctgggagtcagttaaagccatctataaggaaagtaccttttacgacaatgttaaagctcttactagcgttaaaaatattgatcgtggtcacttacagaacctacataaaaataaaaacgggaaagttattccgtttacacgtcttattgaaatcaagtttgagcagcagcttccacctgattatcaaataccagtttccaagtatgccgataaattcggtttagtagcctag

SEQ ID NO: 56165 - DNA, 285 bp, Acinetobacter baumannii
atgcaattaacatttaacaaacgctcaattttgccagacgtctacaagaaggacgacaaagtttatttcagtacaactttgttcacaccagtacgttacaacatcaaatttggtcaaggtcttatgccgattgatcaaatgaaagctgtacttgatgactgtgctgagaatgcacaagaggtcgagattgaattcacagagtcacaaggtcgttttggttctgagttaacaatcttttcagttaagccattaccaaagaaaaacccaatggaatcaaagacttaa

SEQ ID NO: 56166 - DNA, 381 bp, Acinetobacter baumannii
atgatgatttctcatttccgtaattgctttaatggtagatttaattggaataaattaagtgagatgaaaacaaattggaaaataagtaaggcagctttgctctatagagctaaatctttagatcttttaaatgaaacaagttatcgtagtggctttattcatttgaagcgtactggtgaggctattttagagtcagaagatcatgaaatacctaaagaagttccaactttactaaatacatgtttcaaagctttaagtaaaaaaggaatttcagcaattgatatagctaatgaattaaatatatctctagatctattaaataaaattacgcaattagatttacagccacaaaatccttctaaacttaaattagttatttga

SEQ ID NO: 56167 - DNA, 294 bp, Acinetobacter baumannii
atgatgaagtacatccctgactcaatgtcatacccattcactgtttggatgtccgaaagtggtttctatccttcttataaaaaaggatacatcgttatgaagcgtggcaaagaagtggcaaagatttctttaatagaaacaaaaaaaggtttcgaaatgaatgaagtctgtcaaaaaagatttacttcattttgccgggtttggatgaataaggataaacgttttattaaccagcttcgaatgcgtggcatttctaattcaatgaaattcagttatcaaaaggtggcagcatga

SEQ ID NO: 56168 - DNA, 609 bp, Acinetobacter baumannii
atgagttatctatttttgtcgtgtacagagaaaagtgagggacagattaactttctagggcaagatatcaaccacttagaacaaaaagctttacgcaagatcaggtcagacttacagattgttttccaagatccatttggtagtctaaacccacgtatgacggtagggcagattattgctgaagggttaaaagtcaaagcgatagctgataaagaaattaaacagcaagttgaatcagctttgataaaagttgagttggcagagggctttcaacatcgctatccacatgaactttctggtgggcaacgacaacgtgttgctttagcgagagctttagtagttcaacctaaacttttaattttagatgaaccaacgtctgccttagaccgaaccacgcaaaaagcgatgattcaattattacgacgtttacagcaaacagagtacttgagctatatttttattagtcatgatttaaatgtggtcaaagcactatgccataaagtgatggtattacgacatgcaaaagttgtggaatatcagctgactgagcagttgtttaatgccccaaaaactgaatataccaagcaattaattgcggcaagttgttaa

SEQ ID NO: 56169 - DNA, 435 bp, Acinetobacter baumannii
atgaaatgcccaaacccaaagtgtgggaaggaaactcctgcctggcaatcgagcggcatgagcgacagttgcccgcattttttctgtgatacttgctcgaatgtaatccatagagagcaggaccatgcattactgtatgaaaatgaaatcaatcaagagctcttggatcgaatagcagcaactcttccagattgcccttgcgggggtaggtttgttcctggtgcaaacccaaagtgtccgagttgcaagaccgagtacgtgcaccaatgggatgcagtgaaaaggttgaatgtaccttttatgccaatcttggatggttcctgcttgattcgagataggctgtattcgtatgaagtatgcattggttctaaaccaaaatactggtggcgtttgttcacaaatgccttaacaagtttaggcaagggacgctcctga

SEQ ID NO: 56170 - DNA, 276 bp, Acinetobacter baumannii
gtggcttcagtctccgtctgctgtccctcctgttccgctactgaaggcgtgatgcgtaatggcaaaagtactgccgggcatcaacgttatctctgctctcactgccgtaaaacatggcagctcaccttcacttatgccgcttctcagcccggtacacaccagaaaatcattgatatggctatgaacggcgtcggttgccgtgccaccgcacgactaatgggcgtgggcctcaacaccattttgcgccatttaaaaaactcaggccgcagtcagtaa

SEQ ID NO: 56171 - DNA, 249 bp, Acinetobacter baumannii
atgacagtattaatgcatcaagctgtacaagttgaagaccttaagtttttaaataatttttttcaagagttaaataaaagtagtttaacttcatggtctctcatagctttattacgctcaacaaatgtttataaaaatcaaatttcattgtggaaagaaatgtatttatatactcagaacgttgttataaatgagggattaaacccaaaacgtgagatgtatggcttagatcgcggtttaaatatataa

SEQ ID NO: 56172 - DNA, 507 bp, Acinetobacter baumannii
atggataacgaatatgccaagttctttttcaatcggaaagttgatgtctgtcaactggagtgtattgagctttctcatccttcttttatgaatacataccgaatagtccgtaatgatgaccgaggtgtttatgttcaacataaggagggatccggtcaggtctattatgaatttttgccagcatctattcaaagatccggaatgctgggtgatctggaccagacattaacagtctctatatctggtttaggtgatgtaatgccggatgagtttgaacgggtaatcgaaggccaatatcccgatgtaaagccaacagtaaattaccggatttacagttcagacaatctgaattctccaatgttttatttactcggactacaactctcaagtgtcgccatgaaccataaagctgtgacattcaaggctgaatcaccacgattaaataccactaaaactggggacatttttgcactggatcgctttagtggtttgaagggggctatatga

SEQ ID NO: 56173 - DNA, 1260 bp, Acinetobacter baumannii
gtgcgctcaaaaaattttagttggcggtactcccttgccgccacggtgttgttgttatcaccgttcgatttattggcatcactcggcatggacatgtacttgccggcagtgccgtttatgccaaacgcgcttggtacgacagcgagcacaattcagcttacgctgacaacgtacttggtcatgattggtgccggtcagctcttgtttggaccgctatcggaccgactggggcgccgccccgttctactgggaggtggcctcgcctacgttgtggcgtcaatgggcctcgctcttacgtcatcggctgaagtctttctggggcttcggattcttcaggcttgtggtgcctcggcgtgccttgtttccacgtttgcaacagtacgtgacatttacgcaggtcgcgaggaaagtaatgtcatttacggcatactcggatccatgctggccatggtcccggcggtaggcccattgctcggagcgctcgtcgacatgtggcttgggtggcgggctatctttgcgtttctaggtttgggcatgatcgctgcatctgcagcagcgtggcgattctggcctgaaacccgggtgcaacgagttgcgggcttgcaatggtcgcagctgctactccccgttaagtgcctgaacttctggttgtacacgttgtgttacgccgctggaatgggtagcttcttcgtctttttctccattgcgcccggactaatgatgggcaggcaaggtgtgtctcagcttggcttcagcctgctgttcgccacagtggcaattgccatggtgtttacagctcgttttatggggcgtgtaatacccaagtggggcagcccaagcgtcttgcgaatgggaatgggatgcctgatagctggagcagtattgcttgccatcaccgaaatatgggcttcgcagtccgtgttaggctttatttctccaatgtggctagtgggtattggtgtcgccacagcggtatctgtggcgcccaatggcgctcttcgaggattcgaccatgttgctggaacggtcacggcagtctacttctgcttgggcggtgtactgctaggaagcatcggaacgttgatcatttcgctgttgccgcgcaacacggcttggccggttgtcgtgtactgtttgacccttgcaacagtcgtgctcggtctgtcttgtgtttcccgagcggagggctctcgcggccagggggagcatgatgtggtcgcgctacaaagtgcggaaagtacgtcaaatcccaatcgttga

SEQ ID NO: 56174 - DNA, 207 bp, Acinetobacter baumannii
atgatgtggtcgcgctacaaagtgcggaaagtacgtcaaatcccaatcgttgagagaatgtggcaagctatcgcccaacaaatcgctgcagccgacccaaaaccgctacgcggtttcggtcggctgagctcaggcgttagacatcatgagggtagcggtgaccatcgaaatttcgaaccaactatcagaggtgctaagcgtcattga

SEQ ID NO: 56175 - DNA, 780 bp, Acinetobacter baumannii
gtgaccatcgaaatttcgaaccaactatcagaggtgctaagcgtcattgagcgccatctggaatcaacgttgctggccgtgcatttgtacggctccgcagtggatggcggcctgaagccatacagcgatattgatttgttggttactgtggccgtaaagcttgatgaaacgacgcggcgagcattgctcaatgaccttatggaggcttcggctttccctggcgagagcgagacgctccgcgctatagaagtcacccttgtcgtgcatgacgacatcatcccgtggcgttatccggctaagcgcgagctgcaatttggagaatggcagcgcaatgacattcttgcgggtatcttcgagccagccatgatcgacattgatctagctatcctgcttacaaaagcaagagaacatagcgttgccttggtaggtccggcagcggaggaattctttgacccggttcctgaacaggatctattcgaggcgctgagggaaaccttgaagctatggaactcgcagcccgactgggccggcgatgagcgaaatgtagtgcttacgttgtcccgcatttggtacagcgcaataaccggcaaaatcgcgccgaaggatgtcgctgccgactgggcaataaaacgcctacctgcccagtatcagcccgtcttacttgaagctaagcaagcttatctgggacaaaaagaagatcacttggcctcacgcgcagatcacttggaagaatttattcgctttgtgaaaggcgagatcatcaagtcagttggtaaatga

SEQ ID NO: 56176 - DNA, 960 bp, Acinetobacter baumannii
atggtcgctcaagctatccgaaatattatttctcctaaatcagttatagctcagtatcaaaagatagatttttcaaataaaggaactatcccaattcgccatttaaatatcggatttgatggtaaagaaattgatatcgagttttacgtcaacaaccagtttgcaactttgttttttgcaacgctttcggtttttttgacctatggtgaagatctggtgattgaaacagctcgtcaccaccgtgaatttattcaagatccgattttaaaacagcgtgttacttcgctgattggtcaagaagccatccattcaaaattgcataatgagttcaatgatgcaattaaagagctggaatatccggtcgatttttatcgtttcttgggtgagaacttctttaaatatgtgttcttaaaattcccgcagccattaaagctttcacttatggcgggtattgaacattttacggcggtacttgccgaatacatgatgaagcatgaaaagaatttctattataccgacgatgccaaaagtcgtgccttatggatgtggcatatgcttgaagaatctgagcataaagatattgcctatgatgtatatcaattactcaatggtagctacccactacgagcttctggcttctttttagcattcttcactattttaggtctaatccctgcgactaccttgtttattccggttttaagaaaaccgcaggaaatgttgactagaaaattctggaaagacgcgcgccgtggtgtaggacttatttttggtccaaaagatggtgtattcggtagcaccattggccagattttcgattatttacgtcctgacttccatccaaatgaccatgacacgaccgaatatctggagtactacaaagacaaattactcaaagaaggcggcgcgattgcaccttactttgtgaaggaatttaccccacctgtacgcttgtcttaa

SEQ ID NO: 56177 - DNA, 750 bp, Acinetobacter baumannii
atgcatgagattaccttgaacgaagtgcgtcaattaatcgcatctcttcgcactgtttacgctgctcagttcaataagcaatttccagcaacaggcgaaagcgcaattcctctgtcagtggttgagcaaatcgcacttaaaacactggttggcgttcaacaaaaccaatttaacaacgcacttgctcgattacttacagcaggtggacgttttatgccgtcatttgctgagtttcgcacctggtgtattggtgaaagttggatgtctccagaggaagcttggtcacgtgcatgtaagtttacgactgacagtaccgtggttattacacaaattacaaaatatgcattagacgaagtgatgtatttgatcgaagccggccaaatgcgagcagctcaagataatttcttcggaacctacaacgtgatggtggctaaagctcaattgaaaggtcgtcagcaagagttttacgctccaccgctacaactagaacacaaagaacctaaacacgttcctgtgagcaatgacgaggctcaaaagcatctcaaatcattgatggaaagattaaaaatcaatggtcgtaaacctgcaccagttcaaaaacttgaggcaaaagaaaaagagcctgagcttataaaagagttgggccctgatcctttcgataatccacacgaatacgcagagatgtgccgtcgggagggtatgccaatccctagaaatattcttcagctaattgatggggcgaatgcatga

SEQ ID NO: 56178 - DNA, 207 bp, Acinetobacter baumannii; identical to SEQ ID NO: 46771

SEQ ID NO: 56179 - DNA, 159 bp, Acinetobacter baumannii
atggaaaacctcactgcattttcattatttgcaattgttgcctcaattactccaggcccgaccaactttataattttaagtttaagtagtcattataaaatttctaaaacacttcccgttattttaggttcttgtattggagcagcttacttgtattag

SEQ ID NO: 56180 - DNA, 258 bp, Acinetobacter baumannii
atgcatcattatgaagactctaaaaatgatttatggtgtttacctatgagtgaattcaaggcaaaagatgtggttaagcatgttcatacagatattgactggaaggtacttgagtcaacaaatgagtggataaaagtcgaaaggcagaatgaagaagggcaaaggattgttgaagaattcgcgcctgaatttctggaactagtttctagaaaatctggtggatttgtaatgggccttaagccagaagattttcactaa

SEQ ID NO: 56181 - DNA, 237 bp, Acinetobacter baumannii
atgacaattatcacattgagagatgttgagacaaatgagcgggtaattgtaaggtctgtaatcgaccctgtagcaagaaaagataaaaagggtaacattcaaattattcaaattcataagtggttatatgatgaatctgatcattttgttgatgaaaagttttatggggcgcttaataggggaaaagttggaatgtatgtaagtttgcagtatgtgattatgaaaattgaaaactaa

SEQ ID NO: 56182 - DNA, 345 bp, Acinetobacter baumannii
atgaatgagaatgcagagctaataaagtacatcgacgtggctgagaacgtgtatgaacgtgtttatcagaataaccaagtttctaataatttaattgttaatcttaatcgcattatggcagagataaaaaatcaagctgcggaaaaaaaactaaaactgaaatatagttcaatcgacttcgaatattgtttaagtttgcctttatcagatcgagatgtaaaagtagatttaagccttgttccgcattttgaagatcgtgaggaaagtattctatggttaaccaattttgttgggaaaatttgtgaacccaaaaagatgaaaaggcataaattgaatttccgctaa

SEQ ID NO: 56183 - DNA, 738 bp, Acinetobacter baumannii
gtggttactcgtggagaatttacaggtacggagttatttttaccgtattacacctcaacccgtgccaataacatggcagtaattgcatggagttataacccatctactggaaatctcagtaaaaccgagcaaatcgtttatacaagtaagaacaatgttgtttatacaactgataacagcgcgaccagcggcaagttggttactgttgagacttctggcgaacttcgctccaaggggtttactgttgattcgaacggggtttacaaggcagcttcaccgattgcaagactatttgctgattcacttgaactcaatgaagatgcctcaaaacagccgattaactttgaaaagttaggtacaggtgactacctgataaaaggttctctcggatttgctaaagaaggctggtacattgaaatgcctaaagatgcaaacggtaatgttcttgttgctgtgtcttatgagcagcatgaagatggggatattgcagtaaaaacctacaagaaaaaatttgatatcgaaacagcctcaattattcctgatttcgataatcctgtagatattccagaaactcgctggattgatattcgattgcatgaagaactcgaaccagagcctgaagaaccgttgagtgaaacaccattggagttccagcctactaacttatctcaggcagtagctgcagccatgattggtgtggaaccgccagaaatctccgacacagatgcaacatcttaa

SEQ ID NO: 56184 - DNA, 1236 bp, Acinetobacter baumannii
atgctaaaagcacaaaaacttacattagcagttctcatttctgcggcaataatttcctcagctcaggcaagcgagcaaagtgaggcaaaaggatttgttgaagatgcgaacggttctattctcttccgtacaggttatctaactcgtgacaaaaaacagggcgcgaaagataccagctcagttgctcaatcagcaattgtaagtatcgaatctggctttacccctggtatcgttggtttcggtgtaggcgttgttggtgatggatcatttaaaattggcgaaaacaaaaacgctggaaaccaaatgattccaaaacacaacgatggttcagcttacgaccactgggctcgtggtggtggcagcgttaaggcacgtttctcgaatacaacagtacgttacggtactcaagtactcgacttaccagtccttgcaagtaatacaggacgtatggttcctgaatacttcacaggtactttattaactagccatgaaatcaagaaccttgaggttgttgctggtaaatttactaaagaccaaatgtctgaccaaatcaataccgatgcggatgcttctggcagaggtcttgaccgtgcaattgtttggggtgctaaatataagtttaatgataacttaaatgcatcttattatggcttagacagcaaaaatgctcttgaacgccattatgctaatgttaactttaaacaacctttagcaaatgacagttcattaacttatgattttagtggataccatactaagtttgatgcaaatgcacacacttattcagcaactggaactgtagcaccaaattatgctgcggatggtatagctggcgaagaaaagaccaataatatttgggctatttcaggaacttatgcgactggtccacatagtgtgatgttagcatatcaacaaaacactggtaatgttggttacgactatggccaaaatgctgatggtttccaaagtatttatttgccaaactcttatatgtctgatttcatcggtaaccacgagaaatctgctcaaattcaatacaatgttgattttggcaagttaggcgtattacctggtttaaactggaccactgcatttgtatatggttgggacatcaaggttagaaatgtaactgatgatgctcaagaacgcgaattctttaaccaagtgaaatacacagttcaaagggcactgttgcaaatagtcggtggtgataaacttatcatccccttttgctga

SEQ ID NO: 56185 - DNA, 561 bp, Acinetobacter baumannii
atgccaaatttagaaacctcttccaaaaaattacatgttattcgtacggctataaacttatttactacctatggatttcacaccacgggtgtagatctgattgttaaaaaatccggaattccgaaagctacgctctataactactttcactcaaaagaaggtttaattgaaatgtgcatcgcctttcaaaaaagcctgctgaaagaagaagtactcgagattatttactcaaaccgttactgcacaccaaccgataagctcaaagaaattgtggttttacatgttaactctaacagtctgtatcatttgctacttaaagccttttttgaaattaaagggacatatcctcaggcttaccgtatggcaatcgagtatagaaagtggctaattcgagaactttttgacttaatttttagtttggaaactcgtgccttaaaacctgatgccgatatggttttaaacctaatagatggtttgatgtttgggtttttaagtaccaatagtttgagtgaaagggatgaggtgttggagcggttttttaaacctacttatttaagataa

SEQ ID NO: 56186 - DNA, 576 bp, Acinetobacter baumannii
atggaaacaatattgggtttatgtattggtgtgggcctgagcgctgcctgcggttttcgggtgtttgtgccgctactggttatgagcattgccaccatgatgggctggtttgagccatcaaaaggctttgagtggttagctctgccatcggtgtgtttggctttaggtgtggcaacggtgtgtgaagtcgcagcttactatatcccgtgggtcgataatgccttagacacagtcgcaacccctgcggcgatgatcgcgggtacgttagcgacaatggcggttagcagtggagaaatgtctcagtttgccagttgggcagcagccattattgtcggtggtggtacggcaggtgtggtgcaaatgagtaccgttgctgcacgtggtgtttcaactgcaaccacaggtggtttagggaactttgttgtggcgacaggggagtggattggagcaatcttactttcagtttcagctatgctggtgcctgcgcttgttgcaatagtagtactgattgcggttatttgggtggtgcgttggattcgccataaaaagcaagaacaggctcatactccgctatag

SEQ ID NO: 56187 - DNA, 300 bp, Acinetobacter baumannii
ttgctaaagcttaaaaatgatttgattaatgatggttatttgtttgaggatggacattactatcggggagcaaattttaatgttaaattatttttaagagatattgttgagagagaaaatcaatatcgagcaaaattgaaaattataaataatatggatgagttgagtagtgtgattgaaaaaaaacctaaaaatataaatatatatgagtttttttctaatgcaccatatacaaatcttgatgagagtataaaagtatattttaaaaactatgattatttaaagggtgttttagtatga

SEQ ID NO: 56188 - DNA, 957 bp, Acinetobacter baumannii
gtgccatttaactttgatgataattctattgttcccagtagaatatatactcttattggtaaaaatggagttggtaaaactcaattagtatctaaacttccagtggatatagcaaaatctaatacagatttattttcacccaaaattcctatttttagtaaagtgatagctgtatcatacagtgtgtttgataaatttattattcctgaaaactcttctaaaattaattatgtttactgtggacttcgtcaaaaaagcaatcaaaaagaatctattttatctgaaagtgagttaaataatcgcttcttctcatctatacagaaagtacaacgtagtaaaagatttcaaagttggtgtgaaatatgtgaaacttttttttccaaagactttgtggaaagttggatagagtgggataaagaagtttttgaagatagactcaatatagttgagtttaataaaactctaaaaacttttagctctggtcaagcaatatttatatatattcttactgagatattagcaaatatcagatatgactctctgatcatatttgatgagccggagacccatcttcacccgaatgctatttcacaattaattaatagtattcatcttcttgtaaaaaaatttcaatccttttgtatcatagctacacattcacctattattgtccaaggaattttatctaaaaatgtatatgttattagaaatgaaaataacgttttaagtgcaaaacatcctgctatagagacttttggagaaaatctaacgaaaataacagaagatatttttggagctagagaaacaccctctcaatttaagaaagagttacagttgttaataaataaagggtactctttcgatcaaataattgaaattttacaatcaaaagatgtgcctcttagcttaaatcttactgttttattaaagagtatggtagctaatcgttatgattaa

SEQ ID NO: 56189 - DNA, 822 bp, Acinetobacter baumannii
atgttagagattgctttaggctcagcattgatatattactttgcgacagaagccttcgaaatagaaaaaaaaccgccgggaactgtttattatacagagactgccgattcacgtaatttatcttttcatcgaaatcatattgaaccagttactataaaaccagctgttgaagaccagtttcgtggaattgttcgacaagcctacgattatagttgtgggtctgctgcccttacgactttattaaatggttatgttggtacgagtttaacggaacagcaaacaatgagtggtttgctacagtacggtgagtatcaacgtattattgaacgccgaagcttttcgctccttgatatgaaacgctttgtcacagcaattggtttagagagtggtggttaccgaggagagttttctgatttagttaaactcggtcaacctgcaattgttccgatttcatatgctggttttaaacattttgtcgtatataaagcttataaagatggacgagtatatgtagctgatccagctttagggaatatcagctttgatgaaaatcgttttaaggaaatttgggataataatacgttatttgtaatttcagttcctgagtctcagcgtaaagacttattagcattaaaagattcggatatgcgtcatgtagaggatgcaacagtcaatagatatgcttttgttgatgtgcaatatcccacatataaatatgaccgtttagcaaataaggcttctacgatgcggagagttttggatactgatactcattcctcaacttataatcagccgatagatacttggcgaattcaaacatga

SEQ ID NO: 56190 - DNA, 831 bp, Acinetobacter baumannii
atgaaaactcttattttgttgcctttacttagttgcttgagcctgacagcctgtagcttgcctgtttcaaattcgtcctctcaaatcacttcaactcaatctattcaaaccattgccaaattatttgatcaggcacaaagctctggcgttttagtaattcaacggggcccacatctacaggtctatggcaatgatttgagtcgtgcacataccgaatatattcctgcttcaacctttaaaatactcaatgccctgattggcctgcaacatggtaaagccacgaccaatgaaatctttaaatgggatggcaagaagcgcagttttgcagcctgggaaaaagacatgactctcggccaagccatgcaagcttctgctgtacccgtctatcaggaactggcacgtcgcattggtctggaactaatgcaacaggaagtgcaacgcattcgatttggtaatcagcagattggtcagcatatcgacaacttctggttagtcggacctttgaaaatcaccccggaacaagaagtcgaatttgcctctgcgcttgctcaagagcaacttgcctttgatcctcaagtccagcaacaagtcaaagccatgttactgttacaggagcgacaagattatcgactatatgccaaatctggttggggtatggatgtggagccgcaagtcggctggctcaccggctggatcgaaacacctcaggacgaaatcgtggcattttcactgaatatgcagatgcaaagtaatatggatccggcgatccgtcttaaaattttgcagcaggccttggccgaattagcgctttatccgaaagctgaagggtaa

SEQ ID NO: 56191 - DNA, 861 bp, Acinetobacter baumannii
gtggtttatgtcgcacttcaagttttactctgccattgtaatgaaaaagagtttatttactttttcacatctagacctaaagttaggtttgatctctcacggaaaattaaaattggaaagaatgttggtgaaatatttttaaatttaattatcaattgttcagaaaaaagaaaagttaaggttaatattgatcctgattattggcgagctttcaagaaaataattattaatgaaaaatttataacttttaagttcgatgaagatgttaaaataacatggccaattcatatttttttatatgaatataatgttgaattaggtcttgaaagtgaagttcattatataggaaaaacaaaagaccccgtaagtcgtacaatggatagagagcatcgtggctattccgatatgctttattacttgctgcatttaaaagaaaagagagatatttttctgaatattttaatttttaaagtatcagttatttctcctccacgtaatagtattggaatagtttcaacaaactccgtacttgatcatattccaaaggaattggaaatatttgttattgaatattgtctaatatattattttaggccatcaattcaaaaaggtgatatggatacttcttggagtaagtttgttaattattttaggagtttacagaaggaaggaataaacgctttgtattttaagttggaaatgaaagaaagtacagaatataatagttggggtacacctaatttagctgccaagaaaagccattacttttcttggcaattaaataaaagtggacttcaaatggaaagattttatgaaagtaaagatttagatgaagaggtttttaaggatttctttatttaa

SEQ ID NO: 56192 - DNA, 261 bp, Acinetobacter baumannii
atgattcgtgtaagacactacacgaatagaaagggttcgaatgcaattgaacttacacagaaaatacttgctgtagataataatagagtatatgttgagccagcgaataaaaaacctttatctcaaattgaagctgaagacaagtatcagattaaacaaggtaaacgaagagattatgttgagtttgatgttttagaaagtagaactgaatgggttaagaatccacgttaccatagagaagaacggcagagtaaaacttga

SEQ ID NO: 56193 - DNA, 150 bp, Acinetobacter baumannii
atgctcgaaatggcaaaggagaaagagcaaaatctaatttctttaaaaatagtgaaattatttcaaacaatatccatttccaaggtcaatattttgatggcgaaacagggcttcattacaaccgttatcattattattcgtcgtatttag

SEQ ID NO: 56194 - DNA, 459 bp, Acinetobacter baumannii
atgcaagaatccaattttgatttaagtgctaatattgaggaatatttagtcaattgtggttggtatacaggaagaaaaatagatagtgaacacatcatagaagcatggaaagcggataaatataaaatttttaattctgctatagtttttgtccaaagttttaatggattaaatatagctcatgaggcatatagaggaaaagaaaaagatttttcgtatttcaattctattaaagcaacagaaggtatagatcctgcctggatatttgaggagtattcattaaaggcaggaagtgaccttttaccaattggattgggctatagtgaacatttaacatattttatagatccatcatttaagttctatggtggttatgatgactatttttgcaaaattggggattcagttaatagcttttttaataatattttttatgaaaaaaactttattcaattgtaa

SEQ ID NO: 56195 - DNA, 231 bp, Acinetobacter baumannii
atgctcactaacttacagcttcgcccaattgttgtagctgagtttaatctcaattcaaattttaactataagtcttatttttctttgagattttatagtatatttttagctatattggtttcctttttactatcttttttatctactagtaatgtttggaaagtagttttattactgggatgtattaaagccttagaagcaatttcagatattatttatgcatatgtataa

SEQ ID NO: 56196 - DNA, 225 bp, Acinetobacter baumannii
atgttattcaaaaaattcgctgttgctgctgctgttgctgctactttagctttcgttggttgttctaagaaagaagaagctcctgctgctaacgctgcatctgaagctactgctgctgcatctgaagctgctactgctgcttctcaagctgttgatgctgctgcatctgaagctgctgcttctactgctgccgcttctgaagctgctgcttctgctgcacactaa

SEQ ID NO: 56197 - DNA, 858 bp, Acinetobacter baumannii
atgtttataacaacaactcgccccaatgatgctttaattgaacagttactaccaatcttggaagaagctagccaaatcttattacaagaatatcaaaattattcggctggatatgaatttacgattgaagaaaaacatgatgattcacctgtaacgcaagcagatttaaaggtaaatcgttttttattaaagcatcttgcagaaattacacctgagttaccggttttatcggaagaaagtgactatagcgctcgccatgcttggtcttcttgctggatgctagatccacttgatggtacgaaagagtttatacatgagcgagatgagttcacgataaacttgagtttgattgaagggcgtgaaacgattttttcggtgattgttgtgccatgtgagcaagttgtttatttaggttatttaaaagatttaccttttaaatatagctttagccaacaacaatggtatcaatatcaaaaaacaccttattcaaaacaagctcctgtacaaattggtttaagtcatagtagtaaaaatccgaaatatcagaaattcattgaacctattgaaaagattcgtaccgtaattcgacgtgaagcaggcagcgcttataagttttgtatgatgttagaaggagagatcgatatttatcctagatttcatccgacatcagaatgggataccagctcaggtcaaggattattagaaagtataggtggaggtttactcactctaacaggtaagccctttgaatataaccagcgtgataccgtattaaatgggggctttatcgcatttcgtgatcaggaaagcaaaaaaatagcatttgaagctttagctcaatcaggtgttttggattga

SEQ ID NO: 56198 - DNA, 186 bp, Acinetobacter baumannii
atgtatgtctacagacaattttatatgaatatggatatgccaacctgtcaggatttgcttcatgaaatttgggagccaaatgaaacatggacaggactcattcatagtattaccttacagcttcaaggccgtaaggctaccttagaacttcaacaatctttgcaacaaaccaatgatttagtttaa

SEQ ID NO: 56199 - DNA, 1908 bp, Acinetobacter baumannii
atgacaacagagctatatccaacgtctagctttgctgatgctttggtatctatggcactcgatgacaagattggccgccgttcgatcgatgagattgatcttgaaaacatctatcggacctataatgatgtagttgattattttggtacgccgctagcggctgagttctgtactaccattgatgatacgaatctatcttttgaagagctggttaccaatctttgtgatgcggtgttttgtactgcatatcggcaaaacaataagctcaagctttattttgaacggccaactgataactcggtaatgctgtttaacttcaggaatatcattccggatagttacaagcatgacctgacctttggcgtgatggatgactacgacggactgatctatgaatacacggatccgaccgacgatagccgtatcaatatctatttaccggataaaggagccaaaaacccaaaagaggtgaaatctgttggtgtacgaaacaagtggcaagcgcatttcaatgcataccggatttggaacaagatgcgcttccagcgcaaatccattacctttgatgcggcaccagaatcagaattactggttttacgtgaccggattgctgtagcggattatcgcaatggtattcatcaaagcggcgaggtggtacagcaagaaggtttaatcctcaccttaagccatgatgtcgatttcattgcaggcaagagttatgtgatttatttgcaaatgggggatggtaccgtggacctgattcccgttacgccgggttcagccaagaacaaagtagttttagggcgtttaccgaacggggccttaaagcttagtcccgatgactttgtgaatactatctacaccgtagttaatgacgatactaaaggctcattgccttatctggttgcaaaaagagaacctgctgaccagttctctaataccattacggcaattaattacgatgaacgttattacctcaatgacaaggactttattgatgtgccagtagatgattcaccgatttacattcgatatgaccagctggatataaatctggtgcgtttgtatcagatgcaaagaggtgatttaccaacgactggcgaaatcagttttgtagttgaagcaggtgcactggtttcaagttcaagttcttatcgaccggaaaccagatttgtctataaattcgactataactctagtcctgcaaaacgagagtatatcgttccagctgcctcagaattaccggcgatagatacaggggagttcccgcccgatctggtggtaaatctgacgattaaaggtgctgttgttggacgtggtggtgatggaggattgccacatttggcatttggtgcatggtctaccgatccggattataactttaccaaaacccgccgtgatgggtatcagggagcacccggtttgttgaaccggcacagtaaactaaatctgattattgatggtggaactctggctcgaggcggatctggtggcggcgcaacaccaagcggtatttacactgagttaacatatggagtccaaggtatacccggtggagctggtgcaccatttggacgggtcatgacgggacagcccatttcaaatgactcgcaagactggcgttggtacttaaatggtgactttatggttgtcaaagtaaccgatgctgaagcttcggtacccggtaaaggttaccgaacccaaaatgatcgttatggatctccattatcaggtgatggcggaaattggggccaacgtggcaccaaatccaccaatgatggaacgtggaactggcaataccatggcacaactgaaggtcagccggggccgggtggacctgcaattgttggggtggcaccgcttacaactcaattgattaacggagggaaaatcttacaaaccctttaa

SEQ ID NO: 56200 - DNA, 747 bp, Acinetobacter baumannii
atgaataaattatataagaatgaatctccagaaatgattctagcttttgagaatgctataggtacatttaaatatttttggcgtgaactttattgggaatctcgacgaattgttcctgctctagagctggcttatgtgaagtgtgcatttatccaagaaaaccttgaagataaaaatgaacctttaattgagtatatgtggattgatcaagttgattttgatgggagtacaattacaggaattttgttaaatgaaccttatattattgataatgtgcaagctggtgaaactgtaaggcttcaatttgagtctatagttgattggatgtttttatctaatggcactgttcatggtgcgtttacgattcaagaatatcgtaagactttaaatgcatcaggacgtaaagaatatgatgaggcatgggggattgattttggtaatcctgatgaaattcttctagtttatgaccaaaaaaattgtcccgaaaatctagaagaacatcctatgtgtaggagtattttggaacagttcataaatattataaatacagaccctacaatcattactgaaaaagatgaaagtggtaatcaattattacatcgtgaagttatagcgggtaattatttatttgttcaagaactcttaagattgaatgttaataagttagtaagaaataaacaattaatgattcctttagatttggcccataagatggggtggtccaatattgtaaatttacttaagtag

SEQ ID NO: 56201 - DNA, 1014 bp, Acinetobacter baumannii
gtgaaatttgtcgtgtacagagcgattaaatataaaactcctgtaattaccgcgtggtccgcaccgggtactgccctgttagttaccctatttccaaacatctcattgaatgaagcagtagccgcctatattacttctgccatcgttattttcttaattggcattacaggttacttcgacaaattactgaagtggattccgcaagacgttgctgcgggcatgatggcaggtattctttttcagtttggtattagcctatttaccgcatctgatagcatgcctttgattgtctttagtatgctcattgtctttttaattgccaaacgtttaatgcctcgctacaccatgatttgggtgttagctgctggagttttattaagcctcattttaggcaaaatgaatccggttgatgtgaattttaatttagcaatcccccagtggattagcccggaatggacttggaactcaacactcaacctcgccgttcctcttattttagtcagtctaactggccaatttttaccgggtatggcgattatgaaactgagcggttatgacacgccagccaaacccattattacggcgaccagtattgcctcgttagccgttgcctgtgtcggtggtattaccattgtacttgcctcaattactgctgctttatgtatgggtaaagatgcacatgaactgaaagaaaaacgatatattgcaggaatcgccaacggaattttttatattttgggaggcttatttgctggcagtattgtcatgctatttagcttacttcctaaagagttggtggcagcactcgcaggtttagctttgcttggtgcaattgccaccaatatttctgttgccatgaaaaatgatggtcaacgtgatgctgcacttattacctttttagctagcgcatcaggtatgcattttcttggattaagctcagttttctggggtatttgtattggtgtaatcgcccatttcattcttaccccacgctcaactccagccataaattaa

SEQ ID NO: 56202 - DNA, 2973 bp, Acinetobacter baumannii
atgccacgccgctcaatcctgtccgccaccgagcgcgaaagcctgctggcactgccagatgccaaagacgaactgatacggcactacacgttcaacgaaaccgacctgtcggtgatccgtcagcgtcgcggcgccgcgaatcgattgggcttcgctgtgcagctttgctacttgcgattccctggcacctttttgggcgtcgatgagcctccgtttccgcccctgttgcgcatggtggccgcgcaactcaagatgccagtggaaagttggagcgagtacggccagcgcgaacagacacggcgggagcacttggtcgagctgcaaacggtttttgggttcaagcccttcaccatgagccactatcggcaagccgtgcatacattgaccgagctggccttgcagaccgacaaaggcatcgtgctggcgagcgcacttgtcgagaatctgcggcggcagagcattatcctgcccgccatgaatgccatcgagcgcgcaagcgccgaggccatcacccgtgccaaccgacgcatttacgcggcgctgaccgattctttgttatcaccccaccgtcagcgcctggacgaacttctcaagcgcaaggacggcagtaaagtgacgtggctggcatggctgcgccagtcgcctgccaaaccgaactctcgccacatgctcgaacatattgagcgcctgaaatcctggcaagcacttgatctgcccgcaggcatcgagcggcaggttcaccagaaccgcctgctcaaaatcgctcgtgaaggtggccagatgacgcctgctgatctggcaaagttcgaggtgcaacgacgctatgccacgctggtagcgctggccatcgaaggcatggccaccgtcaccgatgaaatcatcgaccttcacgatcgcatcatcggcaagctgttcaacgcggccaagaacaagcatcagcagcagttccaggcttccggcaaggcgatcaacgacaaggtgcggatgtatgggcgcatcggtcaagcgttgattgaggccaagcaaagcggcagcgatccgttcgccgccatcgaggccgttatgccctgggacaccttcgccgccagcgtcaccgaagcgcaaacattggcgcggcctgccgactttgatttcctgcaccacatcggtgaaagctatgccacgctacgccgctacgcgccgcagttcctgggcgtgctcaaattgcgggctgcgcccgccgccaagggtgtgctcgatgccatcgacatgctgcgcggcatgaacagcgacagcgcgcgcaaggtgcccgccgatgcgccaaccgcattcatcaagccgcgctgggcaaagctggttctgaccgacgacggcatcgaccggcgttactacgagttatgcgccctgtcggagctgaagaacgcgctgcgctccggtgatgtctgggtgcagggttctcgccagttcaaggacttcgacgaatacctggtgccggtcgagaagttcgccactttgaagctggccagcgaattgccgctggcagtggccaccgactgcgaccaatacctgcatgaccggttggaattgttggaggcgcaactcgccacagtcaaccgcatggctgcggccaacgacttaccggatgccatcatcaccaccgcgtcaggcctgaagatcacgccgctggacgcggcagtaccagacgccgcgcaagccatgatcgaccagacagctatgctgctgccgcacctcaaaatcaccgagttgctgatggaggtcgatgaatggacgggcttcacccgccacttcacacacctgaagaccagcgacacggccaaggacaaaaccttgctgttgacgacgatcctggccgacgcgatcaacctgggtctgaccaaaatggccgagtcctgccctggcaccacctacgccaagctgtcttggctgcaagcctggcacatccgcgatgaaacctattcgacggcgctggccgagctggtgaatgcgcagtttcggcaacccttcgccggcaactggggtgacggcaccacgtcatcgtcggacggccagaacttcagaaccggcagcaaagcagaaagcactggtcatatcaacccgaagtatggaagcagtccaggacggactttctacacccatatctccgaccagtacgcgcccttcagtgccaaggtggtcaacgtgggcattcgtgattcaacttacgtgcttgatggcctgctgtaccacgagtcggacttgcgcatcgaggaacactacaccgacacggcaggcttcaccgatcacgtgtttggcttgatgcatttgctgggatttcgcttcgcgccgcgtatccgtgacttgggcgaaaccaagctattcatccccaagggcgatgccgcctatgacgcgctcaagccgatgattagcagcgacaggctgaacatcaagcaaatacgcgcccattgggatgaaattctgcggctggccacctccatcaagcaaggcacggtaacggcttcgctgatgctgcgcaaactcggcagctacccgcgccagaacggcttggccgtggcgttgcgcgagctggggcgcatcgagcgcacgctgttcattttggattggctgcaaagcgtggagctgcgccgccgcgtccatgcggggctgaataagggcgaggcgcgcaacgcgctggccagggcggtcttcttctaccgattgggtgaaatccgcgaccgcagttttgagcagcagcgctaccgggccagcggcctcaatctggtgacggcggccatcgtgttgtggaacacggtatatctggagcgtgccaccagtgctttgcgtggcaacggcacggcgctggacgacacattgttgcaatatctgtcgccgctggggtgggagcacatcaacctgaccggcgattacctatggcgcagcagcgccaaggtcggtgcggggaagtttaggccattgcgaccgctgccaccggcttag

SEQ ID NO: 56203 - DNA, 420 bp, Acinetobacter baumannii
  misc_feature (395)..(404): n is a, c, g, or t
atggaactacaaggcatttgccataaaatgcatgcaggcctaaaagatgctagtgtaactgatcaacagacaaccaaggcaaatgttgaatacaaatttgtattagaccgttcagaaattgatcttccttttaatctaggacaagaactagaaatcgaatggacaggtaatatttattgcacctcttgtggtgctaaaacaccaaagtcttactcgcaaggccactgctttaaatgctttaaaacgaaagcggaatgtgacctttgcattatgaaacctgaaacatgccactaccatttgggtacatgtcgtgaagatgactttgcgcacagcgtatgttttcagcctcatattgtgtatttggcaaattcaagtgctttaaaagtaggtattannnnnnnnnngtattactcgcgttag

SEQ ID NO: 56204 - DNA, 942 bp, Acinetobacter baumannii
atggaatgtatgagaattcagcctgtaacgagtcatcctggagaaaatgctttatttattgtattaggattagctcaaggtgattctgttgtagaaaaagtaaaagattttgctggtaaattctctgcgttaaccagaagtttgtctaaccgttatcctgaaactaaatttaatgccatattaggttttagctcaaacgcgtgggatattttatttccacagcaagcaaagcctcaagaattagaaacatttcaagaaatcaaaggcccaaaatacacagccgtttcaacacccggggatttattctttcatattcgtgctgatcgacaagctttatgttatgagttaggaagtatcatcaatgaacagttaggtaaagtaacttacccaattgatgaagtgcatggttttcgttatttcgatgggcgtgcgattattggctttgtagatggaacagaaaatcctgaacctgtaattgctgcacaatgggcattagtgggtaacgaagatcctgactttactgggggaagttatgcatttatccaaaaatatacccatgatatggaaaaatggcgtgcattaagcgatgaggaacaagaaaaagttatcgggcgtaaaaagttcaacgatattgagcttgatgatgacgagaagcctttaacagcacataatgtagtaagtaaagcgcatgatgcagaaggcaatgaactaaaaattatgcgtgcaaatatgcctttttcgaatccatccaaaaatgaatatggtactttttttattggttactcacgtaaatttagtacgacacgtcaaatgcttgaaaatatgttcttaggaaatgagcaaggtaatcttgatcgattacttgactttagtactgcccaaacaggaactctatttttcgtaccgacagtagattttctagatagcttgggtgacgagtag

SEQ ID NO: 56205 - DNA, 213 bp, Acinetobacter baumannii
atgtcacttgtccaccacggtcagtttgtaccacaggaatgtttgatggaatcagaatatgttctggttttccagcctgaccttgagttagtacttcatgatgctggagtaaccacagctcgtctgctgtattttcatcacgttgattggtcaggttcttcatcgattcgaatttgctttgataatcttgtaaatcgttccactgacgaataa

SEQ ID NO: 56206 - DNA, 177 bp, Acinetobacter baumannii
atgatccatgggcttgttaaccaactgcctcctgaagagaccttaaaaactgcgacagccattgcaagccatgctgtaacacaaattggttttcgaatccctacttctgaggttctaaaccaattaaaagcacaaactattatcaattcattgagtgaatctgatgcaaactgctaa

SEQ ID NO: 56207 - DNA, 165 bp, Acinetobacter baumannii
gtgaaatcaacaattacacatcctgctacaaccacacacggcaaactttctgctgaagcaaaacaagctgctggtattcaagaaggcttaatccgcgtttcggttggcttagaagatattaacgatattattggtgatatctcacgtggattagatttgatctaa

SEQ ID NO: 56208 - DNA, 1404 bp, Acinetobacter baumannii
ttgataacaaatgcctcttacgctaatccttttgaccccaagccagcttctggacaggttgaaattccaaatattggaagtggaatagggctgctcgaccaacagaaagaaaaatttattggtgaaaaagttttccgtgaagttcataaacaaatgccggtcatacaggatgtatggctagaagatcagttttttcaagttttctctaatattttaagtgaaactcagctggggcagccgatcgctctggttgtaattaaagaccctcaaattaacgcatttgctgttccaggtgggttatttgcattaaatactggccttatctcatcggcacgaaatattgatgaaattgcgggggtaatggcccatgaaattgctcacgtttcgcaaaggcactttagtcgttcggaagaagcttttaaaggacaaactcttttaagtttggctggtttattagcaggggtggctttagctgcccaggctggtggagatgctggtgctgctgttatgttgggtacacaagcagcacttcttgataaacagctcacttatagtcgtaatcaagagcgtgaagcggatcgaattggtatgcaatatatgtatgccgctggttataacccgcaaagcatggcggattattttgaaacgatgcatagagcgacgagccgtgtaagttttttaccagatttttggctgactcaccctcttacatctgaacgtatgagtgaggctcgcttgagagcaaaccagatgcctaaagttaaaagtcgaatatatgatgtcgattttgaaattttaaaatggtataccatggtggttgctggagaagctactgaaaatcagttgcaaagtctggcatcgcaaaaaaatctggcaggcttattggctttgtcggctttctatcttaaacaaggggattatactcaagcccaagcaacgttggagcaggcgaaatcaagcggtaagccattagtcgccttaattcaaacagatatttatttaggccagaataaacttgatcaggcctataattcgattgctcccttgcaaatgacaatgcctgaaaataaagcttttagctacaaattggctgaggttttattgcgtcaaggtaaatatgctcaagttcaaactttggtgcagcgttttattaataaaaatgcccgagatattcaaggttggcaattattacaacaagccgccaatttagataaaaattcaccattaagagctgtgaatgtattgcgatatcgtgctgaagcacagtactggtctggtagtgaagaggatgcaattaaatcgatgttgcatgcacaacgtcttgcaaaaggtaatcaggccatgtcagccagaatagatagtcgattaaagcaaatgcaagatgagcgacgaatgaaaatttaa

SEQ ID NO: 56209 - DNA, 363 bp, Acinetobacter baumannii
atggtcatgaacgcgagtgacattattgctttagcgtctggaacggcgacattagaagcaatgctcatgcatagaccaatggtcactttctataaactgcattggctaacttatttaattgctaaattcttggtgaaaataccttattactctttgccaaatatcatcgcgggtaaaaaagtaattgaagagctgattcaggcagatgcaacacctgaaaatttagcggctgaaatagaaaaactaatgaatgttgaaactgctcaaattcaagtaatgcaacatttaactatgcataaacagcttatttctggaaatacagaagatccagttcaagccattttgcaatgtttgaatagctaa

SEQ ID NO: 56210 - DNA, 171 bp, Acinetobacter baumannii
atgttcaaaaatgcagaaatttataatgaaaaaacagcattaattggtttagcaggcgcggcaacagtattcttaccagtagcacctttttttacagctggattatattacggaatatggaattactggcgaatacatgccaaatcacatttagatccagagtatgcttaa

SEQ ID NO: 56211 - DNA, 264 bp, Acinetobacter baumannii
  misc_feature (229)..(238): n is a, c, g, or t
atgattgattgggaaaatttacattacttttcagttttttctgaagagaagacactttcagctgctgcaagaaagttaggtgttgaccatgctactgttgcaagaagaattgcccagttagaagataatttaaaactaaaattagtggaccgtagacctcgtacttatattttaacttcagagggggagcgtctggccaaaatcgtgacacgtatgatggaagaaacannnnnnnnnngctcaggcaggacaacaggaaattag

SEQ ID NO: 56212 - DNA, 276 bp, Acinetobacter baumannii
atgatgccaatcatggtcgaagtcgtggatgaatcacagccggtgatcggtggtgaagacttccattgggcaacggcattggttgacgcaaagggcactctcaagctgtcaccggcagcgaaaaaacaggggatgcccttcaacattatggatggtcaattggctgtctattcacctaacggaactaaaaagagctgcggccatgagccttgcgaatatctcccggtaatgatgtccggagacgcaatcatggtcacttcatctttggttcattag

SEQ ID NO: 56213 - DNA, 300 bp, Acinetobacter baumannii; identical to SEQ ID NO: 49871

SEQ ID NO: 56214 - DNA, 555 bp, Acinetobacter baumannii
atgaacacattagaacaacttgtaaatcagagagtgcttgaggaaggtctgaaaaaggcgaagccattggccgcgcaaatggggcttgaatctgtacctgatgagatgcttgaaatgatctgcccaaacttgaactactctgggcagtttacgccagctctgtacgcgagatttcaaagcgtaaagcgattactgaaagagttgtcggaacaaacctcacctaagcacgggcatattgtgaagtttaccaaccaatatgggagctacgatgagtcagctttgctgttcaaagaaggcgacgtcagaaaccagaacttggttgcttgtgtgggcgggaagacgctaaatctcggagagctagagcttcgagattatgggctcaatatgcacatcggttgcggtggaccatttgagccgatctcagaagcgcagattcagtccttgtctgagtttgacttctatgagacgacctacagattctggggccagaatccatgtggaaacgggatgatagacatcaccgtccctatgaaacgttggttcttgactgtgtag

SEQ ID NO: 56215 - DNA, 387 bp, Acinetobacter baumannii
atgtctaaaaacgtcaacgatgttttttcaaaccgaacttctttggaatgtactgtaaatgcagcgctggatcgtcgtatcggtctgcgtgtcgggttccctcattacagagaaggagcaaacggtgtggtttgtgagatcgaagcagagtacccattgctcaacactcattcgagtgttgcatggcccctgctcgatgaactcaacagttacaccatccaaaaaaaccaatcgctcattgatcacattgataatgcggtcgctgaactgttgaaacacaaggctcgtctacagcttgatattcaaaagctgcaagacggtgacattgatctggtgaaacaggccaagcagcaatacgaagacaaccagatgtcgagtagcagctag

SEQ ID NO: 56216 - DNA, 2454 bp, Acinetobacter baumannii
atgcaacaaacattaaactttgatctatcagaacaacccatcccagtgcttttgcgtggggataagtgggattctgtttggtcagaactgactgataacgaggatttgaacttcgttgatgccagtagaggaaccagtctgtcatcgttgatcacgtcatcggttgagtccattcacacggccttaattgatgggtggaccatgatgatcggctattccagtggtaaagattctgaaacggtcttgcacctgttcctgatggccctgatccgggctgtaaggagtggggcgaccatcagccagcaccacttcatcttgcacactgacacactgatcgaaagcccagaggtaaggtggctggcggatcagaaactggccgagctggagcgtttcattgcgaaggaaaaccttcctctgaccatcgttctagcaaagcctgggatctcgcagagttggacgggccgaatccttactgggagggggttgcctacgttttccaactccacggcccgccagtgtagccaggatttaaaaatcacctctgccaaaagagcgaaggcagcttatatgcgagagcttcccaaagaggttcgacagaaagtctgccttttgctgggcagtcgtgatgctgaaagcactattcgtgcggccaacattgcaaaacagcgaggaagctcagatcgcgtcattaagacgaaagatgggggtgagctgtatgtggtgaaaaactggttggcgagtgatgtctgggagttcttactatccgctggcatgggctcagcatatcctctgccaagttacttggagagcaatgtcactacggcagagctttacaaggcggcaacaggggagtgcgtgtggtcggcaacagagaagaaggccagtgacgcctgtggcgctcgcttcggttgctgggcttgccaggctgttgggttggataagtcaatggagacgttgcttgccacggaccctgaaaggcatggctatatgtcggggctgaaccgcatccagcgctacttggcaaaacgccggtacgcatgggaagaccgccatcccgtaggtcgaacgatttacgagggcggatacatcaaaatacagccggacgtttacagtcctgttttcctagaacgattgcttcatgtctgttgcagcatggactacatggagcaaaagagagctgatgagctggcatacaagctggctactggtcaagcagaggataacgactggaaccgtcgaatggcagagccacaattccggatcatatcggaagaggctttagtccatatcgacttcatgtgggccttccatcatttcaatgataagcctttccatgccctggagatttaccacagggtttggtcgatgggtgatctggacttgctggaagacgagccgcagtgtgaaaccgttcctcagtcaccaattccgaagccattgtggttgaaggttggtcgctggggcgatggttcgctttctgatggcttggccgatccgttagcggaaatggcttactttgacggcggggatgacccgttggcagcgcaagtgatcaataccgcagacggaaagagaagggtggtttgcttcgcagaagatgatgaagtgaaagtcgatcccgactccgctgcgttcatcatctggaacgaatacccgcgactaagggagtctgtactaaagggacattatacgcccggtagtgcagcgcagttctaccttcggttcggagcaatccagcttgcgaaaggaaaaggcgctttgtatcaccgtatgatgcaaagaggtcaaacctaccaccagatgggccttacagggctacagacgatggaaggaatccaacagcgcaaggatgtcaaagtgcttagcgatgctaagtacaaagatctggtgaagcgaaaaatcaagggaagactggcaacggtacgctggtgggtcaacttgcacttaacgttcaagtaccatctgcaccaccgtactccgacggggttgttcatcgagaagcaacttgaccaggaagcaatggaagaacagaaacggcatcaggagcgatggtttaactacgtgactgacgcgatgctttgttactccagcgcattctgtatgagcgtcatggaagggcgagaggggagcggaaacgccaacattcgtcgttacatggccgcgaccagaaggaaggcttatacggccctctgcgagctcttggacaatactgacgcccagtgggtgaatgatgtggtccagagtgccgtagggcagtatgaggcgatacaggcagccctaaccgaaggttccgcgcttgctatctatctcgactggatcaacctactgtcaaaacgccatccagcctctttggagcgacatgtcagaacgatgatcaaggcggttcaacgcttacatcgccgcgacgacacagagttgcaaagaggacagcaaggcttgtccttggccgcataa

SEQ ID NO: 56217 - DNA, 204 bp, Acinetobacter baumannii
atgagcctagacaagttaagtcggctggtggaccaacaacgaaagacccaggatgaaatcgacaatgaaatcattctggccgtcaaagaggtgttggctacaaactcagtcggtttagcccgtgagcttgttgggggtgtcccgcaagatcatccattccatccgtttttactcgctatagctaagcagcttgacccgagataa

SEQ ID NO: 56218 - DNA, 606 bp, Acinetobacter baumannii; identical to SEQ ID NO: 25097

SEQ ID NO: 56219 - DNA, 1092 bp, Acinetobacter baumannii
atgccaaaaaaaaggcaagaatcttataaattattaaaacgccatatttgttattacttggcttctggcgttgttacaatgacaatgcctgtgtttgtgcatgctgaagaagcagctgcgagtgcgcctgtagaagctgaatttgattctgcttttttaattggtgacgctcagaaagtcgatatttctcgatttaagtacggcaaccctgttttaccaggtgaatataacgttgacgtttatgtaaatggtcaatggtttggtaaacgccgcatgattttcaaggcattagatccaaatcaaaatgccgtaacttgttttactggaatgaatcttcttgaatacggcgtaaaacaagaaattttaaccaagcacgctccccttcaaaaagaaaataatagttgttataaaattgaagaatgggtagaaaacgcattttatgaattcgatacgtctcgtttacgtgtagatatttcaattcctcaagtcgcattacaaaaaaatgctcaaggctatgtcgacccaagcgtatgggatcgcgggattaatgccggctttttgtcttatagtggtagtgcgtataaaacttttaatcagtctggtgaccgaagcgaaacgactaatgcttttatgggggttacggctggtctaaatttagcaggttggcaattacgtcataatggtcagtggcaatggcaagatacgcctgcggaaaatcaatctaaatcagactatcaagaaacaagcacctatttacaaagagctttccctaaatatcgtggtgttttaacactcggggatagttttacaaacggcgaagtatttgactcatatggttatcgtggtatcgatttttcaagtgatgatcgaatgctaccgaatagtatgcttggttatgctccacgtatccgtggtaatgcaaaaaccaatgcaaaagttgaagtacgtcaacaggggcaattgatttaccaaacaacggttgcaccaggtaatttcgaaattaatgacctttaccctaccttatgcctctgttgtacagatgttacgcccaggcatgaaccgttactcattaactgtaggtcagttccgtga

SEQ ID NO: 56220 - DNA, 189 bp, Acinetobacter baumannii
atgatgaagtacatccctgactcaatgtcatacccattcactgtttggatgtccgaaagtggtttctatccttcttataaaaaaggatacatcgttatgaagcgtggcaaagaagtggcaaagatttctttaatagaaacaaaaaaaggtttcgaaatgaatgaagtctgtcaaaaaagattttattaa

SEQ ID NO: 56221 - DNA, 330 bp, Acinetobacter baumannii; identical to SEQ ID NO: 46650

SEQ ID NO: 56222 - DNA, 183 bp, Acinetobacter baumannii
atgaatgcaaaatttcaactcattaaagacattaattataaacccaaagactcacaacttggagtcataattaaaaaggtaacatcagaacaaaatcatactggttttgtatttattgaagataataaattagtactagctcattttggctggcatgaaacctattttttttcaaagacgtaa

SEQ ID NO: 56223 - DNA, 240 bp, Acinetobacter baumannii
atgactgaatttaaatggcaaattgatagtatccgtactgtattattctttaacggagaaattaattttaagaaaaaagaatggtcgaaaaatataactgggcttgaaatttctaatgaaatgacccaatcggaagaaaatggacgtttgattcaatatgttgaaattactaatcttgatagtaataagcaatttaatttggtttatttaaaagatcaaagcttaattgactttcaatga

SEQ ID NO: 56224 - DNA, 159 bp, Acinetobacter baumannii; identical to SEQ ID NO: 56179

SEQ ID NO: 56225 - DNA, 405 bp, Acinetobacter baumannii
atgccggagggctgccggatactatcggcggcaaataggatggatcgcctgtgccgttatcgtgccggtcgagtgccatccaggaaacgattgggcgaatcgccgtcacgcttcattttgcctgcgaggttgagtagatttttcagtgcggagttgcgattgaacggcgaccagacggctgtaaaggcaaccggctccggttcatcgaggaagggcaggaagacgatgccggtcgtcggcaacaatgacgttgcctcgccgacgatagtgatgccgaagccttgtccgaccatagatagcagcgtgtcgcgccccacatcaaagcgccggatcgacggtgcgggccaacgcccggcaaggcgcagcacgatatggtcatggacctgcgggccggtgccaccatag

SEQ ID NO: 56226 - DNA, 393 bp, Acinetobacter baumannii
atgaaactcaacaaatctactgttgatgctattccattaactgaaaaaggtcaaaaaatatatagagatgcagaactgatcggttttgctgttcgggtaactaataaaagtaaaacctatattgttgaaaggaggcatgaaggtgaactctatcgagtgacaattggtaaaaccaccgatattcctgcaacaaatgctcgagcaaaagctcagatgattctggcgaaaatttcaaacaatgaatatgaaaagcctatcaaattaaagaatgttgctaatcctttagatattacagtgaatgaagctcttcaaatttatattggggcaacaaaaagcttttccagatatctaagcaagaagtattggatcgatttattgaggtatcagaagtaa

SEQ ID NO: 56227 - DNA, 834 bp, Acinetobacter baumannii
ttggatcgatttattgaggtatcagaagtaagtgagtcgtcagcaaatggtgctgtatctcttttaggtactttatggaagtatattcatgttctttattcaacagatgagaacccgatccttaaaagtaatccagttgacattatttccgtaacaagaggttggaataaaatagcaagtagggatagacatctccataaagacatcattcacaaatattacaatgcggtgcttcattatgaagatgagttgaatctggaaaatactgctaggtcaaacacgcatcgggatatcgtattgatgtgcatgtatacgggatgccgtaaacaggaggcatgttgtctaaagtgggctgatgtagatattaaaaatggtaccttaacttttagagataccaaaaatggttcagatcatacttttcctattggtgatcatctacacagtattttgcgtgaacgttggttattaagagaaaacgattgggttttcccagctactaagatgcctacttcgtggaatatgcatgcgactaaggtagatacattattgaatagagtgggtaaggaagttgactattacgtttcaatgcatgatttccgccgtacatttgccactatatgcaaccttttaagatttaatatttatgtgacaaaaagacttcttaatcacacggctaaaccaagaattgatgtgacaggtggttatgttcaaattccagatgaggaattaagagcttcgatgaatatgattgaggcggtttatcaaggcaagattgattgctttaattaccaatctgtctgggcagaaagattaaaagaaataaaggcggtctaa

SEQ ID NO: 56228 - DNA, 804 bp, Acinetobacter baumannii; identical to SEQ ID NO: 46648

SEQ ID NO: 56229 - DNA, 564 bp, Acinetobacter baumannii
atgggcatcgacatagccctcatagtcgccgcctggaacgcggccctcgaacttggcctgctccagatggcggctcggccgatagatgccgtcctttgcaatggcggtaatggtgcggtcggacggccgggctgccgcctcggcggggccgagctggacgacgctgccgatgcgggcgtcctcgagccgctcgagcgcgatgccggcgatgtggtgcgtgcggccgtcgatgccgtccaccacaacggtcaggttctcccccagttcgtcggacaggtgcttgtccacgacgcggccgacgatgggcgtctcgggcgctccgtcatggatttggaagctcatgggatcgcgttcgccgccctgcgggccgagcgccttctgcatggtgcggataatgtcgccccgctctccaagctcgcgcagggccggttccatgtccttgctcaattcccaaacgccgggcgcgtgctcggtcgccagtcccatcttctccagcttggtaagacggcgcaggcgcagcgtgcgctcgaactgccgcctcggcgctgccggttcatggcgtag

SEQ ID NO: 56230 - DNA, 249 bp, Acinetobacter baumannii
atgtttgcggggttatttacttacttgtcagtagtaaatgggtatttaatgacaagcctcggcctaataaaaatacaactcccattgtttctatttttaactatttttaccttagtcttatgttggactttaataccagcttatggtttgttaggtgcagcttgggctactgttgcatcttctgctgctcagttcattttgagtacattaattttatatatgaatatggtgagaaaagtagatgcgtaa

SEQ ID NO: 56231 - DNA, 402 bp, Acinetobacter baumannii
ttgctttcaatccattttgatgaggcgaagcagtatcttgagctcttgccgttacaagagctagttccagctgaaacagatacacttaaacgtttagaaaagtttgtagataatctcgctgctcgttatccagcattagaaaaccctcttgcttatgacattgcacagcaattaggtgaggagctaaagtatcaatctccaaaaggacctaaaaacttttggatatcgattcaagaaagcggagcagtttctgtacagcaatattcactacaccacacaccagttaatgttgtgcaattgcgtgaacgctttaatcaattgtgggattttcttcataaagatgaggtgcttgaacttgggaaggttttaaaacgctttcctttcgaacctgtgaatcgataa

SEQ ID NO: 56232 - DNA, 831 bp, Acinetobacter baumannii; identical to SEQ ID NO: 56190

SEQ ID NO: 56233 - DNA, 687 bp, Acinetobacter baumannii
atgaataaggtagtcctgtttgacatggatggaactttactagatttggcttttgatgactttatctggaacgaatgcttacctaaaagacattctgaaacacatcatctatctttaactgagagtcaagaaatattaaaccagttttatcgcagccataaacatacgcttgcttggtactcatcaaattactggacacaaacaactggcgtggatgttttaaagctccagcaagaatttcagcataaaattaaagcgagaccaggatgcatggagctgctcagcgctttaaaagcacaagattatcaatgttggctagtcaccaatgctgactgtgcaagcctaaaattaaaacttgataacattcctatccaagatttttttgaagtcatcgtatctagcgaacaaattggttacgcaaaagaaaacatccgattctggcaagagttgcaacgcttgcattattttgcgccagaaagcactatttttttagatgacactcttcctgttttaaaaactgcagaaaaatttggtataagacacttgtttactatcttacagccctcaagtcttaagagtataagacagccacaagatttagagtataaagctctaggtcagcttacagagctactgtctattttgaatcaaattgatagaaaggataatgatgtcaaaattgcgtga

SEQ ID NO: 56234 - DNA, 183 bp, Acinetobacter baumannii; identical to SEQ ID NO: 46606

SEQ ID NO: 56235 - DNA, 681 bp, Acinetobacter baumannii
ttgagttttgacttccgtggtattggcgagtccctacatggagctttaaaacaaagtaccgcaagtattaccgactggggaacacttgatattcctgctgcaattgatgctttattaataaaaacgaaagcaaatcaagttattcttattggacatagtgctggcggacaactactaggagtcgtacctaactataataaagtcgcaaaagtgataacgattgcaggttcaaccggacatattaaaggccttaaaggaaaaaccaaggttttagcgccagttatgtttaatcttatcttccctatttctagtcttgttaaaggttatggagcaactcaattcattggtatgggagaaaacctacctaaaaaagttgctcaacaatggcgagagttttgcagccgtcctggatatgtaaaaaatgccataggcaagacaattttccatgattttcattcagatattcaatgtcccattactgctatttgggctgatgatgatgagattgcaaccaaacgtaacgtacaagaattattaagtttatatccaaatgcaaataaaaaaatgattgaacttagcccaaaagatttaggctataaatcaattggccatatgctgttatttaaaaaatcacatcaaaaactctggtctattttctctgtacacgacaaaaatagataa

SEQ ID NO: 56236 - DNA, 246 bp, Acinetobacter baumannii
atgccaaatttagaaacctcttccaaaaaattacatgttattcgtacggctataaacttatttactacctatggatttcacaccacgggtgtagatctgattgttaaaaaatccggaattccgaaagctacgctctataactactttcactcaaactattggtacttaaaaacccaaacatcaaaccatctattaggtttaaaaccatatcggcatcaggttttaaggcacgagtttccaaactaa

SEQ ID NO: 56237 - DNA, 360 bp, Acinetobacter baumannii
atgtgcatcgcctttcaaaaaagcctgctgaaagaagaagtactcgagattatttactcaaaccgttactgcacaccaaccgataagctcaaagaaattgtggttttacatgttaactctaacagtctgtatcatttgctacttaaagccttttttgaaattaaagggacatatcctcaggcttaccgtatggcaatcgagtatagaaagtggctaattcgagaactttttgacttaatttttagtttggaaactcgtgccttaaaacctgatgccgatatggttttaaacctaatagatggtttgatgtttgggtttttaagtaccaatagtttgagtgaaagtagttatagagcgtag

SEQ ID NO: 56238 - DNA, 222 bp, Acinetobacter baumannii
gtggcatcagctgtacctgtacccactacggttcctgctgtatttttaactgttacaacagcattcgcttcggttatgcctgtaacgactttacctgaggcatcaatcgttgcaattaaacttgaaggtgccgtggtatccgatgcaataattgttgtcgcggctgtagtattacccgctttatctgccgctattgcacttaagctttcgccatttagataa

SEQ ID NO: 56239 - DNA, 324 bp, Acinetobacter baumannii
ttggcattaagtaatgcatggaaacttcttaaaccacaaacttatgaaaatgtatctatttcaacagtagttccaattttaatttgccctgatgatttagatctagtgtgcaatgtggttatggtggaacaagttgtttcagcagatcaagtcgtatgggctcgttttggttacgcatttaatcatattcatgatgttgtgacatccgtagtctgggaaaccccaccttctgctccgcagttaagttttccattaagcgaatttgaaaaagcatataatgatttaaaagaattagacaaaaaatggactgaaaattttatctag

SEQ ID NO: 56240 - DNA, 162 bp, Acinetobacter baumannii
atgtctgctgaaactgtgcctgtacctggcaatgaagtgttgcctgcagggtcagttgctgttgctgtaactgtatcgccatccaccaggttacccgggtttggtactgaccagctaccatctgtgcctgctaccacggttgcagttgtgccatcaggataa

SEQ ID NO: 56241 - DNA, 204 bp, Acinetobacter baumannii; identical to SEQ ID NO: 52642

SEQ ID NO: 56242 - DNA, 285 bp, Acinetobacter baumannii; identical to SEQ ID NO: 56165

SEQ ID NO: 56243 - DNA, 1227 bp, Acinetobacter baumannii; identical to SEQ ID NO: 56164

SEQ ID NO: 56244 - DNA, 204 bp, Acinetobacter baumannii; identical to SEQ ID NO: 56163

SEQ ID NO: 56245 - DNA, 4332 bp, Acinetobacter baumannii
atggtacaagtatcattaatggcaaataatgcttcaaaaaataatacagttgatattaatattggccaaacaaaaaatattgtagtagatccgaaggtaatcgcaaaaattgatattaatccagaaaaaattgcttcaataacaagagatggtaatagtgcggttatccatctaaaagatgggactgaaattgttttagagaacttttttattagtgaaaatccacaaattcttttaaatgaggggcagacttattgggctgctaatttagctgaagatgctacaggacagaccactgttaattatttagaattaaaagagataccaaaatatatagatgcttcatcttctgtacccatctggtcttgggttgttagtgctttagctggtgcagggacagttgcattattatcccagcaagacgccaaagataaaacacctccggaaccaggtaaattgtctttccaaaatcttttagattcaggggagttaacacaagatcagatcacgaatgataacaagtttaatttaaaactcagcggacaggaaaagggaagtagcgtaacgtatttaatctctaccgatgaaggtaaaacctggcaggagacgacattaaatcaaaaagatttagctgatggtatttatctttataaagctgtagtgacagacgctgctggcaatacctcggaaacggctgtacaaaaagtggttgtggatactaccacaccacaagcaggtgaactgactctatctgacttgaatgatacaggcgtttcagccacagatcagattacgcaagataaaaacttcaatttaaagcttgaaggacaggaaactggtagccgagtaacatatttggtctctaccgatgaaggaaaaacgtggcaggaaaccacgatagcccaaaaagatttggctgatggtgtttacaaatataaagctgtagtgacagacgctgccggcaatacctcggaaacggctgtacaaaaagtggttgtggatactaccgcaccgcaagcaggtaaactcactttatctgatttgaatgatacaggtgtttcagcaacagatcagattacgcaagataatggttttactttaaagctagttcaaccgattgtgattggggaacaagccgctttactagaccactatgaagtttcaaaagatgaaggaaaaacttggcaagagacaacagctgatcaaaaagatttagctgatggtatttaccaatataaagctatagtgacagacctcgcaggcaatatctcagaatctgctatacaaaaagttattgtagataattccttaaatgttgaatcaaccacagtgattgtaaagccgattactgaagacaatacaataagtctagttgaaaaagatcaagttatttctataagacttgaaatagctaatttacccacagatttaaatagctcactgacatcagtaaatacgacattagacaatgttacttataattttcattttgatgaagtcacgcaagaatgggttactgaaattccagcagagtttctttggtcagtagagccgcaaaccaatatatcaattgagattagtcttactgatcaagctggcaatacagccattatcaaacatacccaaaattataatgtggatcatactccgaattcaccaaccctagattcactgactttcaacaatatagatggagctatcatttcaggtagtgcatataaaggaagtaaggtcgatatctacaataaaaatggtgattggcttgcaagtacaataactaatgaagaaggtaaatttactttacaagatctttcaattaactcaaatcaagaagtttacgcagtcgctacttataatgattatagcagtgaaaattcatcaattgggttagttactgaagttccagctattagtattacacgaattagtccagaaggcgtgattagtggttatgcgactgaaggtagtcattttattgtaaaagatcagaatggaaatattctacaagaatttaattctaatgtatttgatagctctggtattacaccatttagtgtaatggcattaggcgaagtaagaccatttattttgtccctcgatcagcctttagaggaaggggctcaaattattatctctacagataaagataatatttcaggccatccacaatatattactgcagactatactccagcagtatttttagaaactccacaatttgatattagtggtgaaactttatcagtacatgttaatgaacctaacagctttattcgtgcattttctggagaaggcaatttaattgctacaggttttaccgatgagcaaggctttgcaagtttacaagtgttccaatttttaaaagaaggcgaaacggttactgtacaagtagtagataaaaatcaaaatacgagtgaaaccctaatcgaggttccaaactttgcttatattccacatgttgaacgtattacacaagaaggcttaatttctggagttgctgaagataatagtacggtaattgtacgtgatgctgatggcaatgaattaggaaaggttacattaggtgatgataatagttggagtgactttagtcattttagcttgagtgtaaaccgccctttaattgatggagagaaaatttccgttcaaattattgataataaagggttaatgagtcctgagcaaaatatcatcgtagatctgactcctccacctgctccaacggagttaaatttcaatgatgctggtgatttagtttatggtcatgcagaacctttctctgaaattttagttaaagatgggcaaggaaatattcttaataaatggttttggaataactggaccgatgagagtggaagtttctcaatagaactaggtacatttttaaccaatgctgagacggtttatgtcacggctaccgatgtaaatggaaacgtaagtttagcagctcagatacaagcacctaattatgcctttgctccatatgttgatagctttacttcggatggcgtgataagtgggcaagctgaaaataatagtactctcgttgttaaagacgccaaaggtgacgttgtagctgaaattaaagttggtgaagataacggttggaatggatcaagttattttaaacaccagcttgatcgtcctcttgtcgatggtgagcagtttttcttatcaattaaggatgcacgtgggcaagtaagtgctgatactgtaattaccgctgatacggttgctcccgcaccagccagtaatttagttttctcagaagatggttcatatcttacgggtgtagcagagctgaatactacgattcaggtttttgatcataatggtcagctagtgaatatatggaataacaccattaactctgatggtacatttactatttacttaggtagcaacaatttacatggagaagcattcacagtcactgttaaagaccaagccggaaatgtgagtgaggctatttcaataaatgcgccacttgacgatattgcaccgaatccaattaaaaatattttacttgatgcaaatggtcaaaactttacggcacaagcagaagcaaatagtcagatcgaagtttttgattcattgggtaatcagacaggttggggttctacagatagtgcaggtaatgcttctggttctttcaatcaaacttatttacacggtgaggaactcacttttgttgttatagatcgagcaggtaatcgcagtatcgaatttaagcaaaatgctttaattgataccattgcaccaaatccgattgaaaatatcatcttcaacgaaaatggccaaagttttacagctcaggcagaagccggaagttctattgatgtattagatcagactggaaataagattggttttggttacaccgatagctcaggtaatgtatctggttattttcaacaagtttacttacacggtgaggaacttacttttgtcgtgatcgatcgagcaggtaaccgcagtgcagaggtcaagcagagtgctttgaatgatgacgtcgcaccaaatccgattgaaaatattgtattagatctcaatggccagaactttacagctcaggcagaagcaaatagccaaattgaaatcaaaaataataacggtgacgtcgtaggttatggatcagcagatagtgcaggtaatgtttcaggatatttgtatcaagtgcatttacatggcgaagagctcacttttattgtagttgaccgagcgggtaaccgtagtacagcggttaagcagaatgccttgattgatgatattgcgccaaatccgattgaaaatattatattagatatcaatggtcaaaactttatagcgtaa

SEQ ID NO: 56246 - DNA, 153 bp, Acinetobacter baumannii
atgttacgtaatattgataaaatagtattagataaacttcatttaattttagaaaatgaaatatttgattatcggatagttgctagagaagcatatttaattcgtcaagacgagattatagcaaaaataaattctattgaagatgtggggtaa

SEQ ID NO: 56247 - DNA, 837 bp, Acinetobacter baumannii
atgttcatgccgcctgtttttcctgctcattggcacgtttcccaacctgttctcattgcggacaccttttccagcctcgtttggaaagtttttttgccagacgggactcctgcaatcgtcaaaggattgaaacctatagaagacattgctgatgaactgcgcggggccgactatctggtatggcgcagtgggaggggagcagtccggttgctcggtcgtgagaacaatctgatgttgctcgaatatgccggggagcgaatgctctctcacatcgttgccgagcacggcgactaccaggcgaccgaaattgcagcggaactgatggcgaagctgtatgccgcatctgaggaacccctgccttctgctcttctcccgatccgggagcgctttgcagctttgtttcagcgggcgcgtgacgatcaaaacgcaggtcgtcaaactgactacgtccacgcggcgattatagccgatcaaatgatgagcaatgcctcggaactgcgtgggctacatggcgatctgcatcatgaaaatatcatgttctccagtcgcggctggctggtgatagatccagtcggtctggtcggtgaagtgggctttggcgccgccaatatgttctacgatccggctgacagagacgacctttgtctcgatcctagacgcattgcacagatggcggacgcattctctcgtgcgctggacgtcgatccgcgtcggctgctcgaccaggcgtacgcttacgggtgtctttccgcggcttggaacgcggatggagaagaggagcaacgcgatctagctatcgcggccgcaatcaagcacgtgcgacagacgtcatactag

SEQ ID NO: 56248 - DNA, 837 bp, Acinetobacter baumannii
atgatgtctaacagcaaactgaaggaacctccattgaatcggacttatatttttttgggtgaatcgcattctgactggttgcctgtcagaggcggagaatccggtgattttgtttttcgacgtggtgacgggcatgccttcgcgaaaatcgcacctgcttcccgtcgcggtgagctcgctggagagcgtgaccgcctcatttggctcaaaggtcgaggtgtggcttgccccgaggtaatcaactggcaggaggaacaggagggcgcatgcctagtgataacggcaattccgggagtaccggcggcggatctgtctggagcagatttgctcaaagcgtggccgtcaatggggcagcaacttggggctgttcacagcctatcggttgatcaatgtccgtttgagcgcaggctgtcgcgaatgatcggacgcgccgttgatgtggtgtcccgcaatgccgtcaatcccgacttcttacctgacgaggacaagagtacgccgcagctcgatcttttggctcgtgtcgaacgagagctaccggtgcggctcgaccaagagcgcactgatatggttgtttgccatggtgatccctgcatgccgaacttcatggtagaccctagaactcttcaatgtacgggtctgatcgaccttgggcggctcggaacagcagatcgctatgccgatttggcactcatgattgctaacgccgaagagaactgggcagcgccagatgaagcagagcgcgccttcgctgtcctattcaatgtattggggatcgaagcccccgaccgcgaacgccttgccttctatctgcgattggaccctcttacttggggttga

SEQ ID NO: 56249 - DNA, 369 bp, Acinetobacter baumannii
atgcatcttaaaacattaagcttcggtttagcagtagcattggcaagtacagttacattagctgcaccagtggactataaaattgatccaacacacacagctactgttttctcgtggaatcacttcggcttttcaactccaagtgctaacttctcagacatccaaggtgtaattaaagttgataatgctaaaccagcaaactcatctgtaaatgtgaccattcctttaagcagtgtgaatacaaacgtacctgctttagataaagagttccaagaagaagcttggtttaatgcggctaaacccaaacattactttcaaaagtacgaaagtagaaacgaaagacaaaaagcatttcaaaattactggtga

SEQ ID NO: 56250 - DNA, 462 bp, Acinetobacter baumannii
atgccacagtatctcatgtttgcggaaaatgtttataacaaaattaaagatgaggaattattttcacatgactgtattgaaaatatgaacttacttatgacatgtatacgcagagaaattgagggaacagaatttaaattaaaatttaattttattgattttgttgaattgttcagtagaccattagatgaatgtaaagtaaaaatagatgtgagtttgattcctcctcataatttaaaagatgaatacattttatggttagctggatttattgaaaaaattacagaaggtggacctaaaccacctccgccaattaagaaatttattccagagtttataaatttaaagtctgaattagattttttacctttaagtgaggaaaaggttcaaaatgaaggtaaagagattacggattattttaattcaaggctctataaatcaactttaaaaaaaaatagttag

SEQ ID NO: 56251 - DNA, 2181 bp, Acinetobacter baumannii
atggaaagacgttcgttaaatcttcactttataacatgctctaaaacagcattggcttcatctattgcactcataacatctgtcgtttatgcaaatgaagcggaagtttcgcagctcccaaccattactgtgaacgctacacaaaatagtgatgcactatacacatcaaaaaaagtgagtttatctggttttcaaactggtgatgtaaagaaagtacctgcatctattacaaccattacatctgaacgtatagcagatcaacacgcaaaaacactgaccgatgtgattaaaaatgattcatccttaggcgatggttatgctgcaattggctactatccaaattttgcagcacgtggttttgcgcttgatttaggctcaagctatctcattaatggccataccatacgtggcgaacaaaatgtagctttagaaaataaagaacaagttgaaatcttaaaaggcatttctgcaattcaaagtggaatgtcgacaccaggtggtgtggttaactatgtaaccaaaagacctgccgatgttaaaaatattacagtcgatgcaaattcagaaggtggttatacactggcaacagatgtaggcggctttgttaatgatagttttggttatcgaatcaatttagcccatgaaagcatccatccaaatgttgatcacgcaaatggtaagcgtgagtttggttcagtagctttagactggaaaattaatgagcgttctaaactactgtttgacattgaagctcagcatcaaagtcaacgttcagtacccggttatcaactgcttgatggacaagaagtaccaacaaatgtagatcaagaccgtttattgggttaccagtcttggagtaaacctgttgtaaataacagtctaaatgcgagtttgaaatatcaatatgcatttaacgatcaatggaatggtagcttaagtgcgtctcaaagccgtgttgtgattgatgataatagtgctttcccatggggatgttatagcagcatttgtgaagttaccggtttgggcaatacttttgataaacacggaaattatgacatttatgacttccgcagcccagatgatacacgaattactaaccagttcgctgctgggttaaatggtcaattcaacactggccatattcagcatcaaatcgctttcgaattacaacgtacatataaaaccttaaagcaccatacaccactgaatgtagcggtaggaacaggcaatatctatgaagatacggtcgactacagtccttcatcggaaagccctggcgatcgttacaaagctctagagagtgatcagactgcacttactgtatctgaccgagttcaatttaatgatcaatggtcaactctactcggtggaaaactgattcaccttgatgagcaagcttataattcagatgggcagcaaagccgtgatacggatttaaacaaattcttgccacaattagcactcatgtatagtccaacttccacgactaatctttatgcttcatatgccaaaggtttatcggatggtggcgaagctccgtggtatgcagaagcgaatgcttatcaagtcctatcacctagaaattctgaacaatatgaacttggtgttaagcaacaaattcgcaacttcttggtaacagcagctatttttgatttaaaacaagacaatcaatatacgactacaaattctgcaggagaattagaatttgttgagcaaggtgaacagcataatcaaggtattgagttaggtttaactggtgccctaaccgatacactcgacgtaagctctggcattacctataccaaatctcgtcttattgatattgataatgacagctacaaaggtcatcaaactcaaaatgtaccgaaagtacgcgcaactgcacagttatcttataaagtaccttcagttgaagggttaagattattgagtggtatacaatacagtagcagtaaatatgcaaataaagagggaactgcaaaagtaggcggatatagtgtctttaatattggtgctgcctataaaacaaattttgctgggcatgacacaacttttagattcaatattgataacttatttaataagaaatattggcgtgatgtaggggcatttatgggagatgactatctgttcttaggtaatcctcgcacagctcaattttctacaacttttagcttttaa

SEQ ID NO: 56252 - DNA, 1419 bp, Acinetobacter baumannii
atgatgaacgctgatattactacccgtattgagaaggatcttattggtcatcgagaaatcaacaatgaccattattacggagttcaaacattacgtgctttagaaaatttcaacttaacaaatagcaaagttggaaatttccctaatttaattaaagccttagctatggttaaacttgcctgtgctgaagcaaattataatcttaaaaacttagatcaaactaaatttgaagcgattgaatacagctgtaatcagcttattcgtggtaatttccatgaccagttcccaatcgacatgttgcaaggtggtgcaggtacttcaaccaatatgaatgcaaatgaagtattggcaaacgttgctttagaatatatgggacattctaaaggtcaatatcaatacttacatccaaataacgacattaatatgtcgcagtcaacaaatgacgtataccctactgcaatccgtttaggtttattacttagcttagatgagttaaaccttccatttaacaatttgattcttagtttcttgaacaaatctcaagagtttgcgcacatcttaaaaatgggccgtactcagttacaagatgctgtaccaatgacattaggtcaggaatttggtgcttttgcggtaactctacaaaaagatcttgaacaaattaatacgcttattccaaatgttttagcttatatgaaccttggtggtacagcgattggtacgggaattaacactgaatatagttaccgtgaactcgcgattcaagcacttgcaaaaatctctggtaaaaaaattaagtcagctccagatttgattgaagccacttctgatatgggtgactttgttcttttatctggtttattaaaacgtactgcaactaaactttcaaaaattgccaatgacttgcgtttactttcaagtggtccacgtactggcattaatgaaattaacttagaagcacgtcaaccaggtagctcgattatgccgggtaaagtaaacccagttattcctgaagcaatgaaccttgcttgcttccagattattgcaaatgatttggctgtaacgttagctgctgaagctggtcaattacagttaaatgcaatggaaccacttattgcattcaaactgtttgaatcgatggacttgcttggtaaagcaatggcaatgttccaaactaagtgtattgatacgattacggcgaaccctgaacactgtaaagctttggttgaaaattcaattggtattgtgactgcacttaacccatacctaggttatgaaactacaactcgtattgctaaaactgcaaacgaaactgggcaaagcgtattggctttagttcaaaatgaaggtttattatcagcacaagtgcttgatgatatcttgtcgattaataatatggttaaaccaaaaatgtcggcttaa

SEQ ID NO: 56253 - DNA, 426 bp, Acinetobacter baumannii
atgattaacatcggttcttgtttatgccataaagtaaaattctctgtaccttgtgaaatcaaaacggtttatcactgccattgcagcttatgccgaaaacaaacaggtactggagcgaatgccgctactttagtaaaagaaaatcagtttaattggttgataggtaaggaatatgtgactacctataaaaaagaaactggttttacttcatcattttgtaatagatgtggctcgcctgtccctaataaaattaatggtacaaactatatgtggataccgttggggcttcttgaacaaccgtttaaaccagatttaaaacttaatttttgtatagagtcaaaacatgattgggttgtgttaggggatgctcataaaaactttgcacatttacctgagttagaagagttcttaaaatattttgaataa

SEQ ID NO: 56254 - DNA, 462 bp, Acinetobacter baumannii
atgaaagagttaggtaaaaaagaatttttcttttcaatagaaaaatatgaaccgaagaatgatctctttttattagttgttaatattaatggtacttcttttagcaattatgagactcctataaatcttccaattttaattaatgacttaaacttactgctatatactaaccaacgagaaatagactatctccaagtagatactgttaacgaaaacattgagttaattaaaaagttaataaatttagagtatttagaattagagaataatatctatgattttcaaaatagtaccgtaaggaacggccatgaagtatttttcttttttaaagtaccaaatcagtcattctatgaatctccttcactcataaaagctggtgaaggttatgtggaaactattcccatacaaactgttaagtttgcattaaatgagttaattaaatatcaaaattcaattttataa

SEQ ID NO: 56255 - DNA, 513 bp, Acinetobacter baumannii
atgaaaaaatttatttttattgcagcagcacaagcagctgatggtacgatcactattaatggtttagtaactgataatacgtgtacgattgatactggtgataaaaatctcactgtaaatttaccaacagtatcatctcaatctttgaaaaatgtgggcgatgttgctggtcgtacaccttttcaaatcaatttaacgaattgtgcttcagttggtaaagtcgcgacttattttgaaccaggcgcaacagttgattttaatactggtcgactattgaaccaagctacctctggtgcagctgccaatgtcaacatccaattattgggtagcaacaatgcagtaattcctgtaattgcgaaaggtgcttctggtgcacaagataactcacaatgggtaaatgtttctgctggggggaatgccgatcttaattattatgctgaatattatgcaactggagcatctacagcaggtactgtaacgtcacaagtgaaatacacgattatttatcaataa

SEQ ID NO: 56256 - DNA, 516 bp, Acinetobacter baumannii
atggctttaaaagtcggaattattaaaagctcggacgtatcaaaatggtgcgaatacaaaggtgctgatggagaggtacaggcagaatttaaagtccgtggtatcgcttataagccttttcaggtagctattgaacgagcaggaaaccagatctcgtctaaaggctacgatgtaatggtaaaagatgaagatgccaagctctaccatgagctgttgatggatgcctgtgctgctcatttaattgaagactggaagggcgtggtatttgccgaaatcgtagccggtaaaacagtggagtccgaaaaaccttatacacctgagaatgcttcgaaattattgaatatgggtgatatcggcattcaaatctggttgttcattaaagagcaggcccagaagattcaagaagaagccgacaaggacaaggctttaattctgggaaagtcattgagctctacaaataccaaaaaacgtatgcgtcgaaaacgccgcacgaaatcgagcaaatcaagttcttag

SEQ ID NO: 56257 - DNA, 321 bp, Acinetobacter baumannii
atgcctaaagatgcaaacggtaatgttcttgttgctgtgtcttatgagcagcatgaagatggggatattgcagtaaaaacctacaagaaaaaatttgatatcgaaacagcctcaattattcctgatttcgataatcctgtagatattccagaaactcgctggattgatattcgattgcatgaagaactcgaaccagagcctgaagaaccgttgagtgaaacaccattggagttccagcctactaacttatctcaggcagtagctgcagccatgattggtgtggaaccgccagaaatctccgacacagatgcaacatcttaa

SEQ ID NO: 56258 - DNA, 321 bp, Acinetobacter baumannii
atgcctaaagatgcaaacggtaatgttcttgttgctgtgtcatatgagcagcatgaagatggggatattgcagtaaaaacctacaagaaaaaatttgatatcgaaacagcctcaattattcctgatttcgataatcctgtagatattccagaaactcgctggattgatattcgattgcatgaagaacccgaaccagagcctgaagaaccgttgagtgaaacaccattggagttccagccgactaacttatctcaggcagtagctgcagccatgaatggtgtggaaccgccagaaatctcggatacagacgaaacactttaa

SEQ ID NO: 56259 - DNA, 546 bp, Acinetobacter baumannii; identical to SEQ ID NO: 51234

SEQ ID NO: 56260 - DNA, 927 bp, Acinetobacter baumannii; identical to SEQ ID NO: 46217

SEQ ID NO: 56261 - DNA, 2688 bp, Acinetobacter baumannii
atgaacattgaaatttgtactcctaattcagctacaacaaaagataaaggcgacttgcttgaaaaattaagtaaaaatatgctggaagctcaaaattatcatgttgatgaagaagtacgtaaaacaggaagtgaattagatttactatgtaagcataatgtctctaagaaaaaaatttatgttgaatgtaaagcctatcgggataaaaagattgatgcgacgataataagacagttacttggtactgttgtatttgaggactatgacgaaggatggctaattgggacttctgattttagtaaggatgcaaaagggctttgtgaagagttaccaaatcgacctcatggaaatcgagtaattatctacactcctaaagatattgttcagtcattacaatcttctagaatcattagcaatattccaaaagaacatttagaaagttatattgatctgaataaggttggagaatggtatttattaataacaagttttggaattttttgggctgttactatcttaaatgcaggtataccaacaaatgttatctgttatcatgctaagactggaactttagtcgaagatcaggcacttttagataatattgcctcaactgactgtagtctatctaaactagacttttccaaacttataaatacaaagaaagatattaaaagttctcttgattcccaaatagaagtagtagaagtgcaaagaggtgaggattggaatgactatcgacctgcacgacctcaagactttgttgggagaacgaaagatataaaagaaatatttgatttttttaaaaaaataagagaaaaagaaatcggtacacgaattttcgcaattactggtaattcaggtttaggtaaaagctcgttaattattaccctttctgaaaaagcaaaaaatcttcatcagaaaaaaaagttgttcttatatgctattgatgtaagggcagcaaagtctcctgactatatatattccgcattattaaaaacactaaaagaagcacaaaagaagggattcggtaattcaaagattgatttacaaattacaaatgttaatcatccactagaatcagaatctatagcagaatatttaaatagtcttaatacctcgaaacaactcatagtattagtttttgatcaattcgaagaattatttagtaaacctgatttattggaattatttaataatgcaagtaatattttattagatgcagctagcttaaaagctaatttatgtattgggtttgcgtggaaaactgatagtacaatgccttcagaacataatgcatatttcttttggcatagattatcagattatcggattgttagaaaattaaatcctttttcagatagggagtcgcatgcagtaattaataagtttgaggaagtaattggtgaaaaaatccatagtgatttaaggcataatttaattgttagtagtcagggatatccatggttattaaaaaaattatgtatccatttacatgagaagattttatctggccaaaaacaagaagatctattagataataaactggatatatctagtttatttgcaagtgatttagaagagctaaattctaatgaaataaaagctctaaaatttattgcccagaaagcaccagttgatttagttgacactattgatacgtgtggtgaagatatagttacaagtttactgcataaacgtttaattataaaaagtggtattagattaaatatttattgggatatatttagagagtatattttaacagagactgttcctattatctcattaagatatttgccttctaatgatttttcaacaatatggaatgttgtaaagtatttgtctaagaaaccaatttctattcaacagttgcaggaaaaaactgatttttcagagggtacaattcaaaatataggaactgatgttttattatttggtttagcaactagagaaaactcacaatatgtattatcggaagatttgttggaagaagaaaatacacaagagaatattctgaatataattagagaaaaatttaagaaacatattattactttacatctaaaagacctttcaagtggaacattattaacaattacaaatttcatagatttaatgaaagaaacttatcctgataataaatatgcagataagacttggagatcttatactattagacttattcgctggttagaattaacaggtttcttacagccagctacagagccaaatacatggatttataaagatttaggaagtcccaaaacttctgtgatgagtagaagacgtacttctaacttttttgtgccaagaattacacctcagttatttatatcgatatatcctcagattgcaggtaagaatcttcaagaattaataaatgatggtagaactaataaggctttagaaattttaaaaaaatttgaattaatagataatgaatttattttagatattaaagattttgagtctgtggtttatgctaaagctaattcagaatttagtatccaagctatgcttgaaattaaagagctatattctgctgataaactatcaggacaggctttaggtaagttgcttaaagaaaaatatgatttaaaatggactgatgtaactactcaatattcaggcaataaattgaatagttgggctaaatgggttaaatcttatgaagtgaaaaatgaataa

SEQ ID NO: 56262 - DNA, 660 bp, Acinetobacter baumannii; identical to SEQ ID NO: 49385

SEQ ID NO: 56263 - DNA, 492 bp, Acinetobacter baumannii
atggttcaagcaacagactttagaaatgcaatgtctttactcacaagtgcggttagtgttgtgaccacggcaggcatgtctggccgttttggatttactgcctctgctgtttgtagtgtgactgacacaccgccgacattattggtctgtatgaaccaagctgcgagttcacatgcacatttcctagataacaaaatcttaaccgtaaatgtgttaggcgcgcatcacgaacatatttcaaaagcattttcatctaagctcacaccagaagaacgctttaaacatggcgaatggattgagttagaaacaggcgcacctgtgttggaagatgctttggtgagcttcgattgtgagattgagcaaattcaacaagtcggcacacacacgatttttatatgcccgattgtggcgattaaacaaagccaacatgaccaaagtttggtttactttaaccgtgcttatcaccaagtggggcagacagagacagtctaa

SEQ ID NO: 56264 - DNA, 1044 bp, Acinetobacter baumannii
atgaaaaagttattaccgacttcaactgctggcagcttaccaaaaccgtcttggcttgcagaacctgaaaagctttggtcgccgtggaaactcgaaaacgaaggcttagttgaaggtaaaaaagacgcgttacgtttagcacttcacgagcaaaaacttgcaggcattgatattgttagcgatggcgaacaaacccgccaacactttgtgacgacatttattgagcacttgaatggcgtagattttgagaagcgcgaaacagttcgtattcgtgaccgttacgacgcaagcgtaccgtctgtggtaggtgcggtgtctcgtcaaaagcctgtatttgttgaagatgcaaaatttttacgtcagcaaactgatcagccaattaaatgggcattacctggcccaatgaccatgattgatacgctttatgatggtcactacaagagccgtgaaaagcttgcttgggaatttgccaaaatcttgaaccaagaagcgaaagagttagaagctgctggtgtagatattatccagtttgacgaacctgcatttaacgtcttctttgacgaagtaaatgactggggtattgcaactttagagcgtgcaattgaaggcctaaaatgtgaaactgcggtgcacatttgctatggttacggtattaaagccaatactgactggaaaaagacactcggttcagaatggcgccaatacgaagaagctttcccgaaacttcaaacttctaacattgatatcatctcgttagaatgtcacaactctcgtgtgccaatcgacttactcgaacttattcgtggtaaaaaagtcatggtgggtgcaattgatgttgcaacaaaccagattgaaacaccggaagaagttgccaacacactacgtaaagcgcttcagtttgtagattcagacaagctttacccgtgcacaaactgcggtatggcgcctctttctcgtgaagtggcacgcggcaaactaaatgccttaagtgcaggtgcagaaatcgttcgccgagaactgacgggttatgatcttactgcttaa

SEQ ID NO: 56265 - DNA, 987 bp, Acinetobacter baumannii; identical to SEQ ID NO: 51070

SEQ ID NO: 56266 - DNA, 873 bp, Acinetobacter baumannii; identical to SEQ ID NO: 51177

SEQ ID NO: 56267 - DNA, 609 bp, Acinetobacter baumannii
atggcagagttcattgcggttattctcattacaattttggcagtgattagtcccggagcagacttcgcgattgtgaccaaaaatagttacttgtacggcagaaaaataggtgtgttcacttcacttggaatatcgcttggtgtgttggtacatgtaacctatacattagtcgccgttgcctttgtgatgacttatacgccgcaaattttgaatattgttaagtatattggcgcgctttacctgatctatattggctataaaacttttactcaaaaacctgttttagactctgctgctttaaattctataggtactcttcaagcgataaaatacggcttttttactaacgccctgaaccctaaaaccacgctatttgtgattagtacctatacgcaaattgtgagtttaaccacgcctaaaaccattcttttagcttatggcttttttatgtcttttgctcattttgtatggttttcactggtggctgtactgttttcatccatactactgagacagaaaatgttagccaagcaagtccagattaatagggtgattggttcaatcttatgtgtattaggggtgattctgctttttactaagtttcagtag

SEQ ID NO: 56268 - DNA, 1056 bp, Acinetobacter baumannii
atgacctatatttataaaaatcctgccggaatgaccgatagcgaaaaaacggaacatattaaaaaagtagtaacagcagaaggcgtggctttacgcaaacgtcatcctattttgaaccatcaaaatgccattggggcgatgattctatttatatctttggtcggcatgatagcgactgccgtgctctatataaatcatcaactttcagcttggtttgcaattccgattattgcttttttcgcatcgctcacccatgagttagagcatgacctgattcactggatgtattttagaaagaaaccatgggcacatcatttaatgatgggcttagtctggttagctcgaccaagtaccattaacccgtggaagcgtcgtgagctgcattttaaccatcataaaaactcaggcaccgaagttgatttagaagaaagagctttaactaatggagagcagtggagcatacgtcgactcatcgcgattggtgataacggcttggcggtcttgttccgtattatttctgcaagcaattggacggtgagaaaagtaatttttaaacgtgcatttatggcttattttccgttaggaattattcattggtcgctgtggtatatctttttaggttttcatgcagtagatgctgttttaagttgggcgaatgcaccgattgcttggtcagctaccactttaaatattatgcatgtggttaatattttgactgttgtttgggttgcaccgaatgtactgcgtaccttctgcttgcactttgtgactagcaatatgcattactacggcgatgtcgaattgggtaatgtcattcagcaaactcaggtgttaaaaccttggtggatgatgccgttccaactgttttgctttaactttggttcaacgcatgccatccaccattttgtggtgaaagaaccattctacattcgccaaatgacggcaccggttgcccataaagtcatgcgtgatatgggagtacggtttaacgatgttggaacctttaaaagagcaaatcgttggaacataaatgatttatcagagtcaaaaagttaa

SEQ ID NO: 56269 - DNA, 1008 bp, Acinetobacter baumannii
atgccacagacagcaacggcactggctagctgggtgaaagcgattcaaaaagcgctcgaaaaagccggtgttgatagtcaacctttattagaacaagcaggtttagatattcaggctctgagtaatcctgatgcacgatattcattaaaacaaacagcaaatttatggaaattagcagttcagaaaactcaagattcatgttttggccttaaagttgccagccaagtcaatcaaaatacttttcatgtgttagggcattcactgattaccagcaccaccctaaaagagatgtttctaagaattattcgttattttcgtgtggttacggatattccagagctagagttttatgggcaaggaaataaccattatttcgttattcatgttcccgacgaagttcagcccgaatctatcgatgcatttatttccgtttttattcgctcaagtcgtgctttacaaggctctgttttttcgccattacgcattgaacttagacgttcagaacctgaagatttagaaacattccagaatattttaaaagctccgattgtgtttaatgcacccaaagacatgattgtgtttgatacagcaaccatagaacaaccactagaaggtgcaaatcccactctcacccaagaatatgatgaaattattaatcgttatctggcacggttcgataaagaaaatatattggcacgagtgaaagtaaaattaatcgaaaaattatctacaggcgactttcagcaacaagaaatagcaaaaagtttagggttaagtattcgtagcttgcaaaggaaactctcggcagaaaacacttcatatagtgaactgttagatgacacccgtcatgaactggcactttcttatataaaaaacacaggccatagtgtgactgaaattgcatatattttaggttttacagatgtcagtagttttacacgtgcttttcgacgttggaccgatttatcgcccatccattatcgagaaaaatatctagcttgctcttaa

SEQ ID NO: 56270 - DNA, 1368 bp, Acinetobacter baumannii
atgaataaaatcattaaaaacggtatgtttttagggttgtcgactttgatttcaggttatggaactcttctccatgcggaagcaagtccaacaaatttacccgtagtttcacaaaaagcgttaaccattattgatgggcaaaccgagtggttaaataaggtctataaagacattcatgaacaccctgaacttgggtttatggaaaagcgtacttctgccattgttgccaaagagcttaagtcactaggttttgacgttaaaacgggaatagccaaaacaggcgtggtcggcattttaaaaaatggtgaagggccaacggttatgtaccgtgccgatatggatgccaacactgttgaagaggcaactggtctaccatacgcgagtaaagtgcgcgtaaaacttgatgatggaaccgaaacgcccgtagcacatatgtgtggtcatgatgcacatatgacatggatgctcagcatggcaaaaacattagtcgctttaaaaaaggaatggaacggaactgttattttagtcgcgcagcctgctgaagagccaataacaggtgctaaagctatggtgactgacggtttatggacaaaatacaacttaccaaaacctgattatttctttgccgtacataccacacctgcacctgtgggcgttgtcatcaatgcaccggggccacgtatggcaggaacagatcagcttgatgttttatttaaaggtgtgggtggacatggttcattaccaatgctcaccaagaacccgattagcatggctgcaaacgcagtgactcaatatcaaaccattatgggtaatgcagttgatccgcaacaagcggcagtgttatcgattggctcaatccaagctggaaactcgaataacgtgattccttctactgcattggtcaaaatgaatttgcgctggtttgatcctaaagtgcgtgaaaccatgctaaataatattaagtctatgagtgaaggtgcggcccaaatgcaggggatgggtaaagatcaattacctacctttacgtttaaaggttcgagcacacctgtagttaacaataaagaattttcggcacgtttaaatgggcctttaaaagcactattgggcgataaacatgttctaactgagtatcccgcggttatgggatcagaagatgttcatcatttattaggcgaccaaaaagacattccttttaactttatgtttattggtgtagcagacccagttgtgtttgcaaatgcagtcaaacaaggcaaacctgtgccttatattccacatagtccaaactacattgttgacttaaaagctttgccagttggtgccaaggtcactacagtttcgatgttagaactactcactaaaaagtaa

SEQ ID NO: 56271 - DNA, 1386 bp, Acinetobacter baumannii
atgaattttgttgtgaataaaaaaatatttatcttaggaatagcatcgatttgcacaagcacattacatgctgctgcatttgataaaacagggcagtctgtagcggcatttttacaactgggcaactattttgaagcaagtttaggaataacagatgccgatttaagtggtgtagagtcgggtaccaacccttcacatcattcaatttcagatatcgccaataccgattatcggcctacggcagcgttaaaactacagttggcactgcagtattcatttggtctgttatatgatcagccttttggtgctgacacggaatattcaggtgtaaatggcttcgttgcaacgcctaaagataccgttatgttacctggaattacaaccacagggcttgccagcgctacattgggccatgctcctacaggaaatgcaaaatcagaatttgatatacaaaatttaagcttcattttgggttaccaacccacaaaaaactggaatctttatgcggggccagtctatcaaacttttaaaagtcaggttgaattaaggggtaatgtatttagtctctataatggatatgactttcatactaaaactgtcagtgatttagggtggttagcaggacttgcttaccaaattccagaaaaagctgtgaaagtctcattaacctaccgttcagccattacccataaagtaaacgcgactgaaaacgctcctttaattgatatgttaagcactcaacaaggtcgtgatttagttaatcagcatctagattacatgatttctattggtcagatgactccacaaaagaaagcttacttaaatcagattattgctaatttgccagaacaagaagatacaggtacaacaaaatttaaatctcctgattcagtgaatttggagttccagactggactgcgtcagggaacgttactatttggtagtttacgctgggtaaattggagtgatctcgctctacagccttatcgctttggtgagatctcaaaagttgttggcgtactatcaacgccaagccgcccggaaggttttaatttggttcgttattatgacgaccaatggtctttaaatttgggtttaggacaacgtttttcgccaaaatggttaggttctgtgtcagttggatgggactcaggagcaggcgataaagtgtcaacgggtggcccaactaagggatattacaacttgggcgtgggtgctcaatatagcccgacatcgcaatactttatttctggcggtgtgaagtattactggttaggcgatgcaaaagctcagcttggcgcacaggcgggtagtgactattatgtaggtgagtttaaggataaccactcagtaagctatggcttaaaaattggatataaattttaa

SEQ ID NO: 56272 - DNA, 930 bp, Acinetobacter baumannii
atggaaatcaagcaaataaagtattttttgacggtcgttgaatcaggcagtattggaaaagctgcccaaaaactcgatgtgggggcttcggcgattagtcagcaaattagtaagctcgaacaagagttaagcattcgcttattacagcgtaatgcttttggtgtgaccccaaccccagcaggtcttgcctttttaaagcactctcaacttattttgcgtcaagtgaacttcgccatagatgctgcacattctgcacgactgtctggacatgtcagccttggttttccaccgaccattaccgctttaattggcatccctttaatgaaattaatgtctgaacgttacccagacattcgtttagagattgtagaaaccctgtcggggaacctgattcagtcgattaattcgcgtcagcttgatatcgccattatttttaccaatgaaattgataaacagtggtcaattcaacccttggtacgcgagcaaatgtatttaatggcacgcaaagaagtgctcgaaaaatacggacttagcgaatgtattaaaagcggaattattcagtcgcagcaaattggcgatattcctttagtgttgccacgtcagcgtcatagcttaagaaaattgcttgagcacaagattgggcagctcaatgtcgtctatgaaattgatggcttgcatttgcttatggacagcctgattcatcttgaccttgcaagtgtgaggcccggtagtgcttgcttacaagagtataaacacaagctgcaattgcttaaggttgtcgaccctgaagttgaacgaattaactatttggtgagccttgccgaagaagaattatcacctgccgcacttgctgccaagtcagccattaaggcatgtgtgaaagagttgattcaaaaccagatttggccatgttctgaaattattttataa

SEQ ID NO: 56273 - DNA, 1311 bp, Acinetobacter baumannii
atggatgtcgttaataaccgtagggctacttttaaaaaaatattaaatgtaacgagtggcaactttttagaacagtacgatttttttctttttggtttctatgccacctatatcgcagcaaagtttttccattctgataatgaatatgtctctttaatgatgacatttaccgtgtttgctgcgggttttcttatgcgtcctctcggcgctattttcttgggtgcctatgtcgacaaagtcggtcgtcgtaaaggtttgattgtcactttaagtcttatggcaattggcaccatcttaattacctttgtgccgggttatgaaactattggtattatcgcgccaattttggtggtaattggccgtctattacaaggcttctcggcaggtgttgaatctggcggtgtttcaatttacctcgctgaaattgcaaccgataaaaatcgtggctttattactagctggcagtctggtagccaacaaattgcggttgtgtttgcggccttacttggttattggctcaacaccattttaactcatgctcaagtgggtgaatggggctggcgtattccattcttaattggctgtttaattattcctttaatcttcttgttccgtcgtactttagaggaaactgaagactttaaagcgcaaaaaactcatccatcttcaaaagaaattttcagcacacttgtaagcaactggcgcattgtacttgccggcatgatgatgagtgcgatgactacgacaactttctactttattacggtttacaccacggtgtatgcgaaacgtactttagaaatgtcggtaacagatagccttttagcaaccgtgtttgtgggtttgtcgaatttcttctggttaccaatgggtggcttactttccgacaaaattggccgtcgtccagtattagtgggtattacgactcttgcgatctttaccagctatccagttttaagctggttggtgagcgacattagcttctcaaacctacttattacccttgcttacttctcgttcttctttggtatgtacaacggcactatggtcgcaacacttgccgaagtgatgccaaaacgtgtacgtaccgttggcttctctttagcatttagtcttgcagccgcgatttttggtggtatgactccaatggcttgtaccttccttgtcgaaaatacaggtaatgcaagcacaccagcgttctggctcatgctcgctgcggtatgtagtctcatctcaagcttgtatttatgtcgtggttctaaacaaaaagaccctgacacgattgctgaacctgcaaaggttagcgcttaa

SEQ ID NO: 56274 - DNA, 795 bp, Acinetobacter baumannii
atgaaaaagtcccctatcttcataactatttgcctagctggtgcaggcttaggatctacatttgccaatgcagatacgctcgaagtaattagctcaggcggtttctattcatctatggaaaaactcattccaatatttgaaaagcaaactggtcacactgttcacctctcatctggttcgtctatgggggagtcaccgactgcaattccaaatcgactcaatcgtggtgaacgttttgacattgttgtgttggctgctcctgaactaagcaaactcgcagaaaaaggttatgttgacccaaactcacaaagcgctttggtgaattcaagcattggcatggctgtgcctaaaggtgcaccaaagccagacattagctctgcggcaaaatttgaaaaagttttattaaatgccaagcacataggctattctgcaagtgcgagtggtacgcatcttgaaaaagatgttttcccaagctttccacctgtcgaatacaaagtaatttcgagtaaagcagaaaaagtggtaggcgaccgcgttgcaaaacgtattgccgaaggccagtttgatattggtttccagcaaattagtgaaatcaaaccttttaccggcaaatatggtcaagttgagttagttggtccaatccctgcgccttaccaaaaagttaccgtatttgctgctggtattggtaaaaactcggaacatgcaaaagtcgcaaaagagttaattaaatttgtgaaatcgcctcaagcgacacaaattattgaagaacagggtcttgagcaggttaaagaataa

SEQ ID NO: 56275 - DNA, 930 bp, Acinetobacter baumannii
gtggaacttaaacaattaaagtattttattgcagtgatcgagtcaggaagcttgggtaaagctgcaaaaaatctcgatattggaacgtctgcattaagtcagcaaatttcaaaattagaaagcgagctttctattcgccttttacaacgtactgctttgggtacggttcccacccctgcgggtttagctttttttcaacaggttcaactggcacttagacacctagaccatgccatagactctgcgcactcctcacgtttaagtggccacgtcaccgtcggtttttcaccgagtgttgcagctgttattggcacacactttttaaaactgatgagaaaccgttaccccgacattaaagtccgtttaatcgaaggcttatcgggtgacctcaaagctttagttaatgcaagacagctcgatgtggctatcatctttagtgatgatgtcgacccacagtgggccatacaacctttagtcaaagaacagatgtttttaatctcgcctaaagaagtactgggtcagtaccatcttgaaagctgtatcgacactcaaaccattactcatttacagcttaaagaacttcccctaattttaccgagccaacgacatgggctgcgcttgttgcttgaacagaaaattcatcaacttaaagtggcatatgaaattgatgggctgcatttgttaatggaaagtattagccaactcgaaatggcaaccattcaacctgcgggtgcatcgttaaactcgcggcaagacctgtgtttactgcgcgttgtagaacctgctattgaacgcattaactatttaattagtctctctgaagaagaactctcgcctgctactttagccaccaaagtagtaattcgtgcctgtatcactaacctgattaatgaaaagcgctggtctggtgcggaactcataaacacttaa

SEQ ID NO: 56276 - DNA, 1407 bp, Acinetobacter baumannii
atgcatgatgtaattgtgattggtggtgggaatgccgcactgtgtgccgcgctcacagcaaaagaaagtggtgcttctgtactggtaatagaggcagcgcccaaagagtggcgtggtggtaactcacaacacactcgtaacctccgttgcatgcatgatgctcctcaagatgtattagtcgatgcctaccctgaagaagaatattggcaagacctacttaaagtgactgcgggcaaaaccaatgagcacttagctcgtctagtgattcgtagcacggcgacctgtcgtgactggatgcgtaaacatggtgtgaattttcagccgccgctctcaggtgccttacatgttgcacgtaccaatgccttttttatggggggcggtaaagccctcattaatgcgtattaccgaagtgcccaagaacttggcatcgaaattttatacaacacaaaaattaaagacctaaagttaaaccaaggatattttgaagctgcaattgcggaagatggccgtgtatttaaagcgaaaagctgtgtattggccgcaggtggttttgagtcaaatttggaatggttaagagaagcatggggacaaaatgaaaacggcgaatggcctgccgataatttcattattcgtggtacccgttttaatcagggcaacttactcaaatttatgatagatcaaggcgccgatattattggtgacccatcacaatcacattgcgtcgccgtagatgcacgcgcaccgttatatgacggcggtatttgtactcgtattgactgcgtttccttggggattgtggtcaataacaaagctgaacgtttttacgatgaaggcgaagacttctggccaaaacgttatgcgatttggggccgtcttgttgccaaacagccacagcaaattgcctattcgattatcgactcaaaagccattggtcgctttatgccccctgtgtttgcgggtgtaaaagcaaatagcattcaagagttagccgaaaaaatcgggctggatgcaaaaaccttataccataccgtagaagaatttaatcaagcctgtgtgcaaggcacctttaaccataccgttttagatgactgcaccaccgaaaatattgttcccaacaaaactcattgggccgttcctctcgaccaaccacccttctatgcctatgcgcttaaacccggcattacctttacctatttaggcttaaaagtcgaagacgatgctgcggtacgttttaacaataaaccaagccgtaacctgtttgtcgcaggtgaaatgatggcaggtaatgtactcggtcagggttataccgcgggcgtgggtatgtcgattggcacgacctttggacgcattgccggaaaaaatgcagcccactatgcactttcacaaggagttgaacatgaatgctag

SEQ ID NO: 56277 - DNA, 1134 bp, Acinetobacter baumannii
atgaatgctagtaccaaagccctaattccagttgttcagctctcagaccacgagcaagaagtccaaagagccctacagatttgtaatgcttgtcgttactgtgagtcattttgtgctgtatttgctgccatgaccaaacgtcttgagtttaaccaagccgatattcattacctcgcaaacctctgtcataactgtggtgcgtgtttacacgcttgccaatatgccccgccacatgagtttggtgtaaatattccaaaagcgatggcgcaagtacgtttagaaacttaccaagagtttgcgacccctcagcctttaggtcaactttataagtctgtaggtattccttttgtttcgacgttaacactcattttctttttttgcatgttagctgtagtgtggtggaaaggcactgacttatttgcaggctatcaaggtaatttttatgcgattttcccgcataactttttagcactactgtttggagcgacctttacagttgcaattgttttactcggcattggaattagcaaattttggcgccagacgtctaaagttattcatggcaaagttgagaaaccagacttagttcaagccacccaaaatgtattaacgcttaaatatttagatggtggacatggcaaaggctgtaatgagcaagatgaccgttacacacaaatccgccgtgtgttccatcacctgacgttttatggctttatgctctgctttgcagctacaggtgtagcgactttatatcactattttcttgacctacatgcgccttaccctatctttagcttgcctgtgattttgggtactttgggtggaattggcttagttgtcgggcctgctggcttactctatttaaatcttaaacgtcatccgttgcatggtgaccgtgagcaaaaacctgtagatcgaggctttattttccttctacttattgttagcgcttcagggctagtacttatggcatttcgtaataccccttacatggcacttttactgattttccatttagctacagtcatgacattctttattaccatgccatttggaaagttcgcacatggtttttaccgcagtgcttctttactcaaattcgccatcgaagagcgtatttcgaagaagtcataa

SEQ ID NO: 56278 - DNA, 1230 bp, Acinetobacter baumannii
atgggtgcattacaaggaattcgggttttagatttaagtcgtgtgcttgcagggccttggtgtgggcaaatcttggcagaccttggcgcggaagtgattaaaattgaacgtcctcgagtcggtgatgacacccgtatgtgggggccaccttggatgcccgatcaagatggaaacatgacccgtgaatctggttatttccagtgtaccaaccgcaataaatattcggttgcagtggacattaccacaccagaaggtcaggccttaatttatgaaattgccaagactgcagatgtcgtgattgaaaattataagacagggtctttggctaaatatggtttggactacgcgtcattaagtgagttgaacccgaacattgtttattgctcgattaccggttttgggcaagatggcccacgtgcagaagaacccggttatgattttattattcagggtatgtctggcttaatgagcattactggcgaacctgatgatgtaacaggtggtggtgcacaaaaagttggagtggctgtggtagatattcaaactggtttatattcaaccattgccattcaagctgccttgattgcacgttcacacacagggcgtggtcagtatattgatatgtcactccttgatgtacaggtcgcggcactggcaaatcagggaatgaattatttagcttcgggtaaagcgccacaacgcatgggtaatcaacacccaagtattgtgccgtatcaaacttttaaggctaaagataaagaatttattattgcttgtggcaacgacaaacagtttaaagatttgtgtattgcgattggttatccagagttgctcgaaaatgaaaagtttgtgcgcaaccaagaccgcgtaaaatatcgaaatgaactgatacctttattgtcggaacactttttgcgaaaaactgctaaagaatgggtcgacatgattcatgccttaaaagtacccgtaggtgttatcaactctattgaagatgctttagctgaaccacaaattgtgcatcgcaatttggtggtgaacattcctcatcgtttaaatgaaaacttccaaaccattggctcaccaatcaaactgtctgatactcccgttgaatatcgtcatgcaccgccggagctaggtgaacatactactcaaatcttatcgagatttaaaacagcagaggagctggctacgttaaaagagaaaggcattattgatgggaagattgcttaa

SEQ ID NO: 56279 - DNA, 1323 bp, Acinetobacter baumannii
atgaacaatgacgttcaagtaatatcgaaagaattaagaaatacatttccaagtaaccttggaacatacgaaaggattggacctcatacatggaaatgggcgttgttatttgcctattttgcgatggtggtcgatggcattgatattatgctgctgtcttatagcttgaccagtttaaaggcagagtttgggttaactacctttcaagcgggtgccttaggcagtgcttctttagcaggtatggggattggcggtattttgggtggctgggcatgtgacaagtttggtcgcgtacggaccattgccaactcggtgactttcttttctgtagcgacttgtttgttaggctttacgcaaagcttcgagcaatttatggctctacgttttataggtgctttaggaatcggagcactctatatggcgtgtaataccttaatggctgaatatgtgccaaccacttaccgtacaacggtcttgggcacgttacagacgggccagactgtaggttatattgctgcaacgttattagctggcgcaattattccagattatggctggcgcgttttattcttcctgaccgtagtacctgctttcgttaatattttcctgcaacgatttgtgccggagccaaaatcttggcagctcaccaaaattgaaagcttacaaggcaacagacagcctaaagaaagagtggtggctgaaaagccaaaaagtagcagtatctacaaacaaatctttaataactttaagcaccgtaaaatgtttttgttgtggatgaccacagcattcttcttacagtttggttattacggcattaacaactggatgccaagttatttagaaacagaagtgcatatgaactttaaaaacttaaccagttatatggtgggttcatataccgcaatgattttaggaaaaattttagcgggctatcttgcagacaagtttaaccgccgtgctgtttttgtatttggcacaattgccagtgctgtgtttttgccaatcattattttcttcaatactcctgacaatattttgtatttattgatcacttttggcttcttatatggcattccatatggtgtaaacgcgacctatatggctgaaagtttttcaaccgacgtgcgcggaacagccattggcggtgcctataacattggtcgtgtcggagccgctattgcaccagctatcattggtttcttggcatcgggcggtacgtttaccatggcctttattgtgatgggcgctgcgtattttgttgcgggtgtattgcctggcttatttattaaagatcgtcagtacgatccacaaagacaatcataa

SEQ ID NO: 56280 - DNA, 1221 bp, Acinetobacter baumannii
atgaatcacatggtgacaacaaaaaaagcaaaagttcaatttaactggcaagacccatttttaattgagcaacagcttagcccagatgagcgcatgattcgtgatgcggctcatgcctattgtcaagaacgtttgcaaccccgtgtacttgaacaattccgtcatgaaacaacagatccatctattttccgtgaaatgggagagcttggcttactggggccaaccattcctgagcaatatggtggcgcaggtttgaactatgtgagttacggtttggttgcgcgtgaaattgaatatgtcgactcgggctaccgctctatggcgagcgtgcaaagctcattggtgatggttccgattcatgaatttggtaccgaagagcaaaagcagaagtacttacctaaactggctactggtgaatacattggttgttttggtttgaccgaacctgatcatggttcagatccgggcagtatgattacacgtgctaaaaaagttgatggtggttaccgtttgactggcgcaaaaatgtggattaccaatagtccaattgcagatgtatttgtggtctgggcaaaagaagtttctgctgaaggtaatgtgggtgacattcgcggcttcattttagaaaagggctgggaaggcctatctgcgccagctattcatggcaaggtcggtttacgtgcctcgattacgggtgaaatcgtgatggataacgtttttgtacctgaagaaaatgcattccctgaaattcgaggcttaaaaggcccatttacctgtctaaacagtgctcgttatggcattgcatggggtgcaatgggtgctgccgagttctgttggcatacagcacatcaatacaccatggaccgcaaacaatttggtcgcccgttggctgcaaatcaattgattcaaaagaagctggcagatatgcaaactgaaattgctttgggtttacaggcagctttacgttttggccgcatgaaagatgaaggcattgcatcagttgagggtacatctctaattaagcgtaacaactgtggaaaggcgcttgatattgcccgcatggcacgtgacatgatgggtggaaacggcattagtgacgagtttggtgtggcacgccatttggtcaatcttgaagtcgtaaatacctacgagggtacacatgacgttcatgccttgattttaggtcgtgcacaaactggtattgccgcatttagtaactaa

SEQ ID NO: 56281 - DNA, 948 bp, Acinetobacter baumannii
atgcgaaaaagtatcccgtccattcagggtctaatttgctttgaaagtgcagcaaaacatctaagttatacctatgctgcgcaagagttatgtattacccaaagtgcagtttctcgccaaattcaacaattagaagatttcttaggcgttgaactctttatacgtactcggcatggtgtcgaactcaccattgctggtcagcagtattttaaaagtattaagccctacttattaggtttagagaaatgtacagccgatgtgatttctcataagggtttaggtggaacattaaagttaggtgtggttcctacctttgcaacgcgatggttattacccaaactccatcttttaaatcaaaaacaccctgaaattacggttcatttagaaaccagtactaaaccttttttatttaatgacaacatttttgatgctgcgatttttgcaggtacgcaacagcaaattgaccactggcccggcatacaagcacattatttaatggatgaagaaattgtacctgtgtgctcaccaagactaatcgaaaagtattttccagatgctgtgatgattaatgaaaatacctatgatttaagcccagaagatttattaaaaatccctctactacaacaaaccactcgacctagcatttggcaagaatggtttctaactcatcagatgcaacaccctaagccttttgatggacagcgccatgagttattttcgatgcttgccgttgctgccagtcatgacatgggaatggctttaattccacaaatgttgattgagtctgaactacaaaaaaaagaactagtaattgtttccaataaaaaactaaaaggcagccggaagtactatctcattcattcgagccaagacatctcaccgactattcaaaaatttgttgagtggatttaccaagaactagaacaactaaagaccaataccaattag

SEQ ID NO: 56282 - DNA, 1176 bp, Acinetobacter baumannii
atgaagtcggtactttgtcatcaagcaacattgcaagtagtggaccaaccgaacttaacacctgcaaaaggacaagttttattggaagtggtgcgatgtgggatctgtggttcagatttacatatgcagcatcactgcgaccacatgcatgatttggctgcacgtgtcgggtttaatggtttagcgaagtctacagacccatttgtacttggacatgagttttgcggcaaggttttagactacggtccaaaaacacgccataaatttaaagcggatacactcgtttgcgcaatgccgcttttaaatgtagatcagcatggttatttgtctacagggctttccccaaatgcttcgggtggctatgccgagcaagtattggctcaatcaagcttgatgtttgaagtaccgaatggtctagatgcggatagtgctgccatgaccgaacctatggcggttgcattgcatgctgttcgccgtagccgtgtaaaaacaagtgaacctgcgattgtgattggctgtggtcctgtcgggctaggtgtcatattaatgcttaaagctgctggggttaaaaccgtagttgccagtgacttttctccaaaccgacgtaagcttgccgagcaatgtggtgccgatattgtggtagaccctaaagagacatcaccatttgccaactggaaagaatttggtttgcttggcaatgtatcagatgcaattaacatgggtatgggactatttgataagttgcaagcgacacgcttaccgtggtggcatggatggcgcatgattgacaaattaggcgctctaccaaaacgtcctgttatttttgagtgtgtaggcgtaccgggtgttttgcagcaaattattgaaggtgcacctttgttttcccgaattgttggggtgggcgtgtgcatgcaaagtgataaaatagaacccgcacttgcaattaataaagagttagaaattcagtttgtgttgggctatacaccgcttgagtttagagatgcgctacacatgattgcagaagggaaagtgaactgttcaccgctcattacgggtgttgttggcctagaaggtgtaactaatgcatttgaagcattacgtgatcctgaacagcatgccaaaatcttgattgacccgaaacgtagcggttcagatattcaattaatgagtcattaa

SEQ ID NO: 56283 - DNA, 1020 bp, Acinetobacter baumannii
atgcaaacagataagaagaaatttatgattactaaaacgctcccgcttacagatatacaccgccaccttgatggcaacatccgcattcaaaccattttagagttggggcaacaatacaatttagatttgcctgcttacgacatagaatctttacgaccacacgtacaagtgatggataaccaacccgacttattaagttttttatctaagctcgattggggcgtaaaagtattagccagtttagatgcctgtaaacgtattgcttttgaaaacatgcaggatgcagcacagcaaggactagactatgtagaactacgtttttcaccgggttatatgggaatgacccatcaacttccacttgaaggcgtagttgaagctgtgattgctggaataaaagaaggtagtcaggcgtacggcgtaaaagcgaatttaattggtattatgagtcgtacttttggtcaagaagcctgcgaaaaagaattaaatgccctccttgcccataaaaacgatattaaagcactggatcttgctggagatgagcttggttttccgggcaatttatttattgatcactttaaaaaagcacgtgatgcaggttggcacattaccgtacatgcaggcgaagctgctggcccagaaagtatttggcaagccattgaagaattaggtgcagaacggattggacatggtgttaaagcagttcaagatttaaaacttctagattatttggctaaacaccagattgggattgaatcttgtctcacctcaaatattcaaaccaacacagtgccttctttagcagagcatccattaaagacttttttagaacatggagtgcttgctaccattaatacggatgacccagcagtagaaggcattgagatacagcatgaatatttaactgctgccccattggcaggtttaagtcctgagcaaatttatacagctcaagaaaatggacttaaaatcgcatttttatcacatcaagaaaaagatgagttaagacagaaatatcaataa

SEQ ID NO: 56284 - DNA, 1065 bp, Acinetobacter baumannii
atgagtgatgcgactttaattgccaacgatgcaaaaaacattgtacaagcgcatttagaccgtttaggtgaaccaaaagacaaccgcctaagtgaagaagcaaaacaacaaaagtttgcacagatcgaagcagagctcaaaaaacgtgatgctgtccttgttgctcactactattgcgatccagatgtacaagaacttgccgaaaaaacaggtggatgcgtttctgactctttagaaatggcccgttttggacgagatcatgcagcctctacactggttgtggctggcgttaagtttatgggtgaaacagcaaaaattctgtctcctgaaaaaacaattctgatgccgacacttgaggcaacctgttcacttgacttaggttgtccagtcgatgagttcacggcattttgtgatcagcaccctgaccacactgtagtagtttatgccaatacatcggctgctgttaaagctcgtgcggattgggtggtgacttcaagctgtgcagttgaaattgttgagcacctagatagcttgggtgaaaaaattatttgggcaccagatcagcacttaggtcgttatattcaaaagaaaaccggcgctgatatgttgctttgggatggcgcatgtattgtgcatgaagaattccgtgcacgtggcattgctaacatgaaagcactgtacccagatgcggctgtattggtgcatcctgagtcaccagagtcggtggtagaaattgccgatgcggtaggtagtacatctcaattgattaaagctgctcaaactttgccacaccaacgtttaatcgtggcaacggaccgtggcattttctacaaaatgcagcaagcagtaccagataagattctggttgaagccccaacagcgggtgagggcgcaacttgtcgttcatgtgcacattgtccatggatggccatgaatgaacttgatggaattttagaagttttacaaaaaggtgatcaagaaatacacgttgacccagcacttgctgaacgtgccaaaatgcctttagatcgaatgttagcctttagtgcatcattaaaacgttaa

SEQ ID NO: 56285 - DNA, 516 bp, Acinetobacter baumannii
gtggcaactggtcaggctggtggtgctgaaattacatcggaaagcgatgtacgctacgctaaagtgttagaagtacttgctcgtgtaatgaaccgtttagcacagttaattgtccgtgatggagaaggtgcaaccaagtttattactgttgctgttgaaggtggtgcaaatactcaagaatgttgtgacattgcttatagtattgcgcattcaccacttgttaaaactgcactttttgcatctgatccgaactggggtcgtattttagctgcaatcggctatgctggagtgaaagacttagacgtgtctaaaattcaggtatggttagacgacgtgcaaatctgtaaagatggtggcgcagccgaggactataccgaagaagcaggtgctcgtgtaatggcacaaaccgaaattaccattcgtgttgacttaggccgcggacaagccaaagacacggtatatacgtgtgacttatcttacgactatgtcaagattaatgcagattaccgttcgtaa

SEQ ID NO: 56286 - DNA, 162 bp, Acinetobacter baumannii
atggcacgttacaaagctggagtggatagttattttacggttttagatgctcagcgttctgcttatgctgcacaacaaggcttacttgcacttgaacaaataaaattaaataaccaaattgaaatttataaagttttaggaggaggaatatcaaaagtctaa

SEQ ID NO: 56287 - DNA, 1062 bp, Acinetobacter baumannii
atggataacgtagctcagctagaaactgatactaatttccaaagccgaaagaaaataacttggggtgtttttagtgtcctgctgttatttttagttgctggcatcttatattatttttttgtataccgattctatcaatctactgataatgcttatgtacaagccgatgtcacttgggtgatgccaaagatttcaggcgaagtgatggagttattaattaacgataatcaggtggtaaaaaaaggggaaactttagcggtattagaccatcgtgactaccaagctcgatatgaccaagcccgttctgtggtcagcctaaaagaagcagcgcttggtgtacaacaacaaaatgaaaagtctgcacggtcgtcaattattgaagcaaatagtggtgtagtggcagcgcaagcagacctagcgcgtttgaaaaaagagttcgagcgttatcaagatctattaaaagatggcgtaattacccgacaaaattttgaagggattcagtctcaatatttaacggctcaggcacagctcagcaaagcgcaagccgccgtaaatgcagcagaagctcagttggggagtttacaagcgagtcgagcgcagcttttagcagatattcaaagtgcccatgcaaatttaaacctgtatcaggtcgatttggcttcatcaaaagtggttagtcctgtaagcggtaaaatcggtagccttgcaatccagaaaggttcacgtgtttctccacaaacccgcttaatggcgatcattcctgaaaatagtttgtatgtacaggcgaacttcaaagaaactcaaattgaaaaaatgcatattggtcagaaagttaaattaaaacttgatgcctatccgagccttaactttaccggaaaaattgagagtttttctcccgcttcaggcgcgactttctcacttatgccaccagacaatgccacaggcaactttaacaaggttgtacagcgtattcctgtacgtatcgccatagattcaagcccacatattgatttgataaaacctggaatgtcggtgagcgccaccgttgacctaagaacttaa

SEQ ID NO: 56288 - DNA, 1047 bp, Acinetobacter baumannii; identical to SEQ ID NO: 56017

SEQ ID NO: 56289 - DNA, 1167 bp, Acinetobacter baumannii; identical to SEQ ID NO: 50958

SEQ ID NO: 56290 - DNA, 768 bp, Acinetobacter baumannii; identical to SEQ ID NO: 50788

SEQ ID NO: 56291 - DNA, 1188 bp, Acinetobacter baumannii; identical to SEQ ID NO: 50936

SEQ ID NO: 56292 - DNA, 696 bp, Acinetobacter baumannii
atgattacatttgatccggtgccaataggcgatagtacttttcaaatgcatgaattgagttttgagcaatgtcttaaaatttcaatcattgccccgaatttaaatgaaaaaagactttcagctttcgtgaagtcagttttagataatgtggatcctttacttttaacaattcaagagcggtatttattgctacttaagtatcttgagaaacaaagtaatactatgttggaggtgaacactgactggtctaaagttttccttcaatcagaaaataattggaaaactgaaactacgcaaaatggaattacggttagacagcttattggaatggaagcggagttcttagaggcaaattgtaagaatgtcgctgaatggattgcctgtatgatggcatttcagttgagttattctaatcatgaacacttggctttattgccggatagaacaaaccctcaattatttgaagaacaatttaagcagcggctagatttcattaagaaaatgccagctagtgattttgatttgtgctatcaagactttaataatttaaacaatgagttatttacacatttacggttaagcgttgataaccacggtattttagtggaaagaggtgcagatgacgcgcctgcacgatttcgcaccgcttccgtctttacaggaatcatcaaagagttggaccgatcttttgcttga

SEQ ID NO: 56293 - DNA, 795 bp, Acinetobacter baumannii
atgtccaaagctttagcatatgcaccagctataaacacagcaaaaacaaaattaccagagacagaagctgatcccttatatcgttctatctcaaaacataaatatgcagagttttcactttgtgataaagaaggtaattctattgcttcttcaccagtaattcgagcactcttaactgatggtgataagagtatagagagtcaatggcagaccccatttgagaatagcaatccagaattaaaaatgccgatgttgatggcagggctacaatcggggcagttatctcaaactgccgaacaaatgaaaagcaatcctatattgcaagttttatctaaacttggggtccaagatgctatgcagagtgtagaaggacgtacaaatctaactaaagtgaatacaacacaagtatttttatctacttcttcagtacgacttaatttatcaatttttttcttggcttttagtgatgcgaaaacagaagttgaagacaagatcatgcaattagaggcttggagcgtaccagtaacattatcttctgagtctacgctgcagaatgtagttaacgattcaaatactactttagaaggcttgttttcaggtgtcattccaccgtttgtatctcttactactcacggcaaaacttataagcctttcattattgaaagcgtttccgcgccaattgtcgcgcccattgatgaaaaggggaaccggttaagtttggccgtcaatattagtttgttgagtcgaactgcatgggattcgaaagatatttactcattgtatggagtcaaataa

SEQ ID NO: 56294 - DNA, 204 bp, Acinetobacter baumannii
atgacgcttaaagaaaaaattttgtttttgacagtcactcgtggttacacccaacaagaagtaagtattgaaactgggattgaacaaagctccgtttcacgaattttaaaaaacactcaaaaaagtgtggggtatcagaagggcatcgctttagatgcgtttgtgaaccgtgaaaaagaaaaaatgcaatctcaaacagcttaa

SEQ ID NO: 56295 - DNA, 774 bp, Acinetobacter baumannii
gtgaaatctatgaattacctgaaatcgaatcttgattatttgctcacaaagaatgaaacaaaccccactgatcttgagcaaaggcacccagagattaaacaatcgactgtattccgcattttgaacggaattactaaagatcctagacgctctacattagaacctattgctaaatgggcaggcgtaactgttaatgacttatttgataaagatttatctgtcttagaaagaaatcaaaacgaacataatccaggtcctgagaataatttaatttatgatactgagatccatttatacgaagatggtgaccctgttcctgatggttatgtagctattgatttctatagtgaaattaaggttagtgcaggaagtggttacttgaacattgaacatcaaagccctcataagttcttatttccaattaatgaaataagaagatatgacgttaaacctgattgtgcgaaggtactagttgtagatggtgaaagcatgatcccggatttatatccagggcaacgaatctcaattgatacatctgctaaaagaatctttgatggtgaaatttatgcctttttgaaaggtgatgaattaaaaatcaagatgttatttgaatggaatgaacaaggtaaaggtggcttcaaggcagtatctcgtaatacagacaaagttaaatatcctgatgaatattattcaccagctcgcattgaagcagaaaatgtacaaatcattggtcaatactggtggaaatctgaaggtcgcaaggtgagacgttaa

SEQ ID NO: 56296 - DNA, 285 bp, Acinetobacter baumannii; identical to SEQ ID NO: 52917

SEQ ID NO: 56297 - DNA, 339 bp, Acinetobacter baumannii; identical to SEQ ID NO: 49701

SEQ ID NO: 56298 - DNA, 330 bp, Acinetobacter baumannii
atgaatcagaaatatataggcagtcaatctgccccatctacccctatttgttttgtaccagaacttagcgggaataaaacaaataaaccagctacttctagactttatcagcatccatctgcagaggatctaaagtttaaaaaagatagtaagtggccgtatgttttatgctttcttatatttagtgcacttgctattgctttcctttatgcatgtgatgcagaggctcaagtgcgtgagcagaagactcaacattggcaacaacaatttaactcaggtgaacctgttgatgttcaagtacatgtagttaaattaggtggtgcacaatga

SEQ ID NO: 56299 - DNA, 642 bp, Acinetobacter baumannii; identical to SEQ ID NO: 46106

SEQ ID NO: 56300 - DNA, 843 bp, Acinetobacter baumannii
ttggcaaccccatatataactattggctgccctactactggagggggccaagtaatctcaggaaacagttcgtttctaattgacggcattgccgttgcttgtgtcggtgataaagcaacctgcccaacacataaaattgtcgcaacgattgtatctggcgatccgaatatgcaaattttcggtaaagctgcagctcgtgttaatgactctctttcatgtggttgtaagcttctacctaaacaacatttggtcgttcaagacaacggcggtggatccgcatcttctgctgctaattcatcaccagccccaatgtctcaaaaacaaccagcaacagacagctttgtaaaagatgagtacgagaattactacatagaacaaaataaaacaacaatggtcccattcaaaacgatgttaatgccatacgatcaagatagaacaaacttatttggtgtaatgtcacaaatagtatcgggcgcttgtaactttgaagtaacccaccgagtcaaaaaagatcaactctttgtaactgcaaccctattaccacctactgttagagctgatgcaacaatcatcccgcgtgctgtgcttcgcttatttaagaaagataaacagataagtgacacgatcactttaaaagtcggtaaagggtactggaatactgcaaatgataaacaacctgtaggtagttgcgagattaagctacccgcaccagacttagaagtaattaaggcaaagcttacaatgaaatatgatgcgaaatttgatggcggtgtagtcgtaacttctcccccagacgtaacttatgagtttacaataacttcggcggcaagacgtaaagcatga

SEQ ID NO: 56301 - DNA, 288 bp, Acinetobacter baumannii; identical to SEQ ID NO: 46104

SEQ ID NO: 56302 - DNA, 156 bp, Acinetobacter baumannii; identical to SEQ ID NO: 46103

SEQ ID NO: 56303 - DNA, 696 bp, Acinetobacter baumannii
atgattacatttgatccggtgccaataggcgaaagtacttttcaaatgcatgaattgagttttgagcaatgtcttaaaatttcaatcattgccccgaatttaaatgaaaaaagactttcagctttcgtgaagtcagttttagataatgtggatcctttacttttaacaattcaagagcggtatttattgctacttaagtatcttgagaaacaaagtaatactatgttggaggtgaacactgactggtctaaagttttccttcaatcagaaaataattggaaaactgaaactacgcaaaatggaattacggttagacagcttattggaatggaagcggaattcttagaggcaaattgtaagaatgtcgctgaatggattgcctgtatgatggcatttcagttgagttattctaatcatgaacacttggctttattgccggatagaacaaaccctcaattatttgaagaacaatttaagcagcggctagatttcattaagaaaatgccagctagtgattttgatttgtgctatcaagactttaataatttaaacaatgagttatttacacatttacggttaagcgttgataaccacggtattttagtggaaagaggtgcagatgacgcgcctgcacgatttcgcaccgcttccgtctttacaggaatcatcaaagagttggaccgatcttttgcttga

SEQ ID NO: 56304 - DNA, 834 bp, Acinetobacter baumannii; identical to SEQ ID NO: 46183

SEQ ID NO: 56305 - DNA, 429 bp, Acinetobacter baumannii; identical to SEQ ID NO: 46182

SEQ ID NO: 56306 - DNA, 171 bp, Acinetobacter baumannii; identical to SEQ ID NO: 51532

SEQ ID NO: 56307 - DNA, 690 bp, Acinetobacter baumannii
atgattaaaaaaagtaaccgccgtcagtggagcgagtttttctccaataataaaagacaggaattctttaaggatttcagtgtttcatcaggtaatgacaaagttaaaaagcataaagctagctcaaataaacatgtgtttttcccgtgccatgtagaaaaagaaaatgatggtgaaaatagtgtgtataggggaagtacaggtggtgttatcatttttggtaagcaatacatcacaatcaaattgccttatggattaagcgctaacgagatttggcgggctacaattgatcagaacggaaagcaaagaaatagtctttcagtaggtgctaaaaagtataaggacaaggttcaaaaacaatatggacctatgtttagagcacttaagttaaaagctatcgatcaactttgtgaaatacggttaattgttcagccaccacttaaaactcgttcttacagcgctaaaacttatccacgatttgatattgataactatccaaaactactaattgatagtgtcaaaggtgatggcttgttattcaaagacgacaatattttcataagtgaacaaattaagctggcagaaccatgtgaagaaggttgtgtctggctttcgtgcgtttttactgatgaaactgattggttgtcaaaaactgtagattttgattggttagctgggagaagcatttaa

SEQ ID NO: 56308 - DNA, 423 bp, Acinetobacter baumannii
atgcaaacaagtgtacattggctagagaatgttgcttttgaagcgaaatcagagagcggtcatagtgtagtgatggatggctcacctgagtacggtggtgaaaaccgtggaccacgtcctatggagttgatattaatgggacttggtgggtgtgcttcgtttgatattgtgactattttaaagaaatcccgtcaagatgtgacgaatgtcgtatgtcagcttaaagctgagagagcagatgcaattccggcagttttcactaagatccatttacactttgtagtgacaggtaaagctgtaaaagaaaaacaggttgcaaaagcagtagagctatcagctgagaaatattgttcagcaagtagaatgctttcagatggtggcgtagaaattactcacgattttgaaattattgaagcagcgtaa

SEQ ID NO: 56309 - DNA, 162 bp, Acinetobacter baumannii; identical to SEQ ID NO: 46255

SEQ ID NO: 56310 - DNA, 336 bp, Acinetobacter baumannii
gtgcatgtggggcactttcaactcaaccatgtaacaggtaatgcgtcaaatgagttgagtatttcatttattgagactaaagatgctgcaattgcgaatagtgctaaagctataaaagatataatgtttaataaggatggtactcagccgccaccaattgaatacttaatgcgattaaaaatatatgcttttgataaagctgcaagaaatcaaaaccaatttgaaattgagcatctagtttcacttcaagcaggcaatttgccccttgatgcctctaataaagcacataccattgttactttaaatttcatcaaaatgtttcccaacttaaaataa

SEQ ID NO: 56311 - DNA, 336 bp, Acinetobacter baumannii
gtgcatgtggggcactttcaactcaaccatgtaacaggcaatgcgtcaaatgagttgagcatttcatttattgagactaaagaggctgcaattgcgaatagtgctaaagctataaaaaatataatgtttaataaggatggtactcagccgcctcctatagagtacttaatgagattaaaaatatacgcttttgataaggctgcaagaaatcagaaccaatttgcaattgagcatttagtagcacttcaagccggaaatttacccctagatgcagctaataaagcgcatgccattgttactttaaatttcatcaaaatgtttcccaacttaaaataa

SEQ ID NO: 56312 - DNA, 582 bp, Acinetobacter baumannii
gtgagccgtttctttgaatataaagaaattgtagaaaatcatcctgatgcttcacatgtattgctaactgatgttcgagacgtttttttccaaagtaatccttttaagaatcttagcaaaggtttatttgtcggaatggaaaatccagactttacgataggtactgagcaatataatcaaaagtggattttggatgcatacggagagagtttttataatcttgcaaaagatgagcaagtctcttgttctggcgttactattggggatcatgaatcaattaaagtctatatcaataaaatgattgaagaattctgtaaacagccatatcaaaaaatgtctgacagaatttatgatcaagccatgcataataaattattaattactaatgagttgtcagaggtaactcgttgtcagccatttgaatctattattgtaactcttggattatatccaatagagcacatttctattaatgatcaaggttttattattaaccgtaaccaagaaatcattcctattgtccatcaacatgacagacatccggaactgattcagttatgtgataattatattggaaaataa

SEQ ID NO: 56313 - DNA, 297 bp, Acinetobacter baumannii
atgctcaccaaccatttagaatcaggtttattaaaagaggtattgcctcagtggacgccagcgccgatgccgatttcagcagtttatcttcaaaatcgtcatttatcgcttaaagtaaaagtgtttgtagattgggtcgctgaactttttgcaggctgtccattacttggcggtacagctttacctttcgaccagaaatgtgaatttgcctgtgataaagaaaccggtcatgaatatacaattcgtactttggtcgagcagcataatattgctgaagcaagagtattaaaaacttaa

SEQ ID NO: 56314 - DNA, 834 bp, Acinetobacter baumannii
atgaccgaaataaacctcatactcataaacggtaaaatcacaacactagatcctcagaaccccgaagtacaagcaatagcgattgcagatggtaaagtcgtgcgtacgggtacaaatgatgaggttatgaaactcgcaatatcaacaagcaaagttgtagacttaaatggtcgtcgcgttataccgggtctaaatgacagtcatctgcatattattcgtggtggtctaaattacaatatggaactgcgctgggaaggtgtgccatccgttgcggatgcattacgcttactcaaagaacaagcagataatacgccagctccacaatgggttcgtgtagtaggcggttggactgaattccagtttgctgaaaagcgtttaccgactttaaaggaaattaataaagctgcgccagatactccagtattcattttacatctatatgccagtgccatgctcaaccgagctgcccttgatgtattaggttttaataaagacacaccggacccgccaggtggcaagattgtaagagatgaaaaaggtgagccaacaggtctcttgctcgctacgccatcggctatgattttatattcgaccttagggaaagcaccaaaattgccagttgaagatcaagtcaattcaactcgtcatttcatgcgtgaattaaaccgattaggtattacttcagcaattgatgcaggtggtggcggtcaaaactatcctgaagattatgatgtgattaagcaattgcacgatcaaaatcaaatgacagtgcgaattgcttacaacttatttgctcaaaaggcaggtcaagagcttgatgattatcgccgttag

SEQ ID NO: 56315 - DNA, 4866 bp, Acinetobacter baumannii
gtggatggcgctggtaacgtgtcaggttatttatatcaagtctatttacatggagaagagctcacttttgttgtcgttgaccgagcgggtaaccgcagtacagaggtcaagcagaatgccttgattgatgatatcgcaccaaatccgattgagaatattttacttgatgcgaacggacagaactttacagctcaggcagaagcaaacactcaaattgaagtcaaaaatactgctggtgaagtcataggatctggttcaaccgatagcatgggtaatgtttctggttacttctatcaggtctatttacatggtgaagaactcacttttgttgtagttgatcgagtgggtaaccgcagtacagaggtcaagcagaatgccttgattgatgagattgctccgaatgcgattgaaaacattatctttaatgaaaatggtcaaaactttacagcgcaagcagaagcaaatagcaaagttgaagttaaaaatgctgcgggtgaggttgtagggtctggttatgtggatagtgctggtaatgtgtcaggttacttgaatcaagtttatttaaaaggtgaggagctcacttttgttgtgattgatcaagctggtaatcgtagcattgaagtaaaacaaacagcctttcttgataatacagcaccggaaaatgcgactaatttagtatttagtgaagatggctcatatctaagtggtatggctgagccaaatgcgacgattcaaatatttgatcagtatggtcaattattaaatcagtggaataataatgttaattgggacggaacatttaacatctatttaaacagtaactacatgcatggagaagtatttaaagtaattgtagttgatcaggctggtaatttgagtggtgaggttactgtaaaagcaccgcttgatgatattgctcctgtagctgcaagtgatctggtctttaatgaagatggttcatccctttctggtgtagctgagccaaataccttcatccagatttttgatcaaaatggtcagcagatgaatacgtggagtcagagtgtaaatgctgatggtacatttactatttttttcggtacttacaatttacatggtgaagagtttacagtcattgttaaagaccttgctggaaatgtgagtgaagctgtttcagttaaggcgccgcttgatgatattgccccaaaaccgattaaaaatattgtatttgatgcaaatggccaaagctttacggcacaagcagaagcaaatagtcagattgaaatttttgactcatttggtagtcagataggttggggctctaccgatagcactggtagtgtgacgggttacttctatcaagtgtatttacatggagaagaattaacgttcgttgttatagaccgagtaggtaaccgtagtgatgaaatgaagttaaatgctttgatggataccattgcaccaaagccgattgaaaacatcatctttaatgaaaatgggcaaaattttacagcacaagcagaagccaatagttttattagtgtcaaaaatgctgcgggtgagcttgttggctatggttatgtcgatagtactggtaatgtgtccggtcacttcaatcaggtttacttaaaaggtgaggaactcacttttattgttatagataaagcaggtaatcaaagtattgaatataagcaaaatgctttaactgatgatattgcaccaaatccgattgaaaacatcatcttaaataaaaatggacaaaactttacagcgcaagcggaagccgatagccaaatcgaagttaaaaatactgcgggtgaggtcgtaggttctggttatgtagatagtattggtaatgtgtcaggttcttttaatcaagtctatttacatggagaagagcttacttttgttgtagttgaccgagcaggtaaccgcagtacagaggtcaagcagaatgctttgattgatgatatcgcacctaatcaaattgagaatattgtttttgatgtaaatggtcagtactttacggggcatgctgaagcagatactcgaattgaagtacttgatcaattcggcaatcgcgctggttggggatatgttgatagccaaggtaacgtgataggttatttcaatcaggtttatttacatggagaggaattaactttcatcgttgtagatatagctggtaaccgaagtgttgaagttaagcaaaatgctttaattgataatgtcgcaccgccagcagcagcaaatattacattaacctcagacggattgctttttggtgaggcggagccaaactcaactgttgaaattattgatcaatatggtgcagttatcacaacaacttatgtttggtacgatggcatatttaatcaatggattaatctgagtcaataccagacacaaaatttaagtattgttgtcaaagatcaagcaggtaaccgcagtgaagttgtacatgaattagtaccagtatttaccaactcaccaattgctgcaacagagctaaaactggatatagatggtcatattctgacagggaaggcgacagtaggaatgtcggttgttgttacatcgactgatggtcagaccattaacggagggtggaataatgctgtgaatgaagatggtagttttgctattcagttaaatgattactatctacagggacagacattacaagttcgagtttatgaccagaatacgaatcaatatagcttaatcactgaaattattgcgcctttagacaatattgctccagtaattaatgaagtggtaattaacaatgatggttatggtattactgggcaaactgattcaaaagcaatcattcaggtaatggatgcggatggagatttacgagcagaatttcaagcggatgagactggatattttaacgctagtatttatccacctatattacgtggagagcagttatttatcacggcaacagatttagccaaaaatataagtaagccatttaatattacttttaatgcagatactaatgcaccgccatcagcagagcatattgtagtatctgaaaatggtttttttattgagggaaccgctgtagcaattagtactgtgcatatttttgatgtgcatagtaaccatgttgccactaatgttgcagatgaagctggaaactttaatattcagttgtatccacctctagcgagtggacaaattttacgcattgttgtggagcaaaatggctatcaaagcgcttacaccgaaattacggcacctatagacactgtcgcaccaaatgcagcaactcagcttctcttagaagatggaaatgtactttcaggacaagcggaagcatattcaattgttaatatttttgatgctaataataatttggttggtcagactaatgttggaagtgatggtgctttcttaacacacctatggtatgagtattggcatggcgaaacattaacggtaaaagtagttgatgccaatcaaaatgtgagtgtggggacaacgattgttgctataaatgatacggtagttccagatgtagttacgcagcttgctatagatgaatggggttcgctcacagggagggtagaaagttatgctactgttgagcttacctatcattttactgaccaaccgctttctgtaacgagcactacagcattggcaaatggaatgttctttatctatctggatagaaatgcaacttcacttgaccttactgttattgatcgtgctggaaaccgtagtgaaaccattagccaaataattagtgatttaccgactgttattattgatcactttaaaggtgatgctacagataatacttataacattgatactatagatgattttgttcaagaatatattgttgagccgtatgcaatatataaagacgtctggattgataatagctatatgtattcagattgggtcattgaaggccattatgaacagatatggtttgttgatggatattatgaatcgcaatgggccacaagtggttattcaactgtacaaaatatttatcaaaatcaaaatggtataacttatattgataatggcacggcagatagcgattatagtcgatatgaacaacaatattatgatttcgtgaatggccaatggcaagaaggctatgaattaacttatatacgttcagaagaaggatgggttgatacaagtcattatgaagatgtttatattgatacaagtcattatgaagaggtttgggtagatactagccactatcaagatatttgggtagaaaatagttattgggagagtcaacttgttgaatctggccgtagagatgtggatttaggcgggcatgataaaattatcagttctgttaattatagtttggttggtttatatcaaacagtaaatgatccaacgactgtagattcgtttttggaaagcggtcgttatgtagaagacttggagctggttggttctgctcatctaaatgcaacaggcaatgctttagataatcttttaacaggtaactctggtaataacgttttgaatgggcgtgaaggtaacgatacctatatcactaatgaaggtactgataccattgtgttccaattgctaaatagccaagatgcaactggcgggaatggacatgacacggtgttagattttactttaggtgatataagaactaaccttcaagctgacaaaatcgatttaagtgaactattaattgactattctaaagatgtaagcgcattagctaaatttattactgtagagcaagatgctgggaacacgactattagtcttgaccgagatggcgaaggtacaatgtttaatagggtgtcactgttaactctaaatcaagtaaatacaacattagacgaattactaaacaatcagcaaattattgtttaa

SEQ ID NO: 56316 - DNA, 4332 bp, Acinetobacter baumannii; identical to SEQ ID NO: 56245

SEQ ID NO: 56317 - DNA, 585 bp, Acinetobacter baumannii
ttgcaatatccgcaaattcatccggaacgattattctttgaattgctacgtttagcaggctcgttattaaccttctcgacagcttatgaagttgatcagttacctgcatataaacatcataatttgcaagagagcttcacccaactcgacacaattttacgtgatttactcgatacgattatttcgagtcgttacatcagtattgcccttaaagaaattcgcccttcatattgggtaggaagtctcgaaaccgataagattactcgagataccagactttatattgctgtatcaagtagcgcgatgcagacccatgagttgattcaaatcgttcctctacgttttaaaatcggtagtactttagatgttgaacaacgtgttgttgcagcattaccagcaattccattacatcacttaatccaagttccaactgctattccagtacgttcgggtgtgagctattttgaaatcgaaccgcatcatgagctctatcaacgtatgttggattcagaaacgatttgtatttatgttccggctggattccaagatatcagtattgagctgattgcggtcatgaacgcttaa

SEQ ID NO: 56318 - DNA, 483 bp, Acinetobacter baumannii
atgaatgcacaaattttagatccatgctgtggctctcgcatgatgtggtttgatcgtcaaaatccaaatgtagtctatggcgatattcgaaaagaagaacataccttgtgtgatgggcgctctttagtgattgagccggatgtgatgatggactttcgcgaaatgccttttaaggatggccaatttactctggttgtgtttgaccctcctcacctagtgaaggctggtaaacaaagttggttagctgccaagtatggaaagttgtcagaagattggcgcgaagatattcgtaaaggttttgcagagtgctttcgagtgttggccaatggcggtgttttaattttcaaatggaatgaaacacagatcaaagtaagtgaacttttagaactgacagatcaaaaaccattgtttggacacattagcggaaagcgcagtaacacacattggattacttttatgaaagcggaaagtaaggaggggtga

SEQ ID NO: 56319 - DNA, 1236 bp, Acinetobacter baumannii
atgtccggttgtggtgctgagcgtggattaatcagtatagatgaagcgctagatttagttattaataagcctaaaaacttaagctctattcaaaagactctaataaatagcctaagtagttatcttgccaaagatatttactctgaaattaatttaccaagtttttctcaaagtgcggtagacggttatgcactttgtagccatgcagaagatttaaataatcaaaagtttcaagtcacaggtgagattcgtgccggaagcgagagtcatgacatacttggtgaaggtcaggcgattcgtatatttacgggcggcaaaattcctgaagggacaacgcatgtagcacggcaagaaatcgtatcggttatttcggctcaagaaatttgtttaacggaacatatacgccctcaagccgatatccgctttaccggagaagaaatccagcaagggcagttacttgctcaagtaggacagtttctaaatattggaagcttggctgctttaagtatggcaggtgtacaagaacttactgtttatcgtagaccaaaagttgcagttttagtcacaggtgatgaagttgctcaaacggcaaaagatttaatcgatggaaaagtctttgatgcaaatggtccattactaaaagcttggtttgaagattatggtttagatgttgaactcattcatgtggcagatgaagcagatcaggtcacccattactttaaccaactaaaagacagctatgatgttgttataacgactggcggagtttcggtaggagactacgactttgttcggccctgtgctttcgaagttggatttgaacaaatcttttggaaagttaaacaaaaaccgggtaaacctttattctttgccgaataccataattcacaaacccgccattcctgttatttgttaggcttaccgggcaatccggctgcggtatatgtcgcaatgcaagtttacggtaaatctttgcttgatgcattgcagggcaatagacatggaccagaatggtttactgcaattttagagcatgatttaaaagaagatgcacgtgagcgttttttacgaatgtatgcttattttgatgcaggacaacttagggtgaaaagtttggccaagcagcagtctcatatgctgagtaatcttatgcaagccaatagtctagtccgtattcctgcgaatacaaaactagcatcaggaactgtgctaaaggggatctttatttcaaattaa

SEQ ID NO: 56320 - DNA, 141 bp, Acinetobacter baumannii
gtgggattatatacaattagatatggttatcgtaacaacagtttttttattgcttcaaacatggctggacagtttattgtgattgatgcattaggagcagatttccagattggtcatcaaatttcttccatgtatatttaa

SEQ ID NO: 56321 - DNA, 1461 bp, Acinetobacter baumannii
atgacacaagttgatattgcagcattatctcctcaagtcgtttggcagcattttcaaacactttgtactattcctcgtccgtcaaagcatgaacagcaacttcgtgagtttttacaaaactgggccgaaagtcggaatttagaaacttatgtagatgaagttggtaatttgattatccgtaaaaatgcgactctgggtaaagaacatgtgcctggagttattcttcagggccatttagatatggttacacaagccaatactggtacggtacatgacttctttaaagacccgattcgtccagttcttgaagatggctggctaattgccaaagacactactttaggtgctgataatggcattggggtggctttggccttagctgttttagattcaaatgatattgctcatggcccaatagaagttcttttaacagtcgatgaagaagcagggatgagtggtgcgcggcttttagagacaggtgtgctaaaaggaaaatggctatttaatattgatacggaagagtggggtgagttgtatttagggtgtgctggtagtattgatgttgaggtagagcagccgcttaattatgagccaatccctgaaaatttgaatattgtgaatattcaggtggctggtcttaaaggtggccactctggcgtagatatccatttaggacgtggcaatgccaacgttattttggctcgctttttaaatcaatatttagccccgcttggcgggcatcttgttgagtttacaggtggtacggcccgtaatgctttaccgcgagaagcagtggcaactattgcaatttcgcctaatcatttatcaagcctagaaaagttacttgctgaatatcaaacggcatggaaagaacagctaaagggtattgatgacaacttgcaattaagtattcaatccactggtgctaaagtgaccgaagtaattaatcaacaacagcaaaatgaatggttgcaagctttggcaacaagtccttatggcgttgcaagtatgagtcaggttctaccagatgtagttgaaacctcaaataacattggggtggtgagactaaatcgagaaggtggaaaagctgttttaatggtccgttcaatggtgaaccaagaagctcaagattttgccgaaaaaattcaggcccattttagccaatttaatatcggctctacacttacgccgttagtgtcgggttggacaccaaatccagattcggctgctctaaagtgcttacaacaagcttatcaaaatgcatttaatattgagccaaatctaaaagtaattcatgcaggcttagaatgtgggattattgctgaacattacccacatttacagatggtttcgtttggaccagatattcagggggcacatgcaccgggcgaacgagttaaagttgatactgtagagaaatgctggaagctactggtaaccgctttggcatctgtagagtag

SEQ ID NO: 56322 - DNA, 369 bp, Acinetobacter baumannii; identical to SEQ ID NO: 56249

SEQ ID NO: 56323 - DNA, 1260 bp, Acinetobacter baumannii; identical to SEQ ID NO: 56173

SEQ ID NO: 56324 - DNA, 207 bp, Acinetobacter baumannii; identical to SEQ ID NO: 56174

SEQ ID NO: 56325 - DNA, 837 bp, Acinetobacter baumannii; identical to SEQ ID NO: 56248

SEQ ID NO: 56326 - DNA, 2049 bp, Acinetobacter baumannii
ttgacaattgctggtcttgtaaaagctgaaagtggcgaagaaaatgaaaaaagttatatagcagggaaaacagaaacagcggtaccactgggtttatccgttcgtgaggttccacaatctgtttctgtcattactcaacagcgtttacaagaccagcaattgtcaactttggttgaggtcgccgaaaatgttacaggggtaagtgtcaaccgttatgaaaccaaccgaggtggaatctattcacgtggttttgtagtagataactatattattgatggtattcccaccacatatagcttaccttggtcttcaggtgaaattttctcaagtatggccttatatgatcatattgatgtagttcgaggggcaacaggtcttacatttggtgctggaaatccatctgctgcgattaatatggttcgtaagcgtgctacgagtacagagccaactgctaacgtagaagtgagtgcagggagttgggataattaccgtgttatgggtgatattgccaactcccttaatcaatcagggacagtacgtggacgagcagtggcccaatatgaacaaggcgacagctataccgacttgttgtctaaagaaaagctaactttactgttaagtgctgaagcagatttatttgaaaatacccttttatcgggtggggtaacttatcaggaagatgatccgcgtggaccaatgtggggaggtttacctgtctggtttagtgatggcacaaaaacgaactggtctaaaaataccactacaagtgctgactggacacgctggaatgttaaatataccaacctatttgcagatttaactcataaatttaatgataactggtcagctaaactgtcttattctcatggtaagcgtgatgctaattctaaacttttatatgtttcaggtagtgtagataaaaatactggtctagggctatctccttatgcatcagcgtatgaccttcaggtagagcaagataatgcttctttgcagctcaatggtagttttgatttgtggggcttagagcaaaaggttgttttgggttatcaatattccaatcaggactttacagcgtatgctcgttcaactgatacaaaaatggaaattggcaatttctttgaatggaacggcagcatgcctgagccagtgtggaatgcacctacactcaatgagaaatataatattgaacaaaatgcactattcgctgcgacttatttaaatccgattgagcctctaaaatttattttaggtggacgttttacaaattatgaaaagaatatatatggtcgtagttcatccataaaatatgaccacgaatttgttccttatgcaggtattatctatgatttcaatgatgtctatactgcatatgcaagttataccagtatttttcagcctcaagacaataaagactttgatggaaactatttagacccggttgaaggaaacagtactgaagtaggcttaaaatctgcatggtttgatggacgtttgaatggtactttagcgctttatcatattaagcaagacaatttagctcaggaagcaggacaagttactcgtaacggggtaaaagaaacctattatcgggcagcaaaaggtgcgacgagtgaaggttttgaagttgaagtaagtggacaaatcacaccagactggaatattacagcaggttatagccagttctctgccaaagatgcaaatgatgtcgatgttaatacccaacttcctcgtaagatgattcagacatttaccacctataaattaccgggcaaattagaaaacataaccgtgggtggcggggtaaattggcaaagcagtacctatattaatgccgaaaatcccaaagaagttattgagaaagttgagcaaggagattatgcacttgtaaaccttatggctcgttatcaaattacaaaagatttttcggctcagcttaatattaacaacgtatttgataaaaaatattacggtgttttcccggcgtatggccaaattactttaggtgcccctcgaaatgcggcgctaacactacaatataagttttaa

SEQ ID NO: 56327 - DNA, 183 bp, Acinetobacter baumannii; identical to SEQ ID NO: 56222

SEQ ID NO: 56328 - DNA, 765 bp, Acinetobacter baumannii
atggtatttgacccaaatcatcatgagttgattggacttgagtcagcagttgttcaagagactgttagtgttcttgaggaagatttcattccggtaccagaacaaaagttagtacaagttcaggctgaaacccaagtcaaacaaatcgaacctgaaccagcttctactgctgagcctataggtttatttgaagcatcgaatactgaattttcacttgctcaagatacgtcagcttatgacttggtttctgaacctgttattgaacaacagtcattggcgcaagctgaaattattgaaacagttacggtggtaaaagagcctaatgcaacagataacagacagctgatgccacaagatattttaaagttgccatcacaaactttggaaggtgagtggacacttgaaaagtgggagttttggtttagaaatagccagctttctccagcagttcaagaacttgctcaacatggtgtgatgactggggaaattggtggtaacacggttttccatattcctcaagaatatgaaaatatgttgactcagctacaacaagccctaattgaagctttaaagcagcagtggccaaatacacaatttacggtcgagtatggtgcagtcaatactgctacaccgtatgttatgcaaagcgttcgtaaagaaaaagctttccatcgggctacagaactattacagcaacaacccgttattaaaagcctcatagagacttttgatggtgagctgcaaaatattcaattaaagccttaa

SEQ ID NO: 56329 - DNA, 1584 bp, Acinetobacter baumannii
atgactcagcaggtatgtgtaatatcacaactcactttggagtttccttcaaaagtgatgtttaaagaattgaatttctcacttgagcatcatcaagtatcagccttaattggccgcaatggtcaaggtaagtctttacttatgcaattgcttcacaagatttcacccactacagaaatgcatatcagtggccaaataaactggcaaaccaagcatgcatatttatctcagctcactcgtctccaatcagacacaattgcagaagctttagaggtcaaccatctttacaacgcttttcaaagagtggaacaaggcgaagctgaatacgatgattatgatttgttagaaggacattgggatcttcctaatatttgggaagctttactacgatctgctcagctaccaaccgatttagactttcctgttaagcagttgagcgaaggccaaaaaaccaagttagccttatccgcattatttttaaaaactgatcattacctattacttgatgagccaagcaaccatctcgatcaagaagctagacagtggttaattgctcagttaaagaaacatccagtaggcgctttgattattagtcatgatctgactttgctaaatgaagtcgaccatatttatcacttaaatgagcatggcctacagcatactacaggaaattatgaaaaattttatgagcaatatcagtcccaaatcgaggctttagaacagtcagtacatcagcatcaacgtgaagttaagcacatgaagcaaaagcagcatgaagttttaatgaaagcccaaaaacgtgagcgtgctggcaacaaacttcgtgactcaaactcgcaagctaaaattttgctcgattttaaaaaagaacaggctgggcaaagcctgggagcaattcattctcaacatcagcgtcaaatcgatcaaagccagcaagacttgaagagtaaaaaagtacttctagaaactgttaagccccaacaatttatatttccctcttttcaaaaaagatcaggagaaattcttagaattgataacttaaaactcaactatgggacacaacaaccaattcatctcgccttaagagcttgtcaaaagattcatttggttggccgaaatggtattgggaaatcaactttgctgaaacagattgatcaatctgctgtaactgctacagatgaaattaaactgtttgtaaattgcttttatctcgaccagaacttcagctttttattagaccatctctctgctgttgaaaacttaagaaatattaacccaaatatttctgagttagagtggagaaatttattaggtcagcttcggattcgtggtgataaaagcacatatcccttagctcaactcagtggtggtgagaagttaaaagttgctttactaggtttgagccatgctcagcctatgcctgaacttttactacttgatgaaccagaaaaccacttagatatcgagtcaagagagttatttgcaaatgctatttctagttatgaaggtgctgtgctattagtttcacatgatttaagttttgttgaaaaatgtgggattgttgattcaatttatttaaattaa

SEQ ID NO: 56330 - DNA, 444 bp, Acinetobacter baumannii
atgaattaccgacatattattgtacctgtagatggttctgagatttctttggcagcagcacgacaagccgcccatatcgctaaagcttttggtagtaaacttacagcaattagtctagttgcagtggacccgtttagtggtgttgatttctattacatctctcctgttgtaaaagattattttgttgaagcgcgtgctaatgcagaaaaaacacttgcgaaagtaaaagccctttgcgctgaagaaggtgttgatattgaaacacaaattattcaaggtgaaatctcatctgatggcattcttaaagctgtagaagagttgggttcagacctgattgttattggttcacatggtcgtaaaggtttccaaaaacttattttgggtagttttgcgcaagatgttctaaacagcactaaaatccaagttttggtggtaaaagaataa

SEQ ID NO: 56331 - DNA, 624 bp, Acinetobacter baumannii
atgcttatgaactttcacgtggtttcagatgcgaatactgaattactttttaaagccataaagcaactagcagagaagtttccccttcttaacctagaaattattacagctcctcaagatgatattctaaatttactttatacagaaaatattagcctttgccttgcaggttcaaatctcaatataaaaatgcgtgaaagcctacaattagtaatgacagaaacagttattgctacgatctctgctcatcatccgtttttaaaagaacagaataagttaaacacgattgaagagttaattaatattcggcaaattgtggtcgcaagtagtgagttggatatggaagattcacgttcaatcattggggcaatgtactggaaaacgaatagcttacaaacagcaattaatatggtcgaagctggcttaggatggggaaattttcccttatctttggtaaaagaaaagattgagcaaggccatttagttcaattagattttaaaaatacgaaaaatcatttgcctttatctatttatctcatttggcttcaagataaaccgttatcgaaagcagccagagagcttgtccagattgttcaagcaaacttatctcaaacttgtcattaa

SEQ ID NO: 56332 - DNA, 288 bp, Acinetobacter baumannii
atgaattttaatagtgaaaatatcgaacttttcttaaccgtattagatactggatctttctcggccgcggcacgtaagttaaatcgagtgccatcagcagtgagtatggcaattgccaacattgaagcagaacttggttatcacttatttgaacgtacacaccgcaaagttattcctaccgcggcggctttagcattggaacctcaagcccgcattattgctgaacagcttaggctattagctacgcatgcttatgaactttcacgtggtttcagatgcgaatactga

SEQ ID NO: 56333 - DNA, 159 bp, Acinetobacter baumannii; identical to SEQ ID NO: 56179

SEQ ID NO: 56334 - DNA, 369 bp, Acinetobacter baumannii
gtgcatgctttagcctatccattgggtgggcattttcatttgtcgcatggacataccaatgctttggtgctcgttgaagtactgaaatttaatgcgccttatgccaagcaatactatgcagaacttatgcaatggctagacccatatagtaatggcagcaccgatgggttatgtgatctgtttattgaccatatgcaaaatcacttagaccgtagtggtttgactttaaaacttagcgatttgggtattgaagagtctagcttaccaatacttgctcaagatgccatgttgcaaactcgattactacaaaataatccacgtgacatgacagaagcagctgctttagcaatttatcaggcgatttattaa

SEQ ID NO: 56335 - DNA, 405 bp, Acinetobacter baumannii
ttggggtcagatcgccgtagtcatcaccatcgttctggtgatgacgtgggcggcgacgcaatgggttgcctttcgcctcggcttccagccccagcttggagcgccatggttcgatctggcgggcctgccggtctattatccgccggccttcttctggtggtggttttccttcgacgcctacgcgcccgctatcttcgtcgagggcggcatcatcgcggtatcgggcggcttcatcgccatcgccgccgccatcctcatgtcgatcattcgagcgcgggaagcccgcaacatcgccacctacggatcggcgcgatgggcggaagacaaggaaatccgtgcggccggattgctcggccccgatggcgtagtgctcggccggcatacgcaagactatctgcgccatga

SEQ ID NO: 56336 - DNA, 237 bp, Acinetobacter baumannii
atggaagagcgacctgcttgtcgtattcctgtctggcttgcacaaggggcattagatcaaacagtagactggcgttacaacatcgagtttattcgccgtaagtttaggcttcaaacattattgatgctagaagagggttcccatcaattaattaacgaacgtgcagatattcgtgcggctttaacaggtttaattccagcctttttacatgcaaagccgaaacatttttattattaa

SEQ ID NO: 56337 - DNA, 1386 bp, Acinetobacter baumannii
atgggtaggtattgggcaaagtacgggtggggcaatcaagatgcccttcctttctcgcgtatgcaaagaagtttggtttatcaacgtgctaaaaatgagaatgcagataaaccttttggatcaattattgatgtctatcaagaagattatcgctttattgttcattccattagtccatgtccaccagcggatcctaagagtttccgtattcaaattggtaatgcccaatgccttcaaccttatagtgcatccattatgaatatctcggccatgagctttggtagtttaagtgcgaatgcaatacgtgcattaaacaaaggagcacaattaggcggtttttatcacgataccggtgaaggtagtctcagcccttatcatttagaaaatggtggtgatattgtttggcaaattgccagtggatattttggctgccgaactttagacggaaaatttgatgaacagaagtttgctaagcagtctcaattgccacaaatcaaaatgattgagcttaagctttcgcaaggggctaaaccgggccatggcggtattttacctaaacataagattactgctgaaattgccgagatccgtggtgtttcccgtgaccatgattgtatctctcctgcgaagcattcaagcttttcgacaccaattgaaatgatgcatttcttacagaagttacggactttatctggtggtaaaccggtaggtttcaaactgtgtattggtcaaccttggcagtttatgagtattgtaaaagcaatgcttgaaacaaaaattgtgcctgattttattgtagttgatggttctgaaggtggtactggcgcagcccctattgagtttagtgactatatcggaacaccattacgtgaaggcctacgttttgttcataatacacttgtaggtgctggcctaagagatcaagttaaaattggtgcaagcggtaaaattattagtgcatttgatattgccagcacatttgctctcggtgcagattgggtgaactcagcacgtggctttatgtttgcagttggatgtattcaagcgcaaagttgccatacaaaccaatgtcctgtaggcgttgcaacccaagataaagatcgccagaaagcactccatgtaccaaccaaagcagaacgtgtatttaatttccataaaaatacattacatgcattatcagaaatgattgctgcggcaggtttacgtcatccatcggatattaaagctcatcatttagctcaacggattaatgaccgtgaaattaaaaactatgctcaattacacttcttcttaaaagaaggtgagcttttacaatctgaactgaaaaatgatgatgataatttctattatcgtatgtggaatatggctgacgccaatcatttttaa

SEQ ID NO: 56338 - DNA, 288 bp, Acinetobacter baumannii
  misc_feature (256)..(265): n is a, c, g, or t
atgcgcgagtacgctgtttttacctcggaatctgtaagcgaaggtcatcccgataaaatggccgaccaaattagcgacgctattttggatgcaatcttaaaagaagacccatacgcacgtgttgcttgtgaaacactggtaaaaacaggcgctgttgtacttgcaggtgaaatcacaacaactgcgaatattgatgtagaagctgttgttcgccaaactgttaacggtatcggctatcaccattcagatttaggcnnnnnnnnnntgatggttcaacttgtgctgtaa

SEQ ID NO: 56339 - DNA, 900 bp, Acinetobacter baumannii
atgcgtactttaacacaaattaatgtaccttttcatagtgctgatttagtaattattgaattcaacaatcagccatttactgccatgcgcccaattgttgaaggaatgggcctcacatggcaatcacaatatgaaaagttaaaacaaagatttagttcagttatcactgaaatagtgacaactggaaaagatggtaaacagtacaatatggtttgtttacctgttcgtaagctttttggatggttaatgactataagtccaaacaaggttaatcccgaaattcgagatactgtgatcatgtaccagcaagagtgcgacgatgtgctgtgggaatactggactaaagggcaagcaataaaccaacgcttaaccatttctccagaacaacaaaatgcactgcacgagatagttgatcgccgtgcagggagggatcgaagcttaagagcttcaatgtggattcgtcataatcgccactttggaattgctaaatatagccaattgctttcaatccattttgatgaggcgaagcagtatcttgagctcttgccgttacaagagctagttccagctgaaacagatacacttaaacgtttagaaaagtttgtagataatctcgctgctcgttatccagcattagaaaaccctcttgcttatgacattgcacagcaattaggtgaggagctaaagtatcaatctccaaaaggacctaaaaacttttggatatcgattcaagaaagcggagcagtttctgtacagcaatattcactacaccacacaccagttaatgttgtgcaattgcgtgaacgctttaatcaattgtgggattttcttcataaagatgaggtgcttgaacttgggaaggttttaaaacgctttcctttcgaacctgtgaatcgataa

SEQ ID NO: 56340 - DNA, 420 bp, Acinetobacter baumannii
ttgctcgactatttgaagctacctaattgtcaagaagtaatcttatttgcgacttatcgtacacctactgatgggtttagtagagatgacgggcctgaaactaatttgcccctcatgggagcaattgcgaaagtccaattaccaggattaaacgagatttatattatttttgatggacttttcctaaccgcgcaaaggaagccgcgctacaatgaagtaaaagatgtgctggatacagctttggaaacagataaaacatcatttattcaattatcagttccatttacttcacagttagatcctgtggaagcagtcaaaatattaagtgaatttcctagacagaaattaactaaggaaactcgacctactttttttaatttattaagtaatctaacagaagaacaatatgtaaatttttaa

SEQ ID NO: 56341 - DNA, 246 bp, Acinetobacter baumannii; identical to SEQ ID NO: 56236

SEQ ID NO: 56342 - DNA, 681 bp, Acinetobacter baumannii; identical to SEQ ID NO: 56235

SEQ ID NO: 56343 - DNA, 429 bp, Acinetobacter baumannii
atggatgaaaattatatcaaaaatatacagcaaactacgttggataagggaacaactattggccttaaaggtgataaaggtttatatgcaacagctgaatggtgggaaaatatcaaaaatggcaatatagaaacttattgtgtgaaaggagtaatagttgggattaatcaagaaaatccttttatagaggaaaatacaatgattacaattaaagtaaatggaacgaataaagaaatttttcaagatatagtttttactagtgaaagagaaaaaactattagtaaagagctttacaaagctggaaatgagatagtatccatttatattcttgataaattaaaagaagatgatgtttggaattgggtggtagaggagaaattgggtgtttctccattacttaatagagtttacattaagggtaggggttaa

SEQ ID NO: 56344 - DNA, 276 bp, Acinetobacter baumannii
atgatagaagattctattctcattaatcaaggatataagttggttttcgatttgaaaatgtggttggaaaaaaatggggaggatgacataaaatctacacatgctttgactctcgataatactactaatagtggtttaagtggagtatatggtttatacggaacaaatgagtggtgggataatattgaaaaaggcaatattgaaacatatgttataagtggggtaatacatgatgttagtaagggagatacttttgttgatgaaaatacaaaataa

SEQ ID NO: 56345 - DNA, 258 bp, Acinetobacter baumannii
  misc_feature (10)..(19): n is a, c, g, or t
gtgcaattgnnnnnnnnnncaattgagcgtgcagcatttagtgttcctgcgccaaaatcaggtatgtggtctgtaactaccgcgaacttaccaaatgagttagtggttgtagccgtttctaatgtaaattcagctgctgttaacgctatgcctgctgatcaattgcaacaattaaaacagctttaccgccaatctcgtggtcaacagatacttgaagattacagcgaatacttaaagtcacacgctaaaatcaaataa

SEQ ID NO: 56346 - DNA, 270 bp, Acinetobacter baumannii
atgttaaaagatctgagaaatctatctgatgcagagcaacaagaatatttggatcgcttcataatggctaatgaagaacagaagtttcctcaagaggttgtggcactttatttagattgctcgccttggacattagctagaatgcgttgtgatcaatcatcactgcctttctcgaaaattggaagacgtgtttcatataaaaagaaagacgttttaaagtatgagcaaagcaggactgtgcttaatacagcgcaacttgcaactgtataa

SEQ ID NO: 56347 - DNA, 369 bp, Acinetobacter baumannii; identical to SEQ ID NO: 56249

SEQ ID NO: 56348 - DNA, 840 bp, Acinetobacter baumannii
atgagtgaggtagtgaatcaggctgaagttatttcagtaaggccgaataaaattgttgtacaagttactgatcttaatgattttaaagtagctgatgaaactttaaaagttggttcatatattaaaattctaaataatgatgatgcaatattaatagcaattatagaaaatttttctattggtttcgataagaacaatgagagaatttatttaattgaagcattgcctttaggtgtattgaaagatggagctttcattcgtggtggagatactatagcaattcctccacgacatgttgaaccagcaactttagaagatataaaaagcatctatcaatgtattgatgaagatagagttttgaaattttgtacattaagtacaaataaagaggtaagtatacctgttgatgggaataaattttttaataaacatattgctatattaggttcaacgggttctggtaaatcacatactctatctagagtattacaaacagctatatcagagaaatctggtaattttaacttaaataattctcatattataatttttgatattcattcagaatataaaagtgcatttcctaatgctatttttcttgatattaaatcccttgatttaccattttggttgttgaatagtgatgaattggaagagattttgttggatactggagaacgggacaactataatcaatcttctgtttttagaaaagtggttacattgaataaaaagaagcataatccagctgtagataatatattttatgatacacctattagatttgatttaaatgaggttgtaaatgctctttataatctgtctcttatacacatctga

SEQ ID NO: 56349 - DNA, 4308 bp, Acinetobacter baumannii
atggctcaagaagctcgcttagtaattgttattgattcggaacgtgcgaaacgcactgcacaagacttatcagttgaattggatagcatcaccaaaaaaggggatttcgcctcgaaatctatggaccggatgtctgtagcaactcgtgcactagcagggtatatggctggtttattaacagtaggttcagccatttcaaagatggatacatatactggattacaaaatcgccttaagttagtcactaacaatcaagttgaactaaataaagcaacggaagacactttccgaattgctcaaaaaacctattcagcttgggattctgtgttacaggtttaccagcgttttagtgataatgccaaaactttaaacctcacaatggatgacacagcacgtttaactgaaacagtttctaaagctgtagcaattagtggtgcaagcgcagaagctgctgatgcagctttagttcagttcgggcaggccttggctagtggaacgttgcgtggagaagaacttaattctgtaatggagcaaaccccagcactagcaaaggctattgctaaaggtatgggtattactgtaggtgaattacgttcagtagcagctgaaggaaaaattacttcacaagaaattgtaaaagcgcttagaaatgtagaatctgatgttgatgctctttttgctaaaacagatatcacaatcgggcagtctctcacactcctaaacaacgagatcacaaaatttgttggcgaagcaggtaagggaagtggtgcggcacaggtattagctggatcagttcaaactcttgcaagtaatttagatttaattgctgatggggctttagtagttggtattggatatatcactcgtgcaattttgatgaagagcgctgctattaaagagggaatggcttcaactttagcgagccgccaagcatctgtattaaatgctcaagcagaatatgcagaagctaccgctgctttgaatgcagcaaaagctcatctcgcgaatgtgcgagcaacaaatgcagaaacccaagctaaatttggcgcaacagcggcagcaactcgatacgcacaagcacaggcagcagtaactgctgctacaaatgcacaaacagcagctcaaattaagctaaatactgcaacttcaattgcagggagactagctaaaggggcgtttggattaattggtgggtgggctggagttgcaacattaggagtaatgggattagcggcagcctattcttattttaataataaggcagaggaggcaaagcaaaagcttgctgaacaagctaaagttgctgagaaagctgatgaggagttaaaaaaattaactggcaatgataaggctaaagcagttaatgatttaactactgcttttaatgcacaaaataaagcattagagaaatcatcgcgtgctgtagggtctgcattaattgatatcgagaactatgcacgaggaaatagggaggttgaaaaaatttcccaagaagcgagaactggaactatcagctatacagaagccattgaacgtctaaataaaattaagttgcctacagatctatatgaaaatctgaaaaaacaggctgcgcagtatgatgacaatgcatctaaagcaagtttatcagctgagaaacttaaattattaagagttgaagtgaaacttggaggtaatgaagcacaaaatgcggcaattcagcatcaaaaacaagcggatgctttaggaaatactgctactgaagcagaaaaggcaactaaggctttgcaagattatcaagccaagcaaaaagatagcgttattgattcaatctataaatcaggttggcttgataaaggttacactgttgctcaagctaatgccattttagaactgcaaaaagctaaaggaatgagtgcaattttgtctaaagatgaaattgatagcgcacttagaaatctcaagatcatcgaagaacaacaggagcgagaagataaattaactgaagctaaaagaaagcagacgcaggaaattgaaaaacaagcaaaacttactaaacgtctagtcggtatttccggtcaatccggtattggtactggtccacatcttgatgttcgatatggtggctcattgtctggtcagaaagtttcaaatgaacatctggctcgattacaggcgggaggaaaacctttaacttcctacaagatcagttctaattatggtccacgaaaagccccaactaaaggggcttcttcatttcataagggtattgatttttcaatgcctgaaggaacaccgatcacgactaatgtcgctgtgaaagatatcaagacatggtatgacagcaagggtggtggttatgtcagtgaagtgatctttgaggatggagtgtctcttaagcttctacatcaatcaccaaagatgcagagcaaagtgaaaggtggtgcgagtaagggaagtgataaggcagttggtgacattcagtctcaactagaacgtcaactagatgctcagcgctctcttgaaaatgaagtagcttctgaagtacagcggatccagaataatttaaaagttagattggaagacgttgataaggcaggattctcgccagaacgaacagctgaaattaaggcagaactacagcgccgtgctgataatgatgtggctattgccaaacaagcaattagaagcaaactggaagactataaggagtttcgtaaaactgaggaacagttactagaagagtcctttaaccgtaaaaagttcaatgcagctcatgacattgaattaagtaagtctgagcagaagcaagctgttgaattgctggaacagcaaaaacagcaagagttagggttattaaaactagctcaggaacagcgtttatttcaggcacgtttatctctgctttcggaaactcaggccatgcaggaacgttacagactagaacgggaggaaattcttaagaataccaaactttctatagaagagcggcaaaagctaatcggattgtctaaagctagtcaggataaagagactcgtgataaggtgaataatgctgttcaaaactggggtaatatccaagcggatatgaatggtaccggagaatttttcagacaggatcaggaacgatttagccgtttaaatgctgcaaatgatttagcagatagtcaatttgctgctaccgacctgaatgagcaaaactctttagatggtttgaatgctcaattcgaagctggactaattaagcagcaggattacgaaaaccagaaaacagctatcattcaagctgctcaagatcaacgtaatcagattgctgctgaatatgcaaagaatgctcaggatattgaagataagtatcaacaagatcgcttgaacactcaaattgcatttggtggccaaatgatgggttcactcacatcgatgtttggttcaatgtttggcgagcaatcaaaagcatacaagatcatgtttgctgctgataaagcttatgccattgcagctgcaggtatttctattcagcaaagtattgcaaaggcggctagtgttggttttccagcaaatatcccattaattgcaagtgctattgcacaaggtgcaagcatcattgcaaacatccgggcaatcaaagatcaaggctttgctgaaggtggctacactggtcgaggtgggaaatatgaagttgctggagctgtgcacaaaggcgagattgtatggtcccaagaagacattaaacgttggggtggtgttggtttagttgagagaatgcgtaagagtgcaaaccctgaagcttttctcaataacaatgcttcagctgatagtgtcatgcgccgtgcaatgatgagctctaatgcctttatagaaagccaaaagcaatctgatatctttaatcaaccggttcaagatactcagattatttataagggtaatagagacacacctaagttagcttcttcggcaaattctgacctgttccatgacggtaaagtctatttctcatccaatggtttagttctggatcgctcaaatctggatgatgttcaggactttacttcaggacgtgcttcacgccctcaagctgagattaagccttcaattgagccagcttcatcgataatcaatttcaaaattgaagtgattaatcaggtgagtggggcgacagttgaagccgaacaactggatgagcaaacagtccggatcattgttaaagatgaaatggataagcagcttccaagaacggtaccgaagcttgtaagtgatcaaattggtaatccaaactcaactattagtcgatctttgactgagaataccactgtaaggcgtaaccgttaa

SEQ ID NO: 56350 - DNA, 4809 bp, Acinetobacter baumannii
atgtctggaaaaacagaagttgttaagccgttaacagaagttgcgattaaagatgttagccattcaaaacaaaaaatagatagttggttaaagagccatacgcatcaaattgtgacattagacttagtagcaagtgtaatgggaacagttccaattattggaaatgtgatggctgccatcgatgtggtttctgacatttgctatatctatgataaaggttttcaaaatgccgatattatggattggaccacaatgggtattgaccttattggggttgcacctattcctggaacaacagcaattcgtacttctgctcgtccagctttatttttagttcgtcaagaagttaaacgtgtgggtaaagctgctttaggtgaagcagttattgttgtgatctctaatcatttaaatgaccaagttgcaggggatatagaaaaattctgcaaaacagggttaaacaaactaaattcaattttagctacttgtggtgcaacggtccaaaatgccacaacacaaattaatggtggaattgttcgagttgtaactaagggtcaaatatttacaaacgctgggtcaaatgcgagccgcgctcaacagcaagcagctggcgttattaaaggaataaaaagtggtgacttaacaagagctggaaaaaatctagtttatatgaccgaaaactggggaaaagctcttataaaaactggagcaaactccaatgctaaagttgctagttccttagtaccagcacatttaaagcagccgatattaaatgtaggtgcaacgattaataaaattggtatcactgccaatactaaaattagaggcttgggtaatacagcacagccacaaacaattggatggctatttgatgtattgagaatgagtgcttctaaatttaggaaaaagaaagcaactcaagttaagccaactcaaactacacaagtcaaacatgccaagaaaaataataaattagaaaaggcgaatactgaacatgcagcgactcataatgcgaatgcaggtaagaattgtaagggtggtgcgactaaacgatcaattacctttgccatggggactgagtttttaaaccataccgatgcacaaattcatccattattgatagagcaattttcgagaacgtatgtatcaaacttatatcagtatgatcaatcgattttcggagcgcggtggattacaccttttacaaccaagattgctcgttgttctcgttacaacattaatgaacctaaagaaccgattgagcaagagggctgggagtatattggcagcgatggccgtcctgttcgcttaccagagctaaaagttgggcagagttactatgatgaagtagaaacttttacttatacagttgtctcacctgaaattagagcaatttcatatggtgtttcagaaactcgcttctatcaaaaatataaaaatgagtttcgtttagtctccattgaacgtcaaaatggatttagtattgggctgcgttatgaccaagaattagaaaatggtgatagctatttatccgacattatatttaaacagcaacaacaaactttggcgcatgtaggattgcagattaatgatatgcagaaagttgttgcagcttggttggttgaagatggccaacttctaagacaactatcagcatatgaatataacgagcaaggcgatttaattaaggcaaccaatgagtttgctgcttcttatgaatatctataccaagctcacttattgactcgttatactgatcttactcaaagaggaatgaacttaaagtgggatggaaatttaccaagctctaaggctatagaggaatgggctgatgattatagctctgcgactaaattagattgggatgaaaacattcgggtaacttcagtcatggatatcgatggtaacgtgactgaatactattatggtattacgggttatacctatcgaattatttatccagacaatttgcaagaatggttctttagagatcaagcaaaaaatataacatcgcatattgctacagatggaactgaaacatcgtatacctacgacgaacgcggtaatgtcttaagtatggttcaggccgatggctcaaccttttattatgaatatgacgaaaaagataatctgaccggttttgttgacgctgaacaggggcgttggtttaaagaatacgatgcttcaggaaatataattaaagaaattgatccgctgaagcgcgaaacagtctatgcctataatgcaatggggttggtaacttccattactgatgcgaaaggaggtaagaagacacttaaatatgatgatcaagggaatttaatcagttatacagattgttcaggtaaagagaccaagtggcactatgatgaccgcgggcgcgtcaaatttattgaaaatgctttaaagcaaaaagttgaatatttctatacggaattaactactgaactaagacagcctatagcaaaagggttaccgttgaatgcttttggtcagcttgaaaaaattaaacacgctgatggcgctgaagagcatttcattcatgatgcagaaggtcgtttattagttcatattgacccaaaaggtcagcagacacgttatgaatatgatgcggctggtttaattactaagcgtattgacccattaaatcaaaccttaaaatatcaatgggaccgtctaagtcgcttaaaacgtttaactaatgaaaatggcgcaagttacgagtttgtctatgatgcggcgggtcgattagtaaaagaaattgattttgatggcaaagaaactgtttatgcatacgatgaatataatggtcgtttaaccacgagtattgaagttgcttctacttatggtcaagatttcaaagatcgtgctgcacctaaagaccgtattcagcaatttatttttgacagtatgggacgtttagaacaacgtacagcaggatatggctatcaaggacaagagcttgaagaaaaacaaacagaagaattttcttatgatggcttaggtaatctagttcaggctaaaaatgccgaaactaacttgcagtggttttatgatgcagcaggtaatttaattaaagaacatcatcaagatgttgtgacacagaaaactgctgtgtggaaacatgtctatgatgaattaaataatcgatctacaaccatccgaccagacggacagaaaatagattggctgtcttatggaagtggacatgtctatggcatggcattaaatggtgaagatattgttagttttgaacgtgacgatttacatagagagacattacgccactatgcaaatggtcttagccaacaacaacgttatgatgaagtcgggcgcttaactcagcaattaatgttgaatgggcatgacaaaggctatcaggcccaaactcaaaataatgctatccagcataccaaccaattgattgaacgcttatatcactacgataaaacaggtgagttaacgctcattaaggatactcgtcgtggggctatacattataaatatgatcctgttgggcgtttattagaggcaactagtaaacttgggaaagagacttttaattttgacccggcaagtaatattttagagcgatataacagtaccaaagagcaatcttctcagcatatttctgatgaaaaaggtcttggttataaccgcttagttaataatgtcgtgcaggaatatcttgaccaacaatatcaatatgatgcttttggtcaactgattcgacaaaagtcatcacaaggtgatttaaatcttgagtgggatgtattggggcgtcttgttcgtagtagaaacaatcaatacacggcagaatatcgctacgatgctttaggccgacgtattcaaaaaagaagtaagcatcaccatactggacaagaacagaacattatttatggttgggatggtgatactttagcgtatgaatctagtgatgatataactaaacactatttctacgaaaaagatagtttcgtgcctttgttgcaagcggcatatcatcaccccattgagctacatcaaacccaagactggacagaaaaaacatatagcatttataaagaccctctttggaatacagtaaaacaaagtcaaggttttgatgatgtatggttctatcactgtgaccatttaggtacaccgcaagaaatgagtaacctgacaggcgccattgtttggaaagctcaatataaagcttggggtgagtgtaaggtagaacaagctaagtcagatttctttgaaaagtcagaaattattagcaataacatccgtttccaaggtcaatattttgatggcgaaacggggcttcattacaaccgttatcgctattattcgccgtatgtagggcggtttattagtaaagatccgattggattgctgggaggatataacctttatcaatatggtcctagtcctattgggtggattgatcctttgggcttaagcaatgagacagaccaaaaaaaattaaaaagaaaattatcggctgtggagtctgctcaaaataaagctgttagaacacgagagttaagtgatggtagaataagatattatgagaaagaggctttagctaagactcaaggtccaactcgaggaagatcccatgttacagaaattaatcctaaaactggtaccgttagagtatgggaggaaacatatgatcataatggtaatgtaaatagggtacatcctaagatgataaacggtgaggttgtggatattccacattatccaccaacaaaagcagatatagatcaaggtaaagcaactccgtcagggcgagctatcaaaaaagggtgtcctctataa

SEQ ID NO: 56351 - DNA, 348 bp, Acinetobacter baumannii; identical to SEQ ID NO: 6026

SEQ ID NO: 56352 - DNA, 270 bp, Acinetobacter baumannii
  misc_feature (190)..(199): n is a, c, g, or t
atgagagcttctactgttacaattaaaactgaacaagatctagaaaaattaagagtttctgggcgtttagctgcacaagttttagaaatgataggggagtatgtcaagccaggtgtaacaactgaatatttagacaatatttgtaatgattacattgtaaatactttaaaagttataccggctaatgttnnnnnnnnnncacaaaaacaatatgtacttcagtcaatgaagtggtatgtcacggtatcccttctcaaaataaaattttaa

SEQ ID NO: 56353 - DNA, 1140 bp, Acinetobacter baumannii
  misc_feature (1088)..(1132): n is a, c, g, or t
atgaaactcaacaaatctactgttgatgctattccattaactgaaaaaggtcaaaaaatatatagagatgcagaactgatcggttttgctgttcgggtaactaataaaagtaaaacctatattgttgaaaggaggcatgaaggtgaactctatcgagtgacaattggtaaaaccaccgatattcctgcaacaaatgctcgagcaaaagctcagatgattctggcgaaaatttcaaacaatgaatatgaaaagcctatcaaattaaagaatgttgctaatcctttagatattacagtgaatgaagctcttcaaatttatattgatagaaatgactttaggccgaaaacaattaggcaataccataaatactttgatttatatttagggtggggcaacaaaaagcttttccagatatctaagcaagaagtattggatcgatttattgaggtatcagaagtaagtgagtcgtcagcaaatggtgctgtatctcttttaggtactttatggaagtatattcatgttctttattcaacagatgagaacccgatccttaaaagtaatccagttgacattatttccgtaacaagaggttggaataaaatagcaagtagggatagacatctccataaagacatcattcacaaatattacaatgcggtgcttcattatgaagatgagttgaatctggaaaatactgctaggtcaaacacgcatcgggatatcgtattgatgtgcatgtatacgggatgccgtaaacaggaggcatgttgtctaaagtgggctgatgtagatattaaaaatggtaccttaacttttagagataccaaaaatggttcagatcatacttttcctattggtgatcatctacacagtattttgcgtgaacgttggttattaagagaaaacgattgggttttcccagctactaagatgcctacttcgtggaatatgcatgcgactaaggtagatacattattgaatagagtgggtaaggaagttgactattacgtttcaatgcatgatttccgccgtacatttgccactatatgcaaccttttaagatttaatatttatgtgacaaaaagacnnnnnnnnnnnnnnnnnnnnnnnnnnnnnnnnnnnnnnnnnnnnnagaattga

SEQ ID NO: 56354 - DNA, 678 bp, Acinetobacter baumannii; identical to SEQ ID NO: 42312

SEQ ID NO: 56355 - DNA, 528 bp, Acinetobacter baumannii; identical to SEQ ID NO: 53065

SEQ ID NO: 56356 - DNA, 486 bp, Acinetobacter baumannii
atgcttgtgattattttaaagcaaacatgtaatctttcttctgcatctaaagccttgcccatcaagtgcttaccacaatcattttatcgacgtatgcagcgcttctttgcaggtcagtattttgattatcgtcaaatttctcagttgattttcaatatgttttcattcgaccaagtgcaactgactttagatagaaccaattggaaatggggaaaacgaaatattaatatcctgatgctcgcaatcgtttatcgtggaatagcgatacctatcctttggacattgcttaataaacgtggaaattcagatacgaaagagcgtattgctttgattcaacgctttatagccatttttggtaaagaccgtattgtgaatgtgttcgcagacagagagtttatcggtgagcaggggtttacatggttaattgaacaagacatcaacttctgcattcgtgttaaaaaaacttcattgtcaccaatcatttag

SEQ ID NO: 56357 - DNA, 183 bp, Acinetobacter baumannii; identical to SEQ ID NO: 46606

SEQ ID NO: 56358 - DNA, 606 bp, Acinetobacter baumannii
atgttgctcgaatatgccggggagcgaatgctctctcacatcgttgccgagcacggcgactaccaggcgaccgaaattgcagcggaactgatggcgaagctgtatgccgcatctgaggaacccctgccttctgctcttctcccgatccgggagcgctttgcagctttgtttcagcgggcgcgtgacgatcaaaacgcaggtcgtcaaactgactacgtccacgcggcgattatagccgatcaaatgatgagcaatgcctcggaactgcgtgggctacatggcgatctgcatcatgaaaatatcatgttctccagtcgcggctggctggtgatagatccagtcggtctggtcggtgaagtgggctttggcgccgccaatatgttctacgatccggctgacagagacgacctttgtctcgatcctagacgcattgcacagatggcggacgcattctctcgtgcgctggacgtcgatccgcgtcggctgctcgaccaggcgtacgcttacgggtgtctttccgcggcttggaacgcggatggagaagaggagcaacgcgatctagctatcgcggccgcaatcaagcacgtgcgacagacgtcatactag

SEQ ID NO: 56359 - DNA, 123 bp, Acinetobacter baumannii
atgctttctacaccacctgcaattaccaagttcgcttcgccggctttaatggcacgggcagcaatggcaatggcatcgagtgatgaaccgcataaacggttaatggtggttgccggcacctga

SEQ ID NO: 56360 - DNA, 231 bp, Acinetobacter baumannii
atgactgatcattggtcacaacacttaaatgagattgctagaaattcgcttaaacagcaaaacttacagaaaattaagtctaatgcttctaatttggatgatgttctgacttttagagttaacagtgctttaaagaaggaattcagtaagatttgtaaagataatcagtcttctgcaagttctgaacttaaacgttatatgctcaaaattgttgagcaaggttctttataa

SEQ ID NO: 56361 - DNA, 378 bp, Acinetobacter baumannii
gtgctagctcaattgaaaaattcaacagtacttgatgctgccctcatgtcttacatgagcgagcctaaatatccagacaatattccagaaccagatgaaatagaggttgaagacctaaatgctattttgtcagaagggtatgagctgctactcgaacctgcttcgcgtctactttatacagaacaaaatggcattttaaagttttggggtaatggagaagaattaccgattgtggaatcttttgccacccaactcaaatcgattgccgatgggaaaagcattcctttcaatagtgagcttaacaatacagatattttagaaaacattgttcaattattgaataattcaattcttatgttgttacctcctgcagagtaa

SEQ ID NO: 56362 - DNA, 225 bp, Acinetobacter baumannii
atgaagagattaaaagttgttattaaagatcagtttgaccaagaaagtattgctttagcaaaggttagacctgcgaacgatcagaaattagagctgtataaaagtgtagagcatatcgaaattgatgacgatattattctaccgaatatggatttactctatgaaaatccaaaagatggaaaaatttataaattagtcggcccgtttaatgaagatgaattatag

SEQ ID NO: 56363 - DNA, 525 bp, Acinetobacter baumannii
atggggaatatcatgaaactaaaattgaagaattttaagccaaataatttgtggtatgccgtctattcaagctcaatgatattcacatggctaatgacaagctctgtggtgcaagcaagtgatttacaaatttatgcctcacctacagcaggtaaaaaaacaattgtgatgatgttggatacatcaggaagtatgaccaacaatagttatggtgaaaaccgcttagccatgcttaaaaatggtatgaatgcttttttggctagcaataaccctgtcttaaatgatacgcgagtaggtttaggaaatttctcggcaaatggtgatagccgaagtggacaaattttagtggctgctgctcctttaggtgatgcaagtactttaaatacggtaggctcacaacgttataaattaaactctgtacacgacaaatttcacagaacccttatcctatcagggttctgccttcttaaaattgccaaaatttccttaaactcttcttttttcccaaaaccaattaaacgctga

SEQ ID NO: 56364 - DNA, 252 bp, Acinetobacter baumannii
atgttgaatatagtacagcctaatatttgcttcattggtagcagtaatttgtctttagctttaattggaggtttagttttaaaaggctttcaaagagaaaaaattaatctaatagaggaagtcaaatttgagaatcaaatcattctaaagcaaaagcaacatgaggtgaaaaaggcagatatagttgttctattactagacccaaaagacttaaaggctatactggcgcccattaaaaaaatggttagctga

SEQ ID NO: 56365 - DNA, 324 bp, Acinetobacter baumannii
atgtctaatttcaaaaagcaccctgacggctacaagtcatttttaggccgtgatgataagggcctctactctgttcgcattggctggcaagtgtacgcatctaatgctaatggctcagttctttacaaagttaaagacggatttaagacgcctttaaatgtgttcaggttccaaactgactatccaaaagtttggaatgaactcacacaagaaattgatttccaacgcagaaagcagctcgcaataaaactgcgtgaaacaaacatccctacttatgaccgcaaagcatataagcaaaaacgcggttttacaggctcaagataa

SEQ ID NO: 56366 - DNA, 1641 bp, Acinetobacter baumannii
gtgtcgactaaaaaagatctgacattaaatagtgtaaccacgggtgatagcgtacttaataataatggcttaaccattaaagatggtccaagcattactaaagatggcattaatgccggcggtaagaaaattactgatgtggctaatggcgttattgcacaaaattctaaagatgctgtaaatggcggtcaggttcaccatatctctaatagcatcaaaaacagtattggtggaaatacagttgttaatccggatggtagtctgacgaccaataatattggtggaacaggtaaaaataacatcaatgacgcaattaagtctgtagatgaaaaagtcactaatggtgtaaatgacttgactcaaaaagggctaaattttggtgcgaatgaccagaaaacaacccaaggcaaagcagttcaccgtaagcttggtgacactatcaatattgtgggtggggctaatccagaaactgctgaagataaaactagtggcgagaacatcattacccgtaccacagaagatggtgtcaaaattgagatgttaaaagatgtgaagttcgatagcgtgaatgtcgggggccatgtcttaaatcaacaaggtctaaccattaagggtgggccaagcatcacagtgaatggtattaatgcaggtggtaaacaaattaccaatgttgcagacggtattaatgcaaaagatgcggtgaacaaaggccaattagacaagcaaattaacgaagttaaagatcaaattggtaaagatattggcaagctttctgatcatgctgtgcagtatgacaaagataaaaatggcaatgtcgacaagaactcagtcactttaggtggtggagaaaaaggtaccaatctgaaaaatgtagctgacggtaaaattgctgagggctctaaagatgccgtgaatggtggtcaattatggaatgttcaaaatcaagtcgataagaactcgaatgatattaagaatattcagaataacatcgataacatttctaatggtaaagctgggttagttcaacagcaaaaaccaaatggtgaaatcacggtcggtaaagattctggcggtactagcattaatatggctggtaaagagggtgatcgtgttgttcaaggtgttaaagatggtgagattaaagctggttcgaaccaagctgtaaatggtggacaaatccataaaatttcagaaagcatcaaaaacagtattggtggaaatactacgattgatcctaaagatggctcaattacaaccaacaatattggtggtacaggtaagaacaatattaatgatgcgattgggaccttaaaccagtcgaaccaagaattgggtaacaaaattaccaatctgggtgatcagttacaacaagtgttctatgacactaataaacgtattgatgacgttgagaaaaaagctaatgcaggtattgccgctgccatggccttagaaaatgcgccgtttgtagcaggtaaatatacctatgctgttggtgctgcatatcatggtggtgagaacgcagtcggtgtgaccttacgcaaaacctctgacaatggccgttggtcaattacaggtggtgtggcagctgcttctcaaggtgagccaagcgtccgcgttggtattagtggtgtgattaattaa

SEQ ID NO: 56367 - DNA, 435 bp, Acinetobacter baumannii; identical to SEQ ID NO: 26756

SEQ ID NO: 56368 - DNA, 1113 bp, Acinetobacter baumannii; identical to SEQ ID NO: 46111

SEQ ID NO: 56369 - DNA, 237 bp, Acinetobacter baumannii
atgacaattatcacattgcttgatgttgagacgaagaagaaggtgatagttcggtccgtaatagacccaatagcaagaatagacaaaaaagggaatatacaaattattcaaattcataaatggctatatgatgaatctggagattttgttgatgaagacttatatgaggcactcaacaatggagaagttggaatatacttaactttgcagtatatgatcattgatattgaaaattaa

SEQ ID NO: 56370 - DNA, 2412 bp, Acinetobacter baumannii; identical to SEQ ID NO: 46112

SEQ ID NO: 56371 - DNA, 435 bp, Acinetobacter baumannii; identical to SEQ ID NO: 26756

SEQ ID NO: 56372 - DNA, 435 bp, Acinetobacter baumannii; identical to SEQ ID NO: 26756

SEQ ID NO: 56373 - DNA, 1419 bp, Acinetobacter baumannii
atgtcagaatggttcatatccagtatatgctttaaaaagcgcactacatattatttagtattgagtctcgcaattaatattcccttaactgtatatgcatcagacaatatgaatagggaaaatattttaaaagctgactttgatactaattttttagtgggaaatgcacagaaaattgatattggtcgatttaagtacggcaatcctattttaccgggtgaatatagtcttgacgtctatattaatgggcagtggttaggaaaacgaaagtttgtttttaaaagtactcgtacgaatgagaatgcaaagacctgttttaccccagatatgcttttagaatatggagttaaaccagaaattcttcatcatgaagtaagtagtacctttacctgtaatgacttggacaagtgggttaacgatgctttttatcaatttgatacttctcgtctgagacttgatatttcaataccacaagttgctttacaaaagaatgctcaagggtatgtcgacccacgtttatgggaccgcggtataaatgcagctttttttgcatacaatgcttctgcctatcgtattgtaaataataaccatgaaacaaatcatgcgtttatgggtacaaatgttggtctaaatctctatgattggcaattacgccatactgggcagtggaaatggcaagatcataatgaaatacaagaaaaggtttcttcctacacatcaaataatacatatgcccaaaaggcttttcccaagctcaatagtgttgttactttaggtgattattttaccaataataatttttttgatgccctaccttatcgtgggattaacatatcaagtgatgaccgcatgcttcctaacagtatgctcggatatgctccccaaattcgaggttatgccaaaaccaatgcaaaagtagaggtacgtcagcaaggaaatttaatttatcaaacgactgttacacccggaagttttgaaattaatgatctttatcccacaggcttcggtggcgaattacaagtctctatatatgaaacaaatggagaaattcaaaagttttctattccttatgcttctgtcgttgagatgctacgacctaaaatgagccgatattcttttactttgggacagtttagagatgccaatatcaatctaaaaccatggctagtgcaaggtaaatatcaaagaggtatcaataactatttaacaagctatacaggctttcaggcaactgaaaactaccagtcttttttaataggtagcgcatttgcaaccccaatcggtgcaatttcatttgatgcaactcagtcatcagctgagttcgaacaaaagcccacccttaaaggacgaagttatcgtttaagttttaaccgactatttactccaaccaacaccaatttaactttagctacgtattga

SEQ ID NO: 56374 - DNA, 519 bp, Acinetobacter baumannii; identical to SEQ ID NO: 49477

SEQ ID NO: 56375 - DNA, 882 bp, Acinetobacter baumannii; identical to SEQ ID NO: 50963

SEQ ID NO: 56376 - DNA, 282 bp, Acinetobacter baumannii
atgatctggaagcaagcaaggttcattgcttcaggaataactgggtttactttacccggcataatcgaactaccaggttggcgtgcttctaaattaatttcattaataccagtacgtggaccacttgaaagtaaacgcaagtcattggcaatttttgaaagtttagttgcagtacgttttaataaaccagataaaagaacaaagtcacccatatcagaagtggcttcgattagatcaggagcagacttaattttcttaccagagatttttccaagtgcttga

SEQ ID NO: 56377 - DNA, 435 bp, Acinetobacter baumannii; identical to SEQ ID NO: 26756

SEQ ID NO: 56378 - DNA, 918 bp, Acinetobacter baumannii; identical to SEQ ID NO: 46092

SEQ ID NO: 56379 - DNA, 918 bp, Acinetobacter baumannii; identical to SEQ ID NO: 46037

SEQ ID NO: 56380 - DNA, 951 bp, Acinetobacter baumannii
atgggcgacacaaaaattgctgatgtaatcgtacccgagttattcactccgtacgtattaaataaaactgccgaaaagtctgcattatggcagtcaggcattgttggggagctagatgaaaaagttgcttttggtacagaaggcggtactacagtaaatattcctttctggaatgatttaagcggtgagtcagaagtactttcagattcaaaacctttatctgtaaataacatcacttcaggcaaggacattgcgattcttcatgcacgtggtaaagcatggggcgctaatgatttggctaaagcattatctggtgacgatccacttggtgcggttggtgatctggtcgcagattactggtcgcgtgaatttcaggggtttaccgtaaatacacttaaaggtgtatttgggtctgcaagcatggcaggtaatacccatgatatttcggctggaactggagctgcagctgtaattgatggcgtatcttttgttgatgcttcttataagttgggtgatgccgtagataaattaacggctattgcaatgcactcggcaaccatggcggctttagctaagcaaggcttaatcgaaactgttcgagatgctgatggtgtggttctctacaaaacctttatggaccgtcgtgtgattgttgatgatggtatgcccgttgaaggtgatgtctttacctcattcttgtttggccaaggtgcgattggtttccaagatattggcgcaccagttggtgtagagactgaccgtgacagtttagcgggtactgacattcttattaaccgccgtcactttgtgctacatcctcgtggcattaaatgggcaggtgatacaggtattgcacctaataatgccggtcttgctacagccggtaactgggaacgtgtctacgatcctaaacagatccgtattgtagcattcaagcacaagatcaaataa

SEQ ID NO: 56381 - DNA, 435 bp, Acinetobacter baumannii; identical to SEQ ID NO: 26756

SEQ ID NO: 56382 - DNA, 336 bp, Acinetobacter baumannii; identical to SEQ ID NO: 46142

SEQ ID NO: 56383 - DNA, 138 bp, Acinetobacter baumannii; identical to SEQ ID NO: 50167

SEQ ID NO: 56384 - DNA, 216 bp, Acinetobacter baumannii
atgaacgtctttaaaaactcggcagttttatatgccttaagtgttttaaatttctttgcttataccaaaaccatgcgtgaagagacttcacaggacattatcattcttattctgtctacacctgtctatttaatcattacatacaccattaaatttataatggcatggattgaaaaacgcatggctgtaccaggtttaggctcgggaggaaaataa

SEQ ID NO: 56385 - DNA, 615 bp, Acinetobacter baumannii
  misc_feature (551)..(560): n is a, c, g, or t
atgggggttgtagaaaagaataaatctgaaaaaggtagattcagtacaaatgaagagacaaaacgaattgtctggattcaagctgctggtcattgtgaattatgtggtactgatcttacttatgattatcgcgtaggtaaaactatgcggtggggggaggttgcccatatcatgccagctagtcctaaaggacctagagccgataaagaacatgatgagactaaagctgaagcacttacaaataatagtgataaccttatgctgttgtgtcccaattgccatgacagaatcgatcgtgatgcagatggatatccagagtctgatttaactgatttacatcaggcttatttaacgcgtatcaaattggctgccacgacccctgatggagggagagctattccagtaattgtacaaagccaacattttgctacaacaaatgaaatttctactagagatttattaatggctatgtctgctgaaggacttactgcaattggtcatgaaattaggattatttttccgcctccagggcctcgcgggagagataaacnnnnnnnnnnctttattggcagcaaattaaagatagtattcagttcgagtttgaaaataaattaa

SEQ ID NO: 56386 - DNA, 1029 bp, Acinetobacter baumannii
atgcagccgatcgattttgtaatgatttgggtggactcaaccgatacgaaatggcagcagcaatatatatattataaatccaaagaaacaaaaaccaagattgatgagctcgttgatcaatgtcgttatcgtgactggaataatcttcattactggtttagatctgttgagaaattctgtccttgggtaaggaaaattcatcttgtaacctgtggccattttcctgaatttttagtcaaaaatcatcccaaattaaatttggttactcatgaccaaattatagaacctcattgtttgcctacgtttaattcacatgcgattgaaatcaatattcataaaatagaaggcttggcagaacactttgtttattttaatgatgacacctttattaatagtcctttagaaccagagttcttttttaaaaatggtttaccttgcgatggtattcaattacaacctttgatggtggtgggggaagagaactttttaggcgcagttgctttgacggatgtcgcaattattaataaatattttgataagagaaaactctttcggagtaatccttctgcactttttaatcatcgatattcgataagtaataatttgggcaattttttaagcttatataatcgaaaattttcaagcttttatagtactcatttaccccaaccgtttctaaagtcggtgtttgaagaagtttggagaaacgaagagagctacttaaaagaagtatcaagtcatcgatttagacaacctttagacgttaaccaatacctatttcgattatggcagttatgttcggctcgtttttacccagtaaatatatttcagcgtgggcagaactttaatttaagaatacaaaatcttcctgaaattaatcatgttattaagaatgagcaacttccacaaatttgtctaaatgacgatgaacacgtggttgattttgaaaaattaaaaacagaaattatccaaatttttgagcaaaaatttaatacggtttcaagttttgagaaaaagataacacattaa

SEQ ID NO: 56387 - DNA, 219 bp, Acinetobacter baumannii
atggcaatgcgtcctgacgttcgtcgacatgctttagtcgtgattgtattttctctcgcacaatggtttttcatgcgctatatccttgcgaatgaattatttaaccttacaacaaatcaacgtattctttatttctgcgtaagtagtttagtcggtgcattacttatttttgttgcgctgatttatatggtcttaaaaggaaatgcggataaaaattaa

SEQ ID NO: 56388 - DNA, 756 bp, Acinetobacter baumannii
atgaaaaaatatttaatcagtattgaatctacgaatagtgaacgtttaaaaaaattgttctctcaagcaacattttataaatatcgagatgaatttaaacaatttggggtaattgggaaaaatttaagtgttagtgagtattttcaacaaggggtagcaggcaagaagaaaccgatgacgcctggtgaactaggctgtgccatgtctcatattgctgcattaaaagattttttaagctctgatgaagaatatgccattatttttgaagatgatgtaatcgaacgttttgaaattgattttcaagatttagaaaaacacattcgttctttgaattttggtccttgctttttcctaagcttgggcggtattcaaatgaaaatatgtaatcgggttcgaggaaaacttttacctgaagaattgtataaccaaaaaattcttaaagtggattacgattatcttgaaaaacttgcttatgcttatgcatatgttgtagatcgtaaaatggcacagatgttggtcgactatcatcaaccgataaaaatttacgaccattggcaagaccttgtagggcgtggtgaatttagtttttatgtcagtttcttattcgatcatcccattattgagaacaatgatgctttaagctatttggagaaggaaagaagtttagtcggttcgcattctcaagacgatagtgattttttgcggtaccttagagttaaattaaagaaatatatacttaataaatatataatttag

SEQ ID NO: 56389 - DNA, 891 bp, Acinetobacter baumannii
atgctaaatcgcctaatccaaaaaaaatggtacaagtaccaacaagcaaaaaaagcaaaaacttttgactctcattggtatatgcgttttggctggttagaacaaccttttacaacacttgagcaattagattctctctttgaaatccattctcctggaaagtttacctttgccgatagcttttatgctcatgaaaatggacgacattttattttctttgaagaggtggatgatcaacatccggtaggctttctttcagttttagaagtctttaaggatggcacttacaccccgcccgaaactattttaaaacttgattaccacctctcatatccttgcgtctttaaaatagatagcacttggtacatgattccagagtcttctgccaacaaaactattgagctttggaaatgtactgattttccaatgaaatgggagaagcattctaacctaatggaaaatattgaagcggttgatagcacccctttttaccatgagggcttatggtatctttttacctcaacgcgtcgtgattgtaaaaagtttggtgaccgtttagatttgttctttaccgaagatattttaaatcctaactggcaagaacatccaatgaatccggtatgccgaggcagtcagcagttccgtatggcaggcaaaccttttatttataaaaggcaactggttcgaccaagccaagattctttaaaacgttatggcggcaatatcgaattaaaggcaattactcagcttagtccagcagcttatgaagaaaaattactagaagtagttttaccagactggaatcaagcagatgacggttgccatactattaatgtcgaagataatttcgtggtacttgatgccatccgccttacaccaaaaaataattaa

SEQ ID NO: 56390 - DNA, 1035 bp, Acinetobacter baumannii
atgaaaattgttcaggtattggcaactagcggtggagttggtggattagagcagcacacttttaaccttgttaatgagcttgctttaaaccatgaagtacatgtgattgcacatccttgctatgtagacaagtttagccaacaagtacattttcatgctatcgattttgcccgtagtcgttggaatatttttttactttggcaacttaaaaatcttattcaacaaatccaacccgctattgttcatgcacaagcaggaaaagcggctgagttgattgcccgcattaagccatttttatctggtccaaagtttgtaacgactgttcatggtactaaaaagaataagtctgcttatttagcaggtgatgcagttattgcggtgagccaagcgctcacgcaaggcattccagagtctaaagcacacgtagtttataacggggtatatcctcagcccgtacttacaactgaaaataaagaaaaattgcttcaatcgattcaaaaagattttactgagctagacacaagcaaaagagttgttatgtgtattggacgtctagaaccagtaaaaaatatcagtttattgattgagtcgatgcaacagattgatgccaatttatggattgttggtgacggttcacttcgagcaagtttggaaaagcaagtcagcgaattgaacatgcaaaatcgggtcgcttttcttgggtttagaactgatgcgcgtgatctggtacaactggctgatatcgtggttttatcatcagatcgtgaaggttttccacttgttatggtcgaggctttacaggccgataaagcaatggcttcaaccaaagtgaacggtgtgatcgagtggttgccagaacaatatctagccgaaattggagatactcaaggtttagcaaaagcgattgaatatgctcttcaatctgaggctcaaaatgacttcagcccactatatgcaaaggccaaggctgaactgactgtaccagccatggctgagcagacgcttaatatttataaaggcctgctgaaaacttaa

SEQ ID NO: 56391 - DNA, 768 bp, Acinetobacter baumannii
atgaataaaattccatgtagtgtttatattgtcactttaaactgtggtgcttggttagagcgaactttacaaagtgtcagtgagtttgatgaagtcattattttagactctggcagtactgataatacttatgaaattgcaaagcgttttgaaaatacgcaaatttctcaccaagactggcagggttatgctgggcaaaaaagtttagctttagctaaatgcagaaatgattgggtacttaatttagatggggacgaagtcttatctgaggagttaaagcaagaaattgttgagaccattcaacagaacaagcttgatgcattaatcaccccaattaatgatgtatttttaggtgttccgaacagtaaacatactaaaaaacatgcaaaagtgcgttttttccgtaggtctaaagggcattatgaccttgccaataaagtccatgaaaatgtgatcgtagatggtgaatctcagcgtgctcaacacgatatttaccattatggtgagtcgagcattttcgttaaagtcgaaaaaaataaccaatattccaaccttaaagcattagagaaattccaaaaaggaaagtctccaagcattgcaaaattggttttggtgatgccagtgacttttatgaaatcttattttattcgccgtagtttcttaaatggttggcgtggtttcgtaaatagtatgattaatgcattttatgcatttctaaaagaagccaaactatttgaacagacgatgaataaagataaaaataagtag

SEQ ID NO: 56392 - DNA, 756 bp, Acinetobacter baumannii
atgatgtggtttttgtacgttgcggtaggcctgctcgcacttgctgcactgttatatgtgctgggtaattatacattctggcttccgtttcgttcgagtaaactacctcgcattgtgatgttacatcaggtcactcctaaagatgctgcttctggcatgaatatgcctcctgaaaagtttgaacaactcttaacgttgttaacgcgtaaaggggctatcttttgctttgtttctgagcttgaacaatatcgtaatcaaaagaatgtagttgccttaagttttgatgatggctttatggataattatctttatgcctatccactactaaaaaaatataaagcgaaagcaactatttatttagcaacgcaaattgaaggtattgaaaagcttactcatgagcaaatccatgaaatggctaactctggtttaattgaatttggtgcgcatactcaacatcatgtgaacttacttaaacttgatgatcaaacggcttacaatgagatgcttcagtctaagcgtgatgttgaagcattagttgggaagtgcccgagttttgcttatccatttggtcgatttaacgaaaagcaccagaaaatggcccaagaaattggctttaaaaatgcagtatcgactcgtaaaaaaatcgaagcgtatcaagcagataaccaatttaatattccacgtgtcagcacgcatggcgccatgaatgctttacagatgcgtatcgcccttgctaaaggacgttataagttatga

SEQ ID NO: 56393 - DNA, 1029 bp, Acinetobacter baumannii
atgaaaatattgcatattgcaaattttggctttaataaacaaggcgcacatttttactgcacagaccgtaaaatttctgccggattaattgaaaatggccatttcgtttgtgattttagtttccgtgacatggcgcgaatggggacaatctttaaaaccaaaaaattaggggcaaagtgggccaataaagaagtactcaaggttgttaatactattgaacctgatttggtattgattggtcatagcgacttgatgagtccagatgttttaagacagattaaagagtcttaccccaatactaaaattgcattttggtatgttgatccgctttatcttgaaaacaaactcgactttgtcaaagcattttcaccttatctagatgctattttctgcacaacaggtggagaatatctccaaaagttaaaacagcctcatttaagtgtggcttatatgccgaatgttggtcatcgcaatgtagaaacactacagcaattttcaaactcaaaaactgacaaaacttttattttctgcggtgttgtttataaagagcctgagcgcgagaaattcttaaaagatttagcagaggctttgcaacaaggccatgtaaattatcaatattatggttgttttgaacagccaggtgtatatggtaaggcttattataaggttctgtctgaaacaaaaatggggctcaattactcacgccgtaatgatgtaactttatatagctctgatcgtattgttcagttgactggtaatggtttactgacctttagcccaagaattccaggctttgagaaactctatactgagcaggaagtggtttactttgatgatcagtttgatttggctaagaagatacaattctttgaccagaacccagagcaagctgtaaaagtagcgaaagaaggctgggagaaaacacgtaaatctttcaatgctaagcgtatcacccaatttatggttgaggtgacgtttaaacagcccctttcagaagattatgaatggtcacatgaggtttatgcatga

SEQ ID NO: 56394 - DNA, 927 bp, Acinetobacter baumannii
atgaatttggctgatcgtgatggttttatttggcaagatggacaattaattgattggcgtgatgcaaagattcacgttttaacccatactttacactacagtatgggcgtatttgagggtgttcgtgcttatgaaactcctaaaggtactgcagttttccgtcttcaagaccacacaaaacgtttgttaaattcagcaaaaatttatcaaatgaaagtgccgtatgatcaagcagcgcttgaacaagcacaaatcgatgttgttcgtgaaaataaattagcttcttgctatttacgtccactgatctggatcggttcagagaaacttggtattgcagcaacaaataacactattcatgccgctgttgcagcatgggcatggggtgcatatcttggtgatgaagcaatggcgaaaggtattcgcgttaaaacttcatcatttactcaccaccatccaaacgtgaccatgtgtaaagcaaaagcatctggtaactacacgttgtcaattcttgctcaccaagaagttgcacattctggttacgatgaagcaatgcttatggatccacaaggttatgtgtgccaaggttctggtgaaaacgtattcttgattaaagatggcgttttacacactccagatattgcgggtggtgcacttgacggtattacacgccaaaccgtgatgacgattgctaaagatcttggttatgaagttgttgagcgtcgtattacgcgtgacgaattctatattgccgatgaagcattcttcacaggtactgctgctgaagtaacaccaattcgtgaatacgatgaccgtcaaatcggtgcgggttgccgtggcccaattaccactgaaatccaaaagactttctttgatgcagttcaaggtaaaaatccaaaatatgaacactggttaacttacgtaaaataa

SEQ ID NO: 56395 - DNA, 2751 bp, Acinetobacter baumannii
atgaatgcggagcagttacaaaaaacattgcgtgccagccaatatgctgaacaagttttaggattacatcaggctgttttagaacaagattatcaaatagatcaatttgctgcaccgctctcaacagaacaaatttaccaacttgtagacatcacgcttgatggaattggcgatgaaataacttggatgcgtgcgcttcgtatactgcgcagtcgtttaatgtttcgctggatctggcaagatgccaatcaactgacggatgtcgttacacttactcgtgaactttcagactttgccgatgcaagtatttgtgccgcaaaggcttttgctcgtgttgcattggttgctaaacacggcgaaccattaagttattcaggcaaagttcaagatttgattgtggttgccatgggtaagcttggggcacaggaattaaatctatcaagtgatatcgacctgatttttgcctttgatgagcaaggcgaaaccaacggtcgtaaatgtattgatgtacagcagttctgtattttgtggggacaaaaacttatttatttacttgaacatatcaccgcagatggttttgtgtttcgagtagacatgcgcttacggccttggggagatggctctgcattggcgattagtcatgcagctttagaaaaatatttaagtcagcatggccgtgaatgggaacgttacgcatggattaaggcacgtgtagtcactgggggtaaagaagggcaagacttattagaaatgacacgtccttttgtattccgtcgttatgtcgattacaccgcttttgctgccatgcgcgatatgaaagcgatgattgagcgcgaagtattacgtcggcatattgaagatgacattaagctcggggcaggcggtatacgcgaaattgagtttattgttcaggtgttccagcttatttacggcggttctaaacgtgagctgcaagatcgtcaatgtttggtcagtcttgagcatattggtgaggcaggcttgttagagaaacaggccgtactagagcttgaagatgcttacctgtttttgcgccgtgttgaacatgcaattcaagccttgaatgatcagcaaacgcaactattaccagaagaagcagatttacgacaacgcattatagataccttgggttttgcaagctggaatgaatttattgatgttctgaacgagaaacgccaaaaagtaaaaattcagtttaagcaactcattgaagacacaagttccaatgcagctaccgagaactttggacagttagagcagcagctagatgaagtgttagatgataatgcaaaaaatctgattcatgagttctggcatggtcatgcacttaaaaaacttccttccaatgctgtgcagcgtttaaaaacgttttggccccatttaattgaagccattttacagtcagaacaaccacaaactgcattattacgtttaatgccactgattgaatcagtcatgcgtcgaaccgtctatttggtaatgctgattgaaagtaaaggggcattacaacgcttagtaaaaatggcaacagtgagcccttggatttgtgaagagttaacgcaatatccggtattgctggatgagttcttgtcgatggactttgaattaccaaaacgtaaggacttggaagactcattacgtcagcaattacttcgtatcgaaattgatcaggtcgaagatcaaatgcgggtacttcgcctgtttaaaaagagtaatgtgttaacggtcgctgcaagtgatgtgttagctgaaagtcctcttatgaaggtctctgatgctttgacagatattgcagaagtcagtgttaatgcaactcttaatttagcttatcagaccgtagcaaaacgtcacggttacccaaaagatgtcgagggaaaacgttgttcactcgattataaagcttttgccgttattggttatggcaaagtgggtggtattgagctgggttatggttcggacttagatcttgtctttattcactatctagatgaacaagccgacacggatggtactaagtcaataactggttttgagtttgccatgcgtgtcgctcaaaagtttatgtctttaatgaccactcaaacgcttgatggccgtgtttatgaaattgatacacgtttaagaccttcaggtgaggctggtttattggtgacaagcctgaaagcctatgagcattatcagttgaaaagtgcatggctttgggagcatcaggcattagttcgtgcgcgttctattgcaggtgatgaagcactttgccaaaaatttgaaatatttcgccgcgagatattgactcaatctagagatgaggcttatgttcgtgaggaagtgctgaaaatgcgtcagaaaatgaaagaccacttaggttcatcttctgaacaaaaaaaacatggtatttttcatttaaaacaggacgcaggtggtatcgtagatatcgaatttatggcacagtatgctgtacttgcatggagcgggacgaaacccgatctcgcccattattctgataatgtaagaatattagaagatgctgctaaagcagactgcttatccagtgaagatgccacagcattaattcgagcctatcttagtgaacgtgccgaaagccaccgcttagcccttgcgaatcaatccatgcaagtaagcgcagcggactggcgtagtacccgtgcggtcgtttgcaatttatggcaaagattaatagacccaaccgcctcggttgagttggatagtgaatga

SEQ ID NO: 56396 - DNA, 1269 bp, Acinetobacter baumannii
atgacacagcgattagaactacatcaggtagagcagttaacagcttgtaaaatatcactattacttggactaaatgccgagcagaattatattgagcaatttttccggtttagtcttcgcctgttgaagtgtcaaaaagctttgcttacttttaatcaggaaccttatttttggcatcattgcccagatggcatgactgcaatttcctttaaaccttcaagacacctaaaacaatgttttgctaaacaacaggtgattcatcacaatcatccttcttatcaaaatttaatcaactatttaaaagagctaaatattgaatgtgggcgtgccttagctgtccatttggtgcagcctgaccagacatctatgggatttgcagttttcttcgatgacgatgaaaattgttttgaagatgatcaaattcagttgcttctcgattactgttctagttttatgcaacaagtcgagttgaagtttaattatgaagaattaaatgaactctatgagcagcaagtcgcgctgaactcgagtaaaacaaagttcttttccattatttcgcatgacttgcgggcaccatttcatggcttgttaggtttctccgaagtattagctaaagaacgtgaaacactggatgagtcgagtattcaaaatattgctgattatttatacgacacttctcaatcgacctataacttacttgaaagtttgctgacatgggcaatggccgaaggtggtcgctttgtttatcacccaattaattttaagcttagacaagtgagcaatattgtttgtgatgtgctgcatactttggctttaaagaaaaatattgaattggtaaatgcggtttccgaagatttaaaaatctatgccgatatcaatatgatgacttccgtgatccaaaacttggtgtcaaatgcattgaaatttaccgatgttgacggctctggaaaagtgtttattgaagcgaagcaggtgggtacaaatgtcgaaatcactgtacgtgatacagggcttggcatgactgaacagcaaatggcaaatttattccatccgcgtattacagcaagctttaaaggcactgctggggaaaaaggtgcgggtttaggtttgagcttatgtaagcgttttgtcgagattaatcaggggaaaattagtgtaacttcccaaaaaggagtgggaacgacatttaaagttttattaccttctgctcaagaagttcctgaacatcatgtagaacaacaaaatacatctgaagcaaaattggtttaa

SEQ ID NO: 56397 - DNA, 1038 bp, Acinetobacter baumannii
atgcaactgtctgacttttcctttgaactacccgatgaacttattgcccgttacccactcgaaacacgtagtgcttcgcgtttattgcatttagatgctaagggccaatatcacgatcatatgttcacagatattattgatctgttcgaagaaggcgatttattggtactcaacgataccaaagtcatgaaggctcgactgaaaggaaaacgtgccacaggtggggcgattgaaattttggttgagcgtatgctgaaccacaccacagcgtattgccatattaaagcgagcaattcacctaaagcaggggctgagctttttgtcggtgcagacaatattcctgtgattgtgcgtggccgtcacgaaaacttatttgtcgttgagttttcacaaccaattttgcgagtacttgagcaatatggtcagttacctattccgccttacttcaatcgtgaagcagaagaaattgacactgaacgctatcaaacggttttccataatccagaaaaaattgccagtgtggctgctccaacagctagcttgcattttgacgaagagttgttagcaaagttagaccaaaaaggcgttaagaaaacgtttgtgactcttcacgtcggtgcaggtacttttatgcctgtacgtactgatgacattacgaatcatgtcatgcacagtgaatggtgtgatgttcctcaagaaactattgatttaattttggcaactaaagcacgtggcaataaagtaattgctgttggtacaaccgcaacgcgtgctttagaaagtgcagctcaagcgcatggcggaaaaatcgcagcatggactggtgatacgcaaatctttatttatccaggttatgagttctgcatcgtagaccgtttaattactaacttccatttacctgagtctaccctgctcatgttagtttcagcattgtcaaatagagaaaatattttggctgcttatgaacatgccgttaaagatcgctatcgcttctttagttatggcgatgcaatgctgattgataaattagaagtttaa

SEQ ID NO: 56398 - DNA, 1029 bp, Acinetobacter baumannii
atgccgattgataccatacaacaagcacttcatataagacgtaaaaaaaatacacaagtctttcgtaatattgcccgactttgggatgctggacaaaagtcacaaacagatcaagaactcttaaacgcgttacatccatggcgtgaagatcataaccttcgttttgtgaataccctgtcttatttattaagtatttgcagtattacgacgctattatttggatatttttttcatcctcatattcaatatagttggagtctattatgggcatttttaactggtttcctcgcctatttgctctatgaaccgcaaaaacctttaactgaagttattcattatttagaacagcgtatgactgctttacgttatggcctaaagtttcagcagttaccagcttatcttccaatacaagcccaacccattttagtcttaagcaaattaaaacaacacttttcactttttaaccgaggcaatgaagcgaatgaaattaccgagtttgcttcagtaacatggaatgacggcattacagatcatcaagtcttgctatttaaataccactatgtaaataatttacctattcttcaagaccagaacagcgataaaaaaatagtaaaagagattcataaagacttatggggcgcttttatttttcaaataccagctttaggtattgctgtaagtaatcaacgttctcgcttttttgaaccatacttaagcgaatggcaaagtagcgacattctcattaaccaagaactgagtattttcggaaccgaccagcaccagttagctaaagaaatgagtccaagtctaactttaaaacttcatgatttttttcaacattttagcggggatttaatttatcatcatgaagagcaaatattatgttatctcggtgagcaagatctttttcaaaccatcagtaaacgtagtgaaattcatgatattcccgcattacgtggtcacttacgtaccatgactatgccgcaatatgaaaaatttcagcaattcatgcttaatttaattaaataa

SEQ ID NO: 56399 - DNA, 570 bp, Acinetobacter baumannii
atgacaggcttattcattttcttggggattttcgttgtactgattgcttggggcatccacattcgcaataacattgtgcgttatttcaatgcgaccaaacgcgcttgggctgaggttgcaaatttcgaacgccaaaaagtaaaaacacttgaagcactagaaaccacactcaatcaatatactcagttcgagaagtcaactttagaacaagtaactgctttacgtcagcaaattctaagtttgaatgtcgatcatactgatattgctcaattacaacagattgaaaaaatgagcaaagagctaatccgtagcctcaatgtcgtggttgaaaactatcctgaactaaaagcagatacgctctatagcaaaatgatggatgatattcaggaacaaaacgaaaatgtcggtgcggcaatcagcatttttaaccgcaatgtcgaagtatttaataatcaaattgaagtgttcccaaataatattatcaatacgatgactttatctaaaaaaacaattcgtccttttcgagataatttggttactgacaattttgactacaaaccgagcttttag

SEQ ID NO: 56400 - DNA, 1134 bp, Acinetobacter baumannii
atgaagtttgaaaaattaggtcagtcgggtcgtgcccgtcgtggtcgtttaactttagaacatggtgttgttgaaacccctgtttttatgccggtggggacttacggtacagtcaaaggcatgctgccacgtgatattgaagatattcaggcacaaattattttaggtaataccttccatttatatttgcgtccgggccttgaagtgatcaagcaacacggcggcttgcacgattttattaaatggaataagccaattttgactgactctggcggcttccaagtatttagtcttggcgctatgcgtaaaattaaggaagaaggtgttactttccgttctccgattgatggttcaaaagtctttttatcgcctgaaatttcaatggatattcagcatgtattgaactctgacattgtcatgatttttgatgaatgtacaccttatcctgcgacacatgaagaagcacaaaaatcattacagctttctttgcgttgggcaaaacgctgtaagacacatcaccacgatgaacttaaaaataaaaatgcgttatttggcattattcaaggcggcatgtatgaagacttacgtgatgagtctttaaatggcttacttgaaatcggctttgacggttacgcaattggcggtttgtcagttggtgaaccaaaagaagagatgatcaaggttttagattatcttccaaacaagatgccgcatgacaaaccacgttacctgatgggtgtaggtaaacctgaagatatcgttgaagcggtgcgccgtggtgtcgatatgtttgactgtgtaatgccaacacgtaatgcacgtaatggtcattattttgtcactgatggtctggtacgtattcgtaatagtaaatatcgtcatgaccaaggaccacttgacccacactgcgattgctatacctgtaagaactttactcgtgcttacctgttccaccttgagaagtgtggagagatgttggcgtctatgcttggtaccattcataacttacgttattaccaacgtttaactgaaggtatgcgtgatgcattagacaatggcacttttgatgaatttgttcaggacttttatgcccgccgtggattagaagttccaccatgccctgtcgatgaataa

SEQ ID NO: 56401 - DNA, 330 bp, Acinetobacter baumannii; identical to SEQ ID NO: 43498

SEQ ID NO: 56402 - DNA, 1902 bp, Acinetobacter baumannii
atgcgttaccctgcatggaaatatttactgattctggttgttctggtagtcagtacattatacgcactgcctagtctatatccggatgagcccgccgttcaaatttccggtgccaaagctggtacccaaattgatcaaagtgtggtgcaaaaagcagagcaaattttaaaaacagcaaatattgcaagccacgataatacttttacaaataatgctgctctcttgcgtgtcaactcttctgaagcgcaattgaaagcaaaagaagtattacgccgtgacttaggtgatcaatatgttgtagccctaaaccttgcaccaacaactccagaatggttgcaaaaaattggggcgaaaccaatgaaacttggtttggacttacgtggtggtgtccacttcttgctcgaagtagatatggacaaagccatttcccaacgtatggaaacctctgccaccgatttgcgtcgtcagttccgtgaaaacaaaattaaatttaacaatcttgcgttaaataataatgtgatcactgttcagtttgctgacaatgcggatcgtgatgcagcaatggattttttacgccgtaatggtaatgaatatacccaacaggcattagcgagcacgacaggttcaatcctaaagctcacttatactgatgtacgtcgtcaagaaattcaggcttatgcagttaatcagaacttaacaacactacgtaaccgtattaacgaacttggtgttgcagaagctttagtacaaagtcagggtagcaaccgtattgtcgttgaattaccgggtgttcaagatacagcagaagctaaacgtgttttaggccgtactgctaacctcgaattccgtttggtatctgacttaaatgatcaatatattgatccatatacgggtaaatataatggtcaaccgttacctccgggtacggaagtttttgcttatcagtctttagatagtggtcgccaactgttgttgcaacgtaaccgtatcttgactggtgaacgcgttcaaaatgcaagttctggctttagccaagactctggtggtgccgaagtaaatattacgctcgacagtgctggcggtaagctgatgtcagatgcaacccgtaatgcagttggaaaacgcatggcggtattgttcatcgaaaataaacaaaagattagctacgttacagatccaaaaactggtgctcaaacagaagttcgtacaccatataccgagtctgtcgtgattaatgccgcaaccgttcaagccgttttaggttcaactttccgtattactggtttaagttcacctcaagaagcatctgaacttgcgttaatgcttcgtgccggtgctttagctgcgccaatgtacttcgttgaagagcgtgttgttggtccaagccttggtcaagaaaacattgataaaggtgtactatcaacgcaaatcggtttcttgcttgttgcaatctggatggtcgtattcttccgtctatttggtttaatcgcgaactttgcacttgtatttaacttggcaatgattttaaccattatgtcttggataggtgcttccctcaccttaccgggtattgcgggtatcgtcattaccattggtatggccgtcgacgccaacgtactgatatgtgaacgtattcgagaagaaatgctctggggggcctcacctaaacaggctattgtggcgggttatgatcgagcctataacaccattttcgactcgaacttaacaacgttccttgttgcattcattctgtttgcaatcggtactggcccgattaaaggtttcgccgtgacattaatgatcggtattatttgctcaatgtttactgcaattacagtaacgcgtgcgattgtacaaatcatttatggtaaacgccgtaacttgaaaaagttgagcatttaa

SEQ ID NO: 56403 - DNA, 963 bp, Acinetobacter baumannii
atgactaaagtgactcaacagccttcaaaacaatatggtcgtccggatgatgcaaaaatcatcccgttcatgaagattgctaaacctgcagcaatcttctcgatccttattactttagcgagcattttctttattgcgaccaaaggtcttaacttaggtttggactttaccggtggtgtttcagctgagcttaactatgctcagccagcaaatcaggcagaagttattcaggctctcgataaagctggttttaaagatgctgtagtacaaactttaggtagtaataaagacttacttgttcgtatgccagtacaagatattaaggttgaagatcttaataacgccattaccaaagctgtgcaattaccaaacaatgcagcagaagttcataaagtggactctgtaggcggtcaggtaggtaacgagctttatgttcgttcggctggcgctgttgcacttgcgctgattttaatgttgatctatgtcaccattcgctttgagttcaaactcgcaatgggtgccgtgatgtctttattccatgacatcatcatcattattggtgcatttgctttattccaatggccatttgacctgacagttttagctgcggtacttgcggtgattggtttctcgcttaacgataacatcgttgtttcagaccgtatccgtgaaaatttccgtaaaattcgcggcgcgactccacgtgaaatcgttgatattgcgttaactgagactttacgtcgtaccatccatacctcaatgacattattgcttgtagtacttgcaatgatgttcttgggtggtgatggcttacactggttctctgttgcaatgtttgtcggtgtctttgtcggtacttactcttcgatttatatcggtacagcatttgccttatggcgtggtcttaaccgtcaagacttcattgttcaggtcaaacctgaatttgaagatgaaatcccttga

SEQ ID NO: 56404 - DNA, 1254 bp, Acinetobacter baumannii
gtgagctttgatttaagtgttattcctcataaaaacattgttttagctgttacaggtgggattgctgcctataagagtgccattttggtccgtcgtcttaaagattatggttttgacgttcgggttgtgatgacacacggggctcaagcatttattacacctctaacttttcaggctctttcaggaaatcctgtacataccgagcttttagacccggaggctgaagctggaatgggccatattgaattggctcgttgggctgatttattactggttgctccagcaagctgtgacacattagctaagtttgctaatggtttggcagatgacttactcagtactttatttttagcaactaaagcgcctgtgtgggtcgctcctgcgatgaaccagcaaatgtgggctgcaaaagcaactcagcgtaatttacaaactctggttgaagatggcgtacatgtgattatgccagatgcaggggagcaggcgtgtggtgatgtaggcttaggccgtatgccggaaccggaagaaattgcaaggcaagtggcgggttatttccatcaagcccaacgtgcaattgctgaaaaatttgggttgttggcaggtaagcgagttgtaattactgccggaccaacccgtgaggcgattgaccctgtccgttatatctcaaatcatagtactggtaaaatgggctttgctttagctgcggcatgttatgcagcaggtgcaaaagtcacgttaattgctggtcccgtaagtttagatactccaaacggtgttcaacgtgtaaatgttgcttcggctcgacaaatgttagatgtcagtatggagtcgcttgagactggctgtgacatctttattgcgacggcggctgtagctgattatcgcgtcgctgaagtggcagagcataaaattaagaaagcaggggatgagctgaatgtttcccttgtaaaaaatccggatattgtggcaaccattgcagctcaggaaaaacgtccatttatggtgggctttgctgccgaaacgcagaatgttgaagaatatgcagcagggaaactcgttgctaaaaagctagatatgattgcatgtaacgatgtttctcgcgccgatattggctttgcttctgatgaaaatgcgatgacagtattttttgctgaaagttaccatatgaaaaaacgtgagttagaaaaagcatctaagcaagaaatttctcaacagctagttgaagctatttcagatgcgttacgccgtaaataa

SEQ ID NO: 56405 - DNA, 708 bp, Acinetobacter baumannii
atgaatacttctattaaaaattggccagaacaagaacggccaagagaacggttattacaacaaggccctcaaagtctctctgactctgaactactcgcgatctttcttcgctcaggttcacgtcaacattcagcagtagagctcgcacgtttactgattcaacagtttggtagtctaaacgctgttttcgatgcatcttacaatgaattagctcaatttaatggtattggagctaccaagtattcccaattactggccgtaaaagagcttggacggcgttatctcgactatcattttagtcagactgagctaagccttcattcttctcatttagttctagattatttgcgttacgaattaaaaggtgaaaaacaagaagtctttgccgtactttgcttagatgccgagttgagaaaactacattttaaaaagttattttttggttcagttcaacactgcgctgtttcagtgaatcaaaccttacgttatgccttacaacagcacgcttgccaattagtaatagcacataaccacccatttggttccccacagccctctcctgaagatattaaactcacacagcaacttgaacaggcctgtcagcttgtcgaaattcgtctgctggaccattttattatctcgcccgaaggtagcttttcatttgctgaacaacaactgctcaaccctacctcaatagccgttcaatga

SEQ ID NO: 56406 - DNA, 912 bp, Acinetobacter baumannii
atgattgttcgtgaacagcccagtatttttaaagttttattctcttggcgagggacgatattacctaaaattttgccctctttaggggtagtaatgctgatttcggcaatcattggtggggttgaatacattaacctttatcgttttccagaaattcctttagttggctttactttaattggtgtcgtactttctatttttttaggttttaagaatactgcatgttatgaccgctggtgggaagcccgaaaattatggggggtcctgattgcaacttcgcgtcatttcgaccgtgactgccgaattttaactcaagcccgccgtgaacgtgtcattcagcacgttattgtatttgccaatgtattacgtgaccgtttacgccgtcaaacagccaaccccaccgagctaatacaaaccagtggcatgagccaacaagcacttacccaactttaccaacaaaataacgcacctcaatatacgcttagccttattcaatgggaattattacaagcgcttaaagaaggggaaatttcagatattatttatgctcaaatgaataagaatgttgcagatctaagtgtcgtacaaactggctgtgaccgtattgcaaatactcctattccgtttgcttattcagttttgcttaaccgtactgtttattttttctgttttatgttgccgtttagcttaggatctttgcttggtttagcaacgcctttactggttggaattctagcttatacatttttaggacttgatgctttaagtaccgaaattgaagaaccatttggcacgcaaagtaatgatttacctttagatgcaatggtacgtagtatcgaaattgagcttttggggacacttggtaagcccacacctcctccaattcaagctcaagataacaacttgctctaa

SEQ ID NO: 56407 - DNA, 852 bp, Acinetobacter baumannii
atgcaaggcatagatttacatacacatagcaatatttctgatggatctttgtctccggaattgctagtgcaagctgctgtcgatgtgaagttgcatactttagcgctaaccgatcacgatacgatggatggattgcagcgtgcaagaaatgctgcacaaccccatgatttgcaaattatttctggtgtagagatttcaagccagtggtcacgaccaagcacgaaaaaaagctatggcgtacatattgtggctttaaatatgcaagatgaagctccaattttagaagcattagaacaacaaaaaagaattagagcacaaagggctgaagttatttgtgaactattaaaaaaatgtattggctttgatatttatcaagatgttctcgataaagttgaaaatcaaccagaccggattaccagaacccatattgctaaagccttagttgaaaagaatgtagtgagccgtcctcaacaagctttcgatcgttttttaaaagaagggaagcgtgcttttgtaaagtttgaaggattgggtttaaaagaaaccattgaggttattcataacagtaaaggatttgcagttttagctcatccaacccgttatgatttatcggctacaaatacccggtatttgattgagttatttgcaagttgtggtggagatgcggtggagttgccgcctccagtagatcctttatctactcgccaaatgattgatcgtatgattgaccagcatcatttggccatttcaattggtagcgattttcatggtgaaaatatgccgtggattaaattaggaaacacccctaaaccagcgagtaaccagcaaggcatttgggaacgttttatctaa

SEQ ID NO: 56408 - DNA, 615 bp, Acinetobacter baumannii
atgaaagcactactggactttgttccattaattattttcttttatttatataagacagttgatccagccgatacacagcatcctttactcaaactgatcgggtctgctggcggtgttgataataataatattcttgtcgctactaccggtttaattatttcaatgctggtagtgtatggtgcgttgttcatcatgcaaaagttccgtctggataaacagcaatggattgtgctgttcatgacagtcatttttggtggtattacccttatgttgagcgatgatttttacatccgcttaaaagccgctattttgaatctagtttttgcaggtgctttcttagtttcaccttggtttggtaaagaccgtaagcctcttattcaacgtttatttgatccgattttagccttaagcgaaaaaggttggaaaaatttaaactttgcttgggcagctatgtttgtcgtgatgtctggtttacatgttttctttgcgtttttattccacggcggaaaatattggggtgaatttactgcatttggtgacatgattgtcatgttttcatttatcattattcagttcattattttacgtaaacattttaagtcaccagatgcttaa

SEQ ID NO: 56409 - DNA, 303 bp, Acinetobacter baumannii
atgcctttttttgttctaagctgtaccgataacgaaggaactctagagaaacgtttagcagtacgtcctcaacatatcgaacgtttgcaaaaacttgatgatgaaggtcgtctagttgctgctggagcgatgccaaaagaccctaatgacccacaagctggtttctatggcagcaccatgattgtagagtttgatacacgtgaagccttagatgaatggttaaaagaagaaccatttttgaaagaaggcatctatagtcatgttgatgtcaaaccatttaataaagcatttccaaaagggtaa

SEQ ID NO: 56410 - DNA, 480 bp, Acinetobacter baumannii
atgcagcttgcaaccaaaagctttcttggcttgtgtttgatatgttcaactgccggagcagttgaacctgctgcgacaccagcaacgcctccaactgcagcgtcgacacaaaatgctaaaccagcacctacttctgcaactgtagctaaacccgcgactacaacagcaccaaccacaacacaaccgcttacagcagaacaaatcgcaaagaacaagcaacagcaagatgcaaaaattaaggctttagttcaagatcaagcatctcgtctaaaacagctagaacatgcaaaccttgaagcgctagcacaaaaccaagaattgcagctaaagaacgataacttgtctgttcaggtacaagttttacaaagtgaacgtagtgctcaaatgttcttatatggcgcagtaactcttgcaggtggcgtactgcttggcttctttattgcaagttatgtttacaccaaacgtcgacgtcagtggtaa

SEQ ID NO: 56411 - DNA, 1872 bp, Acinetobacter baumannii
atgaacaaatcaaaccgtatacaaactgctgagctggattgggaatctattgatggtattgaagttcccatttccaaacaatttggtgatgtctatttttctaaagataatggtctgcttgaaacacggcatgtattcttaaatggcaatgacctatcagagcgattagccaatttacaagattttgaatatttcagtgtaggagaaaccgggtttggcactggtttaaatattcttgcgctctggcaactatggcaacaagtatgtccaaataaccacagtcatttacatgcaattagcgtcgaaaagtttcctttaagcaaagctgatctcattcgtgctttaagtgtatgggatgaacttaaaccgctttccaaacaacttattgagcaatatcccttacctcttgcaggctgccatcgtttaagttttccagaagagcgcttcagcatcgacctatggttaggagatgcacaagatatttttccaagtatggtaaaaacgaaggcagtgaatgcttggtttctggatggttttgcgccttcttgtaatccggacatgtgggaacaaaatgttttaaataatattgttcggctttccaactatggcactacctttgcctcatttagtgtagctggtgtcctcaaacgtggactaaaggctcacggaatcaatatttctcgtcctcgcggttttgggcataaacgggaaatgcttaaagccgtttggaaagcacctgtaagtgaagaaattttattagaaccagttagcgatactttccattccactcagcagcgtatcgccgtaattggcgctgggattgcaggtttaagcacagcttgggcatttgctcaacgtgggcatcaggtcactctatttgagcgtacagcgccgttatcgggtgcttctggcaatccgttggcattgcttaatccgaaactatgtccaattgaacaaagccatgagcatctcatgactttaagctggcaacatgcattaaatttctataaaaattttcaagcctttcgcccgattcaaatacaacaaatggctttaaaaaatgcacaagatcttctcgatcttactaatcaatatcctgctgatattgtcacacagcaaacaagctcacttgaatcagactatccacatattttgttgaccgaagctggagcagtttctccgcaccaattacgcgatgaaattttgcaacatccaggtattgaactgaaaattgctaatattacgacacttgtttcttttgaaaataaagttcaattaaaaagtggtaatgaaactactttagaggctgatcatgtcgtggtgtgctgcgccagagaaagtgctgctttatttgaaaattatccgctattaaaacctatacgtggacaggtgagctgggttgataattcttttgcaaccttacctttaaacgaagcctatagctatggcggttattgtatgcaactgaatacgtctgaacttattctaggggcttctttctacccaaacagagacgatcaagaagtactgcttgatgaccatgtgcataactttgaattaatccacagcgttttccctcattatgcaaaacaattaccaccagtcgaacaatggcaaggacgagcatcagttcgcgctcaaagtccagattattttccacttgtgggaaaaatgcagaaggaaagccgtatttctacttttgcaggtttaggctcaaagggctttttatttgcgccgctttgtagtgaagttttagtggcccaaattttaggtgaagcttgtcctgttcccaaaagcctattacagaaattagatgcccaacgttttcaaaagaaagttaaacctaagaaaccttattttaaatctcaatag

SEQ ID NO: 56412 - DNA, 315 bp, Acinetobacter baumannii; identical to SEQ ID NO: 44532

SEQ ID NO: 56413 - DNA, 489 bp, Acinetobacter baumannii
atgccttctttcgatattgtttctgaattagagttatttgaagttaatcacgctgtacaaaacacccaaaaagagattgcaacacgttttgacttccgcggtcatgacgtttctatcgaattaaatgaaaaaaataaagagataaaaatcagtacagaaagtgatttccagtgtgaacaagtttataacatgttagaaaatcacttttataaacgtaaaattgatgtgcaagcgcttgacccacagaaagcaacagcatcaggcaaaaattttgtacaagtgattaaactaaaagatggccttgactctgatacagcaaaaaaaattaataaagccattaaagaaagtggcatcaaagtgcaatcatctattcaaggcgacaaaatccgtgtaactgataaaaagcgtgacactttacaacaagtgatggcttttttacgtgaacaacaatttggtctgccattacaatttaataactttaaagattaa

SEQ ID NO: 56414 - DNA, 495 bp, Acinetobacter baumannii
atgtctcaatccaatcgtctattaaaactggtaaaagcaacttcaaaattccctaaaggtattcggagtacgctttggagcaaggcatttggccgcattgtgccaatggtgggtacagctaacattcgctatctggaagtagatgtaaaccatgtgacggttcgcttagaaaatcaaaaaaatatgcagaaccatattaaaggtgtccatgctgcggctatggcgcttttggcagaaactgcaacaggttttctaacgggtttacatattccagataaccgtattttattaatcaaatcattacatgttgattatttaaaagtggttgaaggtggtttaacagcaacagcgactctctctaccgaacagcaaaaatatattgctgatcatgagaaaggtgaacttgttattccagttactgtcattgatgatgcaggtaatgaaccgattcaatgccaaatgttatgggcatggttacctaaacgtaagaaataa

SEQ ID NO: 56415 - DNA, 423 bp, Acinetobacter baumannii
gtgtcagaagcttataccaaaccagaaggaattttatccttacaaacgattgccatgccagcagatacaaactggagtggtgatgtgtttggtgggtggatcgtgtcacaaatggacttggctggagcaattcacgcggagcgttttagtcgtggtcgctgtgctacgatttccattaatcagatgacctttttggttccggtaaaagtaggctttgtcattagctgctataccaaaatcttaaaagtgggtaatacctctattcaaatgcaaattgaagtttgggatagccatgatgactctcgtgccccaattcgtattactgaaggggtctttacctttgttgcagtagatgtaaaaggcaacaaacgtcagattcctgaggaagcgaaacagaaatttcttatctctcaagaatcgtaa

SEQ ID NO: 56416 - DNA, 438 bp, Acinetobacter baumannii
atgattattgtatgtgcatcgtgcggtgcaaaaaatagagtaccagaggaaaaacttaccgatcaaccgagttgtggacaatgtcatcagccattactcccgcttgcgccaattgagttaaatgaacaaaactttagcaactacatcacaaatagtgatctgcctattttgatagatttatgggcagaatggtgcggaccttgtaaaatgatggcgccacattttgcacaagttgcaaaacaaaatccacgtgtcatttttgccaagattaataccgaagagtctcctcgcttaagccaagcatttaatgtgagaagtattcctacccttgtattaatgaataaaaccacagaagttgctcgaatgagcggcgcattacgcgcgcctgaattgcaacagtggctagatcaacaacttcaattgaatttcgggagctaa

SEQ ID NO: 56417 - DNA, 897 bp, Acinetobacter baumannii
atgcacgcttatacggttgagcctttatatgttccatgtgatcaggaaatgatcgcagctgacttttatattccaaaaacaaataataaatctgcggtaattatcatggcacatggttttgccggattgcgtcaattcaaactcattcaatatgcccagcgttttgctcaagctggctatgcggttattttatttgattaccgatattggggtggaagtacaggtaagccccgagagatgatttctatcaactctcaactagaagactggaagaccatgatccaatatgcttctacgtgtaaatttatagataaccgaagaattgtattgtggggaacatccttaagtgggggatatgctttaagcctagcttctgaattaaagaatattcaggccattatggtacaaattccatatgttgatggtgcggaaacagcaaaattatatccactccagcgttatccccaagctttaaagttgtcgagccaagattatatgggttcaaaaatgggccttaaccctaaaaggttgcctgtggtagatcaatataaattgtgctttatgccaacagcagatagctattatggttatttatcgattgtgaatccggattattactggagtggagaagtcccggcacgcgtgttttttaatttgatgcgttatcgcccaattcaacttgtacgtcaaattaatattccagttttatttattgcggctcagcatgattctttgattccaattgagtctagtcgtgaagctgcgactaatattgctccttttgtgagttatcatgaatgggatatgaaacattttgatatctatcacggttcatggtttgaaaaagcagtgacgacccaattagaatttttacatcagcatataggagtgatgtaa

SEQ ID NO: 56418 - DNA, 336 bp, Acinetobacter baumannii
atgtcagagaatgttggtttcgcaggtcaaattggcccagaacatgtgggtcaagttgtagaaaaaggctttaaatctattattaataaccgtcctgacatggaaggtggtccagaacaaccaaccagtgctcaaattgaagaagcagcacgccaagctggtctagattatgtttatcagcctgttgtagctggccaaattaccgaacttgatgttcgtacttttgcaaatcactataatgaacttccaaaaccggttctcatgttctgccgtactggaaaccgttcaaacaatctttatcaattagccaaacaaatggatttgttagatgattaa

SEQ ID NO: 56419 - DNA, 1482 bp, Acinetobacter baumannii
atgaaaagtatgtataaaaaacaacttaccttgaagttgtcggctattgctgtatcaattatgttagcaagttgtggcgggggaggtggtgatggttattaccagaatggttcatcaaatagtaataatccttcatctggaagtaataatagcggatctcagcaagcgactgctacagctttaaagatagaactagataaattatcagttgctgcaacgaatgatactttaactgttactgttagagctttagataagaataaaggcggtgttgctggtgctaatgtcactttggaattagatgatccaacaaataacgtatctatagaaggcgtatctactcaaactactgatgcggcaggtaatgctatatacattataaaaacaccaaaaacatcgagttcgataaatgagttggtgaaaaatggtttcaaattaaaagtctctacgaataatggtacgcttactcaagaacagacagtgacagtaacaggtagcaacagtactgtcgaagctgatactacgagtattgtattgtttgatgctacaaaaacctctctaaatgttagaggtgatcaaacaaccgtcacattaacagctgtagatgcaaatggtgcaactttagcaaaccaagcgattacacttaaagttagaaattcagttttaaatggtgtcaaatttactcctaatgcgacacaaactgatgtaaatggtcagatcagctatactttatcttttagtgaaaatcaaagaacttcatcatatagtgctggtcagttcgtaacagatgatcttgttttagaagcaaactttggccaatctacaaaaatttatacttataaacttgatgtggttaattctgatgtaccagtagcagtaggcgctattgccgtagcatataatccgaccacaatggaagattcaagtgatggagtctactactataaaaatatttcagtacaagtgactgatgtggatggtaaaccgatacccaatcaagatgtagtcatgggcgttaatgctcttgcgtattataagggccgatatgggtttgttgatacttctaatccaactgatggtaaaccagatgaatatcttcctgttattagaacagcctgtacatcaccagtccaagctgtaaatgtgaatggggacgttattaatcaattaaagccgcttaaagaaaattctacagtccaagttgtatcgtatatcaacagtgcaggtaccgctgcaaccaataataaatatacgacagatgcaaatggacgttttgatcttaaaattcaatatcctaaaatttatgcatcatggttaactgttcagttaacggctaaatctacagtttcgggaagtttaattaaaggttctacatccttaactttaggttatttaactaaagatgtcagccttacggatcttaatggcccaaatatggaaagtccatatggaatagatccaaactgttcaaatggtaattaa

SEQ ID NO: 56420 - DNA, 1374 bp, Acinetobacter baumannii
atgttcgatcttattatcattggtgcgggtacggctggtattagcgcttataaagaagcagtaaaatacactaataatcttttaattataaatgatggcccttgggataccacttgcgcacgtgtaggatgtatgccaagtaaagtcttaatctctactgcaaaccgtatgcatgatatacaaaatgctcaagaggttgggctgagtgcttcagcagatattaatactgatcaggttatggcgcatgtgagaaccttacgtgatcgttttactaaggccacagtaaaagatgtcgaacaatggcccactgaacataaaatttcgggtaaagctcattttattgatgcaaaaactattgaagtaaatggtaaacggtatcagtcaaaaagttttattttagcagtaggctctacacccaattatgatcaaagttggaaacaagaattagatgatcgtcttattactacagatcaaatatttgaattaaacaccctacccaagtctatcgctattattggaagtggagtaattgccttagagattgcccaagccatgcatcgtttgggtgtagaaaccactatatttgctcgtagtaaaagaatcgggatatttactagtcctaagctacaacagctcgctcaagaagaactgagtaaagagttaaattttttattcgagacattgcctcatgaggttaagtctacttctgatggcgttatattgaattataaaattgatgaaaaagaaaagtctattcaagttgagtatgtattatctgcaacaggtcgttcgagcttacttgacacgctaaagctagaaaatattgataaatcttttaaagatattaaattactacctataaatgcaaaaactaaacaattagataactatccaatttttattgctggtgatgcgtacacctctacgcctttacaacatgaagctgcccatgaaggcaaaaaagttgttcataactgtttaaattatccacagcttaattcagttaagaccctccctcccttaggaattgtatttagtcatccagaaatggcaattgtgggacaaagttataaacaacttaaagataatggagtagattttgttacaggtgaagcatcttatgaaagacaaggtagagctatcgtactcgggaaaaataagggtgctattgaagtttatatagagcgggaaagtcagaaattgcttggtgcagagttatttaccgaagctacagaacatatggcccatctattaagctggattattggagaaaagctaactttaaatgatattttagagaaacctttctatcatccaacactagaagaaggccttcgtactgctcttaaacatgctcgcagacagttgaaatag

SEQ ID NO: 56421 - DNA, 2064 bp, Acinetobacter baumannii
  misc_feature (2029)..(2056): n is a, c, g, or t
atgtataacttaatttcatcaaatcaggaattatatagtctggaaaaacatttcgaaataatttgtaatcggcatccacatttaaaattactagaatcacaatggcgcttcgaccaagaacttattagcaaagctctgcaaaacgtaagctctatttttccacattatagtcgccatgatgtatctcattcacgacaaattattgtaaatattgagagactacttggtgataaaattaagttcttgagtgctactgatacatggctaattttagaagcagcatataatcatgatatcgggatggtcattactcaaaaacaaatcgaagatatgaatactcctgaatttgaagaatttgtatattctttaaaagctagtagtgacgataacttaaaaaaatttgctaaaaaatggattgaaaataaagcgttgttacctcaaaaagctgcagctcatgactttttccatcaatacattcagcttttagccgaatggtacagacaaaaacatcctacaaattccgcaaaaatagtaagaaatcccgttgaagaaattggcttaaattcatcaagaaatgagttattacccaaacgactattcgatgttcttgctgatatatgtaaagctcatggcgatagttttgaagagctaaaaaggtctttacctaaagcagaagctggaatggcttcagaggattgtcatcccctatatgttgcttgtttattaagaatgggggatttattagatatagatgacaatcgtttttgcccagtaatgatgtcaatgtgtggacataacttaccaaatttaagtaaggcgcactatgataagcatcattcaattaagcattttagacttgattcagaacgaatagaaataaaatgtttatgtcctacccctgaatcttatgaagctgcttatgattggtttaactggttacaacaagaatatcatcaacaaactcaacattgggatcagatagtaccgtcgaaagaattaggtcgtttaccaaccttaatgacacctgtagttgatatagatgagccatatttaatattaaatcaaggaagaaagccaagttttaaagttaatgaagaagctatattcaaattagttagaggaactgggttatattcttcaaaatttgattgtataagagaaattttacaaaatgcagtggattcaacattacatagaatatggattgaacataaagatgaggttaaaaatttaattccaactgatgctaaattgcaagagatttatgataattataaaatgactataacctttgaaccaaaagaagaaaattcaaatcgatggatattaaaagtaaaagaccaaggtataggtataagctcaaatgacctaaaatatatgttagaaataggtagctctttccaaaacaaagaaaagcaaaaaaggattaaagaaatgccaaaatggtttagaccttcaggagcatttggaattggacttcaaagtgcatatttactttcagataaatttacaatgattaccaaatcacttacagataatcaaaaactaaaaattacttttaacaataaaattaaaagcgtaattattgaaaaaataaataaaaatattaattatggcacagaatttacaatcgaaattgatattgaaaaactaccacgcaatatttcttattcctttgcacaacaatctttaatagatgaaagattaaaagaatttgactttacagagaaaaactcaaatctatctttcgtagaaacaattaaaataaatgacagcattaataattttttactaaacgcacctatatcatccaatttaaatattaacaaaagagataataaagtttattttgatcaagaaacctctattttatttaatattattgagtttggtgactttggatctcgaaatagttataaaacttattttagaggtcaagaattttcagatttatttactgattatgaaggcattaattatcttgctgatttttaccatactaaatctgataattttttaacttataatnnnnnnnnnnnnnnnnnnnnnnnnnnnnacttataa

SEQ ID NO: 56422 - DNA, 300 bp, Acinetobacter baumannii
  misc_feature (233)..(242): n is a, c, g, or t
atgtcaggattacgttcagaacatatcagtaatcgactgtttttcttcatgttggtcattattttgtccttactgtttatggcggttccgcttattgtcagcagttatcaagaatatttaaaaactaaacaagctttggttgaaattaaaagcttaagatcaattgctgaagttgcaaataaagtctctaaagaacgtgcgcccgcaaataaattaatgtcgagtaacgctgnnnnnnnnnngagatgccgactttttaaaaaatcaaaaaaacttaaaagaatatcgcctctctgttga

SEQ ID NO: 56423 - DNA, 438 bp, Acinetobacter baumannii
gtggtttttagacattattgtgatcagcatcaactcaatatcattgtcgattcagctggaacaagtaactatcatccaaataaagcacctgatcagcgtagccaattgcatgcaaaaaaaagaggctatgacttatcttctttgcgggcaagacaactttcaactcaagactttttagattttgatttgattttggcaatggatcatcaaaactttgatgatattcacgacttgctacaaagagctatcttccaatttggcagtcatcaaattcgggcaaaagtggcattaatgagtgaacatgatcctcaatatccacaacaagctctgcctgacccttactatggtggagatgagggctttgaacgtgtactcgaccaatgtgaatcaagtgcgttggcgtggattaatatcctaaaaaaacaattgaatgtttaa

SEQ ID NO: 56424 - DNA, 1080 bp, Acinetobacter baumannii
atgcgcgcgtacaatttctgtgctggtcctgctgcattacctactgccgttttagaaaaagctcaacaagaattgttggattggcaaggtaagggtctatccatcatggaaatgagtcaccgtagtgctgactatgttgctgttgcggaaaaagctgaagcagatttgcgtaagctcatgaatattcctgaaaactataaagtgctatttttacaaggtggcgcgtcattacaattttcagcaattcctttaaacctgcttggaaaaaataacaaagcagattatatccatactggaatttggtctgaaaaatctttaaaagaagcaaaacgttatggcgatattaatgttgtagaagctggtattaaagtagacggtaagttcgcaatttctgagcaaagcgaatggaacttatctgacgatgcagcttatgtacattatgccgataacgaaacaattggcggtttacagtttgctggtgttcctgatgttaaagcaccactggtatgtgacttctcatcaagcattttatctgctccacttgatgtttcgaaatttggtctcatctatgcaggtgcgcaaaaaaatattggtcctgctggtttaacaattgttattatccgtgatgacttactggatcaagctaaagcagaaattccaagcattttaaaatatgctgatcaagccaagaatggctctatggtaaatacaccatcgacttatgcttggtacttgtctggtttagtatttgagtggttactagagcagggtggggtagatgctatccataaagttaaccttgaaaaagctcagttactctatggctatatcgattcaagcgacttttataataacccgattgccattccaaatcgttcgattatgaatgtaccatttactttggcagatgaagctttagaaaagcaattcttgaaagaagctgaagcgaatcacttattgaacttggcaggtcaccgctcagtaggtggtatgcgtgcaagtatttataacgctgtgccattagaaggcgttcaggcgcttatccgctttatggatgattttgctaaacgtaatggttaa

SEQ ID NO: 56425 - DNA, 222 bp, Acinetobacter baumannii
atgtttggcatggcaaagtttttaaatgatccggccgttttaccttgtattttaagcgtgatgacgccttgcatgatgcttattattgccggacctaatgctcaagcacctgagccacttaaaaatattgctcagatgcccttacatgatttagttgaacactttaaaaaattttcattagctggattaaaagcaattagccaatcaaatcttaaaaattag

SEQ ID NO: 56426 - DNA, 1143 bp, Acinetobacter baumannii
atgagtagtttaaaaattttaattacaaaactttctacagctgcacgcactgctttagaaaaatctgctaatgcttgtgttcttcagcaaaactacgaaattgaaattgaacatttatttttagagttacttaatcagcctttagaaaacgatttaaaaattttattaaaaaaatataaaatctcagccgatgctttagcagatgatttaaaagaaacaatttctcaattaccaaaaggtaatacacgtactccaatttttgctaaatcaattgttcgtttatttgaacaagcttggttattggcttcagcagaacaaaatcctgtcattcgtagtggtcatttactggttgcattattaactgcacctgacctctatcaaattgcaacgagagcttcgagtttattcgatcttttcccgatagactcaatgaaacataagtttctcgaaatttgtgaaaaaagtgtagaacaacaagaagaatcaaaaacatcttcacaagcagatgaattagaacaagccgtgactccaactgcaaaaactcaaaaaacacctgctttagatcaatatacaattaatttaactgaaaaagcgaagaatggtgggattgaccctgttattgggcgtgaatatgaaattcgtttgatgctcgatattttaatgcgtagacgtcagaacaacccaattttaactggtgagccaggtgtaggtaaaacagctgtagttgaagggttggctttaaaaattgctcaaggtttagttcctgaagcattaaaaaatgttcatttgcacgttttagatatggggcttttgcaagctggggcaagtgttaaaggtgaatttgaaaaccgtttaaagcaagttattcaagaagtccaatcatcggctcatcctattattttatttattgatgaagcacatacgcttattggagctggtggccaagcggggcaaaacgatgctgccaatcttttaaaacctgcacttgcacgtggcgagttacgtactattgctgcaacgacatgggcagaatataaacagtattttgagaaagatgctgcattgagccgccgttttcaggtggtaaaggttgaagaaccgaccgaagaagttgctttaaacggttttcaaattcacctttaa

SEQ ID NO: 56427 - DNA, 363 bp, Acinetobacter baumannii
  misc_feature (348)..(357): n is a, c, g, or t
atgaaatctcgtgcagctgtcgcctttgccccaggaaaacctttagaaattgttgaagttgatgttgcaccacccaaggctggtgaggttttaataaaaattacccatacaggggtatgccataccgatgcttttacattatctggcgatgacccagaaggtgttttcccagcgattttaggtcatgaaggtgcaggtgttgtagttgaagtaggcgagggcgtaacaagtgttcaacctggcgaccacgtgattccactttatacagctgaatgtaaagaatgcttattctgtaaatccggaaaaactaacttgtgtgttgcggtacgtgcgacgcaaggtaaaggnnnnnnnnnngtttaa

SEQ ID NO: 56428 - DNA, 159 bp, Acinetobacter baumannii; identical to SEQ ID NO: 56179

SEQ ID NO: 56429 - DNA, 1185 bp, Acinetobacter baumannii
atggctaaaccatattacgaattcttttgtcctgtaaaagtcattgccggtaatgctgctttagaacatattccgtttgaacttgcgactttaggtgcaaaacgccctcttatcattaccgataaaggtgttcgtgcaaatggcttgttaaaccctattgaagctgcttttagcacaactgatgcagtcattggtcatgtttttgatgatgttccaccagactcaagtcttgaagttgttcgacttgccgcggaagcttatcgcacaaataaatgtgatgcgattattgctgtgggtggtggttctgttatcgatacctctaaagcaactaacattttagtatcagaaggtggagatgatcttcttcaatattctggtgcacacaacctaccaaaaccattaaaaccatttttcgtcatcccgactacatcaggtacgggatctgaagtgaccatggttgctgttgtgtctgatacacaaaagaatgttaaattggcatttgcttcatattacttaatgccacatgctgcgattttagatccacgcatgacattaactttaccacctcacttaactgcaatgacgggtatggatgcgttaacacattgtgttgaagcatacacctgtatggcagccaacccactcagcgatgcctatgcaagtgcaggtattaaaaagattagcgaaaatctatttaatgtcttagaaaatccaaatgacacacaaggtcgtttagaacttgcacaagcttctacaatggcaggtatcgcattctctaactcgatggtaggccttgtacactcattaggacatgcattaggtgcagttgctcacctgccccacgggctgtgcatgaacttattcttaccttatgtgcttgagtacaataaacaagtcaatggtcagaaaattggcgagttgctattaccacttgcaggtgccgatatttatgcccagactcctgctactcagcgtgcagacagagcaatcgcaactattttagcaatgcgtgatcgcttatttagcttaaccaaattaccacgtaccttacgtgaaacaggtaaagttactgaagcacagcttgatgaagtggcagagaaagcactaaatgatggctcaattatttataatcctaaagaagcaagcttaaaagatctaagagagatcttacaaaaagcttggtaa

SEQ ID NO: 56430 - DNA, 300 bp, Acinetobacter baumannii
atgagtccgtttaatgcatggattttcttaaaaggattagaaactttacgtttacgtatgaaagcgcactgtgaaaatgctcaaaaacttgccgagtggttgtctacccatgaaaaagtagaaacggtctattatggcgggcttccaactcatgaaggtcatgaacttgcagcaaaacagcaaaatggctttggcgggattgtttcttttgtagttaaaggtggacgtgaaggcgcgtggaaggtcattgataacaccaaatttatttctatcattgctgttgggacatgctgccaatga

SEQ ID NO: 56431 - DNA, 990 bp, Acinetobacter baumannii
atgactctacgtaatgattggactcgtgaagaaatccaagctctatatgaacaaccttttttggatttagtttttaaggctcaacaagtacaccgtgagcacttcactgccaatacaattcaggtcagcacccttttatctattaaaacgggtaaatgtcctgaagattgcaaatattgctctcaatctgcacattacgattcaaaattagaagcagaaaaacgtattgctgttgaaaaagtaattagcgaagcaaaagctgcaaaagattcaggttcatctcgtttttgtatgggtgctgcttggcgtaaccctcatgagcgcgatatgccttatgttttagaaatggtacgtgaagttaaagcactaggtatggaaacctgtatgactttaggtatgcttaatcaatcacaagcagaacgcctaaaagatgctggtttagactattacaaccataaccttgatacatctcgcgagtattattcccacatcatcagcacacgtacttttgatgatcgtttgaatactttagattatgtacgtcaagctggtatgaaagtatgtagtggcggtattgttggtttaggtgaaagccgtgaagatcgcattggtttgttacatgaattagcaaccttgcctattcatccagaatctgtgccaatcaacatgcttgttccaattgaaggtacaccattagctgatgttgaaaaactagatgttattgaatggattcgtactattgcggtagcacgtatcattatgccgcatagttatattcgtttatctgctggtcgtgaatctttaagtgactcagatcaagctttagcatttatggcgggtgcaaattctctgttctctggtgataaattacttacgacgccaaatacaggtgaaggtaaagaccaagcgttatttaataaattagggttaacagctgaaaagccaaaaccaactgtttctgctttatcagtagatgcgatgagtgcgtaa

SEQ ID NO: 56432 - DNA, 1035 bp, Acinetobacter baumannii
gtgactgttggtaaccttaaaaccagtcaaaatgtagaagcgattgttaaggcagacattcgtgaagctactgcgcgtaaccactcagcaactcacttgttgcatgctgcccttcgtcaaattttaggttcgcatgtacaacaaaaaggctctttggttgcaagtgatatcttacgttttgactttgcaaatgaccaacctgtgtcatttgaacaactacaacaagttgaacgtctcgtaaatgctgaaatcattgcaaatactgctgtaacaactgaactactcgacattgaaactgcaaaagcaaaaggcgcaatgatgttgttcggtgaaaaatatggtgatgaagttcgtgtactctctatgggctcagtcattgacgagaaaaacttctcaatcgaactttgtggcggtattcacgtaaaacgtacaggtgatattggtttattcaaaatcacttctgaaggtggtgtagctgccggcgtacgtcgtattgaagcagtgaccggtactaaagcattagaagtagtacaaaaagctgagcatgatatccagcacattaatagcttattaaaagcacagaaagaccaaacggttgagcgtgtacaagccaatgtagaattggtttctgcattacaaaagcagattgaacaactcaaccaaaaattggccaacttccaagcggctgatttgattgaccaagttcaaactattgctggtcgtcaaacgcttattactactgttcagggtgttgatgccaaagcgcttcgcaacttacatgacagtgtaaaatcaaaattagagaacgcagtgattgtgttagcaggtgtagagggtgacaaagtcagcctgcttgcatcagtcgcgtcgcaatacactgcaaatctaaaagcaggtgacatcatcaaacatctagcgaccgagttaggtggtaaaggtggtggtaaacctgacttagcacaaggtggcgcgccacttaacgagaagtttggacaagttatggcagcattacctgcttggcttgaacaaaaataa

SEQ ID NO: 56433 - DNA, 807 bp, Acinetobacter baumannii
atgttgcaaaacttcacaactggcggtgcggcaattagtgtcattgccaaatatcatcaagctcatttgcaagtgattgactgcggtacagcaggcgaagcatacgaatatgcaggtgttgaacgtcattgtattcgtgccggcacagcaaattttgctaaacaagttgcaatgaatgcagatgaatgtcgtgctgctttagagttaggtaaaaacagtgtagacacggccaaatctaaaggtgcagatatttatattgcaggtgaaatgggtattggaaatacctgttctgcctctgctttagcatgccttttattaaatgatactgccgagcaattgactggagtaggtacaggaattggtgctgatcagttaagacataaaattgaagtaattgaaaaggcaattgaacttcatcataaacatgtcattggtgatgtcttcaaaacactatgtgctgtaggtggtttggaaattgcggcaattgtcggtgcttacattcgctgtgcgcaggtggccttacctatcattgtcgatggttttattagttctgtagccgctttatgtgctgtgcggatgaatcctcaagtgcgtgactggatgctttttggccatcaatcggcggaatatggacaccgtcgtattttacaagaactcaatgctgagccgattttaaatatgaatttgcgtttaggtgaaggtagcggtgctggtactgccttagcattggttaaaatggcttgcgctttacataaccaaatggctaccttcgctcaagcggctgtaagcgggaataaaattggctaa

SEQ ID NO: 56434 - DNA, 576 bp, Acinetobacter baumannii
  misc_feature (547)..(556): n is a, c, g, or t
atgagtcaggcaaccggaccagaaggtttaccgttagtagaagtattaaagcaaatttccaaaaatgctcatgaggcggttgaagagcaatataaaatcttaaactatactttgttaccgcaactccaaggctatggcgttcattttattcagcacggcgatatattagaaaagcataaagaatggattaaagaatacttttttaaagaagtacaacctgtagttacgccaatcagtctagacccagcacatccatttccaaggctggtcaataaaagtctaaacttcattgtaactttagaaggtaaagacgcttttggacgtcaaattgatttagctattgtgccggcaccgcgttcgttaccaagacttgttaaaattccagaacatatttctggcggtgcagagcattacattctgctctcggccattatccatcagcacatttcagatttatttccgggtatgaaagcgaccggctgtcatcaatttcgtgtaactcgaaatgccgatttaaccgtttctgaagatgtagaagacttggctnnnnnnnnnngctgctgctttaaaaggtga

SEQ ID NO: 56435 - DNA, 417 bp, Acinetobacter baumannii
atgcttgaaggcggcagctttttccaccatggagactcatttgcgatgatgcgtggtggtcaccttgatattgcggtgcttggtgcatttcaggtggcagccaatggtgacttggcgaactggcacacgggtgcaccggatgcgattcctgccgtaggtggtgcgatggatttggcggttggtgccaagaaagtatttatcactacagaccacgtcaccaaacaaggtgagccgaagattgtcgctgagctgagctatccggtgacgggtaagcactgtgttgaccgtatttacactgacctgtgtgtaattgatgtgaccaaagatggtttaaaggtgattgagaaggtggatgggctgagttttgaggagttgcaagggttgaccggagcagtgttgattgatgcaacgaattaa

SEQ ID NO: 56436 - DNA, 282 bp, Acinetobacter baumannii
atgggcttgattagtcaagtggttgatttgaacgttaaacaaagtatcagcatttctaacattgctcgaactgaggcaatgttctggggcttagatgtcgatgatcttaaagaccagtcggaagttcaagcacggcgtagttcagttatttcaggtgctgaagaaagaatggcaattgcaaaagctaatatgaaaaagaaaaaagaagaggcgtttatgcgaaagttagcgttaattgaagccggtgaagtagagcctgaagatgaaaaaagtgaaaattga

SEQ ID NO: 56437 - DNA, 753 bp, Acinetobacter baumannii
gtgacctcagcaaatccgcatgatggtagttcgcgccattctaatgtggcattggtggtaaatggagccacagctgctgatgtactccaaaccgaagctgctgttgcgcaaatgtcaggaagtagttcaccatcacttatattaggcgattttgaaaaagacgttagcaagcctcaagttcaagtgctaactgaaggggcaatctatgaagctgtattaaaattaattaatacggctaaacctaaagaacatcttgatttaagtatgttctatttgtctgaacgtaagattattaaagctctaaaaagtgcccaagaacgtggcgttattgttcgtgttttactcgatccaaataaagatgcgtttggtagacaaaagaatggtatcccaaaccgtcaggtagcttcagagttacatgctgccggcattccaattcgttggtgtgatacccatggtgagcagaaccatagcaaaatgatcttaaaatataatgctcaacaagctgagttaattgtaggatctgccaattttacagcccgtaatttaaaaaattataaccttgaaacggatatgttggttgtaggcaaagttcaagatcaagtctttaaagacgctcagaattacttcaatacctcttggtcaaacctacaaggtagacagatgagcgtggactatgcgaagtatgccgatgagtctaaagtgaagtattggatttatcgttttatggaatggtcaggtttatcgactttttaa

SEQ ID NO: 56438 - DNA, 201 bp, Acinetobacter baumannii
atgacaattatcacattgagagatgttgagacaaatgagcgggtaattgtaaggtctgtaatcgaccctgtagcaagaaaagataaaaagggtaacattcaaattattcaaattcatagtggttatatgatgaatctgatcattttgttgatgaaaagttttatggggcgcttaataggggaaaagttggaatgtatgtaa

SEQ ID NO: 56439 - DNA, 516 bp, Acinetobacter baumannii; identical to SEQ ID NO: 56256

SEQ ID NO: 56440 - DNA, 786 bp, Acinetobacter baumannii
atgacaaaacttttagacggtaaggtcgcttttattacaggttctgcaagtggtatcggtctagagattgctaagaaatttgctcaagaaggtgccaaagttgttatttctgatatgaatgccgaaaagtgtcaagaaacggcgagctcacttaaagagcaaggttttgatgccttatctgcaccatgtgatgtgactgatgaagatgcttataaacaagccattgagcttactcaaaagacttttggtacggttgatatcttaattaataatgctggtttccaacatgttgcgcctattgaagaatttccaacggctgtttttcaaaagttagttcaagtcatgttaaccggggcatttattggtattaaacatgtttttccaatcatgaaagctcagaaatatggtcgtattattaatatggcttcaattaatggcttgattggtttcgctggaaaggcaggttataacagcgctaaacatggcgtaattggcctaacaaaagttgccgcattagaatgtgcacgtgatggtattacggtaaatgctttatgtccggggtatgtagatacaccattggtccgtggtcaaattgcagatttggctaaaacccgtaatgtgagtttagacagcgcacttgaagatgtaattttggcaatggttcctcaaaagcgtttgctatctgttgaagaaatcgctgattatgcaattttccttgcgagtgaaaaagcaggaggggtaacaggccaagctgtcgtgatggatggcggttatacggcccaataa

SEQ ID NO: 56441 - DNA, 459 bp, Acinetobacter baumannii
gtggttttaggtcaatcaactggagctattatttttccatccacattattacaacaagtctcaccagcaggtgaacctgaattattgagagtccatgaaaatattgcagagcaacaattagctaacttagaaaaacatcgtctcatttacgctattgaacgtttactcggcaatggtcttcttgagtcaggtaattttgatcaaaagtttattgctgaacagttaaatcgaaatccccgaactcttagagcagatcttcaagcaattaatacatcctatgagcaaattttaaaccattatagagaacgactagcaaggcgcttacttgcccatactcaggaaagcattgatcagattgtttatttaacaggtttttcagaaccttcagcatttacaagagcatttaagcgttggactggagaaacccctagcgcttatcgtcaacgtaaacaaaaatga

SEQ ID NO: 56442 - DNA, 378 bp, Acinetobacter baumannii
  misc_feature (355)..(364): n is a, c, g, or t
atgttgactaaaactgttaaatctttcggtttagcgatgggcttattagcctgctctctcccactttacgcaaaaaacaatgttgttgttgtcgctactggcggtaccattgctggtgctggcgcaagctcagcaaatagtgcaacttatacagcggcaaaagttccagttgatgctttaatcaatgcagttcctcaaatccaagatttagcaaatgtatctggtatccaagcattacaagtagcttcggaaagtattactgacaaggaattattacaaattgctcgtcaagtaaatgaacttgttaaaaagccaactgtaaatggcgttgtgattacacacggtacagatactnnnnnnnnnnagcatttttcttaa

SEQ ID NO: 56443 - DNA, 447 bp, Acinetobacter baumannii
gtgaatgcgcttactgaaccacagctcattagcgcgctttataaagcatcacaggctggtgtaaaaattgatttaattattcgttcaatttgctgcctgagaccacaagttgcaggactttcagagaatattcgagtacgttcaatcgttggtcgttatttggagcatacgcgggtttactatttttataatgatggcgatacaaaagtttattgtgcaagtgcagactggatggaacgtaatttgttctctcgtattgaaacctgcttcccaattgaaaataaaaaattaaagaaacaagtcattgaagatggtctaaataactatttaaaagacaatcgtcaagcatgggaattacaggctgatggaacatgggtgcaatgtcatcctaagccggaagaagaactttatattgcacagcaacacttgatgaacttagctgggtaa

SEQ ID NO: 56444 - DNA, 483 bp, Acinetobacter baumannii
atggtagctttaacgatagggttaaatggctgtgcaagcatcattacaggttcttcacaaacacttacttttacaagtgtgcctgagtcagcaactattgagattaaaaatcgtaatggggtaaaagtccatacggggcaaacacctgctaccgttagcttaaaaaaaggtgccggttattttaaaccagaaagttatcaagtatctttcagtaaacctggttatcaaactaaaacggtagaagttacaggtactcttagtggctggtatttaggtaatattatttttggtggtttaattgggcttttaattgtggatccagctactggagcaatgtataagttggcaccaaaagatataaatacagtattagaagctcaaaatttagtaggagaagctaaacgaaagcccacgctaacagtgatgctggctcaagatattcctgagcaaatgatggcccgtgcagtacaaattaataaataa

SEQ ID NO: 56445 - DNA, 234 bp, Acinetobacter baumannii
atgcgcgttattccaacctgtattctaggtggcgcagtaactggtgcattagttgctttatttcactgtgagcttgtgactccacacggcggtgtatttgtactactgattccaaatgcaatcaatcatgcgtggttgtatcttgcagcaattgcggctggaagtatcgtaacgggagtaagttatgccatcattaaaaagaatcaagaagaaaaattattaacaaactcataa

SEQ ID NO: 56446 - DNA, 132 bp, Acinetobacter baumannii
atgaaagaactgtctgtctaccctgtaatatacgaccagaaagtagcatggggagatatggatgcttttggtcatgtcaataatgtgcaatattatagatatattgaaagcctgtctcttatacacatctga

SEQ ID NO: 56447 - DNA, 300 bp, Acinetobacter baumannii
gtgtcgttatttaataatataaaaaaaattctgctcgggaatggagctgcacaattaatacaatttgcgttccttccactttctgcttttctatatacacctgaacaatttggtgtttttggtacgatacaggcttatagtacagcccttacagtttttattagccttcaactatatgtagcaattccttttgaaaaaaatcaatttttattaaatagaccatatagtattaacaaaaaagttgtaacagcaaaaatacacttaaagtttaaaactattaaatcatttaataaaaattga

SEQ ID NO: 56448 - DNA, 396 bp, Acinetobacter baumannii
gtgaaatttgtcgtgtacagagatctaattgttatattgcagtcatttggttataaacatggcattcctttagatgccgactatgtttttgacgtacggcatttaccaaatccgcattgggatttagaattacgccgcttttctggtttagacgagccagttaaacaatttttagaagcaagtccacaagcaaatgaaatgtttgaggacattctccacttcttaaaaaaatggctgccggcatttgctgaagggcatcgtcactatatgacgatttcaataggttgcacaggcggccagcatcgttcagtttatatggtagatagactaaaacaagcacttgaggcagaatggtctgttcaggtcttacacagagaaatgaagcactggtcatga

SEQ ID NO: 56449 - DNA, 1374 bp, Acinetobacter baumannii
atgaaagttgagttaaaagaattaggggagaatattcgattttatatagaaaaatatagggaaaactataaattttttacatcaacaccacctcatggcgctggttatccaaaattgttagtttctccttatttaacggctaaagaatttgatatctatttggctgaggatggagtagtcattaatgaagttgctcctgaaccagattatcaatggtatatagcaggaggtcctgccttaaaaatagattatgaaccaacaaaaactccaaaacatattatagaattattaaaaaaaaataatttatatgggaaacctattggtatttatagaatagtttcaaaaaaatatataagtgctcctgtatggaaagggatgtttaagaatatagatgatcgtttagttataaaatgtgaggagttaaatgtaaaacttaatttattaaatattagtctaagtttatcgcaagtaatttcgactcttacatttggtgcttatggggaagtacttgatataaaattaccgacctcagcggactcatttggtataccatttataatggagaaaattggttttttccctgctgatcttaacaataaaagattttttaattatattgaaatatatggtcatgcctcttcatgtgcatgggatgcacgtttaatgaatcttagagttaagaatgatttaagaagagattttgctaaacatcttgctaatttagatgataaaaagggaggggttatttcattcggtgaaaacatggagtgggttgaaaattatactaacagactattgaatttagaagttgcaattaatgagttcagacaagttttacattttcattcacatgagacagaagaagtttttcataagcttatggaaaagcatcctttattacttgatgtatatggaaaagttgaaagtaaacctaaattagtttatcccgctggtgagttttctcctattggaaaaacatatgtagagcctgattttataatttcctattcagatcagtcctataaattgatcgaattagaacgtgcttcaaaaaatgttgttacaagccaaggacaacctagagcggaagtaggacaagcagcttttcagacagctgaatggacacattttattagtgaacattataatttaattaggaagcaataccccagtatcaatgtgaagtgtaaaacatgtttaataatgagccgttcgtcacagctcagttttaaaaactcagttgatattaatcgatataaagagctaattattaaacaatattctttagatgagtttttaacatatgacgatttatttgatagagcttgccaagcttatacattcttaacaggtctatcgccacaaaataattaa

SEQ ID NO: 56450 - DNA, 1464 bp, Acinetobacter baumannii
ttgcaaaccttgcgagcgtcaaaatgtggtttgtccacagcccaacttccttcttcgattttagatgtgatcgatagtctgactaaagcaggctatgaagcttatattgttgggggtggtgtccgtgatttaatgctaggactcaatcctaaagatttcgatgcagtcaccaatgcaacaccttctcaaattaaagaagtttttggtcgtcgatgccgaattgttggccgtcgatttgaattggcacatgtctattcaggacgtgagctaatcgaagttgccactttccgtgcgcctcctaaaaaagcggtgaccagtgcttcgggcatgattttacgtgacaacaactggggaaccatcgaacaggactttgctcgacgcgatttttctatcaatacactgtactatcagccgcgtaagggtattgtgctcgatttctgtaaagcaattgatgatgtcaaaagtaagactttacgtttattgggcgatcctgtgcaacgttttgaagaagatccggtgcgtatgctccggacattacgttttgcagctaagctcaactttaaaattgattcggcaattctcgacatttttgatgttgagatgacgcaattacttcgggatgtttcaccacaccgtttatacgatgagtctcaaaagcttttcacaatggggcatttggcacgcgtgttaccaatgttgattgactttggtgtgtggaaacagctttttgcagatattcgtccggatctcactccatttattcaacgtgcagcaaaaaatactgatcaacgtattcaggtgggtaaaacgattaatccagcatttttctatgcggttttattgtggcagccatttttagagcgttgtgatttttatttatcaaaaggcgttgttccggccgaagcacgtgctcaagcaggtttggatgttttaaaacgtcaagcaacacgcacagttattcctcgttttgccgaaacttttattcgtgaagtttgggaaatgcaaacccgtttgcttaatccaaaaccacagcaaattgaagcattggcaagccatgctcgtttccgcgctgggtttgacttcttattacttcgtgaaaagtcaggtgatgacacaacacagggaatgggaagctggtgggaagcttaccaagaaatgtcaaacgacgaaaaagaagctgcgattagccaatataatcgtcagaaggcgaaaagtcgtcgtaaggttgctgctgagcctgttgaaagcaataaagttgatacggaaattgagcctttggttgatgttccagagtctcgaagccgtcgtggtaaaaaagaacgtgcacgacaagagcagtctattgaccgttttattgaaaaatcttccgcagcacaaacgaatgtgatgagtgatcatccaattttaaagcgcaagcgggtacaacgtgatttgagccaagttatttttgggccgacacaatga

SEQ ID NO: 56451 - DNA, 1026 bp, Acinetobacter baumannii
atgaagtcaatttcgcatatgatcctgctatttctagcacaaattggattagtaatatcatcaatatttattgtcattctgaatttttatatacaacctaataataattttttggggttaaatgtttgtatagccataatatcagtagcttatatattgtattttatttggaaaaatttttcagaagtattgaaaggatgggatataaaacttgtatatggtgctctatcattgatttttttagttattgtaggcacttcaggaacatttcttcatttgtactcaattagagatcagcaaaagtttacaaaaacaaatgaacaagatgctaagagtaaagaattcggaattattcaaaagcttggtcatgaaaatgatgtatatattaaacttggaaatacaaggacaagttgggctctaacaagattagtagttgtaccagatgcatcaggcgcatcaatgtatttaatgaacggatattgtgcattaaattattctgatgtttcgagccaagatatgaagcaagaaatgataaaaaatatatcaaaagataagcttgcaaaggaaagacttgatattccaaagatggcaataatgatgcatgagtttgcacattgtattgatattaagagagattatttaacattcaatataaatgcagcaaattcagataagacaacaattttaggtacaaacgctatagcaccaaaatttagatcccacgtaaaagatctaatgagttaccaagagcttggtagcgcctctacattgtggaaagaagtttttgcggatctttatatggcgggttatctgtatgtaaatcatcctagcattgcagaccaagctgttaataattggagtaaattaagagcaaaaaatacaaaagacgatgaagggcattcaacaagttgttggttgaatattgctcagacattgccaaaaccaagatcgaataacgaattaataaattgggcagataatattaggtcgaccagtaaatgcaaaagtgatttttataagtcttag

SEQ ID NO: 56452 - DNA, 600 bp, Acinetobacter baumannii
  misc_feature (556)..(565): n is a, c, g, or t
atgagtcgccgtattatatttattggcgcagcaggtgaaatgtgtcgtttagcgatcgagcgttttgctaaagccaaaggtgattgggaacttgtactatgtgatattcgtcctgaattactttcaaatcttgttgaaaaactccctcaagggctagcaactacacaacatttagatttgtatgacaagcaaaagctacaagctgtggttaatggtgctgatttagttgtacttggagcaggtccatacattcgaacttcagcgcctgtcattgaagcatgtttagaagcaaaagttccttacttagattttgatgatgacgttgaaagtactgaacatgcgttatctttgcatgaaaaagcaaaagaagcaggtattccaatctatgtaggttgtggtgcctcaccaggtatggcaaatgtgttagtggtagatgccgcaaatgagctagataccgttgaaaatattgattgttgctggatggttggtgacgaacgcccaggtattggtcgtgccgtacttgaacatttcttacatatcacggcgggggactgtnnnnnnnnnngactgtcttacttgggaaaatggcaaacgtgttaa

SEQ ID NO: 56453 - DNA, 2559 bp, Acinetobacter baumannii
atgccaaaaaaaaggcaagaatcttataaattattaaaacgccatatttgttattacttggcttctggcgttgttacaatgacaatgcctgtgttcgtgcatgctgaagaagcagctgcgagtgcgcctgtagaagctgaatttgattctgcttttttaattggtgacgctcagaaagtcgatatttctcgatttaagtacggcaaccctgttttaccaggtgaatataacgttgacgtttatgtaaatggtcaatggtttggtaaacgccgcatgattttcaaggcattagatccaaatcaaaatgccgtaacttgttttactggaatgaaccttcttgaatacggcgtaaaacaagaaattttaaccaagcacgctccccttcaaaaagaaaataatagttgttataaaattgaagaatgggtagaaaacgcattttatgaattcgatacgtctcgtttacgtgtagatatttcaattcctcaagtcgcattacaaaaaaatgctcaaggctatgtcgacccaagcgtatgggatcgcgggattaatgccggctttttgtcttatagtggtagtgcgtataaaacttttaatcagtctggtgaccgaagcgaaacgaccaatgcttttatgggggttacggctggactaaatttagcaggttggcaattacgtcataatggtcagtggcaatggcaagatacgcctgcggaaaatcaatctaaatcagactatcaagaaacaagtacatacttacaaagagctttccctaaatatcgtggtgttttaacacttggggatagttttacaaacggcgaagtatttgactcatatggttatcgtggtatcgatttttcaagtgatgatcgaatgctaccgaatagtatgcttggttatgctccacgtatccgtggtaatgcaaaaaccaatgcaaaagttgaagtacgtcaacagggccaattgatttaccaaacaactgttgcaccaggtaacttcgaaattaatgacctttaccctaccggctttggtggtgaaattgaagtttctgttatcgaagcgaatggtgaaatacagaaattttctgtgccttatgcctctgttgtacagatgttacgtccaggcatgaaccgttactcattaactgtaggtcagttccgtgatcaagacattgatctggacccttggattattcagggtaaataccaacaaggtattaataactatttaaccggctataccggaattcaagcatctgagaattacgctgcaatattgcttggtgctgccgttgctacaccaattggagcaattgcattcgacgtgactcactctgaagctgagtttgaaaaacaggcttcacaatcaggtcaaagtttccgtttaagttatagtaagttaattacgccgaccaacacaaacttaacacttgcagcttaccgttattcaaccgaaaacttctataaattgcgcgatgccctgcttatacgtgacttggaagaaaaaggtgtaaacacttatgctgctggtcgtcaacgtagtgagttccagattactttaaaccaagggttacctgagggttggggtaacttctatgtggtaggttcatgggtagattactggaatcgtagcgagagtactaagcagtatcagattggttatagtaataactaccatggtttaacttatggtttatctgcaattaaccgtaaggttgagtacggctcaaatgatgcgtcgcatgatactgaatatttaatgacgctttcattcccaattaactttaagaagaattcagtcaacgtcaacgttactgcttctgaagacagccgtactgttggtgcaagtggaatggtgggtgatcgctttagttacggcgcttctgtgtcacatcaagactatgcgaacccaacatttaacgcaaatggtcgttaccgtactaactatgcaactgttggcggctcttatagtattgctgattcttaccagcaagcaatggtaagtttaagcggtagtgttgttgctcactcagatggtattttatttggacctgagcaaggccaaaccatggtacttgtgcatgcacctgatgccgctggagcaaaagtgaataacacggttggtctaagtgtaaataaagcgggttatgcagtagttccttatgttacgccataccgccttaatgacattactcttgacccacaagaaatgtcgagcgaagttgaacttgaagaaacaagtcaacgtattgccccatttgctggtgcaattgcgaaagtagattttgcaactaaaacaggctatgcagtttatattaatagtaaaactgcagatggcaacagtttaccatttgcagcgcaagtctttaaccagaaagatgaggctgtaggtattgttgcacaaggtagtatgatttacttacgtactccactcgctcaagatcgtctctatgtgaaatggggcgatgaaagtaatgaacgttgttcggttgagtacaacatcagtaatgagttgaaaaataaacaacaaagcatagttatgactgaggctgtctgcaaatga

SEQ ID NO: 56454 - DNA, 534 bp, Acinetobacter baumannii; identical to SEQ ID NO: 46224

SEQ ID NO: 56455 - DNA, 4491 bp, Acinetobacter baumannii
ttgattgatgacattgctccgaatgcgattgaaaacattatctttaatgaaaatggtcaaaactttacagcgcaagcagaagcaaatagcaaagttgaagttaaaaatgctgcgggtgaggttgtaggttctggttatgtggatagtgctggtaatgtgtcaggttacttgaatcaagtttatttaaaaggtgaggagctcacttttgttgtgattgatcaagctggtaatcgtagcattgaagtaaaacaaacagcctttcttgataatacagcaccggaaaatgcgactaatttagtatttagtgaagatggctcatatctaagtggtatggctgagccaaatgcgacgattcaaatatttgatcagtatggtcaattattaaatcagtggaataataatgttaattgggatggaacatttaacatctatttaaacagtaactacatgcatggagaagtatttaaagtagttgtagttgatcaggctggtaatttgagtggtgaggttactgtaaaagcaccgcttgatgatattgctcctgtagctgcaagtgatctggtctttaatgaagatggttcatccctttctggtgtagctgagccaaataccttcatccagatttttgatcaaaatggtcagcagatgaatacgtggagtcagagtgtaaatgctgatggtacatttactatttttttcggtacttacaatttacatggtgaagagtttacagtcattgttaaagaccttgctggaaatgtgagtgaagctgtttcagttaaggcgccgcttgatgatattgccccaaatctgattaaaaatattgtatttgatgcaaatggccaaagctttacggcacaagcagaagcaaatagtcagattgaaatttttgactcatttggtagtcagataggttggggctctaccgatagcactggtaatgtgacgggttacttctatcaagtgtatttacatggagaagaattaacgttcgttgttatagaccgagtaggtaaccgtagcgatgaaatgaagttaaatgctttgatggataccattgcaccaaagccgattgaaaacatcatctttaatgaaaatgggcaaaattttacagcacaagcagaagccaatagttttattagtgtcaaaaatgctgcgggtgagtttgttggctatggttatgtcgatagtactggtaatgtgtccggtcacttcaatcaggtttacttaaaaggtgaggaactcacttttattgttatagataaagcaggtaatcaaagtattgaatataagcaaaatgctttaactgatgatattgcaccaaatccgattgaaaacatcgtcttaaataaaaatggacaaaactttacagcgcaagcggaagccgatagccaaatcgaagttaaaaatactgcgggtgaggtcgtaggttctggttatgtagatagtattggtaatgtgtcaggttcttttaatcaagtctatttacatggagaagagcttacttttgttgtagttgaccgagcaggtaaccgcagtacagaggtcaagcagaatgctttgattgatgatatcgcacctaatcaaattgagaatattgtttttgatgtaaatggtcagtactttacggggcatgctgaagcagatactcgaattgaagtactagatcaatttggcaatcgcgctggttggggatatgttgatagccaaggtaacgtgataggttatttcaatcaggtttatttacatggagaggaattaactttcatcgttgtagatatagctggtaaccgaagtgttgaagttaagcaaaatgctttaattgatgatgtcgcaccgccagcagcagcaaatattacattaacttcagacggattgctttttggtgaggcggagccaaactcaactgttgaaattattgatcaatatggtgcagttatcacaacaacttatgtttggtacgatggcacatttaatcaatggattaatttgagtcaataccagacacaaaatttaagtattgttgtcaaagatcaagcaggtaaccgcagtgaagttgctcatcagttagtaccagtatttaccaactcaccaattgctgcaacagagctaaaattggatatagatggtcatattctaacagggaaggcgacagtaggaatgtcggttgttgttacatctactgatggtcagaccattaacggagggtggaataatgctgtgaatgaagatggtagttttgctattcagttaaatgattactatctacagggacagacattacaagttcgagtttatgatcagaatacgaatcaatatagcctaatctctgaaattattgcgcctttagacaatattgctccaataattaatgatgtggtaattaacaatgatggttatagcattactggacacactgatccgaaagtaatcattaaagtaatggatgaggacggagattttagagcagaatttcaatcggatgaagcgggatatttcaatgctagtatttatccaccactattacgtggagagcagttatttatcacggcaacagatttagccaaaaatataagtacgccatttaatattacttttaatgcagatattaatgcaccaccttcagcaaatcatgttgtgatatctgaaaatggtttctttattgagggaactgctttaccaaatagtgtggtgcgtatttatgatgtgtatagtaattatattggcggtggttttgtagacgaaacagagcattttaatatccagttatattcacctcaggcgaatgggcaaactttacgcgttgttgtggagcaaaatggctatcaaagcgcttacaccgaaattaccgcacctatagacactgtcgcaccaaatgcagcaactcagcttgtcttagaagatggaaatgtactttcaggacaagcggaagcatattcaacagttaatatttttgatgctaataataatttagttggtcagactactgtcggaagtgaaggtagtttcttaacacaattatggtcacaatattggcatggagaaacattgacggtaaaagtagttgatgccaatcaaaatgtgagtgtaagtacgacgattactgctacaaatgatacaacagcaccgaaagtggtcacccagcttgccataaatgaatggggtaattggctggtaggacatgccgaaagcaatgctactcttgaaattacatattattttgctgatcaagaaccttccgtaacgagtactacggtcatggcagatggaactttctctacttatgtgtatgggactgcaacgtcatttgaccttactgttattgatcgtgcaggaaatcgtagtgaaactatcagcaaagcgattaatgatttacctacaatcactgttgatcagtttaaaggtgatgctacggataatacgtatatagttgatcatataagtgattttgttgaagaatatactgttgagccgtatgcaatatataaagatgtttggattgataatagctatatgtatccagaatgggttagtgaaggtcattatgaacaaatatggtttgttgatggatattatgattcccaatggatcacaagtggttactcaactgtacaaaatgtttatcaagatcagaatggtataacttatattgataatggtacggcagatagcgattatagtcgatatgaacaacaatattatgatttcgtgaatgggcaatggcaagaaggctacgaactgacttatatacgttctgaagaaggttgggttgatacaagtcataatgaagatgtttatattgatacaagtcattatgaagatgtttgggtagatactagccactatgaagatgtttgggtagaaagtggctattgggagaaccagcttgtcgaatcaggctaccgagatttcgattttggtggacacgataaaatagtaagctctgtgagttatagtctggttggatattctgattggtcgacaggtctagaaagcgggcgttatgtagaagacttggaactggttggttctgctcatctcaatgcaacaggtaatgctttagataatcttttaacaggtaactctggtaataacattttgaatgggcgtgaaggtaacgatacctatatcactaatgaaggtactgataccattctgttccaattgctaaatagccaagatgcgactggcgggaatggacatgacacggtgttagattttactttaggtgatataagaactaaccttcaagctgacaaaatcgatttaagtgaactattaattgactattctaaagatgtaagcgcattagctaaatttattactgtagagcaagatgctgggaacacgactattagtcttgaccgagatggcgaaggtacaatgtttaatagtgtgtcactgttaactctaaatcaagtaaatacaacattagacgaattactaaacaaccagcaaattattattagcatcaaaaatattaactgttga

SEQ ID NO: 56456 - DNA, 4044 bp, Acinetobacter baumannii
ttggctgacggtatttatcaatataaagctgtagtgacagacgctgctggcaatacctcggaaacggctgtacaaaaagtggttgtggatactaccacaccacaagcaggtgaactgactttatctgacttgaatgatacaggcgtttcagccacagatcagattacgcaagatcaaaacttcaatttaaagcttgaaggacaggaaactggtagccgagtaacatatttagtttccaccgatgaaggaaaaacgtggcaggaaaccacggtagcccaaaaagatttggctgatggtgtttacaaatataaagctgtagtgacagacgctgccggcaatacctcggaaacggctgtacaaaaagtggttgtggatactaccgcaccgcaagcaggtaaactcactttatctgatttgaatgatacaggtgtttcagcaacagatcagattacgcaagataatagttttactttaaagctagttcaaccgattgtgattggggaacaagccgctttactagaccactatgaagtttcaaaagatgaaggaaaaacttggcaagagacaacagctgatcaaaaagatttagctgatggtatttaccaatataaagctatagtgacagacctagcaggcaatatctcagaatctgctatacaaaaagttgttgtagataattccttaaatgttgaatcaaccacagtgattgtaaagccgattactgaagacaatacaataagtctagttgaaaaagatcaagttatttctataagacttgaaatagctaatttacccacagatttaaatagctcactgacatcagtaaatacgacattagacaatgttacttataactttcattttgatgaagtcacgcaagaatgggttaccgaaattccagcagagtttctttggtcagtagagccgcaaaccaatatatcaattgatattagtcttactgatcaagctggcaatacagccattatcacacatacccaaaattataatgtggatcatactccgaattcaccaaccctagattcactaactttcaacaatatagatggagctatcatttcaggtagtgcatataaaggaagtaaggtcgatatctacaataaaaatggtgattggcttgcaagtacaataactaatgaagaaggtaaatttactttacaagatctttcaattaactcaaatcaagaagtttacgcagtcgctacttataatggttatagcagtgaaaattcatcaattgggttagttactgaagttccagctattagtattacacgaattagtccagaaggcgtgattagtggttatgcgactgaaggtagtcattttattgtaaaagatcagaatggaaatattctacaagaatttaattctaatgtatttgatagctctggtattacaccatttagtgtaatggcattaggcgaagtaagaccatttattttgtccctcgatcagcctttagaggaaggggctcaaattattatctctacagataaagataatatttcaggccatccacaatatattactgcagactatactccagcagtatttttagaaactccacaatttgatattagtggtgagactttatcagtacatgttaatgaacctaacagctttattcgtgcattttctggagaaggcaatttaattgctacaggttttaccgatgagcaaggctttgcaagtttacaagtgttccaatttttaaaagaaggcgaaacggttactgtacaagtagtagataaaaatcaaaatacgagtgaaaccctaatcgaggttccaaactttgcttatattccacatgttgaacgtattacacaagaaggcttaatttctggagttgctgaagataatagtacggtaattgtacgtgatgctgatggcaatgaattaggaaaggttacattaggtgatgataatagttggagtgactttagtcattttagcttgagtgtaaaccgccctttaattgatggagagaaaatttccgttcaaattattgataataaagggttaatgagtcctgagcaaaatatcatcgtagatctgactcctccacctgctccaacggagttaaatttcaatgatgctggtgatttagtttatggtcatgcagaacctttctctgaaattttagttaaagatgggcaaggaaatattcttaataaatggttttggaataactggaccgatgagagtggaagtttctcaatagaactaggtacatttttaaccaatgctgagacggtttatgtcacggctaccgatgtaaatggaaacgtaagtttagcagctcagatacaagcacctaattatgcctttgctccatatgttgatagctttacttcggatggcgtgataagtgggcaagctgaaaataatagtactctcgttgttaaagacgccaaaggtgacgttgtagccgaaattaaagttggtgaagataacggttggaatggatcgagttattttaaactccagcttgaccgtcctcttgttgatggtgagcagtttttcttatcaattaaggatgctcgtgggcaagtaagcaccgatactgtaattaccgctgatacggttgctcccgcaccagccagtaatttagttttctcagaagatggttcatatcttacgggtgtagcagagctgaatactacgattcaggtttttgatcataatggtcagctagtgaatatatggaataacaccattaactctgatggtacatttactatttacttaggtagcaacaatttacatggagaagcattcacagtcactgttaaagaccaagccggaaatgtgagtgaagctatttcaataaatgcgccacttgacgatattgcaccgaatccaattaaaaatattttacttgatgcaaatggtcaaaactttacagcacaagcagaagcaaatagtcagatcgaagtttttgattcattgggtaatcagacaggttggggttctacagatagtgcaggtaatgcttctggttctttcaatcaaacttatttacacggtgaggaactcacttttgttgttatagatcgagcaggtaatcgcagtatcgaatttaagcaaaatgctttaattgataccattgcaccaaatccgattgaaaatatcatcttcaacgaaaatggccaaagttttacagctcaggcagaagccggaagttctattgatgtattagatcagactggaaataagattggttttggttacaccgatagctcaggtaatgtatctggttattttcaacaagtttacttacacggtgaggaacttacttttgtcgtgatcgatcgagcaggtaaccgcagtgcagaggtcaagcagagtgctttgaatgatgacgtcgcaccaaatccgattgaaaatattgtattagatctcaatggccagaactttacagctcaggcagaagcaaatagccaaattgaaatcaaaaataataacggtgacgtcgtaggttatggatcagcagatagtgcaggtaatgtttcaggatatttgtatcaagtgcatttacatggcgaagagctcacttttattgtagttgaccgagcgggtaaccgtagtacagaggttaagcagaatgccttgattgatgatattgcgccaaatccgattgaaaatattatattagatatcaatggtcaaaactttacagcgcaagcagaagcaaatactcaaattgaagttaaaaatgctgttggtgagattgtaggttcaggttatgtggatggcgctggtaacgtgtcaggttatttatatcaagtctatttacatggagaagagctcacttttattgtagttgaccgagcgggtaaccgcagtacagaggtcaagcagaatgccttgattgataatatcgcaccaaatccgattgagaatattttacttgatgcgaacggacagaactttacagctcaggcagaagcaaacactcaaattgaagtcaaaaatactgctggtgaagtcataggatctggttcaaccgatagcatggggtaa

SEQ ID NO: 56457 - DNA, 1779 bp, Acinetobacter baumannii
atgatgcgaactcattactgtggctctttaactgaagcccaaatcgaccagaccgttacattatgcggttgggtacatcgtcgccgtgaccatggcggtgttattttccttgatatgcgtgaccgtgatggtctcgttcaagtggttattgacccagatactccagaagcatttgcaactgcagataaagcacgttctgaatatgtattaaaaattacaggtcgtgttcgtcgccgttatgaaggtactgaaaacccaaatatggtgagtggtcaaatcgaagttttaggcaaagaaatcgaagttcttgctgcatctgaaactccaccattcccattaaatgatgacactattaacgtgtcagaagaacaccgtttaaaatatcgtttcttggacatccgtcgtccagaaatgttagagcgtttacgcttccgttctaaagtaaccaacttgattcgtaactatttagatgatcatggtttcttagacgttgaaactccaattttaactcgtgcaacccctgaaggtgcgcgtgactatttagtaccaagccgtgtacaaaatggtagcttctatgcccttccacaatccccacaattattcaaacaattgttgatggttggtggtattgatcgctactaccaaatcgcgaaatgtttccgtgatgaagacttacgtgctgaccgtcagcctgaatttactcaaatcgacattgaaacatcgttcttaaacgatgatgacattatggatttgatggaaggtatgactgttaaattatttaacgacttgcttggcgtaaaatttgaaaaattccgccgtatgccatacagcgaagcaatgcgtgattatgcatctgacaaaccagacttgcgtattccgttaaaactcgttgatgttgcagacttaatgcaagaagttgagttcaaagtatttgcaggtccagctaaagaccctaaaggccgtattgcagcacttcgtgtaccgggcgcaggttcattaacacgtagtcagattgacgaatacactaaatttgtcggtatctacggtgcaaaaggcttagcatacattaaagtcaatgaaatcgaaaaaggaattgaaggccttcaatctcctatcgttaaattcatcgaaccaatcgtaatgcaattgcttgaacgtgttggcgctgaaaatggcgatatcgtattctttggtgcggacaaagctaaaattgtaaatgatgcaatgggtgcgcttcgtgtcaagatcggtcatgacttgaaccttgcgacttgtgagtgggctccactttgggttgttgacttcccaatgtttgaagaaactgacgatggcaaatggacttctgttcaccatccattcacattacctaaatctagcgtagaagacgtgaagagcaatccaggcgaagcactttctgttgcttacgacatggtattaaacggtactgaagttggtggtggttcacttcgtatttacacattagaaatgcaaaaagcgatttttgaagcgcttggtatttccgatgaagaagcagaagaaaaattcagcttcttactcaatgcgcttcgttacggtgcacctcctcacggtggtttggcatttggtcttgaccgtttagtaatgcttatgactggcgcgacttcaattcgtgatgttattgcgttccctaaaacgaaaactgctgaatgtccacttactcaagcaccggctcctgttgaagcaaaccagcttcgtgacttgggcatccgcttacgtgaacaacaaaagaaagaagcttaa

SEQ ID NO: 56458 - DNA, 255 bp, Acinetobacter baumannii
gtgaaatttgtcgtgtacagagaagtaaattataaaattaaaatttttgcttggtgtttatttgctttatctacacttttaggcttattttcattttgggactatgcccgttatattccccatgaggtttggcattctgatacctattattttactggccgctctattaatgagtttatgcaaggttggttaagtacgtttagtttaggatgtctattattcttatttttagatcgacaacaaagaatgggctaa

SEQ ID NO: 56459 - DNA, 462 bp, Acinetobacter baumannii
atgagttatctatttttatcgtgtacagagaaacaacttagtgaagcagtgtatagacaccgagagtctgatgaacgccgcctcatcatgattgtagatgactcagtaactgtacgtaaggtcacgtcccgattgcttgaacgtcaaggctatgatgtggttacggctaaagatggtgttgacgccatagagcagctagaaaatattaagccagatttgatgctacttgatattgaaatgccacgtatggatggttttgaggttctcaatcttgtacgacatcatgatatgcatcaatacatgccaattattatgattacatccagaacaggcgaaaaacatcgtgaacgagcattctcgttaggtgtaagtcaatatatgggtaaacctttccaggaagaagagttactagagaatatcgatgctttacttgtagcgtctgacagtgaggtcaaatcatga

SEQ ID NO: 56460 - DNA, 897 bp, Acinetobacter baumannii
gtgagatttcagtttattacggattaccgtggctctctctcacgttcacgcatatgtcgtttgatgggcgtaacagatcgtggtttacgtgcatggaaacgccgtcctccatcactgcgccagcgtcgtgatcttatacttctagcgcatatacgtgagcagcatcggttgtgtttggggagctatggtaggccgcgtatgacagaagagttgaaagcgctgggcctgcaggttgggcagcgtcgggttggacgtttgatgcgccagaataacattacagttgttcgaacgcgtaaattcaaacggacaacggatagtcatcataccttcaacattgcaccgaacctattaaaacaagactttagcgcaagcgcacccaaccagaaatgggcaggcgatatcacttatgtttggaccagagaaggatgggtctatcttgctgttatccttgacctgtattcccgtcgcgtgattggctgggcaacaggtgatcgattaaagcaggatcttgcattaagggcactgaatatggcgttggctttacgcaaaccaccaccgggttgtattcaacacacagaccgtgggagccaatattgcgctcatgaatatcaaaagctactgctcaaacatcaattgctgccgtccatgagcgggaaaggcaattgttttgataactccgcagtagaaagcttctttaaatcattaaaggctgagttgatttggcgcagacactggcaaacaaggcgagatattgagattgcaatcttcgaatatataaatggcttctctgtacacgacaaatttcacagaacccttatcctatcaggattctgccttcttaaaattgccaaaatttccttaaactcttcttttttcccaaaaccaattaaacgctga

SEQ ID NO: 56461 - DNA, 1380 bp, Acinetobacter baumannii; identical to SEQ ID NO: 46018

SEQ ID NO: 56462 - DNA, 2640 bp, Acinetobacter baumannii
atgaataaagtttacaaggtcatttggaatgcttcgattggagcatgggttgcaacctctgaaattgcaaaaagtaaaacaaagactaaatcaaaaactttaaatgtatcagcggcagttttatcgggtgtaatttgttttgctccaaatgcttttgctgggacaaataccgaagggggaataggccaaggaacatctatttctggtacaacttcatgtcgtgaaggaagcgctaatacggctaatcaaaaagatattgctattggctgcggggcacaaactcaagaccgaactggctctaacatcgcaaatcgtaataatccatataataattctaccggtgcttatgctggcgcaatgaaacaaggcggagcaatcagtgttggtacgggggctgtagttgagaaaggcctaggaacagcaattggttcttatgcgacgactcaaggtatttcaggtgtggcaattggtacgggtgctttatcttctggaaatactgctcttgcagttggtcgtcaatctgcagcgacagccgacttctcacaagctattggtaatgttgctgctgcgacgggtaaaggttctttagccatagggcattcagccactgcagaaggttaccgttcaattgcgattggctcaccagatattgaaaatgctgaccctgttgctgggcaggtaggcgctgcttatcaaccaaaaatggctactaaagcaacgggtaaagactcgattgcatttggtggaggtgcggttgctactgaagaaaatgctttagcaattggtgcattttcagagtctaaaggtaaaaagtctgtcgcaattggtaccggtgcaaaggcacaaaaagataatgcagttgttattggggaccaagcagaagctagctttgaaggcggcgtagcaattggtaaaggtgcccgttctgaagcggaaaacagtattgctttaggtaaagattcaaaagccagtcaagcaactggtgaaagttacttgactaaacaatcagcaccaacaggtgttttgtcaatcggagatattggaacggaacgccgtattcaaaacgtagcagatggtgcagcagattctgatgctgcaactgtgcgtcagttaaaagctgctcgtacccattatgtcagtattaatgacaatggtcagcaaggtggtaactttgaaaatgatggtgcgactggtcgtaatgctattgctgtaggggtaaatgcttctgctgctggtcgtgaggcaatggcgattgggggtagtgcacaggcaataggttctggtgctattgcaatgggaagtagtagccaaactgtaggacgtggggatgttgctataggtcgtaatgcatcgactcaaggtgccgaaggggtcaatagtaaccaatctgttgcgattggtgatcagacgaaagcaattggggatcagtcagtagcaattggtgccgacgtgattgcaaaagggaactcttctgttgcaattggtggtgatgatgtcgataaaatcgcacgtgatacggaattaagtaatacctatacggaaattactggtggtactttacaggcaggtaaatatccaacaaccgaagcgaatcatggttcaactgctgttggggttcaagctgtaggtacaggagcgttttcttctgcttttggtatgacctctaaagcaactggtgatgcttcttctgcttttggcgtcatgtcaaatgcttcgggtaaaggtgccgctgcattcggtgctgttgcacaagcaacaggtgatggcgcatcggcaatgggtattaactcattggcatcgggtacaaattcaacagcaattggctctggtaataaaccgggtgaaggagcaaaagcgactgggaacagttctgcagcaattggtagtggtgcgcaggcaacaggtgataattcagcagcaattggtaaaggagctgaggctacaaatgaaaatgctgctgctgtaggtggtggtgctaaagccacgggtaaaaatgctgcagcgattggtggcggtgcaattgccgatcaagaaaatgcagttgcagttggccaaggtgctcagtcattagttgaaggtggtgttgctttaggcgcacgcagtaaagtagaagccaaaaatagtgttgctttaggccaagatgctgtagcgacagaagcaacaggaacttctttcctgactaatcgtgatgcttctcaatctaatggtgtgatttctgttgggtcggctggaaaagaacgccgtattaccaatgtagaagatggctcagctgactcagatgcagtaacagtacgccagcttaaaaatgttgatagtcgtgttaatcaaaatacgagcaatattggtaagaatacccagaatattactaacctgaatcagaagttagatgatacaaaaacgaatctaggtaatcagatcacagatacaaacaagaatctgaatgatgccaagaaagaccttggtatccagattactgataccaacaccaagttaaataccactaaagatcagttaacaactcagattaacgacactaaaactgagttaaacaacacgattggtaatacgaaaactgaactaaataccaaaattgacaacaccaagacagagcttgaaaacaaaggcttgaactttgggtaa

SEQ ID NO: 56463 - DNA, 1491 bp, Acinetobacter baumannii; identical to SEQ ID NO: 46175

SEQ ID NO: 56464 - DNA, 291 bp, Acinetobacter baumannii
atgaaggactttctcaccaagaaaatgtacgcaactagagctttattttttgctgtaggtgttatggctttgaatgtttcccctattgctatttctactactcatgcagcgacagaacaaaaaatggatatatcgactacactttcattaatttttgcagataaacccatagaagcttctttatttagccctcaatttttagcatcttttataaatagattaatatttatagcgaatttctatctattgttcagtttaattaaaatacttttacgattattctttgaataa

SEQ ID NO: 56465 - DNA, 567 bp, Acinetobacter baumannii; identical to SEQ ID NO: 46070

SEQ ID NO: 56466 - DNA, 309 bp, Acinetobacter baumannii
gtgagactaatacttatagtaattttaatgtcagttggaagtctattgcatgctgaagaaaacgaatcaacggtttgtgaaaagctcaatagtgcagcatatcaagataaggaaaatttaatactgaattaccatatcaatcacttttttggtcatgtaagtggtttggcttatgagacacctctctatacaaaagaagatgaaaaacaaaaagcggctacagattttggtttgagaattgaaagaatttgtagaaaagataagacggcattatttgctcctccgcgatttcagacttttgaggaatag

SEQ ID NO: 56467 - DNA, 189 bp, Acinetobacter baumannii
atgggagaaaatcatgtcggttttggttctgactttgatggagcactgattagtcatgaaattgaagatgtaaggggactacacctactgattgaagcaatgcaaaagcgacattattcgaatgagattatagaaaaaatttgtttttctaactggctaaccgtgctcaatcgcatcctaagtaaataa

SEQ ID NO: 56468 - DNA, 345 bp, Acinetobacter baumannii; identical to SEQ ID NO: 46216

SEQ ID NO: 56469 - DNA, 162 bp, Acinetobacter baumannii
atgtctgctgaaactgtgcctgtacctggcaatgaagtgttgcctgcagggtcagttgctgttgcagtcactgtatcgccatccaccaggttacctgggtttggtactgaccagctaccatctgtgcctgctaccactgttgcagtggtgccatcaggataa

SEQ ID NO: 56470 - DNA, 444 bp, Acinetobacter baumannii; identical to SEQ ID NO: 46179

SEQ ID NO: 56471 - DNA, 138 bp, Acinetobacter baumannii; identical to SEQ ID NO: 50167

SEQ ID NO: 56472 - DNA, 138 bp, Acinetobacter baumannii; identical to SEQ ID NO: 50167

SEQ ID NO: 56473 - DNA, 138 bp, Acinetobacter baumannii; identical to SEQ ID NO: 50167

SEQ ID NO: 56474 - DNA, 138 bp, Acinetobacter baumannii; identical to SEQ ID NO: 50167

SEQ ID NO: 56475 - DNA, 138 bp, Acinetobacter baumannii
atgagtttatttcgccatggtttagactatgttcaaatggcgattcagcgtttaattggttttgggaaaaaagaagagtttaaggaaattttggcaattttaagaaggcagaatcctgataggataagggttctgtga

SEQ ID NO: 56476 - DNA, 144 bp, Acinetobacter baumannii
atgagtttatttcgctatggtttagactatgttcaaatggcgattcagcgtttaattggttttgggaaaaaagaagagtttaaggaaattttggcaattttaagaaggcagaacccttatcctatcagggttctgccttcttaa

SEQ ID NO: 56477 - DNA, 138 bp, Acinetobacter baumannii
atgagtttatttcgctatggtttagactatgttcaaatggcgattcagcgtttaattggttttgggaaaaaagaagagtttaaggaaattttggcaattttaagaaggcagagccctgataggataagggttctgtga

SEQ ID NO: 56478 - DNA, 456 bp, Acinetobacter baumannii
atggatcgcacagataaaaagattcttgctgaattgcaattaaatggccgattatctatcactgaattggcagaaaaagttggtttgagcatttcaccttgtcacagacgagtgaaggctttagaagcgtcgggagctatcaaaggctatcgggcagaactcgacccaaacttagtcggttttgagttttcagcgattgtttttattacgcttaaagaaggcgataaacaggcggttgagaagtttgaaaatgccgtaatagacatcccgcaaattattcaggcgcagcgtttgtttggtgaacctgactatttactctatgttgtcgctaaagatttaccggcttttcagcgtttatatgatgaaaaattatctgctattccaagtgtgcaacggctcatctcaaccattgtgatgaaagatgtggtgcctgagcgtttatttccaattggctaa

SEQ ID NO: 56479 - DNA, 597 bp, Acinetobacter baumannii
atgcaacaaagccgtttacgaatcaaaagtgaaactctatttaccccctatattcccccaagatcattatggatagacttgaaaaatgggatacaaaagacaaatattcatttgaatgaaaatctaaaaaacaacaaatcgatatttaaagaaaactggaccaaatacaaaaatgacttaaaagaagaatggaaaaaaactaaagctaaaatggaggaacactctaaggctattgtagaaaaaaataaagttgctaaagaaatggctgctttagaaaagatgagtaatcagccgcatcatttaaatcaatttcaccatttaggctatgaagacgataagcatttttcttatggctataccccaacttttagcattcaatatgagtctgctaatggcgaaatatcatcacgtaatattgatcccttagattttgaaaagaaaaaatatgatggagaatattactactatgtaaatgcgttctgcttctctgctgaagatgaaagaacatttagggttgatcgtattttacaattaatggatctaaatacacactgcatatcgtcggcagcgtcagatgtgtataagagacagatatga

SEQ ID NO: 56480 - DNA, 246 bp, Acinetobacter baumannii
atgttattcaaaaaattcgctgttgctgctgctgttgctgctactttagctttcgttggttgttctaagaaagaagaagctcctgctgctgctgctgcatctgaagctgtagctgctgcttctgaagctactgctgctgcttctgaagctgctgtagctgttgacgctgctgcttctgaaactgctgctgctgcttctgaaactgctgttgctgcttctgacgttgctgcttctgctgcacactaa

SEQ ID NO: 56481 - DNA, 717 bp, Acinetobacter baumannii
atgattaagataaaaaaactattcttagtatttttaatatatttacttccatatcctatttatgcacaggaaattaagattcttaatatgaataatgatttaattgaagagattaaaagtattgcactacaaggaaatgcagatgctcaagtaaaattgggtcttttgtatattcagggtttgggtgttccacaagattatatcttagcaagacagtggttcgaaaaagctgccaaacaaggtaatagagatgctgaatataatcttggtgttatctatgaaaatgggaatggtatacctcagaattataaattagcagcagagtggtatcaaaaagcagctgaaaaaggacgatctaatgctcaatataatttaggtaatttatacgcaaatggggtaggagttgcacaggattataaaatagcaaaggagtggtttgaaaaggcagcggaacaaggaaacgccgatggtgaatatagtctgggcgttatgtatgagtatggagatggtactgctcaagattataagatagcagtagaatggtatcaaaaagcagcaacccaaggaaatgtgaatgctcagtttaatctaggtattttatatgctaaaggtttaggcgtttctaagaactatgaaatagctaaacaatggattgagaaagcagctgaacagggccatgagaacgctaaaataattatcacccaattagcttcttaa

SEQ ID NO: 56482 - DNA, 795 bp, Acinetobacter baumannii
atgactaacaatttgactggggcttctttatctaataagaaaaatagacaacgctcattggagcctgacgtaagttcctataaagaattcatagatacactatatgacgatctagaatttgtgataacacgcttaactcagagccgagataagtatgccgctggtatgaggacaaatcccaaagaaggtgaagaccttattaatacaaatattgcaaatatgctaacttgtaggggatggacagcaactcatgatacacatattaacggtcacgctgatatcgtagtaaaagtttcatatgaagattacttatggataggtgaatcaaaaatcaatcaaggtagttcatatatccataaaggctttaaacaattactttacagatattctactggattagaccatcaatcagctggtggaatattaatctacatgaatcgaacaaaaaaaactcaacttcaaatcatggaggattggaaaaaaattctttgcggtgaagatattcctccagagcaagatattgagccccttactaaagagcaatgtaatgttctagaagatgatcaatatatcaatttacctataactaaaattgaatcttgcccaaagaattccttgtgctttcatacgactcatactcatcctcaatcaggattggattacattgtcagacatatgggcattgatttccgttatgatccacaagatcaaaatctttcagctagaaatactgatgatgaagctacagattcatctaaagaagcagaaaatgagccacagagtacatcagattag

SEQ ID NO: 56483 - DNA, 411 bp, Acinetobacter baumannii
gtgttagatataaaaaataagattcaaacaaaccgccatatcaaagaggatatggcgaatgtttgttatgcaatcattgattatgtgtctataaagccctcacaaaaaaatcacttatcatttttagatctctatcgggtttctccaaaagtcgatgaagatatattttatgatgcggttttttatctcactcgaaagcatataaatgttttagtgcaagaatttgaagcattagatctttatggaagctttacacaagtacctgatagagagcagatactagaagatatgagaaatgaggaattctttaatccctttagtggaaaaccattaacagaagaagaatttggtcaagaagttcttacttactttacgccatctccttgttttatggagatgtttaatgactaa

SEQ ID NO: 56484 - DNA, 258 bp, Acinetobacter baumannii
atgggacaaaacgttgtacttatttcagatgaatatatgtctgaatatgtgggctgttgtgtgagtgaaggttggggagctgtatttaagcaaaccaccaatttaaaattaattgaaaaatttgcaaaaaagaatcaatgtaatatcgctccgatagaaaccgatagcacttattatgggtttaaaattagttctctgccaaaaggtaattattatgaattatcatgccgcgaacgtgatttagatgagtctcaataa

SEQ ID NO: 56485 - DNA, 744 bp, Acinetobacter baumannii
gtgattgaaacagctcgtcatcaccgtgaatttattcaagatccagttttaaaacagcgtgttacttcattgattggacaagaggcgattcattctaagttacacaatgaatataacgatgcgcttaaagatgttgaataccctgtcgatttataccgtttcttgggtgaaaacttctttaaatatgtgtttttgaaattcccgcaaccgcttaaattatcgatgatggccggtattgagcattttactgcggtacttgccgaatacatgatgaagcacgaaaagaatttctactattcagatgatgcaaaaagccgtgctttatggatgtggcatatgcttgaagaatctgagcataaagatattgcctatgatgtatatcaattactcaatggtagctacccactacgagcttctggcttcttcttagctttctttactattttaggtttgatcccagcaactaccttgtttattccggttttaagaaaaccacaggaaatgttgactagaaaattctggaaagacgcgcgccgtggtgtaggacttatttttggtccaaaagatggtgtatttggtagcaccattggccagattttcgattacttacgtcccgacttccatccaaatgaccatgacacgaccgaatatctagagtactacaaagacaaattactcaaagaaggcggcgcgattgcaccttactttgtgaaggaatttaccccacctgtacgcttgtcttaa

SEQ ID NO: 56486 - DNA, 369 bp, Acinetobacter baumannii
atggaagctttagaatttctcgaattttcaaaaaaactagatactagcaatgaggctgatgcaagatcgtgtatcagtcgtgcttattattgtgcgtatcatgaagttaagaactttgttgaagaagatttaaatattgatattgataaagttaagggtggttcccacgaaagggtgagtaaaacacttttaagtgaaaaaactcagaggttaaaggggcttggatataaaatgttaactttccattccagacgtgtaatggcagattatcatttagctgacgaatgccatcaatctgatgctgatgaagcgataactgagtgcgaaaaaatattaaaaattttagatgagtgtaaatctaaaaattaa

SEQ ID NO: 56487 - DNA, 1227 bp, Acinetobacter baumannii
atgaccactaacattcagtttaatcgacaacaagaagcgtattacgatgccattgcattgggtaatcaagatgttattgatactgaagaagtagcattgtttgaattaatgctccacgacttaattcataattcttcgagcaaattttttaaggtaacagataaaacatcaactgaagttgaacatgctttattagatgcttatcaaagtcgcgtacaagtgaatgctgatgcgtggcaggttctagaagctgaaattatgagtgacatcaatacttatcaatttgagcaaaagattgaattcaaaaatccaaagctttttaaacaaggcttcagcatccgccatacccctattagaattaaagcagtcattgattggttagacctatcttttgaagtaaacccaacgatttgtggatttgcatttaaaaagaatgctcgaagttttatcaaaagctttctcacagctaaaactggcactaagcattatgtaaaacttgatgaaagtgatattaatcaggcaggcttgttgttcacgattcgacttcataatctgagttcaaaagaggatttacttaaagttactcatcttcttgtaatgcaatacggcgctgaccctctcaagatgaagattgctaacattgaattatccctcgacttttataatgccccaaacagagggttattgagtgctttgcataaatcactcaagtacatctctacggcagacaatttccgtatctataaatacacgcagggtgattcacggaataaattaacacctgtaccaaagtcaccacttgcccttttaaaactatttaatcgcgattggtgtatgggagttaacccaaaaggttcgccgttatgttatcgcttgtacccaaaaactactgatagtaataaacaatctttgccaaaccatgaacatcgattaagagtagaagtaacattaaatcttgaagcacttaaaggtattgaaaatcatctttcaaacttgactcagattatcaaattcggctttaaatatttaacatttaccaagctcaataaagatgctccatcaaagtataaaatggactaccgcgaacaaattcagccttttggaatggagcagaaaaacatcaggaaaaatcgaaacaaaaggactttactgagtacaattaagactcatgcaaagctcaataagattgtcgggaaagccgtctctaatcttttacggaaattttag

SEQ ID NO: 56488 - DNA, 258 bp, Acinetobacter baumannii
atgaacaaacaaaccaaagttgaagtcgaaatgaaagatggaactatcaaatttgcagtcgatgtaattgaaacgctgattgaatcggaggttattaataccattgccgaggtaggcaatgattatgacctaactaaacgcgaggacatcattacactcagtgaaatgattgcttgccatttagaagccagtactaaagttcacattcaccccagtcgagtgatttgtgaattcttacatcaattgaagcgcggctaa

SEQ ID NO: 56489 - DNA, 174 bp, Acinetobacter baumannii
atgaaggtatccattatttcattaggtcaatgctgtgatctgatcgaaaacagtgaaatccgcattcaagataaaacccctacatccacaacttactacctgattgctcagggacaaaatgctgtactgattcatacagcattcgaaaactacttcattacacaaggaaattaa

SEQ ID NO: 56490 - DNA, 252 bp, Acinetobacter baumannii
atgattaaacaaattgctaaaacgaaactcagccctgaagcagacaagctgaaaaatgagcttattcaggaaactcttcagagtttacgcatgaacaaagacaaccgatttgatctcagtaccgaagaaggtattcatcaagtggtggattatctggttgattttcatcttcaacaaaaaattgcgaatggtgaaattcaaatcattacatcccctcagaacacttcaaaccgtaatgaggtcgaagtatga

SEQ ID NO: 56491 - DNA, 291 bp, Acinetobacter baumannii
gtgtcacaccaagatcacatcatcaaaaaagccttaattgatttggatattctacgtatccagcaattagcttctacggctgagcgaaagcaaaaaatttataaagaccctcaaggtcgtactcgaatcatcaaagctagacctgcaaaacgcggactgttaggtatgggcgagagcacgatttgggaaaaagtaaagcgtggtgaattcccaaaaccgatcaaaatttcgccaagaatcacttgctggaaaaagtccgacattatcaattggctcgagtcaaaacagtaa

SEQ ID NO: 56492 - DNA, 789 bp, Acinetobacter baumannii
atgaccttacattttcttaattttaaaagtgctctcagatctatttcagagagcactaagcaagccagtaatgtttttacagtcctacatttaatcagtagtgactacttaaatttatattttagatatacgggtgcactatacaaaaaatcctacaacagccttgtttcaggtaaatatgatgaaaatgacttcactgtatttaaaactgaatatgtaaaagatgtttttttgaaaattaaaatgcaagctttaaacgaggacactctttatgaccttttttgtaaaggtggacaagtcaaagtaggaaatgtacacaaattgtacgattatgaaacttatcatctattacaagataaatatcatgtcgaactgccacttcatgatgacaatatgcaagcagcatattgggatatgcttactgaaattgacgaaactcaagttaacctaattctaagggactccaataaaagagagctaatcgaatttaaccgatatgagaatttaaatttggatgacttatatttttcaagtgatgaaattgaagaactgatctctcccctaaaagaagatagagcatccaacctatatacagacaaagagcgcgatattgccaacaagttattggttcagttttttgccgatcgcttattaaaaattaaacccgaattgcactctagcaaaaccaaacaatctaaaattattactttagctatggctgatataggtcgaccactcagtgaaagaactattcgagatcaattaaaagaaaattcgaataataaataa

SEQ ID NO: 56493 - DNA, 1269 bp, Acinetobacter baumannii
gtggctaaagaaattaacaagcttgatgctaaaaccattaaaaatctaagttatgaccccaacattaataacaaatatacagatggtggtgggctgtacctgttagtacataaaaatggttcaaaatactggcggcttgattatcgccgtcctatcagccaaaagcgcaatacattagctttaggcactgtagataatattagccttaaagaagctcggctaaaacgagatgaagccaagcgaaaacttgccaatggtgtagatcctgcggaagagcgcaataatcatagaaatgagttaaaagctaaacttgaaaacacctttgagaaattttcggctgagtggatcaaaatccgagaattggaaggtaaagtcgatcgagaaacaattcgtaaattaaatcgggatattttgccttttattggcaaaatgcctgttacagatttgacggttgaacaacttgaacgagacgtaacacatagccttgttgaacgtggtgcacttgaatccgctcgccgtgttaaatctattatgggtatggttttaaagttgccatttaagaagcgtctaatcacctataaccctgcttatgacattaccctacccaaacctattaaaggcaatcacaacgccatagtacgcgaatctgagcttaaaatgctgcttcaaaatatctggcgttatcataaggaaaatcctcgcgcccgcttacggacagaacttggattaaagctttctgcttatatctatcaacgtccaaacgaaattcgcgaattactatgggatcacgtagattttgaaaatcagcgtttatgctttcgtgcatcaaaaactcatcaagagcatatcgttcccctatctcgccaagcttttgatattttgaaacagctagaagacatgaggacaacgtcaaaatttgttttccctagtgtcaaatcaccacatgagagcatgagtgaggatacaattcgtcaggcacttaatagacttggatataaaggcagacacacggcgcatggtttccgggctactgcacgaacaattttaggtgaggaacttgaatatcgaattgatattatcgagcatcaattagcacacaccgtacgtgatccgaatggtacagcatacaaccgtactaaatttttacgccgtagacgcgagctaatgcagctctgggcggactatttggacactttacgtcaaggtggtgacgtctctgtatttaaacctcaaaatgacaacaatctcatccaattcaaaagtgcgtaa

SEQ ID NO: 56494 - DNA, 1713 bp, Acinetobacter baumannii
gtgctcagccaagtggccgactcaattgataattttattaagtcattaaaacccttaattccatttgatatatctgtcgccgatgattattacttacgtattgcggcaacgggacaataccaaaactatacggggctgtcttttccaccgacctctggtcatgcttttgtgttgcgtaatgaaaaacctttaaccatattaaaaccattagaagaagatgtttgtttaagctgttcgatacgaaatatttgcacaaaagatatcagtattatttatccaatttatgatgcgaataaaattattggtgctgtttctatcggtactgctgatgaaaataaaaagtcagaatttattgcgagtaaagacgagttaatgaatttcttaaaagagattgctaatttaatttcattaaaagttcgtgagaaaaaatcccaagacgttatgaaaatcgccttttccgagattaatgaaggcattatcctcactgataaaaatggttttattattcaaattaataaatatctagaagagaaagagtttagtcagggagattggatacaaaagtttttaccgcagtcgattatccatgatatctataaaacaggtgtaaacacggtaataagtgaatgctatatcgactttggtaaagacgaggttttatttaaactcacagcgagaagagtaattaatgatgaagaaaactcaaatattatttttatattaaaagaaataaatgaatcagatgcaactggagaaagtgcgcttaagtcgatccacctcaataacatcaaaggtaaaagccaaaaaatggtggaaacaaaaacacttgcgatgaatgctgccaagggcgagtcaaatatattaatacagggagaaagtggggcgggtaaagaagttattgcccgagcaatccatcaaatgagctctcgagcagaccaaccttttgtcgcgatcaattgtgccgctattcctgaaaatttactagaaagtgagctatttgggtacgaggagggtgcatttactggagctaaaaagggggggaaaattggaaaatttgaattggctggtgaagggacaatttttttagatgagatcggtgatctttctttacatctgcaaccaaaaattttacgtgttattgaatatggtctatttgaaagagtcggtggtattaaaagcaaaaaaatgaaagcgcggattattgcagcaaccaatcaaaatttagagcatatgattgtagaaaaaaagtttagagaagatctttattatcggttaaacgtgatcaatataccgatatatccactgagaagtcgacgagaagatatacttgagttggcgcattggttcattaataaatatacaagaaagctaggcaataaggtgggtggtttttcagaagaagcagagaaattattgctgctatataaatggccaggcaatgtcagggaacttgaaaacgctatagaatatgcgctgaatttcgaatcatcacaaataatcaatgcagcgagtttgcccaaaaaaatccaagaggaatctttgaatacatctaaagttgcttatgattataaccttcgggatatcgagataaactcgattaaaaacctcatagaaattcatggggacaactatgagggtaaagttaaaattgctgagaaactcgggattagtatgtcaacattatatcgcagattaaaaacatatcgagagtag

SEQ ID NO: 56495 - DNA, 2802 bp, Acinetobacter baumannii
atgacagcatcaattcaacattcacagcgtaaccctgttgcccaagttgttaaagacttaaaagcacgcttgtctttgcgtgcgccacaagctgaaagcttagaaaaactcgatttagcaattcaaaatgccaaagagttattaatgaagcagggacgagatactgatgttaatgcgcaaacattggcaaagttacaaacagtatttccaacattagctgactttgaaagagactttccgagtatctgttttagtttggcaacaggtgtaggtaaaacacgcctgatgggtgcttttattgcttatttgcatttggcttatgggattaataatttcttcgttttggcaccaaacttaacgatttatgaaaaattaattacagactttactccgaatacgcctaagtatgtttttgcaaatttagctcagtttaacttccaatcacctatgattatcacaggtgataactacgatagtcgtgatactgcaactgcaagtttattagggcaaatccgtattaatgtatttaacatctcaaaaattaatagcgaagttcgtggaggtaaagaaccccgaattaagcgtatgcgtgaggtattaggggaaagctattttaatcatttagctggtttagatgacttagtacttttaatggatgagtcacatcgttatcgtgcaagtgcagggattaaagcgattaatgagcttaatccattgatgggcttggaagtaacagctaccccgtttgttgaaaccaatagaggtccagttgcatttaaaaatgtagtgatggattatccattagcgcgagcaatggaagatggctttgtgaaagaacctgccgtagtgactcagcgtaattttgatcctaaaggtttaagcacagaacagatagaagagatcaagcttaaagacggtattcgcttacatgaaatgactaaggtgcatttaattaactatgcgcaaaatacaggtcagtcaaaagttaaaccttttgtcctcattattgcacgtgacacgacacatgcagctcaattaaaagagcgtattgaatctgatgaatttttcaaaggtcaatacaaagataaagtaattcaggttgatagtagtacaaaagaggaagagatcacacaacggctactgtcagtcgaagatccaaatgaaccaacagaaatcgtcattcatgtcaacatgctaaaagagggttgggacgtaacaaacctttatacgatcatccctttacgtgctgcaaatgctcgtactttggtggagcagtctattgggcgtggtttgcgtttgccttatggaaagcgtacaggggtagaggaagtggatcgcctgagtattgttgctcatgatcgattccaagatattgtagatgaggcgaatcgagaagattctattcttaaattaaagacttatattcttgaacctgaaaatgaagagcaagaagtgatcagtgtaacaagtgcatctcgtttagatgtgctgttaggtacgggacatagtcagctaactgatactcaagaaactgttactatcgaagatcaggttgagtcgaaagatgaaaaggttgaagaaacaaagctacaagtagatttggatttaacaaactcaacagtgattcagacaattcagcaagtaaagaaagagattcaagcacaggctaaaaatactgaaatagtaaaacatagtgaagatttaactcgtcatgaagttcaagtacaaatgacagcaaatgtactcaaggcaattcaggaaaatgcctcaagcattgtgcaagagttaaattttggtgatgagcaaagtaacaaaaaacttccatccgaagaagaagtactaaaaattgttcagcaggttacagaagtacatattcaaaatacgattgatattccacgtatttcagtaacaccttcagatgatgtaacaactggatatcattcatttgatcttgatgttcaaggattgcatttacagccacaagagcgcgaattaattggtcaaaacttaagtaacaaccaaattttcagtattaaggcggatgaagccttaaatgaaaagagtcctcaagaccgtattgtttatgcattgatcgattttgatgatattgattattttactcaggctgatttgttatataacttgtcgaatcaaatggtagattatttcaaaacctacttaactgatgacgaggtaatgcaggttgttgaacaaaattatcaaacgatagctaataatattcatggtcaaatgcaggatcatcattgggaaaaggcatcagattataatgtggtaattaaccgtagttttgttgagctaaaacagccaagttttacagcagcgaaagaaattcctcctcagtctatacgtgtaacgcctgctaaaggaataccaattaaaaaattgctttttacaggtttttcaaaatgtcttatggtctttcaaaagtttgattcagatacagaaagacgttttgcaattattttggaaagagatagtaataaatggtttaagcctgctaaaggacaattccaaatttattataattttcaaggagcacagcctgaatatattccagattttgtagttgagacggaaaagtattatttacttgctgaaacaaaagcagaaaatgaaatgacttcggaagaagtgattatcaaggctcaagctggaagtgagtggtgcaaaaatgcctcgacagtgtcgactaaaccttggcattatttattgattccacataatgaagttactgaaaacaaaagattggatgactatttgcgttttaaagtaaatgtataa

SEQ ID NO: 56496 - DNA, 3954 bp, Acinetobacter baumannii
atgtggggcagtaagcagatcatgatggcaaaagcattactcaatattcagcaggtcaataatatgatcaataaattttttatttggatgtttatgttattgggttgtttgattctaagcaatcctagctttgctgaaccgccaactattgagatttttgcaggctctggtacagggcaacaaggaccaagagcaaatacaacaccacatacgtttttgcttaatagaaataacccttcagataacgtaagtgaggcttatacgccgacaacaaccgttagctatactgttacaaattccgtttataatacagcaacttattctggtcaatctggggcgaataaaccagagttaacgatgggtgcagctggagatgctacaaatgtaacagcagaaaatattcttagaccactgaatgcaattggtggtggtcaagatcaaatgtttgccgcaagcttacaaaatgcgccaagtggttgtgtaaatgggtcagcctgttcaagtacgaatggcgggattagtgctgcgaataattatggtgtagctatgtttctaatgactagagggcttagtcttgcgagtgcctctagtaatagtagaataaaaatgggaactatccaggtaacttttaatagacctgttacaaatcctattttgcaagctgcggggatgggggcaacagtaggtagtctaggctttgctgcggagtttacgttaacaggaagtaatctttcgacattacctgtaatgagtcgtttggctgggagtaaagagttaactgtaagtgggaataatattgttaataatgcatccaaaattacagctaccagtggaagtggtggggctagtggcagtgtttatatcaaaggtaaaggaattacctcattaacatttgatatttatgtgcgtggggatggtggtggagcatgggccaacaatggtgcagatgctttcttttttggcatctcaagtatggatgctgatagtgcaattgcccttgtcaaaagtcaacgtgtaggcaacacaggcacatttgtatcaactcagttgaacaatgtgcctctcggttcattaatgcaatatcaattggaaattactaacaatacaccatcaggtgcaacattgggtgggacagttgtaaatttaccttttaatgacacactcccagtcagtttaaaaaatgtttctattgttagtacgacctctacacaaggtacaggggggtccagtcctattgcgacgtcctgtactcccacattaacaggcaataataccgcaggctggagtgtctctgggctatttacgggagcaacaacagcaacctgtaagattattattcagggtgtagcgacagatgcaggaacactgacaaatacagcaacgattgagtcgacctcatcgaatacacctgtcagtagttcagtcaatgcgatcattgtagccccgacacctgatccagcggttaaggaagctcgtttttctgtaagcccagatttaccaaccattacaaggggaagagtaggcacacagactatcaatattaaaaatgaagggccagatagtgcaaccaatgctaaagcggtctatgttgcggcaccacaaacaggagttagcgtcagttctgtaagtgttgtcggcggttccgcctgtacattaagtggaagtaactggaattgtaatctggggaatatgccaaatggagcaaccaaacagctatctgtgacctacagtacagccagtaactcagccttgggaactgcccaacaagcaacagtgaaagtatctagtgacgaatttaacccaggtagtggcgcaggcgaaacactgtataaagtttggggtagcaaccaggaaaatgagtcaacaaccaatggtgccttttgggtgggttatgaaggaactgggggaagtacgcctgtaggcagtaatgtaaatcagggaagttcacttgcagcagcttggccttcaagccaagctagcccgacgggtgcttatctttcctatggtgggccagcactcggcgactcagtttatttggcatccagcagcaccgctgcacccatgatccaacgcattattggcaatatgggggcagctgctgaaagaacggtatcactccctacaatgcagactgccgataaccgccgtgcttgggaatttaccacagggatctatattccgagttcgcaaacattaacagtgtgtattggaaatacgagtgttggcgtggatgatggcgcatatattatggtggatggtaatgtcgtggcgagcacaaatggatgggtagcaggtggtgtaactgttaccacagcttccgccttcagtgctggttatcatcgaatcagttatcgtatcgtcaatcgtaatacctacaatttatcagggtcggatgcagaaaactccgcaggtggttatggaccaattggtttgtctttaagtgggaattgttcgactgcaaactatgacacagtcacaggtacaggtgttcctgtcagtattaacattatagatggtgcaaaaattaaaattgctaaaaactctgtgaatggcacgggtacgtttaactatattaatcttagcaatcttgtaaatagtacaacagcagttaccacggattctgtaactacggtgacagcagaaaccacagcaacctctgcacaacagctttgggcgcaaacgttgaatacagatgtttcttttacagaaagtgctttagctggatatgttttatcaggtgttagttgtgtagatgcaaatagcagtgtaacaggtaatacaggtactttttggacgcgtgcaaataatattgtgacgattcccgctgttcgcataaaagaaggtgccaatattacctgtacgtttaccaatactaagcttatttacgttgatattactggacgagtatttgttgataatagtggaacaacgctggatgtgagtaaagcatataatggcatacaagatgcaggtgaagttgggattgcaaatagtacaattcgtttgaataactgtagtactacacaattagcttcaacagtgacaagtgcaaatggtgattatgctttctcaattgaacaaagcttattaccatcatcattttgtattgttcagcagaatttacctgaatatatttctgtcagtgccgatagtataacggtagcaaacacaagtgcgaccagctatccaaacaataactttgccgatgttaaactcaatgtacttctaacagaagatggacaacataccattaccgcaggtgaagtgactgattatccacaccgtttaagtacccaggcccctgtttgggtaacaaagttggaacaaacccaatcaaactcaaacaatgatcaaccttggcaggcattggtttaccaagacaccaactgtaacggtaccgttgatacaggtgaaacagtgtttgatccaacagccacaggtactgtgttgttgcaaccaaacactgatatctgtcttgtacaacgtgtatttgcaccgaccaatatttttgctggtgcacagcatattggaacgctacaggcaagctatgctgtgagtgcattaaacctcacagaccagaaaacccaacaacgtcaggatgtgacacttattggcagtgcaggattaacactgacaaaaaaagtacgtgcagtaaccagttgttcttcaactccatctgattcttcaggctttttagtgaataacgaagccacaaaacagcaaaatctggagtatgagatcacctataaaaataatagtgtgaagaacctacagaatgtcaaagtaaaagatagtttaccaactggtactaattttggcagtctaagttgcggcctaacaccaagtggaaatacttgtaatgcaacacgttctggagaagttcttgaatggactttaacaggtttgctaaaaccatcagccacaggaactttaagattttgtgttagtcagtaa

SEQ ID NO: 56497 - DNA, 501 bp, Acinetobacter baumannii
atggctggctctcaaagagagataaacacaaatttaggtcgaataatttttcattcaaactacgacactaaacctgcaaatgttgaaattgatcttaaaagtacaaccaacatgtgcgtctcaaaagatgaaggttatctaacagcttgtgaaggttggcaaaatttagtacctgttaaaaaaatagttccttacacgtttggaatgaaacaagcccattgggaccatgttaaagaaaggcaaccctttgaatatgatatggctttacattttggtttgcagttcgatttacgtgaaattgaaaaagctacgcctggtttaatttatacagaatattttcatacactaatgtacttacgctttgcatcttacataacagatgtcgcgacaagtcgagcaggtaaagccctatttgaacttgctaaagatgtgtttgaaatcagagctgctgctaactataaagatataccagaaatgagattttgctcaaagcccgattaa

SEQ ID NO: 56498 - DNA, 507 bp, Acinetobacter baumannii
atgaacccatctatttttaatttcaataatcacggcgttcgtgttgtcttgagcaataccaacgagcctttattttgtttgactgacgtatgtagcgtcctatcagtgagcagaacatcacgcttattacgtgaattagattcaaagggtatggcggattgccacatccttacaaatggcggtactcaaaagctcaagttcattaatgagcctaacctttatcgcattatttttcgatctaataaaaaagaagcgttgaatttccaaaactgggtatttgctgaggtactgccaagcatccgcaaaactgggagttatgtagcacggcagaccgcttatgaagaattaaaccgcctatgtatgcaggaaaaggtatctaaggacaaaggtacatttcacagtttaggtatgcaccgccgtaaacacgaaaagcatttaaacgccgtccgcattgaaacatgcaaagcaaatttacagctaacttttgaaggggtagaccatgaataa

SEQ ID NO: 56499 - DNA, 822 bp, Acinetobacter baumannii
atgacttaccgttctaatcctttcgataaacaagattacagtaaatttgcttttaagaagtctgagctattagcagtaattcaagctattgatgaaaactttagctttgatttagtgaatgctgatttacaagaaaataaagaacttttgcacattgaagccaatacaaatgtaaaccatgaatataaactttttctttttaagaagcctctattaacctttcatgaggcagcttgcatcctgactgggtatgacccccagtatgttgagcaatgtcaaaatgacaccaattttaagcagaatttttctaattatttaggggcttacgattatataagcacttgtatagatgctcagatgcttagttatgatagttatagcaatcgactatgtgccagcgaatttaagcaatttttagcaaatgaaaatacttttattaatggctttaatgatgaattaaggcattcagaagtaagtcacctagatcagaattctgctgatgataacagcacaatagaacagctaaaaaaggaaaatgaagaattaaaggttgagctactaggaaaagagagaagaataaaagagctggaatcaatccaaactagcatagaggatgaatccaaactaggcagaacacgagctgagaataatgcagcaaaactcattttggcattatcggaattggcaagtattgatatatcaaagccttatgcaccatatgaatcattgaaaacacaaggtgaattattaggtatagataaattccctagtaatgaaaatgttgccacatggctaaaaagagcgcatgcacaaaaatcctaa

SEQ ID NO: 56500 - DNA, 651 bp, Acinetobacter baumannii
atgtataactttaataatagtgattgttcgcagtatttagaatctgctgaatggttaaggctttcagatattttaaatgaatggtgcaagctagatcagtcctgcaagaaaataaaagaattggctatcttaggcgcgtgtgaaaaccaacaaatagaatatacgcgcaatgatggaaaatccttcgatgaccccattatggaactatatggcagaggcttactgttaattaataaacgctcctttaatcgctggaaagttaagtttgaaaataaagagcaaagttttaataaaaagaataaaagtagtatttctcttttagatttcttaaaaaatgaagatgctgaatacataagtatcagtgatgctatagattctattcatcattacataggtgcgaatcaagagatatctaaggctgtgcagttattaaatttagctattggcagggcggacgaaccaccaagtatctataaaaaagatgattttaaaagctggatgccagtcattttaaagaatcaatataatggcgactttatggaagcccctaaccccagtgaccaagcaaaactagaagtaattcattatttagtaaacaaaataatagaaaaacgtgaagcggaggacttggacaatgacttaccgttctaa

SEQ ID NO: 56501 - DNA, 210 bp, Acinetobacter baumannii
atgcctgctccactgcctcattcaaccactgaaaacgggcatgaaactttgcaggatcataaattaaatttaaatcccgaattgcaccgtctaccagttcactttggacctgactttcaccatgaaaagcaaaaatatcgccctgtttcagctttttggcaggaaggtcatcgacatgcagtaccatgccctgcccatcaagtacgctaa

SEQ ID NO: 56502 - DNA, 753 bp, Acinetobacter baumannii
atgcccagaacatcaaaacaagaacatactgagctttcgattgaagctgatagtccagttcctttatatcagcgcgtaaaacagctgatttcacaaaagatttatgaaggctcttgggctgtaaataaaaaaattccttcggaaagtgaactcgttaatcaactcggctgtagccgtatgacggtaaaccgtgcgctacgcgagttaacaacagaaggcttacttgttcgaattcagggtgttggttctttcgttgctgaagggcaaggccgaactgcactttttcaaattaacaatattgccgatgagattattgcacgaaaccataagcaccatgctgaagttttagtcttagaacaaatttatgcaaatgcagagcaaagtgtgttaatgcagactcgcgaagggcaaaaattatttcactcgattattgtgcattatgaaaatgatgtgcctgttcaggtcgaagatcgtttagttgatgcagcactgattccagattatttagaacaagattttaaaaccattaccccaaatgcttacctcatggcaaaagcacccgtgacagaaggtgaacacattgttgaggccgttttagcatcacctcaagagtgtaagtggttaaagattactaaagctgaaccgtgtttactcatccggcgtcgcacatggtcaaacaaacaactcatttcaagtgcacgattgatttatccgggcagtcgctattatctcgaagggaaatttaatccatga

SEQ ID NO: 56503 - DNA, 180 bp, Acinetobacter baumannii
atggatattttagagaacccattagaattatgcggttttgcatttattgagtttgtttcaaaagaaaatgaattagatccaatttttgaaacaatcggcttttcaaaagtagccaagcataaatcgaaaaaagcgtacttatggcgtcaaggaaatatcaatattatcctgaattattag

SEQ ID NO: 56504 - DNA, 531 bp, Acinetobacter baumannii
atgttgatttacatgcactttcaatctgttcgacaatcttatgatgattacatattaagatatgattcatttcctgatcttatttttatgggaagtagattttttaatgatttgatttctgaagatactaatttaagaaatctttatgatgtccgtaattggaaagtcttaaatgatcctattaagaaaaattatgaagtttttggatgcaaggtaattctcgtcagtgatgaactttataactttggtttttttgagtttgacgatttagaaaaaacaaaagatcttgttattgcaaatgattatcgtaatagagcacatcgattatctattgcgaagaacgtagaaaaagtagcctatagacctcgtgattcttctcaaattcctcgtcctactactgatactttaaatattccctttttcgtcattgatgccttcaaacgagaaaacataactaagaatgaaattgaagaacgtaaaagtaattaccagattcgaaagggtatatatgaacctgatatttcgttttag

SEQ ID NO: 56505 - DNA, 861 bp, Acinetobacter baumannii
atgagcagcaaagagcagaaaccaaaaaaatttaaatcaaagtggttccgtattgccacggcaggggacaccacagatggtcgtgaaattcaggaaaactggattcaagaaatcgtagaaacctacaacccacaaacatacggtgcgcgtattaacgttgagcacatccgtagtgtttcacctgatagcagcttcggggcttatggtgacgtagttgcagtaaaagccgaaaaggtcgatgtcaacggtgaaaagaaacttactttatttgcccaaattgaaccaaatgacaatttgattgcgctcaataaacgcaaccaaaaaatttatacatcgattgaagttaatccaaattttgccaattcaggcaaagcctatttagttggtttagccgttactgattatccagcttctttgggtacagatatgttgcagttcgctgcaaatgctgaaaaaaacccttttgagagtaaaaagcagcataaagacaacttgtttaccgcggcaactgaagcagaacttgaatttgaagaagtcgaagaaccaaaagtttttggcgctggtcttgttggcacaattcgaaatctgttcaaaaagcaagaacaacaagaacaagcaacaaccgagtcttttagcaatacagagcaggccatccttgagattgctcaacagacggctgaacagggtagcgaagttactaatctccaaacctcttacagcgaactgaagcaaaagcacgatcagttagccaatcagtttgcccagctaaaaactgaacttgatggaacaccagatcagccttcccgcccaacagcatctagttcttcattctctgaaacagacgaagaagtcgacttttaa

SEQ ID NO: 56506 - DNA, 1011 bp, Acinetobacter baumannii
atgcgtccagttacacgtaaaaaatataatgcagtaatgtcaaaacttgcccagcttaacggggtggatacggttgagaaaaaatttactgtagaggcatcagttcaacaaaaattagttgatcatattcaggcatcttcgacgttcttagaacgtatcaatatgcatgttgtacctgagttatccggagaagctattggattaagtatcactcgaccaattgcgtctcgaacagatactaataaaggcgagcgccaagcatcagatcctacggctttggataatcgtttttatttctgccgaaaaactgattttgatacagcgattaaatatcaaaagttagatcaatgggcgaagttcaaagacttttatagtcgcttccgtggagtgattattaaacgtcaagcacttgatcgtattatgattggctttaacgggacatcaatcgctaaagatacggacatcgtagcaaatccacttttacaagacgttaataaagggtggttgcagaaacaacgtgaagaaaatccaagccgtgtattaaaagaaggtaaaacggctggaaaattaacaatcggtgctggtggcgactatcaaaaccttgatgcattggtaatgaaccttgttaatgaaatgatcgatgaagtacatcaagagaacccggatcttgttgttatgtgtagtcgtaaactgcagtctgataaatatttccctctcgtaaataaagagcagcctaactctgaaaagttagccgctgacatcattatcagccaaaaaagaatgggtaatttgcctatttatgctgtgcctttcttccctgaagactgtttattagtaacaactttcgacaacctttctatctatatccaagagggtggtctacgtcgtaatttgatcgataaccctaagcgcgatcagattgaaaactatgaatcttcaaatgaagactactacatcgaagatttagggttagctgcaatggctgaaaatattgaagtacttgcggggtaa

SEQ ID NO: 56507 - DNA, 252 bp, Acinetobacter baumannii
atgagtatttcttttgatagctatgtcgatggattaagtaaaagtggcaatttagctgattacgccatgcgatctggaacatctgttaattacatcctggttcatttaaagcatagaagaaagattccccgcaaagacttgatcgtaaaactagccgaagaaagtgcaggagcatttagcgcagaagagttaactctctggctttatcaattcgaagccaaagatacccaaaaaaaagaaatcaaaaaatga

SEQ ID NO: 56508 - DNA, 2685 bp, Acinetobacter baumannii
atggctagacctaaaaagggccttgatttaaaaattgttaaagaaaagaccttcaatcaatgggatgctatttatccccaatttggcattaccatgccgcctaaaaaaagacattcctcatgtccatcatgtggaggggaagatcgtttttattacgatgacaaacaaggtttcggagacttcttttgtaataactgtggtgctggtgatggtattgcattaattggccgagttaccaatttagctttgcctgaaattatcaaagaacttgctgcaattgtaggaatctctgaagagacagttgtgacagaagcagatcgggagagatggagaaaagaagctgcattacgtaaacgtatgcatgaagaagagttagagaaaattcaaaaaaatgcagctaaaaaagcccttcggctatggaacaatacgcaccagggagatgaagataactgtatatatttgaaagataaaaaggtcaaaatctttgattgccaagttaattttgatggcgatttaattgttcctttatttaacgaaaagcgagaattgtggaaccttcaatacatcaaagcagacggttcaaagaagtttttaccaggtggtcgtaagaaaggctgtttccacattatcgggactattgacctggctgatccagtgatttgtattgcggaaggatatgcaacagcagcatcaatacacatggcaaccaatttacctgtcgtggttgcttttgatgcaggtaacttaccaccagtaggacaagcaattcggtctttagaaccaaatgcacgtttactctactgtgcagacgacgatagtgcaaaagaagatactggccgaaaaatggctaatgaagctgttgctgtgacaggcggtatggttattgtgcctatcttcaaacatgaagatggaattagtaatgaatcacctgagctgacacagcaacatgcattaactgactttaatgatctccacgtgaactttggtttagaggcggttaagggacagatcgaaagagccttggcttctttcgcatctttccccgcacccctttccccaacagaccacaaaaatgagggtcaaaatcgggaaatttcatctagcgaaaatgtttcatcggattgtgggaacgaaaatgggggttccaagggggaggaaggtgtttacaccttaaatttagaatcatgccttggcagattttgccaaattgagggtgagtctaaatattgggatatgcatagaaaggttcagattaaaaaaaccgctttccaagatatgttggggagaagtttatttacagaatggtcgaatcacccaaagcgaaaattgattgatagtaactctgttaagaatatcttaaataaagatatggaccgacttgagcagaatatgagtgaaagattcattatgctcgaaggtacaaaagaatcatgggatgtgaagagaaggcgtaccgtccgtaacgatacaatcaaggataactttcgttcgggttatgaagtttggatcaaatcagaaaataaaaaaatgatttggtttgaagaccttgtattcaatccaaccatgaacgttaagcctgggcaaatcaacatgtttgacggtttaccaattgctcctatgcttaatgatgttgatcagatgattccaattaagagtgcagcagaattatgccagccaattattaaattacttcatcacacctgtaattatgacaaggttgtggtggattggatattaaagtggttagcttatccattgcaaaatcaaggttctaaaatggctacttcgattcttatgcatggtgaaattcagggagcaggaaagtcattattctttggaaaagttatgcgagaaatttatggcaagtattgcgtgacacttgggcaaaacgggcttgaatcaatctatacagattgggctgaacaaaagctttattgcatatttgaagaaatttttaacaataaatctaagtacggaatgatgggcttgattaagcacatgattacgggagaaacgattcgtattgagaaaaaattcatgagtggttatgagcaatctaaccatattaactgtgtatttttatcaaatgatactcagccactgccattggaggaaaaagatagacgttttcttgtcgttaaaccctgtgggaaattagatgatgaactaaagcatgaggtacttcagtgtattgatggcacgggagttgatgcgttttacacattccttttgcaactacctttggatggttttactacgcatacggaaccgccatatacggatgcaaagcgcgacattattcaatatggtttgccctcttggaaattgttttaccagaagtggagtactggtgagcttgattatcctttctgttgttgcttatcaaccgatctatataaggcatatgtgaattggtgtaggcattcaacagaaaagcctttaccagaaaataagttttcttttcagattgcaactattccaggtgtatctaaaaggcttggaaggtatagagagcaaggtacaggttatagcgtggtaaaacctgagagacagaagacaataatttttgtacgcgagcatgatcctcagtcaaatgaaactcttgttgattggttgacttcacaaatacatgagtttagtgctaaagtgcatggagatgtcccgaatgttttacaacaagcataa

SEQ ID NO: 56509 - DNA, 390 bp, Acinetobacter baumannii
atgagtttagtgctaaagtgcatggagatgtcccgaatgttttacaacaagcataataatactgacatcgcccattgttgttttcagaacatgttaagggcgttaagggatatgttaagggtatttttctacacccttaacattatcaaatctaatcatatcaatgtttacagccttaatgttaagggtgttaagggtttcgcgtgcgcgcgcatacgcgtgaaaattatttctataaataagttaattaataaattaattgctaataaatctcccgtgcgtgagaaaaacacccttcacactcttaacacccttcacaagccttaccaactaagagctttatatttttatacccttaacaaaacctttaacacccttaacattgtgtaa

SEQ ID NO: 56510 - DNA, 468 bp, Acinetobacter baumannii
atggaaaaatatttacggttattgaatcctaaaactaccaactatgaagctataccttcaggttgtcatggtgctttaactacagcagatatttgtatttcaattagttatgcgaaactaacaagaattcaaaatatcttattagatgtttacgtattaaaaaaatgtacagttgaacagttgaagctaattagtactgatattcataaagaactaatttctacgggcaagtcagaaaatacggatgagcatagcacttcgatatatattgctttggttgaattgtgcttagtagcagcagattataaacctactgttagaaatcgtggtttgattggtggtgtttcttatttaaaaattcaccgtcgtttaggagctttaattgattcatatcttgaattttttaaagatgaattaaacattgtctctgcaaagatttcaaaacagtttggtaataaaaataactaa

SEQ ID NO: 56511 - DNA, 480 bp, Acinetobacter baumannii
atgaataaattaagtattgaagatattttatctggtgctttggttggtaaacctgagttaattgaagttgatattgttgtaaatggtaagccttgtacttttgaaacccatataaaaattatggattatgaaacagcaaaagctcaaatgattgctaataatgaaggacgagagggtttagcttgtattttggctgattgtatcgttaccgagaacggtgagccaattttcacagaagaacaagtacgtaagaacttcaataaacatttgattcaagctatctgggataaaatcatcgaaaaaaattacttgggaaagtcgagtacacagaagatgagttcgccgaactcgaaatctgggcggagcttgtccaaaacggcatcgcgggcgagacgatcgccaaagcaaaaaagaaccttagttaccgagaattcatcttctggcaacaatatagaaaaagacgtggaagcctcaacttag

SEQ ID NO: 56512 - DNA, 789 bp, Acinetobacter baumannii
atgaatgcaaaacctcaaatcgttaaatttaacaatcaacaattacctgtatttttttataatgaaaagccatatgtagctatgaaaccaatctgtgaaaatattggtttacaatgggaagctcagttaagaagaatcaaacgaaatcatgttcttagtaaaggtatgtccataatggacataccttctaatggtggtattcaacaatatgtctgtttaccattaggtttattgaatggatggttgatgggggtagatataagcaaggttaaattggaaattaaggacaccttgataaaatatcaacttgagtgttttgacgtactatataagcacttcatgcctaaacctcaaaagcatattgatatggctttatatgtgagcaaagaacttcataataaagttgctttaaagtatcaccgtatgtttagacaatacgatgacatgattgataatttgcgaaagcaagttgatgaaatgcaatgtaagtgtagacgttatgattttcgcatgaaggtcaacgcaaaagagattcaatctgtagctgttttatttggaacctctgtttcaaagatcaagcaaatcttgatggaagagcaactattggaagaacgtaatccatatgttgagaccaataaaatagttctaaatgtaactgatagagggaaaaagcttgatttcttgtttttgcagtctgaaatcatagatggtgatattcaggacattattatgatcactgatgatggtgtacagtttctagcaggtttactagaacgaaaagttatgtaa

SEQ ID NO: 56513 - DNA, 504 bp, Acinetobacter baumannii
atggcattaaaaccatgtaaggaatgtggtgctccagttagtgataaagcgaatgcttgtcccaaatgtggtgcgaaagttaagaaaatgggattattacttaaaataatattatggttcttcgcaataactattgttatgggtgttattagtaatttaaccaaagataataaaggtacggttaatgataaggaatctagtgcttctagtgcagttaatgaggatgaaaataaagctgctgggttatcttttataatccaagaccgaatcaaaaatagtgcaaaagatccatcgtcagtgcaatttagaaacgagcaatatcatcatgataaggattatggagcaattgcttgtggtgaatttaatggcaaaaattcatttggtgcatatggtgggtttaaaggctatgtagccgttgaaaaagatgaaaagttgtatattgaggatagtgttaatgcaaaagattttccaaagaaatggaataagttttgtgtgacacgatag

SEQ ID NO: 56514 - DNA, 3075 bp, Acinetobacter baumannii
atggcatctgcttcacttgggcgtttaacgctagatttggttgctcaaattggtcagtttgtaggtccaatgactcaagcggaacggaaagccaaagaatctacagccaaaatgggtaaagctttttctgatttcaaagatcaaatgaatgcttcattagggggtacacaaattggctcagctattgatggtattgctggaaaacttggggtattacgtggtggtgttctaacagcaacagcttcattagctggtatggcggttggaggtgtagttgtagctgctggtgcgttaagtcagatgtcacttgaattagccaaagcagatgcagaacttaaccagctatcgagaagagctgtaacttctgctgaaaactttcaaattattgctggtgcagcaagtgcatttggagttgagcaggataagttaagtgatattttggctgacacctctgagaagctgggcgaatacacatccacaaaaggtggtggagcaaaagacttttttgaaatgttggctaacaacacaaaaatgacttcaaaagagattgatgattttgctaagaaattatcaacaatggataccactgatgcacttgggcaaatcacgaccaaattagatgatatgggggctacagcagccgagaaacgatttgttcttgagtctttagctagtgatttgggtgatttggctccactatttgcaaataactcagagttaattaaagaatatggtgatcaattacgtgaagctggagtagtacgaactcaagaaagtattgataaatcattattacttaacgctcaaacacaagcgttaggaacacagtttcaaggctttaaaaatcagttagctagtcaaatgactccagtattgagtaatttaattcaatactttgtggatggcgcggtaaaaagtggcagttttggtactgtcttgagtgctgttggtacagttgcgaaagttgtgggaattgcaattgttggggtggctagtgctgtttctgtggttattcagtcaattagcggttttgcaagtcttattaaccatgtcggggtggtagcggcaagattagatgcagctgttactattactgatcagattaatgtgcttaaaacagggtttagtgaaggtaaagatatttggaatggctatgcggcaggaattgataaaactctaaaaagcacaatggattttgtgagtaatgttcaaactagcactatgcctgctttaacaggcttatctgctgaacaggcaaagttaaatcaagcaactttggcaaataccaagagtacaattacggatactgaaaaggctaaggaaaatgccaaagctaaggaggcacaagaaaaagcagcagcaaaagctgcaaaggcccagcaagaccttaataagatggttggtgcttcagcacttaacggcttacgtattaagggggcagaatcaattgcaggtggacaagtaagagcttatacagcaaattttgctcaaatggtgcaatctgcattgggtaaggatttaactcgctttacagcatttaatgatacctatcacaaaggcacaaccagcaaacatgcaacaggtaatgcctttgattttacgattgatgatgtcaaaaaatcaggacaagctgttgctcagcttgaacagatggctaagcgttatggttttgccataaaagttcttgatgaataccgtaatccttctagtcgggctactggtggtcatattcatgtttcagttttgggttataaaggttcggctgatgcattaaaagatgcaaaagctgaacttgatattgtcgaaaaggcaaataatgacgcattaaggattcatgatgaacgtgaaaagaaacaactagcaatagtttctaaatattcaaatgttgaacaaaaaatggcattggataatgaggagtctattaaagagattaaaattgcttatgctggtgatgatgagtcaattcagaagtacttaaaaattcaagaggaggcttataaaaaggatgtttcagcttatcgacaagctcagcaggagaaatttgatagttataagaatgatcttcttggcaaaatggctaatgcggaagatgcaatagcattgtctggtattgccaataaatttggcaaaaactcttatgaatatcaaatggctggtttgacaacttctgtaagacaggaaaagtcatatgaattagatgattacactaatgatgtaaatcaaattaataaagattatgactcacctgaaatggctactcaacgatatgagttacttgagcaagctaagactgcgcatttagcaaagatgaaggctttggatattgagtatcaagacagttcaaagcaattaatacaagaccagcatgagtctcaattaaatttatatggctctcttttatctcaagcttcaacggtttggggcagcatgactcaaatggttaaagaggctaaaggagaaaactctaaaacatataaagcaatgtttttagctcagcagggtatcgctattgctcagcagataattaatacggaacttgctgcaatgcaacctattgcgcaaatgggtatttatggtattccagcttcaactttaattcgtggtttgggttacgcttcgatcgctgtaattggtgcgcaaacaatagcaggctttgctgatggaggttttactggttacggtggtaaatatgaagcagcgggaatcgttcacaaaggtgagggtgtattaactcaagaggaaattgctgctttgggtggtccttcggggtttaatgcattgcgtcaatcaatcaagaatggatatgccgatggaggtatagttagtgaaagaccttctatatttacgcagaaaaatattgaacctactagacagcgtggcggtggcgttaatatcaatattaatgttcctccgggctatacagctagagaacgtagactttctaatggagacgttactatagatgttgttaaacaagaaattgagcaagcatttactcgattggggactgaggcaaatagtcatgagtcgcaaatgatgcaacaaggttttattgtagaacgcaatagggggtaa

SEQ ID NO: 56515 - DNA, 444 bp, Acinetobacter baumannii
atgacagcatttattttcttatttattggattggggataggattttggtttggccgtaaaacaaagccaaaaaaccaagagaaaaaagttaaacctatacaaaggacatattcatacaaccaacgacaagcattaaaagtgatgtatgcaactgatgcagatcgcataagagaacttaatttgctatccacaaatgagagtatttttttaagactcttaaagcaggaatttttagataaagaaattgtagtaaagcaaaaacggttctttatcgttgatagtgataaattcccaatagctatatttgaatatcgtgatggctttaaaccattacacaattctgatgtagaagatggactacctgtatttttgtataaagggcttttatcaagtgatgtaatcaaagaagatgcacagcgagttgctgatatggcaagacgatag

SEQ ID NO: 56516 - DNA, 252 bp, Acinetobacter baumannii
atgaatcaaattgtatttgaagacaaacaaagttttacacaagctgcctttaatgaagtaactcgaatcgtatcacaacatggcgcttctgtacttgaatgcttagctcccgcttttaatacacaacaatgtttagagcatttagcttttgtcgcttctgaatatgcatacgactattcatacattgatgcccatttagaaacattcaaaaaagcaaatagtgaattccaagatgttttcggggaagaataa

SEQ ID NO: 56517 - DNA, 948 bp, Acinetobacter baumannii
atgatcaatacatgtaaaaacacggcagaaagcacccccttttataagatgggggtaacgaattctcgcatgacatctgaagagttcactttcccaagaaatttggataatcagaagttaattaaaactgaagatggtgtattaccagttttacattctgttccttgtgatattcatggcatagctgctgttgattgggtgacttttagttttggtcaagaaacctttggcgaaaaatatgcattccttgaaccagaggaagttgatgagtcgcttacagaagcgattgaaacatggctagatcagattctttttgaaatattcgggtttgggcttgccgttaaacgtgacaaaggtatgcatttccatacttgctcatacgaattacaagataatttaggcatggtgttatatggtcatgcaaataagaaaatttcagtacaaattaacggtactggctgtgcattggcacgtaaaggttgggaatcacaactctataagttcttaatacgtggatgtaaacgtcctaagttgaacagaattgaccttgctcatgatgattttgaaggcaaccacttaacagttgatttggctgactcttgggacaatatcgacggcttttggtgcggtggtcgtgaaccaaatgtagagcataaaggagcttggaagcgtcctaatggtaaaggtcgtactcttaatattggcaaccgtgacagcggtaaattttgccgtatctatgaacggggaaaaaaagagggtgatgtattaagcccttggacacgtgcagaagttgaatttaaaggttctgatcgctttattccttttgatgtcttacttaatccaagttcatatttcattggggcttacccttgttttgaatggcttgctaaagaacttactcaagaaatgatttcaccagaaaaacctgaaatcgttagggtttgttga

SEQ ID NO: 56518 - DNA, 3798 bp, Acinetobacter baumannii
atggcaagtaatgaaaatcgtgttgaagtacaggtaggtgcaaacactgcggagcttcagcgtggaatgcatgaaggtgaagcaattgtagagcgttcagccaataatattgaaaatattgggcgcaatattgattttagagttgatttatccagcatggaagaaagctttgatcgagtttcaacttctatcaacagcagaatcaaaactttaggtatgaacattgcctcaacacttgctcaaagtttagcaataggtggcctcgtagcttttgctaaacaaactattgataccggtaatgaagtagataaattagcaaaactggtcggcacttcagctgaaaaatttcagtattactctaaaggcgctgaaatggccggcctatctatggaccagtttggctctatgggcaaagatgctttagataaacttggtgaagctcgccgtggtgaaggcgagatgatggatttttttgaaaagattggtccaaaagttggcgtaaccattgatcaatttaaggatctaagtgggccagatgttttacaggcatattataacggcttagaaaaagcgaatttatctcatgctgaaattgtcacctacatggagcagcttgtagatgacggaagcgcattaattccaatgctacaaaatggtggtgctgggtttaaaaaatggggtgaagaggcaaaggcagctggggcaattatgtctgatagcatgattgccaacctgaaaaccgcaaaagaaaatgtatttaagttgcaattacagtttcaaggcttacaggcgattcttgttaataatattacccctgtaatcacttccatttctaaaaatttcgacactattaaaactgttttagttgtcttggccgcagttattgcaacacgtttagcagttcaattagcaattttaacaaaggagtttttaattggtgtcgctcagggtatggcatatcaggtgcagctgtcagcattgcaggggcaagcaatacgaactgcaacagctatgggagttttgcgtagtgcatcagcgttattaggtggtccagctggtttagctatgctggccgttcaaggcgttgctgctggtgcagcatttctctatatgaaaaatagtagtgatgatttagcgccgtctttggatactcagaaaaagtctgtaactgaacttcgagatgaatatgaaaaacttgaagcttcacaacagcgcgttttgacacgtaaagctacagatgagttgcaaaaaacgagtacagcctatcgtaaccagcgaaatgaattgcttggcttagttgatgctattactcgaaattctgatgtatctgatgaggatcgagcagcagctagttatctttttgaggaataccgaaaaggtagaattgttgctgagcaattagctggaggtataaatcagttaaaaacagtcaatgctaatgcaaaggcaagtattgatgataaggttttttcgctcaaggaagaagcaaagaaagttgttgaggctgatcgagtactaaaagtctatagcaatactattaaacaaggttcagctgataataaagatcatgcgaaatcagttgataaagtaaccgaagcgtatgccaatctatctgctaagcaagtggaatatgttaaaggcgttgagttagctaaagagaaagaaaagtatattcaagatttaatgaaacaaggatatacgcgtgagaaagccgagttttatgcggatgcaaaggagaaatctggaacggcatttaatgcacaaactccgcagggattgggcgattcaataaatcaagcctacaaactcaaacagcaggaagacgccagaactgaaactgaaaagaaggcagcagaggctcttaaagagcaaaccaaggagttagaaaagcagtctgccataactgcgaatacagatcagactacccgaaatatgcttaaggtctatcaagcatttatgaatacaggggttttaactgataaacaagccagatatttaactgcagaagtaggtcgtgagaatgatttcaaaaacagtggtttgtatggttctcacaccgataagaataatggtcaaaaaaatacgggcatgatttcttggcaaaaaagtcgtgctgtaaatctagagaagtatttgagctctcaaggcttgatggattccagtgggaatattaagcaaacacaggacgctttagatgctcaggcaagatttctagttaacgaaatatttaacgataagtcttatacaaagtctaaaaatgccctttctaagaatgttggttacagtgaacttagtaagattgttggaaaaaatacgattggttgggattatgatggtaataaaatcaatgctcaaccacatcaccaaaagagagatagttattataataagcttaactctgttttgggcgatgatccaagtaaagtcatttctgtaacatcctcctttaccaaacttgagtcgattcaaactcaaaaagttgaggaagctgaaaaacaaaggctagcactgaaatataagtatgccagtgagcaagagaaagttgcaattgatctgaaaaatgcaattgctgagattgaaaaatcaacacttacaggtgatgaacaaatcaatgcaattgttcaagctgagaaagaagccagcgataaaatacttgctcttaaaatggaattatttgaaaaaaccaaagcaattagagaagctgaaattgatcattttcagcgtgttgctgagcgtacatatcaaattgaaatggcgcaagttcaagcagattttgatgcaaacaaaatttcccatgttcaaaaagttcagagagaaaagtttttagaagacacgcttacggcgataaaacgccaaggacttctagaccgtctagatcttgaaaatgaactttcaggaatttctggtaagcaaggaaatcaagggcaaatacttgagaatatttcaggtctagataccggcaagcaagtatctgatacaaagctaaacgggatgattagcgaagctgaaatggccgattatgaagccaagttcggcgggtttacttctcgtttagccagtctatgggatcagggtattcaatccctaatgaatggtactttgacttggaataatgcgactagggcggttttaactgacttgggtgcatttgttctgcaatctgctaccaaagagctgcaaggctggttacgtattcagacaatgaagcttgcaaaaaaatacgggttcattactgctgaaacggctgcggaagcgtctggccaagcggctcaaacgggagcaacgatcgcaggtgaggcaacacgtaccagtgttacagctgcgggtggtttagctcgattgggattaaaagcagctgaagctatcaaaggcatcatgatgtccgcttgggaagcaatggccggagcttttaaagcgatggtcgaaattccgtatgtcggtccagttctcgccgtaggtgccggagctgctgcgtttggtttagttgcgggcctagccggcaagattaaatctgctcgaggcggttacgatattccgtccggtgttaatcctataacccaacttcatgaagatgaaatggtattacccgcacaacatgcgaacactatccgtgagctagggaaatctacattcaactcaggtatgtcagataattctgatcttactggccaaggtggtgaaaatgctgtgtttaatattcaggcttgggattcaagagatattaaacgcttcatgaaaaagcacggacgtgaagtagcaggtggtttaaagggttatcgccgtggctttggtaaataa

SEQ ID NO: 56519 - DNA, 927 bp, Acinetobacter baumannii
atgtataagatttttgctttacttatccttgtacatgtgtctgtttcgacatatgcaaaagaacctttgacagcaaaaaggtttgtagaaacaatccaaaaaaataaagaatttaatgaggaatgtaattacagtaattttgacttagtagaagctgacaaaatgctaagtactaatttaaatctattattaaagaaatttggtacgttgaagttatccgattttgatatgggtgaatgtgttactccagataacattcaagaaaatattcttacttcttatttttggcagaagaatatggattataagggtgagcaactttcactctatttttcgtataacaccagcaatcaggatttattagtagcgcttactgataaagatttgaaatcgtatttaattggcgataaagataatgacctaaaagtaaatattaaaaaattctcagctaatttgacacgcactgagggtgttgatattgattcaaatttaacttactcggacttcctaaagacggatggtgaggctcaatataaatatagtaaagaaatagacgcaatcctttatcctaagtggtcttatagctgtaagaaagatagatttgataattcaaaatcatgttatttacataataacgatattggaattttattattaaatggatcttacttagtttcagtcgggcgtgagcattatccaaactcaaaagctagtataaaaattgatgataatgcaaccattacggctttaaatggaatgtttaataaaacttcgagcgcaatcattactcaattaaagaaaggtaagattgcatacactcgatattatgagtggccatatcaatataaaactatcgataatgagtcaaaattagaaggttttagtaataccttcaatcaaatgttggaagcttatagaaagctttaa

SEQ ID NO: 56520 - DNA, 234 bp, Acinetobacter baumannii
gtgcttaaaactggtaaggactatgattacgtacgtaatgaaatggacttaccacgtttaagagcaatgaatgcttataacaaaaagtttcctcccgaagaggttaatcttcatcgaatttatttgatgctggcttgtttctttggtgtagagaaagatgagccagaagatgatacaccagaggaagatttaccagatattttagaaacattaaaagcattcccgcaggggtga

SEQ ID NO: 56521 - DNA, 315 bp, Acinetobacter baumannii
atgcaatttaagcaagttgataacccgcgcggaaacgaaaaaaagattgctggccagaaatggatttttgcaccggctcctttgggggctattgagcgttttcaggatcaattaagctcggcttcagtgccggtagcagtcattattgatatggcccacatttgtttaaagcgaaattatcctgacattacccgtgaatttattgcggatgaattgattgatatcggcaatatgcaagaaattttggatcttgtggtaaacgtttctggtcttgaccataaaggcgacaaagaggcaaccgattcgggggaatag

SEQ ID NO: 56522 - DNA, 768 bp, Acinetobacter baumannii
atggctcagtattcatttggtgtgggtaatctatttgctacaccattatctgatgcatacggcgcacagattgccaaacccacatctttcgagcttggaattttacaagataactcggtggattttagctttgatgtaaaagagctttatggtcaaggacagtttcctgtagacattgcacgaggcaaaggcaagattacaggtaaagcaaaagttgctcgtttaaacggtcttctggttaatagcattttatttggtcaagccatgtctaccggttcagctacagcagtggcacgctcactgactgctacgccagtgcctgtaggtggaaccgttacaccaaccccgccaaatgctggggtttttgtggcggatctaggggtaactaatgcaaaggccgttcctttgattcgtgttgagtctacaccagcagcagggcaatactcagttgatgagtctacaggtgcatatacatttgctacagctgatgccaatttgccagtgtttattaattatcgatactccacaacaatggccggtgcaaagtcttcaacagttatgaatttgccaatgggtgaggcaccgtcattctcgttagatcttcataaggaatatcacgggaaaatcttaacgctgcacctcttcaaatgtgtcagtacaaaaatgtctcttgctggtaagcaagacgattacgatacgccagaatttgagtttcaggcgtttgctgatgatttaggtcgtgtgtttaattggtcaatttcggagtaa

SEQ ID NO: 56523 - DNA, 441 bp, Acinetobacter baumannii
atgagtattaatcgtgaagcaatttttatggctctctttgatctattaaaaaatattgatggttttgttactgctgaacggcgtttaagacattggagtgatgtgcctgacattgaacagccatatttatgtttagcccaagggcagcaaagcgtagctcaaggcagccctgctactggtgtaaagcctaaatggacgttatatgcagacatttatttgtacgcacgtacaaccggtgagcaggttccatctagtgtgcttaatccattagtcgatgctattgaagcagctttacaaccggaatttccagaaattgaaaaatgccagactttaaatagtttagttactcattgctggattgatggaaccattgaaacagatgagggtacgttgggtgatcaagccgtcgccgtcataccgatcagcattttagttaattaa

SEQ ID NO: 56524 - DNA, 471 bp, Acinetobacter baumannii
atgatgattaattatcatgttgatggtgatgcaaagctaaccggtacagttgatcagattaatgaagcggttaggcaatctattgtcagatccactcttaaacttttggtcaaggtgaaacgggagaaacttagcggccaagtactcaatgtacgaaccggacgtttgcgcagatccatcacacaaaaagttatagatctaagcaatggtgttacaggtattgtcggtactaacgttgaatatgctgctgctcatgagtatggattcaaaggtgacgtaacagtaaaggcccatttgagaatgatcaaaatggcttttggtaaatctataaaccctaagcaggtcaacattaaggctcacacacgcaaggttaatttgcccgagaattcttttttaaggtctgccttagaagagatgagaaaggagattaaacaggatctggaagtatcaatacagcggggcatagcatga

SEQ ID NO: 56525 - DNA, 552 bp, Acinetobacter baumannii
atggcacttacaacattagaaaaagttaaggagtttttagggcttaaatcgtctcaacttgaagcagatgccttactttcacgcatgatcgatgctgcaagtgcctttattgaaaattggctagagcgggaagtcttaagacattcagtaactgaatatcgagatggaaacggaaaatctgaacttgttctaaaagagcctgatatacgtcttattaacaaagttcttgttaatggcagggtgataccagaatcgtccaattttcacgactacggttatcgctgggctgactggtggttaattttgcaaggggattgctttgctcatggccgacgaaatattcagattgaatatgaagccggatttgatgaagtcccgagtgatattgaacaagctgtaattgaccttgtagcgctacgttacaaggaaaaagacagaatcggcatacagtctaaaaccttggcgaatgaaactatttcatttttcataggtgaattaactccatcggcaagagcaacactacagcaatataagcgagtcgttccaatatga

SEQ ID NO: 56526 - DNA, 387 bp, Acinetobacter baumannii
atgggattatttaaagcccctgagggtgtgacatcggttagtgtcgcaggtgtagagcttgaagttaaagacggttttgttgagacagatgagaatatctggccatttgtagagccgttaggttttacggttgggaagccggatgatttggtagctcttcgtgaagccgcagctaaagccgctaaagcagctgaggccgcagccaaagaagcggcagaaaatgaaaagctggctaaggctaaagccgaggaagaggccaaggcaaaagcgcaggcaaaagcggatgcagccgacaaagctaaagcggaggctgaggccgcagctgctgctaatgcatcagctccagctgaagcagatgccgacaaagctaaaggtaaaaaggcgtaa

SEQ ID NO: 56527 - DNA, 1533 bp, Acinetobacter baumannii
atgccagatttaaatgacgctctagatgcaatcaaaaccgctcagggtaaagcaatgcaagatactaatgacttaaccaagtcatttacacaacccgatggcccaactacaggcctacaggcatatgacttagaagctccttctaaaaagttttatcctgtattaactcctttacgtaacagtatttcccgcgtgacgaatggtgttgcaactcaagcgaactggcgtgtaattactgcaattaacgtaaataaccaacgtgcaggggtttctgaagggcgccgtggtggagttatccaacataaaacagaagattactttgcttcttttcgtggttggggcttagaaaatagcgttacttgggaagctgattatgctgctaaaaattttgaagatgtcaaagctttggcagtacaacaaacccttgaagcaactatgatcgaagaagagcgactaatcattggtggtaatacttctttggctatgggtactacaccaacaccaacacttgcagcagttggcacaggtggtacgttggctgctcaaacatggtcggttatctgtgttgcccttggtccacaagcttatttagatgtggttggggtgaataacggcgggattggtcagcaattcgatgcaagctcaaaagtaccaagcaaaattacccgtacaaatgcagatggtactactgaagagtttggcggtggttcggctcgtaaatcaacggcagccactgtagccactacaggtacaaccagctctatcacagctacagtaacaccagttattggggcagttggttatgcttggtatatcggggcggcaggatctgagcgtctagtagtggtttcaactgttaacagtgtgattctcaagcaagcggcagatccaaacgcacagttagcaagtacgttagtggatgaagataactctacaagtacaattgattttgacggacttttaatccaagcatttaaacctagtagcaatgcatatgtaaaagttatgcctacaggtactgctggtgttggtaccacactaacaagtgatggtgctggcggtatagtggagtttgaagaagcttttgaatatttctaccgcaaatatcgcttaagccctgatgtgatttacgttagtacgcaagagttattaaccattacatctttaatcatcaaaaatggtggtgctccattactacacttgaatgtagatgctaataaccctgcatctcttcaagcaggtgtggtggttggtagctatcagaacaagattactggccagcgcgttcctttgcgtattcaccctaacttagcggctggtaccatctttatgtttacctcacgcttgccttatccattggcgaacgttggtaacatcgtacagatgaaaatgcgccgtgattatcatcaaattgaatggccactacgtacacgccgctatgaatatggtgtgtatgcagatggggtgcttcaacattacgcacctttctcgatgggtatcatcaccaatattgcaaaaccagttcaatcttaa

SEQ ID NO: 56528 - DNA, 1152 bp, Acinetobacter baumannii
atgaaattaaaaaaactttttggagcaatccagaaaattcaagatcaggacgatggaacaatcattgttgaaggtgtggcatctactgaggacgaagacagcgataaggaaattgtgaaagctgatgccatgcgttcagctattcctgattatatgaagttcggtgcagtccgtgaaatgcatcaaccccttgcagctggtacggcgttagaaattaatgtagatgacaacaatatcactactttaaaagctcacattgttgatagtgaagcaatcaaaaaagttaaaactggtgtctacaagggtttcagtattggtggaagtgttaccaaacgggatgatcttaacaaatcaattgttacgggcattcagttggtcgaaatctcacttgtagaccgtccagcaaacccaagtgccgtgattacttgctataaagcggatggtttatcggctggcgaagaaaacgcaattgatccgctaactaaaagcatgggcgatgtaaaggagatggccaatgtactacaagacatcatgtggctcatttactccgttaaagacgaatctcgctggcgtggagacgacagcccaatccctgagcaactccgtgcatggattgaatcaggcgctgaaatctttagcactatggctcaagaggaagttgccacaatggttgcacgcgctaatgaaatttgtaaggccgaagggtgtgaaaacttacgaaaggccgaagtcatcgtatcgaatccaacaaaagcagagttggatgatattcgtcagaccattgaaaaatgtgcagagaaaatttctaacatcaaagcctatagcccagaagatgcgagtgctccaaatgatgcggcgcaaactcaaatcgagaaaggagcggacgcaggtgaacttaaaaaggtcacagatgatttaactttaactaaagcaaatctggccaaagtcgaacaagagcgcgatacgttgcaaaagcgtgtcactgaactggagaaacaacctgaaacaccaaaagctgcgttaatgaaccttagtaaagcggaagatacaaccgttattaaaaaagatcaggttgagccggtgctagatggtaacggcgaggtcaatgaaatcgcaacaatgattaaaagcgcgcaagcacaacgtatttaa

SEQ ID NO: 56529 - DNA, 2151 bp, Acinetobacter baumannii
atggctagatctaatggaaaaataacgtcacttgctgctgatgtggtgcaaatgtttgctcatggtgtttcaaatattggtaacgcttggtttgggccttcccaacctttggagccagtggcaccaaaagaacaaacctcagggcggcaattcgattacgcaacatctttcaacgtcaactccagaccacgacagggtgaggctttaacttatgaccatttaagggcgtttgcagataactatgatcttttacgaatcattattgagacacgtaaagatcagatggccaagcttccttgggttattcgtcttaaagacaaacccaatactgatgcagatgaagcgcttgtacatgatgcacgttgtgaggaattaacaaacttctttgcatttcctgataaggagcactcttgggatgcgtggttgcgtatgttgcttgaggatctattggttatagatgctccagttgtttatacacgcagaacacggggcggtgaagtatatgcagttgaaccaatagacggcgcaactattaaacgtgtactggatatttacggccgtacaccattgccgcctgaggcagcatatcagcaaatattaaagggtttgccagcagtaaattacacccgtgatgagttgatttatttgccccgtaatccacgtacacacaaggtatatggattctcaccagttgagcaaattgttacgacaattaacattgctctacgccgtcaagctcatcaattggggttttataccgatggcagtacaccagatttaatttttcaggttccagctgaatggacgcctgaacagattaagcgctttgaggattactggaactcgctgctttctggaaatatccatgagcgccgtaagacgcgctttgtgcctcagggcgttacgccatttgatacaaaagataaggcaatgaaagacgagtatgacgagtggatagctcgtattgtctgttttgccttttcaattagccctcaggcgtttgtaaaggaaatgaaccgagcgacggcccaaacagcacaggaagcagctttagccgaaggattggcgccgttaatgctttgggtaaaatccttgatggatcggataattcagcaagtatttggctacttagacatagagttcaaatgggatactgaagaatctgctaaaccaaaagagcaagcggaaatcgataaaatctatgttgatgcaaaagtgctgcaccctgatgaggtgagggccgagcggtttaacatgcagcctatggatcctgcattaaggtcttcattgaacccagcgccgttattgccgcagccgcagcaagtggatgaaagcaagcctactgatgaagcaaaggagaagtttgcaaagtcaaaaaagtatgtagctccaatcgatcgggaacgggaaaaagtggagcaagtacgggaacaactaaagcagcagattcaccagttctttcaggaacaagccaaggatgtagccatacaggttgtgacagcaaaggatcaacttgggaaaagtattaaggataatgtcagtaatattcttgatgggcttagttttggtgcttggtctggtatagctgcatggattagcgatttaacaagtcaattggcagttgatggggtagaggttgctttaacccaaatcaatgcagagcttgagaaaaaggcgcttaatctggcaaatgagcaggcaattaagtttgccgaagatcgagcagctgagctagtcggaatgatttggcgtaacggcgttttggtcgaaaacccaagcccaatatttagtatcactgaatcaactcgggaaatgctgagagctacaatcacacaagcattagaggaaggctggagtaatgacaaattagccgatgaaattggcaatagtcatgcatttagtgaagatcgtgcggaaatgattgcaagaactgaaacagccatagcagacgtacagggcaacatgattgcctataaagctgctggggttgagtcaaaagaatggatggccgcaccagattgctgtgacgcatgtcaggaattggatggaaaaattattcctatcaatgaatcttttgtggctggcagctacttcaaagacgcaccacttcaccctcattgccgatgtgacacattgccagtagtgacatga

SEQ ID NO: 56530 - DNA, 465 bp, Acinetobacter baumannii
atggcagcactaaaagagcctgtaaaaatctttattgttcagtctcttgcttgccgtgatacccctcaagatgtagtggagagcgtcaaacaagaatttgatgtagttattacccgaagccagtgccaagcatatgacccaacgaaatatcaaggccgcaatttaagcccaaaattcaaggagctttttgagaaaactagaaaagattttgatgccggcttggtggacattccgattgcaaataagtactaccgtttgaggcagtaccaaaagtttttggaacgaacacgaaatctaaaaacgggtatgaatatcctcaaacaggcagctcaagacattggcgggcaatttaccaatcgtcaagaaattacaggtaaggacggcgggccagttgaaacggtccagtcagcgattacaaaagaagagtttcttaaggcgaggagggaagtactagatgagtactaa

SEQ ID NO: 56531 - DNA, 642 bp, Acinetobacter baumannii
atggatcagatcagaccatttcctccaactgattttatggatcaggccgaagaagaggaagcactccgtttaatacctgcacctgatttaaaactatgggtagttgctaattttcttacgctgggtggacctttacataatccagatcacgaccatatcgctgagatgcttcatgataatgagggtttcttggctttcgcatgggcttcttctgcttataccagagctaagcgtatggtgctcggccaatgtgaaaaggttatgtttcaacaaggcggctggaagaaagctcgacaagagcagcaaatgcgcgactggttcggattcgttccagtttacttaatcacaatcgatgcaagcttttgtgaaaaggcaaacgatagcgagttctgtgctttgcttgaacatgagctttatcacatcggtgtagaacgagactcggacggtgagattatttacagtgatcatactggcttgccaaagcactatttggctggtcacgatgtggaagagtttatcggtgttgtgaaacgctggggcgcaagtgaaagcgtcaagcgtcttgttgaagttgcgaaaaacccgccgtttgtttctgatttagacatttctaaatgttgtgggaactgcgtaataacttga

SEQ ID NO: 56532 - DNA, 219 bp, Acinetobacter baumannii
atgttcatttgtgttggtggtgagttagacggccagaagattgaaaaagaaggtcgtttattaaaagcttctgatatcgacccaacattcacaactgagtactacaagcaggtttttaaccgcgacaacattaattatcgtttttggcttccaataggatcaaacttgcatgaaatgtctgagcaagttttggatattttgagagcatcaaaaaattaa

SEQ ID NO: 56533 - DNA, 213 bp, Acinetobacter baumannii
atgggtagtgtgcctaaattctatcaatttggtaatagtcattataatcttgaccaaattgtcaaaataacttcgagatctgatcttagttcagttttagccaatttttctgatggttcagaagttgaatttacgttcgatagtgaggatgaatacaatcaattcatccacttaataagaagtattaactttacttcagatttaaatttttaa

SEQ ID NO: 56534 - DNA, 636 bp, Acinetobacter baumannii
atgtgggaacttgtgaaagcgggcggctggttaatgctgcctttaattttgtgttcaattttaaccgtcgcaattagtattgagcgttttgtacgtttaagacgttcacaagttttacctaaagtactaatgaatgatggcagtgcagatatttctgttgtcataacaaatttggagcaggatactaatgcgcaaagcacggcattgggcaatattctaaaagctggttttgagcatcaggaacatggcgaacaatttgcgcgagcacaaatggaagctatggcttctcaagaaatttcttatttagaaaaaaatattaacttcttagggaccttaagtgctatagcacctctactagggctgcttggaacagttgtgggaattattgagtcttttttggttattgattttggttcggcaggtagtcctagtttgatgattcccggtatttccaaggctttgatcacaacagcagttggtatgctcattgcaattcctgcacttatttcctatcgatattttcaaagagtagtgcaagattatattgctgagttagagcaacaatctacgctatttcatgcctcattgttttacaaacgttcttcagtcatgcaagaacatcgccgcgttggttga

SEQ ID NO: 56535 - DNA, 981 bp, Acinetobacter baumannii
atgatgaattacttaggtattgatgtttctaaggaaaaaatagattgttgtttgtttattaatggtatttcaggtaaagggaaatctaaaatattttctaattctgaatctgggtttattaaattaactgattggttatcccacttaaatatcaatacaaatgatttattagtaacacttgaagctactggaatatatcatgagaatctttgttattttcttcatgatttaaaaatcaatattgctatatcaaatccaatgcgtactcgtcgttttgctcagggtatgtctatattaactaaaactgataaggttgatagtgaggttcttgcaaaatacggggctttagctccaattaaatattggaagcctgactctaagaattttagagagctacgtgatttaatgatcagacgtgatgctttatctacggatcttgttcgtgaaagtaataggcttgaaaagtctacttttaccaaaacttcactacatgttatatcaatgattaaggagagtatcgatagcttacaaactcgtattaatcatatagatgtcataataagtgaattaattaaaaatgattctgaactgactaatgagatgaatttattaatttcaatacctgcgattggacaacgcactgcattgcaaatgcttactttatttcacggaaaggattttgataatgcgggagctgctgctgcatatgtcggattagttccaatacaaaaacaatcaggtacttctgttcgaggtgcgacacgcatttctaaatctggctcttctcgtattcgagctgcgttatacatggctgctattgttgcaataagatttaaccctcactctaaagtactttatgacaggcttcttaaaaatggtaaatccaagatgtctgcactttgtgcggtcatgagaaagcttgtgtatttatgctatggcgttttaaagaataagacaccttatcaacccgattatgcttaa

SEQ ID NO: 56536 - DNA, 258 bp, Acinetobacter baumannii
atgatgtctttatctgatactgctattttacaaacggttctttttgatgtttttgtagttggagttgtcttaggtttgattgtatctggtttctttaaaactttactcaattcattgatttatcgctttgaaagacctaagagaattaagacacaagatggctttttatatttctttaagggtaaatattatcctttagagtatcgtaataagctcatcgatgagcataggaaaaaatttaagcatctttctctctga

SEQ ID NO: 56537 - DNA, 1488 bp, Acinetobacter baumannii
atgttgcatcttataactggtactccgggggcgggtaaaactctatatgctgtatttcttattgataattatgaaaaagcaaataaacgcgcacttgaattcaatgccatagctttaaaacaaaataaagaacttattgaaaagaacaatttgcaagattattttgcttcatacacttacttttctaagataactaaagagtatgaaacactttgttttgaacctgattattttgattattttgaaaaaaaggaacgtaaagaaactatatttttagatattcagttttacaacggtatccttgcgaatatcaaaaatgatcttaatcttgagttaaaacagcttaaatctgtacgccatatttactcaaatattgatggtttaaaggttgattttgttcgaccaatgcaggttgactggcgtaagtgtccggatggttctattgtcttctatgatgaaatacagcttattgatgtttattcaaatgataacaagagagatgacgaaggcattgttaaatctttgacaattcatagacatcgtgcatttgatatttacggtattactcaatttcctcgacttgttcatccgggctttcgtgatgttgtaggtcttcattatcacttacatcggggctggggtgcgccttcagcaactgtatatgtctgggctaactgtcgagaaaaaccgaactcattaggtaataaatttactgctgagcgtgattttcgttttaattatccaaagcgtttatatgagatttatgagtctgcaactgcgaacacagtcaagttgcgtattcctcttaaactctttgcaattttgattattcctgttgttggggtttttatgtttggcaatatgatctttggtcatggtccaaattttttaacaagtatctttggtggatctgaacaaccaaaaactgttaaacaggcaaatcaaacacagcctacggcttctgcaactaaagagactacttctcaggatcaggctgcatttgttccagagcaggattgtagaaaagcagttaatgttgaaaaacctgaatgtgttaaatattttaatgatttgacgaatagtaatgcttctgttactccgcacggttatcaggtttcttataatcctgataaaccttttgataacaatgaaatacaagaaaatcttcactacgaagttactgcaaaaccagtcttctccggatgtgccaaaatgaatggtaaatatcaggcatatacacagcaagggactaagttggatgtgtctaaatctgattgtgagcgtttaattaaaaataacgatagaccattcaattattttgccaactctcgaactgagtctgttagtacaggaatattaaataatgtttcatctgagcagacacagccgaataagcagcaatctattcaatatgcgaataactatgttcaatctggtcttgagcacaaatttgatggtgctaatgatcgtggttcgttttctttttag

SEQ ID NO: 56538 - DNA, 282 bp, Acinetobacter baumannii
atgtggtctaaactcgtctttattctttcatcattacagtcaggtgcacttaaacgaattttaggtggtgcgggtatttatctagcttctagtgcaatttttatcacagcttttggtgctgctgtaaatacattaagaagttcagtttctggtatatctgcggatgttttagctttggcgcatttagctggctttgatgtagcaatgactattgttttaagtgctgttgtaacgcgcttatctctcaattcttcaaaacttgtattaagaaaatcatcataa

SEQ ID NO: 56539 - DNA, 1308 bp, Acinetobacter baumannii
atgggtagcattacatcttattgcgtcaaagttataaaagataactttaaattaataacatggctgcaaatcttcattatagccattacacctaactttattttttatcagactgctaacgcaacaactgtctctgctgagggctggtctgttactaagcgtttagtgcaaggtgcaacgacattctatgacggggcaaaaaacgtagttttaaacggtaagagttatgcagctacgggggctgctgcaattactccaactgctagtcaagtcagtaagatgattgtgagaactggtgctgttttggcagttgatcttgcaattaaagagcttattggtgctgtggattacgtaatggaccctgcgaacaatagagttatttatgactcatccgaacaatcaaatccagcactttataaatatctttttgcggtttccggttatgaaacttatcaagatggctattatgcattaactgcacctgcggtttgttctcaagtaatcggaaaaaaagtttatccgcagtggtcgtcttttaagtggacttatgaaacagatacatcttattcgtacggtttgtgcagttcttcaattacatctgtagttatatcacgattttcgaaccctgcttacaatcccaatgcagaacgtgaaaaatcatacttaccttacgaaacggtagcttctcaaattatttctgatgctgttgctgaaaaagctgatggtaaagcatacgtttcatctgttgctgatactgcacttgaagatgaacaaagacagattgttcctgcatctgatctcacacagcaacttaacaactcacaagcgattccaaccaatggtactggaacaggtactgcaactcctactactggaacgggtacaggtacaggtacaggtgatccgactgcacaacaacagccttatgatataacaatcaatttcccgattttttgtaactgggcgccaactatctgtcaggctgctcaagcaggcattaattatgtagcttcatacactaaagacgttgatgcattaaaaaaagaatatggagataacccaaagtttgatgataaaccgcttgaatttgataaagaccctgcaactccagatactacaatatcatttggtggtggttgtccggcacctttgaacgccccttattcttttatgggaatttctggttctattgagattccgtttactccattttgcaaaattgcagaagtttctaaacctgtaattattgcagtttcggcctattttgctgctcttattattggcggaattagaagtggggatgcttga

SEQ ID NO: 56540 - DNA, 261 bp, Acinetobacter baumannii
atgaaacaaaatcaacttgcagtacaagaaaaacgtggcgttttaactttacgtaacgtttcaacttatggtttgggggcaacaattagcggagcactagctctttcacctgctgctaatgctgcatcttcacttgatttcactggtgcatctggtgagctagacggtgttaaaactgctgtagtcggtattatcggcgttttagtgacattgatcggtatcggtattgcttggtcttacttcaagcgtactgctaaataa

SEQ ID NO: 56541 - DNA, 195 bp, Acinetobacter baumannii
atggcatttgtttgttcagagttacaactaattaacaatgttcagacatgtgtttcatgggttgagcaggtaacactacttgaacaactcgcaataactaaggcgcaaatggtgatgttggggacacctattgtggggatttacagcttaatcattgcgttttctatttttaataactttgccaagagggcttag

SEQ ID NO: 56542 - DNA, 183 bp, Acinetobacter baumannii
gtggcagaccgtttaaccggtgctgactttatgatgggctttggactacatgctttagtttatcatatgggacaaggtgaaaattatccccatatccaacgttatgtagcaggtttaagccaactacctagctggcaagtcgcagtacaaattgaacaaaatggtgtgaaaagtcaaaaatag

SEQ ID NO: 56543 - DNA, 192 bp, Acinetobacter baumannii
atgcagggctttattatttttgatgattatggcagtcagtatccggaattcaatcagcaaatgtctgactggttgaaagacggaaaaatcaaatataaagagcatatggtgcaaggtttagataacatgatcaatgctttcaatggtatgttaaaaggcgaaaactttggcaaagtggttgtaaaaatttaa

SEQ ID NO: 56544 - DNA, 333 bp, Acinetobacter baumannii
atgcctttaataaattgtccagaatgcaaccattctgttagtgataaagccttagattgtccatcttgtggggctagattaaggaaacctaaaagaggtttctttggtaagatttttaaatggctctttattctttttaacctttttatgctagttatgacatttaaatcttgtggaagtgcttcagaaattattgcttctagccaaaatgaatatgaacaagcaggagctacattaggttctacattaggcttaggtatggtgataattttctgggcattagtagatgtaatacttggattatttgtactattcacacgaccaaagcgataa

SEQ ID NO: 56545 - DNA, 657 bp, Acinetobacter baumannii
atgaaataccttctgatcccgacattattattaactacatcatcatttacttttgcaaataaagaagaagccataaaaaatattatgatttatgatgattttactacatggatagacagtggtgaggcactatttgactgggaaaagatagtaaaaagttctcctaaaaaagcagtgacaacaaataaaattaaaaatgattttgctgggaatgaggtggcggcaaatagagactatgcgaatcaatgggtacgcctaaaaggcacagttaaaaacgtaaaattagatagtaatggaaaaatgtatgccgatctaacagaaaactatgtaaattataaggcttatatttccgactctgaatttgcggcaagccttaaacccaaccaaaaagtagatatgtattgttttaatacaacagccaattcagcaactcaatgtattaattatctaggttcaatttgggcaaaagcatcagaagttaatttagcagagataagaacaaataaaggcatgtcttcattttcatcaatactgtctaaagctgttcctgataatatttttaatgaatcttgctctaaaaatatatattcctctatctgtaagaatgctgttatgaattctatgaaggatgatcctagacagtatcgaattcattag

SEQ ID NO: 56546 - DNA, 372 bp, Acinetobacter baumannii
atgaatacattaattaaagcaattgttttatcagtatcagcttctgttatgggagcttctgcttttgccgctccacaagaaaatcataatcagcctaaacacgttaatcagcataaaaaacaagttgaccaacataagaaacagcctgtagttcaaaaagttcaagctcagaagcatactgtaaaaccttcacgtgattggaaggctggacaagttattccttctcaataccgcaaaggtcactcagtagaccataaaaagtatagcaacctgactaaaccagctaagaaccagcaatgggtgaaagtaaataatgattatgtgctgatcaatacagtgaatcacaaaatcattaaaactatcaaaggttaa

SEQ ID NO: 56547 - DNA, 873 bp, Acinetobacter baumannii
atgtggtcttctcctattatatttcgtcgaaaaaaggaagtaagcgaaaacggactatgtgatgatgcgaatgcatggtggaaagaagcgcgacgtagagttaatttatttaaacaaaccacgattaagtcttctataaaagatggagatcgtattcaagtgctcggtgaagataggaatggaaaaacagatgaacttaatcaaattttagtcaaaactaatgaagaaattacaaaaatttgcggaactactgatggaaccttttcagcctggctaattgcacctttagtagttgatgaagaggaagccgaatgccttacagggaaaaataattcaagtactattgttcgctttagtataaatgctgagtctaatgataaggccggtctgtttttagttggcggtgatgctgaggttgaaaactgggaacgcgtttggcaacgtaattctaaaaataaagaaagattagaatataatataatgctctctcctcaccattgctcatggcattctttatcttacgatagttggtcagacaaaaaacgtgaagcttatgtagatcctgacgcacgtttagctttggcacaagcaactaaaaatgctttcattattgctagtagtaaagccattctagatgatgataatgatccaccgtgtattcgagctaaagaagaatatgaaagcatactaaaagatgttgatggaacgtttctatgtactactgatgaatgtgaagatgatgtactcacaatagaaattacatctaatggccctcaattaagtcccaaaaagaagggtggaggattctttgggtcagattcaaataaaacaccaagagaaactgaaaaggctggtggaagaagatatgcttaa

SEQ ID NO: 56548 - DNA, 1767 bp, Acinetobacter baumannii
atgcttaatccattactaagttcaggaagtgcatttgatacttctaaaacagtgttatggcaatggctaaacaagaatgctgatgtcgttaagacattggcattaaaagacctatccatatacggtaataatcgatttatctgtggttggatgatagatataactactagtaatcaaacgtttgaatttcatatcttattagatacatatttcccatattcacccattcgaattgcctataaaacaaacgacttttttttaaaatggcctcatgttgaacctaatggattactatgcttacctgttgaaaacagtgatggaattgaagaaaaaatttataaaaatctatttaacgccatcgaattgatcgaaaattgtcagaatagcgaacaatttagagaaaaagaattccaagatgaatttatatcatattggaatcattccactggctcggtaaaaatcaattcattattagatattaacaatacaacatcacgcctgatatatatatggaatgatagtaaatttaaattggttggcgaaagtattgaacaaatagaatcatggttaaaacatgaaggctttcactttaacttatcaatggttacaactggtatatttggttttttgcacaaaccacctattccccccttcccacaaaaacctataaattttataaaagcattagctaagaattcaaacaatattactgaacttcttgcaaaaataccttttcatgaatcggccgtaatagttttaggagcaaagaccaccaattctggcactggcctaatagcagttgaattgagcgcacaaagtataaatggttttagaaggaaaaaactctacagtgatcgtattaatttattactgagaaaaaaaagaggttttttgaacaaaaaagatatccaacgacttgatgctcaatggatacatggtagagatcaaaatgagggcttaaaagctcttcaaaatgctaaagtattagttttaggttgtggctcattaggttcacaagtagcaatgcgcctagcacaatctggagtaggcaatataattcttatagaccatgacatattagttccagcaaatgttggtcggcatgcattaggtattaattcagttggcaaatttaaatcgactgaattaaaaagagaaattcaaaaaaaataccctcatattcaaacggttgaaagttacaacaaaacttggcaacaagtttacacagaaaagtcagatgttattaacaataattctttaatcatatcatgcatgggggagtggacagctgaaggacaattgtccgattggcaagatagtctaatgactccacacccgatcatctatggatggttagatgaaaatggaacagcttcgcatgctgtagctattgttaatcaaagtatttctttaaaatgtataatcaacgaaaatggtatcttaagaaaccccgaaactatatgggagaaaggtggcttaatgcaaacagaacctgcatgtggcacatcatttcaaccttatgggccgttagatgttgtccatgctgaagctttagttacccgcgtggctattgagtttttaactaataaaatttctagtccaacccatcacgtctatgcaggctctacttcaaaaatcaaagatgctaaaggagagtggagcgctgaacatttaaaatatagacctattggttttgagggagcctttgaatatgaaaaatcattactttcaaaatgccaaatttgcgaacaatgtaagaaaatatga

SEQ ID NO: 56549 - DNA, 483 bp, Acinetobacter baumannii
atgaaatattccaaaattacatataaattacctaataatttaggactaattgagtttttgccagaaactttagagcatttcgaaaaatacaaacaacgcacttgtttctcaaaagaagctggagggcaactatttgcatttcatgatggtaaaaatacagtcacaatagctgaggttacaggccctcgcccccaagattggagaagtagattcggttatatacctgatataaaagcagagaaaattgaaatcaaagaaaaatataagataggtctgcattttgtaggcgattggcatacacatccacaagatattccatctccatctactacagatgaaaactctatgaaaaaattagtaattgaaagtgttcatgattttgaaggttttattatggttattgttggaagaaaaccatttcctaatgggctgcatgtttcttttcatacagcaacccattcatataaattagaaactatctaa

SEQ ID NO: 56550 - DNA, 756 bp, Acinetobacter baumannii
atgaaagattatttgggtttttttgatgcatatacattgaaggctaggtttattccagctatcttagccacacttccgctacttgccttaataggttgttactttaatctgaatcaggcatttgtttcaaatgttgtggtcggtggattagttgctttctcatctatttttttattgtcaaactttgctagattgtttggtttaaaggttgaacgaaaattagtcctaaaatggggtgtactacctacaacacaatttttaagacacaatgatttaaatttgagtgcacaaaaaaaacaccagatacatttaaaaataacagagaaatcttcaatagttttaccaagtgcttctcaagaatcaaatgatccactaaattctgatttagtatatgatgaagctgttgcttggattcgagagaatactagaggtagtgatttttcagtattactggctgataatattaactatggatttataaggaattgtttaggactgaaatatattgcgataagtatgtgtgtattggttttaataatttttttagtacttttttttagtttctatccagctagtagctttaatcaaattgaagttttaaaatttctaaaaagccaaaagatggcaatatggttaactttaggattaacaattgtaatgttggtattgtggataactatggtaaccgagaataatgtaacaaaagcagcgcataagtatgctaaaactttgttaaattcgacatataaactttag

SEQ ID NO: 56551 - DNA, 933 bp, Acinetobacter baumannii
atgattaaaggtttagcgattacaccgcccattcttgggcgaatcagtatcggtaagatggtggaaaagaatggcaagcgcatccctgaaaaggatgaccaattcaccattaccagccaaatccaaaataaggatagtggttgggtgaaacatccacttgatgaacaacttcgagccaaagcaccgaatcaaaaactcagaaccattccagtacggatgatctttaatgatcctgaactcaaccttcgggctgagtacagtctgtttgatcgacagacagggcgagcagtctgtgtcggcaatggtgaaacttgccagcgactgactcaacagggcattgaacaacatccatgcccatcccctgacttatgtcaactcgcgcagggcggtaactgcaagccatatgggcgtttgcatgtcaatttagatgagtcggatgaactgggtacgtttatttttagaaccacgggttttaacagcattcggactttggcagcacgcttaagttattaccatgcagcatctaatggcttgctttcatgcctacctttacaactcacgctgagaggcaaatctactgcgcaaagctatcgtacccctgtgtattacgtggatttaaccctatgtgatggtgtgcatttacaagaagccattcacaccgccaaagaaattgatcagaaaagtaagttgtgtggttttaatcaagctgctttagatcagatggcacgtcagggttatggtaatgcacgatttgaggtgaatgctgaagagggactagatttggtggaagagttttatacggatgaggccattgagtctgagcaggtaccggttgagttgaaaatgaagatgaagcctaaatttactcagggggagaagatggtgcaggatattcagcaaggattgcagcagagtgttagggctgtgaattga

SEQ ID NO: 56552 - DNA, 1044 bp, Acinetobacter baumannii
atgaactcagctttaattcaacttcatcctactcgaacaaatatccacgctcatcgccctaatccaactaatccaaaacgcgttgtggagaccaaaaacctaagtcagtcggaatggttggaagtccgtcgccaaggcattggcagtagtgactgtgccgcggcttgtgggctcaatccctatatgtcgatgttggaactatggatgatcaagacaggacggattcaacaaaatatagaagatgaaagtgaaggccatgcacccttgtactgggggaaaaggcttgagcctttagttgcggaatactacagcatgcataccaactacaaagtacgtcgagtcaatgcggtattacaacatcctgatccagacaagcacttcatgctggcgaatctggattactccgtggttggtgatgcggatgtgcaaattctagaatgtaaaaccgcaggggagtatggtgccaagctatggcgagatggtgtgccgttatacgtactgtgtcaggtacaacatcaactggccgtgacaggcaaaaaggcagcacatatctgtgtcttaatttgtggacatgaaacaagaatttttaaagtcacacgttctgaatcggtgattcagcacatcatcaatgctgagcgttacttctgggaatgtgtggaaaaggatgtaccacctgaagccgatgccagtgaatccgcagccaaagccttacaactactttatccagaacatgtaccgctcagcaccacagatttatctgaggatgagcaggccaatcaacagtttgagcaactgcttcaagcccggagtcaaattgacaagcatcagcagcagttcgatctgctgaagcatcaacttcaagccaaaatgcaggaggcagagcgtgccacctttaaagcgggctcagtcacgtggaaaaaggctaaagactcggtcagcttggatagtaaggctttactcaaatcatatcctgaatacctcaaccaattccaacaaactaagaaaggttcaagacgtttcaacatctataccgatacttattga

SEQ ID NO: 56553 - DNA, 1047 bp, Acinetobacter baumannii
atggcacatcaaattgaaaatatggcttatgtcggtcaaaccccttggcatggtttgggtaatcaactcacacccaatcaaccgattgaggtctgggccaagcaagcagggatggactggcagattgaaagctcgaatgtgagttatatggctgaaaaccataaaggacaaagcttgatcctacggcatgatgaacagcgggtgttataccgttccgatacccatgagccgttatcggtggtcagtcagcgttatcaggaagtgcaaccccgagagattctagaattttatcgagacttgactgaacaatcaggctttgaactggaaaccgctggggtactgaaaggcggcaagaaattctgggctttagctaaaactggacagacttctgctttaaaaggcaaagatgtcagcaatggttacattctcttggcgactgcttgtgatggcaccttagcgaccacagcacaattcaccagtattcgcgtggtgtgtaacaacactttagcgattgccttaaaaggtcagaacgcaagtgcaggcgtagtcaaagtgccacacagcaccaagtttgatgcgcagaagatcaagcagcaattggggatttcagtgcgggcatggaacgagcatatgtatgaaatgaaacagctcagtcaacgtaaagtcacacaaagtgaggcagcagcgtattttgacgcagtgtttaataataccagcctcagtgcaaccgagcaggatgacagtattattcagttttatcgtaatgtcgctatccaagccaactcagccaccaaagctgaaaacaagactgaaccgaatggccgtgccatgtctaaggtcatgactatgtttaatggacatggccgtggggcagaactcagttcagccaaagataccgcttatggcttactttgcagtattactgagttcgctgatcacgaacgtcgagccatgagtcaggatcatcgcttagattctgcttggttcggcgcaggggcaggtttaaaacaacgtggactggaacaagcattacgcttgattgtttaa

SEQ ID NO: 56554 - DNA, 303 bp, Acinetobacter baumannii
atgtcctttattcaatgtccctactgtcagtctagccatgtcagacagaccgattcaggcaacgccaactttaactattttgaacagttacaacgctgtatttcacctacacagatggcgatgtttggtatgcaggtcgcaaaaaaagcaggcgtttcaccttttattggcgccacggtcggggtggtcatcggtggcgtcctagtcgtcgtcagccaatactgctttgagaagtactacagcaatgctgagcaatatgtctgtttggattgccaacaaccgtttgcatggatgaagcaatag

SEQ ID NO: 56555 - DNA, 381 bp, Acinetobacter baumannii
atgaagcaattttttaaaccgatcctactcgcattgactgcaaccacaggaatgttgctgggtggctgtaattctggccttgatccaaatacatttacggtagaactagatgtcaaagataccagtaactggtatgcgcaaaatcagtccgctacagtattgacgatccgttctaacagtgcagatccgattgatgttaccaacgtactgatcaacaacggtgaatgcagttatgaaggttatcgtcgatctttggaatatccgcagcattttaaaatgggtctgcggttaagactgaaattaacaggctgtggctatgacaatgtagtgcgtgttgatgttgaaacggagaagggtactgcaagctatagctttcaatag

SEQ ID NO: 56556 - DNA, 576 bp, Acinetobacter baumannii
atgaaccaaaaaaccatattgggcttggcagcaattttagccctgacccttatcagcatcgcaggcttctatttctttagccccaaacatacaactgaaaaaactgttcaagccagcacttctgaggctagctctgcacagcctttggaatctgccagttcagaagcaacatccaccgagattgcagcggcagaagtggatgggatcgatgtcaaagaattgactatgggaagcaagagtctatcagatcatgaaccagagctgctgagttttgagtttgataaaaacttaaagtctgtcgataccttactgtcgatgctgccttatgacgaattgcctcagtttgagcaggacaacatagacaagtatcaaggctatgtcttcgctaaagccgcaaaagatacaggtaaatcagtgaaagacttcagcttgcaggaacatggagcactggaatcggagcaggcgggtaatcgttactacgtttataaatttgataatggcacagactgtgaaattcatctggtcagtattgatttaaatacgggcaattatggcgtgagctataactactgctag

SEQ ID NO: 56557 - DNA, 261 bp, Acinetobacter baumannii
atgtttaaaaccttcctaaaaactgcccttatttcatcactacttgcaggtgcatcattggcgcaggcaggctggtttgcgcaagccagtgaagcttattttgttaaggcccgcaatttgggtggtggggtgtatcaatgcatgtataaaaccaatccgggcaaccgtggttggcgtaattttacggtgaactttcagggtggttgtccgcgctttgttcactttaatgctcagaatggtcaagtcactgtacccaactaa

SEQ ID NO: 56558 - DNA, 186 bp, Acinetobacter baumannii
atggatgaagcaacaatcaaaagtatggctgccgaattgactaaaggtctaaaaacaccagaagacttaaaccaaatgacagcagtctttaaaaaattcatgattgaaactgcactcaatactgaactttcagcccatctcggttatgaaaagcatcagcccactggctttagatattccccgtga

SEQ ID NO: 56559 - DNA, 468 bp, Acinetobacter baumannii
atgttactgagtcacagattgagcgtcccaaaaaaacaaagaaaattctatagcggtaaaaagaagaaacatacctttaaaacacaggtgatttttaatccaaagttaaatcagatcgtgagtatccaggtaagaagtggaagggttcatgatctaagcattgcccgtaaatatgctaaagaatttgctaattttacatgtgtcatggcagatttagcatataaaggctttaaagaaattaagagtaagctactcataccaataaagaaacctaaaaatatgaaattatccaaagaagccaagcggatcaataaggagataagtcgtcgtaggattccaattgagcatattaattcaaaactcaaagcatttcgtattctaggggagcgttatagaaataggcgtaaacgatttggtttaagaatgaatttaatagcgggaatggtgaattggatgctcataaattaa

SEQ ID NO: 56560 - DNA, 399 bp, Acinetobacter baumannii
atgaaatatgaaaatttgactaaatttaatgatggggaatttaaacggcttgttggagtccctcgcccattattcttaaaaatggtatcagtgttacaacacgctgagcttgccaagaaaaaatctggaagacctcattcgttgtgtttagaggatcaattgttgttaactttaaattacttacgctgttatagaacccaaattgagttatccgccgactataacctagctgaaagtaatgtgaatcgtacgattcagaaatttgaaaatgctctgattcaatcacggattttcgcattgccgaaaaggaatcaaaagtttaatgaggaggatgatgtaatcgttgatgttactgagtcacagattgagcgtcccaaaaaaacaaagaaaattctatag

SEQ ID NO: 56561 - DNA, 537 bp, Acinetobacter baumannii
gtgtccgaccccaacgggctgacatgggcagccaccctcgtgtcgcttgcggtcgccatttcggcggcagggcacgcggtcatctacaagcgtgacccgcgctcggccacgctgtgggtgctgctgatcgctctgttgccgctgggcggttcgctgttgtacttgctgttcggtattaaccgctaccagcggcaaccgcatcgacccgcgcgcctgcatgccgcgcatctgcgcaatcaccgcaagctgctggtgatcgatggcaagacgggtttcaccggcggcatgaacatcttcagcccgtattggcggcccgatgcgccggagcaggcctgtcacgatttgcactttcgtctgcgcgggccggtggttgcgcatctgatgcggtgcttcaccgacgattggtgcgataccacgggcgagcggctcaacgagggtttttggggcgaaccgcccgcaacggctgatgagcaaggaacctcttgggcgcgcggcatcgaggccggtcccgatgaggccctagaccggctgcgctag

SEQ ID NO: 56562 - DNA, 483 bp, Acinetobacter baumannii
atgggcgctttgagcgcggcgaagcattcggtgcgcatctggacaccttacttcgtccccgatcagtcgatgatcgcggcgctgagcacggccgcgttgcgcggcgtgcgtgtcgaggtgctgacacccgcgagctgcgaccatcccacggtgcaatgggctgcgcgcgcccactactggcaggtgatggagcacggtgtacgcatcttcgaacggcctggcccgttcgaccacagcaagctgatgctggtagacggagcgtggtgctgcctgggttcggccaattgggatgcgcgcagtttgcgcctcaacttcgagttcaatgtggaggtgtacgacaccgcgttgtctacgcggctgtcatccctttttgatgccgcccgtgatgcatcgaacgagatatcggccatggcgttgcgcgcccgcccgctggccatccgcttgcgcgacggggtggcccgtctgctcacccccattctctag

SEQ ID NO: 56563 - DNA, 312 bp, Acinetobacter baumannii
atgactaatgatcaattccatgcggtagtaagaaaccgtttatctgctccagattttgctcaaccccaaactgaatctggaatgaatatttttcgcgataaagctttagatcaaattaataaagctctcaaaaagataagtgaagcccgtacacgtgacggacttttaattgcacacacagaagcccatgcttttgttaatgcttcttatgattttgaggttattgatttaaaagaaaaacaatcttttgaaatgaaaatccgtcgtgcttatcgcactcaagttataagtgatagccatgatccagcataa

SEQ ID NO: 56564 - DNA, 426 bp, Acinetobacter baumannii
atgcatatttgcccattacattcgtatattaagcaaagccttaatgatcaagttgaagcttggttagcacaaggcaatgaaatcaaaaaactggctcatggtgaaagtggtcatgcctggtatttcaacaatcagccaatcagtgctcaatcaactttgcgtgaaatgatgaccaagtctattaaaaaccataaggctaaaaagtcagaaaagaaaagtagtaaacgagctactagagcgcagataaatgaattgatcaaatggcttgatcaaagcacaggccgcggcactctcttaactcaaaagttagaatgttccccttcatttatttcacaaattaaaaacttcactcgtccttgttctgccgagaactataaaaagatcaaggaagcaattttggaaattgaacaggatgaaaaaaaatga

SEQ ID NO: 56565 - DNA, 627 bp, Acinetobacter baumannii
atgagtttagataaagattctttaaaagccggagccgaattattagaagttgttattgatacctttattacacctgatggtttggttaaagatattccagttgttgggagtgttttttctttagcagaagcctgcagtacatttaggaacaaaagatttgcaaaaagggttgctggattcttaacaagtttttcgcctgaggaatttgaaaagtttaaaaaagctatagcagataaaaataatgaagatttaggtgaagaaatattaagcgtaatagagaatttagaaaaagaagtacaagtagatatgattgcacgtgccactaaaatgcatatagcactacttgaagaaggtcattcacaggcatctgttaaacatattttagatcacaatcttcatattattaagcagttagatagccatcttttagctggtcttcatgcaatctatggcagtcaaaactctgtgagaattgcttcggtagatcaagctttatataatttaggtttattgaagcaaactcaagaaattgcttatattggagctgaggttatgcctaatctatcatttgaatcatctattgaagggttatcattttataaaaaaattgtatgtggagaggaataa

SEQ ID NO: 56566 - DNA, 351 bp, Acinetobacter baumannii
ttgggtgttgtagcaccattcccaattcctgaagtcattagagacatcaatgcctatacacttgaggctcaatctgtaaatccaaaaattaagaccaagatagtctggattaacacttggttcgatccaggaaaagagcgtgaggctgcatttgcattgatctcacaaaatgctgatgtattatcacaagtcaccaactcccccgctgtagttcaagctgctcaggaaaaaggaaaatttgcctttggctggaactcagatatgggtaagtttgctcctaaaggtcacctagctgcatcagtgttatattgggaaaaaaatctatacccctgttttgcaacaagtgcataa

SEQ ID NO: 56567 - DNA, 879 bp, Acinetobacter baumannii
atgtttgattttacagaaatcttctgtgttattgatgatttttttaagaaatttgaacctatctattggcaatttctcaagcaggaaaataagcgtaaacgaattcgattagcaaccttatccctctctgaaattgtgacgattgcaatttgttataaaacatcgcaagtaaataattttaaaatatttttccaattgctttatcaatttgagagtaaattatttaagtctttgccttgctataaaaatatgctcagcctgattaaccaacatcagcttgcgattcatgcactacaccgtgctttaagcaaaggacaagcatgtcaatatctatggattgactcaacacctttacctgtttgtaaaaacaaaagaattcctagaggccaccatgctttggaggatattgcttctcgtggcaaaagttctatagactggttttatggttgcaaattacaccttctcatgaatagtgaaggacaaattgtgaaaacagttttatccactggacacattgcagacattataaaaatcgaagaattagttgatggcttattggcaactgtttatggagatagaggttatattggaaaatcaataaaaactaaattattagagcaagatattgatttaattacttatcctagaaagaatatgcgagtaagtctattgcctttttctgatgaataccacttgagacagcggaaaaaaattgaaacgttaattggcttattgaaagaaaaataccatttagtaagcagtaaacatcggactatttccggttttctagcaggcatattttcatctttatgtgcttatcaactctgtcagaagaataagccaaaaattcatgtcgttagaaatttagcttatccgtaa

SEQ ID NO: 56568 - DNA, 183 bp, Acinetobacter baumannii
atgcacatattggaaatcttttatatccaatgtgggggaatgcctgtgaaaaatatcaaaacattagttcttgcaatgagcactatcagcttaactggtgtagttataccagctcatgctgctactgatgcagaagtagatgctttacgcaaagaagttagtgagttaaagcaactggtctag

SEQ ID NO: 56569 - DNA, 138 bp, Acinetobacter baumannii
atgctgactacgtctaggcagacgatcaaccatgaattgagcctacttgaaaaacagaatattattaaaattgcttttagaaaaattgagattttagatattgaaaaactaaaagtaattgctcaagttcattcataa

SEQ ID NO: 56570 - DNA, 906 bp, Acinetobacter baumannii
atgaaatggaatttagacgatatccctgtttttcttgctatcattgagcgaggtggaatatcagcagcagccaattctttaggcatgcctaaatctacagtcagtacgaccttaacgcgattagagcaggatttaggtctccgcttaattgatcgctcttcacgtagtttgcgtattactgcagaaggagaggtcttttaccgtcaggctcagcaaattatggagcaggcggttgctacagatactcttatggcagatttaagtattgtggcaaagggccatttgaaagttgcgttaccacctgcatttagtgaagaatttgttgcaccacatttattgtatttccatcagcaacatcctgaaattgacttagaaattgttattacaagccaaggtgcagcattagcgcgtgatcaggttgatattgccgttgttgttggtgagctagaagatagcgatttggtttccttacccttagttcgtggggagttaatttgggtgagcagccctgaatggcttgctaaaaatagattgcctgaaacattaagtgaattgagtgaattggttaaaatttgtgaaacccgatatgcattgcgccgtttaccagtctatttcgaccaggacatacattatctagacttatcgtatgggatcatacgggtcaatcacccgcttattgtgcgtagaatgctcatgttaggtggagggatttcaatgttgccacagcattattgtgtcaaagaattggctgaaaaaagtttgattcaaattttaccttattttaaactcaaactatcaagctctcaattgactgcaatttattcaagccgacgtttaatatctccacgagtacgagtctttttagaatttttaaagaatatttgtaaagactcaagtttaaattaa

SEQ ID NO: 56571 - DNA, 1284 bp, Acinetobacter baumannii
atggcacgtattattggcggcatcggagcctcacactctccaactattggctttgcaaaagatacgggtaaacatcaagatcctgcttggaaacctatttttgaaggttttgacgttatccgtaattgggtaaatgaaaagaaaattgatgttttatttaccatttacaatgaccatgttacctcattcttttttgatcattattccgcatttacccttggtattgatgacctgtatgttgctgcggatgaaggtggtggtccgcgtgctgtggctcctgcgcatggacatttaggcttatcacaacatattgcaaaagctttggttgcagatgaatttgatatgtctttctttcaaggcaaagcggtcgatcatggttttttatcgccactttctatgcttggtgatgagcaaggtccatggtcgggtcaagtggttccactacaagtcggtgtgttgcaatttcctattccaagtgccaagcgtatgtggaaaatgggcaaaaccttgcgtaaagcgattgaaagttatcctgaagatttaaatgtcgcaatcatggcaactggcgggctttctcatcaggtacacggcgaacgtgcaggatttctgaacgaagaatgggatgctgaattccttgacctgttagaaaaacaacctgaaaaattagccaatatgcgtattgctgaatttgctgaaaaaggtggttgggaaggtgcggaagtagtgatgtggctgattatgcgtggtgcattatcagacaatgtcaaactgattcacaaacaaaactatgcgccatcggtcaccaatattgccacgctagtgtttgaagatttaggtgaagcggcaacaccagatgaaattgaggcgtatcgtcagcatttggactatgaattacaaggggctgaactgcttaaagggacttatcctctaacgcatgcagtgagccatgccaatttacgcattaatgccttcttacatgatttggtgcttccgcaacatcgttcacgatttttaaccgacttcgaagcccttgccaatgagcgcggcttagacgatgaagagaaaaatctgattcgtgaacgaaaatggattgaaatgattcgtagaggtgtgagtttctttgttttagagaaaatggcagctgtgttaggcgtaccgaacccgcaagtctatgcatcattccgtggagaaactctggaacagttcttggcaacgcgtaaagttccaattacatattcagttgcgggtggtgcacaagcaaaagcaatggataaagctgaataa

SEQ ID NO: 56572 - DNA, 1599 bp, Acinetobacter baumannii
atgatgaaaaagttcaaaataaaacctcttatatggggaatcttcagtattgcattgagctctgcaacgctaatacatgcagaaacacaaccaatttctttgaaatttgatcagcagaatttcacaatcaaaacaatcaatgtgaatggttctacacttaaagtacatgcctatgaaggcattacttatgttgccaatcctgttgataaaaaatatcaaagcatcaatatttatattcctgaagcctattttgagggccaatccatcaatggctataatgcccaaaatgcgcctatttttctgccaaatcaggtgggcgggtatatgccagcagaacccggcacgttggagggaagacgcccactgatgatgaaaaatccaaatggggcagccccatcggatttacctaaagggaaaccacctgaagggatgtctggaatggatcaatctcaaaagcagcaacgtcccaacacgattgtcagtgctctagcgcatggttatgtagtcgcttcacctggagcacgtggtcgcacattgcaaaatgcccaaggacaatatacaggtaaagcaccggctgcaattgtggacttaaaggctgctgttcgttatctcaagttgaacgattctataatgccgggtgatgccaacaagattatttcaaatggtaccagtgcaggaggagcactttctgtattactcggagctacgggggatgctaaagattatgaaccgtatctcaaacaattaggggctgctcaaaatagcgacaaaatatttgcaagttccgcttatgcggctattaccaatctagagcatgcagatgctgcttacgaatggcaattggcgaatgtacatcagtataaaaaaattgatatcagcatgttggattataaagttcaacgcaaagagcaagcagggactttaacagccaatcaaattcaggtatctcaagatttaaaacaattgttccctacgtacttaaacagtttaaagctaaaaaataagcaagggcaattactgcaacttgatgcaaagggcaatggtagctttaaagactatattcaatcgctgttgattcaatctgcacagaccgccttggatcaaggtgaagatttaagctcgttgaagtggcttacaattgaaaataaaaaaatcgccaaaattgactatgatgcttatctgcaatatttaggacgacaaaaattaccaccagcttttgatgccttagatttatcatcgggtgaaaatgatgagtttggaacagcaagcatcgctgcgcaacatttcacggcatatgcactgcaacatcgaactcaaacagatagcacgatggcagatcctaaaattattgccatgatgaaccccatgcactatatcgggactcatcaagcgagtactgccaaatattggcgaattcgacagggcacactggataaggatacgagttttgccattccagcaatgctagcaaccagccttgcgaatcaaggcaattcagtggatttctctctggcttggaatcaacctcatgctggagactatgacctgaatgagttatttaactggatagatcaaattgcacatccatctatgccataa

SEQ ID NO: 56573 - DNA, 1080 bp, Acinetobacter baumannii
atgcaaacaaaaatacggtgcatgctcatgcggggaggaacctcaaaaggcgcatattttctcgcatctgatttgccacaagatcctgtattacgcgatcaagtgttgctagctgtaatgggatcacccgatgttcgtcaaattgatgggattggtggaggagactctctcaccagcaagatcgccatcattggtgtatcggacagcaccgaagcagacatccactatctgtttgcacaagtgaatgttgatcaagccattgtggattatggacagaactgcggcaatattttggctggagtagcaccgtttgctttagagcgtggtttgattgaagcaaaagacccgattaccacggttcgggtctttatgcaaaatacacaacaagtagcagaagtattggtgcagactccaaatgctgaaatagagtatgaaggtgataccgcgattgatggcgttccacatacggctgctgaaattgttttaaattttgaaaatattgaaggttcaacttgtggtcgcttactgccaacgggacaggcacaagacatcatttgtgatacgccagtcacctgtattgactatggcatgcctgtcgtcctgattcgtgcatgtgatcttggtattcaaggtaatgaaagcaatcaggaattggatagcaatattcaattgaagcaacgcattgaatccattcgtttgattgcgggtcagaaaatgaatttgggagatgtccgcttaaagaccattcctaaaatttcaattgtttccaaagcattatcgggtggtgctattaatactcgcaccttcattccgcataaatgtcatgctgcgattggcgtgtttggtgcaaccagtgttgccacagcatgcttgattgaaggaactgtagctgctgatgttgcccaaaccacaaacgagcttgagcaaagactcgagattgagcatccaacagggcgttttacggtattaatacaacgcgatcctcaatatcaaattatgggttgtggttttattcgaacggcacgtgcgttatttgatggctacgtgatgattcctaaaacggtttggtcgaatcgttga

SEQ ID NO: 56574 - DNA, 714 bp, Acinetobacter baumannii
gtgagcttaattgggcgtaaaggcgtagtcgttcgtaatattgaccgtgcagatttcgataccgtcaaaacattagcaacttatggtgttgcaaccgtacacgaagcgcaagggcgtaaaggtttgcttgcaccccgtattcgaccaattcagcaaggcgtatctattgctgggtcagccgtgacactatctgttgcgccaggcgataactggatgttccatgttgcggtcgaacaatgccaacctggcgatattattgttgtcgcaccaacttcgccatgtagcgacggattctttggtgacttgctcgcaacctcgatgcaagcacgtggtgtggtgggcttggttggagatattggcatacgtgatagccaagtcttacgcgatatgggctttcatgtgtggtcaagtgcagtctattcacaaggtacggtaaaagaaacgctcggctctgtgaatgtcccaattgtctgtgccgatcaattgattaacccaggtgatgcaattgttgccgatgatgatggtgttgttgttgtcgcacgtacacaagtggctaaaatccatgaactgagccaaaagcgcatggatttggaagaatcaaaacgagtccgtatggcaaatggtgaactgggcttggatatttatgaaatgcgcccgagattggaagaaaaagggctgatttatgtagaccgtttggaagatttggaagattaa

SEQ ID NO: 56575 - DNA, 1236 bp, Acinetobacter baumannii
atgtgccagaacacgcataatcttattaatttaatgcaactaaaattcttcttggtcgttgctgaatttcaaaatatatctaaagctgcagaacatctttttcgtacacaatccgcgattacccgtgcaattggcgatttggaaaagcaattgaatgtggaactttttgaacgtcatcacaatggcgtgatcttaacggagattggaaaatttctgcatacaccaattaaaaatgcgattgaggaattacagcgtattcctgaattggtctatgcatataatcaacccgatatgcctcaacatgcacaaataaatgagccgttttttttatacaatacaagacgtttagagattttctcgacgctctatctaaccaaaggtatgaaaaataccgcctcattgctgcatatcacacaaccagcagtcagttccgcgattaaattactcgaagatgccttaaataccgaattgtttattcgtacacccaacgggattaaagcgactgcaatctgcaatgacatacaacaaaacatcaaacgctgtttaaatatcattcatgaccttcccaatcaaacagcaaattttattggtaaacttcaaggtactgttcgtattggggctttaccgttaataagaacttttctgctgcccaaagccattacttcactggcaagcaaatatccagccgtccgctttctaacttttgaaaatgcctatgaatctttggtggcacagttgcgctctggtgatatcgactttattgtcggggccttacgtccacaacagcaatcttcagatttagagtcacaggttttattcgatgaaaagatgtttatggttgtgcggaacaaacatcccttattgaaaaaagagatacagttcgaagacttactacaacagcaatggattctaccgcgtgcaaattcacctgctcgtctactcatggaagataattttcgcaatctaaatttgactccgcctgaaccaactgtagaaacaggagatttggcactgactcgaggtctactgctacaatccaatatgattgcggtagtatctgaacagcaaatgaaatacgaattggatcaaggcttaatcaagaaactcccttttgatctgcaatatacctcacgtcaaattggcattatttcccgaaaaaatagtattcaatccgcagccagtaaagccctgattgaaagtattcaaaatgtttgtgtttccacagagcttcattaa

SEQ ID NO: 56576 - DNA, 1341 bp, Acinetobacter baumannii
atggatatattcaacgaattaaagacaaaacccatgaatggttaccgctggtcactggtggcactctgtattttgttaaacatcgtcgatggctacgatgttcaggtcatgtcttttacggcaacttctgtgtctaaggaatgggcactttcaggatcatttttaggtattttgatcagtcttggtcttcttggcatggcctttggttcattatttattgcaccgattgccgacaaagttggtcgccgtaccatcattttgtcctgtttgttactttctggtctgaccatgctggtcagtagccaagtcgctagtccttatcaacttggtttcttacgttttgttactggcttgggtattggcggattacttaccaatggtgcagtaatggcaaatgaattttctacaccacgttggaagaatctgtctgtcgcactcctttccacagggtatgcattaggtgcagttttaggcggtatgattgccttccgcttaattggtaccacgggttggcgtagcgtctttatgtacggcggcatctttacgctttctgttctcgttctggtatattttgtcttacctgaatcagttgaatatcaattgattaaacgcaagccagattcactcgacaaggtcaataaaacgcttgcgaagtttaagatcagtacgattaaagcctttccagcagctcaagaaattcaagcaggaaaagtgtctatctctagtttatttaaaggtcaattaaaagcccgtacattgtttgtctggatcgcattcttctcggtcatggcaggtcagtactttatcttaacgtggacacctaaactgttgtctatggcgggtatgtctccagagcaaggggtaagtttagggatcattttaaattttggcggtattttcggtgcaatcatgatggcaatcctgactgtacgtttcaaaattcactatgtcttgtcttcattctttgcccttacggcagtgtgtattggtattttcgtgatcaattcggggaactatatgcacgcaatgtgggtggctgtattcgtgggtgtattcaacaatggctgtgttgcgggtatgtacgcactggcgaatagcacctatgacacagaaatccgtgctactggcgtaggctctgccattacgatgggtcgtttagggggtattttatctccgcttggcgcagggtatttgcttgatgcaggcgtggcgccgctgcatctatataactttgacgccgtactctttgcgattggctgtgtggtggtcatcagtatgtatctggtcatgaaaaaacaaaccacacctactcaattagacaaagtacaacaaccatcttaa

SEQ ID NO: 56577 - DNA, 1245 bp, Acinetobacter baumannii
atgaacatgttacacctctccgcttcaaaaaaatcagtactgtttttttcttgtatttctatttttagttcaagtatttatgccaatgagccttggtctcaagaccgtcaatggttatttggtgattggggtggaaatcgtcagcaactcgaagatcaaggttataagtttaatttgtctttgatgaaccaaacggcgactctaatcgatggtggcaaaacagatagtcatcctacccgtaatgctgaccaaattactttgggtgctaattttgacttgaataaaattgcgggttggaaagatacaacagcagcgattactgtgaccaagcgtgatggtcgaaacttagccagtgatattgggatgaaaggtagtcctactgaaatttatggtcgtggcacaatttggcgcttaacacaggcttgggtaaaaacaggctttatggacaacaccctgcaagtgaaacttggtcgaatgggcatggccgaagatttcaacagctcgcattgtgaattccaaagcttgattttatgtggcggacaaataggcaaggctcagggcgatgtttggtataacggtcctgtaagtggctgggcagccaatatgaaatacaaactttcgcctgaatggacagttggtgctggggtctatgaaaataaccctgaaaatactgaagaaaaggataatgcaaactttaatttgagtactgatcaggcaaaaggtgtgctcattccagttgaattggcgtggaaaaccaagaaaataaatcagttaacgggtgaatataaacttggtggattctggagcagtgaagactatgcaacaattgatggttcagacgggaaagatcctaagtctggcatctggttgaatgcacagcagcaactcactgcccgtgcagaaaactctaaccgtggtttatacggcactgtcaacttaacctttaacaatgactcaacagcctcaatttccgacacgcaacaagttgcgttctggtataagggtgcatttgatgctcgtcctatggatcagattggttttggtgtggggcgttataaatttaatgacaaagttgctgctaacagcaaccgcgattatgaaattgataccgagttgaattatacctataactactcacctgccgttatgattcgcccgaacctgcaatatgtgtatcaaccttatggttcaaaagagattgatgatgcttgggttgctggggtgagtgttaaactcaatttctaa

SEQ ID NO: 56578 - DNA, 2208 bp, Acinetobacter baumannii
atggttggaaaaactgataatcaagctccttgtcaatcttctgaactttggagccaggataaaaattgggatataaccccagaattatctactaatgagagaaaggctttagctgattatgctagatgccttgctctggggaaaaagggatatcatacggttcaagtccgaagagagctcacacgcttaattatcccactcaaaactgcattgaaatggatgaatgctgcacgtaccccttctgattctgtaatacataatattcttattgaaatgcattgcttaaataagccgtattggttatggactgaagatcaatgggtaggttttttttgcccaagtgagggggaatttcatattaaatttggtgcctccggcaattgtaggcaatatgctattgccttggcttggttgctttgtgattttgggcgactcgaattaatagggcgtttttttcaatatcggttatgtctgaaagtatttggtaaagaagttacagataaggcgatcaaaagaattcaagatagtatgaaaagatggggatacaatttagagcatgatcgcaatttaatccgaaatgctttatgtatggttatgctttgtcagagagagtcagatcctgaaaaattaaaaattgaaactttcaagagggtcattgaaatcggtcctgcttatatgcggacgacagtagcaagtttgtctagaatactgtcagatatgaatattttacctaaaggtatagatcatcgaattgataacaggaggcgtcctaatcaagaatatcgagcgattacaaatgttccagaagagtggttaatgtggtgtcaaaaatggaatgagttgactattagatctccatcttcacaaataagtatgtggtatagaatacttcagtgtggtagatggttagctgttactcatccagacatgacttcccccgcaaattggagtcgagaaattgcaattgaatatacagcagaagtatctaagttagtaattggtaaatggtctgatcctagatccatgtataaagaaaaacatgggaatttgatgaagccttctgctcgtgctgctgttttgcaatcggtaagaatattttttcgagatctgcaagaatggggattaatacctgtaaattttaatccagatagggtatttcaattacctcggagtattcgttcgaaaataggcccagatccaagagtagtgccagatgatatctggtctaaattagtctgggctggtatcaaccttaaaccagaagattttaaatacggaaaacaactttattatcgttatccatttaatcttgcaaaaacagtatgtattttctggctatttagtggactccgattagatgagattattcgaatgcgagtaggatgtatacactgggtcgatggaaaagaaaaaaacgatcataaaatatgcatacttcatgtgccaattaataaaacatcaaaagcttttaataaaccagttgattctataatcggcgagtatgttgaaatttgggaaaaagagcgtggagtccaacctcaaaaacatgaagaaaaaacaggagaaatagttaattatctttttatgtacaaaggtaatcgaataagccgtggatatattaataattcaattattcctttgttgtgcagaaaagcaggagttcctttagaggatgctagaggaccaattactagtcaccgtgctagagctacaattgcaagtcaattatttaactcaaaagaatcaattagtatatttgaattacaacagtggcttgggcatacatctcctcaaacaactcaacattatttaaatattactccaactaaattagcaggctctttattaaaagctggttactttgagcgtaatcgacgcatgatttctgtactcattgatcaagatatagtgaaggctggtactaatgtgagtggagaggcttggcgttattatgatcttggacatggtttgtgttcttatgatttttttgagcaatgtccacatcgtatggcttgcgctaaatgttcattttatgtgcctaaagaatcatcaaaagcacaaactattgaagctaaaagtaatttaatgagaatgctacaagaaattccattaactgatacggaacgagctgcggttgaggatggagtgcaagctatggataagctaataaaagaattgaaaaaagtacctacaccagataaaagttaa

SEQ ID NO: 56579 - DNA, 981 bp, Acinetobacter baumannii
atgcgtatatcaataattccgtcattaccctatctttttgctgaaccaactgcattgagttggatttctttgcaagaaaacttacttcgagctcctaacacagtagaagcttatgcgagaggactaaataattggcttgaattttgcgcaaacaataatttctcatttcttgatataaatcggcagataatagctttatacattcgttatctaaattcagtacatagagtggctaactcaactcttcgtcatagaattactattatccgtctttattacgattatctttatgaagaaagtattgttgaacgaaatcctatttatcgtggtagttggaaaaatggtggtggtggaaagagagggctcataagtgtacaaaaaactctaccttggataccaaatgattatgagtgggaaaatctattagttgcagcaagaaaaacatctattcgtaatcgttttatgatggcattagcttatgattgtgcacttaggcgtgaagagttgtgctctataaccacttcagatatcgatccttctcatcgattattaacaattaggggagagaatactaaaaataaatatgggagagtcgtaccttattctgttgtcactggagaattatatatttcttggttacttgagcggagaaaattaagccatgcaagagggcaattatttttatcgagttcatcaagaaataaagctgaaggtttaactcgatggtcttggtcaaaagtagtacgtaaattagctatagaagctaatttaccgaaacttagtacacatacctttaggcatctctgtttaacagatcttgctagagctggttgggatattcatgaaatagctaattttgctggacaccgtaatattcagtccaccattctttatattcatttaagtgcccgagatttgactgaaaaatttcaaaatagtattgaagcattacatcagtcccgtttacagagtctttattag

SEQ ID NO: 56580 - DNA, 783 bp, Acinetobacter baumannii
gtgcaaaatccgacaccagaaaaaacaaatttctataggtcttgggtattttgggccgtgatttatggcttactaattttggcgtataacttggcgtttattttcctagatcctgaaaagaaagttcttctgacttcaaatgagttgggagattttttagctggtgtttttgcacctctagcattcttatttttatacttagggtataaacaacaaggccgagaacttcagcaaaatacacaagccttaaatcttcaagctaaagaattacaaaatagtgttgaacaacaaagagaattagttcaggccacaaaagaagagatagagttaaataaaagcgagatagagcatcaaagaagaatccaacatgtccaagcgcagccattttttcattttaaaaattgctttattacccatgatgattcgaaaaagtgtttcacattaatgttcaccttatataacagtagagcaacttgtcgagaacttgatatattggttatcaacacgtcagaagagcatgtagcggaacccgttctcatatatcctagatatgatttaatactgggaaataatgaaaagaattatatctttcaaccaaaatatttaccccaaggattaaaatttaacagcaatggcgctctcattttagaacttaagttaaaatactacgatgcggttgataatgaacaacaacaaactataaagtttgttcttccacctaaaagaagaacagatgaggttatgatttttagagatagaactaataacaccccacatcattaa

SEQ ID NO: 56581 - DNA, 348 bp, Acinetobacter baumannii
atgagttatccaatacattttagaaacaaaatattagccaagcttgaagaaggccaatctattcgagcggttgctcagcacttcgaaattgataaaaatacaattgtcgaatggaaaaagcgaatcgaaataaaaagaactcgaccaagaaaaccatctaaagttgatgatgatgccttacgtgcagatgttgaacaatatcctgatgattatcaatatgagcgcactgctcgttttggttgtggtacttctacaattggagatgcgctcaagcgtctaaatatcacagttaaaaaaagaccttactgcacccgaaagcaaaaacagaactcagagagcagtatttaa

SEQ ID NO: 56582 - DNA, 489 bp, Acinetobacter baumannii
atgaaggaaaagcaaccggacccgatcaaaacatttcgtgcccaatgggcagtgatgacgttctacgagcgcttcgaacaggtgatcgcgctcgcgctgtccgcaatcattgccgtgatcatcgtggtctcgctgctgcagctgatctcgatcgtcttcagcctgctggtcatcgatgcgttcaatccgctcgatcacaaggtcttccagatcgtgttcggcatgatcatgacgctgctcatcgccatggagttcaagcattccatcgtgcgggtggccttgcgccgcgatagcatcatccaggtcaagacggtgatcctgatcgggctgatcgccctggcgcgcaagttcgtgatcctcgacccggagaccagccccgccaagatcgcggcgctcgcaggcgcgacgctggccctcggggcgacttactggctgctgcgcgagcgcgatgaccgggccgccggggaaagcccaaatgagccatcgtga

SEQ ID NO: 56583 - DNA, 828 bp, Acinetobacter baumannii
atgagccatcgtgatcggcgccacgcgcaggctgccgcggggttcaccctgctgctcgaaccggcggcggcttccgggctgaccctgcggctgtatggcgcacgccctctgcacccgaatgaagcgcccgatctttgggctgtgttgcgcgaactggcggcgcgggccgggttgcctgccgtgccggtaccgcactacgtgcccagcggggtcgtcaacgccttcgccaccggtacgaagcatcacgcggccatcgcgctgaccgacggtctgctgcgtagcctcacgccccgcgagttgaccggcgtgctcggccacgaaatcgcgcatattgcgaacgaggatttgcgtgtcatgggcctggccgattccatcagccggctcacccatcttctggccttgttggggcaaatcatgctccttttcagcctgccggccttgctgtggggcacagtcgctatccagtggccggcgctgctgttgctggccgtttcgccgcagctcgcgctgctggcgcaactgggtttgtcgcgggtgcgcgaattcgacgccgaccggctcgccgccgaattgaccggcgacccacagggattggctttggcgctcgccaagatcgagcgggagagtcgcgcctggctgctgcccggatggggcaagccggaaccctcctggttgcgcacgcatccggcgacgacagagcgcatccaacgcttgcgggaattggctgattcgatggcaccgcaaccgcttcattccagcccatttctgccggacatccccttggcgccacgcccaccgcgttggcgcgccagcggtgtctggcgctga

SEQ ID NO: 56584 - DNA, 1017 bp, Acinetobacter baumannii
ttgaaatttacagcggtaggagatattgatcagtcaatttacagatggcgtgatgctattcctgaaaatttaacttcgcttgtaaatgagcacgattttaaagaatatgctattgatcaaaaccatagatgtgacccatctattgatttatatgctagagcttttttaaaaggtatagatctagaagaaattgataaaaaaaacatatttggattgcatataaataattcaggaaaacatagatacgctaagttagatgattttatacaaaaaattaaagatgagaataattttgatttttcagattttgtgatattagcagctaataatgcaacggttcagcattatgctttgaatacgcgtcatagttatagaatttacgaagatgatcctcttgatagtatgaatcattatattgcacagttatgttctgatttgattttatataaattttgtaagaattattcaagttactcaatatatgagaattataagtctaggtttattaacattaaattaaatgattttaaggttgaagttaaaaaaataagaactgaaaatgatactgatgaaatttgtgaaataattaaaggcttaattaataaaactaattataaaggtgattgtgaaaattttattttggcaacaaaaaatatttttaatgatgaattcttgttgaaaaaatataaaccacataataaaaatgaattacaaataatgtcaattcataagtcaaaaggtttggagtttaaagttgttatccaccttggtttggaacaatgggtattgccacgtaaaacaaagaaacaaggtcaatggacttttagcgatttagaaggggataaaaatttacactatgttgcgatcacacgagctgaaaatctatgctatttagtagatatgcctataagagtaaaatcagaaaataacgtgtttaaagagatgaatgcaaataaatctgaattcctatgtattgaaagattgaacaagcatattgttgatctaggagttatgtag

SEQ ID NO: 56585 - DNA, 204 bp, Acinetobacter baumannii
atgctccctaaaacaacattttacagacagatttcagaattatgtgaatgcggtttttctaaagcgtatttacagaacttgcatgacaacaagtcatcaaatgtcattcctttcatgaagctcgtagaaatcgacttttcacagcagttgccagactggtatgaaccgccagtttcgcaatttaactatttaaaacttgcatag

SEQ ID NO: 56586 - DNA, 405 bp, Acinetobacter baumannii
atgaaaaacttaataaaaggaattgccctgactacttttgctgtattgcttacagcttgttctaaaccagatatttcaggtgtctggattcctgaaaatgtttcaaaagatagtgttttttattcttactacgttattaaaaaaattgaagattcagatagattttcagttgagcaacataaattcaggattaaaaagcctaatcctattttgccaattgaactccctgaaaaaatatcagatacccaaaaggtcctcgagtttgcacaagataatacttactgtgtcgaaggttcaatgaaaacagaatgtttcattgcagttggtgacaagcttgatgtgtataaaggagttcgacttaaaaaaacctctacttttcctcctcaaattccagttaatgaataa

SEQ ID NO: 56587 - DNA, 1092 bp, Acinetobacter baumannii
atgaaaaagcttatctatattttactgattttatttagttttctgggaattaattcagcttatgcagctgataattacacgccagggcaagaccttggaaatcctgatggatctatcacgataccgaatgctcccagtccagataagggaaatgcaatttatcaggaaatgagtaaggtcactgaacaggggatgggattacttggaaaatttgttgatgaaattcaaagtaatgtcgatcagaatctcaaatctagcctacaaacttattatcaaaaaattacagcgccaattttgcccgtttttgctggatttattgtgatctggctgacctttcaaggctttcaaatgatgctcggtagagctattgcttttgatgatgtcatagcaaactttatcattatgctactgatctggtcgattgtcttttcttgggatgcgttctatccatatattgctgaagtgttccttgaagatattcctaatttgatcagtgaaatgactggaactgatgcccaatcgactcttggagcttttgtaacgattgtatttgatgtgattgccaaatcaatggaaaaagttgatatgggaattagtaatgttgtgtccggtttgttctttgttggcgtgtatttaaccctcctattattggcatgtgtgctatgtggaattttcttcctgatctgggttatctgcaaaatgattatcgcgattttaatagcagtcgcaccaatttttattgcagcagccatgttccccgcaactcgtagatttgctaccaactggttacatgcagtactgacaccaaacgttattgttttactgatgattgtgacatgtgatttggtactaagtggcatcacaactgcctatacatcagttgtcggaaaagatagtggttctagttttgttattgcctttatcttacaaattgcgcttgtaattgttgttggattattcttagccattcctagaattgcgatctctcttgttggcagtggatttgaagcttcaagttcaggaatgcagggaattatgaataaaggtagttcaggattaaaatcagggttaaaaaagattttttctaaataa

SEQ ID NO: 56588 - DNA, 195 bp, Acinetobacter baumannii
atgagtaatacacaaacctacggaaataatagtggtgttgaactatttctagttattgttggaatagtgatggttgcttgcctttttgcaatatggaaagcaacgaagtcattaggattagatatgtggacaggcgtacatactgttgggtatctaattgcatggcttaccgtagtgatcggtatttataaatag

SEQ ID NO: 56589 - DNA, 2877 bp, Acinetobacter baumannii
atggcgaactatcatttatcagttaaaaccggtaaaaacgtaggttcttcgggaagtcgaggggtaagccattacgcctatattaatcgtgaaggtaagtataaaagagacgatatcgagcaaatcgaatcaggtaacttgccatcatgggcagtagacgcccagcatttttggaaagcagcagataaatatgaacgtgccaatggccgggtctatactgaattagaaatctctttgcccagagaattaaaccaagaacaaagacaagaactggttcagcaatttgtagaaaagactttaggcaaaaattttacgtattcttatgcaattcatacacctttagccagtgatggtgaacaaaatccacacgtacatctgatgttctgtgaacgaaaattggatggtattgatcgtacagaacagcaatttttcagacgttacaatcctaagaatcctgaattaggtggtgcagggaaagaccgctacttctcagcaagaatattcgtttcggatgtccggatggaatgggcaaaccatgccaacgactatatggaaaaattgggattagatgcccgaatcgaccaccgtagttatcaagctattggtaccgagatccagagccaaaacttcagggctgattacgttagtcatgatcagtacagtattaacgaaaacattaaaaacattaagcatcaaaatggtgaaaccattattgagaaaccgagtgaagtgttgaaagtgctcacgaccactcagtctgtttttaccatgcgtgaactcgatagattcttggttaatcatactgatggtgaggaacaatatttaaaagcccgtgaagctgttttgacgtgccctgaaatggcagttttatatggtaaagacagtgttgttttatcttcaaatgaactggttggaattgaggaatctatatcaacactgatctacaatgcgaaccaagacagccggatacaaaaaccaagaacactcattgataaattgccattaaatgcagttcgggttgctgagacacgaacgtttaatccagagcaggaaaaggcattttatacactaacttcgacagaccggatcagtttattgaatggttcagcaggtacaggaaaatcctatgtattgagtgctgtatctgaagcttataaggattctgattatcaagtttatggtattgcacttcaggccatcacagcaaaagcgattgcttcagattgtgatattccgagcagtacgattgccagtttcttggctcgatatgaaagtggaaatatagcaattaatgataagactgtattgattctggatgaagccggtatggtcggttccagagatatgcaaaaactattgatgattactgaacagcacaacgcccaacttaaattagtgggtgatagctaccagttaaatgcagttatggccggttcagcgtttaatcatatccagaaaaacctagaccataaaaatatagcgaccctagagaatattcagcgtcaaaaaaccactgaaatgcgtaaagcttcagaatatttatctaagcatgaagttgataaggctttagatatttatcaggctttaggcaaggtcaaagcatgtgaatcccatgaggttgccttagccagaacaattcattcatggtctcttgatcacagtgaaagtaacctgatacttgctcactcaaatcgggacgtggacgaattaaacagaatggcccgttccgtcctgatcaagcaaggtaaactccctgcagaaagccaaaaggtaaatacttataagggtgaaatcgaacttgcgactggagacaagatcgtattcaaacagaataaccatgctttaaacatctccaatggtgaaacagccagaattattggctttgagcgtaatgcccaacagcagattaaaggcctgatggttgagtcagatcggggcggccagatcaagaaaattgatttagatagctatcagcattttaagcatggttatgcaaatacaatccattcctcacaaggaatgaccgtagagaatgcctatattcttgccagtgagaatatgaatgccaatctgacctatgtagctttgacccgtcataaaggcaatgtggaactgaattacagcgcgactaaattcaatcaggaagaaaaaatctgggttagaaagcctgatggccaatatcaggaaaaagaactgtcagcattcgataacctgaagcgaacattaggccgtacagaagttaaaaatttctctactgattattcggtggttcaggctaaagatgaattaattaaaaactatcttcaggaacaccggcacagcatttcagagaagcgtgaaatctataatctcaatagcacgtttaaggcaatgactatgccagatcaacatttcagcaaacaagaggttattgaggaagtccgaaatagcctaagaagtaaggccattttaggggatgaaattgttaaatttaatggtcaaatgaatattgccaaaggtgaacagctccagttagaccaggaactcattttaaagaccggtttattcaaaaaagagcactttgaaaaagatacttcgcttcaggtcatagatgcttatagggttaaagacgaaccaattatgaaagctcgaattaagggggagatttacgaaatcccgtttaataagctgcatatccgttattcagacaaatatttgacagagttcaggcaagatacgtcagcgcgttttgataaacgctttaagagcgaactacacagtaagtttaaccatcagctacaacagcaaagacagaatcagccctcacaaaatttaaatgcaccaaacagtgagctgaagaattctccacatatgaaaaatggtccaaggatgagttag

SEQ ID NO: 56590 - DNA, 213 bp, Acinetobacter baumannii
atgaaaatagaggaactggatgatcaggaattatatgagctagcacagtctgttattggctgccggattagcctaagaagttcaggaaaggttcctgaagatgatcgagaggatctcgcgttgcaactacaatcattgttcgagttgaatcgagctgagttaattcagactattcaaattcatagttataaatatagaaaagaaaaattataa

SEQ ID NO: 56591 - DNA, 483 bp, Acinetobacter baumannii
atgagcgattatcgtgttgatactcaggtcaattttgatgagatgaataatcgcgttaggtttgaaataagacgcacgattaacgctcttactttacgcttacagcggattgttcaggaagacatgttaagtggccaacgacttaaagttcagtcaggccgcttgcgtggatctgtttcatcaaaggtggatgaggataacgattccattgagggaaccgtaggtgctggtggtgcattggtaccttatgcctttgctcatgagtttggtctaaatggagctttgggtgttaaagcccatttaagaactattaagcaggcttttggccgacctatatcaccggttcaggtcaatattaaggcccattcaaggaatgttcgttttagagaattgcgtttcatgcgtgattcgctggatatcgtggccaagattgtgccgaaaaatattgatgcagcaattgaacgaggtattgcaggtggatag

SEQ ID NO: 56592 - DNA, 1542 bp, Acinetobacter baumannii
atgaatagaaaaacggattttactcaatctttggatgcagaagttcttattattggcgctgggattgctggtatcagcgcagcctaccatttaaagaaatatagacctaattcaacctttactattcttgaaggtcgtgatgatattggcggcacttggagtctatttcgctatccagggattcgctcagattcagatatgcagtcttttgcctttggctttaagccatggacgcaaaaaaagactttcggtagcgcacaaatgatctgtgattatttgcatgaaactgttacagaaaatggtattgaccaatatattcaatttggcagctatgtaaccagtgcagaattctcatcgaatgaaggaatctggaccgttaaagtcaaacagaaagatcaaaaaagtttagttaccttacgttctcgcttcttactcatgggtacaggttattatgactataacaatggatatacccctgactttaaggacacagaagaattcaaaggacaaattgtccacccacaacattggccggaaaatctagattattcaggtaaaaaagtagtcgtcattggtagtggtgctacagcagtgacattaattccagctatggcaaaagacgttgagcatattactatgcttcaaagatcacctggctatgtagttgctatgccgagtgtcgatcctattgcagttgctttaaatacagttttatcaccgcaacgagcgtatgaaattatacgacgtaaaaatattgccattagccgcgggatttacaaactatgccaccgctttccaaaggtaatgcgtcatctactcattgcagatgtacggcgcagattacctaaagattttgatgtatcaacgcatttctcacccaaatataatccttgggatgagcgtttgtgtgtggtacctgatggagatatgtttaaagcaatttcgtcgggtaaagcttctgttgtgacagatcatattgaccgctttactaaagatggaatcttattgaagtcaggaaaaacacttgaagcagatattattattaccgcaaccggcttaaacatgctggcatttagtaagattcaactcaccgttgacagtaagaaaattaattatccagacacgacaatatttaaatctatgatgctgtcagatatacctaattttgcctttgcatttggttataccaatattgcatggaccttaaaagtagatctggtatggcaacatttctgtcgtctgcttgactatatggatgagaataaatacggaacatttacaccggttatttataataaaaccatgaaacgggttccttttgttgatttgagcccaggttatgttcaacgtggtttggcacaattcccaatggcaggaaccgaaggtccttggacactacaacatgattataaggttgactttgagcggctcaataaaggacctgtgtgtgataaggaattaaagttcactgcattggttcccaagaaaaagttagctgtcgttacggaaccatcttcagaagaattgatggttaaagcttaa

SEQ ID NO: 56593 - DNA, 156 bp, Acinetobacter baumannii
atgattaagttaacagtgtttttcctttgcttttatgtccttgccagtcttggagcactaatgactggcgatgatgtgatgtcttgctttagtgggttctatgcaatggtttttgcaatagcgtttatatatgcaccaagaggagctgaccaatga

SEQ ID NO: 56594 - DNA, 348 bp, Acinetobacter baumannii
atggataagccaatgacatttaacgaatggatgggaaagcaaggcaatttagctttgattcatgctaattgctgccgaattgcctatgaagctggtcagcagtcaaagcaagcgaaagtggaggagctgcaaacccaattgtcactacaacgtcaaagagtgaaggcttttgaggaagagcttactagttcacgtaattatggtgatgagctgcaaaagcgggtggattccgttacgcatcttattcggggtttacgagctgaatttgatctatggatggatgttgagtgcccacaagtagaaagacagattgagttgttagagcaagcgctcaagggggaaggatga

SEQ ID NO: 56595 - DNA, 255 bp, Acinetobacter baumannii
atgagtgagtttaaagagttcaaagttggtgattggatcattgatccactaattggtgacaaagttattaagtgtcatgacggctatttacgagaaatgaagttctttggctctgtaatgcgccacgccacaccagaagaaatcgcaactggccaccgcattgataaaccatcgaatccgagggaattagaaaccctagacaaaccagaaaaccacatttcgccgaattgcaaaacgataggggaacaatcatga

SEQ ID NO: 56596 - DNA, 321 bp, Acinetobacter baumannii
atgaaaccagaacagtttattcgtgagcagggattggagaaggcgagagaggttgttgaaggcatcccaagtaaatatatggagtgctactactcaacattgtgttactgcaccaaagcaaaaaagtattcagatcgttttaatccgagaattgagcttgtgaacatggctgacctcaagcgtctggtggagtctttggaaatcattgataagtgcggtggcttatatggattcaaaacatattgcaatggcgactactcgcaagaggatttgcaagccatccgcgaccacgaatcaatatacggaggcggggatgagtaa

SEQ ID NO: 56597 - DNA, 210 bp, Acinetobacter baumannii
gtgaatacagataaccaaaaagaaccattgctattcggttcaatgacttacacacagatcatgcagttaagagcagcctacaacctaggcattaaggatgcagaaacacgacaagctaattctctgtaccaaaagctaaaaagatgtggctggttgaagcgtttgaaggagcgccaagccatgactaaacgttacaaggaggcggtatga

SEQ ID NO: 56598 - DNA, 375 bp, Acinetobacter baumannii
atgagcaaagtatcaaccgaattgagtgcaagggctagaaatgaagtttctagagttttgcaagcccttgcatcaagcaatcaaagtcaggttgccgaacagttagggattgatccaagcacattatcacggatgaaaaatgatagaaaatccaatggcttgactgagcttgagagctgtttggtgctattggacattcttggatttaaaactgtactcaagaaatatcgaatgattagcgaggaaaaactaaatgcgctttttgtgatgtcaaaagcgtggatggaaagcaaacaaacaattgacgatctttttcaagatgacattgaagatttcggaatgtgttttgagcttggttacaaagaaaaagcctga

SEQ ID NO: 56599 - DNA, 234 bp, Acinetobacter baumannii
gtgattaaaattttatatgttgaagatgatgtaatgattggtaagacaagttttcatctgcttcaacatgaaaattttttagtagattgggctaaaacaggtaacgaggcattagagttcttatttaataagctttatcacattgtactacttgatttaggtttacctgaactagatgggttagaaatacttaaacatatccgtaaaacagcagatttaactagggtttgttga

SEQ ID NO: 56600 - DNA, 2238 bp, Acinetobacter baumannii
atgtcatttattaaaacgcgtaaaaaattggtttatacagcgatagcgtcatcattatctgttaatgcaaccacagcaattgctcaagatcaagtcgcgcaattggaaacaattcacattgaagcggcagcagaacaaagtttaaaagtagacaaatctgcaaataacaagtttgtagcccctcttcttgacacaccaaagtcagtatcggtcatttctaaacagttgattgaagacactcaagttacaactttaagcgatgctttacgtacagttcctggtatcacacttggggctggtgaaggtggcaacccaaatggcgaccgtccatttatacgtggttatagttctgaaagctcaatgtatgtagacggaattcgaagttcggcttcacaaaaccgtgaaatgtttgctgtagaacaagttgaagttacgaaaggttctgcttctgctttaggtggtgcaggtactgctggtgggagtattaatgtaatctctaaagttgccaaaaaaggtgactttttagagggttcagttggtgctggaacggataattaccaacgtattaccctagatggcaacaaggatttcggtaatggtgttgctgctcgtgttgcagtgatgggacaccataatgagaaagcaggtcaaaaagatggagctgaatatgcacgtgtaggtattgccccaagcattacctttggtttagacacagcgacacgtacgacattaagctattattatcttgagtctgatgatacacctgattcgggcgtaccttattggaattcatcgaataatacagcaacaggtaaaccattaaatgccaagcaaggcatttactatggttggctagatcgcgattttcaaaaacaagaaaatcaaattggtacaatcaagcttgagcatgatctgactgataatttaaccatcagtaatactgcagtttatagtaactctaaaaacgactatatttggacacagccagatgatagtcagaaaaatattgcaaacggtgaagtatggcgccgtgcgaactctcgtattaccgataccaatacttttacagatcaactggctttaactggcaaatttaatacaggcactattaaacacagctttaatgtaggtgctgaatatagtgatcaagaatctgataaaggttcgtatactgttacatcaaaatcagggaaaccaattactggctcacctaaagcgggcgcatgttcacttggaataggtgcagcttctgattattggtgtactgatgcattcaatccaaattcaaaagatccgtggttaggcaatgttgctgcaaataaagcagtaacaacaactacggcaacaaccgcttctgtatatttactagacagtattgaatttaatccgcaatggttgttagacctcggcttacgttgggacaagtttgaaactgagctgaagaccaatgcaactggtgctaaaattgaaagtgatacagactttttctcttatcaagcaggtttgacatttaagcctgctgagaatggcagtatttatgcaagctttgcaacttctgccaacccagttggtatcgatgcaggtgacggttctgaaacttcggtgtcggctgtcaataaagatctagatccagaagaaagccgtacctttgaaattggtacaaagtgggatttatttaacgaaaagttaaatgtaacggctgcaattttccgcacagaaaaacaaaatactcgtatctcgcttgatgcaaataccacaacaaacggtgggtcaagcaaagttgatggctttgaactgggcttaaacggcaacattactgataaatgggcgatttctgcgggttatacctacttagatagtgaatcaaccaaaaatggtgtgagctgccgcggtacatcatgtacagaccaaaccatttataatggtaatgtaatgccaaacgttgcgaaaaacagtgcaactctttggactacttaccaaattatgccccagttcactttaggtgctggcgcaattgcaatggacaaagtttatggtgacttagcaaatactaactatgtcccaggctacgttcgctacgatgctatggcacgttacaacatcaacaaaagtgttgatctacagttaaatgtcaataacttggcagatacacgttacttcactaaagcttatgcatctcactttgcgtctgaagcagaaggacgaaatgcagtattatccgtaaatttcaagtattaa

SEQ ID NO: 56601 - DNA, 1368 bp, Acinetobacter baumannii
atgaaatttattcaaatagataaattaattcattgctataaaagtcaagctctcagttttcgaatgattttgagtgtaaccgtgcttagcttaatattgctgatattaattgcaattgctgcttacaatattgcactggaagagtcagaggaaattattgatgaacaaatgattgagatggctaattttttgtctaaggaagagcgaacgaatgttaaatcagtttttgatcacaataagagatacggtgagcgggacacatttatagatattacagatatcaaatcccttcctcttattagtcaacaatatgatcatattattaataaagttgaacagcctcagtttgtaactaaagattcatcacgtggcattataaaaatttacgttctaccaatgccgacaaaacaaatccaaattagccagcctatcattgtgcgtaaaaatttggcacaagaattggcctttaatatgctaattccttatatgattttgatgcctcttagtatttttgttatttactggctcattcgttttcatttaaggccattagaacaattaagaatggcatttgcacaacgtgattatgatgatttatcagaaatcaaaataaatgaattacctattgaaattcagccagctataaatgagcttaattccttattttcacggatagaagtggcacaaaaacaacagcatatttttattgccaacgcagctcatgagttgagaacgcctttaactgctttgagccttcaaacagaactattgatcaaatcaaaaccgaatactgctatatataatgaaaatattcttgatctaaatttgagcttaaagcgtatgacacatttagtaggtcaactaatgtcattagctcatcaagaaatcccacaaaatgaaactttgcaacagctaatcttaattgattatgtacgtcagtgtgtttcccaagttcttgtaaatgcacgttataaatgtgtagatatccaagtgaagttagactcttattccgagaatatacgaatacttgctattcagtcatctttagagagtatccttattaatctcctcgataatgccgtgaaatatagtccaaaattaggtcaggtatggattattatttcgagtaaggggcacaatgtgaatatggaaatccacgatagtggaccaggcatcccagaagataggcatgaggatgtattacaacgttttgttagactacgtgaaactcaaaatcaagcctttggaagtggattgggattatcgatagttcagtcagctgtagagtcaattaatgcttcaatgcaacttgattcatcagaatatttgcaaggattaaaagttattatttgctttaaatctgcatga

SEQ ID NO: 56602 - DNA, 456 bp, Acinetobacter baumannii
atgagcgtaatcattattagtgccagagaccaaagcaaagataagattttaggacttaagtgtggtgcagatgattatattgttaagccatacgattttgatgaattaatagctcgaatagagtcagtattgagacggggaaagtttaatcattctattgaagacgtctgtttttctgcaaaagatgttagcttatttcctcagagtcagagagttacaaaaaataagattgaagttgatttatctcctaaagaatgggcgattttagaacctctcattatgtatccacaacaaattttttcacggcaaatgttagaacagaaactttatgatagtgatgaacttattaacagtaatgctgttgaagttcatatccataaattaaggcaaaaactaggaaaagaacttattagaacagtcagaggacttgggtactgtatagagtctgattattaa

SEQ ID NO: 56603 - DNA, 165 bp, Acinetobacter baumannii
atgtggacagtcattacaacggatctgtttaacgaatggcttgcacagcaagatcaatctacacaagagaaagtactctcagcgttggtcgttctacagcaacagggaccaagtttaggtcgtcctttagtagaaccgtctatgactccaaatttaccaatataa

SEQ ID NO: 56604 - DNA, 5028 bp, Acinetobacter baumannii
gtgattacggccctggaccctgcactcactgcgactgaatcgacaacaatcagctttacgtttagcgaggcggtcagtggctttgatattgatgacatcacgccagtaggcggtacgctgagcaatctggtccaaagtacaaccaacccgaatgtctggacagctacgtttacagctgacggcagtggtgcggctccaagcatcagtgttgcagacggtgcctatacagaccttgcaggtaacttgggtacaggcgatgtactcgatggtacggacggctttgtggttgatacgctagctccggcaccggtgattacgattgatcctgtaacgaatgcaatcacgattgactttggtgaagcagtcaatgcggttgatggcagtccgcttacggcagatgcgcttgagggattgctggacattgctaacggtacattgactgaccttgtagacaacggtgatggcagcttcagcggtacgctggtaccggctgcggactttgaaggcgatgtggttgtgaacgtaccggcaggtattgttacggacgtggcaggtaatgccaacctgactgcaacagagagccttacggtcgatacattggcgccgggcttggtgattacggccctggaccctgcactcactgcgactgaatcgacaacaatcagctttacgtttagcgaggcggtcagtggctttgatattgatgacatcacgccagtaggcggtacgctgagcaatctggtccaaagtacaaccaacccgaatgtctggacagctacgtttacagctgacggcagtggtgcggctccaagcatcagtgttgcagacggtgcctatacagaccttgcaggtaacttgggtacaggcgatgtactcgatggtacggacggctttgtggttgatacgctagctccggcaccggtgattacgattgatcctgtaacgaatgcaatcacgattgactttggtgaagcagtcaatgcggttgatggcagcccgcttacggcagatgcgcttgagggattgctggacattgctaacggcacattgaccggccttgtagacaacggcgatggcagcttcagcggtacgctggtaccggctgcggactttgaaggcgatgtggttgtgaacgtaccggcaggtattgttacggacgtggcaggtaatgccaacctgactgcaacagagagccttacggtcgatacattggcgccgggcttggtgattacggccctggaccctgcactcactgcgactgaatcgacaacaatcagctttacgtttagcgaggcggtcagtggctttgatattgatgacatcacgcccgtaggcggtacgctgagcaatctggtccaaagtacaaccaacccgaatgtctggacagctacgtttactcaagacggtactctaactgcaccaagcatcagtgttgcagatgatgcctacacggaccttgcaggtaacttgggtaaaggcgatgtattcgatggtacggacggctttgtggttaataccattgatgctattaatgataatgtaacgtttgatccaggtacgtttgtaagtactatttgggacgcaccaataatagctcaagatattaatgttcttgatacctctattattggtgatacttcaatgaatgttgagttttctgtccctagaaatagcgcagatattggtacaggtcatgaaggtgatgttgttattcaagtaagccaagacaatttgatagcagttgcttccgggtttagtgtattagtcgaatattttgatggggctaattgggtacaatacaccacggctacaactacaaatggaggtttaattgctgatgcgcttggtttaggggttttaggtattgtagatgatggcaaaacaatagctgtgcatctaacaggtgtaccagaaggtcaatatcgtgttgtagtgcagaacgatagtagtgctattggcgatttattagatgatttaacattagcacaactaggtgaccaaggtattttattaggagctgacaatcaggatgctgtattagatgcggtagaaactgccttaaatggtcaagtattaaatttaggaactctagtaagaaatgttttagaaccactgttaaatattgctaatgctgctggtgaaacattagctgtgactgatattgtcgcagcaattgtgaaaataccattagttggtagtcttttaggtggtgttgatactgttttagattatattgcagacgcattggttgataatttacttagtgtacttgagtttaccaatgtaaccatcaatggttcagaaacttattacactacaccacaagtatcaggtaatgtttttgatgacaatggatctggagcagatgatcgtggtaatagtgatgcagcacttgtgaccaaagtagatggagttgatgtccctactgatggtacagatgccgtgattaaaggtttgtatggtaccttgtatattaataaagatggtgtttatcgttatgtgctgaatggtagtgtagattctaatggtcaggtagatgattttacttacactttatcagacggtactcactcagatacagccgttttaactataagtgtggcagatgttattgcaccaaaagcaccaattgtttcttcattggatgaaaccaccgttactggtgttgctggagctgcggaagctaatagtgttattaatgtctatggtggtacagacagtgatggcgatggtattccggatacattacttggtacaactacagctaatcctgatggtagttatacagtcacgttgaaccctgcaatcgctttaggggacacagtggttgttacttcaaaagatgcggctggcaatatttctacaccaacaattgcaagtctgcataatattgtcgcgcttgatgatcctaaccaaactaactatgagttatctactacagcagatcgtccaaatattagtggtggtatttttactttagctaatgctggtgttcttggagatttaattgatttagatctgagtgctacatccgctcctggtgtgactgtcggtacaaatgaacaaatcactttaacattaacggcaagtgggtctactggtttagatataagtgcagttgggaatttaattgatgctattttaggtggaaatattggtggtagtcttgatttgattattgctaaacaaacatcaacaggtagctatgaagtttataatactattgctaatgcatatacgttaaacaataatgttttaacttttaccgcgtctggttcgcaatccatatctttggatgatgctggtgtctataaatttattcttgctccaaattcctcaacctcgagtgctttaagtaacttattatctctgaacttattaggtaatttaatattatcgtctaacgatgtagtagcaaccattaacaatacagatcttattactggtaatgttttatctaatgatactgctgcaccgataggtttagatttgtcaattgtttccattaaagaaactacagcaggtgtagatgaaactgtagtgtctggtactcctaaagtcattgaagggatgtatggtactttaactatagattcaactggtgcatatagttatcaaatgacggctaatgcaactgccttaggtaaggttgaagcatttacttataccgtacaagataatgatggtcattcaaaacaggcaactatttatattcgtttggactctaatttagttacattagattggacgggtaaaacaggactagaagaagctaataagttagtaacgcaactgaccgctgataataaggcttccgcaggtacagttactactttattcgatcaggtattaaatggttctggtgattcttcaaatagtattcaggtaactggaagtaacggtgtattacctacttcacctcctgagacaggtagtacggcaataccagatgattctgggcgttttaccctaggtgcagggcaaacagcatatatttctttcacatcaatattaccatcaaatgtgactcaagactttggcttcttaggaggaggaaaccaaaccagtgcttataatgtggttattgaattagagagagatggaggaacactagcattcgatactcaattggccacttggacatcaaccaccagtggtacgaagtattattataaagtgactaatacaggaaattcgtcggctaactatgatctaaatattggttatggtgatggttcaatagcgtataactggacgaatactactggtaagacatttggtattaataatattcaattagatattaaagatacaacatatacagcatcttctgtatcaggtgacctaatttctaatgatatattatattcaagtgtctttaaaattggtgttgcggctggatcgactacgcctagcaattatttggatgcaaattcaacaccaatagtaggagcgtatggaactttaactgttaatttagatggaacctatagttatcaagctaatggtaaaattgctgaccttggtaaagatgatgtctttacatataaaattgagacattggatggtactgtaaacacacaaactttaacaattaaagtagatgctgataatgttctgattggtacgccagatgctggtacaacagggaacgatatcgctgttagtcaatccgcaaatgaagtcttcacattaggtgatggcgctgatttgttaatttacaatgtacttaacggttcaagcccaacaggtgggaatggaactgatcagtggttagattttaatatgtctgaaggcgataaaatcgatgtttcatctttattatcaggcgctaccacagataatattaataattatcttagtgtgagtattagtgggaatcaggttactttattggttgaccgagatggtagtagtgggggtatttcaactcctaccgcattgttaactttaactaatgaagaccacgcaacaaatcctattactagtttagtagatttgttaaataataattcaattatctattaa

SEQ ID NO: 56605 - DNA, 1875 bp, Acinetobacter baumannii
atgaaaactgagcgaataatttcaccacctaaaacagattgggataaattgaaacaacccctagaaagtggtgaaaagaaattcattgactatctagaccagcatcttcctaaagaatgggaaatctatattcaaccgcatttaaatggattatgcccagatgttgtaatactgcatccaaaaatcggtattggagtgtttgaagtaaaaaattgggatttttcagccatgcaatatggcattgaaaccaaaaataatggaaaagttcacttatatgcaattaatcatcaaggtgaaaaaatctcctatgttaagaaaaaccctgttgatcaattacttctataccgtaaagaaattttagatttatattgtccaattttgagcagacctaaacattcgatagttgtctcatgtggtctggtactaccttctgcaacacaagaaaatgtagaaacattgtttcaacctatatttcaaagtcgaaatagaaaagtatttgcatcgaatgatgatgatcaacacaatagctatatcatattttcaaaagacagctttaccaaaaatttagccgagaattttccttcaggtataaatcgaatatcatcaaattacatgaatccagtaattgctcaacaattgagagtttggttgattgaacctgaatcaagcaaagaacaacgtgagccgttaaaatacaatgtacaacaacaaaaatttataaaagaacgtacagaatcaggttttagacgtttaaaaggacctgcaggttctggtaagtctgtagttgtagcaggtcgtgcagcaaatttgttaagagaacatcagtctgtattgattgtgacctttaatattacattaatgaactatttacaggatttagccgtcagagagtatccaaaaattagaaaagatgcgacatggttaaactttcattacctctgtagaagattatgctatgacgccagtttagatagcgaatacgctgaactctttcagactgcaaaaaaacaagggctatcgtttcctgataatgatgaattttgtgctgtaatcaatcaagcaatagaagaaagtgaacctgaaaaatatgatgcaattttggtggatgaaggacaagattttaatcctaagtggtgggatattttaaaaaaattattggctgatggcggtgaaatgctattgtgtgctgatacaacccaagatatttattcatctgcagatttgtggactgatgatgtgatgaaaaatgctggctttagaggtgcatgggctgagctaaagcaaacctaccgactacctgataatttaattccattggcaaataaatttgctgaaatgttcttgccacaagaaaaagttattaaatcagagtcaaaaacatcacaacaggattcatttgattttggaacaattgaagagtcaactttaatttgggaaaacgttcaatctataaatacatctacatttttaaatgcgtttaataaattcagaaatgaggttataaaacttcgactcagccattctgatattacagtattagtccaaacgcatgaaattggtatgacagtttgccaagccttagataagcttaatttcaaatatattgatattttttcaaaagatccgactgaatctcgccagaaaaaaatgtggttttttaaaggtgatacaagaattaaagtttgtactgtacacagttttaaaggttgggaagccaaagtacttttagttgtttgggatcaaatgtatttggataaagaatatgctctattgtatacagcaattacccgactaaaatcaggtcgaagcagcattttatacgtggcgaatgcagaaccaagtttaattgaatatagtaaattttggaaaatatga

SEQ ID NO: 56606 - DNA, 459 bp, Acinetobacter baumannii
ttgcttaaagttaacggagaaaacattgctgttgttcacggtggcggtggtggcacccaaggcgtatggagtaacggttcagcttatgataatgggcaagctggtgctgttggtgctgtagacattattggtgcatttgactcaacgacaatcactcaaggtaaagtaggcaatgcaaccaaggaagaccacacaggtggtgcatctgtaagtcctattgctctatttggtaaaggtggtgatggtgctatgggaattggagatgaaggttggtcatttggtggtggcggtgcatcaggctctgttcttgtggctcaatacactaataatagtacaacaaatcaaacaatcactctggttgttggtcgtggtggtgctggtggacagaaaggtggctatgattcagatatcgtaggtagtaacggaacagatggatttgcacgagttgctagtgtttaa

SEQ ID NO: 56607 - DNA, 2055 bp, Acinetobacter baumannii
atgccagtctttgcaagtgatcaaatcagtactttacctcccattaccttacaagcaacaggcgcaactgaagatactgaaaaagcctataaagttagctctgcgagctcagcaactcgtaccaacacttcactgaaagaaacacctcaagctgtaaccgttgttccaaaagctgtattaaaagatattcaagcaacgcgtttatcggaagcactagatgttgcaggagtagggcgtgcaaataactttggcgggcaaggtttaacgacttttacttcacgcggatttaccagtggcgaatattaccgtaatggttttccaattaaccgtggttaccccaatgcaccagatagtagtaccgttgaacgtgttgaagttttaaaaggggcgtcatcaagtttatatggtcgtggtgatcctggtggcacatttaatgtcgtcagcaaaacacctcaagctgaacgaaaaaccactttaggtctaaatgttgatgaggaaggtttataccgtggtactgtggataccacaggcgcattaacagaagataaaagcctgacttaccgtttaaacttgatgggtgaaaatggcgatacctatcgagataatgtagataccaaacgctggaatattgcacctgtattgcaatggacgccttcggatgcgactaaacttacgctagaggccgattttttacgtaatcaacatgccctagatcgtggttttacccgttatgatgggcaacagaaaacctcattcgactcatcagactattggtgggaatcaggcaaagatcgcaatcgcctatataataataacgacatgctacagttccgaattgaacatgcgctgaatgaggcatggaaattgaatgttggcactcaatatttaaatggcaacctgcatggttacgctgttgaagctaatggcgtcaaagcaaatactaatggcgaagtgattacccgtaactataactggcgtaacttagattggattgataagaatttccaagccaatgtcgttggtaattttaatctattcaatttacaacataccttcatctcggggattgaacttgaagattatgattataaatcttacatcatccgttcaagagatagctttgatttaaacatcaatcaaccatacaacacacagccattgcctgaattggtgaatgtaacgacgaatgatcgcgagcaattgaaaagccaagcattcttcgtgcaagatcaaatccgtatcacggatcgtttaaatactttgattgcgatgcgctttgaaaactataagcaggattatagcaacttcgtaaataactcgtcttggtctacagacaacaatgcctttattccacgcgtgggtttgacttatgacctgacagatcaactcacggtttacagcaacattagtaaatcgtttaaaccaaactctggtgcagatcgtaacaatcaaggttttgatcctgaagaaggtatttcttacgaaattggttcgaagtatgccttattggataaccagctttcttttgatactgctatgtactatgtaaagaaagaaaatgtattaaccttagacccattagattccaccaaaagcattgctgcgggtgaagttaccagtaaaggtattgatttgagtcttgttggtaatatcacaccagcatggaaaattatcggtaattattcctatgtcgatgctgccgtaagcaaggataatactttggcaaaaggtacgcgtttggccaatattccacaagattcattcaatcttttaagtatttatgagtttaagtctggtgcattaaatggtctaggcttaggtgtgaatcaacgttatgttggtagccgtaaagggcaaacggccaatagcacctataacatggaaagttatgcgaccacagatcttatttcttattatgattggaacaaagatgtacgcttaagctttgatatcaaaaatatctttaacaaagaatatgatgatagtgctttcaaccgctatgtatacccagggcagccccgtactgcgaagttaggaataacatatagtttttaa

SEQ ID NO: 56608 - DNA, 312 bp, Acinetobacter baumannii
atggaaattgagttttcatgggatgagcataaagcagaaataaacctcaaaaaacatggtgtagcttttgaagatgcaacattggttttttacgatgctcatgccttatataaacaggatcgctttgaaaatggtgaatatcgttggcaagcgataggtatggtacatgggcaagctgttttattggtggcccacacagtacaagatcataatgggatggatcatatccgcattatttcggcacgacaggcagagaaaaaagagaggaaacagtatgagcaaaaccgttacttacaaaatggatttgaataa

SEQ ID NO: 56609 - DNA, 315 bp, Acinetobacter baumannii
atgagcaaaaccgttacttacaaaatggatttgaataatcctcctgttttgtctgaagaacaaaaggcaagacttgaagcattagataaacgtccagacagtgaaatcgatttttcagatattcctgaacttgatgacagcttctggaaaaatgcagtgcaaaatccattttacaagccgactaaacaagtaactacggttcgcatcgatgcagatgtcatgcagtggctaaaagcccaaggcaaaggctatcaaacacgaatgaataaaattttacgggatgccatgcttaaagaattaaaaaatcatcaataa

SEQ ID NO: 56610 - DNA, 384 bp, Acinetobacter baumannii
ttgattacggtaagtcgccgtttacgtcactttaaccatgtaacaccagaacagcgcccagccatgtttattacacaaggcaatcagcaagaagtcccggtacatggtttagattcaaaagttgaacttgctgctgaggtttatctctatatccatgaggctgatagagcaaagcccccatcatcacagatgaatattttcatcgatcgtgtacgtgaagctattaaaccagaccatcctgattttagtgagtatcaaaccttaggaggtttggttgagcactgctggatcgagggcaccgtagaagtatatgaagcagtagaaaacatgctggatgatcaggcgattgccattatccctattcggatccttacaaccaattaa

SEQ ID NO: 56611 - DNA, 432 bp, Acinetobacter baumannii
atggcttcatttaatgtcagcatactttttaaaacaccacctgataaagaagtgcgaaacaagttagttaagcttgttccacaactttggccagaaatttgggcagaagcggtaacagtaggtttactatcagataatgttgtaagtggagcccctatctgtgaatacaaaccaaaacgattagcatatggggctctaactatcattggagatgctgcacacgtgatttcgccaatgacaggtcgtggcttcgcaacaggcgtggatgatgcaatgttattagcgaatatgttagctaatcgacaggagaatgaacctatatcgtcaatattctctgaatataatgctttaagattgccatttattcaggccttagttactcattcaaaacatcttagttctaattatgttaattacgcagaatcgaactaa

SEQ ID NO: 56612 - DNA, 1710 bp, Acinetobacter baumannii
gtgaaattaaaatatagcagtattgcattttcagtcatcatggcttttagtgctgtaggattaacaggttgcgatgatgatagcgatacttcaacggctacagaaacaacctcagcaacagaaagcacagtagatagtgtcttaaagttcgatccaagcaaaacccaagcgaccaccattaatttaaccgttgatggtcaagcgatgcaagttactcaataccgcattgtatatgtggcgaaccccattaagatggcatctacacaaggaacactgggtggcggaaccacaacgattacagatccgtatgcctaccaaactttaattatttctgttccacaaggtcaagaactggatcagaaaacagcaatgtatctacaagtgaataatagtggttggtggaacagtcctgtccaaaccaatattaaggaaggtgcgagtttagtcagtacaaatgatacggataactatggtgcagcattaaaagcgggctatattgtcgttgatgttggaacgcgtggacgcagcgttcgctcttatgatggcgcatgggctggtaaggcacccgcagtaattgttgatgcaaaagcagcaattcgctatttacgtctcaatgatgtagtcttacctggatcagctgaaagaattgttatttcaggcaccagtggtggcggtggtcttacctctacagtggcagctagtggtaacagtccagattatttaccatatttggctgaaattggtgcggcaggtgttgaaggctcaggaacatcagctaccagtaccattaaagatgacgtctttgctgtggttgcctattgccctattaataacttagtaaatgccgatcgcggttatgaatggcaatataatgcttcgcgtaacgacagcaatacgggggcactgaatggtgtgagttactctgcaggtccacaggtcgcggcatcaaaggaaatcgcggagcaattccctgcttacctacagggtttaaatttaaaactcgcagatggacagcaacttacagcagacaatatgcctgatcaaatcaaggcgcaagtgaaagcagaaattgaacgtcagcttgccaaagggaaatccgtgcctcatttaggagaaaattttgtcaccagtagagcaacactgcccaatgattggctagaacatgatggcagtaaagtcatctctattgattatcaaaaatttcttgattatgtcgctgcaaaccaagcactaaaaactgtggttgcattcgatgctgttgctgtaaatgggaataccgcaatcagtggtgaaaccaatttatttgggaatagccaatatgaatattcgaactttacgcaatggtcatgggatcataatagtaaaaccgctgatggttcaggagcagatgacacaggcttagcatgggaagattatttaaatagtaattcaagtacagccaacctactgaatgctcagattaaaatggtcaacccaattgcatatttaaatacgacaaccgatactgccccaaattggtatatccgtcatgggatggtagaccgtgatacctcttttgcaatgcaaatgattttatattatgcagtaagcaatgaccctaaagtgaaagacgttaactttaagcttccatatttaactgggcattctgggaattatgatgtacaggaagtcttttcatggattaaagaaaagctaacaatagcacaataa

SEQ ID NO: 56613 - DNA, 483 bp, Acinetobacter baumannii
atgagcgattatcgtgttgatactcagggcaactttgatgagatgaataatcgcgttaggtttgaaataagacgcacggttaacgctcttactttgcgcttacagcggattgttcaggaagacatgttaagtggccaacgactcaaagttcagtctggccgtttgcgtggatccgtttcatcaaaggtggatgaggataaggattcgatagagggaaccgtgggagctggtggtgctttggtgccttatgcacctgcacatgaatttggtctaaatggagctttgggtgttaaagcacaccttaggacgattaaacaggcttttggccgacctatttcacctgttcaggtcaatattaaggcccattctaggaatgttcggtttagagaattgcggttcatgcgtgattcactggatatcgtggccaagattgtgccgaaaaatattgatgcagcaattgagcgaggtatagcaggtggatag

SEQ ID NO: 56614 - DNA, 1158 bp, Acinetobacter baumannii
atggaaattacaattattggtgcaggtatggcgggtctaactacaggcatcgcactaaaaaaattcggacaccaagtaaccatctatgaacaggcagaacaaattttaccggtgggtgctgctatttcgttatggtctaacggtgtgaaatgtctaaattatttgggtttgacagagcaagttgaaaagcttggcggcaaaatggataaccttgcttatattgatggtctgacgggcgatgtgatgacccagtttagcctttatccattgattgaagaagtcgggcaacgaccatatccggtatcacgtgcggaacttcagaatatgttaatggatgaatttggtcgtgaagatattcatctagctaagaaaatgatttcttttgttgaagaaggagagcgtgtaaaaattcaatttgcagatggtagcgaaatagaatctgatctattggtgggtgcagacggtacacactcaattactcgtgcctatgttttaggtgagcaagttgagcgacgctatgcaggctatgtcaattggaatggtctcgttgatgtctcagacgattatgccgcagcagatcaatggacaacgtttgtaggtgaaggcaaacgtgtttcactgatgccagtggcgaataatcgtttctatttcttttttgatgtgccgttagctgttggtcttgaaaatgatcgtagccaatacaaagctttattcaaacaatactttaaaggatggtgtgagcctgtccaaaagttaattgatgcagtcgatgtgcaaaagaccaatcgtgtagaaattcacgatatcgaaccatttgccaatttttacaaaggtcgagtggtgattgtaggtgatgcagcgcacagtacaacacctgatattggtcaaggcggctgccaagcgatggaagatgctatctatttggcacgttcattgcaaattaataccttaggtttacaagattctttacgtcgctatcagaacaagcgtaatgaacgtgccaatgagttggtacttcgtgcccgtaagcgctgtgatgtgacacatatgaaagatgaagcggtgacccgagagtggtatgaagagttacgtaaagaacaaggcaatcatattatgaagggaattattagtaacattgtcggtaatccactcgactaa

SEQ ID NO: 56615 - DNA, 321 bp, Acinetobacter baumannii
atgcaatttaagcaagttgataacccacgtggtaacccgcttaaaattaatggccagatttggatttttgcgccgttgtccttaggtactgctgaaaagctgatgccaaagcttaaaacctttgatccaagtgactttgctttagtggtggatgttgcgcatggttctttaaagcgtaactatcctgacattacacgtgaatttgttgctaatgaactgcttgatgttggtcacgtgaacgccgtatttgaaacggtcatgggggcttctggtctggtttatacgggtgaagacgaacaggccactgattcgggggaatag

SEQ ID NO: 56616 - DNA, 240 bp, Acinetobacter baumannii
ttggtgctgacattgggcaaggattacgactatgtacgtaatgaattggatttcccaagagttaaagcattgaatgcgtatcacaaacagtgtcctcccagccatgtcggcattcagcgtctgtgtcggatccttgaggcatttatggggattgaagacaatacagattcaggcgatacgcaaagcgatgatgaagatgatttatttgcggatctgcaaaactttcctcagggtggctaa

SEQ ID NO: 56617 - DNA, 777 bp, Acinetobacter baumannii
atgaaaacagtattaggggtgagtcttttagctttgactttggctgcttgcggtggaggtggcggaggtgattcttcatcttccaataatgagggtaacaacccaccagtatcaaaagctgaagtcaaaggtatttacactggaaagaccaatcaagaacagaacgtagtcggattagtggataaaaataataaattctggttcttatattcagcaccttattcttctggtattgctggattcatgactggaaacttcactgtttctggcaatacgataaaagccaatagcgggaaagacttttattttggtggtgctaccgtttacaatacatcaattagtggaacagttgattccaagaagagcctgaaaggcacaatcacatactcgccttcaaatcaggttacattcgataccgtatatgaaacggatttaaacaacacagcatccaatctagcgacaattgcaggcacctattatggagaatcggtgattgtgcaaggtattgaagatgcgaatttaactatttcaaatacgggtgtgatttcaggtaagggacaaagtggctgcacgttctcagggaaaatagcagctgaagaaaatgcaccttactacaacgttgatttagttttcggttattcaccttgctatctggcaggacagtcagttaatggtgtggcttattatgattcagctgacaaaactttatatgcagtgactgaaacaagtaaccgagataatgcagtcttattcttgggtacgaaaaatttaagataa

SEQ ID NO: 56618 - DNA, 864 bp, Acinetobacter baumannii
atgagcaacaatcgagtggaagtgcacgttggtgcgaagacttccgaacttaaaaaaggcatgaatgaagccgaaagtattgttaaagatacggcgcaggagattgaagtcacaggaaaaaaagtggactttcagattgacgtatctggtgttcaaaagacctttgataatctctcaaccaatatctcaacgcagatgctgggcttaggtaaaaaaattgctgctggtattggttctgccttagctgcagatgggttggtcagtttcactcgcaatgcaattagtaccgcttcagaagttcagaaaatgtctgacatgctgggtgaatcagtagaagacttccaatactttgccaagggtgctcaaacagctggattgtcattagaacagttcggcatgatgggtaaggatgcgctggatcgtctcggtgaagcacgccgtggtgaaggcgaaatgatggacttctttgaaaaggttgcgcctaaaattggtgtgaccatcgacatgttcaaagatttaagtggtccagaagttatccaggcatattacgatggtttggaaaaagccaacttatcgcacgctgaaatcatcacatacatggaacaaattgtggatgatggcagtttacttattccactactcaaagacggtggtgcgggctttaaaaaatggggtgaggaagccaagaatgctggcgctatcatgtctaaagatatggtgaacaacctcggtaaagctaaagaaaatctttacacactagagcttcagttccaaggttttcaggcaatgctgatcaattcagtaacgcctgcggtgacagctattgcgcaaaactttgacaatatcaaagctgtagtcctttaa

SEQ ID NO: 56619 - DNA, 417 bp, Acinetobacter baumannii
atgcaatacgaaaaaatacacaagataactagctcggctcttaagttttttgaagaccatcttaaatctccaatgatatggcaagtctttcccagaaacttctgtgaggaagcaagtagcttactattaatgattcttcaacaagaaggcataaatgattttaaaataatgaagggaacaaatattgaagaagaaaatcattattggttagaaagtgaggagtatgttattgatcttacagcacatcaatttaatggaattacttcaccttttatacttatagagaaaagtaaataccccttaaataaaatattttcactggatatacatgaaattattgattttcaaaattggagtggtttaaatccatatgagcctaaaattcaaagtattttttatgtagattattacaaataa

SEQ ID NO: 56620 - DNA, 237 bp, Acinetobacter baumannii
atgttttgtttcatgatgcgtgaaacagttgctgctgatacttttggcgctttaccatctgcaatgagcatttcaagtgctgttgttactggtaaagttttcttgccattagcacgtgttgccacatgcaccatgccaccgatcatttcagctacttcagttggtactactgttttgcccttatcagagcgttgtttgcgttcagatttaaaacctactttttcaagttcacggtaa

SEQ ID NO: 56621 - DNA, 621 bp, Acinetobacter baumannii
atgttgaaattattggcagatggataccacctagtcgcgggactttctattaatatgaaaaatttaattactattgctgggttcttattattggtaggttgctccactcaaaaacaaccgcagtcagaacctccttatgtgaaacaaaactatagtgagtctgatcctgctgcgaaattgagtgtttctcaatttgccaacgtggttaaaagtatatatccagcctatcaaattaatcattcaaaagatggtggtgaagtaaaattcttaccaaatgatgtcaaagcagatactaaatttgtgccaaataataattggtacagcattaaaattattaaagacccaaacacggaaaattggaaaggtttagttgttgaggtttttaataaagaatcttatgaacagtctaaaaacgttgcttttaaagactgtcaaaagattttagggaatattgataaccgagtaccaacagttatttatgaactggaagatcgtataaataagactaaaactgagtcatctaaaaacctgtcttcggtgcaccgttatggatataccgtttactatgatgcaagccattacaatgaaggctatccagtatcttgtatggttggtatttag

SEQ ID NO: 56622 - DNA, 1032 bp, Acinetobacter baumannii
atgaaaaaagaagtctctatttctcaattaacatttgaaagctcaataaactactgtaatcaagttcaaaagctcattgatgatggtataacagaaatagagttagactttatggaacttagtactatcgaaccatttgggatcgtttattttgcaaattttattcaagaatcctctaaaggaaatataagttttacatgcaattatcctacgggcgatagtattagttatgctaagcatatggggctatttcaatgttgtcgttttgatataggatctcatccgagaaaatcactcccttctacttcagctagtcatatccctattacaataattaatatagaaaaccttaaagcagaagctattgagaagaataaacacgttggtgatattattgaagaatatgctaataattttgctaaattaatcagctcgttgaaagaaggaccattggtagatacgctaacatattgttttcgtgaaataacacggaatgttgttgaacactcagagtctaaaaatttagtattttgcgcacaatattggccttatttaaaaaaagcagaaatagtagttttagacaaaggtaaagggattctagagtcacttaatgaaaatgagagtttgcctgatatagataatcataaagatgctttaaattttgcattgcttccaagcatttctagtaaagttcagtatggaaaaaaaacaaaaagtagtgatgatttttggaaaaatacaggatttggactctacatgactcatcgaatagcaagtttaggcggggacttttttctttctagtgggaatcatggcatacgttgggtcaatgagcaaaaacaagactataacgttaattatctaaagggaactgtattaagaatagtcataaaaactgatcagatagaagagttatcaaatacattaatgcagtttagagaagatggttttaagcttgcaagatcaattacaaaaatgagaatagagccatctcgagcatcgttgatgctttcaagagataggactttatga

SEQ ID NO: 56623 - DNA, 288 bp, Acinetobacter baumannii
atggaactgtatttcgaatgggatgaggctaaaaaccaaaagaatcagaaaaagcatgatatctcttttgaaactgcaagccttatatttgaagatcctctgcggatctcaatccaagacagacataccaatggggaagagcgttggcaaaccattggtagagtaaaaggcgtactaatgttgttagttgctcacaccatctttgatgaagatgactgtgaaatcatacgaatcattagtgcaagacaagtaaccaaagcggagcgcaatcaatatgagcatggttag

SEQ ID NO: 56624 - DNA, 498 bp, Acinetobacter baumannii
atgggcagcgcaaaaaaacaagagaacttagcagttattgatattggtatttcacaagatgatcgcgccaagattgtcaaagggttatcgcgattactcgctgacagttacacactctatctgatgactcataattttcactggaacgtcactggcccacagtttaatagcttacataatatgttcatggatcaatacacagagcagtggaatgcgctcgatgtgattgcagagcgtattcgtgcgttaggtttccctgctccgggtacttacaagcaatttgtagaattagcttcaattcaggaagtggacggtgtacctcaagcgaatgaaatgattcagttacttgttaatgcacatgaagctgttgcgcgaactgcaagaagtttatttgacgttgtagatgaagcgaatgatcagcctacggcagatgttctaactcaacgacttgatattcatgaaaaaactgcatggatgttaagaagtcttttagaataa

SEQ ID NO: 56625 - DNA, 744 bp, Acinetobacter baumannii
atgtttatatctctatctagggctgcttttatcttacgtgaggtatgtgcaagccctgatagcttaagtctaggtcaaatagcattaaaaactggactagctagggctacagttcaaagaattgttaatgctcttgaaaaagagaactttgtgcaagctggtgctaaaggagtcagacctggttggggaatacgtcagttaagtgatatatctggtcctaatatctcgcatgaaattagaccttttttatatagtttgtatgagaagacaaaagaaactgttgatttatcaactttagatgatggaacagttctgtttttggatcgcttcatttcagatcaagatataagatctgtaccagatgtaggaatacaatatcctgcttattcaatggctaatggaaaatctttgctttcaaaattatcgaatgatgatatatctgcactttatgcggaatgtatattagaacgtaagacatcttcgacgatatgcgatttcaatattttaataggtcaaattaaagatattcgtgaggggggattttcttatgacattgaagaacatgctattgggtcatgtgctataggacttcctttaattacgaacagtaaaatgaatttagctatttctgttgttattcctagttgtagatttgactctcaacgacatttagttgaagaagcattaagagagtgtgtagaaaaatgcaatattagattaaaggaacttcaggtttctaagtaa

SEQ ID NO: 56626 - DNA, 903 bp, Acinetobacter baumannii
atggtggatttcatccataacaataaagacttatatggtgttgatgcgatttgtaggattttaccgatcgcagcttcaacctattaccggactctagatctctgcgaaaatccagaacatcgagcaaagcgagatttacatgacttgcatcatgctgaggagattaaacgaatttggaaggaaagttcaggtcggtatggtgtacgtaaagtctggcaaaaactgaaacgtgaaggctatattattgcacgctgtactgttgctcgattgatgcaaaatctaggtatacaaggtgtttggcgtggtaaaaataaacaaactactcgtagccgagatgatcaaaaacgtgcacctgacttagtgaaacgtaattttactgctgatcagcctaatcacttgtgggttgctgactttacctatattcaaacaaattcaggctgggtctataccgcctttattattgatgtgttctcacgagcaattgttggatggaaagtatctacacggatgaatacagatatggtgctcgatgcattggagcaagcattgcacgatcgaggcatgccaaagaatgtgattcatcattccgatagaggtgttcaatatctttctattcgctataccaatcgtttagaagcagcaaatttaagagtatcagtcggtacgactggtgattcatacgataatgctttggctgaaacagtgaatggcttatacaaaacagaggtgattgaatatttaaaagcagattggcaaggtttagcagatgtacaacttgcgacactaaactgggtagattggttcaataaaaagcgtgtacacagtgcactgggttatgtatcgccttttgagtttgaagcaatgtactatgataagattaacccgttaggtcaggtggcctaa

SEQ ID NO: 56627 - DNA, 285 bp, Acinetobacter baumannii
atggctaccagactactaggtaagcctctttcttttggttcataccaaccatgtacatgttgtaatgtaataggggtcgccgggccttcagccgcacctaataatattcttgagatcagtaataaggcagctccaccccataacattggaaacattaaaacagcccaagcaactcccataaaaaagattaaccatcttgtttgtactctcatagcaataaaaccgactaaaattgccgaaattgcaaataagaaaaagaaagcactaccaataaatccaaattga

SEQ ID NO: 56628 - DNA, 207 bp, Acinetobacter baumannii
atgtcagaattatccaacgtaattggtcaattaattcgcaatagaagaacacaaagaagcatcacgcaagaagctcttgcattacagtgtggtattgatcgtagttatatggggcgcattgaacgtggagaagtcaatctcactgttgaaaaactatatgaaattgcatctgcattagaaatcaatgccaaagaattattaccatag

SEQ ID NO: 56629 - DNA, 423 bp, Acinetobacter baumannii
atgtctaactcacagaatgcaattgaacttagtaaacacgttttaagcttatctgaaaaagttgcattcatgttaataacagcctcgaccgcttcgattgcttatatattggctgaagttaaggatggtaagtggaatgaattaatctattttccaatatttgctttatgtttattagctcttagctttgtatttggctacagccatcttgtgaaaaaaattgatgcaacgaatcaaaacagtctcttacttcaattagcaaactggaaaaactcaactaatgagaaaaatgaacttttagataaaatggaaacatctctaaagaaagctggtattttcagcagacttcaatttattactttcatagcgggaatcattacttatgctattttcatttttttatcaatttttttaaacaagtaa

SEQ ID NO: 56630 - DNA, 240 bp, Acinetobacter baumannii
atggcagaaccagcaacatcaacaagcacagcaacttatggtttagcaacaaatgtggcagggggtacgatggcattacttggcggtctttcaactactgaatggatggctgttttaggcgggatttgtgctgtggttggtttagtaattcaggcgatttctgcatatcgcaaagatcagcgtgatgaagaattacataagaaaataatgggtgaagaaaatcatgacaaacaagactaa

SEQ ID NO: 56631 - DNA, 288 bp, Acinetobacter baumannii
atgtcgataagccgtagctttaatttgagcgcacttgaaaacttagcacaaaaaattgaaagagttaatcaaaataactacgaagttttgattaataaattaaatggttttgtaaatgccaatactaaatttgatagctttaaatctatgttactagaagcaggttttgatttagaaactcctcaagattatgcaaaaattgcaagggaccaaattgatatttttcttaaaaagcatacgagttttgatagcctaacggcattagaaaatgaagcgttgaaagactaa

SEQ ID NO: 56632 - DNA, 612 bp, Acinetobacter baumannii
atgatagaaatgaatacacgtatttatctacgagcttcaactaaagatcaagatgcaaaaagggctttgcagattcttcaggatctaaaccaaaacttgaatttgggcgaaaccattgtgtacgtggaaaactatagtggtacgaagttagaccgacctgaattgaataagctactgtcagaagcaaatcagggtgacaccttgttagttgaaagtattgaccgcttatcacgcctaacccaacgagattttcaagagctgaagcgcaggatccaggaaaagggacttcgtttagtcgtagcagatcttcctactacctaccaaatgattcaagccagtgacagcattactcattcaattctggaactcatcaataatatgttgattgatctcctggcaacaatggctcgcctggacaatgagaaacgtatagaacgtattaagcagggcctagcgcgttcaggttacaagccaacaggtaagaaggctaatgaggctaaacataaacgaataaaagaactgctggtggctggcaatatgactaaggaagaaattgcaaaagcagtgaattgtggagttgcaactgtctatcgagttgctaaggttatctaa

SEQ ID NO: 56633 - DNA, 513 bp, Acinetobacter baumannii
atgaaagcaatcttgaatagcgtgatgatgtctatttctagcattctattaatgactctgcttacactaggaataactaaacttcatgcccaagaaacagttcaagtggctcagcaacaaacggtaaactcccaacaggaattaatcgatatcttttttgccgcagcaaaaactggtaatcaagaagttattaatgaatttttaaaatacggatttccagtgaatgtccgtaatagtgcaggttatacgcccttaatcatggcagcttattatggtcatcaagatgtagtcactatattactaaaatatggtgccaatcgctgcgcacgtgacaacaagggcaatactgccttaatgggtgcgatgtttaagcttgaatgggccattgtaaaacagttacgccaagtcgattgtgatagcaatgccaatcaaactggacaaaaaactgcagctgaatttgccaaagtaattggtcaggaagagaaatttaaaagcttatttcatgttaaataa

SEQ ID NO: 56634 - DNA, 1518 bp, Acinetobacter baumannii
atgttgaaacattcgttacttattgcaatgcttgcaacagttacagtgactacacaagctgcagcgttaactaaagataacggtgcgcctgtaggggataaccaaaattcaatcactgcaggtgaaaacggttcagttttacttcaagatgttcaattggtacaaaaactacaacgttttggccgtgagcgtattcctgagcgtgtggttcacgcacgtggtacaggtgcatatggtgaattcgtagcaactaaagacttatctgacctgacgattgcctctctattcaaagccggtactaaaactccagttttcttacgcttctctaccgtaattcatggtaaaggctcaccagagactttacgtgacccgcatggtttcgcagtgaaattctatacccaagaaggtaactgggacttggtcggtaaccagacaccggtattttttatccgtgatgcaatcaagttcccggacttcattcatgccatgaagccaagcccagtgaccaatgtacaagatgccaaccgtgtgtttgatttcttgtcgagccagccatgggcaaccaacatgctgacctatgtatacggcaagcaaggtgttccaaccagctaccgcgaacaggacggttttggtgttcacgcttacaaactgtataacgacaaaggcgaatacaagtacgtgaaattcaacttccgctctaaacaaggcgtgaagggcttgaacgtaaaagaagcggctgagcagcaaggtaaagatttcaaccacttgaccaatgacctttataacaacatctatgcaggtaacttcccgaaatgggatctgtacattcaggtgcttgatcctaaagacctgggcaaatttgatttcgatccgctagatccaaccaaaatttggccaactgagctggttccagaaaccaaagtgggtactttgaccctgaaccgtatgccgaagaacttcttcaacgagactgaacagtcggcatttgcgccaggtaacttggtgccaggtatcgagccatcagaagaccgtctgttacaaggtcgaatcttctcttactcagatacacaaatgtaccgtctgggtgcaaaccaccagcagattccggtcaaccgtccagtggtgaatgtgaacaacaataaccaggatggctacatgaatgtatctgagcgtgattcagatgtgaactatgagccaagccgtaaagagccaaaagctgcaactgcgaaagcacgtgcggtacaaacaccattatctggtcatgtacagcaaattggtgtgaaagagcaaaactttaagcaagcgggtgatctttaccgttcatacactacgaaagaaaaagacgatttaatcatgaacttggctgcggatcttggcagtgttaaagattcagaaaccaaacacatcatgttgtcttacttctataaagcagatgcagattacggtatgcgtatgactaaagcggttaacggtgacatctcaatcgttaaagcaaaagctgcaaaattgaaagactaa

SEQ ID NO: 56635 - DNA, 801 bp, Acinetobacter baumannii
atgagacctttaattggtatatgtgccaactattcgagtaatgagcaagttggttatgtgagtgagctaggagttagtcaccaagaatggcaactgatttcagatgattatattcaagcgattgaacaggcgggagggatgcccatcattttgccagtaacttctgatattgagagtttacaaggcatcttagcaagattagatggtgtgttattcactggaggttccgatgtaaatcctcgttattacaacgaaatgccacatgaaaaattgggtagtctagaacctagaagggattcgcatgagtttgctttagcccaaaaagtcatgcgatctttttcttatccagtattggctatttgtcgaggttatcaactggtgaatatcgttcagcagggtactttgtaccaagacattcaagcacaacgtcccatttcagacataaaccatgccatgtggacatcgcctaagcatgaagaaattcatgatgtcagactcatagatgattccaaatgctatgaaatatttgaccagcgaaaatcaataaaagtaaatagcttccaccatcagggtattaaagatctaggtaaacaccttaaagcatctgctgttgctccagatggtatgattgaggcatatgagatgcagggtggtcgatttgttattggtgtgcaatggcatcctgaaatgatgatggatagctatgctcaacaactatttcaagcttttgttcaagaaagtcaatcatatgctgaactaaaacaacatcaagaatgtgatctgttagcagtggatggatag

SEQ ID NO: 56636 - DNA, 321 bp, Acinetobacter baumannii
atggcagcaatcgtcgaaagaaaaataaatagctccataacacttggtttaatcagcagcaaactcaaaccgataaacatacaaaaagaagaaacgaacagccctcttaaaggtacatacgttttggagagcttcttgaaaaaagtcggagcaaacttgtccatagaaagtccaaatagcatgcgacttgtagaaaagacaccactatttgctgaagataaggttgaggtcatgaccacaaaattaattatcgctgcggcaattggtaaacctgctaaggaaaataactcaacgaaagggctcttatctggtgaaatatag

SEQ ID NO: 56637 - DNA, 246 bp, Acinetobacter baumannii
atgcttattgagaaagtaattttggtgagtgttgagaagtctaaacaaggttatacggctgaagttgaactagaaacagcagatggtttttccttttccgggccgattgaatttgatgttaattggaactacgacttaggttttttgaataccttcgtcaatacagatgaagatcgaatatttattaaggaagttctttccagtgatgattttaagaacgatgtcttaagttctattgtttcttaa

SEQ ID NO: 56638 - DNA, 1182 bp, Acinetobacter baumannii
atgaatctattttatggggaaaatccgtcctcagcaagctcaaagagcattcaaaatagccagtctcttggtatatatacgaaatctcctgccatccttacgccacaagggtttcagcgggtacatgattatttacttcaggatcaatctcgaaagcttttacccaaagagcgagtttcgaattgtagacgtttgcgcattgataaaatgaagcctcgtacagtgatgtacaacgagaatcgttgtaaggctcattttggcaatgttcagatttgcggttcgatttggtcgtgtcctatttgtgcaaagcacatcactgagcaaagacgtactgaattaagaactggcttggataggtggaaaacaggccgtaacggctccgtatatcttcttacgctcacgtttagccattcgcatggccaatccttaaggattttgctagaaggccagaaaaaggcttacaagcgatttttcgaggggcgcaaagttgtagcaattttcaaaaaattaggtgtcgaatacaaaattaagggccaggaagttacttacggccaaaatggttggcatcctcataatcatgttcttttattggcaactcaccatgatttacgttttgagagttatatctctgagttagctgaacaatggatttcagcttgtattaaatcgggtcttaatgctccctcgatgcagcatggtttggatctccgtaacgggtattacgctgaccaatatgttgcaaaatggggaattgagaatgaattaactaagggccacattaagaagggtcgcaacggcagttacacgccatttgatcttttgcaattatctacttctgatgaaattgttcatggacgatcttcaggcaaactttttcaagaatttgccctggctatgaaaggtgctagacaacttgtttgggcacgtggtcttaaggctttgcttgaaattgaagataaatctgatgaagagttagctgaagaaacagacaagacttcaatcactttaacccctgttgaggatctcgtctttagtctgctttgcacataccaaaaacgtcatgaatatctggaggcaattactcgagattatgaaagtggatgttttggaaatggtgaagcagaaaatttaataaacgatttggttcaaacagaaattaggagattagaaaatgcttattga

SEQ ID NO: 56639 - DNA, 513 bp, Acinetobacter baumannii
atgtactgcttagaatatcgtggtgttaagggcagtgttaaaacccaatatgctaatttgaatacgaagaaaacaggcatactggaattaggacagacctatcaatttttcattcctaccaatatatatttaattggcacaatgaatacgattgatagaagtgttgaaagttttgacttcgctcttcggcgtagattttcttggcaagaggtgaagccagatacagggttgttgaaattctacctttcagagcattgtgctaaatggattgaattagcaagtagtcttgaagagcttaatgaaaatataaaagctcaagctttacttggtaatgattaccagattgggcatgcttatttaatgaatttgaaataccctaaaagtttaagcttaactgaggtgaaagctttgatttgggaagatagtatcagaccattgttgcaagaatatttacgtggtacaggtgaagaagcagagttaataagatcttttagtaaatcttttggggtctaa

SEQ ID NO: 56640 - DNA, 822 bp, Acinetobacter baumannii
atgaatgaatatgaatatgtcgatgggcaaagacattctagttttgctgatctgtttgtttattatgaaaaattaaatcaagaaatacttcaagaaaaggaatgggcactagatcagccctatggttttcaagaacgcgaattattcgatgtgtgttatgcaaaaactccagctaaggcaattattatttatttacatgcgggttactggcaatcgagagataaaagccagtttcgttttattgcacaggatataagctctcaagggtatcattttgttttagtcaattacccactttgtcctacagttaaaattggaggcattgtaagatctatacaatatgctatccattctataaaaaatttttttagatataaagaaatcgatctccctatcattttgtgtggtcattcagcaggtgctcacctagtaactgaactagctattcagaatagtaaatcagtacactcaaaactttttcatggcgtcatagcaattagtggtatttatgatttagctcctctaaaagatactagcctaaaccaagcattgcaattaacggaaagtgaaattcaatattattcaccagtttataaaaatagcttattgatagatttgccatttacttttctagtaggccaaaaagaaactaacgcttttattcaacaaaatcagaatatggcaaaacttttagctgctcgaggaatagttaagaaagaagaactattagagcatgatcacttcagtttattacaagagttctttaaaaaaggacgtatctttcaacatattgaaatgatgtatgactttatttcaatatga

SEQ ID NO: 56641 - DNA, 822 bp, Acinetobacter baumannii; identical to SEQ ID NO: 56640

SEQ ID NO: 56642 - DNA, 276 bp, Acinetobacter baumannii
  misc_feature (231)..(240): n is a, c, g, or t
atgcctttaacagatacgtggcttaagaagaatctagatcgtgaacgttcagctatacatacagagtctgatcaagatggattgagcgttcgtgtatcgcaaaaaggaaaactcacttttcagatgcgttttcgatataacgataagcaagctcgtttagacttgggaacttatccaaatatgagccttaaagaggctcgtattgaattgcagaaaatgaaagcaattttnnnnnnnnnnaaaagggacatgacccccgtattcataaaaaagtag

SEQ ID NO: 56643 - DNA, 1131 bp, Acinetobacter baumannii
atgagtaacacagagcttccggattttttagaatttgatgcaattttaatcgacactagtatttatgagagaaatgggctaaaactagacaaaggattgttgaaagctttatatcaattcaagcgtagccctattgatttattgttgcctgatgtaatttacaatgagttaaaagatcatttaaagaagaaactaaatgaaataaatgtattaggtaaagttgtacatgattttagagaatataatttagtagaacctgatgtgttgactgtattggatacattaaaaaataatattaatatagactcaattgtagaaaataagttaaatgagtttattgaaaatacaggagctttagaaatagtatgtggagaatttgcagatattactaaaattttagaagattacttttctgctactccgccatttggaaaagaagtgaaaaagaaaaatgagtttccagatgctattactttgaatgctattgaagaatgggctaaacaaaataataaaaaagtgttagcaattgcatgtgataatgattggaagtcctattgtgaaaagtctgaaaatattgaatataatgatgatcttgcaactgtattagcctatttaaatactgtaaatgcaccatatgtcgtattaaatcagattgaaaatttaatccaacatgaagatcagaaattctataccagtatagctaacttactaaaaatagaattaaatggttttactccagatcagactgccgaatcatatctctactgggaacctgaaggagcatgcgtttggtttgaacgatttgaatttatagaagatgaaagcagaataatagaagctgatagccatcagatagttgttgaggtaaatttacggatatttataggtgcagaaggcgaattttctttatcagcgtatgactccatagatggtgactatgttggaataacgggggttgttcaatccattgagacggaatttgaatcaacagttctgcttagttttgaaggtgaggttaccactgaacaaaccttagataatctagagttggtagaagttgagatattaaataaaccattagtgatagactttggaacattagaaccatcttttgaggatgatgattattaa

SEQ ID NO: 56644 - DNA, 126 bp, Acinetobacter baumannii
atgagagtttataaaggtgaaataaaaacagcctcggaaggctgttttttgagattaagtatgcaagcattacaatacgtaaaagtgtttagattaattttagagatccaaattgattatatttaa

SEQ ID NO: 56645 - DNA, 939 bp, Acinetobacter baumannii
atgagtgatctaatagttaaagataatgctttaatcagtgctagttataatttggatgtcattgagcagagaattattttactttcgattattaaagctcgggaaactggcacaggaatagatgccaatacatctttagaaattcatgcaagtgattatgtaaagcatttcaaagtagaaagacaaacagcttatgaagccttaaaaacagctgtaaataatttattcaatagacagtttagttatacgcaaccatttcagaatacagaaagagtggaatatgtaaaatctagatgggttagccgaatatcgtatgttgatgagtctgcgatattaaatattacatttgctccagacattgtccctttgataactaaattagaaaagcattttacaagttatcaattaaaacgtgttgcacaacttactagcaagtatgcgatacgcttatatgaattactgatccaatggcgtgaagttggaaagactccaatattagagattaatgattttcgctttaaattaggtatcgaaaagcatgaatataaacagatggggcatttcaagagtagagtacttgatcctgctatacagcagattaataagttcacagatattaaaactgaatatgtgcagcataagtctggtcgagtaataactggtttcgaatttaaatttgccttaaaagattcttcctctggagaagaaaagacgaacaataaaaatattctcaataaggaagtggtaagtatgtctgatcgacagatttcactttttgcaaataagctagcttatgatgaggaatttgctagtcgtatagcagaaataggggaaagttatgaagatctagaaaagaggttagtaaaaatgctaactaaaaaagaaaatttggttaaatgggctaaggatcttcagcgtataggtttcaaagctaattag

SEQ ID NO: 56646 - DNA, 489 bp, Acinetobacter baumannii
atggaactacggaaaggtttgaactttgatgtttataaaaggatttatatttatgctggccgattaattcgtcggaagagagtgcctgagttgattgatctttttcttataaaagcacagcatgatgatttactgattatacttggtgatggagaggagcttgataaatgtaaagaaagagccgcccaaggaaatattaagttaattggtaatgtagataatcctgaattttattatcaaatttctgattttgtgatatcgaattcttcagcagaaggatatccgatgagtatcattgaggctgtttcttgcggttgttttgcttttttatccgatattgaacctcatagagaatttgttagtaataatcctcaggtatcttgtttgcttgacgtttgggatgaatgtaaagtactttcggaagagagtgttgaacatttatcagctagggttatggcattatcatatcttaatgtttatgagcaataa

SEQ ID NO: 56647 - DNA, 1188 bp, Acinetobacter baumannii
atgggatggagttatccaaataaaaaatatactgcttatattgaaagtgaagctattatagaaatggtcaatatgcatggtttagattttgctcctttaaatccatcagtacaaaataatttaggtttggctaaagaaaaaataaaaaaatactttagagaccaagaagctgaaaaagcagctaccttagttgagcaatggaaagaggaaaatatatacccatattcctctgaaaccacaaatattgtcgaacaagtagaaagacaagtatttaacattgttgcttcaactgtatctcacaacattgataaatttgaaaaaacaagtaaagaaaatagaaaatttcagtttagattattgaaacaggcattggaaacaaatcctaacagccttcaaacgattattaatgaggttctaaatcttaaaccagaggaacaagatgatttagctgaattgcttagggatgtatctctctcatcaattattagtgcatcgaaggttgtaacagatcgattgaaatttattaatggtcttgaaaatataattaattcaaaagaaggaaaaaagaatttaaaggaaagaacgcaattacatcgtatattagcggaaaactgttgggtttttggagaggagttttttatttctgtagatgatcaatcacttacagagtgtttaaaacaacattcgaaattgttgagtgaagatgttgatatattagaggcggttgagcatccaacaaaagaaagaggaatagttgatctgatgctttctaaaacaacacgaaataataagccaaatactgctcaccacttaattatcgagttaaagcgtccaaatgtaaaaattggtcgagatgaaattgctcaaattcaagattatgctgatgctataaggttagattcaagatttagtaaaacaaaagctaaatggacgtttattgctattagtttagatagagatatgaaattagattctcgttatattgatattgagaatggtattattgctcagaaagatgattatattattttagtcaaaacatgggctgaaatttttgatgaatgtaaggctaaacttcaatttttccaagagagcctcaaatataaagcaaaggctatagatggtatggagcatttacaaaaacattttccaaaatatatagagggcgttactagtacgattcagtga

SEQ ID NO: 56648 - DNA, 201 bp, Acinetobacter baumannii
atgcaatcagacgatctttttgaacgtgccaaattattcatagaggaagtaggtgtcgtttcggtatcgagtttacaacgtaagtttttaattggacatactcaagcagaacaagtgctaaatcagttaattgaagagaatatttgtgagagccactttgttcaagagcaaggctatattttaaaaaaaatttccaagtaa

SEQ ID NO: 56649 - DNA, 753 bp, Acinetobacter baumannii
atgtattgggataaaatagctattcctacaagttcaataattcatatgggattacctttagaaaaagaattaaaatcgttaggtatattggaaaggccgagtttaccagctacaggaacagtagaggctgctaggcatgttcactggacatttggtgaagttgctaaacaaaaattaaaggatgataattttgattggattatccaccatatgtctggcgatcctatttatcttcctgaacattctacaaaaaaagatacactacgactcaaaattaccaatgcattaccgatcccatcctctgatgggaaattttctttagatgatttattagagtttaaaaatagaagagcttccgaacttgaaggtttacatactacaatggataggctattaaaaaagcttaatcatgaagaattagatgtaatcagaaaaactgaattaaaaagatttgaaaatgcaattttggagttagatagaacagtatttgagcgttttaaaataatgaaaaaaagtgattttgaagttaatattgacttaactggagatgctattcaagcacttattttaaatacccctgcacttatacatgatataaaatcaaatggtataccgcttgcaactattgctacttctatactttccatgttttcactttctaaaaagtatggagttacgctaaatcagtataatcatggtgattttaatttagaatatatttctagtgcacgttcagaaaatataatattctaa

SEQ ID NO: 56650 - DNA, 420 bp, Acinetobacter baumannii
atgcaattgcaccgtggtcgcctgattgatcatatccagcttgttgtacgcgatctacaggctagcaagaacttctacatagcggtgatgtctgtattagagatacctgttctaaacactgataatggttatctcattgccgacgaacttactatatcttccgctgacagtccgacagcttcaggtgcattgacagggcggcatcatctagcatttcaagcaaagaatcgtgaaatggttgatgccttctacagcgcagcattagctcacggtggacaagacaatggactacctggtattcgagcgtatcatccagagtattatgctgcttttgtgttggatcctgatggtaataacatcgaagctgtctaccaaggtgaggcaaagcgcacagcgccatcagtcaccattgagttttag

SEQ ID NO: 56651 - DNA, 609 bp, Acinetobacter baumannii
ttgattgaaaaggttgattttgagcgaatcgcaataattaccccagcacaaaaacagactgaaactttttacagtaagtatgactttaattttcaaaccgaacgccgtattgaagatattccgggtaaggttgagtttgttcgtggtgagattaaatcaggtaattttttccgagcgcgaaataaattagcggtagagattcataaagaaatggtaaagaaaaaatttacccctactaatgcccaaggtgatcttactaatctggcaaaaggtatggctgagattattttgcgtggccatgtttttgttaaagctatgtgtggagcatgccaaggaataggaaaacttgaaacttttaattcaaagggttttcctgatggggcaaggttttgtgaaaaatgtaatggtactggtaagcgaccatatacgttaaatgaaaaaatgaaaattgcaggtattgttgccaccaagactgcatatataaaaagctatcagaagtttgagttatttggagaatctattgttgcagaatgggaaaatgaaattagatcgcgtatttctcgatcattccgttttgaacttcctgatagtcaagaaacttacgcttga

SEQ ID NO: 56652 - DNA, 219 bp, Acinetobacter baumannii; identical to SEQ ID NO: 48652

SEQ ID NO: 56653 - DNA, 744 bp, Acinetobacter baumannii
atgttatcacctgatttaagaagtaaattggttcaactcagattatcagctatggtcaaagttttagatttacatttggttgacccaaaatttttagaattaacgtttgagcaacaactcactcatatcgccgatgctgaaatttcagatcgtgccaatagaaaaattagtcgattattaaaaaatgcaagcctgagataccctcgcgcatcaatagataatattgactatcactcagaaagaggtattcagagacgccaaatttcaacattatttgataataagtggattcagcatcgtcaaaatttaattattcttggtgcaactggaacaggaaaaagttggttaggttgtgcctttgcaacccatgcttgtcgccatcattatagcgttttgtatttcaataccaatactctgtttgaggcactagctcttgctgtagcagatcgaacattaccacagttaagacgtaagttgattaatactaatctattaattattgatgactttggtttaggaagcatagattcgcatttagcatctatatttctggatatcattgacctacaggccgtaaacggatcattacttttaacaagtcagtaccctacgtctgtatggcatagtcgatttgaagatcccacattgggggatgctgttttagatcgaatcgtgcataaagctcatcttatagagttacaaggagaatctatgaggaaaagacaaggtaaaaatacaaattaa

SEQ ID NO: 56654 - DNA, 477 bp, Acinetobacter baumannii
atggcggctctaaaaaaggaggtaaaactctttatagttcgctcacttgccgtatttaatacacccacagaaactgctgagctcgtcaaccaagaatacgggataaaagttactaaacagcagtgtgagaaatacgacccgaccaaacgggcaggcgagaacctgagcgaagaattaagaaaagattttgaaaagactcgcgaaatgtttttgggtaagcctgaggcaatcccaattgcaaacttagcggtgcgtttacagcgatatgaaagccaatatcaaaagcacagtagaaaccgtgtagcagctttaagcattcttaagcaagctgctgaggacataggcggcaagtacacgaataagactgaaattacaggcgctggcggcggtccattacaaagcgaaaacattacctatgtgactgctaccgatgagcaggtaaggcaggcgatagatgaactcgagaacgaatattga

SEQ ID NO: 56655 - DNA, 312 bp, Acinetobacter baumannii
ttgaacctagcacagcttgaagctgtgctggatcgcttcaaacaacttggctttgaaattgaatcaaaaaataaatctggagttaaaaatttagctaatgacgaccaaagtaaattaatccgtcatttatggttacagcttcatggggctggtgtggtcaaaaacagtagtgaaaaagctttagcaaaatttgtagaaaaaagagttggtgtgagtgccttgcaatttatgagcagtcatcacgcagacatgatcattaatcacttaagacaatggtgcaaacgttgcggcattgaaagaacagaacaataa

SEQ ID NO: 56656 - DNA, 381 bp, Acinetobacter baumannii
atgaataaaaaatatagtgtttctcctcaagagctttctcgtcgtttacgacaacaaaagaaagaacttttagcgaacaatcctaagaaaattattgaacctcaatatattcaaggtgttcatggttctaccatgcagttcggagtgttagtccacaattggcgtaatggttggaaatggttcagtaatttagccttcgctggcatcgttgcaattcaaactttttatgacaccttgccaccagagttaattgaagcgttaccaactgatgctcggtcaaaaattacaattacattagctgtattggggttaattggtcgtcttattaatcaaaacagaccaaagcctttaccgccagtaaaggagaacgccgatgtttga

SEQ ID NO: 56657 - DNA, 345 bp, Acinetobacter baumannii
atgagccaatgtaagcgaaattttcgacgtcagttagccaaacaaaattctgtgaaaaatcagcttgtggtgaatgaatcccaatccattcaaggtgtgccagtcaagctcaaaaagcgttggattgtggaaaactggcgtagcggttggctttggatatcaaattatgtgtttggcttaattggctatattgcattttttggtttgccacctgaggttattgcattgtttccggtggacacacaaaaggaaattattggcattttgtctggtctaggaattttctttcgttttctagaccaaaaccgagctaagcctttgccaccagttgacgaggaaaattaa

SEQ ID NO: 56658 - DNA, 429 bp, Acinetobacter baumannii
atgtatgcaacggcagacgcgatgatcaaaaagttcggggagcatgaattaattcagctcacggacaatgtagaaccttatttggatggtatcaactacgacaaactaaatgcagcattgcaggaagcgaactcggagattgatggttatctgatggggcgctataagctgccgttgcaaactgtccctccatttcttgaaagcctagcttgtcatatcgctcgttaccatgcttgcactggtgcaatgacggatgatgacccaattcgcacccggtatgacgatgcaattaagaaattgaaagatatttcaaaaggtattgttggcgtaggtggaacaccagctggtgaatctgaacctgtaaagacctcatccaataatgtgatgttttccgttggacggcatgactttggaggtaaaggctggtga

SEQ ID NO: 56659 - DNA, 195 bp, Acinetobacter baumannii
atgaatattttcatcgatcgtgtacgtgaagctattaagccagaccatcctgattttagtgagtatcaaaccttgggtggtttggtagagcactgctggatcgagggcactgtagaagtatatgaagcagtagaaaacatgctggatgaccaggcgattgccattatccctatccgaatcctcacaaccaattaa

SEQ ID NO: 56660 - DNA, 768 bp, Acinetobacter baumannii
atggctcagtatttatttggtgccggcaagatttttgctacaccgattcaagatgtatacgggcaaccgattagtaatcccacaccagttgaagtgggggtaatgcaatccgttggtgtagatattagctatgacttaaaagaacttttcggtcgtggacagttcgccgtagatgctgcacgcggtaaaggtaccattaaatgtaaagcttcattcgggcgaattaacggcaccttattaaattccattttctttggtggcgttgttgctgaaggtggaatcgaaacggtttcccaaaccattaatggtgaagtgattccggctggtggttcagttactccggttgtccctaacatcggtacattcgtaaaggatctaggcgtaacggatgcgaaagcaatcccacttaagcgtgtagcctcagcgccaacaacagggcaatacagtgtagatgcagcaaccggtacttatacatttgctgctgccgatgctggtaaagcggtatttattaacttccgttattcagcaatggtagcgggtgctaagtcaatcactgtatcaaacctagatatgggttatacgccagagtttgccgttgacctgcaacgcgactacaaaggcaaattcatgcatatgaatttcttccgttgtaccagtaacaaacttgggtttagttcaaaacaggacgattacgacattcctgagtttgaattccagcctatggctgatgaccttaaccgtgttttcaaaatcgatttatcggagtaa

SEQ ID NO: 56661 - DNA, 168 bp, Acinetobacter baumannii
atgtggaaaataattatacctgttttggtcttgttctctctgagctacgaaattgagggaaaaacaatttttaagcatattggtgactatgtcgcatcaagtattattaatgatattcacaaaactaataaacaaattgataaacaagctgcaaactcgaatagttaa

SEQ ID NO: 56662 - DNA, 327 bp, Acinetobacter baumannii
atgaaaagtatcctgtttttagatgccgttttgtcaaccaagatcgtcacatttgcatactggatcttacttttgtgtgtatggattacggggggcgttatgattgctgggggattaggtggcaatagtctacctccagaagcagcaagcccatacacatcaggctctttgggtgtctttgttggtatatgtattttaatttttggttcggtgatagttcgtctttgggctgaattttgggtggttatattcaagattcaacaaaatacaagaagaactgctgacctacttgagaaacttggtaagagttacaattcaccactctaa

SEQ ID NO: 56663 - DNA, 219 bp, Acinetobacter baumannii; identical to SEQ ID NO: 50545

SEQ ID NO: 56664 - DNA, 246 bp, Acinetobacter baumannii
atgccatctaaagcaaagaaaactgaacaactagattctgaattaaaaaagttaaataaagagattggtcgtagacgaattcaagtagagcatgtatttggaaggatgaaatgttttaagattttatcttgtgtatatagaaatcgtcgtaaacgattaaacctgcggtttaatttacttgctggcatatacaatttagattgggtgaaagataaacaattaaattggttgaaaaatgatttatga

SEQ ID NO: 56665 - DNA, 540 bp, Acinetobacter baumannii
atggtggatttcatccataacaataaagacttatatggtgttgatgcgatttgtaggattttaccgatcgcagcttcaacctattaccggactctagatctctgcgaaaatccagaacatcgagcaaagcgagatttacatgacttgcatcatgctgaggagattaaacgaatttggaaggaaagttcaggtcgatatggtgtgcgtaaagtttggcaaaaattgaaacgtgaaggctatgttattgctcgctgtacagttgctcgattgatgcaaaatctaggtatacaaggtgtttggcgtggtaaaaataaacaaactactcgtagccgagatgatcaaaaacgtgcacctgacttagtgaaacgtaattttactgctgatcagcctaatcacttgtgggttgctgactttacctatattcaaacaaattcaggctgggtctataccgcctttattattgatgtcttctcacgagcaattgttggatggaaagtatctacacggatgaatacagatatggtgctcgatgcactttag

SEQ ID NO: 56666 - DNA, 693 bp, Acinetobacter baumannii
atgtctttctttgcaaaactatttggcttcaaacaaaaaacaacagctcaagtagatgtggctttgaaagctgctcaagagctagaaccttcaaatgaaacctcttttatagaacttattaaaaaccgccgctctatttatgcaattggcaataacttaagccaatcaaatgatgagattgaaaagttaattcaagaagcaataagacacagcccttcagcttttaactctcaatcatctcgcgctgtgatcttatttggacaatcacatcataaattctggaatacagttctagaagttttaaaaaccattatcccagctgaagcggtatctggaacagaacaaaaaattcaaagctttgcagcaggtgcaggtacagttctgttttatgaagaccagagcgttattaaaagcttacaagagcaatttgaactttatgctgataattttccgatctggtcagaacattcaacagcaattgctcaatttgcagtttggaatgtattagctgaacaaaatattggtgcttcattgcaacactacaatccaattattgatgagaaaattaatacctcatttaatatcccagcagaatggaaactaagagctcagctagtttttggttctattgaaggcgcagcaggcgaaaaagcttttattgatgatgaaagccgcttcaaaacattcggctaa

SEQ ID NO: 56667 - DNA, 306 bp, Acinetobacter baumannii
atgagttattcagaacattttagacgtaaaattttagctaagcttgaggaaggttattctattcgagcagtagctgcacaatttgaaattaataaaaataccattgttgaatggaagaaacgtatagagattaaaaaaactcgtgtacgtaaaccttctaaaattaacgatgatgctttacgtgaagatgttgaaaagtatcctgatgcttatcaatatgaacgtgctacacgttttaattgtggtgtttcatctattggtgctgcattaaagcgcttaaatattacagttaaaaaaagacgttaa

SEQ ID NO: 56668 - DNA, 495 bp, Acinetobacter baumannii; identical to SEQ ID NO: 54618

SEQ ID NO: 56669 - DNA, 594 bp, Acinetobacter baumannii
atggataccgtagtagaacattctgaaaataccactttaggtgatcaaatcaaaatcgtagatgatctggaaaagtatatatttgaaaaaatccactctactccacccttcaattttaacaaatctatcaggatggcaattgatttcgaaacgcttaaaacaataataaatgcattacatgatgaaggtctgtttaaagaatcgaatgaagatcgagtaaaaaggttatgtaaggattctgtccaagtacctattccttgtaaaaaaggtgataataaagttgaaaaactggactttgaatatttgcctaaacattatcatgaaatcatttcagacataaaaagctatcgttccgccatcgaaactaaaaatcatacgcaagcaaaaattatttataaaagcttactccagcaatactcaaaacatcgtgattgttacgtagtcgaattattacctgaaagctttcaaaacacgatcgataaaattcaactcagctatctttcacaagaacctgatgaaatcaaagaaaaagcttatatcgactttgttaaagaatttatcaagaaatggctttgttgcacaaagatttcataa

SEQ ID NO: 56670 - DNA, 321 bp, Acinetobacter baumannii
atgcaatttaagcaagttgataacccgcgtggtaatagtaaagagattgctggtcggtcttggatttttgctccggctccattgggtacgcttgagcgatttgaagaaaaattgaaatcaaataatgttcccgtttcagtaattattgatatggcccatgtttgtcttaagcgaaattacccggatattacccgcgaatacgttgctgacgaaattgtagatatggccaacatggaagaagttttagccctagtaactaaaacatctggcttggaatacacaggttcaccaaaaccagcaggtgaatcttcgggggaataa

SEQ ID NO: 56671 - DNA, 228 bp, Acinetobacter baumannii; identical to SEQ ID NO: 54153

SEQ ID NO: 56672 - DNA, 693 bp, Acinetobacter baumannii
atgcaaaaaacaaaactcattatcgtatcaatttttggccaattcatttgtttaagttcttcgtatgcaaatacacaaatcgagggaaatggctttactgatggagcaagtgcatcaatattgcttcgtaatggttggatttatcgagatagaacgaatggtcgacataattacaactcatggggacaatctgctataggcaaattcaatactggttttacccaaggtcctattggatacggtgccgaattattaggtgatgttggtttcaaaattggcgataataaacacgctggcaaccaaatgatccctcataatactaatggtgaaccctatagtaactggatgcgagggggtgcaaatgtcaaagtaaaagtgtcagaaacaacattaacctatgggacacaatttctgaatatccctgtactaggcagtggcgatgcccgtctttctccagagtatttcactggaactttgctcaatagcaaagacataaaagatctagatattaatattggttacttcaccaagaatcaacaaccagatcaaatagcctcggatcagtctcatttaaagcgagccattatttatgggggaaaatatagaataaatgatcacatcgatacatcattttataatgcagattggctttgttgcacaaacctatctctaaaggcttattccacaatataa

SEQ ID NO: 56673 - DNA, 372 bp, Acinetobacter baumannii
atgaatattgaaatttgtactcctaactccgctacaactaaagataagggtgatttactagaaaaactgtgtaaaaaaatgcttgaagcacaaaattatctagtgacagaggaagtgcgaaagactggcagtgaattagatttattatgtgaacacaaagtttctgggaaaaaaatttatgttgagtgtaaagcatatagagataaaaaaattgatgcgccaatcataagacaattatttggtacagttgtatttgagaactatagtgaaggctggttaataggtacttcagaatttagtaaagatgcgaaaggattttgtgaggagctacctagtcgaccacttggtgatcgtatagtagtctattcataa

SEQ ID NO: 56674 - DNA, 402 bp, Acinetobacter baumannii
atgacgacaatatcaaaatcattattaaatggattaccgataaaaaaatcgagggtacaagtttttgagattttaaatcagaacccacaaggcttaagcgcggtaagtatctatgcgcaaattaaaaatgaacataaaattacgttaggtaccatttatcgaattttatctgagtttgaaaaccgtaaaatcatcaaaagggtgtttttaggaaaaagtaaaagtatttataagcttagaaaagacaagatgagctgtaacctcatttcgctcaaaacctctgaagccttgaactttgaaaatgagaaagttaaagaattacttcatgaggttacggatattatttttgcaaacaccggagtcgacattagtagtgttgaacttaatctttataccgaataa

SEQ ID NO: 56675 - DNA, 414 bp, Acinetobacter baumannii
gtggggaaaaatcatgcgctcaagttagtgaaaagtattaatagttctgaacatgcccgtctctttgttgctggatataaaacattagaatatgacttagctatggaggaatgtaatgcaaaagttatggcccaaattctttttgatctttggccatcaaaaactggtgaagtgaagaaaggcttacagaaaatagtcaatgatgattacttaaaaattacacctgaacaaaaagcagatcatgcaatagaaatactaaaaagagtagatgatgacaatattggcaagggttattttgctcaagttttagcagataaaatttcttctggaatagttaaactaaaagtacctcaatatattgaagatgcaattctctgggcttgttcattagaaaactcttctgttgaggaatga

SEQ ID NO: 56676 - DNA, 321 bp, Acinetobacter baumannii
gtgtttattgccacggctgcaccagaaaagttagcgaatgttttactcgagtctatcaatctagatgtacaaattattggtactcctttgcaaaagaaactaagaggatggacaagtgggatacattgtaggtctgaagaaaaagtaagaagattgaataaacttgatatcaaacaaccttggttcgcgacatacagtgatgatattgaagatgacttgcctattttgatgggtgccaaactctcctacttaattaatggagataataataagattaaacatataaaaatcaaaaatttaaaactattaaattgggtttaa

SEQ ID NO: 56677 - DNA, 252 bp, Acinetobacter baumannii
atgaaggaaatcgttgtttttgacttggatgggacattactttcgggtgattctacaaaggcatggttaacagataaattgaaatctaatcttctcagatttatcgctgcattcattgttacgccagttgctttacctcttatgaaatttaagaagtataaatctagaggtgcttcattatatttatggattgcaacgtatggtgtgaatgaagaagaattagaatacagttttaaaatttttttccaataa

SEQ ID NO: 56678 - DNA, 618 bp, Acinetobacter baumannii
gtgcaacaaagccatgcagatttaaaggacgccttaaaacgtcaatatttggattttaattataaacatgtactgaattcagatgattatctcactttaagttttaatggctaccatacacgatacgatgcggccatctatgatcgattatcttttccttcgggtacaccaaactcagcaaaagaaaattatattatggggttttcatctacgtatcaaaaagacaccaacaaatttgtcgtctcttaccagcaaaatacggggaacaatggctatgattacgcaatagcaggagatggcggtggtactttatatattgccaactctttgctctcagattttaatggaaacaatgaaaaatctttgcagcttcaatacacaaaggactttagtaaactcggtattgcaggactaacatggacaactgcatatgtgtatggttgggatatttgtgtagacaaaacagtacagggacaaaagctattgacgaacaatgcaacagaaagggagttcttcaaccaaatgatatataccgtgcaagagggtgcattgaaaaatttgagttttaaagggctttgttgcacaaacctagcctataaggtttattcagtcctataa

SEQ ID NO: 56679 - DNA, 222 bp, Acinetobacter baumannii
atgaagcaaaagaaattgctcaagtatattgtggttgctattttactaggagtattgacgggttggatctgtcatcacttctttaatgaaggcgagcaactgaagcaaatcgcttcttatttcaacatcgtcacagatatctttttacgtctcatcaaaatgattattgccccattggtatttgctacaagggactgttctaaattttgtgtaagtacttaa

SEQ ID NO: 56680 - DNA, 231 bp, Acinetobacter baumannii
atgaacatcaaacagaagcgtgctcaatttgcgaaggatatcgacaaattagtcagcggtgattatgtgcttgttccaaaagaatctgctcagttttgtgcagaaaaaactattgaccatgtccatgacaatattcgtgagtttggtgaaaacgctgaacttgaagccgaatggaaagcccatgctcatgcattgatggttgcaacaggtgacacacgctatgaaaactag

SEQ ID NO: 56681 - DNA, 561 bp, Acinetobacter baumannii
atgaacttatttactaacaaaactatgttcactctcaacgcttttaaacttgtcatatatcgacaatttattattttcaccctttttatttttcgtcacttaaaaagctatccaattcgatttcttacgcctgaagaaaaagttttggcgcaaagggtgtttggggacttgctagattgcgaacgacctaaaattattgctactcgttacttaccttggcaatctcatggaattttgatggcgccaaatggaaatatttacgtcaacatttctgactacagtagtaattacgcgctagagtctaaattcattcagggtatttttattcatgaattggctcatgtcatgcaataccaacaaggtattcatgtattactaaaaggtgcattactgcaatctgcctattatctgagccttaaatattacaatccttataaatatacttatcatcctcagaaagcatttagttcttacaatattgagcagcaaggagaaattgctagagatatctgttcaggtaaactgccaaatatcatttgtttacctcaacttgatttgtaa

SEQ ID NO: 56682 - DNA, 216 bp, Acinetobacter baumannii; identical to SEQ ID NO: 42270

SEQ ID NO: 56683 - DNA, 348 bp, Acinetobacter baumannii
gtggatatagtggagatttcggaaccaagtcattttgtttacatgccgccaaatgtcgcaatgccaataacatttgaagtaaaaggtggcggttatatcaaaccttttaaaaatggttatgtcttactttgtgataagttagctaagtgcaacccaggtgaagacataattatccaaaccaatgataaaaaaataatttgtggtgaatacctttttgaaagagacggttttattgatatcgaaacaattgaaggagaacgaatttctttgagttcgagtgttgcagttacacaatttcctatagtggcttttttcccgcctagtcaaaaacaacttataaaaaaataa

SEQ ID NO: 56684 - DNA, 276 bp, Acinetobacter baumannii
atgagctattcgggatattttttaaatcttaagatttgttcattgacggtattagatcaagtttttaatttaccccaattacagcttctacctcctactgtaaaagagttttttgaagcatatgtacatgctataccttgtaaacatgttgtttttatagacgaagttgaacttatcgaaaaatctttatgtcatttgggcaaaagagacgatcacttttcatatactcgagcttatgaaatgtttttaagcttaacaaaaaacgatcaaatctaa

SEQ ID NO: 56685 - DNA, 282 bp, Acinetobacter baumannii
gtggaaattttcaagagatataatttagttgatgatgataataaaattagagatgttgaagatatcgaatcttatctttacgatgcgatttcaaatgagttaagtatccaagaaaccatattaataaagaaactgtattcaggaactaaaaaattaactgcatcattcgttgggcagctcctgagggataagcatgatattaagtgggctgaaggtactgtggagtatgcaggtaaaaagctaaacagttgggctagctggtatgaaaatttcgatttataa

SEQ ID NO: 56686 - DNA, 408 bp, Acinetobacter baumannii
atgaaattaaatggattgaatcatctgactatttcagtagcaagtgttgatcgcagttttaatttttataaggatattctaggttttacccctagagctaaatggaaaaaaggcgcttatttaagtcttggagaattatggctttgcttatcacttgatgaggtgagtgtaagttcagactatacccattactgttttagtattagtgaagaagatatagatgaattccgccagaaaattaaaatgatgaatattcttgaatggaaaaataatcaaagtgaaggagaatctatatactttttagatcccgatggacataaattagaggttcatgttggtaacttatctactcgtttggagagctgtaaaaagaatccttatgaaggaatggttttctttgatgaataa

SEQ ID NO: 56687 - DNA, 354 bp, Acinetobacter baumannii
atgtttatagatgctttatctatttttcttgaaaaattagcctcagaaaaagatttagatgaatggtatttatctactttcattgatgaaaatgtttgttcgctattaccagcagaagcttttgaattttcttcacatgttataaagcttattaaaaatgacgctcagccagaatatacctatgaattactaacaattttattagcactccaacatcagtctggcacaactcaggtgcctgaaattctaaaaaatagtcctaatttttttgatgaaattattaaaaagaatcctgaaaaatatattctaaatttagctcatgagttggctgaaaattatcgaatacaattataa

SEQ ID NO: 56688 - DNA, 147 bp, Acinetobacter baumannii
atgactttaacgcgtatcaaatcccaaaataaatcagatgtttttaattcatcatttactatcgtgacaagcggcatggatgccgctgttttgctgtgctacatggatgtagcatcagcgaaacaaaagatttttgcttacttttga

SEQ ID NO: 56689 - DNA, 1896 bp, Acinetobacter baumannii
atgtctaagtcttttcaacctactcgtctggtaggtgctatcgctattgcgatggggtgttcgcctattatttttgctgaagatacaacaaacgcaactcagcttgatccaattgtggtaactgcttctaaaagtgctgaaaaagcaagtgaagttccggcgcgtatttcagtgattgatgaaaaaaccatcgagcagaatcccgtactcaatttatctgatctcatccaaaaagatgcttctgtttatatcaaacaaaatggcggtcttggacaaggtacaaacctctctattcgaggcactaacccaaatcatattttattacttaaagatggtgctcgcttaaatacaccaaatacactatctcctatctatcctgagttcttggatacaactgatgttgagcgcattgaagttctaaaaggcccatcatctgtacaatacggtagtgatgctatcgggggtgtaattcaaatgattacggctacccctcaaaagaactctgcatttattacaggtatttatggtgaaaataaaacctataaagcaattgtaggggcagatttagtcagtgatgaaggattctatgctcaaattcgcggacaacgtttggaaagcgatggtactcgtatatttgatagtcaaccagagaatatgaaagcagcttatgaccaaaaaggttatagtgcaaaattaggttacaacaataaaaatgacttaaatgccagcgttgaaatcagccaaaataagggtaataacaactactcagaaaatagtggtgtgaataatgctgcaagaagagagtttgataatcaattaatcacaacaaaagttgaatataaagcgacatctgatgtcactattaatgcacgttattctaatttcaaagataacgaagagtaccatgaatcctcaccttatcacgcagatactaaacgtaatgaaggggatttaaatatcaaatggcaatttacaccaacacaaaacatcttagctggtacaagtattgataaaactgaatataaagatgcgtccatattaaatggaaaacaaaatattgattccgctggttattatcttcaacaccaatataaaactgataagattagtacacagttaggcgttcgcttagaggacaatgaaaagttcggaacacatactgttggtcaaggtgctatccgttacttcctacttccgacaactagtatttatgccaatatcggaaccgcctttagagcaccatccttatcagaactctattatttttatgaaaatccagcatggaattactattcatacggtaatcaaaatttaaaaccagaagaaagtttttcttatgaaattggggcagatcatcaatttaatagtcatttatctggttcgatttcggcttatcaaactaaagttaaaaacttaatcacaaccaatactgtatttaatcctgtaacctttgctaccgttgctaattatgaaaatataaataaagcagaatttacaggtggtgaagtcggtttaaaatggaaacagcaagatctgttcttatcaactgaatatgcctatgtaaaaacagagaataaagaatctggtttagaaattgcgtatcgtcctaagcaaacccttaccttaactactggtttagaaaatactgtttacggtattagcgcttcccttattgcccgttctagctctaatgctcagaatagcgctaatccgcagaaagtccctggctatgctactgtcgacctaaatgcttactggaatatcaatccaaacgtaaaattatttaccaatattcaaaatgtaggcgatgtagattacaaaacagtttacaactttggaaattggtatgtagatggaggccgccaagcttctgttggcgtaactttccgctattaa

SEQ ID NO: 56690 - DNA, 711 bp, Acinetobacter baumannii
atgagtaaacgtattaagttctttatagtacatataactttttcacttatagtcattagtttattgctttgttgtatttttcttatgtggtatcccgctcctttgcataaagcaactggattggaacatatattatttttactaattttagtcgatgttattgttgggccctttttaggtttgtttatttataaagaaggtaagaaaactctaaagtttgatttggctattatttgcatttttcaaattagtgcgtttctttttggctgttatcatgtatttaaaggcagacctgtatgggtagtatacagtgtcgatcaatttgaattaatacgtgataatgaagtggtttctaaatcatatcaatcttcttttttaggcccaaaatttgttggtatccaatattctaatgttcctcaattaaagcaaaaagaaatgttccaagagttattcagtggaatagctttagcgcaagatccaaaaaactataaaaaattaagtcaaataaaaccacaactcttacaacatttacaaggtctagaaatacttgaaaaatttaactctaaacaggaagtagaaaatattttgaaaaaatatccagaagcgaatgcatgggttcctttaaaagcaaatgctgtagatatggttgttttaatggataaaaactcagctcaagtggttaaaattgtagacctacgaccatggaaataa

SEQ ID NO: 56691 - DNA, 510 bp, Acinetobacter baumannii
atgaatgcacaaaaaggttttacattaattgaactcatgatcgtggttgcgattattggtattttggcagcaatcgcgattccagcttatcaggattacactgttcgtgcacaagtaacagaagggttgaatgtggcgggtggtgttaaaacagctgtaaatgattattttgctgatgtaggtgattggccagctaatattcaagctgctgtttgcggtaaaaatgcaactaaagtttgtgctggtggtacaaatactgattataaaggtaattatgtaacacaagttgatgtgacgaatggtggcgttgatattacttatggtaataaagcaaacacaaatgcattagcgaccaaagtgttgtcgcttattcctggttctgatacggctaaaaacgttacttgggtttgtggcaatgcttcaacgcctaaaggtgtaacattagctactactgcaacaaataatacaaccattgatgctaaatacttacctggttcttgcaaaaactaa

SEQ ID NO: 56692 - DNA, 177 bp, Acinetobacter baumannii
atgatgttaattaaattaaatataaaatcggctttgatggttctatttctttcaacgagtttggctcatgctgatggaggattaatattcctcgaaaagaatattaagtctcagcaagaaacaaaagctaaaacagaaaaaagtaagaatcctcatttaacatgtaaacgtaaataa

SEQ ID NO: 56693 - DNA, 183 bp, Acinetobacter baumannii
atgtgtaaacaaggcacggtagtcctttatgtggattactcatttagatattcacgtctttattctaatcaaaaggcagaatataagtttccatcaaatttttctgaagaacagaaatatcatctaaacaaaacagttaccttgtctctgagtattcacagtgatgggggattatggaaatga

SEQ ID NO: 56694 - DNA, 432 bp, Acinetobacter baumannii
gtgactttgtgcaatttacgtcatggtgtactgttggtacgttctacagtttttatgtccgtcttgtttagtttgcttatattccaaagcttatggaatgtggcagcagcattttgtgtgcatgaaaataggggaacagcattacaacattttggtcatcatgcagatttaaatgtgtatcaatcttcagaccatatgcagactgaacatgtgggtattgtagaaaattctgataatgctccactaagttggcaagatcatcatgatcatttaccttcatgttttcatgtagtcatgactgataacgccaaacaggctcaagaacctgttgtatatgtacatgagcgttcacaagtctattactggtctaatttttatcagtctccgtatcttggggacttaaatcctcctcctgttttaaccccgctatag

SEQ ID NO: 56695 - DNA, 1101 bp, Acinetobacter baumannii
atggccacactatcaaaacgtaatcgatttatctggattattcctgcacttatttttgtcgctttgctactgtttattttcaaaccatcttcatcagcaccatcaaaaacaacaaatcagactgaaaacattgtaaaaattagaattgcagtacctgatctaagcagtagtgaaagacacagtagcggcacaccattagttgattatatttacttaaatcagttacttgaaaaagaatttgcaaagaaaaatattcaagttgaatggcaattttttaaaggtgcaggacctgtaattaatgaagccttggccaataagcaattagattttgcttttttaggcgacttagctgccattattggtaaatctaatcaaatcgatactactttattggtagcaactggacggcatatagatgcttatttgggcgttttgccaaataaaggatataccagtctcgaacagctaagagataaacgaatagcgatttttcaaggaactgctatgcaattagcgtttgatcaatatatcgagcgatatggctttactgaaaaagatttccgcattattaatttagatcctgctgcggccaatgcagcacttgcagctaagcaaattgatgctagctggggtttaatgccaattctagcgctcaaacaacagaaaattgtagaggttcctctgagtactgggcagagacaagatggagctggaacaattcaatcaggtttggtgggtcgtagtgaatttattaaacaacatcctgaaattgtccaaacattggtcaatacggttttacaatcagcacattgggtttcacagcctgaaaaccgcgataatgccattcaacttgtcactaaaaatgcaggattaccaacagaactctatgcattgagtctacaagacaaagccttaaaaacaattttttcaccacttttggatgaatattatctagggcatctacaagaaggtgtgcagactgcattaaaggccaagctgataaaacgcgatgttgatgtaaaacaatggcaaaatgctgagtttgtagaacgagggattcaacagttgaattacgtcaattattggaattcttcaaaataa

SEQ ID NO: 56696 - DNA, 954 bp, Acinetobacter baumannii
atgaccacatttattcagaaaccagcacaacaactacacgttaaaaaattaactggtcgaattggggctgaaatatcaggcattcatttaagctctgagcttgattcatccacagttcagtttatacacgatgcgctattagagcataaagtactcttctttcgtggccagcaacatttgggggacacggaacaagaaaaatttgcagaattatttggatcacccgttaaacatccaacagtaccagcagtggatggcacagattttatttttgaacttgactcacaaaaaggtgcacgcgccaattcttggcatactgatgtaacttttgttgatgcctatcctaaaattagtatcttgagaagcctaatcatccctgaaacaggtggtgatacaacttgggcaaatactgaaactgcttatgaggatcttcctgagcttttacagcaatttgctgagcaattggtagctgtacattcaaatgaatatgattatggtggaccaaaacaaaatgttgagccggaacagctcgaaagactgaagaaaatttttgtatctaccaagtatgagacagagcatccagtagtcgtagtacatccagaaactggcaagaaaagcctcttacttggacattttttcaaaagacttgtgggatttagtcaaagtgattcgcagcttttatttaatattttacaagaaaaagtaacgcgaccagaaaatacagtgcgttggcaatggcaggaaggagatgtggtgatttgggataatcgctctacacagcactatgcagttaatgattatggcgatcaacatcgcgttgtacgccgaattacacttgccggtgaagtaacgactggtgtacatggcttaaaaggtaaaaccacattacccaaagatttatcagaagaacaactcgaaaaagccaagcttcatgctgttttaaatgccaactaa

SEQ ID NO: 56697 - DNA, 822 bp, Acinetobacter baumannii
atgaaagcatcatcaattatcgagttcaggaatcctatctcaaaatatcagaatgattttgacggcggacaatcttcggatcatcaaattataacgaatgaatttattcataaaagtattcgtattttagaaaactatcaggttattcaatctttatctaatacagagaagtctacgcttattcagcatttaaaaataagaaagtattatcataatcaaacgatatacaatcaaaatgatccgtgcactgatatcaatattttgcttgaaggcgcgcttaaacttggctggagcacatctcaaggcaaatatcacaccgatatttttgtgccctcaggtacattaatcaatattgttccgatcgtaacgggtcaacccctacttcacgaccatattgcacaaggtagaacggtaattgccaaccttcctggccaattgtttatggatgtcatcagaaataacgcagatgctttgtttatggtgttgaaattaatctgtgtaagaacacaactaaatcgtgagcaaaatttcatttattcaactgaaacattgcaaactcgtcttgctaaaaaactagtttttctagtggattatcattcctatcaggacaaagataaaattttactgaatctcaaattgagtcaagaaaatctggcagaacttttgcagacttcaagacaaagcattaataaagaactagcagcgctttcgaaccaaaacattattgaggttaaatacaatcaaatctttattttggactttgaaaaactaagcgatattgctcagactcatcagttcaacagtaccactaagtttctttga

SEQ ID NO: 56698 - DNA, 1665 bp, Acinetobacter baumannii
atgacagatgtaaatatcaataaccaacctaatattttattgattgtggcagatgatttaggcttttcagatctaggtgcttttggcggagaaatcaatacaccttatttgaatgaattggcattaaacggcttaagactgactaattttcatacggcgtcaacctgctcccccactcgtgcgatgttactttcaggtactgaccatcatttagctggtttaggaaccatggcagaggccctcactccagaactcgaaggtaaagaaggctacgaaggtgtattaaataacaaagttgccgcattaccagaattattaaaagatgcgggttactacaccataatgtctgggaaatggcatttgggactaaaaccagaatattttccaattaaaaaaggatttgaacgttcttttgcactattacctggtgcagccaatcattatctatttgaagcggatattccagaagaccaaattccacggttacttaagtcaacaaaaggactctatgcagaagatgatgagttttcggaagaactacctcaagggttttattcatccgattattttaccactcgccttctagactttttacaagatgatgaagcacgtcaaggacgccctttttttgcatacctacctttctctgcaccgcactggcccttacaggcacctcaggaagatatcgatcgatataaaggacgttatgcggatggccccgttaaattgcgtgaacagcgccttgagaaactcaagcagcttcaattggtagatgcggtaacaacgattcatcctgtcctcgctagaactccattatgggaaaatcttactcaagagcaacgtgataagtcttcaagaattatggaagtctatgcggctatggtagatcgtatggatcaaaacgttggacgtgtagtggaatatctcaaagatcgaggggaactggacaataccattgttatttttctatcagacaatggtgcagaaggtgctcaactcgaagctctacccgtctttggtggtcaacttaacgaaattatcgagcaatattacgacaacagtattgataatattggacgcgcaaactcatatgtttggtacggagagcattgggctcaagcagccaccgctcctgctcgcttatataaagcccatactagcgaaggtggaattagaacagtttctttcattcactacgcagggtttaaacgccaaaatcagatcagtcacgaatttttgacggtcatggatttactaccaaccctactggattatttaaatattcagcatcctggtcaggtgtataaaggtcgtcaattggtaccactccgtggtcgttctatcttgccatacttacaagtacaacaagatcacattcacagtgaagatcatgtcacaggctgggagttatttggtcaaaaggctctgcgcaaaggcgaatggaaagcactcttcatccctgcgccaaatggtccaaatcgctggcagctatataaccttaaagatgataaaggtgaaactcatgatttggcaaaacaatatccagaaaagctcgatgaattactcaaagaatgggcaacttatgtcaaagaaaatggtgtgattgaaaatgtgcaacaacgaagattattacaaaatgatcagctagaaccgtttgaagcataa

SEQ ID NO: 56699 - DNA, 735 bp, Acinetobacter baumannii
atgagtgatataaactccctgatccacgatgggactatctggttattggttgctttttcaattgtgacgtggggtttgattgtcattaaactggttcaaacccaaaaagccaaccgccaaagtaaagcctttgcagaagaattctggagtgccaaaaatctgcaagatgcgattcaaaaatcggaagtagggcaaggaccagtggcacgcattgcaaatactggttttaaaacacttgccgatgcagacgatgatactcatcaagatttacaacatagttggagtcgtcaagatttacttgagcgccatttacgcaaacaaattttgtctgaacgccgccaattagaaaaaggctctgccttgctcgcatcaattggtaataatgcacctttcattgggctatttggtacagtctttgggattatccatgctttacaggccattgcacattcgggtaatgccagtatggatgtcgttgcaggaccgattggtgaagcgttagttgcaacagggatcgggattgcagtggctgttccagcggtactggcatataactatttcgtgcgtaaagtaaaaactatcggtgcagaactagatgactttgcgaccgattttgtcagcctaaaccaaaaatcaggtttccagcttaagactgtcaaggcaaaaacaacaaacacgagcactccagccagcgatttaagccatacccacaataaagaaaaggtatatgcataa

SEQ ID NO: 56700 - DNA, 843 bp, Acinetobacter baumannii
atgagtgaatttagtcatggctcgattagaaaagcatttttatttgagcaattatccaatcaggtcacctatacaacgacggttaatgatccctttagccataacgtagatggtggaaatgatcccactgggccaaaaaagaatgctttagcaattgcgattgtcgccgttgctgcggcacatttgggaatctggtatatcgccaaacaacttcctacacctcagcttgatgtcaaaacacctgatcctgtggtgatagagattgtcaaaccacctgaaccacctaaggtgattgaacctaaaatccctccagtggtgcaaaagccaaagataccgcctgttagcccaaagcctgagcctgtacaaaagcaaatagagacaccaaaaccagtacagaaacacattgagcaacctaaacctgttgaacagcataaggctgtagagcaaccgcgacctgtagcagaacctttaagtaaaaacgtggtggcggctcctgttcaacaacccgtttcaaaacccgctgaagcacctgcaaaagctgctgatgacaacttgccagttacagaagcaaaaggctatgcaggttatttgagtaatccagcgcctgaatatcctgaacaggctctcgatcgaggttgggaaggttcagtcatcttaagggtaaaagtcttgccaaatggcagccctgatagcgtgacagtcaaacagagcagtggcaaaaaaatactcgatagtgcagctgtgagaaccgtaaaacaatggaaattctcacccgctttaaaagggaagacaccagtcgaaggttgggtcgatgttcctattcactatcagctcccgaaataa

SEQ ID NO: 56701 - DNA, 816 bp, Acinetobacter baumannii
atgacaattacccttaatacaaatactgaaaaacatcaccaatcttttcaatctcatgctcaaacacgtgtggcatttcaccatgttcataagtcttttgtcgttaatcaacaacctgtcaaagttattcacgattttaatctagaaattaaagaaggggagtttattgcgattgtaggtagcagtggctgtggtaaatctacactcttacgtcttttggcaggactagatcaagattttgatggtcggattttaattgatggtgccgatgtcagcgggattggcggcgatcgtgcggtagtttttcaagaacatcgcttatttccttggcttaccgttgagcaaaatattgagctgggtttattaaatgaggcgttaactgcgcgtgataaagatattctggtccaaaaagcaattgaattgattggcttaaatggctttgaaaaggcatacccacaccaactatctggcgggatgtctcaacgtgtagccattgctcgtagtcttgttgtgcaacctcgtatttttctgttagacgaaccgtttggtgcattagatgcattaacacggcatcaaatgcaaaatgaattgctacgtattcaatcccaacaaaaaatgaccactgtttttattacacatgatgtggaagaggctgtaactctggcagatcgtgtggtgattttaaaacctaaacctggtcgtgttgaacagattattcccgtcaacttgccacgtcctcgaaatcgttcaagttttgaattgcatcaattaaaagaacagatttttcggattttgaccgaagacaaaattggttaa

SEQ ID NO: 56702 - DNA, 1626 bp, Acinetobacter baumannii
atggatatatatcgagatatgaaagaaataatttcgcaaaaaaactcatccggcattgtctggaaaagtaccaagaaaccatggttcatttctgttgggtattttaactcgcttgcgatctattggattgtacctctttgtttattcttactgtggtgggtagcgtcaaacgagcaatggatgcctgcccaaattttacctaccccaaaagacacatggcattctttcgttgaaatcgcatctcaagatctatggtcacagcttgcgatcagtcttgagcggtttggtcttggcctattgtcaggtgtgttaggcggcgtatttctaggtgttttactgggttatagccgcattgcggaacaatacctttctgcaacgttttatgcgttggtcattatcccaacattggtttggttacctttgctcatgatctggctcggcatcgaaaatagtttaaaaattttcataatttttaaagccacgatggtaccgattgccttacatactcaggcaggggtacgtgacattcaacccaaactcaaagaaatggcagcaatcttacagtttaatcgcctaaccttactcacaaaacttgtactgccagccacacttccatatttctttacgggtttaagacttgctgttgcagcaggttggacgagcttaattgctgttgagttgttggcttcatcggaaggcattggatatttgatggtggcaggtcgtcagctatttcagcttgatattgtctttgtcacgatttttgttattgcgtctgtaggaattattttcgattttatcctgcatcgaattgaacgtaagtttgtgttctggccacatgctgctctgagtgctcatacttttcataaaaaaaaccgaactgatgttttcaaatcgtgggttttacctttgagtttagtcgtgctttgggcagtgagcagttggtttaacttgatttcgagtcaaatcttgcccgcgccgtggaaagtattagaagcgctatggtcaggcattcaagatttctcacttactaccgccatgtattacagcctttatcgtgcaattttgggtttgattattggcgggttaattggggcttcagtaggaattgtagtgggtctatttaaacctattgaaaatctgttggcacctacactcaacacattacgtctcattgccatttttgcttggattccgctactgacagcttggtttggactcgaagatttatcaaaaattgttttcatttcaatagcgacattttttccgatgtttattgcgacatggaaaggcatgtcgagtattccaatgcagcttgttgaagtctcaagcactttaagaatgacattgcttcaacgcttaacgcttttgattttaccgagcattgcaccttcaatgtttgctggatttcgattggccttgctctattcgtggatggcatcttttggagctgaatacttgatgggctctggaattggcataggtagctacatgatggctgcacagcaaaactttgaaatggagcgtgtgatagcagcaaccgttttggtcgctggtttaggggcgattctggcatggctgggcaaaataactgaaaactacgcaacatcttggcgaaaaaattga

SEQ ID NO: 56703 - DNA, 246 bp, Acinetobacter baumannii
atgaatgagcaaaataaatgccaagctttatacctatataaatcaaatataggaatggattataattttttagagtgtttggatttaatcaaaaaagacaacattgtgtttgagaagcaacatatcataaaaaaagaattgtgtttatttttaatttataagagaaaatattttcagaataaattagatgaattttggattaaatatatttatttgttatttattaaaaaacacactgaaatgtaa

SEQ ID NO: 56704 - DNA, 240 bp, Acinetobacter baumannii
gtgttagccggatgcttacattacaacgatgcttaccaagctttgattcaagggctgagtgaggctaatccatacttatgtggtgaacagtttacggcagcagatgtaagcgtgggcgcgatgttgttatggcaattgaaaatgaacacgattgaatcacatcctgtcattacacgttatgttgaaacgattaaacaacgtgaagggttaaaacaaagcagtatgggcggattattgtaa

SEQ ID NO: 56705 - DNA, 525 bp, Acinetobacter baumannii
atggattattgttcatctaatttagatatttttattaaatttcttcaattattagtgccaatatgtataacaggttttgtttattatatttggcataaacaaaaaagtaaggaattactttctttagaagcaaaaaatttaataatggagttttttgaattaaataaaatttttcatgatttggagaagttaaactttgataatgttaaagacatgcaattaaggataagagagtttaattcacataaagttaaagttcttgctaaattaatatttctacaaaattgccttggaaatattgattttaaaaataatgtagatatttttaaaggagaagtatggaaagtttcgttcatttatgaagcatattttgaaaatgaagataattatgctgtaactaaattcgaattagataaagcattacaaccaaaaacaatatttgataatgatttacatccaatgcttatttctcaagaggtcctacttgaagcatgtaaaaaaattgctatgtacagatctatttaa

SEQ ID NO: 56706 - DNA, 657 bp, Acinetobacter baumannii
atgaacgagctaatttctgctactgctacaattcaaggtgcacaaattcaagctaattatgcactttgggcagctgtagttgggggagtaataagtggcctagctttaataatttcaataaaacttaccgcaaattctactttaaaagcacacaaagtagataagttagcagaagctagaagagatatatatttagagctaattagaaattggtatagttttatattggtttatagctcttatacaataattaaaaataataaagatatagatagtgaaaagaaagactttaaagatagatttatggcttcatacagacaattaacaacatcctttcatgaatcaagttttatttctgaaccagaaacaaaagaaaaaattttggattttacaatgcagttttcagaagactttttttatttaaacgatgagattgatagatggtatgcaaatccagaagagagaatgaaaattcagtttgagttaatggatttcatgaatcaatatggcctaaaagctatgattttacagaaagatttacgtttagaaatgggcgttaatgaaaatgaagagatcaatgagcgaattctgaaaaagcaaaaagctttttcagaaagaataaaggctaagattaaaaaacgaataggaattgaataa

SEQ ID NO: 56707 - DNA, 1347 bp, Acinetobacter baumannii
atgaaaaataaactatgcgatgacacattaaatgaagaaagttgctcagatagttcaaacttagataaaaatttagaagtacaactaggaaatactttaagtgccattcaaacatcacaacaaaaaagtttgagctctattttcagtaaaagcttagaagcacaactcggaaatactttaagtaccattcaagcatcacaacaaaaaagtttgagctctattttcagtaaaagcttagaagcacaactcggaaatactttaagtaccattcaagcatcacaacaaaaaagtttgagctctattttcagtaaaagcttagaagcacaactcggaaatactttaagtaccattcaagcatcacaacaaaaaagtttgagctctattttcagtaaaagcttagaaacccaactaggaaatactttaagtaccattcaagcatcacaacaaaaaagcttgagctctattttcagtaaaagcttagaaatccaactaggaaatactttaagtaccattcaagcatcacaacaaaaaagtttgagctctattttcagtaaaagcttagaaacccaactaggaaatactttaagtgttattcgtgcctcacaacagaaaagtttgagttctattttcagtaaaagcttagaaacccaattaggaaataatttaagtgctattcttgcatcacaacagaaaagtttgagctctattttcagtaaaaacttagaagcacaactaggactagaaaatgctttaagtgccattcaagcatcccaacaaaaaagaatgctagattacttctcatcccaaccaattattcaagacttagaatcaactaatcttcccacctcatcagataaagatgatctcaccattagctcaactactaaaaccgaagaaaagaattccgcctcgataatcactcatattatgttattggtttttataagtattagttcgagtccagtatttaagaaattatccgtagatgctgtttttgatttaactatagcttttgtcttcgaatatgctattaaacctttagctgacaaattaataagaaatgattctgaaggagctaattgtaatactgaaatcacttctaatatttctaaccaagaagccctaaatcaatttcttgcaaataaaagagttgttacaaaaaccttagacttttttgaatcaccaaaaaagaaaagctcaattattgagagcctgcccacaggtactctgctaacagttatacctgataaaactatttctaaatcctggttaaaagttcgaattactttagatcaaagtgaagttgaaggttatattttaaggcgttatacatcaccagttaaataa

SEQ ID NO: 56708 - DNA, 585 bp, Acinetobacter baumannii
gtgcgtggaatctattggttgtctatgcctgactatagcgatcaaaatacccttcatgccaccacgccgctgccacaatattactggacaggtgatacaaaaatggcatgtatggccgagtgtttcagaactacctttgaacatggctatgctcaccatattcagcgtttaatgattacaggcaactttgcgcttttagcaggtgtaaatccatcagaaatttgcgaatggtatttagctgtctatgtagatgcttatgaatgggtcgaattaccgaatactttaggcatggcgatgtatgcagatggcggcatcatggcaagtaaaccctatgctgcatcaggtaattacatacataaaatgtcaaattattgtcagcactgtacatataacgtcaaaaccaaaactgaaccagacagttgtccatttaacagcttgtattggtattttatgagccagcatgaggccatatttcgtcaaaatccgcgaatggcgatggtctacaaaaaccttgatcgtatgaaagataaggcttctgtcatgaagcatgcaaagttacttattcatcaacttgatgagctttaa

SEQ ID NO: 56709 - DNA, 1824 bp, Acinetobacter baumannii
atgccagcatataaagctcccctacacgatatccgcttcttaatgaatgaagtattagactatcctgctcactataaaactttatcaaatggtgaaagtgcagatccagatactgtagatatgattcttgaaggtgcggcagattattgtgaaaacgtactctctccccttaaccaatctggcgatgaagaaggttgccattttgacaacggcgaagtgaaaacaccaaaaggttttaaagaagcttatgaccagtttgtaatgggtggctggcaaggactttcttatcctgaagaatttggtggccaaggccttccaatgtctttaaacctgattaaatcagagatgatgggtacagcgaattggtcatttactatgtatccgggtttaagctcaggttgtatgaatacgattttgcaattcggtacagatgagcaaaaacaaacctatatgcctaaacttgttgaaggtacatggagcggcacaatgtgcttaaccgaacctcaatgtggtacagacttaggtcaggtaaaaactaaagctgaacctcaagctgatggtacttataaaatttctggtacaaaaatcttcatttctgctggtgaacacgatttaactgagaacattattcacatcgtgcttgcacgtcttccagatgcaccagcaggtacccgcggtatttctttatttattgttcctaagtttattccaaccgctgatggcggcgtaggtgaacgtaacactgttagctgtggttcaatcgaacataaaatgggtattcgtgcttctgcaactgctgtgttgaactttgacaacgcaacaggctacctcattggtgaagtaaacaaaggcttacatgcgatgtttacttttatgaacactgcgcgtattggtactgcggttcaaggtattgcacatgctgagttatctttccaaggtgctctaccttatgccaaagaacgtatgtctatgcgtgccctttctggtaaaaaagatccagataaagtggctgatgcgattattcaccatgctgatgtacgtcgtatgttattaactcaaaaagcgatcgctgaaggcggtcgttcaatgatctactacgcagcacagcttgctgataaaatgacagacgctttgacgcgcggtgaccaagctgcatttgaagattatgatgacaaacttggtttctatacaccaattttgaaaggtttcttgactgagcttggcctagaagctgctaaccacggtatgcaagtgtatggtggtcatggctacatcaaagaatggggtatggagcaaatcgtacgtgatgctcgtatttctactttatatgaaggaacaactggtgttcaggcactcgacttgattggtcgtaaagtgttgttaagctcaaaaggtaaagtagtgcgtgaatacactgctgaaatcttaaaattctgtgcaacacatgcacgtaataaatacttacgtcgtttcgcttgggatttaacaaagctttgtgctcaatggaacactttaactgttcgtatcatgcttgctgcacgtaaagaccgtgatatcgtatcttctgcttctgtagatttcttgatgttctcaggctatgtcatgatggcttatttctgggctcaacaagccgtagttgcttctgaaaaattagaagcaggtgacggtaaagaaactccggaattctataaagcaaaaattaaagttgctgatttctacttcgaccgtttattaccacgtgcacaaggtcatgcagaatcaatggtaacgacttctcgtacacttacttcattaccagttgaacactttagcttcgactattaa

SEQ ID NO: 56710 - DNA, 492 bp, Acinetobacter baumannii
atgcttcatgctgaatactcatttctggcatacgtgccaaaagttttagccatagcaatttactactataaggtctggtttgaatttcagactctaaatctagatagcgctgttgcagtgcatgtaaatcgtctaccgaagcttgatcgaattgttgaagaagctgttgcaaccataaatcacgatgctcagcatccaataatccatacttcattgaacgcaaatatacccatggttgctgtaaagcaagctgcccccataacgcggttaatcgttgttgatatgcagtctcgatctcttcaagccaaggtgataattgatgttgatatagaaactcaagatgagttaatgcacgttcagcttcattttgagctagaaatatttcaatacgctgcaactcggctaattcaaaagccattggtggggattgatctaaagcatctaatgctttttgataatctccacttaaaaccaaaaacttggcatcaataa

SEQ ID NO: 56711 - DNA, 1602 bp, Acinetobacter baumannii; identical to SEQ ID NO: 54235

SEQ ID NO: 56712 - DNA, 1815 bp, Acinetobacter baumannii
atgttaagtgcaaataaagagaaaattcagtcatttttaatggggagcagtcaatatcatattccattctttcaaaggccatatgtatggaaaattgaaaattggcaggaatttattgaaagtgtaattgagcaaactgaaatggctagtgattctgaatcagaacatttcattggcacaattatagttcaacaaaaagaatcaactaaaattggtgcaattgaatatgatctagtggatggacaacaacgattaacaacaatttgtttactgttaaaagctattcaagatcttgctcaaaaagaagcaacaaagaattggatacaaactctactaactttcactgacagtgaagctgaattgtgtccgcgaattattcatagtagaaaagatgtagaacttttcgaatctatattatttgatgctagtcataatgaaaaaagttggaaagattttgaaaagttatcaaaagatcaatgggatgattattttaataaagctttagaacataaaacagttttaggctgttatctatattttagaaatgctgtgaataaatatttaaactctaaaaatatagatatagatactcaagatcaattaattaaaaaaattgtccaaacaattctaattaaattacctgtaatacatatggcgttatcaaaaaaagatgatgttcaagagatattcgatacgatcaactctcaaggtgttaaactaacgacagctgaactgttgaaaaactttttattcaaaaataatgaaaaatcaataaagctatatcaagagaattggtactctatttttgaagctaatgaagatgatatcgaattttggtcatcagatcgtacatcgggccgtatgcgtcgatcaactatggagttgtttttatatagttatcttgttatcacgaaagaaagcaccgtaaagcttgaaaagctatttagagagtataaaaatcttatcaaacagaaaaatcaggatgaacttgttgctttgataaaagatctgaaacaacatgccgaggtctatcgacaaattcctgatggaattgacttacgtgctttatcttatggggaatataaaaagcgttttttccaaattgcttcggaattcgatattacgactataatgcctttaatgctatttattatgaaacaagtaaaggatgaagcagaacttaaaaagatattaaaagttctggaatcgtacatagcaagacgtacaatctgtaagatgacgactaaaaactataacaacttgtttttaagtttattggtagaagtaaaaaaatgggacactattactagtgaacgatttttgaataaactccttacctataaagaagatactaatatttttcctagtgatgagcaagttaggaaagcaatatttaataaagcactgattaataaatatacccgtgaagttttatatatcatctctttatatgatttaagtgatcctaaagttgataatcatgttctatcattagatggtttttctttagagcatctgatgccaaaaaaatggcagaataattgggatatacctgaaacgaaagagttaattgatcaaaacaattacaagcttttgacattagggaacttggctttgataaaaggtacattaaactctaaattgcgtgatgcagcttggtcttctaagcgtaaagatttagatacctactcaacactaaaacgaactagagaatgtttagataaagaaatctgggatgtaaagcagattgatgagcgttctcatagcctttttaaagctatcatgcaaatttggccgaaagaatcattagtttag

SEQ ID NO: 56713 - DNA, 714 bp, Acinetobacter baumannii
atgaaaaagattctttttttaagcttagttcttggtttagttggttgcaaagaaactaatacaggtatggataaaaatttatttaatacctcttatgataagtgtgtagattatttaatttactctttaaaaagcccatctagcttaaagattagagaagccaatatctctacagttatccctccagctgaggatattgctaatgtctttggagatctcattactaaagatgggatagtaaaagatagtgtcaaagaagagaaggctaggtttagagaattaacagttgatattgattatgaggcccataactcatatgggacatcaattagaggatattatcaatgtggctttatttatcaattaaataaagatgaggtaagccctgagccattgaatacttatctatacaagttgaaaagtgatggtgaagatattggtttggccgcacatattcctcttactgagtttcaaggttcaaacttttatttaaataaagctattaaaagagtagtgggtgccaaagatagtccattcaacgaaattgataataaacgctataaagaaatcgaaacaatttataaaaatcaaaaacaagaaagagaagctgaaaagttgcgtgaaagttgggatgaatccatgcctagtgcagaggtggcagcagcggctgccgcggccgatattgcagctgtggctgatgaatctgaaagatag

SEQ ID NO: 56714 - DNA, 705 bp, Acinetobacter baumannii
atgaagagaaatatgaaggaaattgaaaaatatgttggatattatttgcttatatatatttgtgttcttgtagtttgcggattttttcagtatatggttgtgtgccaagggaagtctttagaatgcaattttagtatgactggaataaatactattattactacaactgcttatgtaattactccacttgtagcaattattggattttcaagttggaaaaaacaacacaatttagaaattagatcaaataaagctcaagaaactttagatttatatgaaaaagcaaattttagcttacttacattggataagcattatgcgttagctcagtttgaattaaaaaaaattaacctatcttctgatgatgataatgaaaagattaataaagctttagcagtttataaaaacttagaatcttctatgaataatagtcttttggatattgagtctcaattagaggtgatattttttagagttaatacgttagctattaggactgaaatggcagatttattagtattaagcagtgaagtgaaaacaagtgttagtaaccttttacagcctataagagacagggataatcaaacaatgtctaataaagaatttgataaattttataaagaaattgtagaaagtgctgctaaaactgttattgaaaactataaaaaagtagtaataattttagataaatatattgaagcttaa

SEQ ID NO: 56715 - DNA, 1299 bp, Acinetobacter baumannii
atgaaacatgagaacaaagtattttttctcatcgatgtaaataacatgtacgtttcatgtgagagagtctttgatccatttttgaatgataaacccgttattgtgctcagcaataatgatgggtgcgccgtggcgcgtagcaacgaggcaaaatccttaaatataaaaatgggtgtgccgctttttcaaattaaagacattgttcagcaacataaagtaatcgttctttcaagcaactatgcaatgtatgcagaaatgtcacggcgctttcatacgatccttgcctcttacgtaactgcagaagaagttgaaccgtactcgattgatgagtgctttgtagatttcacagcttatgaaaagaattttgacttagaaaaagttggccagcaaatgcgccaacaaatatggaagtggttaggcttacctgtctgtgtcggaatcggcggaagtaaaacagaagcaaaaattgcaaatcatattgcaaagaaaaatcccggatttaacagcgtttgtgacctcgttaatatggatccgtgtaataaagaatattactttgctcaaatagacgtttccgaggtttggggagttgggcgtaagcacgcaaaaaaactacatggtatgggagttaagactgttttagatttagcatgtactgaagcacgcgaaatgcagcggcaattttctatcgttatgtcgagaacgattaatgaattgcagggtatctcatgcattgaaattgaagatacaccaccttcaaaaaaacaaataataaaatcttgttcatttggtacaaaagttactgagctctctgatttgaaagaagcaatagccatgcatgcacaagaagcttgcaaacggttgcgtgatgaagagtcactatgtggttgtctacttgtatttgttcaatcaagcccgtttgatgaaagtgcgccattttacaataagtctattacaggcgcattttctgaacccacagattgcgcaacagatttcgtaagagcagcgacaagaatgttgaacgatatttataaagaaggaattaaatataagaaatgcggtgtagtgctgacatgtttagaaccaaagtctggccatacttatgacctattaactgactttaaacaaatagagaaaaaggaatgtttaatgcaggctatggatggtatccatagtaaatttggaaagaaaaaaattagcgtgggaccttgttttgtacccaatcggaactggtcaatgtcgcgggaaaaactgagcacaaatccatttaactttgatgaactaataactataaaagactaa

SEQ ID NO: 56716 - DNA, 195 bp, Acinetobacter baumannii
atgcgtgcgcttgaggcagccgaagaacttgaaaaagagggcattgagctttcagtgctgtatgtaactacaattaagcaaactatttcggatgaagtcggtaaagacgaacctcctgttttaactgccgaaaatcattcagtgattgatggtttaggggaagcagttaggtcatactatttaagaaataggtaa

SEQ ID NO: 56717 - DNA, 495 bp, Acinetobacter baumannii
atgattattcacgaagctttaaggctcttaacatatactggaattattaaagttgaagaaaattatataaaggcaactaaatctgaattaggtaatagatttgaagtaaaatatggttgtattattgctctagataataatccgacaagtatatctaaagacttttttcagaacttaaatatagctaaattccctgaattcggaaagaatagcccttcttatcaagggtatgatagcatttcacttcattcagaaggtgaaacaaactattcagatgctttaagatcattattacagaaatctattgatgtacttgatcttttaacactatggcaaagagataaattaaaaggtgccaatataactactttggaagctcttttaaataaatctgaagatgaacttattgcaaatatttatcaagttggtcctcatagagcaagagtaatgaaaaatgctgcaaatgctgaaatccttgagtatatctccggctaa

SEQ ID NO: 56718 - DNA, 903 bp, Acinetobacter baumannii
atgaatcttgttctcccagatatttctgccgagccaactttaccaaatgcctatagccaccgccttgattgggttggcatggaaaacattgcattaccagtccgaattgaaaatactttatgctcaagtcaggtcaatgcttatgtcagtctggatgaccctttagcaaaaggcattcatatgtcgcgtttatacacacgacttttagagttaacatcactcgaaaatataaatatgcctgatttaaaattagttttagaggactttttaaaaagccatcaagacttatcacagcatgctaaagttgaaattcacagtcagctttatatcgaacgaccagcattagtcagtaagctttcaggatggaaaagttatccttttgttttgtcatgccaactttctaatcatcaatttgaggcagagttaaaagtagagattccctattcttcaacctgcccatgctctgctgcactttcaagaaatattattcaacaacggtttgagtcagccttacaaaaccaagaaattcggcttgacccacaagacattatgaactggttaaataccacagatgcaattgcagcaacgccacatagccaaaggagtattgcccgcctgcaatttaaactagatcaaaaccttcaaaacattccactcatcgagtttataaaccgagctgaactggccttaatgactcctgtacaaacggcggtaaagcgtattgacgaacaggcatttgcagttgccaacggtcaaaatctaatgttctgcgaagacgctttaagacgtctttatggttcatttatacatcacaaaaatattcatggtttcaaatttaaagtgactcatgcagaaagcttacatgcacatgatgctgtggcccaagggacatggcagtggtaa

SEQ ID NO: 56719 - DNA, 561 bp, Acinetobacter baumannii
atgctacgtaaaaatccatctggtcatcttcctgtgattgatcaatctgcttatgtcgatcagaccgctattatttgcggcaaagtcattgttcatgccaatgtgtttattggcccttatgcggtgattcgtgccgatgaaactgacgaaaatggagagatggaacctattattattggagcaaattccaacattcaggatggtgttgtgattcattccaaagctggcgcattagttgtgattggtgaaaatacatcaattgcccatcgttcaattattcatgggccttgtgaaattggtcaccatgtttttgtgggttttaacagtgtcctatttaactgtaaggtcggtcatcatagcgctatccgtcataacgcagtagtcgatggatgtgatttaccgaaccatttttatgtccctgcaatgagctacatcaactctaaaaccgacttagaccaataccctccggttgatatcgctatcagcgaattttcagagagtgtcgtctcaacaaatattgaattagtcaaaggctacaaggcattacacaatgagttttaa

SEQ ID NO: 56720 - DNA, 1356 bp, Acinetobacter baumannii
atgagttttaaaccctattctaaaattattattcgagatgccaatgtagtaaatgagggaaagcagcaatgtgtagatgtacttattcaagatggacgaatcgaaaaaatttcgccaagcattcctcatgttgttaacgctaaaacaattcatgctaatggaaactggctaatccccggaatgatcgatgatcaagtccattttagagatccaggctcaacccataaaggcagtatagcttcggaatctatggcagcagtcattggtggaattaccagttatatggatatgcccaacacaaatccaccaaccctatctttagatgccttaatacaaaaaaagcaaattgctgcgcaatatagcatggcaaattatgccttccattttggagtaagttctaaaaatttagatattgttgaacagcttaatcccaagctcgtcagcggtgtaaaagtttttatgggagcctctactggcaatatgttagttgatgacccacaagtgcttgaacgattgtttgccaatgttcctaccattcttttaacacattgcgaatatacaccgcgcattaaagaaagagaaaatttatattttgagaaatatggtgcaaacattccagcgcatatacaccctaaaattcgggataaacaagcctgctttgaaagctcaagtttagcagtgtctttagcagaaaaatatggaactcaactgcatgttttacatattagtacagccaaagaattatgcttgtttaaagatttgcccttaaatttaaagcacatttctgcggaagtatgcattcatcaccttagttttgatgaatcagactatgctgctctgggccatttaattaaatgtaatccagccatcaaaacccaacaagacaaagatgcacttatcattgccatcgctcaaaccaatcgcttagatattattggtacagatcacgcaccgcatacatgggaggaaaaacaacaatcctatttaaaagcaccatctggcctacctttagttcaacatgctattcctgcactcatggaacttgtagcagataaaaaaataaatatagaaacaatggtgaataaaacatcacaccaagtcgctgatttatttaaactcaaagatcgagggtatatacgtgaaggctactgggcagatttggttctgcttaaagaaaataaagaagctatggctgtcaaagatcaaaaaaaatatatgcgatgtaactggacgccatttcaaaacaaaaccttccgttatgacgtcgatacaaccattgtttcaggacaattggcttggcatcaaaatcagttatttctaagttgtagaggtaaagcattggacatagacagataa

SEQ ID NO: 56721 - DNA, 1197 bp, Acinetobacter baumannii
atgaaacttactcaaggggtatgtggggttactttagctgtttttttatcagcttgtggtgggggaggtagtggaggctattatgatcaaagttcaagttctgattcaacaacaacgccaaatacaccttcaaaaaatcaggaacttgctacttctgttttaaatagtgtaaagcaagaaggaaaatatttatttggtacctatgatcttaatgatgaaaatttatcaaaaggttatatcgatcatgcattagatactttcgcacaaggacctttaaagttaactctcgatattagaaaagtagatctcactaaattttcagatcactatcgtgacaaatgttttattaatagtactacagactatcgcgcctgctacgtttttaaaggggaagaaataaaatcattacttacaggttataatgattgggattttgatattacagcagatgatttaaagaatattaaactcgcgtctgacaatatctctccaaatctacaggattatcaatctaataccagaatttatatttttgaaaatgaaaataaggataaaaatttccaagatgtaactattactggagcttttgcatatccattccaacaatcatggggacttcaacaaaccaaacaaaagagatttgtattaattaactcaacgacaagcgattataaaattaccacaacgactactgttcaagatccacaaacaggtcaaccaactgaaaaagaagtcactacaggtgcaatgagcgtatataaagataatacatcaactgatggtgatctatatgtaattcaagggggatctggttttaacgtacttatcaatgataaccctaatgttccttacgcagaaccaatttcatttgttgtaaattcgactcctgggaatacgaataatgcaacatatcaagtgaaactcaatggtaatcaagtattgagtttaccaagtattactggtattgaaggaagtcgcgttgagaatcaatctccaacaacgaatacacagaaatttaatggtagcatctatctggaaggacaaaatattttcacttttaaacagtcttcgaatggaactatattaaatttcaaacatgtaattaatagtataaatattgaaggacagtctattaatcaaaatggaactgtttcaactgctttaaaatcaccttttgagcaaaaatttacattttaa

SEQ ID NO: 56722 - DNA, 1053 bp, Acinetobacter baumannii
atggcacaacaaaaaccttttatcctagctttgaccgatggtaaagcaggccatgaaactcaaactcaaggaatagtgcaactactgaatcaacagcaagagtatcaggtcgaatgggttcaattaaatctacctaaaaaatggttgtatcgtgttctgaagttactgatcaagttttcaataaatacacagtggttacgttatttttttgatgcccaaaccttaagagcattagagcagaaacaggttgcttatattatatcggcagggggaaacactctacttgccaatctactgctcaaacaacatttacacaaagatcagtctgtgaaaaatttggtcgcgggttcattacgggggattcgcgctgacttgtttgatgtggtatttactattcatgaacaacaagctgttttgcctcattatttttactatccaattgcaccgaataaaatgagtgctttacctctaacacgcgaacaggccctagaacatttgggtattcaaaatgctgaacaaacgattacaattttgattggtgctgacactaaaacagtaaagattggtgaggcggcacaatgggcaaatgttttacagcaagttcgaaagcaatatcctacagcgagattgttactgacgacatcacgaagaacatcggttacttttgaaaaagaattgcagaaacttgccgagcagtatggtatttttcagccctatgaccagttaacatgggtagcacaagggcaaagttgtgatattaaggattatattaaagcagctgattgggtgttagctagtcaggattcaacttcgatgatcgccgaagttataatgtctggctgtccattagtaattttctataatgaaaatgctatgcatgatgaggatatcaaaaagcagctattctttttgaaaaagaaattatggattgcattatttgatcagtttacagtacaaaattttgatcaaatgctgcaagatctggagatgaaagaccatgcaaaagagatttttttcaaactaaggagaaatttatctagtcatagaatttaa

SEQ ID NO: 56723 - DNA, 465 bp, Acinetobacter baumannii
gtggtaaataaaataaaaggctttacattaattgagctaatgattgttgtagctattatcgcgattttagtggcgatagcttacccctcttatcaagaatatattcgtcgtactaatcgtgcggatatgcaaactgcgttgcaacagattgctatgcatatccaacgctacaaaattgcaaattttagagtaacgggtgcaacgagttctgatttaaatattgccacttcttatcctatacaaggcgcacctctttatacagtcaatttggctccagtgacagctggagctttaaatgcggaagcatggatattgaccgcgacgccgattgcaaatacttcgcagtccggtgatgggcatattgttttaaattatcggggtgagcgttgctggacaaagggaactgatattaacagtggtacggcttgcgttccttctgcaacatcgaattgggatggtaaataa

SEQ ID NO: 56724 - DNA, 477 bp, Acinetobacter baumannii
atgaaaggtaaattcacgtattctttaggctttactcttattgagctaatgatcgtagtcgtgattgttgctatttttgctgcagttgcaataccttcataccaagcttatgttttaagagcggatgcttcacgtgcgcagcaacaaatgcaacagatcgcagtgcaactctcacgtcagaaatctagaaattttaattacataggtttctctacaggggctacaaccccagtaattttgcctgttggggcaactggtagtgctattaaataccgaataactgtgcgtgatggtgacgatacaacgaaaaccttaacagatcctacagttttagggcaaaactgggtgattcgagcagaggcttcagatcctaataattttacttatttgtttactagtaacggattacgttgcaagaataaagccactagcaatgttacttatataacttgtggcactggagctgagccgtggtaa

SEQ ID NO: 56725 - DNA, 501 bp, Acinetobacter baumannii
atgaagagccttggacaccagcgtggtatggggatgattgaaattctagttgctttgctgattttggcaattggtattttaggctttattgctctgcagtatagagcgttagaagcaagtgcagaaagtacatcacgggtacaagcaattacattagcgcgcgatcttgccgagcgtatgagagttaatcgtaattctttaactgtatataaccagcaacttcaagatgccagtaaacaaacagactacgctaaaaattgctttcaaaacaattgtactgatacagagctagctgattttgatgttgctcaggttgtaaaaagtgcatcttcttatggtatgactatgaatatgattgcctgtccccaaactaacaatcgtcaatgtatttatattgcatggggagatactagtgcaacgaatggtcttggtgtaggagattgtactcaagatacttcatataacaataattcaacatgtgtgattatggaggcctattaa

SEQ ID NO: 56726 - DNA, 441 bp, Acinetobacter baumannii
atgattccgcaagaagggttcaccttaattgagctcatagtgacaattgtggttatggcaattattgctgtgatggctgtaccaatgtttggggatatgttgaataatcaaaatttgaatagaagttcagaggatctagtttcaagtataaatcaggcacgtatgaaagctatagtcgagcgtagacaagtaaaagtgcaattaaattctacatatgtggcagatagtgataatcaaattaattgggtaccaagcggaaaagctcaattaaaaataggatctaatacttctatagtatttttaatgtccggtttggtaaaagatgcaaccggagatacaacttttgaaatttgtaatacggtatctggtaataaatcaaaaattattaatgtttcaagaatgggatcaattcagtcaatcacaatggggacatgttcatga

SEQ ID NO: 56727 - DNA, 837 bp, Acinetobacter baumannii
atggaaacatcaaatttatattttattcattttccaaagatgtcagctttaaagatagggaaggctgatgatattgaagataggtataataatttaaagaaatattggggagaggcagatttaactaattcctattatgtaaatatgccatcacgtgaagtttataaatatgaaaaaagtcttcatttattatattcaaagtatagtatatctttgccagaaggtgatggtaaaacagagttttttgatattcaagttcttgataaaattataagctatttttcatcttgtactgattttgaaattaaaaaagatataaagttaaaaagtaaagaatttttaaataaaaaatctaaatttaaaagaaataaattaaaacaaagtagtaatgctgtttttcttagtatttctgaaatgaatattaggttgaataagttgagtaaattattgaattttttaattaaatttaagaataagttgttttttcagtatgacctaattgatggtgaatattattttagagtaaagttagatagtaatattgatgaaataaattttaataaactaattgataaaatttggaatctgttgtcttttaagaataatactcatactggctgggggtggtttactatttctacttggtgtacacgatgcttctcagagagaacttttcaaattgtaataactgatccgatgtcattagatagtgatcatttttgtaagatattcttcgagggatggagcgtactagtatatccagttttgcaaaaacttcctaataaatcaaatgtactaaatcataatctagccataactacttggagtattaattaa

SEQ ID NO: 56728 - DNA, 270 bp, Acinetobacter baumannii
  misc_feature (98)..(107): n is a, c, g, or t
atgaatttagaattagatcaagatggtcatttagtcgactatacgatttggaatcccgaagttgcacaggaactcgccaaatctctcgatcttgaatnnnnnnnnnnatttgggcattctcctgcaacacgtcctttgattaagtttttaatgaaaaccgtaagtccagatattaataatgctgttttacagcaaaaatttaataccggtttagttgctcgccatctcagtcgcttagcaggtattcctaaaccggcaaattgtttataa

SEQ ID NO: 56729 - DNA, 402 bp, Acinetobacter baumannii
ttgtgttggtctaatttatctgctataggggttgatgctttagtaattttaatatttagaggagctttagctgaaggaattttagctggaacaatgatattatctttcttaaagctaataattccatttggctttacaactatacccttaataatcgcattactatccgtaactttttttatcttgatatttccatctatgacgatttcaacttctttatttacttctttgctattatcatcatccaaaaatacagcattcacaatagtgcattgtccactagattcacctctagctatagcccttctcattgaaggcactctaaatacctctattaatttatctgcatatactaattcaaattttcctgtagctttatttctttccttatgtgtagcatag

SEQ ID NO: 56730 - DNA, 594 bp, Acinetobacter baumannii
atgaatatcgatactttaaagaatcaaatagaagttgaatttaaaaatgttactttgggggatgcttatactctgcctgaggaagattatgccgatacaagctactggtactttgataaaaggcgaaccaatttaaacttaactgaggaagaatgggtaaagcaggaacttttccttcttgagactggtaattggtttagagaggactttaaagaggctgtaaatgcaattaaagaaaagagaaaaatgaataataggtacagtaatccttttgaaatacctgtttcatatttagacaactattatacgggttttagttttttagaacctcagggatttctgttttataccccagctattatgagttctgtgttaaaagacaccgaagttctatcttcacctagtttttcatattggttttatcgtttaagaaggtcaaatacttttgaagaaatttctaagttattaaattgttttaccaaagtacaaatagaagtgctaaaagactttctgttatttacttccagtttatctctagagatgaaagaaggagtagatgagtgtttaaataatataagtttattaggattctga

SEQ ID NO: 56731 - DNA, 492 bp, Acinetobacter baumannii
atgttcgtgaaaaagggctttactagccccttaaaactaatcttaatttctatgtttgttctaactagttgcggatgtaccaatacacaagttaaaaattatagagaagatgttattaattcaacccgtggtgcagtaaatatgctgattatggatcaacccgtctataaaaatgctatagcatccgaaaagaataaagttacaaatgctttgctgtataccactttaaagaaagcaggtgttttaagcgagcttgaaaaagaaattggaaataactttgtaattgaagaaagcctttccttagctcaactaaataaactttgttggacaactaagtttcttcagcattataaaaaagacttatcccctcagtctcaagttgattatcagaaagtttatgcttgggtggatgccaagcagtcaacatggttaaaaaaactaaatgagggatatactaaagatgaactcggtgaagatgattgtcgaaagtga

SEQ ID NO: 56732 - DNA, 696 bp, Acinetobacter baumannii
atgtcagataaaaatttaagaaacccttatagtcgtaatatacctgacacttcgcccgcttgggatgcttatccaaccgaacaaaaagtctgtgaaatcactgaaccgctttgtaatgatcatattaaagttcgcaattacacaatggttcgaccttataattttatgatgaacattcagcgttgggcggaagttgaaaacaccattgaattattaatggcagttcggtttggtatggaatgggatgtcaataaacttcctgaaagcaatatggctgaccctgcatttcatacaagaatgtatataacgtttcataattatgtactcaaacatgcaatgaaagaaggtgcgcgaattgttggagaatttcaacagacagcctttaaagtacgctttttgagtacgtttgctgttgatgaattgcttgaactaagaaatcttagtaagtttgatcaaggcaaagaaatttattcaaaaattgaagacttgaaagatacttttgcaaagttaaatgctgccaaggctagtacaaatttggcacagttaagaatgaatgatggaccactatttattaatcgtgaaatgtttaaaaaggtttttaatcaagactttaatcctaaaatgattcaaattatgaaacaaaatagagagtatctaggagatccagttaatgttcgtgaaaaagggctttactag

SEQ ID NO: 56733 - DNA, 540 bp, Acinetobacter baumannii
ttggcgacaccctatatcaccataggttgcccaactacgggcggtggcaaagtaataagtggaaattcattatttctcattgatgggaaagctgtagcttgcacaggcgataaagctacctgccctacacataaattagtagccactattgtatcgggtgatccgtacatgaatatttttggcaaactggcggcacgtgttggtgactctctgtcttgtggttgtaaactacttccgcaacagaatttagttgttcaggataatgggggtggttctggacaaagttcccgcacaaatcaagcacaagatagctttgcacctcaaactgacgaacacggacttaagttccaacttaaagatcaagagacaggcaaaccacttgcacaacagtattttaaattaaagagtcctgacggaaccgaaattgaaggatttactgacaaaagtggttatacaaaattaattaaaacgggtactgaagccaaagaaattgatttaacaacttttgatttatccgaacctatggctgagtggaattaa

SEQ ID NO: 56734 - DNA, 954 bp, Acinetobacter baumannii
atggctaaattgtatgatgtggttgttaaaaatcgccgtgtagaaggtgaaaatatagcaattatagagtttgaatctgcaagctctacagtattaccaaaagttgaagcgggtgcacatattgatgtgtacctaccgaatggcatggtgcgacaatattcactatgccaaaatccggcacatatcggtatatttcgtttaggcattttacgtgatccggaatcacgtggcggttcagtttcagcctttgatgatttgaaagaaggtatgaaaattcaggtcagtgagcctaagaacctgtttcctctagtgaaggcaaaacatacggttcttattggtggtgggattggaattacaccactcattaccatggcttatcaattggtacagcaagaagaatcttttgaattgcattattgcggttcaagtccggaacgctgtgcctttgtgaatgaaatcaaaaatggtgtactagccaaatttacaacttttcattttaaatcggaaggtgcgagtcatcgggagtttttccagtctgctattaaaggaatagaccctaaaagccatatttatacctgtggtccaaatggttttatggattggattatcaacttagctgtttctcagaatttttctgaacagcaaattcataaagaatattttcaggttgaagtagaaactggtggcgatgcatttgaagttgttgctcagcaaagtggcaaaattattgtagtgaatgctgaagaaaccattttgcaagctttagcacgtgaaggaatcgagattgaaatgtcatgtgagcaaggagtgtgtggcacttgcatgtgtgatgtgatcgaaggcgaacctgaccatcgtgatgtgtattttaccgacgaagaaaaagctagtaatgaacaaatccttgtgtgttgttcacgatctaaaacacctcgcttagttttggacatttaa

SEQ ID NO: 56735 - DNA, 486 bp, Acinetobacter baumannii
atgaaaattgacctaaatttattgagtgaagtgactgctttcatttgggctgaagcagatatgttagaccattccgaacatgacacatggttaaaactatggaatgaaaagggtgtatatatcattccaattgatccaaacctaaccgattatgaaaataatttgaactatgcctatgacgaccatcatatgcgccagctacgtgtcgaacgtttaaaaaatggggaagcgatttcaactgcacctaaagctaatactgtgcgtagcgtgtcacgtattcgtattcttgaggatagcggtgatgaaattgttctacgttgcgcacaaaacttgcgtgaattccgtaaggagaatttaaaacattacactgctgatataactttccatttacaacgcgatgcagaacaaggttttaaaatcaatcgtaaaattatcaacttagtaaactctaccgatactttgtcgggtattagttacattctctaa

SEQ ID NO: 56736 - DNA, 1278 bp, Acinetobacter baumannii
atgaacagtattattccaacacaaaatattgagatgaactacaacgaacttgttcaaagtgatcgcgtacatacatccttatataaagatgctcagatctttgaagatgaaatggaaaagatattctataaaacttgggtttgggtagcacatgcgagcgaaattccagatgcaggtagttataaaaccataaatataggtaaacaacctgtagttgttgtgcgtgatcgcaagaaaacggtccatgtattgttaaaccgttgtcgtcaccgtgctgctaccgtgtgtgaacataaaaaagggaaaacgaatagctttgtctgcccatatcacggttggagttatgcattagacggtagcttacggggcgtaccttctccagaaagctacggtgattgtttagataaatctgaatttccattaattcgcttacgtgttgaagaatataacggcatgattttcgcctcgttcaatcacgatattgagccgttagaagattttcttggcgctgcaaaaaaatggatcgacttgtttatgaaacaaggtgcgggctatccaattaaagtcttaggcgaacatcgttttactttcccgggtaactggaaaattcagttggaaaataccactgatgcttaccattttcccttagtacacaaatcatttttaagttcggtggatgaacaaactgaagaattatttaactttgaaaatcagccggggtatgtcgaagacttaggtaatggccatagcgtgatggtgatgatccctgaactggttgatctagatgaagaactaatggaacgtccaattcaggagcgttttgaagaacttgcccaagctttacgtgatgaaggacatgaagaacttgaggtccgccgtatagtacgtgctgtaggagggtccggttttaacctgaacttattcccgaatattgcatgttcgatggcatttttccgtgtgatgcaacccatcgcagtggataaaacagagattcatcattctgtcattaccatggatggtgggccacaaattgctaaccaatatcgcttacgtttacatgaacattttcaaggcccatttgggttcggtacgccagatgatgctgaggcatgggagcgtgtacagcatggtgcaaatgcaggtaatgacttgtggatcatgttaaaccgaggtttaccaggtgaagtgaaaactgaagatggtctgaaaagtgatgtcagtgccgaaacagggatgcgtgctgcttatcagcagtggaaaaagttaatgatggcttaa

SEQ ID NO: 56737 - DNA, 528 bp, Acinetobacter baumannii
atgcttcatgatgttgatatgactaagctcctattacatttggaacaactaaaggcacagcaagaaattcgcaactgtataaatcgttatatggaaatttgtgatgccctagatgctcatacagacctgaatgagttaatggacttatttgatgcagagtgtatttgggaaggaattggtgagaaatatgccaaaacttttgggcgttatgattcatggcaagcgatttataacatgttcaaaagttacacccagcaggaatctcattttgttatgaatgctcattttttgagttcagaacaaatttatatcgaacaggaccgtgcccatgcgtcttggttaatgttgcaaacctcaactttccgagatggaaggagtcacttaaacgcagccaaattaactgtgcactttcaacagcaagtagaaggtatgtggaaaattaaacatttccagacagaaaatatttttagccgtccagtctctcattggaatagcagtgaagagttgccagtaccgaaccagaactaa

SEQ ID NO: 56738 - DNA, 1128 bp, Acinetobacter baumannii
atggcatctttggttcaaactttacagttgggctctggaaaattaaaagtcgttgttaaagatacaattgatattgaaaattatccgactagagcagcaagtccagctttagcaaatattccagttgcaacacaacatgccgcagttgtaaaaaatattttagaccaagactgtcagattattggtaaggctaacttacatgagttggcttttgggattacaggactaaatagttatacaggtaatcctataaaccctaaatatcctcaccttattccgggtggatcatcgagtggatctgcaacatcagttgctgagaaaatatgtgatttctctatagggactgatactggcggttctatccgtttaccggcggcatgttgtggtatttatggacttaaaccaacctttggtcgtgtaagccgtcaaggcgtattacctcaattttctagcttagattgtgttggaccgtttgctaatgacatgagcacactgatccaagcaatgcgtattattgatccgactttcgatattgagaaagttaaaataaatcataagcataaaacacatataggtattttacgtgtagatgcagacaattcaatttggcaaagcattgaacaaagaatagagcagttaagcaatattgaatttgaaccagttgaattagaactattccaagatgcttataaagtcggaatgaccctgattagttatgaaaattggttggcattttcatatttaatctctaccggaaaattagggatcgacatccgtcaacgtttattagcatcagcacaaatcacatctgaagaatatgaaaaagcgaaagaagtgcagcaggcatttcgacgagaagttgatcaacttttaacacaatttgatgccttacttttacccacattgccgattattcctccacaaattagtgaagtaaatgatccattaaaactgctgaacttaacctctctagtacgtccttttaatgtttctggtcatccggcactaactttgcctttagaaacggcagaaggtttaccagtaggtttgcagttggtggcaggacaaaatcaagatgagaaattatgcgcaattgcatgtttatttgaactaaataaaggagcctaa

SEQ ID NO: 56739 - DNA, 1677 bp, Acinetobacter baumannii
atgagcttagagctagaaaaacaagagtacgaagaaagattaagatatagtcttaaaattctttcaaaaaatctaaacgaaggaaaaattaaggttgcaaagcacttgattgatgatttcaaagaaagtatgagaaatattaaatatgatgttaatggagaaattattttagattcagttgatagaagaattcgatctatggctcttagtatagagcagtttgatactagagataaattaaaaaaacaaatttcattagcggaaattcaaaagttatattttgaaataatagagcttaattttggtgatttctatcgtcaaatgttaaaagcagattctaacccaaaccatattgcagaatttttatcaacacatgctgattttgttgatggtatgtttgaccaaatacctagttttgttgaagcaattttaaagttttggaaaaatgtcggtgatataggttactggcatttggaagataatcattcaaaccttactggcgtatatggtggagatttgtttcctactcataatgaaaatattgcatcaaaatgtggtatctatactgatactattgttttaccagatccttacataagatcacagcacatatttaaactttatccaaaagaaaaagctgtcttttttttaataaagcatgctatgaatcttctcaaatacagaaacttagcatgcgttgaagagggcatgccggtcgttgtcatacttccagatttatcatatttagaagagaatggtagagattttatttataaattttctcaaaatgatgctctaattcatgctagcaagatatttggtagaagatttgaaaatattgatgaattcaatgaattctgtataagtttagacacagtagaaaaaactattacagcaataaaagataaaagtagggttttatttgatacaaactggaaaggttctttagaagaacaaataaataaagcagtaaaaggcgatgagctaaaagccatgaacgggactgaaccaggtttattatttacaatacaaactattggccggatgtcagtgagtaacgagctcttaattaaagcacggcaactttcaggtactccaattatagaagctgaaacatcttggcagttttttaactggaaattggagtacgatgctgaaaaagctcaagaatattatggttctgaagatctacatattactaaaggcttgactgatttatctaaaactgacttaccgtggcttgggaatattccacctgaatcattattagagttacgtaagcaaggagctttagaagaaattagaaatattttaggaaataatattaaagagctaatagatactaatcctactaattgttttagaactagagatcaaatattagaaaatattgaacaaagttttgaaaaacatcgtaagaagcttgatgaattgaaagctaaaaattggaaatttgctggattcgatataggttcttggattgtatcaggaggaatagaaataggagcggctttaactggtacacctacgtggggtttagcagtattagccgcagatcaactacttgatgctcctaaattaagagaaatccctcaaagattccgtgatttggttgaccagaataaaaaagtaaagcaatccccagtcggaatgttattcaaagctagtaaaaagtga

SEQ ID NO: 56740 - DNA, 435 bp, Acinetobacter baumannii
atgaaaaaaataataacactgctactctttttttgtatgacagtaactcttacagcttgctcacagaaagaaatttatcttactccggaagtgacaggctatgtttataataacgctacgaaagaacctctaagacaacaaaaaggctttattggatttaatggcttaactccaaatgatagttccgagcttgttttaaataaagatggtagtttcacattaaaacctattgcaaaaaaatattacttttttaaaccagacatgcatgagtactctaacatggccgctttaatttatattagttttgatgggtttaaggtaaaggatatagactattctgaggagaaatataaaagaataaaagctgataaaggtgaattcagaccttataaaaaagttaatttaggtgttgtttatctagaccccgaaaaataa

SEQ ID NO: 56741 - DNA, 555 bp, Acinetobacter baumannii
atggacaatttaaaacagttagaaccctcttatgtatataagggttctggttggttaataacattcataggatcagtaattggttgggtgggtttattatttgttttaaaaaaaatctatcaaacagattttgctgatttaattgtgaactttaattttgaaacaattgttttattgatggttttagttggatggttttttatgctactttctgggctttcttctgtctttccaatttatattgataaccatggtggacattataggacgctttttttaagaagaaaaaatcttgagtggaatgaagttaaagagataataattgtaaaacagaaaaataattggaaactccagtatcatatgatggtttctcatataaaacctggttctttagtgtggggtgtggcaacttataaaggtgataattacgaggagctttatcaggttgttaattattatgtacagaaatataaaattaaggtgatattgcaagatcgattgtataattcaattcgaatactcgagggtatgccaaaaaagctcgatttctcgtaa

SEQ ID NO: 56742 - DNA, 129 bp, Acinetobacter baumannii
atgactttagttaataaaacattggtctctattgcaatgggattggcattaactgcttgtggtggttctggcagcaatgagggtttacagtcagaattattttggagaaatttttataatgtatattag

SEQ ID NO: 56743 - DNA, 123 bp, Acinetobacter baumannii
atgtatattaggttgacttttaatgtgtctggagttttttttaatgctattcaagctttaaaaaatatatctagtgataagatttattttgcttttgatgaagaatactccaattatatttag

SEQ ID NO: 56744 - DNA, 276 bp, Acinetobacter baumannii
atgaagaatactccaattatatttagtttaactctaataaaagagttttctgatgaatattatgatgaagaatatgagtctatattttatgagtttatttctaaaaatattgaaaattttataaaaaatggagctgacgattttagtttatttatggaagtatatatttcagaagatgagcaatgtaattttgaggttttaaatgctgaattcttatctttaatcgggaaatataaaatttctataccattgagtgtttataaagtcacggactaa

SEQ ID NO: 56745 - DNA, 165 bp, Acinetobacter baumannii
atggttgatgaattaaagaatattatcaaaaatttaaaaaaatatactaatgaggaaagatgcttttggttgttgaataactatcctttaaatagtgagagttattatttggcattccagttaatccctcatttttcatggggaaaaaagaaagaaaaacattaa

SEQ ID NO: 56746 - DNA, 240 bp, Acinetobacter baumannii
atgaattattatttacataagttaccattttcatcagaaaggccatatttagtatttttgaagatttcaccgttgtcacagtttatgaaaattttggaagaaattgtaactgataaaaataatgaagatttaactctattgagttatcatctgaatagaatatttcaatatgaaataaagaaagatgtatataataaacataaggttgatatagaaaggcttttaaataaattgaagtag

SEQ ID NO: 56747 - DNA, 897 bp, Acinetobacter baumannii
gtgagaatattattttgcaatattggctggatgagaaaatataatggaatggatggagatattttagaaagaggagggtcatataatgataacgaaattggtcacgaagtatgtaatttcacgaatatggatggctctgtttttggatatgtgcagtctccgggaaagattaatataacgaagttaggagctaacaaggatgatctatatattgatggcgtaacggttgtctggacagcaagttctaagagcaatggaacagttattattgggtggtataagaatgctactgtatacaaagaggaaatttactttgaatttgcttcggaattacataagcagaatggtgttaaatcctatcgaataaaagctgattttgaagatgcttatttgctacctattgatgaaagagagtttggaattcctcgtgcaaaaaaaggtggtatagggcaaagtaatgtttggtatgcaaagttagaagaaacaaaacctttagttgaaaaagtaaaaaagtatattgaaaaatactgtctagttaatgatttacctgatattgatgacttaggagtcactgagggaagtcttaaaatcagaaggcacttagttcgagaaagaaatttaagtatcattaaacaaaaaaagcagaaaatattatctgattttggaaaattagaatgcgaagtttgtcattttgactttgaaaagaactatggagaaattggtaaagaattttgtgaggttcatcatctgattccattaaaccagtcagacagtatagttaaaaccaaattagaggatttggctatagtctgttcaaactgccatagaatgctacataaaggtcaaccattattagaaattcatgagcttaaaatgcttctaaataaagtgaattaa

SEQ ID NO: 56748 - DNA, 207 bp, Acinetobacter baumannii
atgctgagtgattgtgaaaaatgtgatgagtgcggaagccagtatttaaaaagtaaatctagcatggcttcgttgtgtcctgaatgtgcttctataatttatggatatgcaaattgtgagcacgtttttgaagagggacgttgtatacattgttactgggatggcagcacaaccacttatattgaagacttaaagaaaaactcataa

SEQ ID NO: 56749 - DNA, 1290 bp, Acinetobacter baumannii
atggcaaaacagtctaataaactgactgctaaagaggttaaaaaccttagctttgatgtgagtggcgcaaaaaagcagagacacccggacggcggtggactgtatttattgattgatgaaacagaagcgaaatactggcgaatggattaccgtcgaccagtaactcaaaaatataacaccctggcaatcggcacctatccaatggttagccttgagcaagcaagatctaaacgtgatgagtttaaaagattgttagcagagggtatcgatcctgctgaacagagaaataataagaaacgtgagcagcttgaaaccttagaaaatacttttagtaaatttgctacagaatggttagagatccgtagacacgaaggaaaagtggatcgcgaaacgatacgcaaacttgataaagatatcctccctttcattggaaagttacctgtttctcaactaaccactgagcaattagaacgtgatgtgactgatgcacttgttgaacgtggtgctcttgaatccgcgagacgtgttaaatcaattataaatatggtgcttaagcttccacttaagcgaagaataattacctacaatcccgccccagatatcatcctgccccaaccaactaaagggaaccataatgctgtgacggatgaaaaagagttggccgaattactacgtaaaacgtggcgtttaacaaaggactttccacgtacgcgaatccgtactgagttggcgataaagttatcagcatatatctaccaacgcccaggggaaatcagaacgttactatgggaatctgtagattttgataaccgatgtttatcatttgcagccagtaaaacaaatcaagaccatatagtgcctttatcaattcaagcttatgacatcctcaaagagctggaggatatgcggaccacctcaaaatatgtatttccaagcgttaaaacatctactgagtgcatgagtacggatactcttacacaagtattaaagcgactcggtttcaaagggaagcatacagctcacggatttcgggcaacggcgaggactctccttgatgaggaaatcgaatatagaaccgatattgtggaacaccagctcgctcataaggttaaagacccgaatggtaccgcttacaaccgaactaagtttttacgccgtagacgcgaaatgatgcagctctgggctgattacctcgacacacttcgtcaaggtggtgatgcatcgaaattcaagccaaataatgacagtgaaaatttaattcactttaaacctaatgccaagatggcatag

SEQ ID NO: 56750 - DNA, 1068 bp, Acinetobacter baumannii
atgagtaatattaaagatattaaaaatccagctcctttctatacattgaaagatgcagcaaaagagttaaaccgtgccttagaagttgattactatgatgccaaaaagctattaaatatggccttagtatatgacctaaaactctatatctttgtaagaggctgggagggttacccagcttggaatgcgatcatgtctgatgagtgggaagaggaggcagatgttaataaacatggggggtatacaaagctacattttgatatggatgacacaatagataccattattacggcaagacttaatttagctttacgtgagggatgtcttcttgaagtaaagcaagaactaattaacgagttaattataagaaaaaattttgttggtgatggcagcttaggtacttttttcgagaacattctagatatccaagattcttttacagcaaatcccaagaacctttttttagaagtctttaaacaacggccttctcgtgatctgatacaagagctcggtcgatgtacactttccgcagatgttattgcttctgtagaaaacatcgatattgcttggattgagcttaggaaggtaaacaagttttttcaacataatgcatccacaccaccccctgtaatcgaccctacaattgaaaaggaaggggagcctgctattttccaagcactatctagaacagaccttctaataacacattatcaactttctagaattattgaaggctctttaatctcaagagacagaagagttgagacaattaaaagtttgatcgaaacaaagcaagatcaaagaccacgaggaaaaagccaagctaaagaacatgctcaattagcagcgaaaactttagctacttatctatggaatcaagatacggataataaaatcaaaattaaagaaatggctatcacagttcatgctgagttaaaccaaactgagcatcacactcaattaccagatcagtcagtatcattaaagaagtggattgaagatattgctcccgactacgcaagagagcctggaaggaccaaagaaaaatatatatcaagtgaaacttaa

SEQ ID NO: 56751 - DNA, 288 bp, Acinetobacter baumannii
atgtctactcaacaacaaactacggcgccaaaaggcttttatcgcatgtcacagcttgcaactacggctgcacgtaaagaacgcaagtacatcgctaaagacggaacaactcggatcatcaaagcacgtcctgaacgtcagggtctgctcccgatgggtgaaacaactatctgggacaaagtgcgcgctgttgagttccctaccccaattaagctaaccgaacgcatcaccgcatggcgtattgaagatgttgaagcatggatggcttctagaggattggaggcttaa

SEQ ID NO: 56752 - DNA, 315 bp, Acinetobacter baumannii
atgaattttcaaaatattttctgtttaaggcttctcaaattaaaaatgatcggctatattgatcgtgttcggtgcaaaatcatcgaattagctttggtcggctatgaatacacaagcgcatacagtccgctacgggctttttttatgcgtaaaatctctatgcttctgcatctctatggtgaagctggagagggacatcttcggatgtgcaggtctcttgtgtacctgtcgaccaacccttttcagctttgccaccctcacttggtcgtgactggtaaagctcctaaacaaacacaaggagcgcattcatcatga

SEQ ID NO: 56753 - DNA, 672 bp, Acinetobacter baumannii
atgtgggattgtttagtaaaaatatctacttgggctgaacagaattcagggcaaatacaaataattattgcattgatcgctttctggaatgcatacaaggggtatcaaaaagtgcttgaacaaattcagatggctaaagatcagtcatttgaatcagaaaaacaaactaagttctttgctgatcaagtaaaagaggctgctaagcaaacaggtcttgcagcaaaacaatttgaaaactcgaaccttcaagtgcaacaattaattgagcatcgaaatttagtcttaaatattagaactgaggagttaagaagtgactgtattgatacttgcgttaaagcactcctagctattcaggagaccgaagacaccctaaaaaatggaattagaatttgtgaaggaagaattcaccttctacaattagatcctgaaattaaggaatggcttcaacaaaatattaataagatgaaaaccgaaaaatctgagttaaggcaaaaaagtagtgatttgattgtaatttctggtggtttagccactaaagaaaatgtacctgaaggtttaaacggaactttcttgacagtaaagatgatttatcttcgagcaataagaacaaaatatatatatgaagaattagctatggaagtagatcgaattttacctataccgaaaccttaa

SEQ ID NO: 56754 - DNA, 2073 bp, Acinetobacter baumannii
ttgtctgtaatcgcctgcgcgatttgttatgccaacctcacctatgcccaagatgcacaggtacaagctttgcaaacgattcaagtcaaagcatcaaatgcagaacagtcttctgaacagaccaaggtatataatgttaaaaactcaagtagtgcaaccaagcttaatattgaggctaaggaaacaccccaaaccattaatgtcgttactcgtcagcaaattgaagattttggccttaccagtactcgtgatgttttaggtaatacaccaggtgtgacagtaactggattagaaacaaaccgaacaacttatactgctcgtggttttgatatttcaaatattttggttgacggaatcggtatccctcaagttgatagctacaattataataatagtgatgcagatagctatttctatgatcgcattgaaattgtaaaaggtgctgatgctctaacaaatgctctaggtgatcctggggctataattaactatatccgtaaacgccctaccaaagaatttcaagcaaatgctggggtgagctatggttcatgggatacgcagcgctatgaagctgatatctcaggttctattacacaagatgggcgagtacgaggacgtctcgtaggttatgagaaagtcggagattcttatcttgatcgctattcagaagaaaaaaacggttttcaaggaattttagaagctgacgttacagacactacaaatatttcagcaggatattcaaaaactcgtcaatacgctaatggttcgcaatggggtgcactacccttagttaactcaaaaggagaaccattaaattattcacgcaactataattatgcaccatcatggacatactacgattgggaaattgataattattttgccaatattgaacaaaatttatggggagactggaagctaaggttaggttataaccttaaaaaatcagaggttaaagataaaatgctttatctcaatggttctccttctgctacagacaatacatctggtatttcactattaccagaaatttataatcaaaaatttaaagaaactacagcaaatgcagatattcaaggtacgtttaatttattagggcagcaacacgaagcaaatattggttataactggtcaaagtataatgcacaaagtgtttattcgtatggtagtagtttaggcgttattactacagacttaccaagctggacacctgaagaaccgacttggggagactttacctatgctgacccagaagaaagaataatgaagtctgtttacggtgccacacgtcttcatttaggtgaggatctgaaatttatcttaggtgctaactatactgaaatcgaaactttggattataaaaagaataaagtttccccgtatgcgggtattacatataactttactcctgaatacacaggttatatgagttatacctctatttttaggccacaaacggttatcgatctttctactaaacaaaccgctgtaccagtagagggtgaaagttatgaagtaggtgtaaaaagctcttggttagatggtgctttaactggaaatatcgctatctttagaacagacgaagataactttgcactaaacccattatgggatccgctctataataaatactcgtcaccaataggaacgattagatcgcaaggggttgaagttggattaactggaaaattaactgataacttagatttagtttttggtttctcaacatttagtctaaaaaatatggaatcaggtgaaagaggtagaccaaatatcccaactcaaacacttaacgttttagcttcttatacagttccccaaattccaaaattgaaagttggtgcaagcattaaatggcaagatgatatacatgacacctcttactcaactgtaaaacaagatgcttacgcattgcttaatgttatggccagctatgatttaaacgaacatgtaatgttccaagtgaatggcaataatctaacaaatgaaaagtatttgacaggtttatctggtggtcagggttactatggtgccccagccaactatacggttgctgtaaagtttaaatattaa

SEQ ID NO: 56755 - DNA, 1062 bp, Acinetobacter baumannii
atggcatcaaacaaaccaactgtaattgatatgttttccggttgtggtggtctatcacgtggcttcatggatgcaggttatgaagttttacttggtgtagatcatgaagaaatcgctttaaaaacttttaaacacaatcatggagatgcaattgcatttcacggagacttgtttaaaaaagaaacactccttgatatggcccgattaataaaaactaaaaaggttgacgtcataattggaggaccaccgtgccaaggattctctctgacaggaactcgtaaagaaaacgatgctagaaatactctttttcaatctatggtagaagcagtaaagctgtttcaaccaaaagcttttgtacttgaaaatgttcctggattagctacgttatatgatggtaaagctaaaaatgccatccttgaacaatttggggctctaggatatacaatcaattttcaggttttatatgctcctgattatggtgtgccacaaataagaaaacggattttctttgtgggaatcaaaaatggacaaaagttttcattcccagaaccagtactaactcctgaaaaatatatctcctgtgaacaagctatttctgatttaccaagtttagaacatgacttaggtaaagagagaatggaatacccttcatctcctctttcaaaatatcaagagtatatgagaaaaaattcctctattcttttaaatcacgtaggaacagttcatacagaattggttaaatctgttatttcgttagtaccagaaggtggaaatcataaagatttacctccaggcgtgggtgacagccgaaaatttaatgaggcatggactcgttatcatagcaaaaagccatccaagaccattgacacaggccatcgtaaccatttccattacaaatggaatcgtgtacctacagttcgtgagaatgcccgtctgcaaagttttcctgatgactttgagttttttggaaacaaaactcaacaataccgtcaagttggaaatgcagttccacctctactaggttttcatttagctaaagctcttaagaaatacttagactag

SEQ ID NO: 56756 - DNA, 1710 bp, Acinetobacter baumannii
atgtctaagctcgtgtggattcataaatttaataataatgagcttggcgttagtacagagggcggtacaggaagaggggctttttgcttggttcctaaagatgcaatagatatttttccaaccttaaatgaagcgaatttgtttaaagaaaaagtaaatttatatgttaatcgcaattttagggcagaagtaaactatagtaagccaccgtctaaaagtgaatttagactttctctacctagagatgtacatactgatgagtatggaaaaatattaattcaccccaatgcagtagttgcattttatacatatgaagatggggtgaatattgatgtcaatagtaataatttaaatctttctgattttcttgaagagtataaggaccgctcgaaaaataataaagtaattgaaatagttgtagatgaaagctttccaggtgagcttgaccttccaaaagtaacaagattaagtaaaccattcatccttttagcgggaatttctggtacaggtaagactagatttgtaagagagcaagctaaaataactggaagtttatctcaaacttactgtttaacttctgtacgtccggattggcatgagccaagtgatttattgggatatatttctcgcttaagtggaaaaacagaatatataaccactgatgtactaaactttatagttaaagcctggaaagcgatcgtagatgctgaattggaaattaagttcgaaaatattgatggatatggcgaacgcttttatgtaagtggaaatgtagttcagttggaaaaaattccaccattttggttatgtttggatgaaatgaatttagccccagtagagcaatattttgcagattatctgtcgatattagaaacaagagaatggaagtgggtagatacggattttaaatatttttcagatcctctgttgaaggctagtatatttcagcaagtagaaaatcctgttgggttgagacaaaacttaggtttagaagaagtaaagtatgattacatttgggagactttctttaaatttggtttaggcttgccgtttaatctattggtggcaggaaccgtgaatatggatgaaactactcatgggttctcaaggaaagttattgatcgtgctttaacttttgattttggagagtttttcccaactgattatcaaatgtattttaattctagtattaaaaatgaaactttaagttatcctatttattctcaggtaaatattactgatttacctgctatagacagtaatggtgagaaaactataagctttctcaatgccatcaatgaattattgcttaacactccgtttaagttggcttaccgtgctttaaatgaacttttgcttgcattagttagccagaagcctggtaactatttagaattaatcgctgtttgggatgactttctgatgtgcaaagtattacctcggatcgaaggagatattgataaattaatgaatggactctctgaagagtcactattagtacaattggggaaaaaaatccgtattgagtttaaagatattattgaacaaaaaactggagaagatgaatctggatcaattctccgtcctgatctatatagaaaagataattcaactaattctcctattcagattgaatgtagaagtttggataagttaagttggatgcaagaaaggttagagagctcaggatttacaagtttttggccatga

SEQ ID NO: 56757 - DNA, 2430 bp, Acinetobacter baumannii
atgcctgaattgctctatataaagactccagagtttgaactatctgtttggtcgaacgatatttccaaacgtcgaaaaacttatatggatactatcggtaaacgtaataaaaatctgcttaatggcgagggtggattacaaaaaaatatttcatatatttatttctatccaatgttaaaggcgataaatgttgaatgcgaaaataagtctttagttcaggatgaaagttgttcattatcagaaatagaattaccaaaccctctatttttcgaaaacgtacaatatcaattcgaatggatttttcataataatattcgtgtggcagaacttcttcacaaaagtttaacattaaatagtagttttcgatttgtccaggctcatcgtaatatgccagctcgtttagtaggtacatttaataccgaaaataatgttggttggatgcgtttgccattagagtacaaaacagataatcaaacctttcggcatgaaatatcttttgaagtactaccatcaaaaatggatttacatacagatttacccgttatgtatgaggcaattgatcagatatttcctttatggcgttttagtttagttgaaaaaacagaacaaaattcagcaaatagccatcatcgtggaaattttcctttaatgtggttggctaatttctctagattgagagagcgttttgaaaagggtttaaaagttattgttcaagctcctcataatagattgcaagcacattctacatttataaaagctgaccgtctcaagggacgaataaatcaaaaaaacagtttgaaaataagagaggataaagaaaatggatattttaataaaaaatataaaatagaaatcaaaaaattaagtgtagacactcaggaaaatagatttattaaatcagttgttttgacctgccaaaaaaaattatttgcttttgagaaagccttaagaaaaagtgatccattattagaaaaacaacgtttttcagaagcttttcttaatgaattacatcagtggcaatacccgttaaaaaaaattttagctaatgacttttttaatgaagttggaaattatacagaaaaaaataaagagtcactggttctacagcaaaaaacagggtacagcactgtttatcgcgtttggcaggatttaaaattctatttggataagtttggaagcatttcaactatttcaatgaaatctgtagctgaaatatatgaggtttggtgttttctgactttaaaaaatattttacaagatgagttgggatttgaagaaattatcactggaaaaaataaactagagttaaatgaatattttgaatatcaattcaaaaatgggaataaaggtgcattcgagtttatccgaggggatggggtcaaggctagacttgcccatgagccaagatttacaaagtcgtctaaagatatccgctcttactcggttaatcaagagcctgatatagttttggaaattgaatcaactcacggaaaacgatttgtctggttatttgatgcaaaatatagaataaaaaataatgatgatcgttttggtaacgaggattcaaacaataaggattatgtaccggatgatgcaattaatcagatgcatcgttatcgagatgctttgatagaaattagaactaaaaaaacatctgcggggcaatatttcttaaaaagtcggcctgtaattggagcatttgcattatatcctggtaattttgatcagttgaatcttaaagtgggaaatccctatcaaaaatctatagatgaaattggcataggagcatttgctctattacctaataacaaggaaggcgacaaaagtgggtatcattggctattaacatatttatctggtcaaatagaagcggtacaaactcttgatgaaaaatcaggggatacttttgatgaaaaattatatctcaaggagcctgctcgtatcccatatagtggtatgaaacaaattttataccctgacttgataatgacggcagctttaactgaaaatgaagaaaagaatgacacttattttgacagtttcagaaatggtgttgctcaaagcttttctttgcctgcagatctcttagttagtaagtattctattcatattttaaatgaaataagatacttgggattggcaattccatcagtggaagatacttccataaaaaatattgataaaatttggccggtaaaaaaaattgatatcattttaagtaatgatactgtccagagagggagtgatggaaaacaaccttctatgtattataaatttgagttagggcaacctttatttttgatgaataatatttctaatattcctgataaagtatttacagactctatagtattgactactttggaaagattggaaaatattaaagactttacgaaattaaaatgtgtttatagcgatctagtttattga

SEQ ID NO: 56758 - DNA, 444 bp, Acinetobacter baumannii
atgaaaattattaacctcacaaaacttctccttattagtacattcatgtcagtaagctttaatctttatgcggcccctattcccagctataaaggaataccaaaaaaagatgtgaactttgctaaattccttaaaaaaaatcacaacaagattgttcaattagatttactcatacaagacccagatgattttgattttattacttatggttaccgctcagtaagtccaacatttaatatagctcctattggtacagtgaaatatgaggcttacatagaatgcgacaagattaacaacccgaatgcagagacgactattgataaatgtgctccatacatacaatggaatacagaaactggtcatttgacaggtaagtttaaagtcatcagtaaaggaaaaaatggaatgggtaatatgctttactatctagttgctactaagtaa

SEQ ID NO: 56759 - DNA, 855 bp, Acinetobacter baumannii
atgtttaaaactgaaaattattatcacgtagagtattggggaaatcagggaataactcaaacctgtctaatgagcctttgtaatttaattcaaactcattcagatttaacctatgctttgcttcttaccaatgagcagacacatgcctttattattaaagaggaaaatgagagcttttatgtaatacgctcaggttttacctcaggatatatgggtgagggccctagaggcttagcaacagcactaacattattaaaaagacatgagatagaaactgaagaaatattggtaagttcaaaaattttaagaaagacaaacaattcaactttaaatgactcagaaattgaacttctatttaaacaagaaatcatacgcccaatcagattacacgattatatctatccatttacaaaagaagttgcagaaactcataagcgtaaacgctactatcctctcgagctaccttattcaattttagatgatagaatttttgaccttgctctactttttaagcaagatcctgactctgctcttctaaaagcttataaacgtctagaagatatacttcgaacaagaacaggactcaatgaacatagtaatactttaatgtctaaagctttcaatattccgagctcgtcccttacgtggaatgttccaaataatggcgaaaatattggtcgagcgaacatattcattggaacttatcaagctttcagaaatgctcgagcacaccgagaatcaaacggaaactatactcaaatgtttagagagtttcttttgattaacgagctgtacctattagaagctgaagcagttgaaagatcaatgcttcaagagccaatactaaataaataa

SEQ ID NO: 56760 - DNA, 492 bp, Acinetobacter baumannii
atgaaaaaatcaatgagtaaggctgattttgaaagaattagagctcatgactttgtagttctaaagggagtcaacaataagcttattgttggtcaagtttcgtttgataaaagttgtatattcttatctctaacaaataacgaacttagtcgtttagctatgattcctgaattaattttagagaatttaggtagtatcgttgaactcatgaagaaatacaaagaagttttttttcggttaaatgatgttattgaaaagtccaatttgcctgaattaaatgagtataagaatgattcactatttaaaattaaagctttatatgctttgagagaattattggattctgctgaagtgaacgaagatgtaacaactgaaacattagaaatagctgtcaaaaaggcattagatgaatgtgtttatattcaagatgttcagtttacactgtcttactatattttaaatcgacctaagcaaaatacacaaatgatgtag

SEQ ID NO: 56761 - DNA, 1494 bp, Acinetobacter baumannii
atgcgtatattcaaatatgagctcgaagatgctctacaatcgcttgataatagtgttagttatgcaggttttattaataaattatttccaacgtttatatctaaagatgttgataacatcaataccattaccataaacattcttctgaagaaaattcaagatttattatcttctggttattactccgtatttattaattataaaaactatatgaccaatggcgagagggtatggggtatacatcatttttgtatgtgtatttacttacatgaaaattttgaaccatttggtacttattcatgggatgcatcttcacatcctcaaatgatattagatttttggtccttgacatcttcaaataaatacgaattacatgaagtgggtttaacttataatcaagttaacaattcagatcatacagaaaggatgaacatcgatattgaaatggcttgggaagaattagttatattaaatccaacttttaattttcctttctttaggaactttttttacttaagttgtttatcaatttttaatatttcggagtaccaaaagtttggcaagttgctttcattaaattatagcattgatcatttacttgaccagttgagacataatttatttaattttttagacttacttgatgactatatgcttaatatagatttaagtgagtcaacatactcttttactgatagcactagttttacaatgtttgctgaagtaagtgaacaggacttactcaattatgacttctcgtttgtttctgacagttctagttctgaagattctacagctcaacagagccaaacattttctacatcagatacacattcggctccttcacgtgtagacagctcttatctatcttttctttcaaagcaagatattcacgaagagatcacttctaactatgttcgtgagcttataaaacagttcttttataattattctaaagtcagcttttctattcataatacgtcgataccaagtggattcgtcgctgattttcttgattacttaaaccgatcactagagcaaatatttattaaggttgaaagtttaaaagtcaattatttgaagcttcaatttatttaccagacttctcatactttatcgagtatgtatttttataagtatatagttgataactatacttctatttttatcaatatttctgtaccggaaagcctaaaaaaagaagttttagttaaggtgagatctttatcaatttttattaaaaataagattaataaattaaatgatgttctcgttcatgatccacttttcataaatgtttactctttagtctttttttacctagatagtttttcacaatctttaaactatattcgatgttctggaggggagctagacaaagatagattagatttaatatataataatgaattggagtatatcgatgctttggattttaacttttttcaatacttggcgcgaagattaccacgccaagtatatagattgccttaa

SEQ ID NO: 56762 - DNA, 498 bp, Acinetobacter baumannii
atgaaaagtgaaaattcaattgagtgttcaaagatcattcccttaacgggaatattaaatcaaagtcctttattaaatacattacacaaaagtgtaaagcttgaaattcctgaaattaataaccaacgaagagctttaagcaatatttttaatagacttggaatagataatattcagcaagtaattatcagtgaaccgaaattaaataaagaagtacttagtgaactagcaaataacttctttactagcagttttcctcaaaaagctgaagaacttattcgcaagatgtctatgcctgagtatggatttacagatccaaaacaaccttccccttctacactggccatgaatacagttacccaacctcagagtgacattcaaaagcagatcattgaggaaatcaaacaaagatcggcagaatctatgcaggagtttaaccagcagaaaaatgaaagtaacaacaaaacgaatgaaattgatttaaataatttcttttaa

SEQ ID NO: 56763 - DNA, 570 bp, Acinetobacter baumannii
atgtatagtagcacaaaatcgtttagcaatttgtatgcttctattgttcatatgcaagagcaccaatctcttgaagaattacaagcgaatcaaatcattaaccatgcaatgaagaatggtcctgatcacaaactgaatcgtcttctagaagaccaaatacttaatggtgttaaagggttcaatattgaaaatatgggaatgaagcacgaaatttttaatgacaaagttctaatgaatcttaaaagagaacgtgccactctccaagacattaacagcatcatcattgatacagcattacaattttcgcgcaatccggatcaaatcgaattgaatgaagaaaaattaaagagctctctaaatacaatcaaaaatctgcattgcgaacgttcgctaaaaattgatctaatccggaacatgaaagaaggtgtacttacgtttgttccagaagaacaaagaaatgatattgaacgagtaataattagtaagcaacgtgaaattgaacgtacagctactcaatcaaataaagtagtattagaatcaaatattcctaacagcttcaatccaagataa

SEQ ID NO: 56764 - DNA, 2649 bp, Acinetobacter baumannii
atgagcatattttgcccttcgcagactgacagtacatgtcaaaacgatgcagcaatagacctgctgggaaaaatttttggtgatgggtttattcaagcattcgtgctgggtaagtccgctgctgcaactgcacctgctacgggtgaattaacgcctgtactctttggtgcattaggtcatttagccttagtgtttgccgcttttctttttctctttctagtttttacttccgtattacacactgcacgagatggtgaagtctttggtgctggaaagaaaaaacattgggtaatacttcgtatcttgatgtctggtgtcatgattctacccaccacatcattatattcagtttccagtgtggtacttatgatggtggtattagcctcgaatggtgaaactaacaaggcatacagagaatttttaaatactgttgttatgaacccatcgccatcctttgcttcagtagacggtttagatccgtatggctttcgcgcatacgcaatccaaaagcttcggcaatacacatgtgtacgtgttttgaatcagaattttgcggctgaaggtgtttctgtcggtgaaaaaaaatattcggatggccaaacttattatgtttctaatattggaggagaaagacaatttaacagctctctagttgacagaaataatgtcttagatcagggatatttcggagcaatatgtggtacatcctcttacattgtagctaatgctgactctgttgattcgaattttaaatatttaacatctgaaaatccggatttagaatcatataaagatttcaaaaaacgcttattactcaatatacaaaatcttaaatttcagggtattgttcgattaaatgaagcagtacttgcatatgtaaatagattgccatctgaagcgattagtcctgaagagtatgcacgtaattttaatcaagcttttaataatgaagaatttgataaaattattactgatgaaattagacgaactgatgcgtctattaactcccacttacagtcaaatcaaaatagttatattaataaaacaattcaatattttgctgaacgtggttggacacaagtagctctcactaagaagaaacttggtgaattccagcgtgatatttatgaggctcgcgcaaaaaccatttatgaaggtacgaatccagacttacaacgtcttaacagagaaggcgttgccagtgaaaaagaacgtatgatttataacgttctagtcacacagatggactctactgtaaacaattacctcaagacacctcaagtagtaacaaccctatcaactaacgatattcagaatttaattcctgaagatataactaattcagatgtttcatttaagcagatctctaaagatgttgaagctgcaaataccacactagtttcaaataccatgagaatctttattgagacttttactggcactggacaagctgatggcgtagatgctgtaactcgtatgcagaacacgggtaatgtacttcacattgctttaacggctgtagatactactctaactggtgtgagaactggtttatctgctgctggcgccactggtgctgttttctcagataatatcggtactgctgctgaaattgtcattgggcttgttgactattattctgaaaagctaggcaaaatcatggtgatgggtaagctcgttgcctattatcttgctgtaattatcccgactttaccgtttgtattcttcttcttcgctgttattggttggattattcatatcattcaaacgatggttggcttaattctttggtcagtaatgcatatgatccctgaacaaagttttgtcggtagccagacacaaggttacttaacggtagttgccttattctttaggccgatgctatcgctagtcggattcttcttggcttttattatttctgatcctttattaacatttactactgatggtttcttcgcaatcatgggagctgtacagttcactaataatgggtttattgctgctttagctcagttcttctggctaatgggttgggtaattttatattgcttaatccttttaccaattatttatttgatttttggattacctagttcgcttgcggatagtgtattagcttggttgggtactaatttatctcgatcacttggcgagacaaatttaggtcagaatgtaggtcgtgctgcaaatccggctgctggttactataatacctctggtggtggacgaggtggctctggcggtggttccggtggtaacggtgggggtggtagtcctgctggtggcggtggagccggtacacgtggtgatggatcagtattgatgaataaagggcagcctaatgaacaatcatcgggagctcaaactcacttacctaatgctaccccaagctcaagtaattctaattggcagtctgcggctgctgctggagctagagagggcggtataggtggtgctattgcttcgggtgttagcttcgcgggtagacggggtcttcagaatgaagcttcggccggaacaagcgtcctttccgatgtaaatgctggtgctaatcaaacaggttatgttcctacagaatatcgtattgttccagcaactacctccggtgcaaatagcgttgtaccagaaccaaaagatcctaaacggtag

SEQ ID NO: 56765 - DNA, 360 bp, Acinetobacter baumannii
atgtcaaatatgcgatattcaaatgacggcattgataatggcttatttgctccacatgttttagacagaaatgcccgtgattttgatcaatatatgaaggatcatactccggctgccgttgcacgtattcgtaatttcacaagaaatattaatacacctgtacagcaaaaatcttactctcaagaatatgttattcagttagtcaattacattaagcagttagagcaacaaaaccaaagcttagattcaaatttgcaaaaagctattagtaatatacatacttgtaatagtacgattacacgattagatggacttattgatgaccttgaagcgcggttatcaaaatacgaaaaagtttaa

SEQ ID NO: 56766 - DNA, 1836 bp, Acinetobacter baumannii
atgatgtctgctgctgttattgcagatttacatgcttcggccaccaactttgaatatgccaaaccgtctggtcaaactggtaaaccatcaaatttagatgccggtgattttcctttaactggtaatcttctcgttacatcacgttttggtattactcgatttcgatcggatggatcaccgcggtcacattccggtttagatatcatcaactcaaatggtaatcatagtctgtacgcaattgcggatggtgtcgttattgcgaatggatggatgaccggtggtggtaattatattcgcgttaaaaggaaagaaaataatgacgtatatcagtatcttcatttagctacgcgctcccctttaaatatcggtactgaagtaaagaaggggcaatatttagggacaatgggtaataccggtatatcgttcggtacacatttacattttgattatgcaattccacaaaaagaaggatcccgtgccagaaatgcatggcttggtagtccaaagggaagcgctaatgcgaatccatatcagaatattcagacaataggtctaagtaagaatggaatcgaaggatactacgtaactgatccgacaccatatttaaaagatgatataaaaataacggatagtacctataaaaactatctcggttctactattagacaacagtttaatatcctctatggagctaatttgccagtaggagctggtgcaacacagccaaaatttgctggggttcagtttaagttacctcaaggatatggagctactgatgagcaactagcaaaagtaaatatttctgtcattgaggctagacaaaaagctcttgaaaatggtgagatcactgaagcacaagcttacgatccaaacattacttatcgagaagtagaagatatttttaaagattcagggcaggtggggagttctgaagaaactaaacttgatattggtgatgatggatcagtaaaaggccacattgaaaatttagctttcaaacgtttcgcttctgctggctgggctcaagatctggtaaaagcttcaaatcgatctttatgggtcgaatttttaaatattgaaattgctaaaaaccatcttaaaacacaacttttaaagcaaaatgaacgcattgaagcactttttgcagcttacgcaattgcaaaggcacgagtcttacaaggtaagattgaagagttaagacaggctattgaaaatggccgtaatattgctttaatcagtcgcctagagcttgaagatcttccaccgattgcttcagatactgaagtaatgaatgcaacagttacaaaacgtaatggaagttatggtttaactggtgataagaaagctgcaattattgcagtcgctcaggcaattggtgcaaaccctaatgacttagctgctgttattagttttgaaacggctggttcatttagtccaagcatacgcaatccaaaagggtctgcaaccggtttgattcaatttatgcagtatacggacggaactggaaatgataagacgccgcgagatcaatgggattattggggcatgacacgttcacaatttggatcattatcatttacagaacaaatgaagtatgttgaaaagtactttaaagatcgtggattacgtgaatctaaaccagttagtttagcgacactttatggtttagttatgggcgtgccgaagggaggatatacgattgcaagacattcggctgtcttcagagataacccagcatgggatgtgaatggagacggtgttatcacggctgctgaagctgtaaatggatcaaaatttaaagctcatattcgagtttatttccctgatttcccataa

SEQ ID NO: 56767 - DNA, 342 bp, Acinetobacter baumannii
gtgttaacaaaaaatattttattagccattactttggccggttcaattggtacaagttacgcagccgatttgaatgatcaattctatcaagtaatggatgaagcagatgcaaatcctatcacgttaaacactaaggaagacgataaaaactttatttcgcgttatacaaaattgaatcaaaagctggcttcaattaaccagcaaaagaacgcaaaagtttatagccaatataaggctagaattgagcaaaattgttcaaagcttaaaactaatgggactgagtcatcgagttcagcctattgtaaatatattttgaactattcgatttttaacatgctgtga

SEQ ID NO: 56768 - DNA, 396 bp, Acinetobacter baumannii
atgaaaaaattaatcttgatatctttaattctaggtgcttctgtaactgctaatgcgaactccaagtttcaaaatcagttcaagcaagtcgagcaaatgacagatagttgcggtgaagcaacctatggagattcgcttacttgttataacgaagttatagctaagcatgcccaacttgctgaaacaattaagggtcattcaccggaaaaatccaaaattcctgcatggaataaagccgtttcggatctatcatcgattaacaatttatgcaatcagattggccaaattcagaccggtatgcaaggtgcagcaagtttaggcaccggtgattactgtagagctaaaataatgggcttaacttcatataaggcagctcaaatttttggcagtaaataa

SEQ ID NO: 56769 - DNA, 225 bp, Acinetobacter baumannii
atgtctgtatctgaaagtttaatcgcgatcagggtaattataagaagagcacaaggcaatggtgggttatcagttaaagatattcaaaatattgaatcattagctgatgcttgccataacataccttcagttattgccaataatgagtcggaacagctcaagtttttgcttgagtcgggtacaagagaggcgaagatgattcttgctcaaggagctgtattttaa

SEQ ID NO: 56770 - DNA, 1659 bp, Acinetobacter baumannii
atggaagaattaaataatacaagaattgaagatgctggagaaaaattcgaaggtgcgcgtaaagatgcggcttctccgatcttcaatcaaccatttaagctaggaaaaaatgacagcaaaataaccaaaaaaaagatatggccttcaccgaattttagagaagacgttcataacggaattaaaactaaagagcatgcattactttttatgcttgtgtatgaaggtttatgcaataagcctttaaacggggggtggttcaatattagtggccaatcatttgaaaaagcgtatgaagatacattgaattttttgaaagaagcttatgaaaaaaaaacttatgaaaatagagatgtattagttcaagacttcaacgattttatgaaagcgaaatattctggtaatgagttgtatgctgctggtagaagaaaagggcgggttgtccagcatccattatatttcaatttacattctagaattcgttttaaaaatctacttaatattggctggccacataagttaattctggattcagattgttttggagcttatgagttttcggataatgattcaaaaaagctattttggtatgcaatagaaggcatcaaggagcggaggatccggagcttagataattggaccaagcatgatcattatgaggctgcattacaagtggccaaatctgaattcagaagtattattcaaaaaaggaaagaagagcagccagacaataactcaaaagtgcgttctaagcctccaaaacgccctacatttaatcgaccatttgtacgggtaggggaaacatatcgtcaatcaaatatttcaactgaggagtttttgagtacctttaaatttagagggattgaatggggaaattatgtaactcaatctgaaagacaaggtttcctagacgctacttatgattcctttatagatcttacaaggctttgtggtttaccaccttcttttgcctcactaggtggtaaattgggtattgcttttggcagcagagggcgagggtatgatggggcagcagcacattttgagcttgatcaatggctaattcatttgacaaagacaaaaggtgtgggagcacttgctcatgaatttggccatgcgttagatgcttatttagctttaaagagtaaaacaaaaagagattttctaactgagtcttttattactaaatacaataatcactcacttagcctttattcaagtggtttaaagataagtgaatccgaaagcctgagatgttttaaagttcttcttgaaaatatgatttttacttcagacaagaacataactgatgaacaacaaggaaggactaattctacatttgcaaagaatgcatgcttgttagatcaagggagaaaagaagcatactggacggatccaactgagctttttgctagagtctttgaagtatgggtcactgataagctcaaagcttcaggatcaattaacgagtttcttgtttatggaccagatgaaccaccttcaagctggcacaccaaagttaattcataccctgaagatcaggaaagattaagaatagtccattatctagaccgctggttatcagaacttgtaactacatggaagtttgaaaaaaagagaaaaatcactatctctagaattatgtcgaaaagtccccaataa

SEQ ID NO: 56771 - DNA, 651 bp, Acinetobacter baumannii
atgtacgccttagctcaagaggaaaaatttgaaaattcttcagtagcggagaatgtaagacataaaattaaaaaattcccaagaggtcgagttttttctattgaaaatattcctgaaacatatgggaataaagaagcgattcaacgtaatttgtctcgattagctcaaaaaggtgagatttatcgaattagaaatgggatttactataaacctttacgaaataagtttcttaaagggcgaattgtgccgcctaatgtcgatgaggcacttaaggtaatttcaaaaaaatataacgaaaagattcaacttcatggtggtgctgcggctaataaacttggattaagcactcaagttccaacaatttacgtttattacacaagtggtgtcacacgtgagcttgaaattgcgggtatacatgtaaagctcattcatacaaataatgaagctttaattaaatatgcaggtacaaatattggtttggcaattgcagccttacaatatttaggaaaggagctggtttcggaggaagtgattcttaaaattcgtgagaatcttactgataaagaatttcaaaaattgatgaaagcacatatagcggattggatgcataaaacattgattaaatatagcgatattaataatgcctgttaa

SEQ ID NO: 56772 - DNA, 1047 bp, Acinetobacter baumannii
atgcctgttaagtacacacatttaacgcaaaaagagcagtatggtattttgcatttctcggcaaggcattttggaaagaacagcattgttttagagaaagatatttgggtatgttgggtacttaaacaaatttttgagatgccaaatcgcttatctatggcttttaagggaggaacttctttatccaaaatttacaaagttattgatcgcttttctgaagatattgatattacacttgattatagacaatttgaggtttgcaaagagctaaatcttggtccaaaccaaacggttccggattcactaagtagatctgcaattagacgcttatctgaagcattaaaagcaaacgtgcaagaatatacaatggacgttgttattccctatttgaaatcacaaattcaactacttcctaatggtgaggactttgaggtgattgcagagggttcagaacaaatccgttttatatatccttcagctattaaagagggcggaagaagaggatatatcaaagactatgtgctaatagaatttggtggacgaaatataattgatccaagtgaaactcatttcatcgagccagatgtagcagaaagcacagatcatatcgaatatccaagtagccaagtagtagttttgtcaccggagaggacattttgggaaaaagccacccttattcatgtggaatgtcatcgaggggtaagggaaaatgccgaacgtctttctagacattggttcgatttaacttctttgtatagtgatgatattggtactcaagctatccagaatattgaattgcttaaagacgtcatttctcttaaaagtactttctataatgcatcatatgctcattatggagaatgtttaacaggcagctttaggttgattcccgatccagaagggttaacacatcttgaaagtgattttagtaaaatgaatgaagccggtatgcttaatcatagctcaatgtccttcgaagatgtagtagaacgtatccgtacaattgaagctcatatgaatcagatgatcactgaatttcatgtttga

SEQ ID NO: 56773 - DNA, 498 bp, Acinetobacter baumannii
atgaatagagcagttgagttggggcaggcatgcagccatttattgtgtggcaaagtttatccggatgtgatttgtgtacatgaagtagttagatcttcatccataaaaattccattcgtaagtgaaaagatatcagcgggatttccatcaccagctcaagattatgtagataaaatgatggatatgaatgagcatcttatccggaacgaagctgcaacttttattgtcaaagtttgctcgttatcaatgataaatgctggaattgatatcaacgatgagcttgtggttgatcgtagtttagaagcgaagaacgacgatattgtagtagcacttatagaaaatgaatttactgttaagcgattaaagatagaaggaacgaaagtctggctagaggcagagaatccagactacaagaatatatattttagtgaaggggaaaatctgatcgtatggggagtagttacgttcattctaaaaaatgttagaaaaagatcatga

SEQ ID NO: 56774 - DNA, 1296 bp, Acinetobacter baumannii
atgaaccacacaaacaaaatttttttactcgttgatgtcaataatatgtacacctcggtagaaacggcttttgatccttccttatcggggcgtgcctgtgtagttttgtcaagtaatgatggaaatatcgtagccagaagtccggctgcaaaaaagcttggaatcaaaatgggtgaaccattatttcaaatccaagatttaataatgagaaacgatgttattgttctttcaagtaactatattatttatggggaaatgagccggcgttttcataaaatattagctgaatacgtttctccagaaaaccatgaaatatattcagttgatgaagcatttctggaacttacaagttatagggatatatatgatttgaatcaatgtgctaaagacattaaagataaactaatgaaatttttatctttgcccgtttgtgtggggattggacgcacgaaaacagaggctaagtgcatgaatcatatagcgaaaacctatccacatttgaacggtatttgtaatatttttgatattgctgaagtaaaagattctatttatcgtaatacggatgttggagaggtttggggggtgggccggcaacaaaaaaagaaacttcagcttatgaatattaatacgatctatgacctaatgatggctccaccatcgcatatacaaagtgttttttcagtggtattaaagcgtactgttctggagttaaatggcatatcatgtattgatatagagcatacgcctccaacaaaaaaacaaattgtctcatcacgaacgtttggccagagaataacaaaaattcatgatttgaaagaagcaattattaaaagaacacaagaagcgtttacacgtgcgagaaatgaacaagttcttgtggggtgccttattgtgtttgggtattcaaatccttttgataaaacaaagcctttttataaaaaggaacaaagcgcatcttttgctgtacctacggatgatttaaggttactggttcaaacagcaacaagattaatggatcaagtctataaggccggaattgaatttaaaaaagccggagtgattttgacttgtctcgaaccaaaacatacttacacctatgatctgttaactgaccatcaggatctggagaaaacagagcaacttatgaaggctattgaggatgtacaacagatctttggtaaaaacaaaattggatttgggggaagtatgtttaaaaaccggatttggaaccttacagcaaatcatcaaactagaaattattttagttttgatggaatgataaaaattatgaattaa

SEQ ID NO: 56775 - DNA, 879 bp, Acinetobacter baumannii
atgagtatgttattagattcaatccttaaggatgatgaaacagaagctaatgccgaacaaaaagaaattgaactccatctaatcgatctcgatccggaaaacccacgtaagacattcattgaagctaaagaaaaagatcttgaagaaagtattcgtgaaagcggtgttcgtatacccgttattcttataaagcatcctcatgatagcaaccgttttattgttaaagatggcaatagacgagttaaaaacagccttcgtgctggaattgataagatcccagccgttgttgtagaaagctttacagagttggaccagttaacagctaacacaatgaatgaagacatgactatttatgatattagtcgtgctattgttcgcttaaaggctaaaggatacagccaacgtcaaatcggtaaaacgctggcttatggtgatgcaaaagtttcaaagattgtagctatcaccgatgggttggatgaagaaattctcgaaactctggaagatatgtgtaatcgcaatctattaaatgacttctcagcaatgtatgagattgcagttttatatcgtgatcataaagtagatgtacgtgcttgggttgaaaaacaatctgcaacagctaaaaaaattggtattgctgaagtacaaaaattcaaaaagacttttgaaacagatcttgaaaaagataaacctaaatcaaaagaagtttcactcaatgaaactgtaattgaggatattctatcgaaagctaaagaaagcttaccgttagtatcgaaactacataagggcgaaatcaaagatcctgaagaacgtgaagaagttgtaaattctttaggtgaactgattaaggatctgactttaattttaaagcaatataaataa

SEQ ID NO: 56776 - DNA, 813 bp, Acinetobacter baumannii
atgaacgacaagacttcacaaattaaagatgccggtatcttaactattggtaatggaaaaggtggcgtcggtaaaagtacatttaccgtacattctgcgtactttttttctcaacatggctacaaggtaattgtcgtggaccttgataatcaaggcaacagctctggtcatttattaatgctcaattcaaatacagtattaccagaatatgtgacgcgaccaacctcacctgtacataacttaggggacgcaatttctctttttcttaaagataatcataatcttaagtgcgacttacaaaatggctcaattggcgtttttcgaccaactaaagcactcgctaatataaacacgagtagcgatgttgatctagttactatttttaaagataatattagtaagttattgaaatataaaacagttattatattcgacacaccccctactctaagtaatttaatgcttctacctttatcagtatcaaatgtagttttaattccgacaatgcttaaacaatacgcatcggatggtattcgcaatatggttaatttaaaatcaaatattcaaaagaatgaactatctaagttgttggaagtggctgagcaaaccaatttgttctaccaagataaatctaatatggcatatataacggataagaatgttatagaagaagcagtcacttatggcactgcttgttggcatattaataaaacatcatcacgtgatgtcaaacgaacatttaccaatatattcaaacaagttggcactcaacttaaattatctgtgttcaatacatctggtaaaggagaataa

SEQ ID NO: 56777 - DNA, 1728 bp, Acinetobacter baumannii
atgaagcctaatgatgttgtctcgaacctgccaaacaacccgacaccgaatactcatgcctctgtcgattctgcgcagcaagaacaacaggctggattagattttgttcgccaagtcattactgatgatttagctgccggacgtaccaaacaaatcgtaactcgttttccgccagaaccaaatggttatttacatattggtcacgtaaaagcaatctgtctaaactttggtgttgctgaagagtttgatggactctgtaatttacgttttgacgatacgaatccagatgcggaagaacaagagtatgttgatgggatcgccaatgatgtgaaatggcttggttttaactggaatggtgaacctcgctatgcttctggttattttgatcagctttatgcatgggcaattcaattgattgaacaaggtgatgcatatgttgatttgcagtctccagaagaaattaaattaaaccgtggtagttttgttgaaccaggaaaaaactcgccatatcgtgatgcatctgttgaagagaaccttgctcgctttgaacaaatgcgcagtggtgaactaaaagaaggtgaagctgttttacgcgctaaaattgatatggcaagcccgaacgtgcatatgcgtgatccaattttgtatcgtgtcttgcattcagagcatcatcaaactggcgacaaatggaaaatctacccaatgtatgactatgctcatccattgtctgatgcaattgaaggaatcacgcattcactttgtacattggaattccaagatcaccgtccattctatgactggattgttgaaaaggttaagtctaaagctgttccgcaccaatacgaatcatctcgtttgaacgtagattacaccattacttctaaacgtaaattacgtaagttggttgaaggtggttatgtaaatggttgggatgaccctcgtatgccaacagttgttggtatgcgccgtcgtggttttacaccagaaggcttacgtgatttctgtaaacgtgtaggtgtgtctaaaactgacggtattgttgatgttgcaatgcttgagttctgtattcgtcaatctttggagaatacagcagcgcgtggtatggctgtgttagatcctttaaaagtgacacttacaaacttaccagaagatttagaccttacacatgcgcgtcatccaaatgtcgatatgggtgagcgtgtcattccattaactaaagaaatctatattgaccgtaaagattttgaagaagtaccgccaaaaggctttaagcgtttaattccggatggtgaagttcgtttacgccatgcatatgtaattaagtgtgatgaagtcatcaaagatgcaaatggtgaagttgttgagctgaaatgttcaatcgatccagacactttaggcaagaatcctgaagggcgtaaagtaaaaggcgtgattcactgggtatctgcaagcaagggtattcctgctgaagtacgtatttatgatcgtttatttacagaggctgaccctgaaactggtgatgatttcttagcgaatttaaatccagattctttgaaagtcgttcaggctgtgattgaacctgctttagctcaagcgaaaccagaagaccgtttccaatttgaacgtgaaggttattttgttgcggatcaacatgatcatactcctgaaaaacctgtcttcaaccgcgttcttgatttgaaagacagcttcaaacctgagaaaaagtaa

SEQ ID NO: 56778 - DNA, 648 bp, Acinetobacter baumannii
  misc_feature (541)..(550): n is a, c, g, or t
ttggtaaatgaaggtcgcttccgtgaagacttataccaccgtctaaatgtaattcgtattcatattcctaagcttgcacatcgaagtgaagatattccgatgttagctcaacatttcttggttcgcgctggtaaagagttaggcgtaagtccaaagattttacgtaccgagacaactgactatatgcagcaattaccatggcctggtaatgttcgtcagcttgaaaatacctgccgctggttaaccgtcatgattactggccgtgaggtttacccagaagatttaccttcagaacttaaacaagttccactccaaaaaaatagtgaagctagccaacctgctccatcttttgagcgtatttctttacatcattgggatgagctactaagtcaatgggcaattcaaaaactcaaaaatggcgaaatgaagattttggatattgctacaccaatgtttgagcgcactttaattaatgctgcactacagcaaactcgtggacgcaaacgtcatgcagccgagctattaggttggggtcgcaacnnnnnnnnnngtcgcaacactctaacccgaaagttaaaagaactaggtatggattctgctgatgacgatgatgaggatgaacacaaagtaactttgtctgaagcttaa

SEQ ID NO: 56779 - DNA, 885 bp, Acinetobacter baumannii
atggataaattgatatttgatgatcactatactcatcgtctaaatattctaggtgaaaatttacctttattgactatgtgtttgagaggaatagaacgtgaatgtttgcgtgtaacgaagaatggaaaattggcacttacacctcatcctgaaacactaggatcagctttgacaaatgagttgattacaactgattattctgaatcattaatggaatttgttacgtcaccttgttcaagtgcctcagaggtccttgcagaactcaatgatattcatcgttatgtttatacaaaactgaatagtgaatacctttggagttcatcaatgccttcacttttgccagaggaggagaggatacctatcgcggagtatggaagttcaaatattgggaagtttaaacacgtttaccgaaagggattagctcttcgatatggtaaggctatgcaatgtatagcaggtattcactataatttttcattgcctgataaaataattcagcttttatatcaaatagataatacaactaatttggagaatattgatcagtcatcaatttatatgggtatgatacggaattttcaccgttatagttggctgttgatttatctgttcggcgcatctccagcagtcaactcaagttttttaaaacaaaacttagatcaatttaaaaaatttgataatgaaacttactacttgccttatgcgaccagtctgcgaatgagtaagattggttatcaaagtagtgcccaatctactatcagtccctgttttgatagtctcgattcatacattcatagtataaaagaagctttagaaaagccttatctaccgtatacgaatatcggaactcataaaaataatgaatgggtgcaacttaatacgtaa

SEQ ID NO: 56780 - DNA, 771 bp, Acinetobacter baumannii
atgtcacttttcattattaccttagtcactctggtcgtaggaataggtagcgttttgatcgcagacttattggtaacgagagctggggcagctattaacaatcaagatagttatgtacagcaaggctttttaggcctagcagctggtgctctattagctacaagttttacccatttgttaccagaagcttttgaaagccatatagatacccatcagctttttttagcgcttctaattggtttagttttcttttttcttcttaataaagctgaattgtggcatcacggtcatgaacataatcattcacatgagccacatgcaaacaatggttggtcactgttattgggtgatggagtccattgttttggtgatggtattttgattgcttcgattttcattgttgacatacatcttgggttgattgctgctgcttcagttcttgtgcatgaggtgcctcatcatatgggggatttaattgttcttaggcagaaaaatcatcgtagtgctgctgtgttaaagcttgctatggctggagcaatgactgctttaggcggagtaagtggatattttctactagcgggattacagcaatggcaacctttccttatggttttggcaagtagtagtttcatttatgtgtctttgtcagatctaattcctcaattacaacagcgttggacaactaaagataccattatccaaattctttggctttttataggaattcttatagtaacgttaattaatgggttagttcatggcgcacattaa

SEQ ID NO: 56781 - DNA, 1005 bp, Acinetobacter baumannii
atgattgatttatctttgatttgggtcgcaattattggtttgggtgttctcatctatgtggtactggatggttttgatttaggcatagggattctttttccctttgtcaaagaccaacaggaacgagatgtgatgatgaataccgttgcccctgtctgggatggtaatgaaacatggatggtattgggcggagcaggattatttgctgcttttcctctggtgtattcagccgtactttctgcactttatttaccgattaccttgatggtgattgcattgatatttcgaggcgtcgcatttgaatttcgttttaaagcaaatcgtacccgatatttatgggatcaggcatttatttggggttcaatatttgcaagtttccttcaaggtatagttttaggtgcatatattcagggtattaaaaccttaaatggtgtttatgctggtggacaactggactggttgactcctttctctgtgtttacaggtattggtgtagtcgttctatatgcaactttaggatgtggatggttaatttataaaactgatgctgaaattcaagaaaaaatgttttcaatgatgcctaaactgatcattgcggtatttattattttcggattagtcagtatttatacaccactttcacaaccacaaattacggaacgttggtttagtcagccccagctaatgtattttagtccagttccagtattagtgcttatttttacgggtatggctttacgtgcatgtaagcaaaagaaagaacttagtccatttatttatacattaggcttagtcttccttgcttatacaggttttgtcattagtttgtggccttatattattccaccttcagtaacgatctggcaggcagcggccccagtgaatagtcaactatttgctttaattggtgcattgttactcattcctattattctgacttataccattttttcatattggatttttaaaggtaaagttcgtgttggtgatactggttatcactag

SEQ ID NO: 56782 - DNA, 1434 bp, Acinetobacter baumannii
atgaacttaggactaacagcgttggagctggcaagaatacagtttgcctttaccgtgtctttccatattatttttccagcaatttccattggattagcaagttttttagccgttctagaatggcgatggttgcgtacaaataatcctgtctatcaagatttatttaagttctggattaaggtttttgccttgtcctttgggatgggcgtggtctctggcgtagtgatgagctaccagtttgggacaaactggagtgagttttctcaatttgcaggcagtattacaggtccattactcgcttatgaagtgttaagtgcatttttcttggaggcaggttttctcggcattatgttatttggctgggggagagttagtccacgaatgcactttttcgctaccttaatggtggccattggtacatgtatttccatgttctggattctatcttccaatagctggatgcagaccccacaaggttttagcattgaaaacggcattattgtgccgcaagattggtgggcgattgtctttaatccatctttccattatcgcttggtacatatgggaattgctgcatttatggttgccgctttattggtcgcaggtacagcagcatggcatttactcaaaggtcgtcgagatgaattggtaaaaaaatccttttcaatggcattgtggctgattctgattttagcccctttacaagtgtttatcggagatgcacacggtttaaataccttaaaacatcaacctgcaaaagttgctgcgatggaaggacattgggaaaccaatcatgatgagggtatgccattgtatctattcgggattccagatatgcaggaagaacgtactaaatacgctgtggcaattccaaatttaggtagtctgattctgacccattcaatggatggcacagtgacaggcttaaaagattttgcccctgaagaccgtcctaactcaactgttgtgttctggagtttccgtatcatggtcggacttggcacattgatgcttttactggctttggtcagtgtctggttaagaaaaacaggcaaactctatgaaagtaaatggtttcatcgttttgcactcatcatgggaccatcgggctttatcgcattgttggcagggtggtttaccacggaagtgggacggcaaccatggattgtctatggaattatgaggacaaaagatgcgttgtcacccgtatcggttgaacaagtgggtctcaccttaattatctttgtggtggtgtactgcattgtgtttggtgtcggtatttattacatgctgaaaatcatgcacaaaggtccagagtttatccatagtcaaactgatgaaatcggtggtgttggacattttaaaaccccaatgcgtccattaagtgcaatcaatgaaccacttgatgaacaagataaaggagcatcatcatga

SEQ ID NO: 56783 - DNA, 630 bp, Acinetobacter baumannii
atgccacaaatgaatcatgaactcacaggcaaagcactccagattttacaggcagcacgacgtgtttttctaacacatggtttttccgcagcaaccacagacatgattcaacaagaagcaggggtttccaagtcaactgtatatgcacattttccaaataaagaagctctttttaccgcagtaatcgaagctgaatgtacagcattcacagatacagtacgtgatattaaatttaaacatggcaagttacgagaaacacttaccattttagctcgtacttatctagatattgtactttctccagcaggactcgctgtttttcgagtggtgattgctgaaggagtgcgtttcccaaatcttgcacgagcattttatttagcaggtccacaagtcatgattaccatgattgctgagcgacttgccagtgcagtcgcatcgggagaagtcgatttaaatgaactgggttgtgagactgcggcaagtctatttatcaacttagttagaagtgaaccacagtttcaatgtcttactcatccaaatgctgctccatctgcaatacaggttgatcagtgggtaaatattgctgtcacaacatttatgcgtgcttatggctgcgatcaacctaaatga

SEQ ID NO: 56784 - DNA, 1485 bp, Acinetobacter baumannii
atgaagttacagtcattgctacaaaacgctggaacagcattttgtatgatttcaatctgtgggtgtacagtcggtcctgattttgtacggccacatcatgaaatcactcagttacaaccacctccccatacagatgatatttacaataatcaactatcatctacagataaaattccatctgaatggtggaaaatatttaatgataaacttctgattgaactacaatctcgtgcaaaattgaataatcttgatttgcaaatggcagtagaacgcattgagcaaagccgagcacaattagggataacctcctcccagttattacccaatataggtggttcagcaagttattcccgtgaagccctaagtcagaatggcaagtttgcagcactaggagctccaaccaaagcaagtgatttttggcaattaggctttgatgctagttgggagcttgatttatggggacgtgctcaacgtatgcgtgagggtgcaacagcatcttttgaggcaacaatttatgatcgtgaagcagtccaaattgccctatctgcggaacttgctagaacttatctgcaattacgaggtacacaggcacaacttagtattgctcaacaaaatttagaaattgctaatcgcctaatcaaaatcactgaaagtcgtatgcgtaatggcgttgcaacacgttttgaaactgcctctgctctggctcaacaggctactgtaaaagctatgctgcctgaattaatacagcaacgtaatcaacttatgaatgctctggcattattgataggtgaaaagccaagagtattagatgaacaattaagccagactttaacattacctgtattacctcagcatattcctattggaatcccatctgaatttgcacatcaacgcccagatatacaacgtgctgaagctaaacttcatgcagcaacagcagcgattggtgttgccaaagccgatttttacccacgtattggtctaaggggaagagttggtgtcgaggcttttgaaattaatgatctggacagttgggattctcgattattttccgttggaccaactgtctatttacctatttttcagggtggaaaattaacccaacggttggcattaaatgaatctcgtcaaaaagaagctgctctcgcatatcgtcaaactgtgttacgtgcttggcatgaagtagataatgctctcaatgcctggaatactcaacagagtcatcatgccgaattagttgtttcttatgaacaaaataaacaagcatttcaagctgctgaaagaagttatcagcaaggcatagcggattatatgaccgtattaactgctcaacgtaacttattgacggcacaaagtcagttaaataccagttctaccaatgtagcagtgagtattgttaatctttataaatcattgggtggtgggtgggatgttacatcctttaatactgcttcggtaatacctctatcgagggttaatccatga

SEQ ID NO: 56785 - DNA, 1545 bp, Acinetobacter baumannii
atgagtagtgtaccaccttctccacctacaacaggaacacgaccacccaaacgtgctcttgcaggattactgggtattctcattgctgccatgatggcagggttaaataatcgtgttggtgctttagctttagcagatattaggggggcattgggctatagtctggatgatgcttcttggcttaccacggtatacagtgctggtgagttaattgctatgccttttgctgcctggtttgcgattactttatccatgcgtcgttttgaactatggatgattagtttatgtgcattattggctcttatccttccctttatacaccatttggatttattactggttttacgctttgtacaagggattgccagtggaacaatgattccattattgatgatggcagctcttaaatttctacctccacatattcgtttacatgggttggcactatatgcactaacagcaacctttacacctaatttatctatttggctcacaggttactggactgatggcattgtagattggcgttgggcatattggcaaatcataccactggccttaatttctggtggattgattgcatggggtttacctaaagataaaattcaaattgaacgttttccacaagcaaattggtttggtatggctttaggtgtacctgcactaggtctaattgctgttgcccttgatcaaggtattcgtttggattggtttaactcaccactgatagtggtatcgctgatagcaggtttaacgctattggccgtttacctactcaccgaatggtaccatccatccccttttattaaattacaaattttgaatcgtcgtaatttaggattgggttttaccttattcgtattcttattgattatcttgacctctggagcattattaccaatgcgttatcttggggtaatacaggattatcgttctcaacaaatggcatctatcggactgatgattgccttgccacagcttatattaggttcagtagttgccattttcttatacaaaaaatgggttgatgctcgctggatttttgctggtggcttactgcttattgctttgtcctgctttttaggaacgcagctaacatctgaatggaatagtgatcaatttatccttattcaatgcttgcaagcttttggtcaaccaatggcaattgtttcaatgctatttctatgtacaagcgttgtacaaccaattgaaggaccttatgtttctggaacaattaatacattacgtgcttttggatcacttcttggtggagctgtagttgggcaatttatggttttaaggggagactttcataaagaaatgttactggatcatgctgcattaaccagtgacatgctcccagaaccatcagaacctttacagcttatggcagttattgctcaacaatctctcgttttatccgttgctgatacttatctggtacttggtattctcgctttgttgcttatcccatttgtattgcgattgacctatatccctgcaccagatcttcaccaaacagcaccactcccagtttctaaatag

SEQ ID NO: 56786 - DNA, 1038 bp, Acinetobacter baumannii
atgtcattacctaaaaaaaccaagatcatcagcattgttgtattacttattgttgcaatcggctgtgtcatttatatcaatacacctgaatcaagtgcaaccagtcagtcaacagaagatgcttatgtacaagcagattttacttttgttacacctcaaatctctggaacaattcatcgggtcttggttgaagaaaatcaacaagtcaaagctggtgatctattggcaacgataaatgatgaggactttattgtagcggttgatgctgccaaagcacaggttgaaaatgctaatgcacatattgcaagtattaaagctcgacttgcacaacaacaaacaaccatccgtcaggcacaagcagccattgatgttgataatgcggaattaaaattagctaaagaaaatcagacacggtatcgtaatctagctgcggatggttctggtacagtacaagcaatgcaacaagcagaagcacagttaagtatccgcctcgccaatcgtgacaaaaatctggctggacttgatgccactaagcaacaagtggatattttaaagacggaacttgaaagtgctaaagcggccctctctcaagccaaggcagctcaagctgctgctgaattgaaattgtcttatacccagattacagctccaattactggcatgattgggcaaaagtcagtacgtgcaggtacttttgtcaatacaggaaaaccattacttgttattgtgcctcttgataaactttacatcactgcaaattttcgtgaaacacaacttgctcacattaagacagggcaatctgtagattttaaagtggatgctttaccaaatacgatattaaaaggcactgtagaaagtgttggaccagctagtggagtaagttattctgctgttgctccacataatgccacaggaaatttcactaaaattgttcagcgtttacctgtgcgtattcacattatacccaatcaacccgaagcaaaaaacttacgtgttggtatgtctgttatcccaacgatttatattaaggataagtaa

SEQ ID NO: 56787 - DNA, 2946 bp, Acinetobacter baumannii
atgacatctattgaaagaacagcttatcctcgttttaaaaaacacatttccaaaaaagagctggaacaggtctatacacctaatcaggcggagctcacttttatctctaaattggctcgtaaatctgaattaagatttggggcaactcttttgcttaaatcatttcagcgattaggttacttccctacttttcaggatattcctcgtccaattgtccagcatattgctgaatcacttgatttccaaatgagccataatttggattatgaagaccgtacgctttatcgccaacatcagaatataagagcttatcttgatgtatctgaatacaatagaaaaggcacaaaaattatagaaacatctatgactacagcagcacaggttatggataaccctgctgatattattaatgtggcaatcgaagagctagtacgccaaagaattgaattacctgcttttagtaccctagaccgttttgctggaaaaattcgtcatactgtaaaccaatcattttttgatatggtgaatacaaagctgactgattctgaaaaaatacagttagatgaattattggatgtgactgaccataagcaaaaaagccttttacatacccttaaacagttacctaaacggtcatcactggagcatttacagcgattactagaccatattgtaagactatccaatacggtaggtgcagaccatcatttagatggaattcctcataccaaaattaaacattttgcagcggaagctcgtattcttgatgttgctgaactaaaagattttaattctgccaaacgacatgtacttttactaagcctaatttatcgaactcgaatcaaagctcgtgatgacttagccaatatgttcattaaaagaatgaaccatattcatcagcgaggtaaagatggactggaacaattaaggattcgtcatcggcagaaaactgaatttttagtggcaaccctttccaatgttattgatacactggatactcacccagaagatgccgatgctggtcgtgccgttcgccaacttttaatcgaaaatggtggacttgaagccattcaagatgattgtgccgcaatcacggcatatagtggagataattactatccattattatggcgtttttatcgtagccatcgtgctaccctctttcgtatggtgcatttgcttgatttaacctcaaccagccaagaccaatcgttaatgcaggcaatcaatttattgcttgaatatgagaatcgaaaaatctcctatattgaggaaaagattgatttttcctttaccaatgaacgctggaaaaagaccatcattcagggtggtaaaatcagtaggcagcattttgaagtctgtgtattttcatcacttgcagcagagattaaatctggtgatatttcaatttatggttcggaaatctatgccgattatcgagaacaattattaccatggcaagaatgtgaacttctagtttccaattactgtgaacaattaaatttccctaataatgcccaagattttacgacttatttaaaaggctggctcaccactgttgccgaaacgattgataagaattatccaagtaatggtcatgtgactattggtgaaaatggtattcctgttttaaaacgccatatgtccaaagagccaaccgcttctgctagggaattggaaactacacttttacagcgattgcctgaacggaatattattgatgtactgtgtgatgttgctcactggacaaactgggctcggcattttggaccactatctggctctgaccctaaaatagataatcctactgaacgatatatcctgacagcctttacttatggctgtaatcttggaccagcacaggcttcccgacatttaagaggaaaagttaccccacatatgctgtcctttgtgaaccgtaggcactgtaatgtagataaactaaactctgctatggaagacattattaaccactatcaccagtttaaattacctaaaatctggggtgaaggtaagactgctgcggcagatggcaccaaatatgatatgtatgaccaaaacctgatggctgaatatcatattcggtatggtggctatggcggtattgcctatcaccatgttgcagataattatgttgccctgtttagccactttattccatgtggtgtatgggaagcaatttatatcattgaaggcttactacaaaataaatcagacattcaaccagataccattcatgcagatactcaagggcaatctgccccagtttttgctctagctcatttgttaggtatcaatcttatgccacgtatccgaaactggcatgacctaaagacgttcaaacctagcaaagatgtgaaatataagcatatagatagcctatttaaagatgtggtgaattgggaaattatcgaaacccactggcaagatttgcttcaagtcgttttatccatcaaaacaggtaaaatttcgtcttccatgattctacggaaacttggtaactacagtcgtaaaaaccgcttatatcaagcatttcgagagttaggtcgtgttgtacgaaccgtctttctactacaatatatttctgacctagatttgcgtgagcaaattacagcaaccactaataaagttgaagcatataatggctttaccaaatggctattctttggtggtggcggtacgattgcagaaaatgatccagaggaacaagagaagatcattaaatataatgacttagtggctaatgctcttatctatcacaatgtagtggatcaaactcgtatcttaaaagaactggtcaatgagggctatcctgtcaatcgagaagatattgccagattaagcccctacgtcaccagtcatatcaaacggttcggggactatatcattgatatcaatgttgtgcctgatcctgtggatgtggagtttagtttggatggtagctag

SEQ ID NO: 56788 - DNA, 336 bp, Acinetobacter baumannii
ttggttcaagatttacaagcattagtaagtaatgcaaatatttataaagagacagttttagctggaggtcgaattgacttaatcattaatattttaggaagtgagtttatagttgagctaaaaatttgtgggaatggatattctaaaacatatgctgaaggtggttttgaacaacttaaatcatatatgagtgttcgtgacgcaaaaagaagttatttagtaatttttgatgctcgaataaaacaagatggagtgaattctttgccaaaagagtatgatttagatgatggaaaaattgctttttgtataggtgtagatattaggagtatgaaatag

SEQ ID NO: 56789 - DNA, 525 bp, Acinetobacter baumannii
atggcagcgaccaacgatttgcctgatgcgatgatcaatcaatctggtctaaaaataacacctctcgatgccgtggctcctgatacagcccaaactttaattgaccaaacagcaatgctgttaccacatatcaagatcaccgaattattaatggaggtcgatgaatggacaggctttactcgacacttcactcatttgaaaacggatgacactgcgaaggataaagcgttattgctcacgaccatactggctgatgcaattaatttagggctgacgaaaatggccgaatcatgtcctggtacaacttatgccaaactctcatggctacaggcttggcatatccgtgatgaaacttattcaacggcattggccgaattggtgaatgctcaattgaaacaacctttcgctgaaaactggggagatggcactacctcctcatcagatggccaacgcttccgcgcaggtggcagagctgaaagtacaggacatatcaatccaaaatatggcgcagagcctggaaggtaa

SEQ ID NO: 56790 - DNA, 792 bp, Acinetobacter baumannii
gtgggcgttcgtgattcaacctatgttcttgatgggctgctgtatcacgagtctgatttacgcatcgaggaacactacaccgatacggctggattcaccgaccatgtttttgcactcatgcacatgctagggtttcgatttgcaccacgaattcgtgatctgggcgatacgaaactctatattccaaagtcagacatagactatgccgcacttaaacccatgattggcggcacactgaatatcaaacagattcgtactcattgggacgatattttgcgtctggccgcatcaatcaagcaagggactgtcacagcgtcgctaatgctacgtaaactcggtagttatccacgacagaatggtttggcattggcattacgagagctggggcgtattgagcgcacactgtttatcttggattggttgcaaagcgtagaactacgccgtcgggttcaagctggattaaataaaggtgaagcccgtaatgcattagcgcgcgccgttttcttttatcgattgggtgagattcgagatcgaagctttgagcaacagcgttatcgagccagtggcttgaatctagtgaccgccgccattgtattgtggaacacggtttatttagagagagcgactaacgccctacgagggcatggtcgcacagtcgatgataccttgctgcaatatctgtcaccgctggggtgggagcacatcaatttaactggggattatctatggcgaagcaaagccaagataggtggtggaaaatttaggccattgcgcgcaattgaaaaaccttag

SEQ ID NO: 56791 - DNA, 420 bp, Acinetobacter baumannii
atgagtatagtaaatcagatgagcgcggaaacacccccactaaaattgtgtgacgagccttttgtcgattttctaggttttcgtgaggaaatgcaacatggagaaatacagtactttatggactttcgtgattcgcatatcggcaacccgatgattggcacgtttcatggcggcattctcgcgagttttggtgaagtggccgccgccgcctatcttgcccgtcagcgtggtgataatgagctgcccttatgctccacgatgacctttgattacctgcggccagcatttataggtacgttacaggcagtccccagtattgttcgtgcgggtcggcgcattacgacagtatcggttcagttactacttgatggcaagttggtttgtatcggtcgattcctgtttacggttagcagcaaataa

SEQ ID NO: 56792 - DNA, 465 bp, Acinetobacter baumannii
atggacagtaataacacggcacacctgaccatggctaaggcgttttttggtactaatcaccctttattcaatatgttcaatattagtgttggtgcagtgagcgatggtcatgccgagatgacgatgcccttctctgagcaactctctgaccgtaaaggctcactgcatcgaggggctttggtgacgctgctggatacgacttgcggcttatctattttttcgtcattgcggtcgttagagccgattgccactattgatttgcgtgtcgattttttgcgacgtattccctctgcggtaggtttaaaggcgatagtggattgcattggtagaaccgatacggtggcctttatcacgggccgagcggttgcagaagacagtggtgagctactggctactgtcactggttctttcgcaatcggcacgatgggaccctcttttgacagcaatgaagcgcgaggcgagtga

SEQ ID NO: 56793 - DNA, 972 bp, Acinetobacter baumannii
gtgaccaactataagactccatcccgtatcacgcacgccatcgggaggcattgtggcagctccgcaattcgtgatttgctcgagtttaatgggctgaatatttccgaggccatgtgctttggattaggctcagggcttggcgtgacctatttggaaatggctgacgcccctgtgccatttttagtgcatgtgcggtctttggggtttgaagcgcgcgtatttgaaagtatcggtataccctttgagtggcaaaccttcgagtcacccgaatcggcagccaccgcgctggagaaatgtttggatgcgggtcaccccaccctgttgctgacggatattttttatttaccttacttcaacagcagcacgcactttcccggtcacgccatagccgcttggtcgagaaatccagagacaggtgcggtatttgtcaccgataccgagcgtccgagtgttttgtcggtgacgcgagaggcactgacccgcgcacgtttttctacacagcccccatttattcactatggcaatatgttcacgcccaccgcgtttcaaggcgaaattacccccgagatgattaccggtgtcatccatgacaacgccaagtcattagctgtgagtggcatatcggcactggaaacatggctggccgaactgagtcgttggggagccacaggcgattggcactggacgacccgatttgcctaccaaattattgaaaagcgtggcacaggtggcggcggcttccgcaaaatgtacgctgaattccttgatgaagcggttcactatgacgcaagtgtacagcaatatcgactgcccctgttaatgagggcttgcgaaaaagcatggacggcattagccatgtgtttgaagtctgcctcggaaagcacaaactttccatatgccgccattgaagaggccattgtggcggtgatgcaggccgaacgtaattatacagatgccgcccttgcactttga

SEQ ID NO: 56794 - DNA, 627 bp, Acinetobacter baumannii
atgttgagtagtgaatctacgcgagtcgaagttgctgaccgcgagagagtattagccgcttctgccaagctgtttcgagaaaagggttttgagcgtaccagtgtgcgagaaattgccagtgcttgtggtattcttccaggcagtctgcattaccgctatcgtagtaaagacgatattttggttgatatgatgcggcttgctattgagagaactatttacaggattgttgaggcgacttccgcgattcaagatccactcaaaaaaatgcaatcggcactgcagacacatgtcgatatccttatgtcgggtgacgatatggtttatgtgttgttgtttgagtggcgctcggtacatggagtcgcacgtgagcagattattgctgagagagacagatacgagcgatattggcagacaattcttgatgatctgcagtcttatggttgtatccgaaacgatgtggatgcagatctgttaagactgattgggctaggagcaataaactgggctgccacttggtataaagaaaatggtaagtacaatcttgaacagatcgcggatgcgatatggcagatgatgacaagaggcatccttaatccagattttcacgaagaggcaaaaaacctgtga

SEQ ID NO: 56795 - DNA, 870 bp, Acinetobacter baumannii
atgactcatatgatcaatatccagccacgtaagccgcggtttgatttaagtgatgttccagttttttggaacgacggtgacccggtgttaacacgcttctttgatgcactttctattcacttccccgatggagagcgtttttttattcagtcggtgcgtaactatcaggatctggtcacagatcctaaactgagagaagatatcaaaaacttttttcgccaagaagcgcaacatggcattgtgcatgaccagtataatgcggtgatgcagtcgcaaggcattcatgtcgaaaaggtcatcgcaagattcaaattatttattcggctctcccaaaaacacctgcccgccaagtatctgttggccatgacagctgcctttgaacatattactgctgtactaggcgagggtgctatggagggtgagggtgagatgttcaagaatgctcatcccgcaatgcgtgccatgttcatgtggcatggggtagaagaagtcgaacacaaaacagtagcctttgatgtttacgaaacagcggcaggtggggggtatttcacccgcgcatctgctttgattatcggaacgctactggtacatgcggtggttggctcagttctttggcatatgttgaaaattgacaaactacaaggtcagccattggtgcttgctaagggattttatcgcctctatggaccacgtggcctgattaccagacttattccacgctatctggactggtttaagccaggtttccatcctagcgacaccgaaatcccagaaaaggttaattcttggctggctgaatatgataagcatcaagaccctatggaagcgtcacgaattgtttttaatgtccccattgcaaaagctgtatag

SEQ ID NO: 56796 - DNA, 231 bp, Acinetobacter baumannii
atggatagcaattacgtcaaggcacatcaacataatgcacgtgctgcaactcacgatcaggaggcgattggcttaagtcgaggtagcaagacaagtaagatccatcttgccgtagatgggtatggattacccatcgtgtttgcgatcacgggtggtgaattacacaaagccaaagctgcacctgacttgctctcacaggtatctatcgatgccattctgattaacatctga

SEQ ID NO: 56797 - DNA, 1215 bp, Acinetobacter baumannii
atgcaaacaatcgtcatcattggcgcaagtcatgctgcggcgcagttggcggcaagtctgcggccagatggctggcagggcgagattgtggtgatcggcgatgagccgtatttgccgtatcatcgaccgccgttgtccaagacctttttatgcggtgcacaactggtcgatgagttattgattcggccagccgctttttatcaaaaaaatcagatcgaatttcggcacgggcgggtggttgcgattgatcgggcagcgcgcagcgtgacactacaagatggcagtacgcttgcgtatgaccagttggcgctgtgtaccggtgcacgagtcaggacggtgtcgctggctgggtctgatttggcaggtgtgcattatcttagaaatatcagcgatgtacaggctatccagccatttgtacaacccaacggcaaagcagtggtgatcggtggtggctatatcggtcttgaaacagccgccgcattgaccgagcagggcatgcaggtggtggtcttggaagccgccgagcggattttgcagcgggtaactgcaccggaagtgtcggacttttatacgcggattcatcgcgaacagggtgtgacgattcataccggtgtgtcggtcacggcgatcacgggtgaggggcgggcgcaagcggtgctgtgtgccgatggttcgatgttcgatgcagatctggtgatcatcggggtcggggttgtaccgaatatcgagttggcgctggacgcgggcttgcaggtggacaatggtattgtgattgatgagtattgccgtaccagtgcgccagagattgtggccatcggggattgtgccaatgcgtttaatccgatttatcagcggcggatgcgcttggagtcggtaccaaacgccaatgaacaggccaaaattgcctcggcgaccttgtgtggcttacagcggacctcgaagagtttgccttggttttggtcagatcagtatgatctaaagttgcagattgcgggactcagtcaggggtatgatcagatcgtgattcggggtgatgtgcagcaaaggcgtagctttgcagcgttttatttgcaggcgggtcgcctgattgcggcggattgtgtgaatcgtccgcaggagtttatgctaagcaaaaagctgatcacggctggtacggcggtcgatccactgcggttggcggatgagtcgattgcggtacaggcgttgatggggtag

SEQ ID NO: 56798 - DNA, 1392 bp, Acinetobacter baumannii
atgaaaaacatgcaagccacactaaaccaaatttcagccctgctgccgatacccatgcatttacaagtgaaaggcatgcaggtgttccaaaaggtcaagcaacgggtgacacaggcgcaaccgttccctgattttgtagaaaagccaatccccgatgttgccacgctcaagctcgaagacatcgatatgagcaatccgtttttatatcgacagcatcaatggcagtcatactttaagcggctacgcgacgagcgtcctgttcattaccaaaaaagcagtccattcggtgcattttggtcgattacccgttatgacgatattgtgttcgtggacaaatcccacgagctgttttcggcggaaccggtgattgtgattggcaagccgcccgccggactggatgtggaaatgtttattgcaatggatccgcctaagcacgatgtgcagcgtcaagcggtacaaggtgtggtcgcaccgaaaaatttaaaagaaatggaagggctgatccgcagtcgggtacaagagattttggatgatttgccgctcgatacgccgtttgattgggtggagcgggtgtccaaagaaatcaccgcacgcatgctggcgaccttgttagattttccgtatgaacagcggcacaagctggtgtactggtctgatacgttggcgggcagcgcagaagccacgggcggtgagattagcgacaacgatgtgctttttaatgccgccgctgatatggccaagcagtttgccgcgctgtggcatgccaaggcggctcagcaagcggcaggtgagccgatgggatttgatttgattagcttaatgctgagcaatgacgataccaaggatttgattcaccgtccgatggagtttttgggcaatttggccttgctgattgtcggtgggaatgacaccacgcggaactccatgaccggcggggtatatgcgctgaacctgtttcctgagcagtttgtcaaactgaaaaaccaaccgagcctgattccaaatatggtgtccgagatcattcgctggcagaccccactggcgtatatgcgtcgcatcgccaagcaagacatcgagatgcacggccaaaccatccgtaagggcgacaagatcttaatgtggtatgcctcgggcaatcgtgacgagcgggtgattgaacagccagatgcgtttttgattgatcgtaaaggtgcacgcaatcatttgtcatttggctttggtgtgcatcgctgtatgggcaatcgcttggccgagatgcagttgcggattctgtgggaggagttattgcttcgcttcgacaatattgaggtattgggtgagccagagttggtgcagtctaactttgtgcgcggctatgccaagatgatggtcaaactgactgccaaagcgtag

SEQ ID NO: 56799 - DNA, 321 bp, Acinetobacter baumannii
atgggtcaaattacattgatcgagtatgacggtaccgccaccgtacttgacatcgaagcgggcaagtcgctgatgcaactggctatcgatcacggcgtatccggcattgatggagattgcggtggcgaatgtgcttgtggaacctgtcatgtgatcgttgacggtgcttggctggcggcgacaggacagcccaatgacgaagaggcgcgcatgctagagatggtaccagaaggtacggcgtcgtctcgtttggcgtgccagattcaattgtccgatgcaatggatggcatggtggtgcatttgcctgagtttcaaatgtag

SEQ ID NO: 56800 - DNA, 1080 bp, Acinetobacter baumannii
atgttgcatccaagtctgctgactggtctcgccagtacaagtgaatctgctaatatcccctgtagctatacccgtctgattggcctagagctggacttgcaggcgcgtgacctacctaaactattaaaattcaccacgctgaccgctgaacaactgatgcgtgacgacacgatgatcacggccagccaacagattcaaatcttacaaaatagcttggagttgtccgcatccgatcagtttggcttgcgtttagggcagcggctcacgccgtcaacacatggctcgatgggctttttaatcaatagcagcccgaacttattggccgtgttacaagcgtttcaaacttttttgccgacccgtatgagtttgattaggctcgaaacacacaccaatgctgagtggacgacctgcttgattttctttgagcagaccttgagtcatgcagtacatcggctactgtccgaaactgttgcggtgattttttcggaatgtgccgaatttattgttggacgaccgctgaccgaggcggtgattcagtttagccatcccgcccccgatcatcatgcctgttacgcggattatcttgccggtacctatcagtttgatcagccacaactgtcgatccgagtgccgaccgagttgtgcttgattgccaatgcatccgcgcagcacgatagctatctgctggcgatgcaacaatgcgaaatgatcctcaaccggctcaagacccaacaacacagcaccacctaccaagtgcaaaaagccatgctgtcctatccgctcgggcaactgagtgaagaggatctggctgcagccttgtttatgaataagcgtacgctggccagacgtctggtcaaagagaacacgagttaccggctgattcgagatcggattttatctgagaaagccagtagttatttacatgaccctcaaatatcggtcgaggcaattgccagcttactgaattaccacgactctgctaattttcggcgcgcgtttaaacgctggtttggtgtatcaccaagtgcttatcggcgaaaaatcacccatcggcaagaagaaaatgacctgagagaatga

SEQ ID NO: 56801 - DNA, 264 bp, Acinetobacter baumannii
atggcttctgtgatgtctgcattagcagagtttgagggagatttactacgtgaacgtgtgcgctctggtgtagcagcggcacaagcgcggggcgttgtgtttggtcgtcgtcctggtcaacgtaccaagtcagatcgtctggcacctaaagtgttggagttggtgtctgctggacactcttatcgacaagtcggtcggctggtcaatctaagcaaaaataccgtgttggatatcgttaaaagaagtcggagtgaaaatccttag

SEQ ID NO: 56802 - DNA, 1215 bp, Acinetobacter baumannii
atgccgaatttgcagaaaaaaaaatcgaaattaggcgatattaaaatcagtttccggcaggtactggggaccccggaagatgcgcgacgggtatttcaatcgattaactcagatactaaacgtctagataaatatgaggaatatcatctcagaagtcgcggtagtgacgcgtattatgcgatctatgcctgttgttatatcaatgacaataaatctaacttggaagagctccaatatacacgtttaaatgagctgattgagttaggggagaggatccatcagctccttttttcgaccattttattagacaatgaaatgagtcatggcaaaaaaattggcttggtcaatgagttgatgaatatcattgctggtgatcagattcataatattatgagtctgaatcagggggaacgcgttgaaaacctgatgtcgcatctgttgaccattctttgcagaatagcgacgcctgtaaaaaatactggggttccgagtttgggctttcatccatacttatatttttataaggaccagcgttttcagattacttcttttcttgcatggttttcaattgtgtatgaaattcatgaaagcctcatgcagattcatcatcgaacgattagtttcaaagacttcacccgggtacgccgtagtattgagttcttgatcgccaatttccccgtggcgaccaccgaaacggtcggcaagttcggcagtggtatcaagggctatgatcggctacaaattgtctataaagcctttatttgcttaagcttggaaatggaggttgattttgatgatgaggaatgcctgaatacctttattctgtccatgtctaaggccttcaagtacataaactttaacgagttttatgtcgaaagatttttgggtggttatgatgatgcagtcgtcaagcatgtggtgggatatgtggagtcgattagtccaatttctcggtcaaagcccaaggctttttcggcattaaccaagagtctgcttaagcacaattttctggtgggtaatcataacttttgcctcatttgtgatggattgatctatcttgattctactgaatcggatcatcggattgccaaagccgtaggtgggcaaggtgttctagagaatggtctgctggttcatcccatctgtaatagaatgaaatcagatctgagtctggaagagattagagcggatttgtttggtgaattactgtattaa

SEQ ID NO: 56803 - DNA, 486 bp, Acinetobacter baumannii
atgggttctacacgactattgaccaatattattcagcgtaaagtcatgttgccagaagaaatgtcaccttcaatgcagcgtgacaattttgaagtgacactgactgattttgaaaagcatccaatcatcaaatgtttatttaaggcggataaccagcgttctacggaatgttggagcgtgcaagaaattgcaaactttattgaggattgcacagaagatcaaaacatcaatttatgcattttgtattggaaagatatacacagcaatatttacattattgatggagcacatcgtctttcctgtatctatgcgtggatcaatagatattttgcggatgagcaagtccctcaagcacctaatttcaatgatcaacaaaaacaagatattcgttacctccgcaattatttaggagatcttgctgattttcaaaaaatttgtactgatgccgaatttgcagaaaaaaaaatcgaaattaggcgatattaa

SEQ ID NO: 56804 - DNA, 342 bp, Acinetobacter baumannii
  misc_feature (330)..(339): n is a, c, g, or t
atgaaacgatcggcacttggtttaatctatttaattcaaggaatgcgcaatgcgggcattgatgtcgactcacgtttggcagatataggtataaaagtagattccttagacccaagctcaacaattcatgacagtttagaatgggatatacaacaaattattagtgagaatgttgatcctgagaaaggtttgtttattgggcaacactatgcattagcaggttatggtccattgttaatgctacttgtaacaagtcaagatatacaaactgcactggaaaaagggatacagtatcaaaaactcactcatttatttggcactttgagtctnnnnnnnnnntaa

SEQ ID NO: 56805 - DNA, 393 bp, Acinetobacter baumannii
atgatgtttgatttgaataaggaaagagaggcttttgaggcgttaccgcaaattaaagctattttgattggtggagaattttacttttccaccctaagtatgaattacaaacctaaaaaccctcaaaatgaaaaccacttgcagtgcacgtatttcttaaatggtgcttggtacacatggcaagaaaaagccaaagatcaggcggtgccagtatggatatcgacagacttaatgaaaccagatgaaggtgatttggttttaggtatatcaaaaacaaagcttgcagaatttaatgtttatcaagttgtagctttagatgagtttgaagaatgtgagattaattactggatgccattacctacggcaccaagcgaatcgggagcacaacaatga

SEQ ID NO: 56806 - DNA, 369 bp, Acinetobacter baumannii
atgggcttacgtgacgaaattcaggcagatattgccgaagcatttaatgatgatttagcggacgccgttcatacctttacatgtgagcggatctcaaaaagaaattgggatcctaagactgaaacgtatgttgaagttaaagaaaactattctggccgtggcgttctgtttggctcatacagtcaatatgagatccagatacttggagtattggccactgataagaaggctacagtgcttcaaaatgaagtatccatgactccaaaaattgatgatgaatggctaacagctttaggctcatttcgagttatccatattcaacaagatccagccagtacaatctggaaatgtcagttgaggaaggtttag

SEQ ID NO: 56807 - DNA, 243 bp, Acinetobacter baumannii
atggtcataactaatttaaattctaatattaaagaaatattagataagaaagttcaatctacttattcttcacttcttgaaagtggtttcacctatcatataaatttttatcgtgaaaataatatatataaggctacagtaagtttttttaagggacaggtcgatctttgtgccatatatgaactaagacaagataaatttcatgatgaatactggtatatggtgagagattggaaagattga

SEQ ID NO: 56808 - DNA, 414 bp, Acinetobacter baumannii
atgataagtacagattatgttcctgagtggtacatttcaccgtttcaacatgtcaaatatgcacttgctagaaatcaaatacatatggatttgttatttgaagatatgggcaaagctgatcaatttttggatatgggatcggatgcacaagttagtactttttctgatggcgcatatgcaatcgtccaaattggtgatacgtcagataaagaccaaattcaagtttatggattgcttctgcatgaggctgttcatatctggcaaatagttaaacggcgaatgggggagcgcgatccgagtgttgagtttgaagcctattcaattcaagcgatagctcaagacctttttgaaatgttcgaagcaagtgaggttaaaaaacatggggtggaagggagcaaggccgagcagctttag

SEQ ID NO: 56809 - DNA, 348 bp, Acinetobacter baumannii
atgttagaaaaacttttatattcattggggttaactatttcttttgccgtattagttagctgttctaaacaagataaaattaaaccgcttcctccttcggttgaagagcagttcataaaagctagccagcagattgatacgatgcttaatgccttagagaacagagatgtttctttgagtcaaaagcaagaaatattgtgcaagacctatcctgaattctataaaaaacaatacatgccagcattactgaagctctcacctaatgtatatacccaggaaacactcttaagagattacgaggcagtggctaacttttataaaaaagtctttactgttaattgtagttga

SEQ ID NO: 56810 - DNA, 216 bp, Acinetobacter baumannii
atgaatttaagtgagattaagaaattactgtcttacaaagacattcctaatcaaaattgttctgaagttaatgagctcattgattcacatattaaagaagtgcaaaacaacatccgcaaacaacaaaaacttatcgaacaactgttagaaattcggaaaacctgcgatggtatgtgtaatgctgatcaatgcggtgtattgaaaaatttaggttaa

SEQ ID NO: 56811 - DNA, 477 bp, Acinetobacter baumannii
atgctggcatatgttattcggcggttatggcagatgattccaaccatgttgggagtagtactgtttatctttattctttttaactgggtcggtggagatccggcctatattctggcaggtaagatgtctaatcctgagcagattgaaaacattcgtaagcaactaggtgtcgatcagccttattacgttcagctctggatttttattaagcagattcttacttttgactatggcgcaagttggagtactggcgagccagtttcacaaattattttaactcgcttggggccttcattaacgctcctaattccactcactattttacaaaccattatttcaattggcttggctctagctgtatcggcagtacgtggttctttaacagatcgtatggtcatgatgttatgtactattggtatgtcgatcagtatcttggtttatattatttttttcaatatgttttggcttatcagttaa

SEQ ID NO: 56812 - DNA, 564 bp, Acinetobacter baumannii
ttggacattaatccttttttttcgttaggaattgatttagagcaagttcactttttagatgcatttttattattttgtgctttatataaaagcccatcattaagtcaggatagctttactcaagcgaataacaattttcatctggttgcggaaaaagggcgtaagccaaatttaaaactccaaaatggagatagttcaattcctatgtatgattgggctcaagagttgatggcttatattaagcctttagctaatttactcgatcatgcaaatgataccaataagcataaagaagctttgtatgctcaacaggctaaaattgagaattcatttttgacgccatcctctaaggttttaacaaatatgtttcaacacaataaaggttttaatgagttcgctttacatcaatcccagcaacattcaaatgacttttcgcagcagattttgactgatgagcgtaaacaattttttgaatcaatcacgcagaagtcttttctagagcaagaaattttagagcggcaagtgatggactttgatttgtttatgagcaattattctggttga

SEQ ID NO: 56813 - DNA, 276 bp, Acinetobacter baumannii
atgccatacaatgaccatgagaagaaacaagcacttactcgtgttagacgtatcaaaggacaagttgctgctcttgagcaggctcttgatgatggtacagagtgtggtgtgattctccaacagctagcagcagttcgtggagctgtaaatggtttaatggcggttgtactagaaagttatttgcgagaagaatttccagatagtgatgctagaactgactctcaaagaaagtctattgacgaaactatctctatcgttcgatcgtatcttcgttaa

SEQ ID NO: 56814 - DNA, 579 bp, Acinetobacter baumannii
atgagcgaaattcatatacacccttctcttgatcatgggatccgtccaagccaagaaaacttcgacggtggaatcttagaatgtctatgttcaacggataaagttcaagttgaggttggtgcgcaaacattgcataaccatgcttgcggatgtactaaatgctggaaaccagaaggtgctacgttcgctgtaattgccgttgtaccacgtgacaaagtaagcattgtagcaaatccacaaaagcttcatattgttgatgagaatgctgcaattcaacgtcacgcatgtcgtgaatgtggagcgcacctttttggtcgtatcgaaaataaagatcatgcattctacggtttagactttgttcatacggagctttctccacaagaaggatggtctgcacctggttttgcagcttttgtttcgtctgtgattgaaagtggaactcctccatcaaatatggatgctatccgcaatcgtttacgtgaacttaaacttgaaccttatgattgcttgtcaccaggcttaatggatgctttagctacacatgcagctaagcagaaaggaacttatagagaagcttaa

SEQ ID NO: 56815 - DNA, 1332 bp, Acinetobacter baumannii
atgaaagaagaaccccctatcaaaacgaccccacaaacttcctcgactgcatttgtatatggtatgccagcacatgcagatcgagtgagggctgtgggagaggtacatgcccgtccacctttattaatacaagctccacgaaatttattgcagttagctttcttgacagagggagatccaagcaaagaccaaattgcgctggatgaactatcagatcgctttggcttgaaaaaaactcaaaaagaagaatcaccacttcatggtttgacttgggatgaaggaaatttgcattgtgaaaaacacacagaattttccacatatctttggtgtgcagaactagatgtaccaacgggattgcctagaggtgaagatccatttaaaaatggctttgttccaccaggtgaaattatctcaggtatctgcttgcaaatattgccatgggctactgaatctgaaaaattggtaaatcgttttgatacagtcagtttgtgctattcactagtagaaaatgaaacagcagctattttgactgatttcagacaagataatgacggtctgacccggattcttattcttgaccgtggtttgacagaggctcgtgcaggcgcacttgctcaaagtttattagagattgaaacatatcgaacattggcattacttgctttgccattaattcgaacaatgacctttgaactacgtcagatggaattacggcttgccgcgatcactgatgaaatgaataaaggaacagaattaagacgtgataatgatgtactgctatttgaacttacaacgcttgcaactgaactagaagccaatgtggcagcaaatctttaccgatttggcgccagtcgtgcttattaccaactcgttgaagaacgtttgaatagactttcagagaagcctgtatctggatattgcacatggcacgactttcttgagcgtcgtatcgctccagcgatgaggacatgtcaatctgttaaagaacgccaagctactctttctgaaaaattaacacgtgctatttctcttttgcgttcatggatcgatgttgagttagagcgccaaaatcgagatttgctcacatcaatgaataatcgtgctagacaacaattacaccttcaacaaacggtagaaggtttatccgttgctgcgatttcttattatgttgttagtttacttgcatatttagtgaaaggtataccttcagttcatgatatagctgcgcctgaattcacaattgcgatattagtaccgttagtgatgttttctatttggtggacgatgcgaaagattagacaaaagcatagtgacgtaataccagaaaaataa

SEQ ID NO: 56816 - DNA, 831 bp, Acinetobacter baumannii
atggatcgtgttgaacatcatgcaatgtttggtggttggcaagacgtttatcaacataaatctgaagtactcggatgcatgatgaaatttgctatttatctgcctcctcaggtgcaacaagataaattaccagtactatactggctcagtggtcttacctgtacagaacagaattttattacgaagtctgcagcacaacgatatgcggctgaacatggaattattattgttgcaccagatactagtcctcgtggagaaaacgtagctgatgatcctgcatatgatcttggtcaaggtgctggattttatttgaatgccactcaagatccttgggctgcacattttcaaatgtatgattatattgtgcatgaacttccagcgctaattgaggctcatttccctgcgtcacaaaaacgcggtatcagtggtcattcaatgggaggacatggggcattaatgattgccttacgtaatcccgaattatatctgagcgtatcggctttttcgcctattgttaatccatccatagttccttggggacaaaaagctttcaatgcttatttaggagctgatcaggaatcatggaaacaatacgatactgttgaattagttaagaattcaattcataaaattccattattagttgatcaaggcttaggggatgaatttcttgatagccaacttcaaccagaaagactacgaaaagtatgtactgaaatggatcaccctttagttttaaacctaagagaaggttacgaccatagttattacttcattgcgagctttattcgtgcacatattgtgcatcatgctttagctcttaagtgctag

SEQ ID NO: 56817 - DNA, 1293 bp, Acinetobacter baumannii
atggtaaagtctacaggacgtcatcgtgttgttattattggagctggttttggagggatagaggctgcaaatagtctcgctggtgtcaatgtcgatataactattatcgacagaagaaatcaccatctatttcaaccattattgtatcaagtcgcaggctcatctttatcaacatctgaaatcgcttggcctattcgatatatttttcgaaaccgtcctgaagtccgtaccttaatgggagaggtgcagggcattgaagtgggtagccgactagttgttcttgatgatggcgaaaagttgcattatgacactttagttattgcgacaggtgctactcatgcttattttggtcatgatgaatgggagcgatttgcaccaggtttaaaaaccttgggggatgcaacaaatattcgagaacgaattctggctgcctttgaagaagctgaacgtaccaaagatccaatcttaagaaaggctttacaaacatttgtgatcattggaggtggtccgacgggagttgagctatcaggaactattgcagaactggcaaaagatacgttatctcgagattttcgtttgatagatcctcgtgaatctcgagtggtattgattgaagctggtccacgtttattatcagttttccctgaaaagttgtctagctatacccgtcaggcacttgaacaacttggtgttgaggttgtacttggaacaccagtgacaagttgttcagaagatggtgttgtttatgatggaaaacagctacctgcaaaaacaattatttgggctgctggcgtacaagcatctccagcagctcgttggttaaatgttgaatctgaccgagcagggcgtgtggtggttgattcaaatctaactgtgacagggcatcctgaaattttcgtcattggtgataccgcggcagttactatgggagatggtaagttagtaccaggtatagcaccagccgccaaacaacaaggaaaatatgttgcgaaaaccattgataatcgattaaaaggcaaagatataaaagagccatttaaatatcatcatcaaggtaatctagcaacaattggacgtagtcgtgcagttgttgatatgggtaaatttcaactacaaggagtactcgcttggtggttttggaaacttatacatatttactttttgattggtgtgcaaagtcgtttaaacgttgccttaagttggttgtggaatcatagtgtgggttaccgtggttcaagacttatcacaaatgtaagaaaagaagatattagtaaatctattcctaagaattaa

SEQ ID NO: 56818 - DNA, 378 bp, Acinetobacter baumannii
atggatcgtttcgctcggagtctgaaggatttagtcactgaagttgatcaactcgtaaagaggggaattgctattcagtttgtcaaagagaatattaccttcacagctcaggccactccgatggataacctgatgttgcagctcatgggcgcttttgctcaattcgaacgggaaattatcttagaacgtcagaaagaagggattaagctcgcagcagctcaagggaaatataaaggacgagtccataaattgaatcccgatcaggccaaagccttacgacaagcttgggaagaaggaaaatacaaatcgaaagttgcattagcaaatgcatttggcatcagccgacaggctgtgtataggtatttgcaaagagattaa

SEQ ID NO: 56819 - DNA, 1389 bp, Acinetobacter baumannii
atgagtaattacagcattccatatcatgatgttgatattttgattccggcacagaagtttgaaataaaattcagctatacatcaagccaaatgccaaactttattgattcaatggttatgcgtttactgcgtattagtccaatgtcagtcaaaaacatagcaaactttttgggcatgaatcaaagggagtctcggattgttttagatcaactcattacaaataacgagattgaacttaaacaagatggtttatttcatttgacgaacaaatcaatgaaatattttactactgtggattcgatccctaaaattgcatcgattttggagcatacacatggtctagtttatgagcttactaattttaattacattgctcagaagcctgacactaatatgtacggcttaaaactgatcgcttcaaacgaacatgcagcaaatagtgaaagcattgttcgagatagattccaaaagcaattctaccaactaattgaagacgaaattatcaccctaaaaaaaatggatggtagacctgtcatctacaaaatgggtacggtgaaaaaggtaacagaatgcacagtgcgcaagtcgctggatcttaatatcgatgctcaagccgatccacaacctataaaagttttggactctattatgagcgatgagcttaaagataagacttatcaggctttagggcagagtaagaaagggaataatattcgagatattgtgaagaaccttgagggctttgagcagttaaatttgcaccaatattttaaagatggtcgttttttagcaccagtcgcattatttgatagcttaaaccctgtagagagcaaagcgagtgatgaaaaccacctgtttattggaccttgttataatcaaggtaattcaaaactaatattgaacaaaattaaagatgttctcacgaagaatcaagctgtaaagaatatttattggttagctccagatgatgccttttggggtaaatctcttagattcaatacgttcgtcggtgctttggggcaactcaaaaataaacaaaataatgaaatacagcttaagtgtttcttaccgatgtcagatgagcgagatcgtgtttccgtacataattaccgaaagatcatttcaaaagaccatcaaaaatatttttacggtattaaagaaggtttgctcgatggtaattttgaaatcatcgtagttgaaaacgaatttgctatagtaattttacatgtattagattcagaagcagatttcttgacctcattcccaataggctcaatgagctataataagacattggtcagcaacttagtcaatttatttgatgcttggcagcgtcctaaagaagaaaatggcattagttatggtccaattttcaagaaaaatgtctaa

SEQ ID NO: 56820 - DNA, 5049 bp, Acinetobacter baumannii
atgtctttaattattaaaactcaagcaaatggtcttcatcaacacgaaacaaaagcaattgctgatattcgagatgcatttagtattgaagatgaaatgcgaagagttagtccttggtatggttatgctggctataccttagttgatccgatctcaaaaaaagaaggggaatttgatttaatcttagtgaccaacagtgtcctaatagttattgaattaaaagactggaacggtaagtctattaagtctgccaatggtaattggtacatggatgaccgtgatatgggagtatcacccgtatctacgacacgcttaaagcaatacattcttgttaataagctaaagactctcaaagataaatttacagctaacccaggttttgtaccacgggtatatttctttgttgtaatgtgtggcaaggtgaatttttcaagtttgcctgatgatgaacaaaagcatgtaattagccttgataaattcttaaaatttgctaataaaaattcatttaacaaagaatttacacctcatccaaatgcacagcacctttataaagatttcgatttaattgacaaaatttttgtgcagaaaagtacgctacctaaaaaaatcattgttcaaaaatataaacaagatgatgagcttctaagtcaccctaaaaagttatatacggagtatgaagctacttcaactatttcacgctctgacaaggcaataataagacagtggatgttttcaaattttcaggaattgagtattcaatcacctaaaatgagagcagcattgctgaaccatgagcgagttattagtgctgaatttaagcaaagcagccatttgtacaatacggcacttgttccgttaatcatgccggatgaggatcaaattactcaacagtacaatgaattggttgaatatcgtcaaagtcatcttaggtttaacgattttattactacaatctctcctaatttgagtgacgatgataagttaaatttaattcagattttactaagcaaattttctgcaatgcacaaccttggtatctctcatggagatattaattcgcattgtatttggatatcgcctcagaaagatgtggctatttcacactttttgacatcagatgctaagaatataacgaataatatccgtgatttacagccaaccctctcatttgttgctgatggtacacaatcagaaattgctaatgtgcaagcgtttaaaaaagacgtatatatgttagctgtcattgtatggcatttgtggttgaatattcgcttaacgccaaaagctttaaataatatatgtgttaatagcgatcattggttagcggatttagtgaaaagagctataaatcttgaaattgaagatgcaggccagttgctcagagaattcaatgcaaaacgccccgttcaagtcgtagaatttatagcggatacttcatttttaaatgaatatattacggcagaaaggctgagtagattatatcctgaagatgatgaaatttatgaagatgatgataatgacgttatcttatatcgttcaggtgacttatgtgtcaaagaatggtctgatgtccatgtaaatgaattgtcatctagcgatattttgaaatatcagcacttttttgagcgtattaaggaagctaattctcaaaacttatcatatttaccaagcattgaaagatttggtatttcaacaaaatcaagatcgttatttctggttagcaagttcgttgaaggtataactgtagaccaaattgagactacgaaagagtcaagattactgctggcagctaatttaattgaggccataatccatctacacaaattaggtttgccaatcggaagaatttgccatggaagtgtgttattcaatttggatgataacagttttatttttaatgacattattgatattaatgaatatttagatcacgaaagtgcgtattatccatcacatattgataatccaacaagtgaacagtgtcaaaattatgcaattatgagactggtatgtgaaattcttggattcgatataggaaatgatagttcagaatttaaatgggttagcgatgctgtaaatatagaacttgaggagtctgaatatcctttaggggatttaaatcgcttattagaaagtattgagactgaacaagttcatggtgatactccaacaatccgtattcctgtacctgataaattttcagagcttcaaatttttgcagataacaaacgtatctatgtgggactagaaaagggacgtaatgccagtgatattgttgtcaagatgcaaggtgttgggggggcaatacagtttattctagatccaattagtaagactatacgcttcgtgacgggagtgcgtgagtcagatgttgttccacactatgtcatagatcaggctgtgcttgaaataaatgtggctcttgatattaagcattctgttggtagacccgaatatactgaattctcacaatttctctttaaacttgatgagttttcaacagccgttaatgatgttcttcaagagcaatctaacgatcaagatgaaagtattgatgtatgtaacaatttaatatcatctgatgccttgatagtagatgagcagctactttcaaatgaaaaacaacctctggttgaaagttcttcaaaatttactgatattgacagtctaagcgatgaagctcaaaaactagctgctttaaatattgatactaagaagctatggaaagcaattttagagactgagacagaggcattaccatatatcatcttgtcacaaccattacatttggttgatagcaaaatctatattgcaagatatgaagatgacaacgatgtattagataaatttcctaaagattcacttatcagcctaatacacaagacagttgattttaatggtgaagatagggagttccgagtaggtgatattgatattcagaattcactcgcaggtgagttaagagttaaaggtgttaaacatgctgataaaattaaggttggtgaagttttatatttaagaacgaaggctgataaatcttcattcttgaaacgaaaaaatgccttagagcagattctaagaagacaatctgatattccgaacctggttgaatatttcgagcctaattcagaaattaatcctatccactatgacattactgtcactgatcgggactttgaaagatatgaccaatatgatcaacaaggcgaagtcattgttagtctaaacaatctccaacgagaagctttccgaaaattaataaactatggaccggtttcaattttacaaggtcccccaggaacaggtaaaactgaatttattgcagcttttgtgcattttctatttgaaaaacagaatgttaataatgtcttgatggtcagtcaatcacatgaggccgttaatactgctgcggaacgcataagaaatcactcgcatcgactaaatacaccgttggagatcgtccgtttcagtaacagagagaatgcagtatcaaataaccttaaagacgtattttctgattcgattatatcaacacatcgcaatctatttttaactgaaatggaagaccgagttctgtctttgagtcagtcaataggtgttgatagagattatttggcatgtgctttgttcctaaaagtacatctgtttggtcacttatctagaatgtgggtatcaactgaatcagaagataataaattaatctcaaaggctgagtggaataacctatcaacgaagcttattgaaagacttaaggattattcaaaagaattgcatactgcattattgggatggaatagtcgtcaggtcttagatcgagaaaatcaaatatgggagatgcttgacgaggtttttgaggttcagggtaaagctgtgaataatgctaaagcccttgtacaaattgctttcgactatgatcaacttatagatagtccaaatgctaattatgaaacttacctttctaaaactagacaatttatctgcggtacatgtgtgggtattggacatcactcaattgatattgcgaaccaatcattcgattgggtaattattgatgagtcagcgaggtcaatttcttcagagttagctattgcgatgcaatctgctaaacgcattctattagtgggagatcataaacaattacctccattatattcaccggaacatgctaaggctcttggtcgaaagttagggtttacaaaaaaccgtatagaagtgaacttaaaaagtgattttgaacgattattcaaatcgccatatggcaaggctgttcagggtaagttattagttcaatatcgtatggctccagcaattggagaaatggtttctgcatgtttctatgataaggaattagtaacaggcgttattgagcctctaggtaagccttatcaagagaaaatggttcgagtcgtaccaaatatataccaacattgttcggttcaagaattacgttctacagtcacatgggtcgatacgtctgacaaatttagtgatggtgttggaacgactttctttaacaagcatgaagctcgtaagattattggcttattagaaaaaatttatgcagatgaggagttattaaaagagttaagagaacgatctaagcctaatgaacctccgattggcattatatgtatgtatggtgaacaaaagcgttatttacgcaagcagttcaattctaagtcctggaatgaagattttagatcattagtaaaaattgatactgttgatagttaccaaggtaaagagaatagaatcattattttgtctgtaactcggaatagtccagataacaaaattggattcatgaacgtgccaaatcgaattaatgttgcattatctagggcaatggatcgtttagttatttttggtgcttcacgtttatggaatatgccaaaacatcaagaatcaccgcttggcgaagtatttaactatatcaaagagcattcaagcgataggacaagctaccaatatattgctgatagaaatgctgaatccaaactaaacgcaaatatcaaaacaaatacaggtcgaggtattagtcatgagtaa

SEQ ID NO: 56821 - DNA, 1455 bp, Acinetobacter baumannii
atgttatctaatgtccgagaacagtggttctctaacatccgtggggatgtacttgccggattagtcgtcggtcttgcactcatccctgaagccatcgcattttcaattattgcaggtgtagatcctaaagttggtctatacgcatccttctgtattgccgtcgtgatttctttcgtaggcggtcgtcctgccatgatttcagcagccactggtgcaatggcgctgcttatggtcactttggtcaaagagcatgggcttgaatatctgctggcagcaacaattttgacaggcgtgattcaaatattggcaggctatttaaagctcgccaagttaatgcggtttgtatctaaatctgtggttattggattcgtaaatgcgttagcgatcttaattttcatggctcaattgcctgaactgattaatgtgacctggcatgtatatgcttttgttgctttaggtttagcaattatttatctctttcctttggttccccaattaggaaaattactcccttctccactagtctgcatcattgcaatcacattattggcaatcgctttaggaattgatgtacggaccgtgggcgatatggggtctttacctgacacacttccaatgttcttgattccagatattcctttgaatattgaaacattgatgattattttgccttattcagtcgcactggcggctgtaggtttacttgaatcgatgatgacagcaactatcgtggatgaaatgactgatacgccaagtgataaatatcaggaatgtaagggacaagggattgcgaatattgcttctggctttatgggtggcatggccggttgcgcaatgattggtcaatctatgattaacgtaaaatcaggtggccttacacgcttatcaacattctctgcgggcatttttcttcttattctggttgtatttatcagcgactggctcaaagtgattccaatggctgcattggtagcggtaatgataatggtctctatcagtacctttgaatggagttctgtcactcagttaaaagataatcctaagagcagtaatatcgtcatgattgcgacggtgattgtagttgttgctacgcataacctggctttgggtgtgttaacaggcgtattactttcagccttgttcctggcgaataaacttgaaaatgatatccaggtgacagcatcttttgaaggaatggcccgtttatatgagttgagaggtcagatcttctttagttcttctgaaaaattcatgcaaggttttgactttaaagaggatgtaaaggatgtgattattgatttgacccattctcacatttgggatgtaacatcagtcgccatgcttgattctgttgtaaaaaaatttcaaaagaatggtgtgaatgtcactgtgcgtggcttaaatgaagccagctctatcatgattgataagtatggaacacatgccagaatctaa

SEQ ID NO: 56822 - DNA, 963 bp, Acinetobacter baumannii
gtgacagcaacatatttacgtgggcaagatctgatagaccagattcaacaacaagactattccagagatctgattggctatcatggagaaccacccaaagtggaatggccaaatggtgctcgtgtcgcggttcagtttgtattgaactatgaagaaggcggtgaaaaccatgtagaacatggtgatgcaggttcagaacagtttttgtcagatattattggcgcggccagttttccagacaaacacatgtcgatggattccatgtacgaatatggctcacgagcgggcttttggcgcattcaccaagagtttaaaaaacgccaactccccatgaccattttcggtgtgggtatggctttggcacgcaatccttacattgtggaagcgattaaagcagccaattatgatgtcgtatcgcatggtcaacgttggttgcattatcaagatatgccaatcgaacaagaacgccaacatatggatcaagctattagcgtgcttgaaacgctatttggtaaaacaccaatcggttggtataccggacgtgatagcccgaatactcgaaaattacttgctgaatttcctcagattcaatatgactgtgactattatggcgatgacttaccattttggagcacagtgacgaatgtagatggtgcaacacgtccgcatttaatcattccatatacacttgaaagtaatgatatgaagttttgctcgccgggtggttttaatagtggtgagcaattttatcaataccttaaagatgcctttgatgtgttatatgccgaaggtgaaactgcgccaaaaatgctatctattggtatgcactgtcgtattttagggcgaccaggacgctttaaagcactacaaagattcttagattatgtgcaatcgcatgaaaaagtatgggtttgtcgtcgtgccgatattgcagaacattggataaaacaccatgcaccgtaa

SEQ ID NO: 56823 - DNA, 504 bp, Acinetobacter baumannii
gtgcaacttgttgaatttaatcaagcatccgaagccgatgtaaaaacatttttaaagcactgtgtgcaaattgaaagctgggcgaatgagctgctcagtcagcgtccgtatgcatcattagacagtattttggaatacgcggctcaagctgctcgtacatggtcgtgggaagaaattaaatctgctttagataatcacccgcgtattggtgaaaaaaaagcccaagctgaactttctgaattagaaaagaatttttccaaccgtgaacaatccgctatttcagccgatgaagaaacacaaatggcattgctcaaaggcaacatcgcttatgaaaaaaagtacggctatatcttcttaattaaagcttcaggcttaagcagtgaaaatgtattacaagcattgcagtaccgtctgctgaataatccagaaactgaaaagcgtattgtccatcatcaattggctgaaattgccttattaagattaaaacaggagctaagtgcatga

SEQ ID NO: 56824 - DNA, 321 bp, Acinetobacter baumannii
atgatcagctcacatattttagatacaaatcttgggaaacctgctgccaatgtcttgattaaattattcaatgcagacggtatgttacttggtgaagggcaaaccaatgcagatggccgtgtgaccgactttggtttaagcgaattttctacgggtagctatagcttagagtttgccacagcggactattttgaaagtcttaataccgaaacttttttcccaaaagcagtaattcatttcttagtaaaagatgcctcacagcattttcatattcctttgttgattagcccttttgcctattcaacatatcgcggtagctaa

SEQ ID NO: 56825 - DNA, 1362 bp, Acinetobacter baumannii
atgacagaacaaaatcaaacagtttcaccagaacatgaatatttaggtgcagggaaaagcctagcttatggcttacaacatgtattgacgatgtatggcggtattattgcgccgccactgattattggtacagccgcaggacttgaacctgcacaaattggtttattaattgcagcagcattatttgtcggtggtttagccacgattttacaaacggtcggtgtgaaatacatcggtgcaaaattacccctagttcaaggcgtatcctttgctggtgtggcaacgatgattgccatagtcactgcaggtggtgggctttcggcagtatatggtgcggttattgttgcttcattaatcggtttctttttagcaccatatttttcaaaaattattcgttttttcccgccaatcgtgaccggctgcgtgattaccgtgattggtttgtcattgctacctgtcgcagtacgttggatgatgggtggaaatagcaaagcgcctgattggggcagtgctgaaaatattagtttggcttttctaactttagccattgtcattgtgctgaatattactcgaaacgctacaattcgtcgtttatccatcttattagcaattgtgctaggtacagtgctggcatatgcgatgggctttggcgatttctcaaaagtcgcaaatggcaattggattcaattcccaagtttctttgcctttggtatgccaacatttgaactgagtgccattattgccatgctaattgtgacattggtgattatgactgaaactacagctgatattatcgctgttggtgaaattgtcggtaccaaagtcgacgctgaacgtattaccaatgggctacgtgccgatatgctttcaagtgcggcagcaccaatatttggctcattcatgcaaagtgcctttgcacaaaatgtaggcttggtcgcgattactggtgtaaaaagccgttttgttgttgcagcgggtggcttaattttagttgtattgggtattttaccaattatgggccgtttgattgctgcaattcctgtaccggtattgggtggcgcaggtttggtattgtttggtacagtggctgcaagtggtattcgtactttagctaaaattgattatagtgagcaaaagaacctaatcattgttgctacagcaattgccgcaggtatgattccaattattgatcactcattctatgcgaacttcccaaaatgggtacaaaccctgttccattcaggtattagttcaacgtgcctcatggccatcgtattaaatattgtgtttaaccatctaaacttttttaaaagtaaagaagtgaataaaaccagcaatattgttatagatagtcatcactaa

SEQ ID NO: 56826 - DNA, 4932 bp, Acinetobacter baumannii
atgtcacaaaattcagtcgttgctcctttaaatacttttagtcccaaagatttaacaacaaaaaaggcagaagttgataaatggtttagggaatatacagatggtattgttactgttgaccgactagagacaatctgtagaaatgtacctgttttaggtagtgcctttgctgttggtgatatcattattgatatcataagtatgattaataaaggtattgataaagttgaaatttttgattggttaaatttaggaattgatgtgatcggattggcaccgatcccatctattagtctgggtattcgtggtgtagcacgaccagcattattttatgtaaagaatgaatcagaacaaattatcaaagcacaagcaaagaaattaggtaaacaaacgttaacttctcaagaagtaaaaaaagctttaagtaccggttttaaagacagtgcaagtgtatttttaacaactatcattgctgaaaatgtagcagggactttagaaaaatttgctaaagaaggacaaagtttacttaatcaggttctaaaagaggttggcaactggattatcacattaacaaatgccattgatactggcttaaaaaaactagtcagtggttcattagatggtcttccaaaccttaagcgtgcaggccagcagtctttaggagttataaaaggaatatttgaacttgatggaacccgtgtagtaaataatgcaaaatatgctaccgaaaacgttgcaaagactgtgggtaaaggatatgtcaacctagccaatttaggaatttccaccgaaacacgagctaaaattttagctttaggtacaaaaataagatctatcggacaagttgctcaaggaaaagtaaatggtttaagtgaccctaatactttatggactattggttggctatttagcattatgggaatggttgccgcaaaacatcggcaaaagaaagcgcagattaaggccaaagaaacgacaaaggccaatgcaactcatccatcaactgcgactgacaaatcaaataaacaagctcatgccgagaataatgccaatcagtgcaaaaattgtatgggtagtactgatggttcgattacctttgcaatgggtacagaattcttttcacatgttgatgctcaaattggtggcatgattcaagacagcattagtcgtacctatgcttcaaacttgtatcaaatggatgactctatttttggagcacgttggattacaccgttcactacaaaaatttctcgtaaatttaaatatagtccaaagaaaaaagaccataaagactatttaaatgggcttgaatacattggtttagatggccgagcaattgatctgcctgacctaaaaagggggcaaagtatttatgatccgatcgagcaatacacttatacagtattatcagatcagctgcatttaattgcctacggtgaagacgagaaacgctattatgaaaaatacggtgaggactatcgtctatcttatatagaacgtaaaaatggtttcaaagtcgctttccgttatgatcatgtttctacggataataaaacaattttatcggacattttatttaaacaggacaataatttgctggctcatttagctttgcaattaaatccacaaggtctggtctccgatatttggaccatcaaaaatggccaattagatcgtgtgttggcaagttatgattatgatcaacaaggtgacttgattcaggcaacaaatgagtttgcagcttcttattattatcaatataaccatcatttaattacacgttatacagatcttactcatcgtgggatgaacttaaaatgggatggtattttacctacttcaaaagcgattgaagaatgggccgacaatgctagtcgggcttcaaagttggaatgggatcaaaatatccggaaaacctatgtaaccgatgttgaaggtaataccactgaacatttttacgatatagatggttatacctaccgtattgtttatcctgacaactatcaggaatggttctttagggacaatgctaagaatatcactttacatatcgctaaagatggctcaaaaacttcatatacttacgatgagcgtggcaatatgttgaccagcacccaagctgatggtgcaactagctactttgaatatgatgacaaagataatctgatcgggatggtcgatgctgaacagggacgttggtttaagcaatatgatggttctggtaatctaatcaaagaaattgatccacttaaacacgaaacggcttatgcttacaatgccatgggcttagtcacttctattacagatgctaaaggtggaagtaagtcacttaaatatgatgatcaagggaatttaattagttatacagattgttcaggtaaagaaaccaagtggcaatatgatgagcgtggtcgtgtaataagcattgaaaatgcattaaaacaaaaagttgagtatttttatactgaacttaccttagaaaatcgagaaccaattataaaaggtttacctctgaatgcttttggtcaacttgaaaagattaaacatgctgatggtacagaagaacacttcattcatgatgctgaagggcgtttactggcacatatagatcctaaacagaacatcactcgctatgaatatgatgaggcgggtttaattctgtctcgtacagatgctttaaaccacaaattaaaatataaatgggatcgattgggacgtctaacccgactcattaatgaaaatggtgcaagttatcaatttttttatgaccttggtgggcgtttaattaaagaaatcgattttgatggtaaggaaacggtataccactatgatgaaaactcgggccaactggcaaccagtattgaagtcgcatccgcttatggacaagacctaaaagaccgagctgcaccgaaagaccgaattcaacaatttatttttgacagtatggggcgtttagaacagcgtactgcgggttatggtcactatggtttagagctcgaagaaaaacagactgaagaatttgcctatgattatatggggcgaatcattcaagctaaaaatactcaaagcaatttacaatggttttatgatgcggctggcaatttagtacgggaacatcagcaagattataaaatcaataaaaccgcggtgtggaaacaccaatatgatgaaattaatgatcgaatcaaaacaactcgtccagatgggcaggttattgactggttgacctatggtagcggtcatgtacaaagtttaatcgtgaatggtcaagacctagttagctttgagcgtgatgacttacaccgagaaattgcacgtcactatgccaatggagtgagtcaggaacagcaatatgacttagcaggtcgtttgaaaagccaaatgatgtcaagtgaacatgaaaatggctatcaaaaccaatataagccgcacaacaatgcattagagcagaccagtcaactggtacagcgactttatcaatatgataaaacaggtgagctaacggcaattagagatacacgccgtggcaatattgcctataagtacgatcctgtagggcgtttacttgaagcgagcagtaaacttggaaaagaaacgtttaactttgaccctgctagcaacattctagattcatatcatagtcacaaggctcaaagccacttacaaggtgagcaagaaaaagactatggttataaccgtttagttaataacgtagttaaagaatatctagatcaacaataccaatatgatgcttatggacaactcgtaagacaaaaaacgagccaaggtgatttaaaccttgaatgggatgtctatggccgtatggtgaagagccgtaatagtcaatatacggcagaatatcgctatgatgcattaggccgccgtattcaaaagcggagtaaacatcaccatacaggtcaagaacagaacatcatttatggatgggatggtgatacgcttgcttatgagtctacagaggaactgaccaagcattatatctatgaaaaagatagttttgtaccgatgctacaagctgtttatttaagtccaatagaattgcaccaaactccagattggtcagatagaccttataacatacaccgagacccgctttggaaaactgaaaaacagggtaaagagtttgatgatgtatggttctatcactgcgaccacttaggtacgccgcaagaaatgaccgaccatacaggtgcaattatttggaaagccgaatataaagcttggggtgagtgtaaagcagaaaaagccaagtcgaatttcttcgaaaatagtgaaattatttcaaataatatacgttttcaagggcagtattttgatgaagagacagggttgcattacaatcgctatcgttattattcaccatatgtaggtaggttcatcagtaaagacccaattggattgttgggtggtaataatgtatatgcatatgcaccgaattcgacaagttggaccgatgctttaggactaaaatcagaatggcaaaagaattgggaggctgtacatggaacattaccaaaagattatgaagttcatcatataattccaaaaagtgcatcttcagtaagagcggcgaaaactatttgtcctaattttgatgtaaataattcggataatttaatagcacttcctaagaatagtaatgtgaaacaaataacaggagctggttttgggaaaactacacataatggttaccataaggggtatagccaagctgctgaagcagcaatgaatgttgctgcgagaatgaaatcaagtgtaccaggatgtaaaagattggcaattatacaagcgggtttaaaaaatcaattaattattggtggacaaactatgtatggtaaagagcatccaaatggtgtaccaggtgtgaaaagcgattggaaaggaactgttagaaatcatgttagaggtaaataa

SEQ ID NO: 56827 - DNA, 174 bp, Acinetobacter baumannii
atgaaaaattgggatgaggtcttagaggttgcttctgcatttgttaattttttagaaaaagggaatttcttttctagaaagtttcaaaaggatggtaactatcatattattaatgatgcaaccgttggaagctgtctcttatacacatctccgagcccacgagaccgaggctga

SEQ ID NO: 56828 - DNA, 705 bp, Acinetobacter baumannii
atgaaaaacacttatttagttacaggcgctacgaaaggtattggaaaagcaattagcgacgaactgtccttgcaggggcatcacgtgattggtattgccagaaatattgaccatatagactttcccggacagctttttagttgtgatttatccaatatagaacagactgaagaaaccttagctttaattgctaaatctcatgtcatacatggaatcgtaaataactcaggaattagtttgccccaacctttaggccagatttcctttcttgccttagaggaagtttggaacttaaatgtaagagctgcgatacaagtgactcagcattttgttgcgcaactaaaagaacagcgctttggacggattattaatattggcagtagggcaatttatggagcaaaacaacggacagcatactcggcagcaaaaagtgcattggtcgggtgtactaaaacttgggcacttgagttggctgagtttggaataaccgtaaactgtatcgcgccggggccaattgaaacggaactttttagaaaaaccagacctgttggaagtgaagctgaaaaagcaatattagaaagtatccctttgggaaggatcggtactccacaagatgttgcacatgcagtcgcttttttattgtcagatcatgcaggttttattaccggccaagttctcaatgttgatggtggtggaagcttatag

SEQ ID NO: 56829 - DNA, 588 bp, Acinetobacter baumannii
atgtttgcgatgataggcatatttttaatagccataatgatattagcgattttaagtgttttaaagaaaggggaaagcaaaaatagaaatgcaaaacgtaccccaatcaagggaaaacctatcattactatgaatgaacaacccacttttatgaaattaaaggaagctttgcctgaacatattattttagcgcaagttgctttcagcgcttttatgacagcgcaaggatacgcgacgcgtaatttatttaatcgaaaagttgctgattttgttgtgttggataaagcatttaatatagttgctattgttgagttagatgattctagccataaggggaaggaaaagtttgatgcggagcgagatgctttaattcacgaagcaggttttaaagtcatacgttataaacgaacaccagaactagtacaaatacatcgtgattttaatattacatcaagttcattagctcaagttttaatagaaccagatttaacaaaaacaaagttagttgctgatgcaataattattgagaaagatgatccaagtatacaacccactcaacatattgatgaagtaaagttgaaatcttaa

SEQ ID NO: 56830 - DNA, 1173 bp, Acinetobacter baumannii
atgggagcagtaatctcttctttaacggtagtgagtatgagctctgtttatgcacaagaccaagtcaactctgaatataaacctggcaatctcatttatgataaatgggacagattttataaaatagaacaggctcaaccccaagaagcagaaaaaatattagttgagctgagtaagctgacccctacagatattaaagtttggaaaagccttacttacttacaaattcggctcgaaaaaagagatgaagctttacaaagcttacgacaagcgagagctttagctcctcaagatgacactttaaaattacaagaagcatatttgctgaatcaacaaaaaaaagatcgtgatgcattagttctatttaaagaattaacttcatcttcagatccagcaattgcagcaaaggcaactcaggcagttaaaaatttaagtggaggagaaattaagccatattttggcgatatttattttgcaccttcttatgagtcacgttatgacgatgttatttttcctttaaaagttcggtacggaaaaaatattgataatggacgagctcaagtctacggttttcttaatttaaaccgtgatactaaatctcaaggtggggtacgacctgaaattattgatgagaacgcagtcactcttggggtaggcgcaaattatcaaccgtggacttccattcctgtgcgagcctatgttgaagttggtggaagttatgacttgattgatagaaatagaaagcgatttcgtgagagtgttgtgggcggtgtaacgggttatcaagaatggtattcacaatcaaactgcgatcattctctttgtttagatagttattttactgacttatatggcaatgtcgcgacttattcgagagaggactataacgttattggggacttacgcttacgtacaggcttaaatctttataagggtgagagtgggattgtgcaggcttatgtgaaattgcatggcttagcagatagcgaagatgaatattacaataatttatttgaatatggcccaggcatttcgtggcagccttttaattatcaaccgataaaactacgggttgaacgtttatatggcaattattttaaagacgtaccggttaatacaaaagatcactacaacaatactcgtgtagaacttgttttttataaggatttctaa

SEQ ID NO: 56831 - DNA, 909 bp, Acinetobacter baumannii
atgagaaaacagataccaattaaaataactgcttttattattttaattatatgtagcgtagtggcttatgcggggttgttcaaaaatcatggacaacctcccattattgaaggtattttctggcaacctgacaataatactactccccctaaaggaaattggcattacttaggtgtgaacacctttgttcctcaatggtcagtcgttgaatctaaatcgtggtggaaaaactccaatcttcctcaatgggaaaatgccattgatatacagaaaattaaacaacaaccgtgggctaaaaatcttattttaggtttagcaggtgaatataatgaacatgaagcacgtgcaaatgtcgttgctttaggagaaaaatctgcacaaattattcaagaacaaaatgatgcatcgttaaaaggatactactttccagtagaagccgaccccacatggctaagagtaagtacattaggtcatgttttagaaaagctaccctcacctgtttgggttagtgtttatagcggtgaaactgaacccgaaaattatgatctctgggttaaaagttggttaccacaacaagcgggcatcttttttcaagacggcgtaggtgtgggagtaagaactcccgaacaagctagacgtattctagaccaacttgaacaaacacttggaaaagataaaacggtgattgtgctagaagcctttcgcaccaagaaaaatggacaattccgggcagcctatccttgggaaattatttctcaaattaaagcctatgaaggtaaaactatttacatttttgatggtccccactatatgggacgctggtcagtttatattgtcggtttatggtatcggctcgtttacggcagtacatctactgccataaacgaatcagaacttcagaataaatga

SEQ ID NO: 56832 - DNA, 1845 bp, Acinetobacter baumannii
atgaaaaagactttcgatctttaccagacagctcaagtgctccttgccagcaccagttttttacttgccatatctgctcatgcatatacatggaaacttgatgacataagtacctcgaccaaatatacggtcgagcctcattttttctatgttggaaaaggagctgaatggcagaatattcagttctctagtgactattcaactgagaatgacacaacattactggtgaaatatgacgacaaactgatctataacacgaccttaaatggtgatggccagtttaaattcaatattcctgccagtccaagtggctttcatcgtttagattttattattcaacaatatgctaaaccgacgactctcaaccagacaaaagagactttctgtaccgaagatatcgaccatttaacctatttgagtaattctcaactcgactttactcctgttcgaaatatataccgtttaaaagatttaccagatgctctatttaacccccaagctagacgtcctaccccatttgttggaattttaaaatataaccgtaaggaaattaccgaagcatccatgctagctcgtttggcaagttcttggagctcagtaactcctattgaatgggttgattcaggtcaaacgaacctgaatcctgaaacaaactttattattgaagtgatcaaatccacagctccacttaaaaatggagcgtttgtacaaatttcaaaacctgcagatggggtacctactctctctatcacttaccataccgcccaagagcttactgctgcgattaatggtctaattaatccggcatacgtacagcagcttaatacaggtagtgctatttttcccactacaatttcaccaccagcatgggctcaatttagaaaaattgatacgcttgcagatttaggtattgatgacttcagactcaaccacgctgaaaagaacctattccttgattttccagcagtatggcagcctactgatattttacagggacaaattgcacttcgtattcaaagtggtttattacaaggctctagtattacagcatggcttgatggtggccttgccggtagtatgaaaacagcagatcttgcttctgacccagtaaaccgacagttcaacatctttgctaaggaaatttcaaatacaacaaactttagcttaaaactggaaaactcagttattgcaaattctcaatgtttaccaaatgctcatggttcactttgggtagataccgccaaatcaacggtaaaacttccacataaactcaaaaatggtgtggcagcgctttcaatgacattagcaaccaaaccaacaattgcaattgatgaccaatcaggggcattaaatattgccatcattttgggacaagtcgctaaaaatatgctgcttacacaggcaccaatgcctctcaatctggtacgtttctcaccaagcgcccctcaagcggtcaatgtgagagtaaataaagagatttatcagcaacaaattttaatgcatcaaaatattatttatgcgcctgcggcagccaacggttttattgtgagttataacaataaccgctttgatgtgattaccgattctgaaaccggtgcactcacctttatgcatttatgggaaaaaatacagcataaaattccaaataatgtgaccaaaatgatggtttcagaaaacggcaatatttatgttctccaaaaattaattgtaggtaatcaaaaagcgccattagttcagcagtcttcattctttttattagttgtgattatctctgcaattatgataatagtgatcttcttgtggtattggttacgacgaaataatgagaaaacagataccaattaa

SEQ ID NO: 56833 - DNA, 765 bp, Acinetobacter baumannii
atgaatactcttgctgaacgacttaggtatgctatggaagttttgccacctaaaaagattaaaggtgttgagcttgctcgtgcagtaggagtcaaacctccttctgtgagtgattggctgtctggaaaatccaaaacaatggaaggtgaaaatttattacgtgcttcaaaatttttgaatgttaatccttcttggcttgcatctggcacaggagagattcaatcaagcacgagagataaatttaaacaactggatatcgaagccttcaaaaagaaatacaacattagtgatagtgatgaagctcttttattttcaacaattatcgaaaaaccttttaccccatcatctaaacgttgggttcctgtaaaggcgtactccaagatgggaatggatggttattttactgacatgggttatgaaggaaacgctggtgatggatatgttccaacccacactgcaggatcaagagcatatgcggttaaaggtacgggcgactctatgtttccagctatccgtaatggttggtatgtagtatgtgatccagatgcagaacttgtgccaacagaatttgttcaggtgtgtttgaaggacggaaggtgcacaattaaggaatttgtaggaataaatggtggtgttttgagtttattggccgttaacggtagcgaacgactatcttttgacatggatgaggtcgaaagtattacggctataactgatattgttccaccaagtcagcatagacaggaacaccctaaagcaaattaa

SEQ ID NO: 56834 - DNA, 1083 bp, Acinetobacter baumannii
atgcattttgatatcggttattttaataaattaccaatgccaaatatgcaagaaattacgaaaaaagtttctgtagataaattaattaatctagcgaaaaatgactgggactcttacgaaatctcatgggattttactcagaacccaattattcgtacggggcagccgaacctagaacaagcctttaacatctggcaacagcaaaatgctgacgccgtggctgaaatgaaacgtctggaggaagaaaataataagctgtttattgatgcttatggtttacaggatgaacttacccctgacgtaccagatgagcaaatcactttaacccgtgccaaccgtgaaaaagacagccagcgtttagtgtcttatgctattggctgtatgatggggcgttatagtctagatgaacccggcttgatctatgcccatgcaggcaatcaagactttgatgccagtcgttatcaaacatttccagccgatgcagacggcattattccattgaccgaaatgcactggtttgaagatgatgcaacgcaccgtattcgagagttcttaactgcagtgtggggtaaagatacactggatgccaatatgttgtggctggcagaaagcttggataaaaaagccagtgaaacagcagaagataccattcgccgttacctagccagcaagttctataaagaccacatgcaaacctataaaaagcgcccgatctactggttattcagtagtggtaaacagggggctttccaggcgttggtgtacttgcaccgctataacgagagtactttggcgcgtatgcgtactgaatacgtcatgccactgatttccaaaatggctgcctatgctaattctctagaaacagcaaaagaaagcagtgactctgcggctgaaatcaaacgcatcgagaaaaaactgcaagatttacataagcaacaagctgaactcagtagctttgaagaaaaactgcgtcactatgccgatcagcgtatttcactggatctagatgatggtgtgaaagtgaactatggcaagtttggggacttgttggctgaagtgaaagctgtgacgggggaaaagtga

SEQ ID NO: 56835 - DNA, 1257 bp, Acinetobacter baumannii
atgtcaaaacagttaaaacttactcaatctgcaataatatctgtatttgctagtacagccacgatacaagtacatgcagatttccttgaagatagtaaaactagtcttaatcttagaaatttttattttgatcgatctttcgaacaagaacggcaaccatcttttggcagctggacacaaggagcgaatttaatttttgaatctggttacacagatacactgcttcaagtaggaatagatgcaagtattcgatatgcggttttacttgatagtgaacatcgtcaaactagtgacttaattgtgccttacgatactgctaaaggagagttaaaaagtaattatgctaaatacggggttactttaaaactaaaagcagccaataccgaattgaaagttggtgaattgctaccgcgtaccccgattgtacattttgatgagtcaagacaattagtgacatcactagctggagctatgttagaaaacaaggatattcaaaatttaaaaattactgccggacgtattacccacattaatgcccgtaacgatgataaatatcgtaaattgagcatgatggctgcgggaccagtcaaggaaagcgatggactaaatctattggggctagattatcaactgactcctgacttgtcgacatcttactggtttggtcaattagaagatatttatcagcagcattatgttggtgttaattataaaacacagctcaatcagaccaaagttaaattggatctgagctatttctacaataaagaagatggtgatgcgtattatggaaatattgatagtcaggctttgggtggaatgaccaccttccagcaccagaatcatcttttcactgccggtttacaaaaaaatataggagacagtagttttcctttactaactggttattctccccaacattttttacaggcttggtcaatcttaacttttaataatccagaagaaactatctggcattttagttatatatatgactttaaagactggaacctaccaggtgttaaagttcggtttgcctatcatcatggtgatggcatccaacgtcctggactggcagataacaaagaaattgaacgtgtattcagcctcttatataacccaactcaaggttggttaaaaggacttggatttgaatggcgatataccgatgctaatattaaatatggtgcaggaatgcaaccgggtaagagttttgttgaaaaccgtttaattacttcttataccttcaagttctaa

SEQ ID NO: 56836 - DNA, 1167 bp, Acinetobacter baumannii
atgtataccattgagcggctttacgattccatctttctggatgagagtaaaaaatctgagtttgaagaattgctcaagcaagttgcattggaaagtgcatcattttcggaactggcttttattccacagcacatcgtcgatttgatgaaaaaagctggatttttccgtgtgtctgtacctcgtatttttggtggtaatgcggggaatccactgccatttttacagtctttggaaaaactagctgcagtcgatggttctgctgcatgggtggctagtttcggttcatcaaattattacttggcagctttgcctatcgaaactcagaaaatcatttatcaagatggtccggaccagatttttgcgggaggtttgttcccagtacaacccgttactcgtattgataatggctgggaagtgtccggaacatggaaattttctagtggttcaaaaacggcagattggttaggtgtaggtatttgtgagagtagtagcggcgaatttcaagaccgtccacgcactgtaatttttcctaaagataaagtgcaggtatctgagaactgggatgttttcggtatggagggcaccggtagccacgatttaaaagttaacaaggagtttgtcactgaagattggtcttttattcgcggtgcacctgcactggttgatgaaccactttatcacatcccaacagtcgccttctcgggtcaggtccacaccgtggtagcacttggcttggcttatgcagcaattcaggaacttctacaaatttgtaagggccaaactacaactggcgcgcccaaactcgctgatcgcgcttatttccgtatggctttatccaaaaatacagcagcttttctcagtgtccgcagctatttctatgaaatctgtcatcttgtctgggcggaaattgaaaaaggtaatgagattagtaaagagttagaaaacgaaatgcgcctatccgctacctatgccgcgcattcatgtgtcgatattgtcaagaactgctatagcatctctggcattaattccatctttaaacgtcagaaaatgcagaaaattctgcgagatattttagtgattactcagcatgcacatatcaatgaatctgtatttgatggagcaggggcagtgatgactaaaacagaaccattcaaaggttatatctag

SEQ ID NO: 56837 - DNA, 501 bp, Acinetobacter baumannii
atgttgattaatacacgtgatttcagaaatgcactaagtaaatttccaacaggcgtcactattattacagcttatgacaagaatggagagaaaattggagttactgctaatagcttcaattctgtgtctatggaaccgcctttggtgctatggagcattgataaaaatgcctacacttacgaagcttttactcaaggaggatactttactattcatatactacggaaagatcagatagaactatctaatcgttttgctcgacgtggtgaagataaatttgctggtgtagaactacatccagatagtcagcatgcacctcgtttgaacaatgtctcagcttggtttgagtgtcgtttatggagtgtttgcgacgctggagaccatgccatcgtgattggagaagtactgcaatatagttatgaacaggatgttgattcactggttttctgtaatggctcctatgccatacatgaggctcatcctttattaaaaatatattaa

SEQ ID NO: 56838 - DNA, 1317 bp, Acinetobacter baumannii
atgtcggcaccagtaataaataatgcaataaatgccaatatggaaccttcagctattacgactaaacgtgtggtattgctatgttttattgcaatgatatctgagggttatgatatcggaattatgggggtcattattccgacccttttacaggaggtgagctggaacgtgacagccgtacatatgggatatattggcagtgcggctttttttggtacattaattggatgttatttgtttagtgcacttagtgatttatttgggcgtaaaaaattattaattggttgtctaattatttttaccagttcaatgattgtagcagccatggcacaggatccgattacttttgttattgctcgcggtatttgtggtattggtgttggtggcataattccaattgcctgtgctttaacttctgaatattcagatgaaaagcataaaaatttctatttcgcattaatgtattgtggttatccagcaggggcattactggcagcactggtcgggatgttctatctgggtgaatatggctggcgtccactgattgcaattggcgcattgccattattattagtacccgtatttatcaaatatcttcctgaatctattagtttcctgttgagtcaaagccgtaaacaagaagcgctccagttagctaataaaatcggtattgcgcaggattcaattgaaaactatcagatcagcaaagaagaaaaagttaatattttctccttgctgaaagaattgttctcagccaagcatcttcgtgcaacaactttgttctggagctcacagattgcaacggttcttggtgtgtatggcttaagcacttggttgccacaaattatgaaaactaatggttatggcattagttccagtatttcttttctagcaatctttatgctgtctgctggcttgggttcagtatttattggtcgtctgacagatcgattaaatactcgtaaaacaattgtgatgttctatcttattggtgccgtagctattttcggcctatcttttaattaccatattgccttgacctatgtgctagttgctctggcaggtatgggtataacaggggtcggtatggttcaggttggttatattacacattactatccaactaagatccgtgctagtgcaactggttgggcaattggagtcggtcgtattggagctattatggggccgatcatcgcaggctatcttctggcgaatggaacgagtaccagtgctaatttctacctgttctctgcagctgcattgattgctgcgataagtattttctttacgcctaaaaatattgggaatcactaa

SEQ ID NO: 56839 - DNA, 735 bp, Acinetobacter baumannii
atggataaggtgattctaattactggggcaggtgaaggaattggtttttcaatagcagaatatctggttaaccaacaatatcaggtaattgtgaccgatgtaacacttgataaagctgaagccgcagtagcaaagttggctgtgaataatgcatttgctcttaagctggatatcacacatccggcagactttgatgcggttttggactggattaaagaaaaatttcataagctcgatgtgctgattaataatgccgcaatgaccagaacgacatcattgtttgaaatatcggctgatgagtttgttgagattagccggattaatcagatgggaacctttctcgcctgtcaacggtttggtcaatggatggcacatcaggggcagggacgtattgtcaatatgtcctctctcgctggccaaaatggtggtattgctgtgggagcacactatgctatttctgaaggtgctattctcaccatgactaaactatttgctaaagcactggctgagtcaggtgtcacagttaatacaattgcttgtggtccagtagattcaccagcattccaccgtttggttcaagtgaatgagattccagagattcttaaatcgataccggtaaaaaaacttggtgatatgcgtttcattgcacaaactattgagttactaattcaggataattcaggatttgtcactggagcaacttgggatatgaatggtggcttattgatgcgctaa

SEQ ID NO: 56840 - DNA, 705 bp, Acinetobacter baumannii
atggattcaaatggaactctgctgattgatcagataattcaatcgagatatgccgcccgtgcttttttagataagcctgtcgaaccgcaactcattagagatattttaactatttcttcccgagcaccttcaggtactaacacacaaccctggaaagtatatgttgttagcggtcagaagcgtaatgaattggtggcagaggtttatcaagcacaaaaaaaaatatttgagcaacctgatatagctaaacaatatcaagaaagtttcgcttactatccaaaagtttggcaacagccttatttaaatcgtcgaaaagaaaatggtgcttggctatatggtttactcaaaatcagtaaaaatgaccaaaccaaaatgcaagcacagcttttacataattatgaattttatggtgctcccgtaggacttttctttactgtagatcgctctttaggcattggctccaaaatggatatttcaatgatgatgcagaatgtaatgttaagtgccaaagctagaggacttgatacgtgtccacaagcagcgtggaataaattccattctattgtacttagccaccttaatgcggatgagaatgaagaactagtctgtggtatggctctcggctatgctgacccttcccatataattaatatttctcaaaccactcgagtacctttagaagagttcgctatatttttggattaa

SEQ ID NO: 56841 - DNA, 1161 bp, Acinetobacter baumannii
atgctattccaaaattttattcgtacaaatcacgatattattcaggctaatgaatcagattttgatttcttagatcgttgtgcttggccaaaagctaaacaaatacgattactattagaacagtgcctgaataattatcctgtaactgaaaaactcgagataattgctcgtctaaaatcaggtgatcatcgacaattcacttctactacttttgaacttttattacatgaatatctagtatatcaagattttatattatcccctcacccagaattagcaaatggttcatctaaacgtccagacttcttggttacatgcccagatggacagcagttttatttagaagcaatttgtacttcagaaaataatggtaaaaacgattctgctgaagcactaaaagattcaaccctagactatctaaattctagacctcataaaaattttgttctttcgattaactcttctggagatcccataactcaaccaagtggtaaaaaattatactctataattaagacctggctagattcacttgaccctgatatagtcttagcagattcagaaaataatggatactcatcatttccagaaatctcatgggcacatgaggaatggaaagtaattatagaagcaattcctttagctgttaaacatcgtggaacacataaacaacttatcggaatccaaaattacgatgcaagttggattaatagctggatacctattcgtgatgcaattcaaaaaaagacaaatagatatgggcaacttgatttaccactaattgttgcagtcaacattaatagtttcaaactcaacccaattgatgaaatgcaggcactctttggtgaggaacaatttagctttaatttggctagtttagataatccacatttttccagagtttcaaatggtgcttggtttggtccagctggaccaaagggaaaaagatgtagtgctgcttggctgtttggaaatctttccatatattcattaacaaatatagaccatacgctttatataaatccttggtcaactttaccaataccttcatcagcattaataatgccaaatgcaaaagtagaaggtcatcaacttaaattaatggaaggcaaatcatttaaagatattttcaacctcagtaagggttggccagatgaataa

SEQ ID NO: 56842 - DNA, 732 bp, Acinetobacter baumannii
atgagtgcatggtcattatctgttctacttgctagtctgcatgatgatattcagcatcgactagagactgctaggaaatcattctctcaccctggaacaaagggcgatgctagtgaagaggtttggcttcagatgcttaaaacctatcttccacaacgttatcaagctgataaagcatttgtagttgatagtacaggaactttcagtgagcagattgatgttgtgatatatgatcggcaatactcaccattcatttttcaatatcaaggacaaatcattgtcccagctgaaagcgtttatgccatttttgaggcgaagcagacaattaatgcgaagtatgttgaatatgcacgtcaaaaagtagcctctgtgcgtaagcttcaacgcacaagcctgccaatcccatacgcaaaaggaacctatccaccaaaaccattaattccaattatagggggcattttgacacttgaaagtgattggacaccatgttgcggcgatgctttatggaaagctttaggcgacggcaatggcagtaatgaagatcacttagaaattggatgtgtcgcagcacatggacactttatttgggagcccacaaatggtaaatatgaattcacacaagaagggaaacctgccaccgcatttctgttcaagttaatttcaatgttgcaatttagcggtaccgttccaatgattgacgtgaatgcatatgctgaatggttatcaaagtaa

SEQ ID NO: 56843 - DNA, 942 bp, Acinetobacter baumannii
atgacttcacataacagaccaccacttgatcaactatttgaacatcgacttatttttccagatttcgaacctcaggaaagattaggaaaacttgttgggcttgatgatcaaaaggctcgcctcattaaaattctcagtcttctagttaacccttcaggtttaaataactgggcacaaagatttcatccagacgctaaagatttattaaagcatgtactccgtcgcccaccacttgtagtattagcaggagatgttggctcaggaaaaactgaactcgcagaaacgatcggtgatgccgttgcacgccaagaaaaaattgatatcacactataccctcttagtttatcaagtagaggacaaggtcgtgttggagaaatgactcagttgttatcagctgcatttgattatacagttgaagctgctgctagcctcaaaaatgtagatggtacagcacgtggagctgtcatacttttagtagacgaagcagatgcacttgctcaatctcgtgaatcagctcagatgcatcatgaagaccgtgctggagtaaatgcatttattcgaggtattgatcgaattgctaatggtcaattaccagctgccgtaattatgtgtacaaatcgccttggtgcactagatcctgccgttaaacgccgagcagcagatattctgacttttgaacgacctaatgaagggcaacgccatgctgttctcaatgaatcacttcaagccctaggatttagtgataatgaaattaatcactttgtggccgcaacaggagagaaagccgatcgttatggcttcactttctcagatttaactcagcgactcctcccaacaattgtccttgatgcctatccttcagaatgtgtgaaatttgaacgagcattagcaattgctaaacaaatgaatccaactccaccctttgaggagaagaaactatga

SEQ ID NO: 56844 - DNA, 516 bp, Acinetobacter baumannii
atgtctagttttaccattactgagtcaacaacttttaccattactcatgcacgtcatatggcagctaaagtttctgctgacttaaaacgtatgcaacggttctatggaagtccaacagacaactatattggagaaattgaaattgaaaccattgaacttctgaaagcaggctacttcggtactctaaccgtgggatttaaacataatgataaatggatagaaccaacgcttagatatactgcacgtgatctttatggaatggcagctgatgatgatgatcctggtcgtgttaaacctggggcaaatacttcaggagcatcattctataattatctaacatattcatctgcatgggatgtcctcactcaagctgaaaaagatgctttcaaagcacgaatgccttatcagcgtactagtgcccaagaacctttggtaaatggatatatggaaaacgatagaaactattcagctggtggtaaagcattaagcagagccagcgtaaggagctacaaatga

SEQ ID NO: 56845 - DNA, 966 bp, Acinetobacter baumannii
atgacccgagaacatgtaagtcataaagatattgcccgttttgctcaagaaagggtcaatctcccaaaagtaaaagcagatgaatttcgtgcacaagctaaacgcctacgcgacaaacttgaaacgtatcttggtgagcatccagatttcaccctaaaaaaaatgctgctttcaggtagccttgcaaaaggcactgcactacgttcactcaatgatatagatgtagcatgctatatcagtggagctgatgcacctcatgatgtgaaattactcctcgaataccttgctacgaggttacgtaaggcttttccaaacttctcaccagaccaagttaaaccacaaacctatagtgttacagtatcatttcgtggttcaggtttagatgtagatgtagtacctatcttgtatgatggaaattcctcttggtacggaaatttagtaagccaagatgatggttcattattaaaaaccaacatacctcttcatcttgaattcatgcggaaacgtaaacaagctcaaccagagcatttctctcaagtggttcgtctaatcaagttctgggctgcacgtttaaaagcaacaaacgaaaattttagatttaagtctttcatgattgagttaattcttgctcgtctaagcgatcagggcctgtcgtttaatgattatcctgaagcacttcaacattttttcacttatttggctcaaacagacttacaagagttaattctctttactgacaattatcctgcatcatctataggaaactttaatgatcgcattcaaatcattgatccagttaacgcattgaataatgtaagccgactgtataccgaggttaatgcaaatgcaatttacgaagctgctcttgatgctggtgatgcaatcgattccgctttagctgcaccaactaagcgggaaacagtgtactactggcaaaaagtatttggttcatcatttcaggggtaa

SEQ ID NO: 56846 - DNA, 348 bp, Acinetobacter baumannii
atgagtaatgaactttcaccttcagagctattccaagagcgattaaaatctgctagagaattacgccaatggagtcagagtgatctagctgttaaagcaaatatgccaccaagctccatagctcatttcgagtctggatcacgtaaaccctcatttgacactcttcggcgccttgcaaatgcattaacagtaacaacagattatttgcttgggcgggtagatgatccctctatggctgaatcggctgatccactttttcgagatgttagtaagttgactgggcatgatcgtgagcttgcgaaagattttctacaaatgcttgctaatcgaaataagcaggggaaataa

SEQ ID NO: 56847 - DNA, 888 bp, Acinetobacter baumannii
atgagtcttgcactgcgtttaaaaactgcaaaacaaaaaggagaaatgcttctagttgaagaaggtctagtaagtttgcccatagatccatttgaaattgcagagcgtcgagatattgttgttcaggcaaagccaaatgtagcatctggtgtttcaggaatgcttttgagacatggcaatacttttggaattctttatgcctctgatattcccagtgatggttttcaacgttttagcgtagcacatgaattagggcattattttcttgatggtcatattgatcatgttcttcctaacgatggttttcatcagtctcatgctggtttttcttctcaagatccgtatgagcgtgaagctgatagttttgctgtaggtttattaatgccttctaagcttttcaggcgtttaattggtcgtcatcctcttggtttggtagatattgaagctgctgctgagacttgcaaaacatctttaactgctacagcaattcgttatgttgaactaaccagtgatgctattgcaattattgtcagcactggttcgacaattgattactgtattatgtctgaggcgatgaaatcatttcgaaatttaacttggttcaaacgaggagcattagtaccgttaaatactgagactgctcgatttaatgctgatccatcaaggggattacgtggtgaacgatccagtataaaaattgatatccttgattggcttggaggaacaaattcaagcatacttaccgaggaagttattgggctaggtaactatggaaaaactttgactatactttcctcttcaaaaattggccaagagatttatagtggagatgaggacgatgatgaggagaagttgatagagagctggacacctaggtttcgaagataa

SEQ ID NO: 56848 - DNA, 972 bp, Acinetobacter baumannii
atgattagacagaatttagcaatcattctactttcaagtattacattaactgcttgtgcaaaatcactgaataatacagatcaagctcaaaccccagttactaaacaaaacctctcaccagagcaacaaaagaagttgcaacaattgctcgataaaacaaaaaagaatcttatagaaattaagggtggtacttttatgatgggagactttggtgagcaaaaaagcccagataaattaccctatgatagtaatgcagatagtaaacctttacataaagtcactttagacaattttgcattaagtgcaacaaaagcaacttatgctgattttgatgtatacactgaagttacagggcaagaaaaaattgggaagtttgataatatttcaataaaatatcgtattgctaattcagcagcaggcgtcaattggcagcaagcccaaaattattgccaatggctaggaaaacaacttaatttaaaaatggatttaccgactgaagcccaatgggaatatgctgcacgaaatcgtggacaatacattctttaccctacagacaacggtaaaattgatattggtagaaacgtttggagctttaaacaacgtactctttcaaagcaacaatatcacgctaataaagatatttctattctccaacagtttcctgccactcccttaggtttatatgacatgattaccgataattatgagtggatactagactggtatgacccacagtactatagcaaatctactgaaaagaacccccacggtcctaaaacaggaacccttaaggtcgtaagaagctcagaaccatctgatggacagaacttacaaatgtttggaggttttacctttagtcgccatgctattcaccctgtagaagatcccaaactatcaaatgatcctgatattaaaaaatataatattgatttaaatagattaaattctgtacgatgtgccgttaattactaa

SEQ ID NO: 56849 - DNA, 1173 bp, Acinetobacter baumannii
atgatctactacaccacaacgaaaactgattgtcttttaagcttaatgcagtgcatttctaacggcagtgcaaagttttggttctctgattctgtgagcttttcaaagttccatacggtcattccaaagttgattctggagtatggtctcaatctggatgaatctttacgcaagcgaaaatcagactatggggaaccagtctggagtttggttatcaattatgacccggccaagaatgatgtattccaattctggttgtttaccacaggctacagagaggcacgaagaagtaagctgacgctaaaagagatactcgctaaaaattccagcatggtgcaaaagcaaaagctcaacagtattttgactgtcaaaaaagagaagctgcttcgctatggagattatgtgctggggcagtatatagagttcggcgatcttaagcctcaatttactaagacttattatcacccggaacaatttggagtgatatttaataccaagacaatccgaacaaagacaattgatagtaataagaattcaacttaccggatatttaaaccgttcgataattttgaattaaatcggctggccggcattaataaaaattttggtttcgcttttctcgaaaataaacatactcgctggaataaaacctccgtaagtcagtttttattaaatcagtttgggattaagtttgatgtaaatgccagttataacgaccgattaaaagaactgaccagggtattacgtggagttcgcaaaaagcacttggaatttttccagcgttattctcagaagaaagtccgctacacctggtatctatcaaaagattttatgcagtcagctgaaagggagttagataagaagattgatttaatctctacaggtaaggcagatcgattaaaggaagctacatatcgattaagtgcacatggtaatttccatggtacccggcaccaaattggaaagttacaggccaagaccagatccatattaaatagtagggatccaaaccataagaagctaaatcaaatgtatttccctcaaaatcttcactatgtacggtttactgccaaaaaggctcagaatatgaaagagtttgaattggcatgccagaatgcagacaagatttatataaataaaaagagtcgatccagatctaaaacgagttattga

SEQ ID NO: 56850 - DNA, 2526 bp, Acinetobacter baumannii
atgaaagaacaatgcaaacaggcagtagctaaagcgcttggcaagcaatcactatcagctcaagaagcaataaaaattgaatcacgcatcaatgaagccatgcgcaacatggcacgcaaagatattgataaatggcgcaatctttctgactctgaaaaactcacagaagcatctaagcaagttgcaattgacattcgagaacaattaaaacgcaaacataaaattgctgcgaatgacattcttacacaatctaaaaatttggctaaactagatcataggagtttatcagcaagtgaagttgtagaccgtatggttgcagcccatggtgatatgtcaggcatccagtcaattagctctaaagcagatggtatagcatcaatctatgaagggtttttaacggatttttatacgaacattaagggcggtttaggtattttcactgataaagagttagtacaaaaaattgttcgcgagcgctttggtgaaagtacaggggattccttagctaagaaaattagcgacaagatgggcgatgtctttgaaaccatgcgtgaccgttttaatcggagcggaggcgatattgggaagcttgataactggggattgccacaaactcacaacctagaaaaaattgctaaagcagggaaagaagcgtgggtagacaaggctgaatcattaattgacacccgccaatatgtgcatgagaacggtgattactactcacagcaagaaatacgctcattgcttgaatatacctatgacacgttatcaagtgatggggcaaacaaaattgaagtaggccgacaggcaacaggtagtggaacatccaaattaactaaccagcattcagaaagtcgtgtcttgcactttaaagatgctgaatcatggcttgaatatcaatctgactttggtggaatgcagtttgttgatttggtaaatgctcatatcaaaggcctttcaaaagatattgcgttggtcgaaaatttaggcagtaacccgaaaacagcttttaaaatcttaaaggatgcagccgataagaaagaccgtgaagctaaaagaattacgactaaggataatccggtactaaaccgcgctcaggttatgtttgatgagtttagcggtggcagtactccacagtcacaagttttagcaaatttgggcgttgcatatcgctcaatgaatattttctctatgcttggaggaactaccatcgcatcgactactgatcaggcaaccattgctaaaacagctcatgtgcacggcctttcatatcgtaaagctttcggggaattaatcggacaactcaacccagccaataaagcagatcgagagttagcgcatagtttaggtttagctacggaagaaatgttaggttcgattgctcgatggtcggatgatggattgacttccacgcatggcatgactgcaaaactggctcgtatctctagtgggatagcgactcagattatgcgagtatcttttctaaatgcacttacagcagcatcaaaagttggctttactaagctacttatggagaagtatggtcgtttaagccgttcaaaagcttggaatgacctagatgtacaagaccgtgaattacttttaaatactggtttagatgagcgtgcttggcaagttttccaattggctgaacctgtcgttgaccgcaaaggcaatcaacttatgtcagcgcgttctatctatgaaattcctgatgaaaaattagcagcgttcggtgatcctaaacaggttaaagatcaagtagcctcacagctacaagcacatttacttgatgagcagggcatggccgtgattgaggcagggcttcgtgaaaagactctaataaatgtaggtgctagaggaacgattacaggtgagattcttaggggcattactcagtttaaatctttctctgtagcttttttgatgcgtcatggcagcagaacaatggcgcaagaaggcttaaaaggcaaagcggcatatgcaatccctttgtttgtgatgactactttacttggtgggttagtagttcaattaaaagagttacttaatggtaatgatccacaaacaatttatgatagtaatgatccaaagaaagcagggagtttcttcattaggtctgccgtacagggtggcgggttatcattcttaggcgatattttagttgctggtactgatacttcgggacgagatgcacactcttttgtagctggtccactaggaagtgatttcactagccttttaggcttaacggttggtaacttaactcaatataatgaaggtaaggataccaatttcggcaacgaagcattcaaatttgtgaagggtaaagttccagcgcaaaatttatggtatacaaaagcagcaattaaccgtatggtatttgatgagattcaagacacaattgcacctggctatcgcgagaaggctttacgtaaagcagaacgacaacaagatcgtgagcgattctggggtgatgacataaatgatattagagcacctgactttgagaagatagtgcagtaa

SEQ ID NO: 56851 - DNA, 477 bp, Acinetobacter baumannii
atgcagcttgcttacgagcaagctgaattagcagccaagcagggggaaattcctgtaggagctgtaatcgtgagccaaaataagttaattggagctggctttaatgctccaattggtttatctgatcctacagctcatgcagaaattcaagctattcgtgcggcttgtgagtcattgaaaaattatcgtttacctgaagatgcgactttgtatgttacgcttgagccgtgcacaatgtgtgtgggagcattagtacatgcaagaattaaacatgtcgtatttggaacaacagaacctaaagctggctcactcgtgagtgcacgtcaattattagaaaatggttattacaaccataaatttacttttgagcatggatgtttacatgaaaaatgtgctcaacagttaagccttttttttaaacaaagacgtgaacaaaagaaacaagagaagcaacaaaaaacgtccttaaatgattaa

SEQ ID NO: 56852 - DNA, 666 bp, Acinetobacter baumannii
ttgaatggtcttaattatttagtaggctttgatgttgatgtagcagttgattttattgaaaaaaatatttcttacaactttataatggctattgaattctttaaggcaagatgtagtttgctttctgaatatataattgaacagtctacatttgattatattagtcaagtttttgaatatggtgtattagatagaaatgctttatttttaataggattaggtttgaaatctagagttaaagcaaatgaaatttctcggtttataaactttccaagtgctggaaaactactcaagtggttgaatgaagctaactttgatagctttattgatacttttggtcaagaaaacatacagatactcaaaaattttgcttctaatatcaagagtacattattagaaaaagaagatagaatcctccgaaatatatatgttaattggaaagaggtagatcccttagattatatatttactaatattaagttgcttaatataaatggtattacatgtttaatttctaggaaagcacaagtcattggtagctttaattttaattttaaattggatttaatgtcagagatatttgtttatattaactctgatttttctgtagatatacggtataagtgttcccctgatgattctttaataattgttgaaaatagatag

SEQ ID NO: 56853 - DNA, 222 bp, Acinetobacter baumannii
atgtttctactttacggaatattggctttgatagctcaagcatttttaatttactttccttttaaaatcaaatggtttttccctaatgtcccatccatttttcatggttttttctttcgttacattcttctaatttctcttcagattttgctttataagatcttagggttatctggatttataaattactttcaagaactgttaatagaaaaatatatctaa

SEQ ID NO: 56854 - DNA, 495 bp, Acinetobacter baumannii
atgaatacagccctattagttaagatcttaaagatcatatgcttaataatctttataaccctagtcgttttgactttttggatttgtgctatacgagatatattcttcattccagtacatgctggtttttacaaatgtgatcgcccctacattggagttgtgactaacaacaatgaagtcaacacaactctaaccagcaaggactattgtgttgacctctatattgattacaaaaacttaagaggaaatagcaaaatctcatcccaaaagaacgaaaaacttattttggatttttctaatttatacaccgtatctcttgcaaaaaagcacagcttctttacatcttcctctaaatcgtatgatcatgagttgaagaatgttgggctcttttacctatcttatcagcagaattggagcagcactcaatcagatcctaagactgtacaacctcaattaatcattaatgactttaatctcaagactgcacttttttaa

SEQ ID NO: 56855 - DNA, 426 bp, Acinetobacter baumannii
atgggcgaaaaaagaaagatttccatttcatccgaagtttcgaactacatagaaagtttggctcgtacaagcaaagaaaatgaccaagatcaaatttcttggtctatgcatatcaataaaatgctttgtgattatatttctattgttcagagcaaccttccagagtcactatcaccccaaatggccgatacactagtttttatatgccaaaattatattgatgacctctataaaattaattatagggatgatctaaagcattatttatataacttttattttaatttagaaaaagaacgtcaaataccgccacacataaaaattgagtttttagatcattttatggaaatggaacttacccacattgaagccctctctattctttactttttaaaaaagacactcgcaaaacatcatcgaaattaa

SEQ ID NO: 56856 - DNA, 1851 bp, Acinetobacter baumannii
atgagattaaatatttccgaatatgatgcacgtcaaatttttgccaactatttaagggaaacggctgaattagacatcacagcggatcaactaaaagttgatggcacccgccattacgttaaatgcttaaagcgatcgcaaaagaataagcactcaaagtctgggtggtacagattaaatttcgcttttgacgtgcctagtgtaatttggggcaattataataccggcaataaagaggtatggcacctagatcccaaattgttaaagaaagagtccaatctatcacctcaagaactcagaaaattggaaagggaaaagaaacaatacgaaattcgaatgcgtagaaatcatcgctttcagagaaccttacaacgcattgctaagacatggtcgcgcattgaatacaacagagcccagccagttcagtccatacatgaacacccttatcttaaaaataaagccgcatttcctgaaggatacaacttagaccttgttcgcattattaaaaagcaaccattgtttgctaaatcactccatattgctattagccgagtagtaaaaaaagctgaagcgaaaggtttaaatattgactatatcaagcccaaatattttcagcacgcatggttccaaaatcatcacattagacctaccttgattaacgcatattacgacgttgatttaaaaatccagaattgccagcttatctcagcactacaagacagagagaccggtaaactaaaattctttaaagggaatttaactcatggccggaaagatggagttttttgcccaattcacagattgccagcgcaagatgaaaaaatatttgcactcactgaaggttttgccactggaaaaagttttgcaaggatctgtaaagaaaaacctaatactatcgcagcttttgataaagagtcattaatctcagtagcaatagcaatacgaaacaaatggccagataccaccatatatattgccgctgataatgatttaaatgaacaattaaatggcaacaccaagacaaatggagggttaataaaagcatatgaagcaactcaagctgtatccggatacgtactaatacctcctatcaaaaaggatgagttaacgctctctgattggaatgatcttgaactgaagtacggtacacagcattgccgagagatcattaaacaacagcttatcgatatcgcagaattcaaccaaagccgtaatatgtcaaattttaaaatgccagcaatggcatccgcaaacattcataaacctcaaatcaatattcagaaaacgacagcagctctagatccagcaatctttacttcgtggttaatacacctcatggagaatcagaaggaaaaggatgtcgatttaagtatggccaaagatattgttcaagctgtttcaagcaatgaacaaaagcaagtcctacctatgcttaaagtaatttgtcagaaaaatggatggcacgatctggatcaagcattaaacctgatgagcgataaagttgagataagaaataacaatgaaaaagaagctctaaatcgggttaatatgactttacaagcaatcttttatgcttccaacaacaccattatagatgcttctaaaaaggaaaaagcagaagaaatgcttaaaaacacaattgagttcattggatatctacccattagtagagccgaaaaagtaaacatctacacaaatattaaagataatatatttgaagcaacagatgaagcggaaccacggtggagcaaaacattactcaagctttgtaaagaaacaattagcgaaatggaaaacaaacaagttaaccagtttgaaaatcaaaaatctctaagttatgagagaacttaa

SEQ ID NO: 56857 - DNA, 348 bp, Acinetobacter baumannii
atgaacattaatttaaagtttattatttggcattatctcattccgattattttcctaagtatttcttttttttattgttattgtattttttggctatatagtgatgagattaataatagtattctaaccattcttggtactattgtctttatagaaggaaaggatctagatagatttatttctcctctcaattggtctacggttgaaggtgcttactcgttagttcaatttatgcttgctaatgttacagttttaggcgttaaatttgttttttggggataccctttttgtaaactaggaattaatattctagagaagcagcaaatgcacgctaaaactgctcactaa

SEQ ID NO: 56858 - DNA, 252 bp, Acinetobacter baumannii
atgaataaatataatgtaaaaatttttgaaggtaataatagaattttgcatagaactgtaaaagctggttcgattgaagctgcatactattgtgaaaatattattaataatcttaaaaaagaggtaggtgtttctgtattaaatttaacttacagtactatttatgaatttcaaggaagtgcagaattatggctttcaaatactaaaactggtagaaaaatgtttaggttggaagctataatagtttcgtaa

SEQ ID NO: 56859 - DNA, 441 bp, Acinetobacter baumannii
atgaaagcaattacagtaaattttgtacaaaaccaagctgtacttgagactcatgttattcacttaactgaagcgagctatgagcttatcaaagctgaaatactccctatcattaatcaaagctcaagtattatgagctatcttaaaaagctcaacaacgccaaaaatattattcaaattagctctgcatttcgacttaagaagcatcttcatactttattgtctgcaaccggacaaattaaggaccaaaacgatttagcttcgcttcagcattttgttttgatcttaggtaaagtttttgatcgcttagtaaaccagtaccatgagccaaatttatacattggagcttatgtactctcagttacaactttacctgttctaaacctagctttagatactctagaggttgatcccgattctctaggagcattacatgcctga

SEQ ID NO: 56860 - DNA, 1854 bp, Acinetobacter baumannii
atgctcaaacggagcattgcttttgcattattggctgctgctgggcacgcttattctgctgatattcaagtgacaagtttagctgatgaagataaagatgatacggtatgtacgcttagggaagctgtacagttcctaaattatcgtggctcatctaatgcagctgacgttgaaaaatatgcaaatgggtatcatggttgtggaaataaagatgcttcatcaaatattattttacagcgcgatcaagaatatagcttaaatagcagaataacgattacagctccccttacaattagtacagcaaaaaatgattctacattagttgatactgatcagcctggttctcataatgcaactatcaaaatggtcggtacagatcaattatttaaaattgatgatggtagcgttgaaaaagcttcttttgctgtgaccttaagtgatcttaacttacaaggtgcaggcgcaaactctaatgttttaacaggtggtttaattttaaaccatgaaaaattgactattcaaaactctcgattgattggtggatatgccaatcagggtggggcgatttacaatcaaggattgttatcgaaaacaggtcaaacagctggctttttaactatcataaatagtttgattcaaaataataaagcaacccaaggcggcgtcatttacagcgaacagcctttatatttagtgacccaatctgtagtccgagataatgaagtttcttctgcagatggtgccttattttatggcgcaacaaaatttgatgatgaaagtactggtggatacttaaatgtacgtgccataggctttagtaatagtacctttttccataataaagttggttttattgcaaacattaaagatggaatgtttgttaataatattacaatgattaaaaatgcagcaggtttatttttagatgctcctcaaggaaatgcttctgtttctaacagtattttagttggcaatggggttaactgtactccaaatacaaatgatcaaactgttgtccaaagcaacttagtgaccactgattgtaatcgcaatgcttctgcaaagctgcctaatatacttttgcctacgagtgaaaagttaattgcgggtgatagtgatgaaggcatatgtgatgtaactgctaaagacggcttgttatgtccatttaatacaccaaaagatagtttccttggcttttttaaaccacgattacttgagagctataacactttagctgactccttaattattaataaaggacgtttatatagtgatggctcatcaattggtttagcgagttgtgagaaacttgatcaacgtggaaaaaaccgtagtggttatgatgagttatgtgatttaggggcaattgaatatattttaaataatgaaatcgcaacagtagggcaagatattaaatatggacaagttgcaaaatttaatattttaaattctttaagtgaagcagatttggtcacaccagctacatgtaagcgtttatttggtgaccgtcccgatggaaaagaatggcaaccaggttgtctaaaaataaaacaaagtactgatacgccagtttctaaaggtagtgtaaccatagaccaaaatggaaacgtggtttatacgccaaatggaaactggcatggtgcagacatttttagtattcaagttgttacgagtgtatcaagatttaatgatggaaccgatttccaatatgtctcgattccagcaaccgtagtccaagaacctgtatctggtattgaagataagtctgttagtaccggtggtgggggaagtgtcggtggtggattaattttaggattattcggattaattgcattgcgccgtttcaagtcataa

SEQ ID NO: 56861 - DNA, 210 bp, Acinetobacter baumannii
atggttgaaggattaggagtaccgttaggagtagcatcaccagtaaatttcaaaatactaccatttactgtatttgcaatatttttagctattgtattaattgtaaaggttgctttcggctctccgcaaaactcaaaagtattattagaactatttgaaccattactcataatactagaagaggtaaatgttacttcccgttttgtatag

SEQ ID NO: 56862 - DNA, 309 bp, Acinetobacter baumannii
atgtttaacatattgggattactggtgttagtttgcatttattttgggatttcttacgtaactggtccagcaagcaccgaatcattagcagaaattaacaaactaatagatgcttcaaaaggtcaaccgtatgaagcagagttcaaaagccaaatttccgatctcatgaaagatggaattaccagaacagaggcagaggagatacttcatatttatgaggaagtacgtctaaaaactagtttagtttctaaggatactaaaagtgatagtaatggtttaaatataggaaataaagaaaatgcaagatga

SEQ ID NO: 56863 - DNA, 195 bp, Acinetobacter baumannii
atgatctatgtctattggacttttcaggtcttatttttcttaatatggatttattgcctttcatatctatatacaagaaatgataaagatgacaagttcagaattttcgcacttattggtgccgtagtttttggactattaactttttactggaacgacactatcgctcagcttactggtcaaggatttatatag

SEQ ID NO: 56864 - DNA, 405 bp, Acinetobacter baumannii
atgacttccctgaaaaaatatatttgtcttggcgttccagttttatttttaagctgcaatcttttcgctgaacaaccagatccggcctatatcaaggcaatggttaatgaaacgattgctggagctcaacaaaaccagcgccgttttaaaactgaagacatcaaagatgtggttgcagcttcagatcagaatcgccgtgcctacgagcaagatgcacaatcattaaataaccattcaaaaaattatttatcttcacctcaagcgcaagcggatcaaaaatgggctcaagaaactatgcgtaagcatgaatcttcgccggagtttaaaaagcataagcgtgatgcttatgaaacttgcttaataacacagcgctatgctccagtaaattgtgaggtgccggaatga

SEQ ID NO: 56865 - DNA, 381 bp, Acinetobacter baumannii
atgcgtaaaattggtttgatattttttttgccggttctcatctccggttgttcttctccagcttcagaagccgaaattcgtgccgccgtgcatgaatgtgaaggtgttatgcatgatattgaaaatcagattcaaccaaaaactgaaaagaagttcggccggttctggattgaagatgctgagccagtgactagcagacaactcaagtcatttttaaaagactgcaaaaatgacaaaaaagaaattgttgaagccagtagagatcaaaaaacaatcagcaagcaaattaatgtagtggccgaaattaagtatgaaaatgaaattaaacacgccaaatcaatggcgtatctagattcccaaagtgaggataatgcaaaatga

SEQ ID NO: 56866 - DNA, 414 bp, Acinetobacter baumannii
atgaaaattatgtcttctaaggccactgttcaaggtggtgctagtattttactatttcattgtgtttataacggtagtgactcgatcacacactttatgcaagatatagatccagagatctataacgaactacctaatttatattctgtttgcgtagcagacaattcaaccggtaataaaaagatcacggcgactttctttattaaaacaacacgccatcacaacgatccagatttcctagattcactactaagcatcatggctttaagtccggatttgctggctcactggaaagagaaaacatccttaataccagcacaacatgtggttaatggtccaccgctctcagaaaatgaatatgttcatttttctcagaagttatatatgaaacacaatattgatggacgagcataa

SEQ ID NO: 56867 - DNA, 1389 bp, Acinetobacter baumannii
atgaaccaaaacaatactgaagctgaagtaaatctatttcgatttactttccactttattactcaaaatacgaatagtttttttgttagcgtagaagggccagatgagaatgaaactcttataaacttcgtcaatgatatgtacagagttttatacgccagcaatgtcaaacaggatctcgatccagcacatcccaatcaaatcaaagccagcgctttacaacgcatgacaccaagtttacggacacaagttaatgctatgttgagcgattacactaaactcaagcctagtattcataaagcgattagtaagctcaattcgattgaagatgatgaatacttctttgtatttccctatgagtttacagaaaagatgcaagcacaaatgcttttgcaaacttttcttagagccaaaaattcattgaacagcgatgaagaagtaaatcaatacatgcaaactcacatggaaggatttaatagcttatttgatgatttattagagaaatacaacattgctgtgtttggtgaaacagaacggagaactgttataggccaaaaaccaacaaaagaacacggcgtttgtaggttttgtaaatcaccggttgatgaaaacacaacctttcgaaaagtggctcatacgatttctgaagcgctgggcaataaatcaatcgtaacggcagatgaatgtgatacatgcaatgagaggttcggtcgtgattatgaacctcatctcatacagtaccttgatatcctacgtgtatattatggaacaagaggaaagaagggcattccacatctgaagtttaagaatggccaagtgttccagcacaagcaagaaggatctgaagaaaactctattgtgattgcttcacaggacattgtagaaacagaaaacggtttaattgtcagcttatcggccaatcaaaaagttaacaaacttaaaatctttaagtcattatgcaaatacgctatctcagtattgccggctaaagaactaccagctttcgaatcgactattgaatggttattttcagatccggagattggtgaggaaaagcagcaatttcatatagccaaaatgtatggccaaagttatgcggaacatccggagttaactctatatacacgaatcagtgatacggatccggagtggccgcacgtggtagcagatttcaagctaggtacattgcatttaatcttcattctacctttttctaaaaaagatgcttccacattcaacttagaaactgacttccaaaaattgagtcagctcttcaggcattaccaaaaatttgaagatcaaatcatttttgaaaatttatcgaactctgaagaaagagagtgtgaatataaagtaaggtttagcacaggcaaaattaatcagcagtga

SEQ ID NO: 56868 - DNA, 609 bp, Acinetobacter baumannii
atggctaaaaagctacccccacatatcgttgacgctcttgaagcgttagaagagaatgaaattgaaagtgcatctttaaatgcacttcgattaagagcatggttgtatttcatccgattcttaagttcttttcaaacaaactatgaaactaaaaacccttactctagtattcaatttacacatcaccaagcaagtttgtttgcatttggaatagatgacaagaatcctgaaaatttcttgttattcgctcaagaaaatgacttttggtggttaagtgaaattggtattgagtattttacatttattgaaaaatacttgattatcaagtttttaccgctaaattatgtcaatttaaatttatccagtgagaataagatccggattccaagcttaactattagtattccgttaagcgacatgtactatgatcatcttcagcaatatattccagcattcaaaaatgcatatatcggtaagattggaccttctccggctggtattaataaatggaatatttctgagttcagtaatcttcctatacctgttcgaccacaattgactccaattaatcgtcaacacgctttatccaacaaaacttcattcctttaa

SEQ ID NO: 56869 - DNA, 969 bp, Acinetobacter baumannii
atggaaagtaaacaacgtttaaatttctcactagatgagtactattcggctattacacatctgatcgcctctaaacctaaaaaagaggcttcggacttttccatcttagaaaacggtttttttactgatgacaaagaactgagtttaaaaataactcgtggtgaaaagtcgaacttgcataaccctctttcatcttcaaataagcaatatccccttttcaatgacaatcaattagccgatctcattaatttctttgatactgctatttggactgttgaacgtcgtttaccagtacagagttattgtcgagcgatttcacagaactttgaccttattgttgacctaaaagctgaatttgtgattgctttatcaatactaaacaatctcgaattctctaaaattcaaagtcagttccatattgatggtacttctcatcttattgataaaacgcgccaactttcacggttgatttgcgatatcaatgatccaaaagttcttcaggatatcgttgctcaatgtaataagcgtatcgatgacttggatactgcgccatatattgaacgaatggttgtaactggccatgaccacattattaatagtcttcagctttacagcaaagtaaagccgtatgcgaacatggttcaagacggcaatagtgatttttcgatcggtaaaactcttgatattcgtaaatgtgatgtaaagcgcatccgaaagatgtctaatattgaagggctattgaatacagataatcgttcagcaagaagtcgtgcacttaaaactgatattgagaagatccttgatactccatcatatagttgggttttagagcaatcacagatgcacgggatcagtgaacaccaagctcttaagaagattattaaagaacataaaaagttcactttgaaatcgaatctagattcttcagatgaagatgagattgaaaacactggtgaagtaaatggctaa

SEQ ID NO: 56870 - DNA, 858 bp, Acinetobacter baumannii
atgaaactgtttaataaaaaagtgtcattacctgatacgactcatttaccttcagtgactagcaatgttcacgaaaaggaagataaaagttttctgacaattcaggtatatactgatgataattgcacaattcacaatcgtgctcccaaattagtatcaattcaacttccagaactaccatcatttaattacgctttagactttgaccaaagtacattgaatgcagatccggtgcatacttcagaggaagtaccttataaaattgtcaaattcaaagcagttttagaaatatcaccttcctttaagaatgaaactgatgaaactaagacatatgaaattgctgatatcgacttcaaagtatatccaaacgattatgattctaaagcagataaatatttctttaacacccctgatgaaattaaagagtatttaaatggccaatgggaggatgcatttaatagtatcatctcaacttataacttaaataatagaacttttggcaaccagaataacggtggtggatatacccctatcacaacttcaggtcatgcatctgtatcaactgtaagacagccaagaaccttttcaatatttggctatgagttttcacttttacagctcttcctagccgctatcgttttacttctacttgcatttatctcactatctttatggggccattatgttaattcaaaaaatggctatgcaaattcttcacaaaacccgtattcttcatcttcaattgatcaacaagttcaaattgcagaagatgttgtttcgcgtgttcagggcaagctaggggttccagctaccgccaaaagcaatgatctaggttgcttacaagatagtttaaattaa

SEQ ID NO: 56871 - DNA, 945 bp, Acinetobacter baumannii
atgaaaaccaaatcacttggtaacagcaataaaaaatcaagctttaaatttccccatgttgctttggcagctctacttggctttggtgcggctggaggatggttttattacgaatcacataatgttcctacagttgtaacttcaaacagcacaaacctttatagtgaaaatctttttgctcaaatgagtaagctgggacaagtttctaacgttcaacctatggctggcgaactacttgcttggaccatgctaattaatggccagccacaagttgtttttacaactaaagatgaaaaagtggtcattactggaaatgcttttgatacagcaacaatggatagtgtaagccttcctattttgcaaaaagcacaacaaggtggtgctccagcaaattcaaccggagttgctgcaccgactggcggtaacgtagctgttgattttgccgaaatcgtagggaaatgggataaagaagttcctccatctatctctttactagataaattaaaaggtgcaaaagaaggtaatgcttcagcagttgatacactgtatatcgtttttgatcctcgttgttcaaattgtcatgatgcctaccgcgcaacacgtaaatatgtagaaaaaggcttttcgatcaaatggattccaacaacgctacttggtaaacatgaagaaggcgctaaattggcggctgctgttcttcgggatccaaagcaactcgaaagagcgttctcaaaagatccaaatatagtggtcaatcctactcctgaagagaagaaggcccttgaagaaaacgtgcaattccttactgaagcaaccgtacaaagtacaggtagtcaaacaatcgctgttcctacagcattttacttaaacaaaaaaacaggtgagccaaaaatgactactggcttatcagatgaaagcattttagaaatgattttcggaaaaatctaa

SEQ ID NO: 56872 - DNA, 501 bp, Acinetobacter baumannii
atggttcaaacaattcagctacagcccctgagcattgaaaactttgccccttttggtgaggtgatttgctgcggaggacaggatttttttcatatcaatgatgcacataccgagcgttatcatgcccttgtaaccactgaaatcttcggtgaagcacatgcaggtattagtatttttcgtaatattaaacagacagaaattcctttttcggtttcgatgcttgagcgacatccgaatggctcacaagcttttatcccgatgcaaggtcaggcttttttaattgtggtggcacctgcattggatgatcaaacgcctgatatttcaaaactctgtgcttttatttcagatggtacacaaggtgttaactaccatgcaggtacatggcatcaccctctattaactttagaggcgccaagtaactttgccgtggttgatcgtattggtattggacataattgtgatgtttatcagtttaatgaagtactcaatatcgtggcataa

SEQ ID NO: 56873 - DNA, 1008 bp, Acinetobacter baumannii
atggcgactttattagcacccgattttgatattcctgcacaattacagacacttaccaatttggcagatgaccgtattggtgcaaaaattattgaatgttcagatgaatttttcgcagaagcaaaacgtatgcttcaatttgacgcgccaatttttgttgaagataaattcgatgaccatggtaaatggatggatggttgggaaacgcgccgtaaacgtcacacaggttatgactgggcaattattcaattgggcgtagctgggcatattaaggctttagatattgacactaccttcttcactgggaattaccctgcttcagcttcagttgaagcctgctacgcccctgatggcgatcttgctcaagctgaatggttgaacatattagagaacaacgtacttggcccaagtcagcatcatgttttgccgattacagctgaccaagtttttactcatgtgcgtttaaatatttttcctgatggtggtgttgctcgttttaaagtgtatggtgaagtgagcgttcaacaacaagatcacactgcaacaattgatttagttgctttagaaaatggtggacgtgtaattgcttatagcgatgcacattttggtcatccacgtaatctgattaacccaggtcgcggaattaatatgggtgatggttgggaaaccaaacgtcgtcgtgcaccgggctttgattggtgtattttggctttgggtcaaactggtgcaattgaaaaaattgatatcgatacggcacactttaaaggcaactttccagcccaagtctctattcaagccgtatatgttaaagatgcaactgatccacaattaattccacaaagtatgttctggccatttttgcttgaagcacaagacatgcaaatggatcatattcatagctttgtaaacgaaattttgcaacatgaaaagatctcgcatattcgcattaatatgattccagatggtggtatcagccgtattcgtttgtggggtaaaaccaaaagctaa

SEQ ID NO: 56874 - DNA, 1158 bp, Acinetobacter baumannii; identical to SEQ ID NO: 56614

SEQ ID NO: 56875 - DNA, 1047 bp, Acinetobacter baumannii
atgcataaacgtacatcagctttaaataaaaatccgcagaaattaaactctgtagaaaagaaacattcgtttaaaccaaaattaggttttacaacgggtattgttcttggtgtgtcctcagcaattgcattgtcgaccactgcaagtgtcggtgatggtttatcaactattcaatcctcattgaaccaaacttctaatacctcaacaaacattacgaatagttatacgaatacaacaacttctactattccgaccttatcagcttctccatttgctgctagtagtaatgctactgctgcccaatctgcaattgaagcttctagcgtgggttgtggtgatgcttcacaacaaggttcaattgcttggactcaacaagaagtaattaagaatcgtcagattttaaatacggcaccagttgacatcgatgcattgttcaacggatctaagggttcttcttctggtagctgtttttcagatatcacgaagattattgacttgagtgtagcaattcccgattggggtggtatgcgagctgctgctattgctgctttacgtcaatatgcacaacgtaaagtatgtactatggttaatgaagcaaccaaaaaagcgttggagccactcaataatgctattgatattattaataaaaatggaaccattgatttgaatggagctgtacaaggggctataactggtggtttgggtaagttagatccagatttagcaaatatatatcaaacacaagcacctcaaggcgaaactgttaacatttttgattctaatcagactacttttaatactgatgttgctaaagttcaagatcaagttaatggtgctattaatcaaattggcacaatcggaacgaataccggtagtactggttcaacgaatcctactggaacttcgggtactacatggtctaataatacatctacgcaatctataccaaatttgagcgctaacacttctaatcaaacacaacagaaggctcaaccacaagaagcttctcgttcttcaatttttgatgcgctttttggcggtagttga

SEQ ID NO: 56876 - DNA, 762 bp, Acinetobacter baumannii
atgagtaagcttgttaaagttgccttgagtactgcgataacaatgagtttaattggttctagttatgctcagattgctcatacaacgtacaaccaaaatacgagagatttaacatctgccataggtgttttgactaagcaagaaggtctgagcgcccagcaacaggcagaatccgcaatgatctcttctaaagcactagctactgcaattggtgcgataaatatgtctgatcgtgtattacgctttattgttgacgatgctgggagactcggtagtacgcaaaccactacttgtactgtttttgctgaacagcaagcggaaaaaataaagattcttcagtcatctattaatgcggccaatatggttagtaattatatgaaagttatgatgtctaattcagttgagtctgaaaaggacaaaatacttcgtcatgaaaattactgttctattgccgaagcagcaatgggtacatgcacacttctaccaaatggtttacaagcggctgactcaaattatgcattagttttctcaaaatctaagctacaagatgacacttttaatgcggctacagattatatagcgaatattactgattcgcgtttttctgctcaagatatctgttcaaacactcagtgtatgactaaacaaatcgattttttaaacaagacttcaggtaatagtcttgcagcgtttgtattgagtaatcaagttagtgatcgactttcttattcattgaatgctaattcatctggagctaactaa

SEQ ID NO: 56877 - DNA, 1128 bp, Acinetobacter baumannii
atgaaatataaatatttatgtgtagttgctgccctccccttcttgggtcttagttttaaggcatgggctgcggcagatgtattgtatggaagtgttgcacctaccttccatcaaaacgttcaaacacttaatagtaagatggtttcagaattcgcttctactcaagcaaatttgttgaatgcaattcaagaaaatactcgtcaattgcagagtgcacttagtgtttctattgctcaatcaagtgctggaacaacacaagtaattgatgcacgtaaacgagctggacaagctctagcaactgcttatcaagcaattgaaatgcaagataaagtgattgatacggtattgaactatggatctactggacaaggttacaatacatgtaaagtactagttagtaacgcaacactgagtaaaggtaaagaagtttcgagacaaactgctgccaaaatggtgaatgaaactagtactggtactggtcgtgtagtacatgatttaaaccaagttcaaaaagaaacggttcaaaagcaccgtgagttattttgtacccaagctgaggcaagtctaggattatgtacggtaagtaagctggctggtggagatactaatgcggctttacttttccaacctgctaagcctaattcattagaggctgaagcgagacgtacattaagaggaaatatcttaggttcaccagatgtcgctttaaatgctgttaatggtatgacacctagaggtcaacaatatttatttgctttaaaccgtaaaacagctttacaagccttccctgcttattcattggctgctattgatgcagcaaacttacaaacaatcaagaatgaagctggtgaactgcgatcacctaatcagatgattgatgagactattggccgttattacggtactgacgaagccaaaaagtttcaggcaacaatgatgaaccagtcagctcgtggattgctagttgagttggcaagacagcgtggtgcggctatttggttactcaatgaggactatgaacgtggtttacgtcttgaaggtaatttagcctcacttctcttaattagtgctgaagaatcaaagtcgaaaatgcgtgattcttatcgcacaatggctggccggagctaa

SEQ ID NO: 56878 - DNA, 1134 bp, Acinetobacter baumannii
atgaaaaagaaaacgacgtttttactattatcagtttttagtacttctgtaattgctgcttactgtcctcctttttcaaatccattgatactcagagattttataagcggttttcagcaattaaatgcgacattcacgactggacttaatactttggatcaaagtgttagtgcagctttaactacagaacgccaattacttttaaatgcaattgctttgaagacaacacaagaagcaatgaatgcttcctcaattgctcatgcggaccaagaaattgcaaaggcgactgctaatgctattggcgctgttaaacaatcagagcgtttaaaagaaacagctattgattttggagctgctggacaaggctataacccatgtaaggttctaaatgaacgtagaacaattactgaaactcaagtaagggataaagaaaatagaccagatttaatttttaaggaaatttcagcgggaacgggaaaatatgcaaatcctgtagttgctcaagaacaaacacttaagcttcatcacgattatttttgtacatcagaacaagtatcagccggcttatgtatgagcgtaggtgaaatgtctggtgcaaatttgcaagcctctactttatttgagtattcatcagcgaatgataagtatgctattgcaaaaactagcttcattaacaatatggttggtttgccggatgcacccttatctgctaatgcagccaaaacgcctcgtggtaaagaatacatgagacagaaagttgaaaatgatgcagttatttcaccagctattaatagtttaatggcaatcaaatctgaatttactgaaaaccctaatggtggtgagtttggtcaacctgttaaaccattgcgacaacaatatcgggaacaagtagaccgttatcttggtcatggtgaagaatataagaattggaatagaacattagttgctgcacctgagcgtggggtacttgtagagattcttaaagaaggtgcattagagcttgcaatcatgggaaataaacatgctcaaaacgaacgtattgaagcaaatttagcttctttagttgcattagaaaataaaaaggcaaactcgcttaataaatctaatatagctggttctgctaaagctaaataa

SEQ ID NO: 56879 - DNA, 984 bp, Acinetobacter baumannii
atgaaggaatcactttgggatcagcattaccatcgtgaaacaaatgaaaatgctttgatacgagttatgttcccgaaattaggcgcttctagtcttttagcgagtaattatgaaattcgttacgtttatccaagttcagattttgtacacagtagtaagctcaaatatttaatagaagatgctgctttaactcctactctattacggaatgttggtactcatttatttattgatggaaataaaaaggaagaagagttttcatttatgaaaactttaaatgaaatagagtacttaaaaactaatagtccccttttgctttctttcgataagtacgaaccaaccgctattgagcgaactgcaacccttttaactggcaatattatcaatgcccttaatgctgcctcagtagctaaattatcttctcaaatgattaattacaccgatgctagtggaaatagacaacgagcagtcatgctatatgacgactgtgagttggaagaagttttagacaaagttaaaggtctttcaacaatacaagaggcgattacttattttgaacgtgtaaatgatgctatagagatgaatgaaaaacctactcttccggatttctatattgttcgttcaaattcaaatgggaacccaactattgaactcaatctaaaacctctaaatgatgaaacatataactttgttattactggtagcagaaaacatttaaaacaagttgctgagatggattctatatttgtacaagctggctcaggaaatagatcagatagtttgaatttagtccttaagggagatctatcacaaggagctcgttctagccagacagttcaggtccctattgaaaaagtaactaaactgctaaccaacctttccactgaattttctactgtgaaaattaataatcttgatccagacgtcttagatcaacttaaaccgaatacgtcgaataaacttactcagaatctcatgtattag

SEQ ID NO: 56880 - DNA, 2034 bp, Acinetobacter baumannii
  misc_feature (955)..(964): n is a, c, g, or t
atggacaataaagaagaaatgaaagcagctccacaagctttaaacgaaatggactggaaagatgaaatcgtctttgatgatctactatctaaagtaggtcccataacaccaccagacaccactttaaaatcgagtgatttggaagcttacggttatcaaagccaagtgatgctaccagttagcgaagcaagagccaaagagctatatgaaaaaattgaattatatcgattatatgaagatggaacagaagcgttagtagaagatcttgcagaccttaatagtcatgcacagaaagatggactatttggtgttcaggaaaaagattggagaaattatcaattaaaaatagaaaaaaacaatgattccgaaaatagtaatgatcttgaaaactatcagtatttttcgtatccagctttagctcaatctataattaagcgtgaaggtgaccaattttttgcaaattatgaactatctcgaagcttgggttctgatgaagataaaacgattttgaataaagagttttacgaagaacacaaagcagacttagacattttgttaaacgaattaactatatctgagcaatatgaacatcaaggctatgctgttttatatgcaaccaagagtaatttatctgccctaaatagtgatgaagaaatagaagcagaagcaaatgagattaaatatgaattgagcgcagaaaacgtgttcaatgaatttaaggcacttgaaactagaattgaaagagacatggatttagaagaaggcaattttgatttaccattccagcatgctgtagaaaagactatggaaacttttgataataacgcccctatttctaaccttccctttgatagtttaaaagagcccgaaggatttatggaagatatagagcagtactcttatgcagaggatcaaaggagtggaagtaactggatttatttggcttggactttgnnnnnnnnnncttcattacctatcaataacgaagaaatgatccaaaaatctgaagtaaaggaagaaaaagaaaaaattgatgttaacgatgtgggggtgccagaacaactcataatcaatggtaaagagttcaactttgaacaattagatcctaatgatatagaaaagcatgagcaattaagagcagctttgtcgcagttattgggtaataccaatgcttcaacttttcaaagtccaagccaaataaatccagttacttccactcctttgattcctccatcaatgccagattttaacgaaaattcggcacagccttctactgttaaaaattattcgctttttcctagttttgcgaatcttaaaaaggcgactccggataatgcattatcgttattacaagctgaacaacttctacaaacatcacaaaatatacaagctccagcttcagaaaattctggtgctcatatgaacacacaaaatgttcaacatatgctttcaagtcatttagcaagctcaaaatataatgatttggtaaattcacataaaaattattcagactcaataaatgagttctggaaatttgacaaatttgaggattttcgtggaaccctaattgaacgtggacaaaaagaaaataaggatttgaaaacattgattaatgaaatgaatacagatcctaattcaccatatcgcaaagagtttcaagatcttattgttaatgttggtagtactgagaaaggcaaagctttattgagtaaattgaataattcacatcaagactttttgtcgcgctcagattcaatgtttgaagttattcaaaaatcagagctttcacctgatgataagacaaaatttgaaaataagctaagtgaggttgttgaaaaccaagctgaattatcctctaccctacctaattatattaatgatgacggggtacgtattagtcttgcggatgaaatgaagaagtatgcagaaagtctcaagaaggctctacaagttgttgtggactttgttaaatctaaagtgggtttatctgtagatggccctacagaacagtcctctagctcaccgtcaccttaa

SEQ ID NO: 56881 - DNA, 396 bp, Acinetobacter baumannii
atgaacatgagcactttcccccaccctaacatatatgaagatggttgttttgctggggcagcagaaatgaactggctaaaaccaatttttgaaaaacagatatatgttaaatttaaaaaaaattccttttctcctttttttcttgataaggttaaaagtgattattactgtgaagcagacatttccgaaattgagaaagatgaagtttatattgtctatataaattatggagaaacaaagctttatgagaaggagaatcaatatagccttatattaaaagtaaaaattattaatggagagtatagggaatatgtagaaggttgctcactcaggggtgaacagatgccgcttgaatctataaattatagcttgagggcaattttcgactttaattga

SEQ ID NO: 56882 - DNA, 843 bp, Acinetobacter baumannii
atgtcagtcggctcgctaaactggactatattctgtgcggagtctaatgaatatggtgtcgataaagccgcatgggcagaatcagtttgtaaagtcattggtagctctagctacaatgtctattctgaggcgcccacatggttacaaatgttaggttctggtgtctttactatggtatggactgccgttgtagcctttcttatcgcatttttattaggttctctcctcggggtaattcgtactttacccaataaaccacttgcttttatcggcaactgttatgtcgaaatattccgtaatattcctttaattgtacagttattcttctgggcttttgtattcccggagttcttaccagatagtttaagtgccggaagtggggacgtcgtagcaggtggctggtggaaaaatattttaaatcatcatcctgctgttattggtgtttttgctttgggtctatataccgcagcacgtgtttctgagcatgtaagagcgggaattaacacggtttctcgtggacaaaaatttgcagcttcggcaatgggttttacaacagcgcaaagttatcgttatgtgattttaccagttgcataccgtacggtatggccaaccattacttcagaagcaatgaacgtcttcaagaactcggcagttctatatgcattaagtgttttgaacttcttcgcttataccaaaaccatgcgagaagaaacttctcaggacattatcattcttattctgtctacgccggtttatttaatcattacctacacaattaaatttgtgatggcatggattgaaaaacgtatggctgtaccaggtttaggttcgggaggaaaataa

SEQ ID NO: 56883 - DNA, 147 bp, Acinetobacter baumannii
atgaataacctacttaatttaaaaaatattttcgtaaatgccagtcttttaggacttttactcatcagtggggccaatccagcattggccgctgatcaagcggcttttgtctatgtcgctcataaaaacgattatggttggtcttag

SEQ ID NO: 56884 - DNA, 531 bp, Acinetobacter baumannii
gtggttggcgaggcccgtatcagcaatggacggaaagaacaaacgagctttatcatcattgattcacaaagtgtaaaaaacacagatactgcacgtgataaaggctatgacgctggtaaaaaagtttcaggcattaaaagacatattattgttgatactcaaggtctcccgcatggaatattggttacgacagcagataaaacggatcgccaaggtgcattagatgccataactatacatagagataccttacaaaatgtagaggttgtacttgttgatggtggttatacaggcgaacccttttatttggctgttaagaatttaatcagagcccgagttgaagttgctaaacgaagtgaattacataaatttgcagtcattccacaacgctgggttgtggaaagatcatttgcttggttagaaaaatgcagaaggctctggaaaaactgtgaaaagcacctaaatacgagccttcagttcattaatttagcctttttaaggctacgtttgcatagaaaatattctggatag

SEQ ID NO: 56885 - DNA, 333 bp, Acinetobacter baumannii
atgagaaaaccatatcccagcgacattagtcgagaagcctttaaagaaattgaaccgttactattgagcggaagaaaacaaacacgtccaagagtcgttgatgtctatgaaatattttgcgccttactctatattttaaaaagtggatgccaatggagtatgcttcctcgagacttcccagctaaaagcactgtgcattattacttctcgatttggaataaaaaaccatcagaaactgaacctagcatacttgagcaagctttaaaaaaatgtggttggcgaggcccgtatcagcaatggacggaaagaacaaacgagctttatcatcattga

SEQ ID NO: 56886 - DNA, 174 bp, Acinetobacter baumannii
atgaatgccattgaaaaggtagctaaacagttcccgaacaccatttttatgcatgcgaacggatataaaactgcaaaaaatgtgggagtctatgatatccgaacctatgaaggctcttacttgcaaggggtattggcaggctataagactaaaagtaatgtttgggtgttgtag

SEQ ID NO: 56887 - DNA, 855 bp, Acinetobacter baumannii
atgagccttgtaaaattaattaacttgccgagttttggtgatgaacgaggtggtttagttgcgattgagtctaatcattcaatcccttttgatgtgaaacgtttatattacatctttaatacgtcacaaaaaccgcgtggctttcatgctcatattgatttaaaacaagttgcaatatgtttgaaaggtagctgtagatttatactggataatggttctactaaagaagaagttgttttagataacccgacccaaggtttggttattgaaggattgatctggcgtgaaatgcatgatttttcagaagattgtgtattactagttttagcaagtgaacactttacagagcaagattatattcgaaattacgatgagtttctgcgtgtagtaaatcagccttatattcatccattatccgatgttaaatctaaaaatattggtcaaaaaacaaaagtttggcaatatagtgtgattttcccacaagcggttattggagaaaattgtaatatttgtgcgcacactatgattgaaaatgatgtgcaaattggtaataacgtcacaattaaatcaggtgtatatgtatgggatgggattacattagaagataacgtttttgttggtcctagcgttacttttacaaatgataagactccccgttcaaagcaataccccgatgagtttctaaaaactatagttgaacaaggtgcaagtattggcggtaatgctaccattttaccaggcataagaattggccgaaatgcattggttggtgcaggcgcagtagtaactaaagatgttccggaaaatgcaattgtagtaggaaatcctgcaattattaaaggctatgtgaaataa

SEQ ID NO: 56888 - DNA, 672 bp, Acinetobacter baumannii
atgagaaaatacgataatgctacaacggtagcaaatgagggggaaatactagcaagctttcagtatagaagcttgctgagttatcagacctatcaccatataaaagatataaagtacggttcacagaaccgatcaacgatggatctttttccttgtgaacacaccaataaaaccgtgatttttattcatggaggctattggcagtggtgtgataaatcggattttgcttttatagcgccatatatattagcaaaaggagctcagtgtgtacttttagaatatgacttggctcctcaaagtcatatttcagaaatggttatgcaaattcagaaagctctagattttattgctaaacaaaattggaaaacgaatgaagttctattagtggggcattcagcaggtgcacatcttggagctgtatttttaaatcatgcattaaacttatcagaagaggatattttgaaatatagccctatttatcagaaacagcagactgatataccttgtaggattttgtgtggagagttggagctaagtgaattgcagtggcaaagccaaaattattttgaacacagatgcagtgcgggtcatgagttagtttctttcgagactatttctggagttaatcattattcaattttagaccactattttaaatatatatttaaatag

SEQ ID NO: 56889 - DNA, 447 bp, Acinetobacter baumannii
gtgcacttggcgcagtggtatctacagttaccacagcattgcctgtacccacattacctgccgggtcagtcgctgtcacagtcacggtatgcggaccgtcagtcaacactggaagtgtattgtctgcaagggtccaggtgccatcaccattgttcaccgctggataatccacaccatctacagtcaccaccactttcgctgtcggatcgttcactgtaccggttaatgcaggtgtgctgtcattggttaatgctgttgtcactgcaactgttggggcaactgcatctactacacctgtgccaggtactgacgggttgcccgctgggtcagtcgctgtcgctgttactgtttgaccatcagtcaggtcacctgggtttggtactgtccacttaccatccgggcctgcaactacagttgctgttgtaccatccgggaagctcacggtaa

SEQ ID NO: 56890 - DNA, 447 bp, Acinetobacter baumannii
gtgcatttggcgcagtggtatctacagttaccacggcattgcctgtacccacattacctgccgggtcagtcgctgtcacagtcacggtatgcggaccgtcagccaacactggaagtgtattgtctgcaagggtccaggtgccatcaccattgttcaccgctggataatccacaccatctacagtcaccacaactttcgctgtcggatcgttcactgtaccggttaatgcaggtgtgctgtcattggttaatgctgttgttactgcaactgttggggcaactgcatctactacacctgtgccaggtaatgacgggttacccgctggatcagtcgctgtcgctgttactgtttgaccatcagtcaggtcacctgggtttggtactgtccacttaccatccgggcctgcaactacagtcgctgttgtaccatccgggaagctcacggtaa

SEQ ID NO: 56891 - DNA, 639 bp, Acinetobacter baumannii
ttgacaatagatatttcacagctaagtggttttggccactctaaatctgacctattcaagtataaatctatagatgaatttgttgaaagtgaatgcccttcttatattgagacaattagtcaggctcagttaagactaatgctctatcatcgggggatccagattgtaaataatcaagattcaacatttgacaatttctatatgtatggctggcagcctaaagtatttttaagcaatgaaaatggttcacatcatcttgcgtcagctcaatacattgcgttaagacttaatcagccagtaccattgactgcacgacttatttataaagtcattagaggtgagcaacttgctaattttcatgatcgttatgcagcgtacataacgcctctccatgaattagatgactactttaagtggtttgataattccaatattaaatttatccggttagatgattctttgcatgaatatgcagtgtatttctttaagcgtacaagtgaaaacaagcggatcatagagctgtttagttcaaagttttcttcattaaaccaaatattatggaaaagactgtcagatcaaacaaataatatgctgttaaaagcgcttgtaccgcttaattcaggctgttggagctattag

SEQ ID NO: 56892 - DNA, 486 bp, Acinetobacter baumannii
atggctagcccccaatcttgcaataaatttgccctaaaagcctcctgtaaggattgtccgtttagaaaagatagcggaggttatctacatccggaaagggtacgggaaattgttaattatatgagtaaagatgatgctctattcccttgtcataaaactgtgggtacagctcggactaatttaaacgaagctttagagttgctagaagatgaactgtcgtttaacggactctcacaaaatcttacggcacgaaaagagcttgaagagaagtaccagattgacaatcttcaggaagcactacttgaagaaatgaagtcagaaaaggtttgtgctggctggttaatattagggaaaaaagagcaaatcattaacaataatttcccattgagattagctcaaatgcaaggacttttacggttaaatgaattaacaagagaggaagagatatatgattctattgagcaagcaatttcagatcattcttga

SEQ ID NO: 56893 - DNA, 447 bp, Acinetobacter baumannii
atgtttacattccttcaagagcactggtatttcgtttatatcattgcaataacgattggtttgctgtctctttttatccgtctttatatattacctaaaattcgatcatcggaaggtccacaaagtgaaatttttttcgcaaagaatttaatcgaaatcttgaattctgatcataacttagtaatgtatgtgaataattctgatggtaaatcaccagattctaatatgcgtgataatgtaattatcaaagaccctttacgttttgaagatgattatttaataactagagcatcttcaccacatatttattttgatccaaagacattaaaggttaaaggatatttcttccttcatagtaagggaacattccaagataagtacgctgatacagtatatgaaggacaattagaactacttgaagtcgaaaatagaaaaggtgttaaataa

SEQ ID NO: 56894 - DNA, 396 bp, Acinetobacter baumannii
atggacaatttaattttaattcatattttaaattttttcttgattatttggttttttaatagctctatttatagctttattcgaaataggattattgacaagcgtgatggtgctgccatgcgagctacagcatcacttagtggatatgttgagaagtatggtttaaaagcttgttatgtagatagtagccaagctgattatagagttaataaatctaaactacctccagcaaccagaaaggccgttaatgctctagaaaatatagagttcaatactcgtcaatttatattctatgttacggacggtgagactaaagagcttatagcacattgctaccgtagtgaagatggccaattgcttaaatacaaagtcaagttaagcccgaaatcaaaatag

SEQ ID NO: 56895 - DNA, 570 bp, Acinetobacter baumannii
atgacaaataaagcttcacagcctagaacatttacattatctgatgagaagaggatccatatcttaacgacagctctaaacttatttgatcagtttggttttcagcatataagcattatgcgtattatcactgaagcaaaaattgctaaacaaagtttctacatggctttcccttccaaagattccttcatcattgaatgtttagatatggaaatctctagactgaagcaatcactaagcaacctcttgggccagtgtggtaaagatgaccatacaagtattttaaaatccttctatcagtggcacgtggacctagcttatagagaaggatataacggtacgctgttaacaaaagctgtgatcgaatattggaatttaccagatataaaaatgaaggttgaagacttcaacaaatggaaatatgaaattattgcagagtatctggcggaagaaatcaacaatgctcgactaagaattatagtaagcgcaatgaatgggattttattgccggctagtacttacttgcctacatgggaagatattgaaagtttatatggtgagcaattttga

SEQ ID NO: 56896 - DNA, 384 bp, Acinetobacter baumannii
gtggatatagtaaacacattgaaagcatactcattgagtgagaaacaatattttcagatcaatagtattctactgctggtactcgtaattatattaggtgttcttgcaaaaggctcctacaatggtgtgctgacaagcttgaaggtatctctgtatatacaatgttttatttgtattatgatgcaagtcgtagcagtgatggcaaataaaacttcacatataaaatatttattacttggcagttattttttccttttctgtacaacgttttatttagataacttcttttatgggagtactgccggattttttgtgagattcttatgtgtctacagtattttacaaggctgttttattatctggctttatgaaaaaaataagtga

SEQ ID NO: 56897 - DNA, 2262 bp, Acinetobacter baumannii
atgactgatttagttatcgtagagtcatctaataaggttgactctattcagggctatctagatagcctttttggtcgaggtaaatttaaagtttcatttagtaaggggcatattcgggacttacctaaagactcactaggattaactgccgaatatacacctaactatgtatttaatgattctggtgcaagtcgtgtaagagagctaaaagcattagttgagaaatcacaaaaagtatatcttgctacggatccggatcgagaaggtgaggctattgcatggcatcttaaaacggttctccggcttaacgaaaattatggtcgagttacctttcaagagattacaaagacagcagtagcacaggctatgggtaacgagcgtaagttaaatatgcaagttgttcaagcacaagaaacacgaagaattttagaccgaattattggatacattgggacaccggcttttactttaatatgtggtgaaaaacagattgctggtcgagttcaaagtagcatcgtatggtatctagtcgatcttgaaaataagatcaaacaattctcttcggtcttgcactttggtgtaactttcaattttggttctgtagatgagtcttgggaagcaaaatgggatacatcaaatttcataactaagttagatccttttgtaattgatcgaaagcttgctgaagaagtttctaaattacgtgaattcactgtagaaacttttgaagaaaaaccagagaaaagttctccaccagctccttttacaactcccacctatctacgagctgcacacgttcaattaaaacttaaaacgaaacgagcaatggaaattgctcaaaaattatttgaagatggccacattacttacattcgtactgacagcccaaatttaagtgatgatgcaattcaagccattcgtgaatttgcactgaagaacaaattacctataccggcaacaccacgaaaatttaaatctaaagctttggcacaggaaggtcatgaagctatccgaccgactgattttaatcaattgaaagtatcagatgattcaaccattcaggcggtatatcaaatgatctggttgcgttcagtggcttgtcagcttgatgacgcgacattcacagcgcgtattgtccgtatgaaaggtcgccagttagtgcaaggtaaagaagtctttgttaaagctcgtggacgcaaactaattgatcaaggctggttacgacttactgcaaagctaaacttttctgaagacgagaatgaagatattccggaagacgctgctcaagagctgaataatccagtgccgttattacaaaaggcagggaatttagttgcattaaagtcagatctgaatgagaaaagaaccgaacccccacgtaggcattctgaagctagtctcattaaattcatggaagatgtgggtataggtcgcccatcaactttcgtaagcatcgtttcaaaaattattgaacatggttatgtacacttagacagtaaaaataaaatacatgctactgatctggctcaaagattggttgggaaaatttcaaaccaatttgaattttgcaatctcaaatatacagcagagttagaaggaaagttggatctcattgcacatggtgaaaacataggtaagaggctattaaaagagacacatctcaaaattgaaacccaagcaaaagagtctattaaaaatttagatcaaggtggacctaaacaatattgttcaaagtgctcagaacaattggtgaatatgacaagtgcgaacggtaagtcttatttcaaatgtacaaatttgaagtgtggtcacatgatgatgaatcaagatgggatagcaattgatagagaatcgcttacctcagaatttaagtgcattgtgtgcgagagtggcctaatttcgcgttcaggccaaaatggtgagttctttggatgctcaggtttcttcaagaaaagaaataaatgtacagccagttatcaaaagaaaccagacggtacacctgactatcaagcattccttgccaaaagggagctgaaggaatctaagcaagaacaaggtgaaaaacctattcctaaaaatacagagaaaaaggaaaaagaatttaactgtccggagtgtaaatctctactccaacaacgtactggtaaatcaaaaacaacaaacaagaagtgggagatttggtcgtgttcggcccctaattgtaaaaatgaatattggggtgagcgaaataaaccaattttcgataaaaagatcgttaaatga

SEQ ID NO: 56898 - DNA, 504 bp, Acinetobacter baumannii
atggctaaaagagaaagcgtacaaaagaagcttcaacgaattcgacctcctcgtgttcagcttacttacgatgttgaaattggtgatgcaaaagaagcgaaagaactcccgtttgttgttggtgtgatgggtgacttttccgcagcatctgagcttgaacgtacaaagttaaaagataaaaaatttattaatgtagatttagataatatcgatgaagtaatggagtcgttgtctccaagagctgcttttcaggtagataatacgctaactgaagagggtgggaagatggctgttgatttaacatttaagtcaatggaagatttccgtcctgaaaatgttgttcaacaagttgatccattaaagaaattggtggaagcacgtgaacgtttaactgatttaagaaataaaatttctaacagtgaacgtttagaagatttgcttgatgaagttcttaaaaatactgatcagattcgtaaattaagtgcggaggctgaccatgaataa

SEQ ID NO: 56899 - DNA, 981 bp, Acinetobacter baumannii
atgtatagtaataatttagaaagtgtagtttttaacagacatttgcgttcaaaagctgacgaattgttgattattacaggttacatcggacctgatccttttgctaaattaaaaactcttcctttagattgccaggtcatttacggaatgtatggttccgatagtataggtgagaaactccataaatctttagtaaaaataaactctagcttaacaaatacagatcttttctattcccaaagtggtgtccatgcaaaatgttatttgtggaaaaagaaaggaattatagtagatgctcttattggatcggccaatttttcaaggaatggtttagctacacctgatcgagaagttcttgtagaagctgatccttcagcattttctcaattacaggcttattttgataaaataataagcaattctattcattgctcttctagttcagtaaagttaaaagtaaataatttatctgcaagagttggagtggcaacggactgtaagctttcttttttaacgaaaactaaagggatattggaagttcctgcaaagagcggattaaattggggagtaaactcatcaaaaataggaggaacctctcatacttcagtaggtgatgctgagattagaattactaaaaaagcaatacaaaattatcctcatctatttcctcctaaagtgggcaccccatctaaacgcactggtaaattacaacgacaaaatgatgagatagagttaatttgggatgatggaacaattatgaagggattattagagcaaaatcttatcatcggagatttaatctacccgaaagctatatgttcaagtgattcaaaggctgagcttggcttatatttaagaaaaagaataggtgtatcagatactcatgtgattactaaacgagatttagaaaaatatggccgtacagatgttactatttctttgcaagcggaaggaatatattatatggatttttctgtttaa

SEQ ID NO: 56900 - DNA, 462 bp, Acinetobacter baumannii
atggtcgacattgtagatagcacaactcgtagtattatgatgtctaaaataaggagcaaaaatacaaaacctgaattacttattcgtagtctgttacacagaagaggattccgttttcgcgttcatgtaaaagatttaccaggtaaaccagatattgtattagctaaatataaagcagttatttttataaatggatgcttctggcatggacaccaaggttgctcacttttcaaattacctggcactcgtagtgatttctgggagcagaaaattgctcggaatcaaattaatgataataaagccatagtagctttattagaaaagaactggagaatagcaattatttgggaatgtagtattagagggaaaaacaggaacccagaacaggttattacattgattgcaaattggttacaaggttctgaagtttttttagaggtaagttcaaaaatatatgaataa

SEQ ID NO: 56901 - DNA, 819 bp, Acinetobacter baumannii
gtgggattattatctgcaaaaccgaaagatgtcccagtagttgatctgataagagaaatatttgatcagcatggctatgctattgtttcagatcttaaaaaatatgccttacaggatctaactttattcggtgttccacagaaaagaaatcgagtaataatcattggtattcgtaaagatctgttcaatgacccagaagcgactttaagaaacttttataccaatattttacctgctcatcatgaacatttaaaaacagttgaagatgctattggggatttgccaaagttatatcccgttaaagagtataaattaaatggaaaaaaatattcacactctttcgcagaagaaattataaaaaatcatgaacctcgttttcataatagtatcgatataggtacatttaagctattagcacaagatattgaatctggtgaaaaaaaatatatctcaacaaatgagctcttaaagctttatacagagagaacagggaagacttctgcggtacataaatattatgtcttacgtcgagatgaagccagtaatacaattcctgctcatttgtataaagatggattaagacatattcatccagactctcagcaagcaagatcactaactgtaagagaagctgcaagattacaaacatttgatgatgattatgaatttatttcttcagttggcgccaattataaaatgattggaaatgccgtacctccttatttttcttataaattagcattagctattaaagaattatttagagaactgaatatggagaatccaaaagaaaattgtcagttaacaataaacttttaa

SEQ ID NO: 56902 - DNA, 1149 bp, Acinetobacter baumannii
atgatgctaaatactcctctcgacgtctttaccgattataaaggttataaacaaagccttatcgatatttcaaaatctaaagctatcatgatggtaattaggtcagattacgacgtgctcgtagttgaaaaaatcgaaaagagaacaaactgtctcatcttggaggaaacctatgatatttcgcatttgcaaggctatctccgcacacgcctaattcaagagtatatcgataagaatgaacagccggataatgaaaacttatatgattatgattatatgcttatgaagctgttatctgagtttaaagatatagttgtagcctataccaactatgaaatgttcacagacatacctccagtaacccttttaaattataaggatgaaaaggaaaagatatcttttgatcgaaaaataattgaccaaaaagatctaaataacgagcaaaccggctttcttgaatttctaaaaaaattgaatactagattttgtgatgcctatccagattttataaatgattgttatggtaagcgagagatttttctaggcaaatcagagctagataatgcatggaccaacatgacatcgaatattgtcttcgatataaggacaatcagcttttaccagcagaattcatatttaagattactattaattttaatccatgagtatgcacatcttctcgacgatgaagaaggccataattttgaattctatgaacgattccatgattttgttattcgcaatgactttattccacttctggagagcctaagttcatctaataacaccatacatagtaattcgagctcaaccgctccggatgaaactgaattaaaacttttagcaatgatcgatcaaccaacgcctcaaaatgcgcgagaactctataacatactgcatgacttaaattattcattcaaagcagttgaggaagggaaaaagaataaagagttattcggattaagctatgacacctttaatgcttggctggctgatcctaagtctacacgctacagaaatccaaagctgcaaacttggcaaagtttcatttatgaaactatagctaagaaaagaggttttaatgatttcaatgcaatggtactcagtaatgtttttaattgtgaaaccaagactgaagagaacacctaa

SEQ ID NO: 56903 - DNA, 333 bp, Acinetobacter baumannii
atgaatctaaaacatgatgataaaattattctagttttctttggtacaaatgatattaaccttttaattcccaaaaaaagaggaaagggctatttaaagcaaccaataggccattttaactgtccactttcaaccctaagtagagatattggatatgacttttttggtcttgatgggttcctaaaggttcaaaccggatacataaatgataaagaagaattcactcatcaggtggttatacctattagtgaattctatggttataagtggcgagaagtcgatacaaacacgttttttgatattcttagaacaaatcttaaatcaaacagataa

SEQ ID NO: 56904 - DNA, 1356 bp, Acinetobacter baumannii
atgcttgagcaagatataaatgttaatcaatgtccatcattacgtactattcaacgaagaattaagcagttggatccttacattgtactacgagcaaaaaaaggtgcgagaattgcaaatacaacatttaaagctgccggaataaaaaaagaaagcccatttgtaatggcaatagtcgaaattgatactcattatttagacatatttattatcgatgaagaatcaaaagatgttatggggcgtccttttctaacttgtgctattgatatttttactcgttgtattgttggatggtatctaagtatgctacctgttaatgcttcgagtactcttgcaacttttaaagatatgttggatagaccacataatggtcttccaggtggaattcccagcttgattatccctgataatggtgtggaatttaaaaacaatacaatgagcaaaatatgctgtgaattaggtattactatccaacccgctcaaaatagaaccccgaatgataaagctaaaattgaacgtttttttgggacaataactcataatctgattcaaaaaataaagggtactacattttcaaatcctcgagaaaaagccgattatgatccaaaaaaaaatgctagcattactttagccaatttaagatcctatctaactgaatggattgacgaaatttatcataaaagtatacattcaagtacaaatcgagctcccatacttgcatgggaagatgcagttaacataagccctcctattctgctctcaaaatttcagattgatgtccttacacgaaaaacttttaaaaaaaatataaatcatggccaggttaaatttctgtatttaacttataaatctcacgtacttgcaacattgtcagctcaggggatacttaaagttatccttatggtggatgaatcaaatctagaatatgtttattttcaagatccatttgatagtagtaattatattcgagctgattcaactaatccaacctatacaagaggattgacattgtatgaacatgagatggttcttgaagaaaaaaagaaaatatcaaaagccgataaagaaaaattaggtgaacatgtaacagattttgcacgatgggctttacatcagcgtattcaatcggaggttaagttaaataaaaaagcgaaacaacttaagattgaattgccaaatcatttaaaaactcttctggatgacccaatagaatttaatctagctgaagaagaagtatttagtttcagtaatttaccgctgatgacagcacagacaggagacttagtttcagataatctattcgatgaaagagataactattcagatttttcaacttgggagtttgataatgaatag

SEQ ID NO: 56905 - DNA, 429 bp, Acinetobacter baumannii
atgaatattgaaaatattttggtagtctgcgtaggtaatatttgccgtagtccaatggcagagtattttttaaaagctcaacaccccaagttaaatatttcatctgctggtatttcagctctggtaggccatacggcggatgaaaaagccatctattgcatgaatcaattgggtattgatatgcatccccatattgctcgtcagcttaatgctgaattaatcaaacaaaatgatttaattttagtaatgagcaataatcaacaaaaacatgttgaacaaacttgggcctttgctaaaggtaaagtctttaggttaggacattggcaaggacaaaatgtacccgatccttatcaacatgaccaagctttttttgatcaaacttgccgcaatatacaaagctatgtgcaagattggcgtactcaattataa

SEQ ID NO: 56906 - DNA, 1095 bp, Acinetobacter baumannii
gtgaagtatcagagcacattattatttttagccatttcactttcgtttacaggatgtgcagtcacctcaggatttcaaacttatgacctgcctgaacaagggacatttaaaactgttcaaggggcagaagtttcagtagtaccacttacccaagatactcttgataaactgaactcagaaataatccgccctaataataatattagtgctctttttaagggctcacattatcaatatcgtttaagtccttatgatgtattatctattcaactttgggcctatccggaaattactcctccgacacaagataaaggagctataagtacaggttatccaattgatatagatggaaatatccaacttccattagttggacaaattcatattgctggtaaaactgtaccagaagcaacacgattattacgaagccaatttgctaagtatttaaaaacgcccgatgttattgttagagtactttcctatgaaggacgcagattttatgtaaatggacaagtgcagaagagtggacaatatactttagatgatcaacctatcagtatttattccgcattaagtatggctggaggtattaatccgcaaacaggtgataataccaatattcaactcatacgaaatggtcaaacttatagtctaaatgcaataaatttagagaaacaaggatattctctgcataaattattggtacaaccaaatgacacgatcttcgtcaacacaaaacaagatcaaaaactttatgtcatgggtgaatccaataaaaatgaagctattaatttgcgtgatgacggtatgactctcagtgatgtattgggagagagtgaaggtgtcaacccatactctgcaagcgctgctcgtatttatgttatgcgtactaatttacaaactaaacaatcaaccatttatcagctcaatctgagtagtattggtaatcttgcactatccaatcaatttcaaatgcaaaaaaatgatattgtctacattgatgcaactggcttaacacgctggcaacgagttattgggcaaatcgttccatttgctagtgctatttattcattccagctattaggaaataactag

SEQ ID NO: 56907 - DNA, 795 bp, Acinetobacter baumannii
atgataaataaagctttgagtgtgattctaatttcaagcgtcttatctggttgcatgactacaattcaaaattcagcatccggactctcaagaaaacaatttctcttaatcccgtctcaagactattacatcgaagcaaacaaaggttatgttgttttaatgaacaattataaaaattctggcgctttggatagaaaacctgaattaacaaaaagagtagtcaatatagccaagaaaattacggcgcaagttcaagacattaaacctgaaacgaatcaatggacttgggagctacatgtaattaataccactacaattaatgccttttgtgtaggtcaaggcaaaatggcaatttttgaaggtatgatcaaaactcttaatttaaatgacgatgagattgcagcaatcatcggccatgaaattgctcatgcactacttgagcatggccgagaaaaagcttcaagaaatctcgtatcggatttagcgttaggccaaattggaggcaatgctcagatcttggcgtacttcggtacaaagttaggattaacattaccgcatagccgaagtcaggagagtgaagcggatctattgggattagaaatagcagccaaagccggttttaatccagatgcagccattaccttatggaagaaggttggggaccaacagaaagggcagaacaataaactctcgcaaatgctaagcactcatcctatgccacaaaaacgtatggaagacttggcattggcagcacctaaatttagacctttctaccttgcaacattgcacaaataa

SEQ ID NO: 56908 - DNA, 285 bp, Acinetobacter baumannii
atgcgttcaccacaagaacatatgcaacttgatgttcatatagttataaaaatacgccttctcgaacttgaatataagctgcacttaagaaccgctatctgttttctattgggtgctgttttaagcttaagcttcgccttcccttttgattttggcttttctttatccacactgtttttaatagcctcgtttgcatctggtgcagttgctttgtactggttaaactcggcccaagaatttaaagcagcccaccgaagcttatgtgatgagtattcacggtactga

SEQ ID NO: 56909 - DNA, 558 bp, Acinetobacter baumannii
atgactaaagttatttcaaaaagaaaaaccattttggataccgctttatcactctttaagcagtacagctttaagtttgtcggtgtagatcggatcatcaatgagtcacaagttgcgaaaatgactttttataaacactttccgtctaagactttgttgattcaggcttgtttatgtgaagagcaaaagacaattgaagagtctattttaagtgagctgtctttactttctgaggctggaaatatcgaccgtttaaaagcattgctaaattggcatgtcacgtatatcaatcagcaaaattttaatggctgtctttttcaaaaagcagtgtatgaaaatgaggtgagtgaggaagttttatccgtcattcaagcccataaacaatggaagttcaaattagtttcagacttaatggaagttccagaatgcagtactgcctttgtctcatcttcgatggtgtatagcatgttagaaggcatgctcttgcctgcaaatataaatccatgtgtggaccatgaaacagcaattaagagtctaattcagacatttgaggcttaa

SEQ ID NO: 56910 - DNA, 747 bp, Acinetobacter baumannii
atgtatagtgcggtgaaaacaatctataaagaattgcaaaataacaatgcgccagttggaaaatatacaattgcgaatccaattacccgtgaattcaattcattggttcgtggttcacaagtcaatgatgatcttgcgaaatcagagaaggaaatattgaaacatctaagatcacataagattattaaagaaatggaaaagttacttcatgaatcagtattctatttagtacaaagacaaacattacctttgtttatagatcaagtgaattctataggtggaaataaaataagcattctaaaaggggttgcgctagatcactaccagtcttatatggaaaaatcatttcagacagggaagggggtagcaaataaacttgatttagaccttgtctttaataataacaattttgcaagccagtcaaaattactggataaagacaagaagcaatatttttcattagttgcagaaaggttcgcacgatgtggagaagcgctggtaacagatttacttgctgaaaaaagcgtacaagtagattacttagtaacttgcatggaggatccacaaacagtagggcaacgagctggtatcactccatctggtaatgaccgaactgaaattttaaaagcttttaaatcagtgattgaagcttgccgtagttatgcttttaatctggataaagatatcaaagaggaaaatgaagttaatcaaaaattgtctactacactgtcatttggagctaattga

SEQ ID NO: 56911 - DNA, 402 bp, Acinetobacter baumannii
atgaaacttaacaatacctttgtacaattaaaaatatgcttatattcattttgcaaaaaaaacgatttggattttaagtatatgaacacgagtctagatcaccagactgctgctgagtatatctatccgttaatttgtcacttgtgtgagtctgagtttatttattatttccatagagaaaagctggaggatttagaagccctttttatgtatagtaagaatactacagggtcaatttttcaaccttataaggtagaacctacaagtttactttcaaccatttcatttagccttatttctccttttttcttcttttggatgaagaacttaattgaaaattatgcgtcacaacttgagctaatgtatatacattttccagactcatttatttttaaaaattga

SEQ ID NO: 56912 - DNA, 1047 bp, Acinetobacter baumannii
atgtctattcagcatattattgttcatgaaattcgacgcgttaaagaagataaaaaaagtacagaaacattaattgctaagattaaagattcagagaatgatttaagtacgttagatggcgagttggcagcgagtttattaaagctattttctagatccagcttaatggttggtcagttttcaattggaaaagataaagataagaagcctgcatttgagcaagtgttagataagttttacgatgaagaaaactgcttagactttgttgaaatgaccaaggagttggcagcatactttaaaacttttcttgatgagaataagagtatttctggtggcttccttgtattttttgagtttaaaggggatgagcataccaagttagcagtcgcagtaattaataaatctaatgcaacagatattaatcctgatcttgattttatcgccaaagaaattttagatttagataagttgcatttgggtgcaacaattaatattacagagtggcatgatgaatttgcggaaagatatatccgttttaagaatggtcagtctgacaatgtgacggattatttccaaaaatttattggttgtgttgttgataaagaagctgccaatgaagaaactaagaaattaaaagaagcaattgaaaaatttgctactcagaaactaaaactcccacaatctgcagcagatgagtatcttgctttagcacatggatacattaatgaatgtataaccaaaggggatgatgttgttctattgaatgtagcaaaacacgtattcccttcagacagtgatgatttttttgagtatgccagtgatgggcacaatctgtctggtatcttacaaattagttcatctgaattgaaaggatttaaaaaatttagcagtacacgaaaagacctttcgattacttttgccaaagccttattgaacgatcaaattaaatttgaagatgatatacttaagatcaacagtactttactgtctgataatttagtagcagagctgagagctgctacagcacaaagtaatcaagataaatag

SEQ ID NO: 56913 - DNA, 732 bp, Acinetobacter baumannii
atgctgaagaaaattggtaaggcttttgtctatttgtatgtgacgttgccattgaaaggtatagctggaaatttaggttataaacacctgaaaaatgactatgaattcaataaacaacagtataaaagtctaaagaaaatacattgtcctgcatgcttcaagagcattgttcaaacatcgcaaatcaagctaactgataatgaaattgttgagcacaaagctccagcaaaagcggttaaagtcacgttaaaatgcgctaatcctgaatgttcttttgagaattcattcatttcgggacctagtaaaaaagaaattagtgaaaagactaataatgcaattttggcagttggccgcgaaagtgctaaacggatctttgaagtaattccggttggtcaagtaaataattcaattaaagaacattatgaaatggcgattatgttaagaaatataagtattttttgcgtaatcggttgttttgcatttactttttatcagatttttttcaaggataactcattatttttcactgccttatctgccttctcgtggctagttatagggttaggaatatttcttaatgcccttaagtattcacataagtcatggcaagcacagactctaaaggtatttgaacagcagtctcagttttatttttggtttaaaaatcatgcatggttttcaaaacctaaatactggcgtataagtggagaaaggaaaaatgctacaaagtaa

SEQ ID NO: 56914 - DNA, 837 bp, Acinetobacter baumannii
atgctacaaagtaaacgacttttctactttcttggttgtatggtgtgtgtgtctggcataacgaatgctaaagttccacaaatgagctcccagcaacttggtttatatgcaaatcagcttaatggttctccaagagccaatattgctaatagcggtactattagcaatcaatcgagtaatcctaaaactgttggatctagttcagcagttttacatcaaagaagagctggtaattatacgactgtaagttacaccaatcctccaactcaatcgcctgaagttaagcagcttgaaattgtaaaacaaagccaaacatcgaatacaaattgggttcaagaatatgcatttagagcgagtgtaactacgcccgaagttgtacagaattatagttatcaaaaaccaaatattaatatcaattatgtgcgtggacgtgaagctaacttaacatgtgtaatcgctgcggctcgttcggaaggtgtgcctctttatgtgctattgggaattcaaagtaaagaaagaggtaggaatggtgaagttaatgcgaccaatgacatggggcatttccaagtaaataagcagcattttagaaatggaggaatgtttaacccacaagacatggagagagctcgtacagatgggtgttataacgctgtactggccgctaaaatattacgtgatcgactgagtactaaggttgcatctgtagatttctggactcgcgccgcagcttatcattcatggactccatctgtgaacgcaagatatagaccagatctaataagatattctatgcaatggaaacagtggttgacacaaaatggaattaatccgaattaa

SEQ ID NO: 56915 - DNA, 1584 bp, Acinetobacter baumannii
atgactcagcaggcatgtgtagtatcgcagctcactttagaatttccttcaaaagtgatgtttaaagaattaaatttttcacttgagcatcatcaagtatcagctttaattggccgcaatggtcaaggtaagtctttacttatgcagttgctccaagacatttcgcccaccaaagaaatgcacattagtggtcaaattacttggctgtctaagcatgcgtatttagctcaattaacgcgcctttcttcatccaccattgcagaagctttagagattgaccatctttataaagctttacaaagagtagaacaaggcgaagctgaattcgatgattatgatttattagaaggtaattgggatctcccttctgtttgggaagccttattgcgatcggctcacttaccaaccgatttaaactttccggtgaaacagttaagtgaaggacaaaaaaccaagttagcgttagcagcattatttttaaaaaccgaccactatctattgcttgatgaaccaagtaaccatctcgaccaagatgctagacagtggttaattcatcacctcaagaaacatccggcgggtgctcttatcattagccatgatctaactttgttaaatgaagtggaccatatttatcacttaaatgaacatggcttacagcacactacaggaaactatgaaattttttatgagcaatatcaaacacgagttgaggctttagaacagtctgtacatcaacatcaacgtgaagttaagcacatgaagcagaagcaacatgatgttttaatgaaagcacaaaaacgtgagcgtgctggcaacaaacttcgtgattcaaactcacaagctaaaattttactcgactttaaaaaagaacaggctggacaaagtttaggagcaatccagtctcaacatcaccgtcaaattgagcaaagccagcaggatttgaaaaataaaaaatcacttctggaaactgttaaacctcaacaatttatattcccctgttttcaaaaacgttcaggagaaattcttagagttcatgacttaaaactccactatggaacacagcaacccatcaattttgccctcaaagcttctcaaaaaactcacttagttggtcgtaatggtgtcggtaaatcaaccttgcttaaacagattgttcaatctgctgtagcgcctacagatgaaattagcctgtttgtaaattgcttctatctagatcagaacttcagctttttgttagaccatctctctgctgttgagaatttaagaaatattaatcctgatatttctgagttagagtggagaaatctattaggtcagcttaggcttcgtggtgaaaaagggacttatcctttagctcaactgagtggtggtgagaagttaaaagtcgcattgttaggtttaagtcatgcagagactatgcctgaacttttattactggatgaaccagaaaatcatctggatattgaatcaagagagctatttgcaaatgctatttctagctatgaaggtgctgtgttattagtctctcatgatttagcttttgttgaaaagtgcggaattcatgagtcaatttatttaaattaa

SEQ ID NO: 56916 - DNA, 273 bp, Acinetobacter baumannii
atgagcaattcatctgaatcaaaaaatgattttcaaaatggccaagttgaaaattatcttgcaaaagtttatccggatttaccgccaaaagatataggttatatggctgccactatggcagctacaatagaagctgaagctcgttttatgcggaaatggaaatcagatgcaccaacggctgaagaatttaaacgccgaattccttttcttgaatatctttttgaactaccagaaggtagtcgtccacctcgcggtaaatgccgcaaaatgtaa

SEQ ID NO: 56917 - DNA, 516 bp, Acinetobacter baumannii
atgaacgctaatcattatattcaacttgctagagaatttcgcaagtttaattccgaaccaattttagctagtcagaaaattgagcatttagcacgatatatgaaattgcatcctaagattggtgcatacgaagattatattcgtaatctaccgcttggcagccgattaccacggggtaagtattttaaaggtcgtaaagctggtgacaatataagagctatggatgagtactggaatatgatcaaagaaccgactattagaagcactaacgctaaaattagatccttaaaccctgttgcctcttttaaaactcaatatgactctactatgatttttttgcaaagagtcgctaattacactttgaattccgcacagagtcaacgtgccaaatctctcattctggatacacccgatggttttgaaacgactattttatccgtagtgcaattatgggaaaaagatgcattgttaaaagattttgctacagcattaaaacttgttgctttgcctaattag

SEQ ID NO: 56918 - DNA, 204 bp, Acinetobacter baumannii
atgaagcgcaaagttagcttaaatcaagttagtttagatggaaaaaatggcataaatgaggtgagctcatgtaagtctttgagctcttttaacaatttagagcatttaattcaaagtgttcataatggcgaaacaatttacataatcgatgttgggcgaacttcttgggatattgagcaactaatgaaaaatcatattaaatga

SEQ ID NO: 56919 - DNA, 339 bp, Acinetobacter baumannii
atgatgaaagaatttaatttagatggttattcatcaatagaactagaggatttgatcaaggctgcaagtcttgaaaaaggaaaaagggaaattgaagagaaagtggcagcctttggccaattagaggaaattgccaaaagtgttggactgactttagaccagctcattgaatttgggaaaacccataataaaaagaaaaaaacaaagactgttgagccacgttatagaagtaaggctgatccggagaacacttggacaggacgaggacagatgccaagatggttgaaaagtgaaatggaagaaagcaagttaaagctgagtgaattcctgattaaataa

SEQ ID NO: 56920 - DNA, 138 bp, Acinetobacter baumannii
atgcaaaactatactcagattattagtgatcctattcgatctggagcctatagtacaaacttagcaaataacgaacttgcggttaatattgtagttggggatttaattaaatattttaaatctcaattatcaatttaa

SEQ ID NO: 56921 - DNA, 345 bp, Acinetobacter baumannii
atgaacgttaaaattcttttagtactttctttagctttattaccagttattgttgacgcaaaaccacaagcgaccaaagaacagttcaataaaggtctgtttgaaagagacatggaaattgctcaagtattccaagaacttaccaaagagcctaataatggattaaagacctgttatgcatattctttattaaaagaaaaacataactacattgcttcaaatactgcaaaatttgaacttcaagatgactattcactacagaaagtcattctttcagagaaaccattaatagctcaatttaaatccatcatcaccaaaaacggcataccttgcgatgttaattaa

SEQ ID NO: 56922 - DNA, 819 bp, Acinetobacter baumannii
ttgtctaatttcacaccaaatagcaattttcaaggaatcgttatatctaatgaaaagaagttcttcttaaactcttttaaacgcaatgcaaaattgcttaatacttcttttgatgttgtttcaaatacacttaacacaccttttaaggcaccaacttactctcaatgcttagaaatcttagcacgatccctcggatttaaatcgtttaaaggattgactattggcgatgtcagtggtttaaaagaaattggctatctaagtgattttgataaaactaaattaatagaaagttacttagaggttaatcgaaaaaaaattattacaatgccgcttaaaatcgatagctctttggatttaaatttaacaatcgatgctgtatgtactctcgcgtatcatatacaaacctttcctttacttcgcgatttctatctaccaaaaagatatctcagtaaacatctagattttgataatggccccttcagaattaatgatacattatcaaaaatttgtgcacattggtgtatatcgctattgcttgaaaaaccgcaaggctatgaattttataaaggtgtttatgagaacaacaacgacattctttacgatgtatcaatgagtttcttcacaaagaaaaaaattaatgattggtataaatcacgtgactttttgcacgactttactgatctttttcagcactgtgattttatacgtgtacaaagcggttggaccgattttgataacttaagtaattcgaaaatcaatatattctttcctccagcactacatgaaagaatagtaaagttatcttttccttctaattaa

SEQ ID NO: 56923 - DNA, 405 bp, Acinetobacter baumannii
ttgaattccctgattttctggaatcgtacaaaagcacccgaaattcatgttctagagaaacctctacgaatagcatcaaatttcgataactattcaccctatacaatccttccagcagggacagttttatatgatgatagtgattctttaaatagaagagttatggtttatttcaatttacaaggcgtagactttaaatttgaagagcaagatccagaaatatctaaacagccaagtgaagtacgctctatcagaagtatggagctaaatgatattttaaaaactattcctttgacgaaaaaagatatttatctcattattaaatatgacgatagtataaatgattcagtacgctcaattttatttaaaaaatacaaaattgatcctgcagaatatgaaaaataa

SEQ ID NO: 56924 - DNA, 1104 bp, Acinetobacter baumannii
atgaatgttaaaccactcgattatttagcaacaattgaacatatatttgagcatgttaaacgaacattttatcaaacagttgcagacacaaaatcaataaataaaggccgcctaaatgcaccaataacagaatataagtggcatccaagtgtatttttaccaacaagcttatggcaagaagtcttaagaccaaccatcatggccaaactatatgaacaagtgcaaataaataaaactaaagatccatttgtaatcgatgcatatttcgcaaattttgttgcagcatttacatggagatacacaaaaagtatttatcgatttgatgaatatacatttgaatgtttgattaaacattcagcagggaaatatcttgatcaccaccttttgactaatttaccagaaggttgtatctacattgatctagcaacacctttaaaaattgcagatcataaggtttatggtgtgtatgcagtccttgatctctcttcgactagcatagacacattaaagaatactctaccagaccaactcattattacattagacactcataacccatttgaagaaaataatttggctctgctcaagcctctccctacgatcgttttcgacataaaacgctctggcaaagtgagtcaacaaatcaagttcaaatggggtattaatctggaaagtccagaagaactaaatgaacaaattgctccagttatttcgctaatttcgtcaatatgtacagatgaaattgctattgataattttactaagaactctactcgacagaatgtaactaaaaagccctcatttaaggatctagaggctgcttattggcagaaaggtgaatatagagtaaatgcaccagctaatcataaaatgtggcgaataggcgtcaaatacggagtagattatcgagctttcgtagcacgtcagcaaaaatatgaatccaaaactgaatatagaataacaggtgttcactggacagcttatattcaagattatgaaattcgccttaaatttatgcccccacgcatgaactcaccagtcgaaatcgacgaacaaattaataatttctttgatgagctcaatgcctctaattcattaaaataa

SEQ ID NO: 56925 - DNA, 621 bp, Acinetobacter baumannii
atgatttacctgatcaatactcatcaactggctttgcatgccttacatttcgccctgatgaaagatcagcaaagttcttatttatggatcgattcaacgacattggctgtctgtaaaaatcagcgaataaaaagacataaatcgctagcagcaattgcaactcgtggtaaaagttctatgggttggttctttggttgtaagttgcatgtacttatgaatcagtcaggtgaaatactcagcacagctttatcaaatgggcatacagcagatataaaaatggttgaacagttagtcaaaggaatgactgctaaattgtatgctgatcgtggctatattagtcatgaattaaagagcaaattaagagtacaagatattgatttaattacctatcaccgaaagaacatgaaatctatacagttatcaaaagcagatgaataccatctgaaacaacgcaataaaatagaaactttattcagtttgctgaaaggggcgtacaatctagtgacgactagagcgagaagtgttgcaggctatttagctggtatttatgcatctttatgtgcttatcaaatatgtcatcaaaacaagccgatgattcgtattatggaaatatcggcttaa

SEQ ID NO: 56926 - DNA, 330 bp, Acinetobacter baumannii
atgattaatacggaattttcaaagtgtatttctgcatgtacaaactgttcacttatttgtactgaatgtgcaacttcttgtttaaaagaaaaagatttagagatgatgcgtgaatgtattcaacgttgtctagaatgtgcagatatttgtcagttatgtgtgcgtatgcaacaacataactcacctttcctcaaagagatttgtgagctttgtgctaagatctgtgaatattgtgcggaagagtgtgaaaaacattcacatgattattgtaaaaaatgtgctgaggcttgccgtcagtgtgcagaagaatgtcgaaaaattgccatgtaa

SEQ ID NO: 56927 - DNA, 306 bp, Acinetobacter baumannii
atgacacgaagaaaacgtcgtaatcattcagcagagtttaaagttaaagttgctctcgcagcaattaaaggcgaccacacactcgctgaactttctactcaattcgatttacatcaaaaccaaatcatcgattggaaaaatcaactgcttgagcaatcagtcaatattttttcacgaccaacagcacaacaagaaccagagattgacctcaaagctctacatgccaagataggacatcaggcattgcaaattgattttttagaaggtgcgctcagaaaaatagggcagctgagcggcaaaaaatga

SEQ ID NO: 56928 - DNA, 828 bp, Acinetobacter baumannii
atgatcgataagacccatcaactttcggtacgacaacaatcgcaattgattcaaatcaatcgcagtacgttgtattacaagcccaaagagatttcatcaactgatttgagttggatgcgtctaatcgatgaaattcatctcgactacccctttatgggcagtcgaatgatacgagatatgctacagcgtcaaggacatcaaataggtcggcgtaaagtccgacgtttaatgcgcttgatgggaatacatgccttgtatccaaaacccaataccagtaagcctaatcttgcacaccgtattttcccatatctgttgaaaaacatggtcatcgatcactctaatcaagtctggtgtacagatatcacgtacattcctatggctaaaggctttgtctatctgtgtgcaattatagattggcatagtcgtaaagtactggctcatcgagtatcgatcagtatggaaacagacttttgcatagatgcgttgcaagaagcaattgtgaaatatggttgtcctgaggtgtttaatacagaccaaggcagtcaattcacaagcgaggcatttttgaatgagttaaaattgcgaaatatccgtatcagtatggatgggaaaggacgatggatggataatgtaatgattgagcgtttatggcgcagcgtgaagcatgaggaagtctatttgaaggcttacgatacggttaaacaagcgaaacaatcaattgctgaatatttggatttttataacatgatacgtcctcattcaagtttgaataaggcaacaccggatgaattttatgatcaacatttactaaaagtaatggcagcataa

SEQ ID NO: 56929 - DNA, 507 bp, Acinetobacter baumannii
atgagttcaattagattaaatttaatgtcgcctaagactatcactgaaggtgtaaaaaaaatcctgaatcacttgtgtttgcaagaaaaggatgcggagtacttagaatttataaaacccaagaaatttactccagctccaattgaatgccatttaaatgtttgggttcaatgtaataaagaaggaggttcagcagtaagcggctggatgattgctgaagatcctaaacatcattttgtagaggcccaatatcacactgtatggatctcgccttcaggcaaattagttgacataaccccaagacaggataaggaaaaaaaagtgctgtttgtgccggattatgcacgaccattaaaatttaatgtctctccagatgggaatacaatattttttatctatacgaattgtaagatgcaatttaaaaaaattatcgtggatattgaacgtgtacagatcatgagcaattctaaatttgcaattaagcacggattctataaaaaaggataa

SEQ ID NO: 56930 - DNA, 249 bp, Acinetobacter baumannii
atgataaatcgaatcatctatatatgtgatgataagagtcaaggaggctacataaaaggctttcaatatgaagaaattaaagatgcatatctccgcgatattgatagacattctgagaaagacggtgcctatctaagtccggttaaaaatgctgaagcggatccgatctataaggatagtcaggatctttgtgaagctgcttggatgttaaacaaatataaagcggatcatcaaatttttcctgaataa

SEQ ID NO: 56931 - DNA, 783 bp, Acinetobacter baumannii
atgatacccgtacagacattctcggtttttgcaatttttctgttgtttattgctccattgattggtgttgtactgacactaggtttattggtgaaagcactattcttttggcgaaaggaggctcaaaggcctgtaaggtttttctctcaaaaaacattatttattacgctagtggcattaatatgtgacttgtgggcaggttatttattttatatggctgcatcggtagagtatgagttcgcacttaagcagcattacaaggaaagtcgccgtcatttcgttttatcccaagatacacaatatggcgaactgttgattcccaaaggaagcttaatcagtcgttatgatgcttttgacaacggtgagcctcaattacccttgagtttacggggattacaagctgtacgtttccctcatcctgtacaagtcgcaggaatgtgggtaactgcgatggagcctcctcgaatggaattggcatgggatcagcaaataggtctagttatgcgctttgatcctaatgaggccgatggctatggtgaatgggtttacgacacaaagcgtcctaccatcgcttgttctcgtggagacatcgtgctaatggaaataccactcattcattatgatattcaaaaagaatttggtaaacctgagcccgatggagctaatgcgcgttttcgcccgagtgaatggggtgttcaacaatgcgaaaaaggtcaggggccaattaaagttagtcctgcatatactgggactgcaccaaagaaaccatggtttcaactttaa

SEQ ID NO: 56932 - DNA, 180 bp, Acinetobacter baumannii
atgattaaaagtatccagcaagtaaaaaaagaatttaatagttctggtatatcaattgcggaatggtcaagggagaataatttccctgctcaattggtctaccaaatattgaatcacacacgcattccacaaagaggaaaaagccatctgatcgcagtgaagctaggtataaagcaataa

SEQ ID NO: 56933 - DNA, 126 bp, Acinetobacter baumannii
atgattatttatttggtggaagtggaacagatacattatatggtggacatggaaatgactatctatatgcaaattcaaaagatgactctaatgacactgggtctaatgctttatatggaggggtag

SEQ ID NO: 56934 - DNA, 384 bp, Acinetobacter baumannii
ttgggttcaaaagctattgaagcgtatctagaatggttgcctttaagagaagaaattatgaataaagataccaatcaaaaacataattatgtttttgtcaccacaactggagcccaactatcaagagtccaaataaataaaagaattaaaaatgcttttaaacttgctggttatccaattcaatccaacccacacatgttacgccattcatttgcaactcatctaataaataattctgtaggtattcgtgaaattcaggaaatgctgggccatagtaatttgaatactactcagatctatacagatctggaccatacttcaatgacaaatgtttatatggatacacatccaagagccgtaaaaaatactgaaggtgagaactaa

SEQ ID NO: 56935 - DNA, 249 bp, Acinetobacter baumannii
atgaaaagcttagcaagctgttctttgagtgctcatcaacaccgcttacttcgtcatacaaagaccggccgcgaatcttttagatttgtacatatgttttctaccaaactcgttagtgaatacgtttcttttgataaagatgggcagattttctacagctttaattatgcacctttctttgaaacgatgtttaaagaaaacctacataagaaaaatcaatcacaactttatttagatcaagttgtgtaa

SEQ ID NO: 56936 - DNA, 516 bp, Acinetobacter baumannii
atgaaatttaagaaatataaatctaaaggtgcttcattgtatttatggattgcaacgtatagcttgaacgaaaaagaattagaatacagctttaaaaatttctctaagaatatcaatgaaactacatccagttcattatattggtttgagcaaggtatagccgaagttaaagatcatttagccaatggaagaattgtgtttattgccactgctgcaccagaaaagttagcgaatgttttactcgagtctatcaatctagatgtacgaattattggtactcctctacaaaacaaattgggaggatggataagtgggatacattgcaggtctgaagaaaaagtaagaagattgaataaggttgatatcaaacaaccttggtttgcaacatacagtgatgatattgatgatgacttacctattttgatgggcgccaaaaagccctacttaattaatagtaataacaacaaaattaaaaatattaaaatcaaaaatttaaagctattaaattggttttaa

SEQ ID NO: 56937 - DNA, 360 bp, Acinetobacter baumannii
atggctcgtttctttggcatttttatgacactattaattgttatctatgattatatctcaggaattattaataaattatctaataaacttcaagaagagactgatcgaaaagaagctattaaaatacttgaagcaaatcaattaaaagtaggtttaatcttatcagaattacctttggatttaaataatttagaaaagcgtgaatgtgtggaagcttatataactttaaaggatcaaaattcacaattcgtcctcgttaattctgataacgaagtaaatgcacgattgtactttttaggaaaatatgcagataaagatcacaataagtacaagcttatacttaagagaaatttagattaa

SEQ ID NO: 56938 - DNA, 252 bp, Acinetobacter baumannii
atgataaatacaattattctttcatgcagtgatgctttaaagggtagctatattaaaggttatcaatatagagatttcagagaagcatatgagcttgatgttaatgcatttttagaaagtaataaactttttacccatcctttaaactccagccaaattaccaaagatccaatctatgctgaaagtaaaaatatttgtgacgctgcttggatgtataataagtttaaacaagagcatcaaacaaaagggtag

SEQ ID NO: 56939 - DNA, 132 bp, Acinetobacter baumannii
atggccatggctgctgatgtcactattgcccaagtttctgaagtggttgaactgggtggattagaccctgaacacatcatcaccccaggcatttttgtacagcatgttgtacaagtacagcccgcacagtaa

SEQ ID NO: 56940 - DNA, 345 bp, Acinetobacter baumannii
atgattaatcaattaaaaccaactgagattatcagagatgaaatgggctgttgggcacatcccgattatctcaaatatataaatgataaccacgctgaccaagaatggtttagtcaagaagattggaatcaactgaaaaagcacttcaatattgtgaccactagactttatttagaaggaagtgtttcagaagatctatttgaagaaattatggattctgcggatttgtcgaagtgggatccgattgcgccacacgggtttttcttaatagatatcggctttactgaagatggtgcagaagctctgtttgcaaaagagaaacaagtagagggagctgagggatga

SEQ ID NO: 56941 - DNA, 660 bp, Acinetobacter baumannii
atgaaactattccgttgttcatccctgcacaaacttattggtgatggtcgctctaaagcggctgtcatcagcgacacggcaaagtctgcaatccgtgacattgtgaaagaggatttatacggctttcgctcattcacgggcaatcagtacacgcaaaaaggtaatttgcttgaagatttggcaatcactatgtcgggtcgtatgcgtcatcgcaattaccaaaaacacgttggtcgtgttgaaaatgagttaatcactggcgagtgtgatgtgcttgatcttgagcgaaaactcattatcgacacaaaggtcacttgggatattggcacacacccattctttgccgatgaagcaatggagaaggttaaaaaagcaggctatgacgttcagatgcaggcgtatatgtggctgtatgaatgcgaagtggcgaatattgatttttggctattcccttgcccgcctgaattgttgaacggttgggatgacatagatcaattggttcacctggtagaaaagattgatattcgagagcgtaaaacaactgtagttatcgagcgtgacgaagcaatcattcagaagatcaaagacaagattccgcactgtcaggagtattacgcaaagctgtttgcagagcgtagtaaggaaaaggtagcagcatga

SEQ ID NO: 56942 - DNA, 309 bp, Acinetobacter baumannii
atgaaagtttcagaaaccttttatgttattcgcaatcaagtgggcagcaagtttatatgcaaccacaaatacggcacagaaactaagtttttaacatcggctgagcgctatgagactttgcttgaagctaatgaggcgcttgctgttataaaaaaacttttatcagacaagttggctaagtttaagaatgaaaaccctgattacctagaaaacaaatggcttttacaggaagttaatagccgcatggaattgattgaaaagttaaaagttttcaaatgcgagcgcacatatttaatggttgaggggtga

SEQ ID NO: 56943 - DNA, 873 bp, Acinetobacter baumannii
atgaatgcgccagtaaaacataacgctaaagactttttctcaaagccgatggttcaggaaaagctaaaagagcttgttggtaaaaatgcccctgcttttgcaacttcggttttgcagatcgtgaatagcaactcaatgcttgttaatgctgacccgcagactatctttagtgctgcatgtatggctgcaacattgaacttgccaatcaataacaatcttggttttgcttacattgttccgtttaagaacaacaaaacaaacactatcgaagctcaatttcaacttggttacaagggatacatccagttagcacaacggtctggtcagtttagccgcattgctgcaacgcctgtttatgaagggcagttgattagcgaaaaccctttgcttggctatgagtttgactggtcgattaaaccaactggtgagccgattggatatgtggcgtttttcaagctgattaatggcttcactgctgaactttacatgagtaaagaagaagtaatgaagcacgccaacaagtacagccaaacagccaaaaaaggctttggtgtatggaaggatcagtttgaggcaatggcgcttaaaaccgtattaaagctgcttttatcgaagcaagcaccgctttcaattgatatgcaaaaagcacaaatggcagatcaagcaatcattcgtgatgtggaaaaagacgaatttgattatatcgaccacagcgaatcagttgcagatttagagccgccaaaactgccgcttagtgatgatgagtttagcgcagtgcttgaacagctcaatgctggcgcgattgataaggcttatatcttggatggttacatgctaacagatgcgcagcgtgtagcggtggaggctcagtga

SEQ ID NO: 56944 - DNA, 186 bp, Acinetobacter baumannii
atggagtggatcaagattgaagacgagaaaccatatgaatatgaaatggttctgttagtagacaacttaggtcagaaatattacggcactcttctaatagagggagaaaaccacttcattaacgattgttgttcaggtgagttggttactcattggatgcctttcccaagattgccaaagaattag

SEQ ID NO: 56945 - DNA, 264 bp, Acinetobacter baumannii
atgaataatttcaaagaagttattgataaagcggtagaagaaagccgtttgcaaattgcgcattctgctgatcaccttgcggttgctcatcaatcatttgcaaatgactatcttcttaatgtcgctaatcaagctttattcatgcttggcaccacgcttactgctgaagaatttgagacggaaattgatggcttaaaggcacacttaattgaatctctaaagggcttcaatggtggcaatgacaaggagctctctcatggataa

SEQ ID NO: 56946 - DNA, 357 bp, Acinetobacter baumannii
atgagcaaattatcaattgaattaaacgcaagagccagaaatacacatacgctcattttgcattcacttggaagtgttgtgaattctgctctcggagaggaaatcggatttgatggcccttggatatctaagtttaaaaatgacaagaaaagcaatggcttaacagatcttgagactatttgcgtcttattggacaagcttggtctaaagataattcctgaacaatatcaatgctatgacaagcaattaattgattcgatctttttcttggcgcgcctttctatgaatcgtgcatcagaaattaatgatttccaacacacggctatagcgccacgtttggaagagttcggatattaa

SEQ ID NO: 56947 - DNA, 303 bp, Acinetobacter baumannii
atgggcaacacttggcatgctgatcaagataataatatgcgaccagatgttaaggggttgccttgtccattctgtggttatgatcacgggatagcggttgacaccgaatcaaccgatttaaaggagcatggagtagtttggtcggctcgcgcatattgtcatgagtgtggatcacagtgcccaagcacaagcataaccaattggcccgatcatcctttaaatgaagagcgactttatgttgactgggaaaatgaacgtgaggtggtaaatctcgccgttaagatctggaatatacgagtttaa

SEQ ID NO: 56948 - DNA, 225 bp, Acinetobacter baumannii
atgagcagtgaaccaaatttacaagatgtggtgcttaagctgatcgagcaaacaaacaaacttattgaccaaaacaataagctgactgaccacaacaataggctgatcgaacagaatagcttgatcgttcaaatcaatgccgagcaatccgcacaactaaatgaagtcttggcaatgtttgaagacggcgaaccaacacagcgatcaggatcactagatgggtga

SEQ ID NO: 56949 - DNA, 213 bp, Acinetobacter baumannii
gtgaatagacagaatcggccaatcaatggtcagccaatgcaaccaccaacgagatctgttcctgaatatgctccaccaccacaaaatgaaatctcatattcagatgagccaatcaattctgattgctggtcaactggtttttattggggtgctttcattggtattgggattggaatgttgttaatgaagctctttataaaattcacaagttaa

SEQ ID NO: 56950 - DNA, 195 bp, Acinetobacter baumannii
atgtttggaatgttagaaagtttgaccaaggcagcagtttctgtggctgtcgctcctgtaactgctgtagttgatgcagtaatgattcctattgatgcaagtgaagatggtgaagtttttcaaagaactaaatcaacccttaacaatgcagcagaaaactttagcgatgctgtgaagccagagaacaaaaaataa

SEQ ID NO: 56951 - DNA, 1692 bp, Acinetobacter baumannii
atgaccgcaatgcttccagaatggacaaccgcttgcccagactgggaggagcgtattgttgctaaacagtcgctcatgccttgtgagccattatttccacaagttgctgatgttgctgagcgcatatttaaagaactgattcttgttgatgtgatgggtagcccgaagatgggcgatgtcacattggattgggtaattgagtttgtccgagcaatctttggggcgtacgacccaagaacaaaacgccgattaatccgtgaattctttcttctaatttccaagaagaatactaagtccacgattgccgctggtgtgatgcttgttgctttgctactgaatgaccgcctttctgctgagttgattatcttggctcccacaaaggaagtcgctgacaacagctttaaccctattcgtgactttattcgagctgatgaagaactcagtgcaatgatcaatgtgtctgagcacactaagactgtaactcacttgggaacaggtgcaacgcttaaggttatcgcagcagaatccaatgcagcagcaggtaagaaagcttcaatcattttgatcgatgaggtctggctatttggtaaacgtgccaatgctgaatcaatgtttcgtgaagcaaagggtggtttagcatcacgtccagaaggttgcgtgatttatctgtctactatgtcagatgaggtgccatgtggtgtattcaagcagcttcttgattatgcccgtgatgtgcgtgatggaattaaagaagataagtcttttctccctcttatttatgagttcccaaagtatctagttgaagcaggcgaacacctaaagcctgaaaacttctacatcacaaacccaaacttgggtgcatcggttgacctagaatatctaatttcagagtttaaaaaggttcaagacgctggtgaagaatcactaagagacttcttagccaagcacttaaacatcgaaatcggcatgaacttacgtgccaatcgatgggcaggtgctgagtattggaatgctcaagctaaggatatccaaatcgaccaactaatcgagctatccgatgtcataaccttgggtattgatggcggtgggcttgatgacttattaggattcgctgcactagggcggttatcagcagatccacgtatctggtggctatggaaccatgcatgggcaaataaaattgctctcgagcgcagaaaagagaacgtacctaagtatgaagacttcaagtctgagggttctcttactgttgttgaccgaataggcgacgacattgaccaactcgcagcaattgccaagaaagtttatgacagtggaaagctcaataagatcggactagatccattgggcttaggtgggcttttagatggcttgcttgaggcaggtataccagaggaaagcatgtttgcagtgccgcaagggtacaagctcatgtcttacatccttaccactgagcgaaaattagcagagggtaatctctaccatgcagggcagcaattaatgacttgggcagcaggtaatgcacgggtaattatggtcggtaatggtatgcgaatcaccaaacaagaatctggtgtaggaaagattgaccctttgattgccacgtttaacgcagttgcattaatgagccttaatccagttgccaagaatttagacattgatgattatttagaggacgtcgtgatagcatga

SEQ ID NO: 56952 - DNA, 198 bp, Acinetobacter baumannii
atgaaaacaactgaagaatatgcatatcaactcagccttgagttttttaaaaattgcgaaacctttaaagataaagaagcagccattgaagaagcttggaacttagcactgaagttcacaacttttggcacacttattcttgaacacaatcagtattctggctttgtggatcccttaccaaacgcctgcataccttga

SEQ ID NO: 56953 - DNA, 765 bp, Acinetobacter baumannii
atggctaatgtagcgttgttgcaaggcaaaaaagttttagtgactggtgctgcacgtggtttagggcgggatttcgctcaagccattgctgaggcaggcgctgaagttgtaatggcagatattttatctgacctcgtgcaacaagaagcgcaagcgttacagcaacaagggctaaacgttcatgcagtaacagttgaccttgccaatgcagactctattgaaaatgcggttgcaaaaagcgtggaagtattacaaggactagatggccttgtgaactgtgcagcgcttgcaaccaatgtcggtggaaaaaatatgattgattacgatcctgaactttgggatcgagtcatgaatattaatgtaaaaggcacatggttaattacaaaagcgtgtattccacatttaaaacaatcggctgccggcaagattattaatgttgcgtcagatacagcactttggggcgcaccgaacctgatggcttatgtggcaagtaaaggtgcaattcttgccatgacacgttcaatggcaagagagttgggacagttcaatatctgtgtcaacaccttgtcaccgggccttactctggttgaagcaaccgagtatgtgccacaggaacgtcacgatttatatgtcaacggaagagcgattcaacgtcagcaacttccacaagatttaaatggaacagcattgtatctactgtcggatttgtcctcttttgtgacaggtcaaaatattccggtcaatggcggttttgtctttaactaa

SEQ ID NO: 56954 - DNA, 1488 bp, Acinetobacter baumannii
atgttttccaatgtacgagagcaatggttctcgaatatccgtggtgatgtactttcgggtattgtcgttgctttagcactcattccagaggcaattgctttttctattattgcaggtgtcgatcccaaagtcgggctatatgcttcattctgtattgcagtcgtgatctcatttgtgggtggaagaccaggaatgatttccgcagcaacaggtgcgatggctttgctcatggtgacactcgtcaaagagcacggacttgaatatttgctagcagcgacaattctgactggtgtcattcaaattgtcgcaggcttcctaaaattaggcgctttgatgcgatttgtgtctaaatctgtggtaattggatttgtgaatgcgcttgcaattctcattttcatggctcaactacccgaattaaccaatgtaacttggcatgtatatgcaatgactgccgttggtttgggtatcatttatttatttccattaatacctaaaatcggctccttaatcccttcacctttagtgaccatcgtagtcttaaccattgcagcaattacattgggattagacattcgtactgtgggagatatggggcaattgccagacacacttccagtgtttttactacctgatattccattaaaccttgaaaccttaactattatttttccatatgcagcagctttagcggctgttggtttacttgaatcaatgatgacagcaacgattgttgatgatttaactgatacatcgagtgataaaaatcgtgaatgtaaaggtcaaggggttgccaatattgcttcaggatttatgggtggtatggctggttgcgccatgattggacaatcgattatcaatgtaaaatctggtggtcgtacccgattatcaactttttgtgcaggaatattcttactgatcatggtggtttttatcagtgattggttaaaagtcattcctatggctgctttagttgctgtgatgatcatggtatcgattggaacattcaactgggattcactcagaaatattcgtcagtatcccctctcaagtaatatcgtgatgattgctacagtagttgtcgtagttgcgacacataacttagcttacggtgtcttgattggtgtattactttcagctctattttttgccaacaaaattgaacgatatatggcagttcaatctgtattggatgatgctgaaaatacgagaacttacattgttaagggacaagtcttcttcagctctgccgataaatttacagcagcttttgattttaaagaagcgatttcaaaagtcgtgattgatgtaagccaagcacatttttgggatgtttcagccgtagcagccgttgataaagttgtcattaagtttaaacgtgaaggtactgaagttgaattaatcggtatgaatgaagcaagtcaaacaatggttgaaaaatttggtattcacgataaaccagatgcattagatcgcttgagtaatcactaa

SEQ ID NO: 56955 - DNA, 504 bp, Acinetobacter baumannii
ttgaaactattaaatgacacagatattcgtatagcatcatttaaggatgcattgtctattgcagaagtacatgtacagagttggaaagaaacctatacaggtatgattaagcaagaaatactggatgagcttaacgtactagataaacaacagctatggaaagagataagcagaagtcctgatcataagttatttatctatactgaaaatggagtagtgaaaggctttctcgatggttatttaaatccagaaaataatattgctgaaattcgtgctttttatttattaggagaaattcaaagaaaaggagtagggcgtgcgttattccaaaagttctatcaatgcgctttaaatcaaggttatgcttttattcgtttagaagtttttaataaaaatccaagtcgcttcttctatgaaaaaatgggagccaaattaactggtgaagccgaactaccagagttcggccttggaataatagaactattttatgaatggcaactttaa

SEQ ID NO: 56956 - DNA, 2529 bp, Acinetobacter baumannii
atgacagttatttcaaaaggttctgaatggcatatttgggacttacattttcatacgcctagttcatatgactacaagcataaagatgtgacaaatcaagaaattatccaaaaattaaaagaaaacaacgtgaaagttgtagctattactgatcatcatgttattgatgttgaaagaattacagagttgcaaagattaggtgtatcagaaggaataactgtacttccaggtattgaatttctagctgatgcgagaggaagagaacctgttcattttattgggattttttcagaaaattctaatatggaacatatttggggacaaattaagcatagaactgatataaataaaattgagctaaatgggataagggaaaatcaagtttactgtgatttattagaaacaattaatctcgttaaagaattaggtggtttagtaacgatacacgcaggtgataaacatggttcagttgagaatataacgcattcattacctcatactatggctcaaaaaacagaagttgctcatgctgttgatatatatgaattagggaaagaagaagatcaacaaggttatatccaatatgtattccctaccattaaaaaaattattccaatgattatatgttcggataatcataatattagaaattatgaaattaaacaaaaattgtggattaagggggagcctagttttaatggcttaaaatatgcacttaatgaaccacaggaaagattttatattggagaggagcctgagatattaaaaagaactagagagaacaaaaccaaatatattagtagtttgaagatatctcttgatggaattcatgataaaaataatatttggtttgataatgtggaaattcctttaaatagtgagttagtaacaatcataggtcataaggggaatggaaaaagtgcaatatcagatattttagctctttgtgcggatggtgaacattcgggtgaatatctattcttacataaggataagtttaaaaaacgagggcttgctgaacgctttaaagcatcgattgaattcttgagcaactttaaaacttctgagcgaaagctaaaccatacaattgatccaacacaacaaagtttagttcgatatttacctcaaagttattttgaaaaagtttgtaatgagattggtaaagtcgaggctttcagagaagaaattgaaaaagtagtttatcagtatgtccccaaagaaaaaaaaatgggtgcggaaagttttagagatttattggatttaaaaaagaaagctattgaggctgaaattgcttcaattttagaaaggttaagagcatgtaataagcaaataatttctttagaagatcagaatgatcctgcatttaaagaaagcttaaaaagtaaaattaaagttaaaaaagaagaattagaaacgcatcgtcttaataaacctactgaaattttagatccctctttagttagtcaatcaccggaaaatgagaggaaaaaagctgaattattgcaacatgaaaaaaatagggatgatcaaataactctaaaaaatcattatgagcaaaatctaaaaaattgtaatagaacaaaattagaaattgaaaatttaattagagaaatcaataacaaagttggagagctaaaatcatgtcttgaaaatggtcttaaattattcgaagaattggaaataaataaaatagatattctaaatataaattttagtgagaatattctgagaactaaaattgctgaattagatattaaaatcaatgaatatatcgctttacttgatgaagcgaatcatgaaagcccaatttttaaaattaatgaatatcaaagtcttatagagtcaattacttctgcttttacaggagaacagaaagcttaccaagcatatacagatgcgataaaagaatggcattttaaagaaacagaaattataggggcaatagaagaagtagactcattaacctttcttgaaaataaattaaattatatagaacatcagcttttaattgatttatctttgcaacgtaatgctcggttagaaatagtaaaagaaatttataagaaaaaagctgaaataaagaatatatatgatgaagtgaaaaatggaattgataaacagttagctgagtcagctgtttctgagctaaatatcgctagtaaattagattgtgatcaatattttaagaaaaaactattaagtaatattcggcagaataaagttggtagtttctatggtggagaagacggtggtagaattttacaagatgatttgattagtcagacagattggaatgatgaagagagtgttattagttttctagagaattttatttattatctggaacatgacatgagaaataatgaaagaaagaaaatttatattggtggaattactcaggatagattcgaactgtatgattatatttttggtttacatttcttaaacgaacattatgatttacaaaataatggtaaaagtttagaccaattatcaccaggtgaaaaaggtgggcgaattcaaacatga

SEQ ID NO: 56957 - DNA, 516 bp, Acinetobacter baumannii
atggctttaaaagtcggaattattaaaagctcggacgtatcaaaatggtgcgaatacaaaggtgctgatggagaggtacaggcagaatttaaagtccgtggtatcgcttataagccttttcaggtagctattgaacgagcaggaaaccagatctcgtctaaaggctatgatgtgatggtcaaagatgaaaatgccaagctttatcacgaattgttaatggatgcatgtgctgcccacttaattgaagactggaaaggtgtggtatttgccgaaatcgtggatggtaaaactgttgagaccgaaaaaccgtatacacctgagaatgcctcaaagcttcttaatcttggtgatattggtatttcgatctggctatttattaaagaacaggcccagaagattcaggaagaagcagacaaggacaaggctttaattctgggaaagtcatcgatctctacaaataccaaaaaacgtatgcgtcgaaaacgccgcacgaaatcgaacaaatcaagttcttag

SEQ ID NO: 56958 - DNA, 363 bp, Acinetobacter baumannii
atgaaaagtcatgatcatttgcttgatagacaatatgacgaggaaaactacaactgtgttcattttgctcatgaagctgcattggatctatatggaatagaccgggcggaagcacttgaattttttatgaagcctattaaagaaaaggtatttctaccatcaagattaaaacttttaaatccactgcccatgcccaaggaaggctgcatagtcgcctttcactcgagataccgaaacaagcccccacatgtggggctttttcgtttgggtcgtgttctacatttgatggaaggcggagttacttttttatccgaagaagtgatcaaggcaatgggttttagtcgggtcagttactatgattaa

SEQ ID NO: 56959 - DNA, 801 bp, Acinetobacter baumannii
atggataactacaaaatcaaagttaatgatgaagctgagagcaaagaggctcaggagttgttttttgagttgggttacagctggctttgttgtggaaaatactataaccggattggcaactatacgtttattacggcctacccagatgaaatgttattaagaatgggctggggtggagatactgataaagaactcaccctccctcagcttcgagaccttgttgtgttgaagcgtaatgatgtgaaggatgcgactcatactggtactggtgatagcaagtattacgtagacagtaatggtgattcatatattcacaacagcattatttggactgagtggaaattagatatttcaatactaaagccaatcaaaaaacaccttgaaactgccactgggcgctttgatgagaatggcgaacaccaccttacgtttagcaagggttcggaagaaaaagacccagccttgattagcatcgacgatgtttggaaggccttctggaaggagcaaaaggttcaatatagctttgatgatgataataactggcaagatgatattgaaagtctaaagattgaagatatcaaaagcggccattatcaattccgcctcaaaccccaaaccatcaaggttgagcttgaaatccctgctccatacaaagcaaagattggcggtagagatgacacttcttttgttctgaacgtaggcagacatcaatattgctaccaaaacgaagaagactacaccaaagctcgtgacgctttagaggcagtatttgacgctgcagtgagaggtactaactcatga

SEQ ID NO: 56960 - DNA, 384 bp, Acinetobacter baumannii
atgaatatggtagttaacaagccggagttgctgtgcccttctttcccaatgcttcaagtgtctggtgagtttgaagttaatgacaacactgttttattcgaactggaaagcggttgcgcaactctgaaatgcaagattgttgccgatgttgttaagcaagttcgtgtcgttggttctcttatgaatccagaggacagcaaggatcagttttacgaccaactcgttgtagatgaccgcacacatgtagaagtggttggtactgaatatgtagagaccccaatcggccttctattccaactcacatcaacacaagtggctgacttaaacgagcagcttaaatactatgccgaagaattggcagatgaagaagcaggagtggtgtga

SEQ ID NO: 56961 - DNA, 318 bp, Acinetobacter baumannii
atgaacgacttagaaataaatggatataagatttttacaaatcctgatgaagctgtttatgcagccaaatcaaaagaagatgtctacaactatttcgttgaaaactatggccctacggaagaatgccaagatgaaacaaaagagcaatttattaataacttgaatgaggttgagcttgatagtaactgtgctcagagaaaccgagagtggattaatgaggatacggggatgatctcaacatcatcctactatcaggaatataaacatgttgcttctaaagatgaaggaacagaagtaatcgcatttttagtttggtga

SEQ ID NO: 56962 - DNA, 381 bp, Acinetobacter baumannii
atgccagatttgaataatccagaaactatcgaaatacatggcttaagaacaattaccaagctttgtcattttggtgcagataacaacatggaaggatgtacttttactgaaattgtagagcgactatttgcagaactacaaaaagccaaagctcaggcggtgccagtctggatatcgacagactttatgaagcctgatgacaatgattatgtagacatcttaattaatggtaagcgaagaattgtagatgcggtctatttagatgggaaattcttcatattcccgcccttctcaaaggaacaatggactgaggtaaataacaaagtaacacactggatgcctagagttgaagtggcaagcgaatcgggagctgagggatga

SEQ ID NO: 56963 - DNA, 213 bp, Acinetobacter baumannii
atgagtgaaaaagcatttaaagatttaaaaattcggttccatctagctattggtttggctaacgcacctcgtgaggacattgggaaattatccgattggatcgaagaggaatgttgggaagtgatggatgaaagagagcaaaaagagactctttcggaaattgcagaggaatgggcgcagcagtatttagatttaggagcgacagttgaatga

SEQ ID NO: 56964 - DNA, 1128 bp, Acinetobacter baumannii
atggctgatggtcagactaagaactcggctttaactactgctttagcatttcattatcaggtattaattggcttggagaagtgtttttctttagaggaaaatcaagcgatttggtttgaaaaggatggggatgtaagttttttagcagagtctagcaatgaatcatctcaaatagaagtaaaagaatatgctgacagcttgacagacaatcatgaaaatttatggaagacacttaaaaactggctagcgccagaatttaatcataaccaatatggagccttaatactgcatacaacgcaggcatttggagcgaagactcgccttaagaactggaataatcaaaattctgaacaacgcctacaaatacttaaagatatttataatggacgatcggaagataaattaaactcagaaaatccttcagatattataaaaatccaaaaaaaggtaatagaagctgatgaatctttacttttagatttattaaaaaaggttagtctatttacagaagcagataatgcaaaagtcttagaaaaaaatattctttctaaacttattggaatccctccaaataatttaaaaagttatttagaaggtcttgtaggtttcgtgtacggagaggcaactaagttatcatggagtgtcaattataaaaatttccacgcgaaatgtcaggaattgactactttattctgtaaacaagagtttactttcccaccatttaaaagaatatcagcgtctattcaagaagttgaaactcatcaagataagttgtttgtaaaaaaaattattgaaattgatcaccatgtaatgatttcagatgctattggtaattggcttgaattagtaaattctatgaatgaagagttggatggccatccattatttatagataaaactatagcttatcaagagcagttagttaagaggtttaagctcgcttattctaacgctcagcttgaaatgatagattccttaagaagttcaaaactactttataataatacaattagagaagttccattaaatatagataataacatccctccaatagaatataaaaatggcttaattcatgaagctatggatgatgaagatagagacttaaaatggaaggtggatccatga

SEQ ID NO: 56965 - DNA, 354 bp, Acinetobacter baumannii
atgcaagacgatgcgggcaaaattattgctttagttgaagtaattaaggttaaagttggtaacgaaattacattaaaactaatgtcaattgatctttgtccttctattgagcaattatcaaaagaagattatgatgtcttcaatgctaaagtattggcttcatgtgtagctactttcttagcagaaagcgcaaactctggttgtactaaagtttatgcgcgtaatgattcaacattagaatacttaacacaactgcatgtaggcttaaccgctgcttcgcaggctttagatgaacttaatttatcagttcaattcgaggggccacggtggttggccttccgttttaagaactag

SEQ ID NO: 56966 - DNA, 174 bp, Acinetobacter baumannii
atgagtaatgtaattaatttaacgcaacaagcccaagtcaaatttgataaagttaagtgcgaacagttaattgaggcagtagctttaaaagcacttcaatcaatgagctataccgttgcaccaatgtctcaaatgagtgaacgcttggataagcctttaagtaaagttgcttaa

SEQ ID NO: 56967 - DNA, 537 bp, Acinetobacter baumannii
gtgagaagttttttatttttatttttaacatttctttcttttcagtttattcaggctgaaactgtagaaccaaatagacttgaaatattggccgataatttaagtcaagggaaaagcgattccgaccgtttaaaggaacttgaagcctcgcttagtagtaattatttgggaggtgaaaatgtaaatggatggctaataacaggttgtgaagttgataaattcaatggaagtaaaacttgctcaatgagtaaagacgatttgatagtgtatatccataaagggaaaacctttttcctagttggaacaaatcattttcctcgcaagcctacagttttaaaggttgatcaaaataaaccaatctatggtagagaaggttcatttacgaacaacggtcaaatccttgagcaatttaagaatggtagtgttgtaaatactagatatatcaaatggccatatgaaatgaatagagataatgaaactagcctaaaaggtttttcagaggcataccgagaactgcaaaggcagtttagaaattaa

SEQ ID NO: 56968 - DNA, 1857 bp, Acinetobacter baumannii
atggctgacgaaatcattactcggcaagaacttgtagatgcaaaggttgatgcaaaagatctaggggagagtattaatgaggatgtaattgttaatccacgatatggtcaaccttttaaatccttaccaatggtttctcgactgtttgaagtaatgatttcgacaggttatgcaacaattgatgatctacaagaagcaatagatattgctttggctggaggtgctggtgctgctggttggacaactgatttagtagctgatggttctgaaacgcagaaacagatcaatgataaagcagtatttagctcaataactgatttatcgaatattgagagagttgattcacagatagcttttttgaatggggattcatatcaacttgatatgcaagattcatcccttccagatggcttctttaaaatgcccgctacagcaggaaattggaactggctaccatctcactttaacattccatgtgtatttgcaaaaaatattaaaacagatggaactgaccaactagcaatactaaatcaatatgcagcttatgctgtaagtaagcgcttagtacttgttttgcctgctggcacaattacaatcaataatgaatttattccacctgatggactagttatgcgtggattaaatgaaaacgcaacagtttccaattcactttacgcaagtggcaccataataaagtggggtggtattgatggaacaaaaaaggctgtaatccgttgttcaagggctgcagttggttcagcaccatcactccctatgaacgcagttaaattaagtggatttacagttgatgctaatggctgtgactgtggtatttattttcgttatttcactaatgaatctcgagctgagaatattgttgttggtaacagtaaaaaatgtaatatcgctggggtacagctctggtttagttcctttggcaaacttacttctgcagagtgtagaggggtgggaattgctttcggctatcctatcttctcagaaagtggtgatattgctgttaacggaatcaattttgaggatcttagagcgcacagatcgggaatggacaacacattcaattataatacagctcgatatgatggatgcgggattgttgttaatacccaagggtgctcttatggttcagttcagtcagagctgaatcaggggatcggattaattgatcttagtgtgagtcgggtaaatttctggggtaatatttatttagaagataatgcgaaaaatgataatacgttgacattaaaaccttctatgtatatctatgctccaagtggagttcgaaatgtaactttgacaacgatcacattagctcagaatcaacagataattaataattctggcggtgcgatagtcttgttaagtgcgcgaaccgttggaattccttttaaggccctaggtggaactggcaaatttttaatatatggagaaccatttccgattacatatggtttaagcgaagctgaatataaatctttgattgtacatacaactagtcgtatagctgaatttaagaatgtaaatttaagatatacttctcaattagaaaatcaaacattttattggaaagacacaactggttatccgtttatcgttgttgttccaaggcaaaactatagtggtactggcttaacaatagcaattgatggaacagcttacgctataagcttagcttcagtagttaaaggggtgccaattactgttaggggtggtgcgattacaaaagattttcatagtgtcggatgtactttaggaacgaacgcagatttttattgtgatgtttatgtggtagcaggaagattgctaaatggtagtttagcggaatggattgacttttaa

SEQ ID NO: 56969 - DNA, 531 bp, Acinetobacter baumannii
atgctaaaatatataaaaagtgatctttatagatattacggtaaaatttcgctatacctattttttaaatgttacttcctcaatagaggttttaattacacagtttggttccggctttctaagtcgaatagctttacaggtaaatttgctagactaattttagcaaggaaaaccttcaaaacaggaattgatattaattacaagactaatatcggatatggtctgtacattggccatggtggccctctaattattaatggtactgctgttatcggtaataattgcaatctttcacaattcacaacaatcggtagtatgtcaaataacgctgcaattatagaagataatgtgtatatcggccctcaagtttgtatacttgaaaacgttagaattggcaaaggtgctatgattggagctggcagcattattacaaaaaatgtagaaaaaaataaagttgcagtaggaaatccagcaaaagttattaaagatgttcaacaagatgttatcaacaataaatggattgacttttaa

SEQ ID NO: 56970 - DNA, 591 bp, Acinetobacter baumannii
atgagtttgcaagtaaataaaaaattagatccacgacaacggcttattttatccgcattggatttattaaggacacagggattagctgctacaagtgtgcgagaagttgcgaaacatgcacaagccccactgggctcgacctatcattatttccctgatggtaaatcgcaaatagttaaagaggctttaattttttctggaaatactgcattagaacaactagataaagcattaaatcagcatggagtacgtaaaggcatcactgtatttattacgtggtgggccgatatggtgcaagccgataattttgaggccggttgtcctttaatgtctgtattaatggaaacaggaagtgatcctgagaaattacaatatgttgaaatagttaaacaaatactagatgtatggaaactgcgattgatacaagcatttgaacaagaaagtatatgtttggaacaatccaatcaaatcagtatgagtattattgcatcattggagggagctattttgttatgtcgagcatgggggagtgtaactccattaaaggcaatagccgaacaattagatttaacgattaaaagcttagtttaa

SEQ ID NO: 56971 - DNA, 927 bp, Acinetobacter baumannii
atggcaacattagtacttaagtcatcaaatgcattagatgcatcagttgaagctttagagctaacgctctataaacaaagggttgttgctgatggtggttttattgcgaatgaggctgcggtcaaggcggctttccaatattgttttgataacaacttaactgaaagtgaggtgttttcagcgacaagcgcaaattggggggtaaaacttgaagcaggcaagcctaaaaaactttactctctttttaatgagtctggtgatattgatgtaacaattgggacaccagcatcaattaattacaacactacttcttttagcataccagttattgaactaaaagcatcttcatcaaatggtttaaaaaccataggaacagctaacaatgtaagaacatcaggtttgtgtatcatagcacgggcgccaatgttagcctctgatagctcttatgggacaaatagcacatttactttaggggaaatatccaacttaacaaactcaacatcagctggtgaatcgctagataaacgaatgaatacgcagttctatacccgcactgcgaacactgaacttgctaatacatggcgatatctagcttatggttatgggacacaaggaaatattgaaaccactgcttcagaactagcagatgcaacggtttggaatagaacttctacattcttgcaagctgggctaatgcagctttataaggatggctcagtattaaaacaagatacatctgtcaatgaaaaaacatggattaatgatttgtattttaatattggtcgcgctcgcagtgcagcagtagctaatctggattattcttccccattatatggttatgtagcagaagcatggtgtttagttaacaccacagcagaaaagatgcgcattttatctttaagggcttcgcaggtatatggcccgtga

SEQ ID NO: 56972 - DNA, 870 bp, Acinetobacter baumannii
atgtatccattaatgaccaacgtcacagcacaatttgttgatgacaacgggaagcctttaacaggtgggcaggtgtggacctacgaatctggaacaacaacgcccaaagcgacttttgttgatcccgatgggggagccaagaacaccaacccaattattctggatgaagcagggcgcgccaatatctatttagatgatggggcatatcgtgtaagggttttatcggcagatggtatccttattgctgatacaaacaagctttctcgatatgtaacaagcaccgaactagatgaatttattcagcaagttcaagacggattggatgaattaaatcaagtcaaagaatcgctaaataccattgttgaacaaggcattgaagctcaaaaaggtgtcgctggtggcttagctccattggatgaaaatgacaaaatagatccactttatcttaaaacaagtgacgctctagatgtcgatgattcaaagatattggcgacttcaaaggctgtaaaaaccttacaagacaagaagcttgagaaaaaagatttagcttctggagacgcgcctgtttttggtgctcgtgcttttggagtattcaatggagatggcactaaggttggtggcgggaactttgagagcgtaacgcgtgtaagtgttggcttgtatgaagtcacactcaccaaagccttgcctaacactgactacacagttgtgacctctacggaaattacagctggaaatgacgctagatcagcaaatttagatggcacttttgctaaaaccacgtccaaattcaggattgttacaacatttggtggtgatagttctcaggggcgattcgacccatatttagtggatttcatcgttttctaa

SEQ ID NO: 56973 - DNA, 288 bp, Acinetobacter baumannii
gtgatttcatcctcagagggttttatttctttagaagaacttgctcaacgagtaggtttaagcagatatgcaatcatacgtttattcaaagcaaatgtaggtttaactccacatgcatttcaaattaatttaaagattaatcaggctcgagagcagctcaaacaaggcgtgccacttgccgaattggctgtaaatttaggttttagtgatcaaagtcatttccataaagcttttaaagcacatacaggagtaactcctcggcagttccagctcgcagccgcgcaataa

SEQ ID NO: 56974 - DNA, 4392 bp, Acinetobacter baumannii
gtgactggtcagattgtgattcatgctgaggctgtagacgcacaaggtaacgtagatgttgctgacgcagatgtaacggtaaccattgatacaactccacaagacctgattacagcaattacggctcctgaagacctaaatggcgacggtatcttgaatgctgcagaacttggtacagacggtacattcaatgcacaagtggcattaggaccggatgcagttgatggcacagtggtgaatgttaacggtactaactacaccgtgacagcggctgaccttgcaaacggctatatcacagcaactctggatgcaacagcagccgatcctgtgactggtcagattgtgattcatgctgaggctgtagacgcgcaaggtaacgtagatgttgctgacgcagatgtaacggtaactctagatgttactccacctgatatcactacaactgtgttagcaattgacccagttactgctgataacattctagatgcgacagaagcgggtggatcagtgaccttaacaggtacattgaccaacatccctacagatgcagtaacaacaggtgttgtggttactgtaaatggtattgactatacagccacagttgatgccgtagcaggtacttggacagttgatgtagctggtagtggccttgcagcagattcagacttaactgttgatgctactgcgacattcacagacctcgcaggaaacgctagtacacttcaagatacacaaacttatactcttgcaagctctatcattgctttcgataacactgatacagctgtacttgctcctcaaccattgcttgtacaagatgatgcagcactaggtagtaatacttatctagcacttgtatcgcttgctggacttgatttgcagttaggatcagagtcaattggctttacagtgggtgctggtcaagaaggcaatgcgacctttacttatagtgctttaattggagtggatgcattatctgactactcattagttgttcagaaatttgatacagcaacaggtcaatggactgcaatttatggtggtggccaggctgatattcttgatcttactttactaggttcaacacctggtgtagtgattgatgggttagaagaaggacaataccgtgcattcatgacttacaacggtcttctaggtatcggtttactgggtaccttaactggcacaatggatgtttatgacacaacacaagtaggtggctactacactgaagttgctgaaggtaacgtcattacagaaataaatgatgcaggtgaggtagatgttgtaactccaacaacagttataagtgaggttaatggtcagcctgttgtagcaaatggcacgagtatcactggtacttacggtacattagtgatcaacctggatggttcatacacatatacgcctactgctagtgcggcaggtgtaggacaaactgatcagtttacatataccttaattgatcctgtaactggtgatacggctcaagcaaatctcaatattcaattgagctctgtgaaagcagtagacaatgtagtgatggcagaaattaatcctgaaccattgcttgtggcagacgatgttgctctaggtagttcaacttaccttgcagcagtatcgttagcaggtatcgacttacaattgcttggtaacgatgcaatagagtttactgttgatccaaatcgcgaaggtacagcaacgttcacattcgatgcgataatcacagcagatttactcagtgattatgcgattgttgttcagaaatttgatgaagcaacaggtcaatgggtatcgattggtggtactaacccagaagcttcactcatcgatctaacgcttatcggtggaacaccaacagcagttcttgaaggattggatgctggtcagtaccgtgcattcattggatatgaaggcttgctaggtgtaggtttgggcggaacattaactggtacaatggatgtctacaatccatacatcgtggctggttactctgttgaaccgatctctggtaatgtcatcaaagatgcgagcctcactggtgaagttgatgcagcaagcagcagtgctgtgatctctcaagtgaatggtgttgcggttgacccagttgctggtgcaacaattactggtacatacggtacattggtgattgaccaagatggtaactacacttataccccaactgtagacggagcaaatctaggtcaggtagatcaatttacctacaccttacttgatcctgtaacaggtaacacttctgaggcaacactttacgttcgtctcgatagtgacagtgtagatatgacttggaacgatgcagatccatctcaaccagctgtaattactagtccgcttccagtagatgcgatggataacgttgcttcagctgaaatagacatggtttatccagtaacgactgaggtacttgataatgcgattagctacaactggttactcggtgtaggtggaattgttatcggttctaaagaaggtacagcgacatttacagttgatccaggtaatctgactgatgcgattattgcagtgaactttggttcggttgctacggttgtcgacggtttacatgtggtattaacacgagtaaatccagatggcacccgtactgtagttgcagatagttctgatactggtgtgattgacttgttaggtatctttggttctgaagttcaattcaagattgataacttaagtgctggtacttacgagttgttcatggaaagcaatacacttcttacagctctaggtagtgttactgcggatatcacgctgaatcatggtgatatcactcaaccgcctgtactggttgttgaccctgtaactggtaatgtactcgctgatgataactcggctgtttatggtacaaactatgtgccggattacattacaacaacttcagtagtaactgctgttacagctgaaaatggtaatacaactacagttgtagcgggtactccagcaacggttgtaggggtatatggaactctgactattaatgcagatggtacttatagctatcaggcaactgcggatatggcgaatgtaggtaaagttgatagcttcacttacacagtgacagatcctgtaacaggtagaactgatactgctacattacatgttcaagtcggttcgccagatgttgatgtaacttggaatacagcagatccttcggcagatgctacacttccaacaccatcagtaacagctgatacagatgatgcaacaatcagcatggcaccagtggtagatccagttgtagatgttgcgagtggtaacgtgaccattggtaacttggctggcttcccaccactacctgtattaagcagtacagtaacctctagtcagtttacaatagctgcaaatacagtaagtgatgtacatgtacagttgaactatacagcatcgttaagcttgtcggctcttccaacgactggatatacaattcagcaattggttggtggaacatgggtaaatacagcgtactctggttctgcgacagcattggcaggtgtgttgggtgccccagcatattcagcagatgtacctcatttgtcagaagggacttaccgtgtagtattcagcttatcaagtctgatttctctaggtactgtaactctagactctgtagtgacaactacagcgactcatctagaccaatacacaccagatggtcaaacagactggattactggaaatgtccttactaatgatgtcgtagaaggtactcagctctacgtaatgaactcaacaactggtacttatgaactagctgctggtcaaggagtcaatacaggtgaaggtacgttgtatctatacaatgatggttcttacttctacaaaccattagacagcgctgcaaatgcgacagttgatgtgattgattacaagttagtttcggtgattgatggtagtgaatacacttcttcattgacaattaacttgagtcaagagttgaatagccttgcagtgagtactgcggcaaatgatacatttgctcttggtaacggctctgataccttgatctacaacacattaacagctgcaagcgtaactaatgcaactggtggcaatacaacggctggtggtgtagatgtatggactgacttccatgtaggtaatactgcaacggatgatcaggctgataagattgacctaagcaacttgttgattggttcacaaactaacttaacaatcggtcaatatgtatctgtaagttacgatgctgcgtctcaaactgcgacaatcagcgtagaccgtgatggtggattactcgtagaaggtacttacactgaaacaccattgcttcaattgactaacctcactggtccagtcacattgaatgacttgatcaacaatggtcaaatcattttctaa

SEQ ID NO: 56975 - DNA, 1152 bp, Acinetobacter baumannii
ttgaggcccctatctccaagagatccagaacagccgcatagagcagcaactcccctcgaattattattcgatttaatttttgtggtcgcgattgcaacagcgggtcagcagctacatcatgcaattattgaaaatcatctatggcatgcattaccaagttatctgatggtattttttgcgctgtggtgggcatggatgaatttttcatggtttgcttcggcttacgataatgacgatgcattgtatcggtgtcttacctttgtacagattgtagggtcattagtcatggccgcaggtattcctgatgtgttccatagtcaggattttgacatcattattgtcggctatgtgattatgcgtttggctttagtcacccagtggctaagagccgcaaaacatgaccctgaacggcgaattacggcgtatcgttatgccgtaggtatcgtattggtacaaattggctggcttgttgctaactttgctcatgccctttcaattcctttatttttacttctggttgtggtcgagttatttgttcctatctatgcagaaaaatattcgcctacgccgtggcatcctcaccatattgtagagcgctatgcccttcttactattatcgttttaggggaatccatcgtaggtagctttaatgccattcgtgatgcgcttgcggctcaatctattaatattccggctgtttttttaatgattggcggattaatgttgatgtttgcaatgtggtgggcttactttgaccgcagtgaacagcatcatcatgttaaaggtgtacgtccgtttgtttggggatatggccattattttgtttttgtgagtgttgctgccgtaggtgctgcccttgctgctgctgtggatgttaccacccaccatgcccatatttctgatttatacatgggtgtaattgtcgcggtgagtgtggtgctttataccagctgcatatggatactttacgagtttcagtgcttatctggaattactaaatggttttatcctattactgcactcattattttatgtattccgtttatttgtaataacgtgggatatagcgtgtttgcgatgggtattgtctatacgttacgtttattcatctcgaataaatttatggaaaatatagagccaaaacaggtttaa

SEQ ID NO: 56976 - DNA, 477 bp, Acinetobacter baumannii
atgcaacgttatccaatgacccctgaaggtaaaatcgccttagagaaagaattacaacatctgaaaactgttgaacgtccacgtattactcaagcgattgctgaagcacgtgaacatggggacttaaaagaaaatgcagaatatcatgctgctcgtgaacagcaaggtttctgtgaaggccgtatccaagatatcgaaggaaaattgggtgctgcacaagtcatcgatgttaaagacttagaacaaaacggtcgtgttgtattcggtgttacggtaacgattgaaaaccttgatactgaagaacgcaagacttataagattgttggtgatgatgaagctgattttaaaatcaataaaatttcagtaaattcgccaattgcacgtggtcttttgggtaaaaatgaaggtgatgaagtaaaaattaccaccccacaaggcgaagtggaatatgaagttgtaagtgtagaatatatttaa

SEQ ID NO: 56977 - DNA, 711 bp, Acinetobacter baumannii
gtgtgggagcatctatgtctttcggctattcaagaagacggatctgcattgtggccagcaaaacacaatattcaaaagttgaagcaaatggagcaagctgcgccgtatgtttttgccgggcaatatcgtcaaatgccatcaccgccagcaggtggtttttttaagcctgacaatattgaaattgtggatgctttacctgctgatgtagtgaagcaagtaagggcttgggactttggtgctactgagaatgaaggcgactttacagcaggtgttagagaagctcttggcgcagatggttttacttacattgtcgatgttacaagaggacagcttggtccagacaatgttaataagcgcttaaaacaagtcacagagttagatgggatgggcgtaacggtaaggattcctcaagatcctggtcaagctggtaaatcacaagctagtgcattcgtaaaacttcttgcaggatatgacgtcaaagccaaaccagtttcgggagacaaactcacacgtgcacaaccttttgcggcgcaagttaacgtgggtaacgtgagaatgcttagaggtgattggaataaagactttattgaagagcttcgcaattttccaaatggaacgcatgacgaccaagttgatgctggttcagatgcatttaatgaattgaatggaggttttgaggccttctttgctgatatgggatttgctcgatga

SEQ ID NO: 56978 - DNA, 288 bp, Acinetobacter baumannii
ttgcaatctactataaaaatggaagaaattgtagctactcataagaatctaattggtttagaaatggaagcatatgctgtatatttagctgctagtaatgcaagacaacctcaacccaagtttttatcggcaaaatcagtatgtgattttggtacagaagataaaggtgatgctattcaccagtatgcttcttatacaagtgtatctttcataaatgaatttttaaaaagagctgactttctatctgaaaatttagtgaataaaaattatgaagtggagtgtgaataa

SEQ ID NO: 56979 - DNA, 246 bp, Acinetobacter baumannii
atgaaagatcagtacaagaaagtgagccaaaaacacatgcttggttttatgtactacttgcaattgctgggctacgtaatagtccggcaaggcattgatcaagcaatgtttctaaccaagcattatgcggtaccagtcgcttggcgccgcataacgatcgactacaacaaccgtttaaataaaccagcacaacaactttataaagagtttgttgagtggactaaagaagaatatttgagggcttag

SEQ ID NO: 56980 - DNA, 1071 bp, Acinetobacter baumannii
atgcctaaaaatatttataaaaatgcaaatagtgttatcgaaggaaattatgataatacactcttaggtgccaatacatatttgctaggtttaaccagtttatttgatgaaatgggtttgcaaggccattcaatatccgatgttttatctggcacgaatatttcaacagatgagataaatcaatcctctttatatatttcccaagtccaaaaaattcagctatttcaaaatattcaacgtttatcacatgatccgctcattggactacgcgcagggcaaaagcagcggttgtctgattttggagtgtatggctatgcgttatattcctcacgtaattttagacaagcggtagagcttggcattcgacacattaagcttgcagggcctattttaaagaagtctttttatattcgggatgatgttgccatttttgaagggcaggacattattgcacttggtaagcttttgcctttagtgtgcgagttttggtttagctccatgcaaaccttaattgaacgggtgcttgaaggaccatttcaagcgaagaagcttttattaccatacccagcgcctgactatgcagaagaatatgaaaaagtttttcattgtcccgttcagtttaatactggggtgatgcaatggcactttgatttaaagtggctcgatgtaccttgcccaaatgccaacccgattactgcggacatgtgtaagtcgttttgtgagcggatgctaggcgctgctgaacttgaagagcctgagttggtgaaaacgattcgtttaatactattggatggaacggggctttttccatcagctcaagaaatggctgaacgtttacatatctcaaagcgtactttacaccggcgcttggcaggttgtgatttaacctatcaagaattgttagatgagactcggcgccgtcttgctgatgaatatttgcgagagacaactttaaccatagatgaaattgctgagagaattggcttttcagatacttctaactttcgaaaagcctaccgtcactggacaggcatttcaccaaatgagtatcgtgagaaattagttttataa

SEQ ID NO: 56981 - DNA, 189 bp, Acinetobacter baumannii
atgtcgcacttcaagttttactctgccatatataaatgcttagcgttgtatgacatttccaaaactttcaagaaaaacattgataagtcaaaactaaaaactataaaaaaagcccgacatcctgtcgggctttttcgtatttggttgctagatatgactcctgtcgtatctcacgatcctgatgcatga

SEQ ID NO: 56982 - DNA, 543 bp, Acinetobacter baumannii
atgactcagcaggtatgtgtaatatcacaactcactttggagtttccttcaaaagtgatgtttaaagaattgaatttctcacttgagcatcatcaagtatcagccttaattggccgcaatggtcaaggtaagtctttacttatgcaattgcttcacaagatttcacccactacagaaatgcatatcagtggccaaataaactggcaaaccaagcatgcatatttatctcagctcactcgtctccaatcagacacaattgcagaagctttagaggtcaaccatctttacaacgcttttcaaagagtggaacaaggcgaagctgaatacgatgattatgatttgttagaaggacattgggatcttcctaatatttgggaggctttactacgatctgctcagctaccaaccgatttagactttcctgttaagcagttgagcgaaggccaaaaaaccaagttagccttatccgcattatttttaaaaactgatcattacctattacttgatgagccaagcaaccatctcgatcaagaagctagatag

SEQ ID NO: 56983 - DNA, 471 bp, Acinetobacter baumannii; identical to SEQ ID NO: 48447

SEQ ID NO: 56984 - DNA, 924 bp, Acinetobacter baumannii
atgcctgaaatacaaattattgccaaggatagtcacgataccttgtcaacaatccaaggaacttctgcaaagctttcagaagcgtcggtcgtattggtaaaagtggctgccagtgatgtattggtagtgaatagggagggtaccaatgcagtcattcgcctgaaaaatggcgagactattgttattgaaggcttctttagtggaacagctgagcctaaagataacagtctggttttccaagatgaaaatggacagttgatttgggcaaaattcaaagatgctgaaaatgatgcagatgctgatagtgatgcggacgcagatgctgacagtgacgtggaaccacaagcacttttaggtgaagatttaccagcagctctaccagcagaagctccacaagagttggtatctgatgttatttaccaacctatttcttcaattgagcctctactttatcatgatgcaggcgtgaacccatggttatgggctgctattccactagttgcaggcggtattatcgctgcagcatcaaatcatgatagtaatgatgattcttcagtacctgctgacaccactccaccaagtaccgatggcgtaactttctcggttgaccctgttacttctgataatgtgattaatgcatcagaagcagcaggtaatgtcaccattacaggtgttttgaaaaacattccagcagatgcggccaacacggccgttacagttgttattaatggggtaacttataatgcgactgtagataaagcagcaggtacatggacagtaagtgtaccgggcagtggcttagttgcggatgcagataagacgattgatgccaaagtaacgtttacagatgcagcaggtaatagcagcagtgttaacgatacacaaacttatacacttgataccctgcaccaaatgcaccagtga

SEQ ID NO: 56985 - DNA, 633 bp, Acinetobacter baumannii
atggctgaaaagttaattggctcccctgttcgtcactggtgtgaatttgagtttatttccaaaactgtgaaaaatccaaatatccatattaaagggaattactcttactactcggcatattgggatcaaggttttgaacgctgtgtagtgcgatatctacatgacaagccttctactcctgacaagccaattgatcagctctatattggtaattttgtttgttttggcgctgaatgcgtgattatgatgggtggtaaccaacttcatcggccagactggatatcgacattcccctttgatacccgaagttttttagccgctggtgacactatcattgcagatggctgctggattggaagccgtgcaatgattatgcaaggtgtaaaaatcggtgaaggtgctgttgttgcaactggagctgtggtcactaaagatgtccccccctatgcaattgttggtggcgtacctgcaaaaattattaaataccgttttcctcaggagcaaatagaaaaaatacttgctttaaaaatttatgatttagatgaaaaacaagttttaaaaatgcgggaatatttacaaacggatgatatagatgcattaacagcacatcttaaaaaattacagagcggataa

SEQ ID NO: 56986 - DNA, 840 bp, Acinetobacter baumannii; identical to SEQ ID NO: 53424

SEQ ID NO: 56987 - DNA, 957 bp, Acinetobacter baumannii
atgactacgacagttaattccgacatgatcatctacaaccaactggcccaaacagcgtatttagaacgtttacaagacaatttgaatgtctttaatgaagcttccaatggtgcgattatttatcgtaatgaaatcattcaaggtgacttcaataaaaatgcattctacaaagttggtggtagcattaaacatcgtgatgtgaactccaatgcaaaagtaactccggaaaaaatcggtgcaggtgagtctgtaggtgtaaaaattccatataaatatggcccttatgcatctactgaagaggcatttaagcgccgtgctcgtacaccagaagaatttgctatggttgttggttacgatcttgctgatgcattggttgctggtcgtttagagtacagcctagcttctttaaaagctgctatttctagtaatcccgatatggttgcgaaaggaagtatcgttgttgatggccgcaaagcattaactcgtggtatgcgaaagtttggtgataagtttggccgaattggcttatgggtgatgaactcagatacatatttcgatattgtcgatgatgctatcactaagcaaatttacggtgaatctgaaatcgttatctatggtggtttaccaggaaccttaggaaagccggtattggtgacggatgctgtaggtgataacgatgcttttggtttgcagtatggtgctgtaactgtaactgaatcacaagtaccgggcttccgcgcgtatgacatcaatgatgaagaaaacttagcaatcggtatgcgtgctgaaggtgcatttaacctagatattcttggttatagttgggatacatcgaaaggtgaaaatcctgaccttacattacttggttcaagtgctaactggattaaatatgcaaccagcaacaaaatgacagcaggtaccttacttgatttatcaggtacagcgacaactggttaa

SEQ ID NO: 56988 - DNA, 957 bp, Acinetobacter baumannii
atgactacaacagttaattcagacatgatcatctacaaccaattggctcaaactgcttatttagagcgtttgcaagacaatttgaacgtatttaaccaggcctctaatggtgcaattgtatatcgcaatgagattattgaaggtgatttcaataaagaggcattttacaaagtgggcggtagcatcaagcatcgtgatgtgaattcaaccgccaaagtagtgcctgagaagattgggtctggtgaatctgtaggcgtaaaagtcccatataaatatggtccttatgcttcaaccgaagaggcattcaaacgccgtgcacgcacacctgaagagtttgccatgattcttggttatgatttagcagatgcattagttgcaggacgtttacagtacagtttagcctccttaaaagcagctatttctagcaacccggatatggttgccaaaggcagtattgctgtagatgggcgtaaagcattaacacgtggtatgcgtaagtttggcgataagtttggacgtattagtttatgggtaatgaactcagatacttatttcgatattgtcgatgatgcaatcactaatcaaatttatggcgaatctgaaatcgttatctatggtggtttaccgggtaccttaggtaagccggtattggttacagatgccgtaggtgatgatgatgcatttggtttgcaaatgggtgcagttactgttacagaatcacaagtaccaggcttccgcgcgtatgacatcaatgatgaagaaaacttggcaatcggtatgcgtgctgagggtacatttaacctagatattcttggttatagctgggatacatcaaaaggtgaaaaccctgaccttactttacttggttcaagtgccaactggaaaaaacatgctactagcaacaaaatgacagcaggcacattgcttgatctatctggcacaacaacaactggttaa

SEQ ID NO: 56989 - DNA, 465 bp, Acinetobacter baumannii
atgactcctgcatgtagactgttaaaaagtaacaaaatcgaattttctatccatgagtatgaacatgacgcaaatgctaaaagttttggcttagaagctgcggaaaaattaaaccttaatgtaaatgaagtgtttaaaacacttctggttaccgatgagaaaaattattttgttgcggttataccagttaaccatcaactcaatttaaaaaaagtagctacggcagtggggtgtaaaaaactacagatggcaaatcctaaagatgccgaacgtttaacaggatacttagtgggtggaattagtcctttaggccaaaagaaacgtttgaagacagtaattgatgcctctgcacaagagctcagcaaaatttatgtaagtggcggtaagagagggttagatattggtgtaaatcctaaagatttagcacaaatattaacggcgcaatttgtagacgtacttgattaa

SEQ ID NO: 56990 - DNA, 180 bp, Acinetobacter baumannii
gtgtctgagctgacttatccggtgacgggtaagcactgtgttgaccgtatttacaccgatctttgtgtgattgacgtgaccaaagatggtttaaaggtgattgagaaagttgaagggcttagttttgatgagttacaggctttaacgggtgcaactttgattgatgcgactcaagggtaa

SEQ ID NO: 56991 - DNA, 207 bp, Acinetobacter baumannii
atgaaagaacgttgtgaatggatagttagagttcaaagtacaccaggcttttacgcccagtatgaaggcaatgtaaaagtttgggctgacgaagattcagatgaagaaaccctctttcgtgcagcagtaaaagaacttggccgaggcgctttttttgatcgtaagcacctaagtttttggaaattagtttcagttaaaaaaggataa

SEQ ID NO: 56992 - DNA, 678 bp, Acinetobacter baumannii
atgccacatgatgcacctcattcggtagcaacaattgcacgcttaaacaatgaagctaaaacacatcgtgaagccaaagaagcagctgaaaaagcattaaaagcttttgaaggaatcgaagaccctgcggcagctaaaaaggccttacaaacaatccaaaatctcgatgataaaaagctggtggatgccggtgaagttgagaaagttaaagctgaagctatcaaagcagttgaagaaaaatatgccccgattgttgagcaacgtgatgctctagaagcctctttacataaagaacttatcggcggtggttttgctcgttctaagtacattcaagacaacattgcagtacctgtggatatggtgcaagcgacctttggtcatcacttcaaaatcgaagagggcaaggtggttgcatatgaccagaacggcgaaaagatttattcacgtgtacgcccaggtgaacttgcaaatgttgatgaagctttagagtcattggttggtggataccagcataaagacttaattcttaaaggtggtaaagggactggtggaggtttccaaagcgggggcaaaggtggagcacctactggaatgaaacgcagtgaaatgtctgtttctcagaaagcagattacatcaaagaacatggcaatgatgccttcctaaaactaccgaactaa

SEQ ID NO: 56993 - DNA, 390 bp, Acinetobacter baumannii
atgagctttattactgtagatgacgcaaattcaattttgggcagcgattttgcaccagacagtgataaagctcgtctggtaaagctggctaatgtttggatgaaaaaacggattggttttgtaccagatcctattgatccacttcttaaagacgcggcttgtgaaattatcaaaggaattctggccaaagtaatttataacggcaaagaccagcagttgaagcgtaagaaagttaaagctgattctgttgagtcagaaaaagaatatcaagacggatctgaagcaatctctagctttgaacagatagcaattgattttattgattcacttgatttgaaagatccaaatgcaagttttaatggctttggcataccactttacagggcatga

SEQ ID NO: 56994 - DNA, 186 bp, Acinetobacter baumannii
atgcaagcgcgtattgctgaattggaagctggaaaagcggcagaaaattcagcaacagaaacggcagctaatgattttgaaaactggtcaaatgatcaattaaaagagtatttggctagtaaaaatattggttacaagccgtcagcaacaaaagcagaacttcttaaattaatccctaaggaataa

SEQ ID NO: 56995 - DNA, 537 bp, Acinetobacter baumannii
atgtgggatcatttagtaaggttttctacttgggcagaaaataactcagggcaaattcagattttaattgctgtatttgccgtttggttagcgtacgctggttataaaaaagtcttagagcaaatttctatttctagagatcaagaaaaaaatacttttagtcaaagaaattttgaattgaaattagaatttttgaatttatgcctcgctatttctgataaaaccactgttaaattaatggcacaacatgaaatattaagggccttggagaactctttaaaagtttacacttcagaagaagaccaagaggagttgaaggcaacaataaaaatcttggaacaaaagattaatgaaactgaaatgatattagagcttactaataagttatcggagcgaattaacaaatctcaggaatttgattttaatgagcaaagtaaacacattcattacatttacgaggctttaataatttctgttgatgatgcgaaccgtatggaacttttgaagtctaaatttttaaaagatgattatgactaa

SEQ ID NO: 56996 - DNA, 504 bp, Acinetobacter baumannii
atgtgttcatcccatgcacgaactgaaatacccaattgctgtttgatcttctcagcatcaaacttggtactgtgtggaactttaactacaccagcactactattctgccaacgcaaagtcactcagcaggaagcagcagcttactttgatgctgtgttcaataacacgaatctgagtattgccgaacaggatgatagtatcattcagttctaccgtaatgtagctacgcctaaacagatcaactcatccagagccgataataaaactgaacccaatgggcgcgccatgtcaaaagtcatgaccatgtttaacggacatggacgtggggcagagttagcctcagccaaagatacggcttatggcttgttgtgcagtattacagaatttgcagatcacgagcgacgggcgatttcaacggatcatcggatggattcggcatggtttggagctggggccaaccttaaacaacgtggattggaacaggcattaagaatggttgtataa

SEQ ID NO: 56997 - DNA, 240 bp, Acinetobacter baumannii
gtgcttgagtatccaatcaaggctgactttgccctgattaaagcctacaagggcgaccgctggggcaatctggtttaccgtaaatctgcacgtaactttggcccgatcatggccatggctgctgatgtcaccattgcccaggtttctgaagtggttgaactgggtggattagatccggaacatatcattaccccaggtatctttgtacagcacgttgtacaagtacagcccgcacagtaa

SEQ ID NO: 56998 - DNA, 195 bp, Acinetobacter baumannii; identical to SEQ ID NO: 53414

SEQ ID NO: 56999 - DNA, 195 bp, Acinetobacter baumannii; identical to SEQ ID NO: 47913

SEQ ID NO: 57000 - DNA, 180 bp, Acinetobacter baumannii
gtgtctgagctgacttatccggtgacgggtaagcactgtgttgaccgtatttacactgacctgtgtgtgattgatgtgactaaagacggtttaaaggtgattgagaaggtggatgggctgagttttgaggagttacaggctttaaccggtgcaactttgattgatgcgactcaagggtaa

SEQ ID NO: 57001 - DNA, 180 bp, Acinetobacter baumannii
gtggctgagctgacttatccagtgacgggtaagcactgtgttgaccgtatttacactgacctgtgtgtgattgatgtgactaaagacggtttaaaggtgattgagaaggtggatgggctgagttttgaggagttacaggctttaaccggtgcaactttgattgatgcgactcaagggtaa

SEQ ID NO: 57002 - DNA, 198 bp, Acinetobacter baumannii
atgataatatccccaaaattagtttttccttttactcctgcgcaaattcctgacattaaaactaattgtggacaaaagaactcaattgcttttgtagcggcaactgccgctgctgccatccccatttgcggagattgtgttacagcaacgctaagaaatccaaaatcagtatttattagatttatagcatatttttga

SEQ ID NO: 57003 - DNA, 195 bp, Acinetobacter baumannii
atgaaaatgtatcaggtagatgcttttactgatcagttattttcaggaaacccagctgcagtcgtaattactaaacaatggttagatgtagaaataatgcaaaatattgccattgagaataatttatccgaaacaagttttgctcgtaaaattgatgagttagtcttcacacttaacttttttatgtatcaataa

SEQ ID NO: 57004 - DNA, 195 bp, Acinetobacter baumannii
atgaaaacatttactgctactcattcacacactcaaaataatgtaaaagagcactcccctatttatgacttggctgcttatcaacaacgccaacgtcaatccaaacgtcagaaattactcaagaaccttttcgacaccgccatatttgtcagtcttgccggcttcactttctcaatgctgttttggggagtctaa

SEQ ID NO: 57005 - DNA, 189 bp, Acinetobacter baumannii
atgttaaaacgttttttatctattttaatgatttcgatgtgttttgtttcattagcaaatgcaaagtggcaagggcgtgagccttgttcaggcaaaaaaggtggagttaaagcttgtactgctgatggcaagtttatgtgtaaaaatgggacattgagtgcttcaaagaaaaaatgtactaaggtgtag

SEQ ID NO: 57006 - DNA, 459 bp, Acinetobacter baumannii
atgaaaaataatagtcgaaatttataccttatcttgttagggctcgttattttagggcttgcatcatgttcgaatgaacctgagattactttgccaaaagtttctcaagtaggtgtagggagtgctgaaaatattataaaagcagcagatctccatcctgtaaaaatgattgatagtacagacagccatgatgctgttaagaaaatttatctatttgagggtattcagacacaattggaatttagtgaaaactatattttgattgcttggcaccaacatgataaagcgagtttagataaggctgtgcgtttgggtatggcagcgcttggtaatgatgcaggctattttattcataaggtagatattcagggtgagcatactgaatattcaattcaaggatataagttaatacagaattcatgtgtatctaagttatgtttaatcaaaattgaacggtaa

SEQ ID NO: 57007 - DNA, 231 bp, Acinetobacter baumannii
atgacaagtttccaaatctttttcattgttcttcttgtattgtcactcatcattttatggatgattttggactatcaagtaaaccgcctgattcgtgaaatgaagattgctcaacttgataaaattgaaggcaaattctctgtcactggtgaagtacgaatcaatcaaaaaattcagaatatacatcaaggggtgcaagaatgtggctatacccagcacttatcggattaa

SEQ ID NO: 57008 - DNA, 234 bp, Acinetobacter baumannii
atgaacattgaagaaattagaaagaaagcaccttacaaggattatcataatggtgagatatttgaaggtgatctaatacaacatccatcaggtgaaaaaggggttgttgtgtttgagaaaagaactgaaagcgattcagataattggcttatccagtatgaggacggtattaaatcacgtttatgtcttcaagtttgtgacaaaggtcaagccgttgtggtgaatgtgcattag

SEQ ID NO: 57009 - DNA, 327 bp, Acinetobacter baumannii
atgtatcagacagaaaaaatacataaatttggtggcataaataagttgaaagatgcaatcaaaaccaagttacttgatgatgtgtactgttgggaaactgagaagtggtacacacaaagatattggaatgaagtggcagataagaacctgacaggaattacattgttggaactaatgactggcacgcctcttgacgcaacacattatgccggccctttattcaataagatggatgaaggtggtcgtgtattcgaatgggttcctcagcaaaatagatggctgtatgtaggttggcaccctaacgccaaacttaattcaatattataa

SEQ ID NO: 57010 - DNA, 282 bp, Acinetobacter baumannii
gtgaataacgaagaattagccaaaatcggaatgatgtttattcattggattcaagttcatagagaatctatcaatcgctttgaagactttcgagattgttttgtacaggaccctgatgagccagtgcacactaaaaaggactatgacaaagcatgggaaattcagaaggaagcttctgtattgggtagtgaagcgaaaagacgctatgaaaccttgcttgaagaagttgacctatatctggcgcgtgaaagaactgatgttcttgaggcaggtgaccaatga

SEQ ID NO: 57011 - DNA, 429 bp, Acinetobacter baumannii
atgaaaccagaacagtttattcgtgagcagggtttgccagaagttaaacgacttttaggagaggctcctaagcactctcaattcgtaattccttgcttagatggtgagatgtacttttcacaacgtgaagatgatggcaagtggtttaaatggagtaatggctatagcaaatggctcgaatactttgggaaatgtaatccacttgatttggcttacagcctttccgacctcaagcgtctggttgagagcgttgatttggttgagctacttggtggaatagatatagcaaaaaggaaagtgaagatggctgaatttaacggcttcttacttatctcagttccagtagaaaacgggtttggcgacatatacgcgcaaaaggttgagcgcgccatccgcgaccacgaatcaatatacggaggcggggaatga

SEQ ID NO: 57012 - DNA, 1779 bp, Acinetobacter baumannii
atgatgcgaactcattactgtggctctttaactgaagcccaaatcgaccagaccgttacattatgcggttgggtacatcgtcgccgtgaccatggcggtgttattttccttgatatgcgtgaccgtgatggtctcgttcaagtggttattgacccagatactccagaagcatttgcaactgcagataaagcacgttctgaatatgtattaaaaattacaggtcgtgttcgtcgccgttatgaaggtactgaaaacccaaatatggtgagtggtcaaatcgaagttttaggcaaagaaatcgaagttcttgctgcatctgaaactccaccattcccattaaatgacgacactattaacgtgtcagaagaacaccgtttaaaatatcgtttcttggacatccgtcgtccagaaatgttagagcgtttacgcttccgttctaaagtaaccaacttgattcgtaactatttagacgatcatggtttcttagacgttgaaactccgattttaactcgtgcaacccctgaaggtgcgcgtgactatttagtaccaagccgtgtacaaaatggtagcttctatgcacttccacaatcaccacaattgttcaaacaattattgatggttggtggtattgatcgctactaccaaatcgcgaaatgtttccgtgatgaagacttacgtgctgaccgtcagcctgaattcactcaaatcgacattgaaacatcgttcttaaacgacgatgacattatggatttgatggaaggcatgactgttaaattatttaacgacttgcttggcgtaaaatttgaaaaattccgccgtatgccatacagcgaagcaatgcgtgattatgcatctgacaaaccagacttgcgtattccgttaaaactcgttgatgttgcagacttaatgcaagaagttgagttcaaagtatttgcaggtccagctaaagaccctaaaggccgtattgcagcacttcgtgtaccgggcgcaggttcattaacacgtagtcaaattgatgaatacactaaatttgtcggtatctacggtgcaaaaggcttagcgtacattaaagtcaatgaaatcgaaaaaggaattgaaggtcttcaatctcctatcgttaaattcatcgaaccaatcgtaatgcaattgcttgaacgtgttggcgctgaaaatggcgatatcgtattctttggtgcggacaaagctaaaattgtaaatgatgcaatgggtgcacttcgtgtcaagatcggtcatgacttgaaccttgcgacttgtgagtgggctccactttgggttgttgacttcccaatgtttgaagaaactgacgatggcaaatggacttctgttcaccatccattcacattacctaaatctagtgtagaagacgtgaagagcaatccaggcgaagcactttctgttgcttacgacatggtattgaacggtactgaagttggtggtggttcacttcgtatttacacattagaaatgcaaaaagcgatttttgaagcgcttggtatttccgatgaagaagcagaagaaaaattcagcttcttactcaatgcgcttcgttacggtgcacctcctcacggtggtttggcatttggtcttgaccgtttagtaatgcttatgactggcgcgacttcaattcgtgatgttattgcgttccctaaaacgaaaactgctgaatgtccacttactcaagcaccggctcctgttgaagcaaaccagcttcgtgacttgggcatccgcttacgtgaacaacaaaagaaagaagcttaa

SEQ ID NO: 57013 - DNA, 2076 bp, Acinetobacter baumannii
atgttgttctataaaaatattttgaccttatccattttggctgccatatctatacctgtatttgcagcagaaaatgaaaatgttgagaagttagaaactatccgcatcaaggcgcacccccttgagcaaacttcaaaagattttgcagtcgctgatactgtagttgaccaaaagcatttgactgaaggggccgccactattggggatgcgctcaatagtgaggtggggatttatgcgaatcagtttggggctggttcaagtcgtccggtgattcgtggccaagatggaccacgtgttaaagttcttcaaaattcatctgaaaatgtggatgtctcaactttgtctcctgatcatgctgtaacagtagatccagttcttgcaaaacaagttgaagtgattcgtggaccctctactttattgtttggtgcaggaactgtgggtggtttagtcaacgttattgataacaagatccctacacaaatgcctgaaaatggttatgaaggacaagttggcttacgttacaacactggaagtgatgaaaagctggcaagcgctggcgtaactgttggcttgggcagccaagttgctttacgtgttgaggggttaactcgtgatgcgaataattatattgctcccaattatattcatgaaggtgaaaaagagcgccgtgtagacaatacttttgcgcagggtgactcggttaatgttggtttgtcttggatttatgaccgtggttatacgggtatttcttatagcaaccgcagagaccagtatggcttacccgggcatagccatgagtacgaaagttgtagcgctcatctaggtggaagaccacatttacattgtgatgctcatgagcatgatcatgaagagggtgaagaggctcatgcccatgaagaacatgagcatgaacatggcggtccatggattgacttaaagtctgagcgttatgattttaaaaccgagttaaacgatccatttgcaggcttccaaaagttacgtgcccaagcgagctatacagattatcagcatgatgagattgaagaaggggcaatcgcaactcgattccaaaacaaaggttatgatgggcgtattgagttagtccataaccctattgctgattgggaaggggtaattggtacccagttaggccaacaaaaactaaatttaactggtgaagaggcatttatggcaccgaccactaccaaaaagtggagtgtttttgctttagaacataaacaatggaaagatgttcattttgaactttctgctcgtgcagatcagcaagaaatcaatgtagatgataactctaaacaagattttgacggttctgctttttcctatgcaggtgctgccaactgggagtttgcgccaaattataagctttcatttgtagcatcacaccaagagcgtctgcctcttgctcaagagttatatgcaaatggtgcccattttgcgaccaatacttatgagttaggaaatgatcaactcagtaaggaaaaatcaaataatgttgagttaggtttgcattttgataatgacaaactcgattatcatcttcatgtttaccataactggtttgatgactacatctatgcgcaaacccttgaccgttataaagacttccgtttagttcaatacactcaagataaagcacgtttctatggtgctgagggtgaaattggttatcaaattacgccaatgtacaagatcagtgcttttggcgattatgtgcgcggtaagattgatgccgagggcaatgctccacgtattccggctgggcgtttaggtactaaagttgatgcggattttggtgacggttttagtggttctgctgagtactatcatgtctttaatcaagataagattgcggcttatgaaaccgaaacagaaggctacaacatgctcaatttaggggtagcatactctggacaatatggtgcaaaaacagattatcgcgtttatttaaaagcgaataacttgttagatgacacggtttatcaacatgcgtcgttcttatcaaatatcccgcaagttggacgtaactttaccgtcggtgtagattttagtttctaa

SEQ ID NO: 57014 - DNA, 1464 bp, Acinetobacter baumannii
atgcgtatttttcagcgaattcatcaaaagttaaattggtcaggacgtcgttatatggcggtcatactttgcgttgttgctattgcatatcttgcatcggcaatttatcacacagtgaaaccattgccgcaaggaattaactttagtggcaagctcagacatgccgatgttaaatttttagccgataaaacgtatattgatgcgaatgggcaacaacaggttgatcagcacatctttgatgaaatcttgaaaatgattgatgaggcaaaaaccacaattgtggtggatatgttcttatttaattcagaagtaggcgattcaaaactaaagcaacgaccattgatgcaagagctcactgatgcattagtgagtaaaaaaagacaaaaccctcaaattcaggttgttatgattaccgacccgattaattcggtatatggtggactaagccctgaacactaccgtcaattacgccaagctggtgttgatgtcatcgaaacgaatctggcacctttacgtgcttcaaacccattctggtcggggttttggtacatctgttgccaaaatattggcaataatccagagaaaggctggttacccaacccatttggcgatgaaaaaattacgctacgtagttatttgaacttatttaactttaaagcaaaccatcgtaaaactgttgtcgttgataccgatacgggttggaagtcattggtgacttcagccaatccgcatgatggtagttcgcgccattctaatgtggcattggtggtaaatggagccacagctgctgatgtactccaaaccgaagctgctgttgcgcaaatgtcaggaagtagttcaccatcacttattttaggcgattttgaaaaagacgttagcaagcctcaagttcaggtgttaactgaaggggcaatctatgaagctgtattaaaattaattaatacggctaaacctaaagaacatcttgatttaagtatgttctatttatctgaacgtaagattattaaagctctaaaaagtgcccaagaacgtggcgttattgttcgtgttttactcgatccaaataaagatgcgtttggtagacaaaagaatggtatcccaaaccgtcaggtagcttcagagttacatgctgccggcattccaattcgttggtgtgatacccatggtgagcagaaccatagcaaaatgatcttgaaatataatgctcaacaagctgtgttaattgtaggatctgccaattttacagcccgtaatttaaaaaattataaccttgaaacggatatgttggttgtaggcaaagttcaagatcaagtctttaaagatgctcagaattacttcaatacttcgtggtcaaacctacaaggtagacagatgagcgtagactatgcgaagtatgccgatgagtctaaagtgaagtattggatttatcgttttatggaatggtcaggtttatcgactttttaa

SEQ ID NO: 57015 - DNA, 447 bp, Acinetobacter baumannii
gtgtctgaaatcagttttgaacgtcttcatcaatttttctgcaaagttccaagtgtacaagaagcccgtatcatggctcatggagcagatggcgaacacgcttggtggtttaagttcagtattgatgtacaacaccctctcgcatggcaaaccgttcaagaactaggtcatgttttaaattacctgtcgacgaatgaacgtttacctactttattctttcctgtgtctccaccaccttacatgaatggtgaagcaaaagattttttatcatgggttattcagtgtaatcaccctgagttttctccagatgtggtttgtgattggcttgaagcgcgtttgccgaatcctgtagatgatgagtcgcagtggaaaattaagacggatttgagtgaaatagaaaagttagatgataaggctttggatcagttgattccgcctactgcttaa

SEQ ID NO: 57016 - DNA, 384 bp, Acinetobacter baumannii
atgaaaaagcctattgttctcgtactttcaacattaatgttgggtatgtcggcaactgcgatggccgattcaaatcatcgttgggataactatcacggtaaagaccataatcgctatgaacagcgtcatgattatcgttatgaccaccgcaatgatcatagagctcctgtttggtcacattctgagcgtggcaaccattatggccgatatgtagcctttaagcgcggtgatcgtattcctgtggaataccgtaatagccgttattatgtttcagattggcgtgcacatcgcttatatgcaccaccacgtggataccactgggtgaaaactcctaaccaatacttattggttgactcgaaacatcacatttatcgagttcgttaa

SEQ ID NO: 57017 - DNA, 483 bp, Acinetobacter baumannii
atgcctgatcccaaaaagtttgaaagaacccttgatcggtttggacattatgctgttgaggcttttcattatttagccttatttatcataggctgtatgattgcttggtctgctgctcataccgtttttgaaattctgaccgtcaaaaaatatgcatcaatcgatgacatcttattgttatttatttacctagaacttggggcaatggttggaatttactttaaaaccaatcatatgcctgtacgttttcttatttatgtcgccattacagccctaacacgtttactgatttctgatatccaacatgaccataaagctgaccttgatcaagtcattattactggctcaattcttattttagccttatctattttagttgtccgttttgcttcttggcactacccatctgttatgaaagaaaaacattcaaaaacgcctacttctttaaaaacaccccaaccgcaagatgacgagttggcataa

SEQ ID NO: 57018 - DNA, 1782 bp, Acinetobacter baumannii
atgccaatttacaatgctcctttagctgatatgaaattcatcttaaatgatgtatttaaagcagaacaattttggcaggctaatgagaaactcgctcatgtagatgctgcaacagctgaagcaattttagaagaaatggctaaatttgctcagaacgtgactcatccattaaaccgtactggtgatgaagaaggcgctcgctacgaaaacggcgaagtctttactcctgctggctttaaagatgcatttcgtcaatatgcagaaggtggttggattggcttaggtgcagatgaagaatggggcggtcaaggcatgccaaaaatgcttaccgttcttgcggatgaaatgttattcgcgacaaacccatctttcatgctctacccacttctttcagtaggtgcaggtatggctttaagtagctacgcatctcaagagcaaaaagaaacgtatttacctaagatttattcaggtgaatggtcaggtaccatgtgtttgactgaaccacatgccggtactgacttaggtattatcaaaactaaagccgagcgcaatgaagatggtacttataacattacaggtactaaaatcttcatcactggcggtgacaacgatttagcagaaaacatcattcacttggtacttgctaaaactccagatgctcctgctggttcacgtggtatctcgctatttattgtaccgaaataccttgtaaacgaagacggttctttaggtgaccgtaaccatgttggtccaggttctattgaacataagatggggatcaaagcatctgcaacttgtgtgatgaactttgacggtgcgaaaggttacctcgttggtaaagaaaacgaaggccttgctgccatgttcgtgatgatgaactacgaacgtttatcaatgggtattcaaggtttaggtgcttctgaatttgcttatcaaaatgctgctcaatacgcgactgaccgtttacaaggtcgtagtgcagctggtgttcagtcaccaagcaaacccgctgatagcattttagtccacggcgatgtacgtcgtatgttgttaaatgtacgtgcaaacaacgaagcttctcgtgcctttgcagtttatgtaggccagcagctcgatatcactaaattctcaactgatgcagaagccgtgaaaaaagccaatgaccgtgttgcgcttttaaccccaattgcaaaagcttaccttacagatacagccttccaagcgacattagatgctcaaatggtatttggtggtcacggttatattcgtgaatggggtatggagcaatgtatccgtgatcttcgtattgctcaaatctacgaaggaactaacggcgttcaatctcaagatttaattggtcgtaaaaccattaaatgtggcggtgcattcattgctgaatacatcactgaaattcgtgactttgcaaatgacctagacactgatttgaacttcattaaagatgcaactttagatgctgcaactgaaatcgaagcaatcactcagtttattattgagcaagctgcagagaacgtagagttcccgaactctgctgctgttgattacttacatgcagtgggtctactcagcttctcttatatgtttgcaaaaattgctgccgctgctaaagataaatctggtgatttctaccaaaacaaacttgcattggctcaatactttgttgaacgtatcttgccagatattgatgcacggattgctaaaatcaaagctggttctgacttaattatgggctttagtgaagattactttacaaaccaagcgtaa

SEQ ID NO: 57019 - DNA, 1803 bp, Acinetobacter baumannii
atgccacaatacaaagcgcccttacgtgatatgcaattcgttttgcatgaattattaaatgctgaagaacactatgcaaaattacctgactttcaaggtaacgtaagccgtgaattggttgatcaatatttagaagctgcggcagacttctgtgaaaatgaactttctcctttaaaccaagttggcgaccgtgaaggttgtacttggaatgatggtgttgtaactacaccaacaggctttaaagaagcttatcaaaaatacatcgaacttggcttcccgtctttatcagcagaagaacaatacggtggtcaaggtttacctaactctttaggtatcgcaatttcagaaatggtaggtagctctaactgggcatggggtatgtaccctggtttgtctcacggtgcagtacgtacattagaacatcacggttctgaagagcaaaaaaatacttacttaccaaaccttgtttcaggtgtttggacaggtacgatgtgtttaactgaatctcatgcaggttcagacttaggtattatccgtactaaagcagaaccaaatgcagatggtagctatgcaatctctggcgagaaaatctttatctctgctggtgaacacgacatggctgaaaacattatccatatcgttcttgctcgtctaccaggcgcaccaaaaggaactaaagggatttcgttattcatcgttcctaagttcaatgtcaatgcagacggaactctaggcgaacgtaatgccgtacgttgtggttcaatcgaacacaaaatgggtattcacggtaacgcgacttgtgtcattaactttgaccaagcaaaaggttatttaattggccctgaaaaccgtggtttgaactgtatgttcaccttcatgaacacagcacgtattggtactgcggttcaaggtttatctgcatctgagtcttctttccaaggtgctttaacttacgcgaaagaacgtttagctatgcgttcactttctggtcctaaagctccagaaaaagaagcagatccaattatcgttcaccctgccgttcgtaacatgcttttaactcaaaaagcatttgctgaaggtggtcgtgcacttgtgtacttacttgctcaatatgcagatatcgttgaaaaaggcgaaactgaagaagagcgtaagtttgctgacaacatcttgtctttattgactccaattgcaaaagcattcttaactgaaacaggttctgaatctgctaagcacggtgttcaagtgttcggtggtcatggtttcatttctgagcatggcatggagcaaatcgtacgtgatacacgtattgcttgcttgtatgaaggtacaactgaaattcaggcactggacttgttaggccgtaaagttttacaaactcaaggtgcaatgcttcgtgatttcactaagattgttcacaagtttgtagaagcaaataaagacaatcctgccatgaaagaatttgttgagccacttgctgcgctgaacaaagaatggggcgacctcactatgcaaatcggtatgcgtgcaatgcaaaatccggatgaagtaggtgcagcggctgtagattacctctacttctctggttacgttactttagcttatctatgggctcgtatggcgcttgtagcacaagagaaattagctgcgggtacaaccgatgttgatttctacaatgcgaaagtaactactgctcgcttctacttcaagaaaattttaccgcgtgtacgctctcatgtagacgttatcgcaggtggtttagacccattgatggcattagatgctgaacatttcgctttctaa

SEQ ID NO: 57020 - DNA, 381 bp, Acinetobacter baumannii
atgaaaatgacggctaaaattgcattattcagtgcagcaattgtaactatgggtagtttggctgcttgtcaatcaacaactcaaccacctaagccagaacatggcatgatgcaagatggcccacgtgatggtcaccaccatcgtatgaaacaccgtgaatttacgcctgaacaaaaagcagcatgggaacaacaccgtgcagagcgtaaagctcgttttgagcaaattcaaaaagcatgtgaaggtaaagttgttggacaaactgtcaatgttcaagttggagataaaacacttgaaggtacatgtaacctccgctttgagccaaaacgtcctcaaccaccagtcaatgcccctgctccagtagcgactcaagcaaaataa

SEQ ID NO: 57021 - DNA, 3006 bp, Acinetobacter baumannii
atgcccgttgactttctgaccactgagcagactgaaagctatggcagattcaccggtgaaccggatgagcttcagctggcacgatattttcatcttgatgaagcagacaaggaatttatcggaaaaagcagaggtgatcacaaccgtctgggcattgccctgcaaattggatgtgtccgttttctgggcaccttcctcaccgatatgaatcatattccttccggcgtccggcattttaccgccagacagctcgggattcgtgatatcaccgttcttgcagaatacggtcagagggaaaatacccgccgtgagcatgcagcgctgatacgtcagcactatcagtatcgtgaatttgcctggccctggacatttcgccttacccgtcttttatatacccggagctggataagcaacgaacgtcctggcctgcttttcgatctggcgacagggtggcttatgcaacatcgtattattctccccggagccactacgctgacccggttgatttcagaggtaagggaaaaggcgacgttgcgcctgtggaacaaactggcactgataccgtcagccgaacaacgttcacagctggagatgctgctggggccaactgattgcagccgcctgtctttactggaatcactgaaaaaaggccctgtgaccatcagtggtccggcgtttaatgaagcaattgaacgctggaaaactctgaacgattttggcttgcatgctgacaacctgagtacactcccggctgtgcgcctgaaaaatctcgcacgttatgctggtatgacttcggtgttcaatattgccaggatgtcaccgcagaaaaggatggcggttctggttgcctttgtccttgcatgggaaacgctggcgttggatgatgcactggacgttctggacgccatgctggccgttatcatccgtgacgccagaaagattgggcagaaaaaacggctccgctcgctgaaggatctggataaatctgcattggcgctcgccagcgcatgttcgtacctgctgaaagaagaaacaccggacgaatcgattcgtgctgaggtgttcagctacatccccaggcaaaagctggctgaaatcatcacgcttgtccgtgaaattgcccggccctcagacgataattttcatgaagaaatggtggagcagtacgggcgcgttcgtcgtttcctgccccatctgctgaataccgttaaattttcatccgcacctgccggggttaccactctgaatgcctgtgactacctcagccgggagttcagctcacggcggcagttttttgacgacgcaccaacggaaattatcagtcggtcatggaaacggctggtgattaacaaggaaaaacatatcacccgcaggggatacacgctctgctttctcagtaaactgcaggatagtctgaggcggagggatgtctacgttaccggcagtaaccggtggggagatccccgagcaagattactacagggtgctgactggcaggcaaaccggattaaggtttatcgttctctgggacacccgacagacccgcaggaagcaataaaatctctgggtcatcagcttgatagtcgttacagacaggttgctgcacgtcttggcgaaaatgaggctgtcgaactcgatgtttctggcccgaagccccggttgacaatttctcccctcgccagtcttgatgagccggacagtctgaaacgactgagcaaaatgatcagtgatctgctccctccggtggatttaacggagttgctgctcgaaattaacgcccataccggatttgctgatgagtttttccatgctagtgaagccagtgccagagttgatgatctgcccgtcagcatcagcgccgtgctgatggctgaagcctgcaatatcggtctggaaccactgatcagatcaaatgttcctgcactgacccgacaccggctgaactggacaaaagcgaactatctgcgggctgaaactatcaccagcgctaatgccagactggttgattttcaggcaacgctgccactggcacagatatggggtggcggagaagtggcatctgcagatggaatgcgctttgttacgccagtcagaacaatcaatgccggaccgaaccgcaaatactttggtaataacagagggatcacctggtacaactttgtgtccgatcagtattccggctttcatggcatcgttataccggggacgctgagggactctatctttgtgctggaaggccttctggaacaggagaccgggctgaatccaaccgaaattatgaccgatacagcaggtaccagcgaacttgtctttggccttttctggctgctgggataccagttttctccacgcctggctgatgccggtgcttcggttttctggcgaatgggccatgatgccaactatggcgtgctgaatgatattgccagagggcaatcagatccccgaaaaatagtccttcagtgggacgaaatgatccggaccgctggctccctgaaactgggcaaagtacaggcttcagtgctggtccgttcattgctgaaaagtgaacgtccttccggactgactcaggcaatcattgaagtggggcgcatcaacaaaacgctgtatctgcttaattatattgatgatgaagattaccgccggcgcattctgacccagcttaatcggggagaaagccgccatgccgttgccagagccatctgtcacggtcaaaaaggtgagataagaaaacgatataccgacggtcaggaagatcaactgggcgcactggggctggtcactaacgccgtcgtgttatggaacactatgtatatgcaggcagccctggatcatctccgggcgcaaggtgaaacactgaatgatgaagatatcgcacgcctctccccgctttgccacggacatatcaatatgctcggccattattccttcacgctggcagaactggtgaccaaaggacatctgagaccattaaaagaggcgtcagaggtagaaaacgttgcttaa

SEQ ID NO: 57022 - DNA, 1797 bp, Acinetobacter baumannii
atgttcatactcttcgccgagcgaaaagttggggaacagcacgggccggccgcgcaaggcgtgctggcagccgtgcagaccctgcgtgagatgaacgccgacaacctgcgcaaggtgccggccgatgcacccacggccttcatcaagccgcgctggaagccgctggtgatcaccccggaaggcctcgaccggaaattctacgaaatctgcgccctgtccgagctgaagaacgccctgcgctccggcgacatctgggtcaagggctcgcggcagttccgcgacttcgacgactacctgctgccggccgagaagttcgccgcactcaagcgcgagcaggccctgcccctggcgatcaacccgaacagcgaccagtacctggaagagcgtttgcagctgctggacgagcagttggccaccgtcacccgcctggccaaggacaacgagctgcccgatgccatcctcaccgagtcagggctgaaaatcaccccgctggatgcggcggtgccggatcgggcgcaggcgctgatcgaccaaaccagccagttactgccgcgcatcaagatcaccgaactgctgatggacgtggacgactggacgggcttcagccgccacttcacccacttgaaggacggggccgaggccaaagacaggacgttgctgctgtccgcaatcctcggtgatgcgatcaacctcgggctgaccaagatggccgagtcgagccccggcctgacctacgccaagctgtcctggctgcaagcctggcacatccgcgacgaaacctattcggcggccttggccgagctggtcaaccaccagtatcgccacgcctttgccgcccactggggcgacggcacgacctcatcctccgatggccagcgcttccgcgcgggtggccggggcgagagcaccgggcacgtcaacccgaagtacggtagcgagccgggacggctgttctatacccatatctccgaccagtacgcgccgttcagcacccgcgtggtgaatgtcggcgtccgcgattccacctatgtgctcgacggcctgctgtaccacgagtccgacctgcggatcgaggagcactacaccgacacggccggcttcaccgatcacgtctttgccctgatgcacctgctaggcttccgcttcgcgccgcgcatccgcgacctcggcgaaaccaagctgtacgtgccgcagggcgtgcaagcctacccgacgttgcgcccgctgatcggcggcaccctgaacatcaagcacgtgcgtgcccactgggacgacatcctgcgcctggccagctcgatcaagcagggcaccgtcaccgcctcgctgatgctgcgcaagctcggcagctacccgcgccagaacggactggccgtggccctgcgcgagctgggccggatcgagcgcacgctgttcatcctcgactggctgcaaagcgtcgagctacgccgccgcgtgcatgccgggctgaacaagggcgaggcgcgcaatgcgctggcccgtgccgtgttcttcaaccgccttggtgaaatccgtgaccgcagtttcgagcagcagcgctaccgggccagcggcctcaacctggtgacggcggccatcgtgctgtggaacacggtctacctggagcgtgcggcgcatgcgttgcgcggcaatggtcatgccgtcgatgactcgctattgcagtacctgtcgccactcggctgggagcacatcaacctgaccggtgattacctatggcgcagcagcgccaagatcggcgcggggaagttcaggccgctacggcctctgcaaccggcttag

SEQ ID NO: 57023 - DNA, 213 bp, Acinetobacter baumannii; identical to SEQ ID NO: 25793

SEQ ID NO: 57024 - DNA, 822 bp, Acinetobacter baumannii
atggtggttgagcatgcccatggcctccgtcagcgccgagggcccaatgccaaaagctctctccacaaggcgcacctcgcccctgatgccgggctgcaggcaccaggggcgagcctgtcctttgcgcagggctcgcatgacttcgaatcccttgatcgtggcataggccgtggggatcgatttgaaaccgcgcaccggcttgatcagtatcttgagctttccgtgatcggcctcgatcacgttattgagatacttcacctgccggtgggccgtctcccggtccagctttccttcgcgcttcaattcggtgatcgctgcaccatagctcggcgctttgtcggtattgagcgtggcaggcttttcccagtgcttcaggcctcgcagggccttgcccaggaaccgcttcgctgccttggcgctgcgggtcggcgacaggtagaaatcgatcgtgtcgccccgcttgtcgactgcctggtacaggtaggtccacttgccccgcaccttgacgtaggtttcatccaggcgccagctcggatcaaagccacgccgccagaaccagcgcagccgcttctccatctccggggcgtagcactggacccagcgatagatcgtcgtatggtcgaccgaaatgccgcgttccgccagcatttcctcaaggtcgcgatagctgatcggatagcgacaataccagcgcaccgcccacaggatcacatcaccctggaaatggcgccacttgaaatccgtcatcgttccgtccgtccaatctccgccaagcatgctcaagcttcacgatttttgcaacagagcccacacgagtattga

SEQ ID NO: 57025 - DNA, 603 bp, Acinetobacter baumannii
atgagatttgaaaagaagttgatcttcggggttggaatcaatgactggagcactcccgttcgaaaagatgggaagttaattaaagagtattacttgtggtcaggggtcatacagcgctgctattcagaaactttccagaaacgccaacctgcatacaaaggtgttacttgttccgaggattggttgaccctttcaaagtttgaaaaggatattcaagggaaagtcaattttgataagtgtctcaatgagcggtggcaattggacaaagacatcctctttaaaggaaacaagcattactcaaatgaaactacatgttttgtgcctcccgctataaatctacttttttgcaaaagtgatagtgcacggggtgagtatccaattggcgtgacatttaacaagtggaaaggaaagtttcaggctcagttaaaagttaatgggcacaacaaaatgtgccaaaagtttgacaatgcgttggatgctttctactggtacaagaatgaaaaagaaaaggaaattaaaagagtagccaatctctataaagatcaattggatagcatggtttatcacaccttaatcaattaccaagtagaactaacagattag

SEQ ID NO: 57026 - DNA, 198 bp, Acinetobacter baumannii
gtgaatacagaaaaccaaaaagaaccattgctattcggctctatgacttacacacagatcatgcagttaagagcagcttacaacttagggattaaggatgcagaaacaagagcagcagcgaacctatacgagaaattaagaaagctgaaaatgctagaccagcttaagcaggaagccatgacaggagatcaaaaatga

SEQ ID NO: 57027 - DNA, 186 bp, Acinetobacter baumannii; identical to SEQ ID NO: 46346

SEQ ID NO: 57028 - DNA, 1779 bp, Acinetobacter baumannii; identical to SEQ ID NO: 53686

SEQ ID NO: 57029 - DNA, 2721 bp, Acinetobacter baumannii
atgccttctaaaattaagtttaaacagtcaactctttctcactctatgcatttaatcttaaaaatgcagagtatacctaaacttatttgtagcagcttattattaagtttatgtgttactccttgttatgctcaaagttcggctgagaccgttataccagaagcaaaccagacggtaacagattcattggtacaacaaactaatacaaataacccaagtgatgttccaattaccgatgtcgctactcttgtaactcaagcacagcaacaacaagatagcttggctatattgcaacaacaagaacaatttccgaatcagattgaagaatttaagccaattacgcttgataatcttgaagacttacctgttatgcctgttgatcagaatatggcaaatgaaatttatcgggtagcagaagaggcaaaaaacgaggctcaaaacttccagaatggtacgcaaaaacaaccagaaatggtggtgagtgacgcatcacaagcagaattacatgaaattaatcaggcccctgtaaatattgaccagctcatgcatgagattcaatctgatagtaagattgtggttgaagccaatgaaacaggaaaaactttacctgagcttactgctgccgttgaagaaccacccgaggaaaaaggtttctttagacgtatattcaataaaatccgtccacctcgggtaattccaatggagcagataccccgtattactgctgaggttacgggtgcgccagatgatttagctaaaaatatcaaaggtaaattatctacatttacccaagaatcatttgaagattttaatgcagcgctaccgcaacttaggagcttaagtaatcaggctgctcaagctgtaggttattacaatgccgagtttcgttttgaaaagttaagtgccagtcgcgtacgtgttaatgtaacgccaaatgaaccagtacggattaatgaacaaaacattgaatttactggtgctggtgcaaaacagccacaatttcaggtcattcgtttagttcctgaccaagatgtaggtgatatttttaatcatggcctttacgaaaccacaaaaagccgaattgtcgatgctgcatcggataatggttattttgatgcttattggcgtttacatgacgtaaaagtgagccaacctgaaaataaagcggatattaacctcaagtatgagactggtgagcgttataagcttggtaaggttgagtttcgcatgagcgatccatcaaaaccattacctttaaatatgaatattcttgaaagcatggcaccgtggaaagagggtgatgactatgctttttggcgtgtaaatgttttagcaaataacctgactaactcacgctattttaactataccttggttgattcaattaaacccgacccaattgaaaaaccacttgagttaccacccgatttacaagcgttggtcgatcagcagaatgttgatattgacgaatcgaagctgcttcctttagagcaacaacaacttgccaaagcacgccagttggcttcctcaagtaaagaagtaacacaaaatgtggtagatgaaaaacaatttgccggaactgaaagtgtacaagccgcacctgcatctttaaaagctgcaactgtacaacatgaagaacaagagtctgaacaagaccgtttacaggctcaagctcgggaagaaaaacgtataccagtgattgtgacgttaaatgccgataaactaaatagtctggaaacaggtattggttatggtaccgacactggcgcccgtttacgtagccaatatagacgttcgattgtgaataaatacggtcattcatttgacgcaaacttggagctttcccaaattcgtcaatctatagatgggcgctatagtattccttataaacatccgttaaatgattactttaatattgtgggtggttatgagcgtgaaacgagggatgatattggtccggatgtaagtttactcacggaatcggcagttttagggggtgagcgagttattaaaaaaccactcggaaactggcaacatactattggggtacgttatcgtctcgaccgcctaactcaaaaggggaatgtggatatctctgagctaccagatgcatttaaaactgctgcatcagagcaagaagcattattatttagttatgagacctctaaaacttcaagtaatacacgcttaaacccgaccaaagcttttaaacaaacttataaattagaattaggtagcgaaagtttactttcagatgccaatatggcgattgccacagcgggttggagatttatttattctttaggtgaaaatgatgaccatcagtttgttgggcggtccgattttagttatatttttaccgatgagtttgataaagttccatacaatttaagattctttactggtggtgaccagacaattcgtggttttgattataaaagtctttcaccagaagataatggatataagattggtggacaggctctagcagtaggctctttagaatataactatcaattcaaagagggttggcgagcagctgttttttctgattttggtaatgcttacgataagagttttagtaatccgacggcctatagtgtgggtgttggtattcgttggaagtccccaattggaccaattcgtttagacgtggcttctggtatttctgatgataaccatccgattcgtttgcatttctttattggtccacaactttaa

SEQ ID NO: 57030 - DNA, 2580 bp, Acinetobacter baumannii
atgcgatttgaaaaatttacgaaccgcttgcagcaagccctctcagatgctcaatccttagcgatgggtaaagaccatacagctatagcaggtattcatattttgagtactttattggaagagccgtccaatattagtttgttgcaacaagcaggtgcacggttacctgaacttaaacaaaagctagagcaggctttaaaagatgctccgactattgctaacccgacgggcgatgtcaatttaaacccagaagcagttaaagcactcaacttggcagatcgatacgcgcaaaaagctggcgatgaatttttgtcaactgactgggttttattgggcttggcagaaactggtgaaacaaaaaatattttaagtgccgtaggtgtaactcccgacagcttacgcaaagtaattgaaaatattcgaggtagtgacaaagtcatgagtaataatcacgaagaccaacgtgactcacttaataaatatacgattgatttaaccgagcgggctttatcggggaaacttgatccggtgattggacgtgatgatgagatccgccgtaccattcaggtcttgtcacgccgtactaaaaataacccagtactcattggtgaacctggggtaggtaaaaccgctattgttgaaggtttggcacaacgtattgtcaatggtgaagtaccagaaggcttaaagaataaacgtgttttatcgttagatttaggttcattgcttgcaggtgccaagtatcgtggtgagtttgaagaacgtttaaaagctgttttaaaagatttggcgaaacacgaaggcgaaatcatcttattcattgacgagttacatacactcgttggtgctggtaaaggtgacggcgcgatggatgcaggtaatatgttaaaacctgcgttggctcgtggtgagttgcgctgtgtgggtgcaacaaccttagatgaatatcgccaatacattgaaaaagatgcagccttggagcgtcgtttccaaaaagtgctggtcgatgaaccaagtgtagaagataccattgcgattttacgtggtttgaaagaaaagtatgcgactcaccatggcgtacagattttagactcagcgattattgctgcggcgaaaatgtctcaccgttatattacagaccgtcaattaccggacaaggcgattgacctgattgatgaggcagcttctcgtattaagatggaaatcgattctaagccagaagcacttgataaacttgatcgccgtttaatccagttgaaaatgcaattggaagcggtgaaaaaagatgaagacgcaggcagtaaggccgaagttactcatcttgaaaaacagatcgctgaagtcgagaaagaatacaacgatctggaagaagtgtggaaagctgagaaaacactggtagaaggcactaaacaagctcaggttgaacttgataaagcacgtattgcttttgaaaaagctcagcgtgaaggcgatttggcagaagcagcacgtttgcaatatggcgtaattccagagcttcaaaaacaattggagcaagacgaagttgctgaagaaaacgaagagccaaaactcattcgtacaaaagtaactgaaaatgaaattgccgaagtcgttagtgctgcaacaggtattccagttgctaaaatgatgcaaggtgagcgtgaaaaactccttcatatggaagagttcttgcatgaccgtgttgtagggcaagatgaagcagtcgttgcggtatcgaatgctgttcgccgttcacgtgccggtttgtctgacccgaatcgtcctagcggatcattcttgttcttaggaccaacaggtgttggtaaaactgagttgactaaagctttagctaacttcttgtttgacagtgatgatgccatgattcgtatcgatatgagtgaattcatggagaaacattctgtcagccgtttagttggtgcgcctccgggttatgtaggttacgaagagggcggtgttttaaccgaagctgttcgccgtaaaccatatagcgtagtgttgtttgatgaggttgaaaaagcgcatccagatgtcttcaatatcttgctacaagtattagacgatggacgcttaaccgactcacaaggtcgtgtagtggactttaaaaacacggttattgtgatgacatcgaacttggggtcacaagatgtacgtgaacttggtgaaggtgcaactgatgatgaagtgcgtactattgtaatgaatgcggtaagtcagcatttccgtccggagtttattaaccggattgatgagctggtgattttccattcactcaaaaaagcacagattcgtggcattgccgatattcagttggaccgcttacgctcacgacttgttgatcgtgatatgagtttaactgtagatgacagtgcatttgacttattgattgacgctggttttgatcctgtatacggagcgcgtccattgaaacgtgcaattcaacaacaggttgaaaatacactagctcaaaaaatcttgtcaggtgactttgttgcgggtgataccattttagttaaaggcgaaaatggtcacttagtgtttgataagctgaaactcagctaa

SEQ ID NO: 57031 - DNA, 189 bp, Acinetobacter baumannii
atgcctgttgacggagtgcgtattgctctggtgattcttttaataagccttgatcaagctgttcataaaaccactttcggtcattctccgttatttcttcacttacagactctatttgttcaggtagataagctttgtattgttcggcataggcagatggagaaccataagggaatttatgtcttctaa

SEQ ID NO: 57032 - DNA, 762 bp, Acinetobacter baumannii
  misc_feature (14)..(43): n is a, c, g, or t
atgacatgtcttcnnnnnnnnnnnnnnnnnnnnnnnnnnnnnnaaggtatggatcatgacatgtcttcaatgaaaggtatggatcatgacatgtcttcaatgaaaggtatggaccatgacatgtcttcgatgaaaggtatggaccatgacatgtcttcaatgaaaggtatggatcatgacatgtcttcaaaaacaatgagctcttctggatcagatgaagtggtttacggatgggcgaatgcctcaaccccagctggactaaaagcacttcaatatagtgatctacaatctttaacccctcaaaaagatacccgtgctccagaacgtgaaattgaaatccgcttaggtggaaatatggagcgctatatttggacaattaatggtaagaagtttaatgaaactgaaccatttaaagtgaaatatggtgagcgtatacgcttgaaatttgttaacgatagtatgatggctcatccgatgcatttacacggcatgtttatgcaactggaaaatggccaagatccaagtaatatgccgaataaacatacggttattgttccaccaggtaagacagttacaactttattaacggctgatgagttaggtgaatgggctattcattgccatttgctctatcacatgtctgctggaatgatgaataaacttattgtggcaaatgtcgatagtaatagtactgattcgaaagatgttgttgctcaacctaatactaatgataagggggtaaatcaacatgcgcaccactaa

SEQ ID NO: 57033 - DNA, 2700 bp, Acinetobacter baumannii
atgctggtcaagccttcatttaaaaaaagattgctacttacaacattattatctttatcggcgacacagatttttgcatctaataacagtgaacaaatcccgattggtaaattacccgagtgggtcgtacccgaatcttatgatttagattttaagattgatcccgcacaaaaaggctataccggtaaaactacgattcatttaaagctggctcaagccacagatcacatctggattcatggtaaatctttgacggtgaaagatgtgaatatcatatcggctgagggtgctaaaaccaaagcaaaatatgagcaagcctctgaggtagatggggtaagtaaaattaaatttgccaagaccttgccagcaggccagtatcaactcgttctagattttaatgcggcgtatgaccagcaacttgacggtatttataaaatcgagtttgagggtaaaccttatgtgatgactcaaatggaagcaattagtgcacgccagtcatttccgtcatttgatgagccacgttttaaaacgccgtttaatattcgtttgacgattccaagcaaatattcagggtttgccaatacccaacaaacttctgagcaagcagagaagtcgggttggaaaacactcagttttgcacaaactaaaccactaccaacgtatttacttgcactggctgttggaccgtggcaattacaaaaagggcctgatattggtgcaacttcatggcgtaagcagccgattcagttacgtggtattgcgcctgatgctaaagctgaaaaaatgcagcatgccttatctgaaacgccagccattttaaaaactttagaagattattttgcctttggttatccatttgacaagctcgatttactggcagcaccagacttcgccgctggtgcaatggaaaacccggggctgattacttttagagactatctaatgttgctagataaggactcgccagtctcttttgtacagaattcatttaacgtcaatgcacatgagctggcgcatcaatggttcggtgatgtggtcacgatgccgtggtgggatgatttatggctcaatgaatcttttgctacatggatgcaaagtaaaatcactcaaaaattacatcccgaatttaatgctgacctagaacgtattgcagataccgccgatgcgatgaaaagtgatagcttggtgagtgtgcgccgtattcgccaacctattttaagcaatgccgatattcaaaccgcttttgatggtattacttaccaaaaaggtgctgctgttttaaatatgtttgaaagctacttaggcgaagaaaaattcaaacaaggggtacgcaattatattaataagcaccaatatggtaatgcgacagccaatgatttaattagcgctttagcagagcagtctggacaaggtgagcgttttgccagagggatgaaaagttttcttgatcaaccaggtgtacctttaatcaatacttcattacagcaagaaggcaataaagtctttttaaatgtgaagcaaagccgttatttacctgtgggttcaaaaggtgatgcaagaagtctgtggggtgtaccattatgcgtacgttatgaagttccaaatgcagccagtaaggtccagtgtgagctggtagaccaagcagaatccaagattgaactcaaaggtgctagccttggcagttggtatattccaaatgcaaatgcggcagggtattaccaatttagtttgccacaaaaagaatttactcgtttgactgccgctacagaaaagctttctaacactgaacagttggcttatgcctatgcaatttcagctgcatttaaccacggtgatattaatttgttggctgtcgtagatgctgcgaagaaatttgccaattcggatagccgacaaattagtacagcgttgttttcccagttaagtacgattcatcgtcatgtattgaaaacagaagctgaacgtgaatattttagaaaagttttggccaatttatatttaccaaaattaaatcagttgggttatgtcagcaaaacaggtgaatcagctgaggacagtttgtggcgtagtgaattggttagatttcttgctttagatattcaagtttcagaagttcgtacacaactgttaaaacagtcagatgctctctttgctcaaaagcagcttaattttgctcaagtaacacctgaattattgccaactattttagctgtacgtgtacaagaaaaaggccaacctgcttttgatcgtttatctggagagctacaacgcgtgactcaacctacacaacgtcttgcaattcttacggctctaggttcagcaaatcaagaagcaacacgccaacaagcacgtcagttgattttgaaccctcgtgttaaagtcggtgaagtccgtaccgtggtcaactccatcaataattatggagatgaacaaggggggctatggtcgtggtttaaagtaaatcatgacgccgtgtttgatcgtttaggtaaatcttcggctgggcgtttccctgcaatgttcagtggagcagcatgtagccaacaacaagcggcacagttaaatgacttttttgcaccacgaactaaagaattggtcggggttgaaagaggattgaaacagaccaaagagcgaattcaactctgcgaatctttggtggcaaaacaagatggatcaattgtgcaacagttaaagttgtaa

SEQ ID NO: 57034 - DNA, 3237 bp, Acinetobacter baumannii
atggataataagaaaagtaactttattgaggatagtcgtattcttgcattttggcgtgatttagaaatatttactataccttctgctccaacttcaaaagataataataaattcataaaaataataactttaagatttggtgagaaactaccttgggaaatggtggaatatcagccaacattaaaggatatgtatatccatacagtttatattggtgtagcagatcaagaagaattgactagacttgttttgcgtaagattgtaagcaaagagttgagtgataaagaacgtgaacgtatttcgggtactgggtggttagcgtcttttactgtaaacgaaaatggatgtttaagtgcagatagctatgcaccagccagttatgtatatggtacccaggctttaagtcacggagagccccttattgacttaaatgcaagacttactagagctaaggaggagtttgctcagcgttgtcatcgcttagttcaattgaaagaggattatcgatgttcatggaaggatttgcaaagtgaaacggatttaattagatctatttttgctcatgatgagcagattggattagattggcgagtcgtagttgctacaaagcgattacctagaaaaaaagcgttagaggatattgaacaagaggttaattatctgaactcattttatttagatgatttagataaaatgctgaaacaaagttcattaagtcaaccatttggccaagcgttatctacatatctcggggcttcaattattcatgataagcgaatagatattttaaaaaatcatgaaattatgggaaaacttgtctgtgcagccaatttacctattgcgcgttggcctaacgcaccagatagacctttagtgttggcacagcaggcggtagttgctcatatagaaaactcattgaaaaatcaagatggtattctcggtgtaaatggaccgccaggtactgggaagacaactttactgtgcgatgttattgcgacggttattactgacagggctaagcgaatttctgcactttctacacctgaagctatatttaaacagcctattcagcttatgggacgaagattttcacccattgttgaggagttggtgcgagatagctcaatagttgtcagtagcaacaataacaatgctgtaaaaaatatttcacaggagttgcctgctactagtaaattagacaagcggtatgaaacagattctttatatttctctgaagtcataagtggagtttttgatagtcaacgagttcaggatgaaaatcaaaaaacaattcctgcatggggtttaattgctgcggctttaggtaacagtacgaatcggagatcttttgctcgtgctttttttaaagaggatcatattgctgagaatgatgaggaggagagcaaaaattcatttatatcgatgaaacaaatacttgaggatgcaattcctcatattagtgcttattgtcggaaatggcacacagtcaaaagtgaattaattgaattaattgaagaattagagaaaaagcgttcagttttaataaaagcagagcaggcttcacttgttatttcagaatgtatggagaggaagaaagaattatcggaaacgattacgctcaaaaatgaagaattaaataagcatcaagatttatatcgtcaaatacagggagagttacaagaccaggctattttaatacaatctaaacagcaaatattagggcaaattcagatatcacatggacctcggttatgggatcgtctatgtgcattatttggttaccggactcaccgtacagaagtctatgataagcgaattagtgaagcaactttatcattacaagaaactaccgctcgctatgaaaagctcatcaatgataagacatcaagccataaaattataaaaatttgcgagcaggagttattgaaattaaatgatgagcttcttgtaataaggcaaaaatgcgacaagttgatttccgatttacaggcggtacacgctttaggggtaagacatgtcattgggcctgatttttggaaattatcgtttgaagaattgcataggacttcagtaaatacttcagaaattatcgatgatattcgtgcccgtatttttattaaatcgatacagctacacagactaacgattttatctaatgccaaaagatttttaagtaatttgagaatggtcgggcaaatgctttcaggaaataccaaaggtctttcccttcatgatcgtcctgtaatttgggacagcctgttttttgtggttcctgttgtttccacaactttagcttcatttagtcggctttttgcaggcatgggacaagatagtttagggtggttattaattgatgaggcaggccaggctacacctcaatctgcagcaggtgcaatctggcgtagtaaaagggctattttaattggtgaccctttgcaggttgaaccggtatttacactaccagatagtgtagttgagattctacgcaaacaaaatgatgtggatttatcttggtctcctgtcttcgaatctgtacaaacaattgctgacagaataacgccatttggttcatggattgatgatggtagtggagataatcaatcaagaatctggactggtatgcccttaagaacacatcgtcgttgtgatgaccctatgttttctattgcaaacagtattgcttatgggggtcaaatggttcaggggcgtgttgatcgcgaaggaaagcctacaccagcaaatatagcttatgatattggtgtgagtacatggatgcatgtagattcaatagattttgctcatcctgttaattctgaagaacttgatgtattgattgattctttaagaaagcttgaagaaaagcgaaaaactacaattaatagttcaaaaaataaaatatatgtcatttcaccttttagaaaagttattcaagcgtgtaaaagcagtattgaagaggcaggaataaaaggcattgaatgtggcactgtacatacttttcagggtaaagaggcggatatcgtatttttagtattaggtacagcgaaggatcgtaccggggaaggagctagagcttgggcttcctcaagtccaaatttattaaatgttgctgtgacacgagccaagagtcgtttgtatgtgatcggtaatgtggatacttggtctaaaatggactatttttcaacactcgttaatatacttccagtgaaaacggtaaatatatctaagacttatacttaa

SEQ ID NO: 57035 - DNA, 507 bp, Acinetobacter baumannii
atgataacttcgtcttactttaaaaaacacaagaaacattaccgctccctaaaggaccagcagcttacaatcgcagccaaagcaaatatctttatttgtattattttttgcttgttttggactatatattttgcatttgcccaaatgtgggtgattgtttatatggatatctgtttcacactaatttccatatttagtttttttcttatttatataaaccgtatttcggcaggaatacttttatcacaagcagttctgctggtgtttccagtggttttttgcttatttttcgatgttgctacgcctgatcgccctcgagtggcccatttgtttttacctgccggagcgatattgggatatttgaattaccgtagagagccaagcttcttacaaattgttttaattttactgtcgattgctgctttatattttttagtggaagctcttttactctcgatagtgccatacctttatcagaagatattcgtgatcatggtgggtggatag

SEQ ID NO: 57036 - DNA, 297 bp, Acinetobacter baumannii
atgatgcaatttaaaaacaaagtgaaaatcttaggtgctaaggctgttgattttaaaactgacgatggtcgtcattatgaccatgtagctttgtactgtgaggttccacttgatcaatcgcaaggtaatgcggttggtaatgcatgtgaggtttttaactggcaagaccgaacaaatctagtgttgcttaagcaacataaatttccgttagaagctgatatcacatttgaaatggttacttcaggaaaatctatgaagtatgtcgttaaacaagttgagttgccaaaggtaatttaa

SEQ ID NO: 57037 - DNA, 282 bp, Acinetobacter baumannii; identical to SEQ ID NO: 53026

SEQ ID NO: 57038 - DNA, 138 bp, Acinetobacter baumannii
atgagtaaatttaaagctggtgatgttgttgagttaaactctggcggcccggtaatgacaatcttggaagataataaaaaagaatttttggaatcgaatatagatacctacgaaatgttagaggcatttaccatttga

SEQ ID NO: 57039 - DNA, 885 bp, Acinetobacter baumannii; identical to SEQ ID NO: 52892

SEQ ID NO: 57040 - DNA, 1557 bp, Acinetobacter baumannii
atgcatacaattttaggctacttgtggcagtacatcacgaatcctaaagcaattatcgccttgtcattgttcgtggcattgatgtcttcctatacttcaattcctcgccatatattttgggctttagcatctgcatatgctttagggctcatcgcttatggaatttattggctaattcagcgtaaaaagcatgctgtccaaggtgaagaacttgcgcaagcgattgaaaaggatacacaagcagagtacggcaaaaataaagataaagaagagctgcaacttattagccaacaaatgaaagaatctattcaattgattcgtaagtcaaagctaggcgataaaaaggggaacgcagcactatatgagttgccatggtatatggtcattggtaacccggctgctggtaaaagttctgcgatctataattctggtttaaagtttccttttgaagaaacccatcaaaaaatggtttcggctggtttaagcggtacgcgtaattgtgactggtttttttcgactgagggtattttactcgacactgctggacgttattcggtctatagtgaagatcactctgaatggttaggctttttaaatatcttaaagaagaaccgttctaaggctccagtaaatggtttaattcttattgttagtattgctgagcttgttagtcagagtcctgaacactcattaaagcttgcgaaaaatttacgcgctcgtattcaggatttaaccgaacgtttagaagtggttgtacctgtatatctagtcttttcaaaaatggatttgatcgcgggttttaccgaatttttcgaattctatgaagcacaagaatataatcaggcgtggggcgcaacactaccatatgagcaaaactcttctcataatgctgtagatctttttgagaaacactacaatattctttatgacggtttaaaaggggtcagttcaactcatcttagccgtcgacattctcaaaatatctcacctagtgtgatgactttcccattagaatttaagacattaaaacctgcattaaaaagttttattgcgacactgtttgaagataacccttaccagttccaaccagttttccgtgggttttatttcacaagtgctttgcaagaaggcgtaatagaaagtccaatgactgagcaaattgcacaggaattccagctttcccaaattgctcaaagtgaagtaaaagatcaactaaaaacaacgcctaaccatggttatttcttaaaaggcttgttttcagatgtcattttaaaagataaagatctggttaagcagcatgtcaatacaagcaaaaagcgtcagcgttatattgcatttattggtgctttagctggcgtatccattattctaggtgtgtgggtttggtcatatcgtaacaatcaacaacttattgctgaagttcaagctgatttaaataaagttgttcaattggaaaagagttcaggtcaacaattgtcgactcaattagaggccttacttatcttgcaaagacgtctacaacagttagatgaatttgatgaaaatagaccactataa

SEQ ID NO: 57041 - DNA, 525 bp, Acinetobacter baumannii
atgagtgcattagatttagaccaattaagtgaatatctagatggagaccacaatgagtatggtctagactttgctgcaactcatggatttttgtgtgcaattgcagtaggtcctcagtttgaccgttggttagatgaattgttcgaaggtaaccagaaaaaggttccggctgaaattattcaacaaatcaaggtttggctagagtcgattcgtcaagatttagcaaatgaaaatgggattgaatttccatttgaagttgaagaagctgacgttgaatcaagcttaggcgattggagtgtagggtttgttgatgcaatgttcttaaacgaagaggcgtggtttgcccctgagtatgaagaacaattggttgatttgactttaccaatcatggtttttagcggaattgatgaagaagatccacagatggaatctttccgtcgcaatggacagttaatggatgaactagcagaagaaatcccagataatttgaatgagttatatttgatgtaccatactccaaattaa

SEQ ID NO: 57042 - DNA, 642 bp, Acinetobacter baumannii
atggatcagatcagaccatttcctccaactgattttatggatcaggccgaagaagaggaagcaattcgtttaatacccgctccagatctaaagaaatgggttgtggccaactacttaacgattggtgggcctctttataatccagatcatgatcatattgctgagttacttcatgataatgaagagttcttggcatttgcttgggcctcttctgcatataaaagcaagcaggcgatggtactggggcagtgtgaaaaagtaatgtttaacgtcggtggctggcgtaaagctagacaagagcaacagatgcgtgactggttcggctttgtgccaacatacttaataactgtcgacgcttctttctgtgagcgtgcaaacgatacagagttctgttacttacttgaacatgagctttaccacattggagtgatgagagacgaggacggagaaattgtttatagtgatagttctggtcttcctaagcactatcttgcaggtcatgacgttgaagagtttattggcgtagttaaacgttatggaccaagcaaaaatgttaagcgacttattgaagtcgcaaaaaatccgccgtttgtttcgaatcttgatatttcaagatgctgcggaaattgtgtaatcaattga

SEQ ID NO: 57043 - DNA, 1317 bp, Acinetobacter baumannii
gtgaaaaatatcaaaacattagttcttgcaatgagcactatcagcttaactggtgtagttatgccagctcatgctgctactgatgcagaagtagatgctttacgcaaagaagttagtgagttaaagcaactggtccagcaattatcaaatcagcaaaaagcggtaactgtagtaaatactctaacagtgccaccaactacaattacagcaagctcacccgttcctcagagcaaaccaggttggatgcaaatgcctgatggccaaacgcaagtcaagctttatgggaatgtccgtgtagatgcaacctatgactttaaggggtcaaatggcagcatttcaaatggtgctaactatcctttgaataaagatgacccaagacaggactctttaaatgtatctgcagcaactacacgcattgggttagatcttacccgacctacacaatacggcgatttaacaggcaaaattgaagccgattttatgggaggcaatggtgataatggcagtggaactttccgtgtacgccatgcctatatgtctttaggcaaatggttagcaggtcaaaccacttcacctttcgtcaatacagatacttctccggaaacactagactttaccggtgcagtaggtacaggaaccacacgtactgtacaggttcgctatactcaaccaattaatgctcaacaaaaaatattagttgccttagaaggtggtgatgttgaaaaagtgagtaatgctgctggaggaagccgtttccctgctctaacaactcgttatgatttcaaaaccgcagataataaaggcttattacagcttcatggtcttgcccatgaaaatcgagtagcgcctaaagatagttcatctgaagaaaaatttggctggggtgtaggcatcggtggcaagtacgatatcacgcctcaggatagtgtcgttgccaactattatcatgttaaaggtgatggccgctatttatcttatagcaactctgcatatgcatacgatacaactactcaagatatcaacttaggtgaatttgatagtgcggtgatcggctaccaacggaaatggagccctattctccgctctactttcgcaataggcggtattcaatataaagataatagcgtctatgcaaatagcaatttaaccaatactagctataacaaagaaatttataacgctttggtcaacttaatctggaatccggttaaaaatattgatttaggtgcagaatatacttacggccagcgtgaaacttttgcaggtgataaaggtgattactcacgcataaatttattggcaaaatataatttctaa

SEQ ID NO: 57044 - DNA, 492 bp, Acinetobacter baumannii
atgttctcaactacacttatggatttatcaaaactaagaaagcatctttgtgtacctttatttttatgtgcaattttgactgaattgacaatgtccaaggatccattgtacttaactttaagtacgcttggagattccttatttattaaaattatggtctataccttaggatgtattgtacttgcatttataatttacttctttgtagctttatttgaagaatctctattttatctagacaattatttaccaaatactttgttcttttgtggttatgctctcattggtttaggattacttgtaattgggaattttgtaacaggtctaccaagcagtgtttttaatatttattggcattttggctttcttgcctttggttttgatcttctatcatcccatattgagttcaataataaaaaaaccactagtaagctaaattttatgattcaacaaaagctactttttataagtggcttttgtataaaattttga

SEQ ID NO: 57045 - DNA, 2310 bp, Acinetobacter baumannii
atgaatgtaaacaataagattggggttaaatcacgtaatcacatacgttcaaaacaagtactttttaagatgacaccttgttgtcttgccatatcggctatttttgcacagcaggcttatgcagaaaccgtaactcaaacggctgaagtaagcgaaaatgcaacacaaaaaccagtaacccaattgcaaaagattgtagtaactgcgactcgtacaccaaaaaatattgcagagattgcaggtacagttcaatctattgatcagaaacaaattatccagcaagctacggcgggtcgtaaagttgctgatattcttgctcaacttgtaccatctcttgcatcaagtagtggaacaacaagtaattatggtcagacaatgcgtggacgaaacgtattagtcatgatcgacggtgtttcgcaaacaggttctcgcgatgtttctcgtcaattaaatagtattagtcctggtatgattgaacgcattgaagtaatttcgggtgcgactagtatttatgggtcaggtgctactggcggtattattaatattattactaaaagagcagatacatctaaaccacttagctttgaaacaaaagtaggcattacatcttcagatacattccgtagtgacggcttagcttatgaagtcggacaatctgtctcatttaataaaggcaatatggatggtttcttaggggctaattttacaagtagagggtctcaatttgatggaaatggcgatagaatttccttaagcccttggcaaggtagtacgatggacactgatactatcgatgtaaatgggcgtttaaatttcaatttaaatgatactcagacattgagctttggtgcccagtactataaagataagcaggatactgactacggaccggattactcttatttaccgacaacctctaagagtaatgatgctacaacgccaacttataaggcaattaaaggtttaaagcttagtaatccattatttaccgagcgttatgctgttaattcacagtatcaaaatcaagactttttgggccaaatactaaatgttgaagcatattatagaaatgaaaaatcacgtttcttcccatatggcctatcaaataaatccgtgacttctgtaaaccagtctcaatcagaaattgaagtagctggattacgttcaactatgcaaaccgatcttaatatcgccaatcgggatatgaaaataacctatggccttgattatgattgggaaaaagataagcaatttgttgatattttggcaactcaatatccttatttagtgtatacgccaacaggccaacgtaaaggttatggaccaaacactgaaattcaaaatattggagcatttgttcaaagcgattatgcagttacggataaattgaacttgcaagcaggtattcgttatcaatatattcaagcggatactgatgcttatattcctagccgagagacaacaatggttccggcaggatcaacacatgatgataagccgttatttaatttaggtgcagtttataaacttacagatgcacaacagctatatgctaatttctctcagggcttcagtttccccgacgtacaacgtatgttgcgcgacgtttctacttataccgtttcaacagcaaatctacagccaattacagtaaatagttatgaactaggttggcgtttgaatcaggatgatggcttaaatctgggattgactggtttttacaatacttcggataaaactgtccaattcaacaatcgtgcagcaaaggttgtagatacagatcaaagagtatacggggcggaagcaactattagttatccatttatggaaaattataaggtcggtggcactttaggatatacccgtggtcagtataaagacgtggcgaataaatggcatgaattaaactcatttacggttgctccagtgaaaggaaccctttttgctgaatgggataataatgaagggtatggtgttcgtgttcagatgcaagctattaaaggaacaaataaagcttataaagatgaccgtgaattagccgcatttgcaacaactcaagatgaagctttccaaaacgctgtaaagaatgatgcgaatagtgctgcgcaaatcaaaggttataccactatggatgtattagcacatttcccggcttggaaaggtcgtgtagattttggtgtttataatgtgtggaaccgtcagtatcgaacagtatttgctcagcaagcagccgtctctaatgctaatccgttgttagcaatccctgcagaaggccgtacttatggtttaagttatacttttaactattaa

SEQ ID NO: 57046 - DNA, 258 bp, Acinetobacter baumannii
atgagtcatctaaaaaaacaagaaaattttaattttacgtatagcaggatcttttttatctgtttagccgcttattgctacagttcatggctcagccttgttttggctaaatggttaccttttgctaaagcagagaatgtttatttttcggtatttatcagttttatcttttttattttatggttttggatgatcaatagcttaggtgtagtgttattagtgagctattggctattagctaaatggggagtggcttaa

SEQ ID NO: 57047 - DNA, 420 bp, Acinetobacter baumannii
atgtcggaatcgaagtggatcgagcattaccgggccggagcgtggacggtcggcgaagtaatcgcggcgggcgcggcgtggatcgaggcgatggacccggaccattaccggctgcgcttctttccgcaccgggacgcggagacgttcaccgttggcattgatgccgagtggaccgacgagcagcccggcgaactggcgaactacacgccgagctatgagagcggcagcagcgattgccagcccggcgaggtgacgatttccgatgacggcctgttgtccgtcatgccccggcagcggtcggcctcccatgtcgtgatccgcaccggctggacggcccagcttccccccgaggcggtcgagccgatccggcgcgctatcgcgctggccgaagcgaaattgtcgcgggaggcccaagcatga

SEQ ID NO: 57048 - DNA, 354 bp, Acinetobacter baumannii
atgaacaaattgattttcacgggccgggccgcagcagcgccggaattgaacgcctacggcgacacgaaggtggcgcgcttccggctgatccgtaacgactatgccgggaaggacgagaacggcgagcgcagggagaagcaggtaactatcccgttcaccgcctttggtgggatggccgaaacgctcgccaagaacgtgatgaccggcgaccaactcgtgatcgaggcgaagatttccaacaacaattacaccgatggcgagggcaaagaacggtacgactacaactttgaagtcgtggccttcgattacggagcgccgggagccgagaagcgcaagaagctggccgagggctaa

SEQ ID NO: 57049 - DNA, 2019 bp, Acinetobacter baumannii
atgaccacattggtaatcgtagaatcgccgggcaaggtgaagaagatcagcgccttgctgggagcgggctacaaggttgtggcgagcgttggacacgtccgcgacttgccgccgaaggaactagggatagagccgccggacttccgcccgcactatcaaccgaccgagcgcgggcgcgacgtgttagcccggctgaaaaaggacgtggccgccgccgaccgtattttgctggcgaccgaccccgaccgtgaaggcgaggcaatcgcgtggcacttggccgacgcgctcaagctgcgcgatccgcagcgcatcacctttacggccatcacgaaagataaggttcaagccgccgtcgccgcgccgcgtcgcatcgacatgaaccgcgtgcggtcgcaagaggctcgccgtgcgctcgaccgcatcgtgggctaccgggtaagcccggccctgtcagatcgggccggacagccgctttcagcggggcgcgtgcagtctccggcggtgcgccttgtggtggaccgcgagcgcgagattgcgagcttcaaagtcaccgagcattacggcgcggaactgacattcgacaacggcgacggcacggcatggcgggccgtttgggacaccaaaccacacatggccgagggcgaaagctacatcatggacgacgcgcttgcgctgcgcgtggcggcagtgcgccacgtcacggtcgccgaggtcgccgacaccgagaagggccgcgcaccggctgcgccgttcacaacgtccacgttgcagcaggccgccgggcagcggttgaagctgcgaccgaaaaagacgatggagcttgcgcaacgcctctatgaacaaggcgcaatcacctatcaccgcaccgacgcgcccaacatggacgacgccggtatggaggacattgcagcctatgcccgcagcgcgggcttgccgctggccgagaagccccggcgctggaaagccaaggaaggcgcgcaggagggccacgaagcgatacggcccacccacgcggcggaccttgaggcgggggaaacagacgatgaaaaggcgctctatcgccttatctggcaacgtgccgtcgcctcgcagcttgccgacgcgatttatgccgtgcgatccgtgcgcctcgccggggatgcggaagggctggccgtggcgttcacggcgacaggccgcaccctgcaatcgccgggatggatggccgtctatgcggcggatgccgacgacagcgacgacgagggcgaagcgtcgaataacccgattccggcactggccgagggcgcgggcttaaccgcatcgagcgggcgacttttgacgaagcacacgaagccgcccacgcgctttaccgaggcaacgcttgtcaaggaaatggagcggctaggcatcggacggcccagcacctacgcggcgatcatcgagaacatcacgggtcgcggctacgtcatagaagggcagaaaggctatctcacgccgtcacccatcggcgagacgatccgcgatgcgcttgtaggccggttccgcttcgccgaactcgattacacgcggggccttgaggacgagctagaccaaatcgcggaggcgaaggccgactatcagggagtcatttccgccgcatggtccgcgctcgacgacgagctaggcaagctggacagcgccggaatcgccgccgcccatccttgcccggcgtgcggcaaggccctgcatcgccggaaggggcaatatggcttcttttggtcctgcaccggctatcccgagtgcaagacctcgctccccgacgacaagggcaagcccggccagcggaaggccccgccgccgtctaccggcttccagtgcccgaagtgcggcaaagagcttgcccgccgtcagggcgtcagcaagccgaagaagaagggcatgaaggggcggccctacgatttctatagctgcacgggctacccgaagtgtgacgccagctatcagaccgggccggacggaaagccggtttttgagggggcaggacagcaagccgccgagtag

SEQ ID NO: 57050 - DNA, 675 bp, Acinetobacter baumannii
ttggatgcggtcgcgcgcggcttgcgcgaacgctggccggatcggttgctattgattgcagcggacaatgaccaccgggccgagaaggagctacggccagacggcaagccccgcgaaaatgttggcttgaagaaggcacaagaggcggcggccaaccataagggtgtggcactggtgccgcccttcgccgatggggacaagggttccgattggaacgactacgcccagcagcacggcgacgaggcggcgcgtaaagagcttgagcggcaggtggcgcaggcaagaaccgaagcggccatgaacgccgagcgcatgatggtgattgcgcgcgagcgtgaagccgaggcccgcaacgaccccacgacgagcgccgacgacgcccttgtggcacaggaaagggccgctgcgaatgatctaatggcccgcgccgtagcaggtggcctcaaggcccgcgccgaggctagggacgcccttgtggcaaacgccacaggcgcgccgcgtcccgtggccgctgtcaatgccacgatgggccgcaccaaagccgagcaggccgacgaattgaaggagcagcggataacggttttcgacggacaaaacgtgtccacgaaaccggagcagcagaaggcctcacagccgcgccgtgctcgagcgcggggatatgacgcagacctttaa

SEQ ID NO: 57051 - DNA, 465 bp, Acinetobacter baumannii
atggcaaccacattagagctctggaataaagtaacagcttttcctaaaggcaagtggactttctctcgtatgctgtgcttaaaagcaccttatttcggcagtatttcccctctttttattgagttaaaaccgaattattgcgaaatttctattaagaagaagcgttctgtgcttaaccacattggaacagtccatgcgattgcgatgtgtaatatggctgaactggcgggtggaacaatgacagaagttactgtcccaactacccatcgttggattccaaaaggaatgactgttgaatatttaaaaaaagctgaaacagacttaattgcaattgctacaccagtggaagctgattataactgggaaaaagctggagaatatttagtcaacgtagatatttacgacactcacaaagataaagtatttcatgccacaattaccatgtggatttctaaaaagaaataa

SEQ ID NO: 57052 - DNA, 633 bp, Acinetobacter baumannii
atggtatctgctcaaaatttattagaacgcttatatcctggaagaagagctgctttaaaacgacaaatattattagatgctttagattgttttttagagcagggcattgaaacgactagtattgaaatgattcgtgccaaatcagaaagtagcgttggggcgatttatcatcattttaaaaataaagagggtatagttgcggccttatttttttcagctttagatgatcaaacagctctgagagatgaatatttaaaacagtccaaaacattaaaagatgttgtagaagctctaatttatagttatgtggactgggtaagtgagcaaccggaatttgcaaaattcttaattactgcgcgttttaacattatagagggggaggaacagcaacaacttacacaaaaaaataagagtagaaaccaaaagatatttagcttgatttcgaactttgaagaatttaaagcatttagtttaattccacatgaacttttgctttcattagtgattggttctacagagagctattgccgtgcgtggttatcacaacgtgtaaaagctgaccccaaagactatagagaaattctggcaaaagcggcttggaattcattacaggatttgcgtttagaacattaa

SEQ ID NO: 57053 - DNA, 702 bp, Acinetobacter baumannii
atgcgtactttagcaatatctactcttctccttggtacggtactcagccctatggtttttgcccaagatgataatgcccttcactacaatattgtaaatgttcaagcagaagcttctcgccaagtttcaaacgatgaaatgcatgcaactttatatattgaaaaaagcaataagcagcctgcagaactttcaaaccaaattaaccagttaatgaaccaagcactcgcaacttcgcgtaaatacccacaagtgaaagtggaaactggtgcccaaagcacttatccaatttatgacaatgacagtaataaattaaaagaatggcgtggccgcgcggaaattcgtttagaaagtaaagatttcaaagctgctagccaattaattaatgagttacaacaaagctttcaaactcaatccattaattttagcgtttcagatgagcaacgtaaaaaagttgagaatgaattgatggtagaagcatctaaaaactttcaacagcgtgctcaaatgctgactcaagcatggaataaaagccaatattctttggtcactctaaacctgaatacgaataactattttcctcaacctgtaatgcgtgccagcctagctaagttcgctgctgctgaagcggcaccagctcaagacatggctgctggtgaatctaaaattactgtaaatgcaaacggttcaatccagtttaaataa

SEQ ID NO: 57054 - DNA, 918 bp, Acinetobacter baumannii; identical to SEQ ID NO: 53014

SEQ ID NO: 57055 - DNA, 1020 bp, Acinetobacter baumannii
atgctgccttttgcttcgggcattccaaacctcactccagactggactcaagttacgggcttaggtacagcggcaacaagaggtgttggagtagaaagcggtaatgtagcagcttatggttcttatggtttatctaacttaggttatggtggatctccaacttcagaagccggaaatgatattgatgctggttataaagcagggagacaaaagactcgttttaagaatgcacccactagtatttatacaaatccctatatagctgcttatgcaccttctatcgtggttactcgtggagaatttacaggtacggagttatttttaccatattacacctcaacacgcgccaattgtatggctgtaattgcatggaattatgtgccatccactgacaccttaagtaaagcagagcaaatcgtttatacgagcaagaacaatatcgtttatacgaccaataacagcgcgaccagcggcaaattggttactgttgagacttctggcgaacttcgctccaaggggttcactgttgattcgaacggggtttacaaggcagcttcaccgattgcaagactatttgctgattcacttgaactcaatgaagatgcctcaaaacagccgattaactttgaaaagttaggtacaggtgactacctgattaaaggttctctgggatttgctaaagagggctggtacattgaaatgcctaaagatgcaaacggtaatgttcttgttgctgtgtcttatgagcagcatgaagatggggatattgcagtaaaaacctacaagaaaaaatttgatatcgaaacagcctcaattattcctgatttcgataatcctgtagatattccagaaactcgctggattgatattcgattgcatgaagaacccgaaccagagcctgaagaaccgttgagtgaaacaccattggagttccagcctactaacttatctcaggcagtagctgcagccttgaatggtgtggaaccgccagtgatctccgacacagatgcaacacattaa

SEQ ID NO: 57056 - DNA, 654 bp, Acinetobacter baumannii
atgatgaacgctgatattactacccgtattgagaaggatcttattggtcatcgagaaatcaataatgaccattattacggagttcaaacattacgtgctttagaaaatttcaacttaacaaatagcaaagttggaaacttccctaatttaattaaagccttagctatggttaaacttgcctgtgctgaagcaaattataatcttaaaaacttagatcaaactaaatttgaagcgattgaatacagctgtaatcagcttattcgtggtaatttccatgaccagttcccaatcgacatgatgcaaggcggtgctggcacttcaaccaatatgaatgcaaatgaagtattggcaaacgttgctttagaatatatgggccattctaaaggtcaatatcaatacttgcatccaaataacgacattaatatgtcgcagtcaacaaatgacgtataccctactgcaattcgtttaggtttattacttagcctagatgagttaaatcttccatttaacaatttgattcttagcttcttgaataaatctcaagagtttgcacacattttaaaaatgggtcgtactcagttacaagacgcctgtgcctatgacattaggtcaagagtttggtgcttttgcggtaactctacaaaaagaccttga

SEQ ID NO: 57057 - DNA, 822 bp, Acinetobacter baumannii
atgacattaggtcaagagtttggtgcttttgcggtaactctacaaaaagaccttgagcaaattaatacgcttattccaaatgttttagcttatatgaatcttggcggtacagcgattggtacgggaattaccactgaatatagttaccgtgaactcgcgattcaagcacttggaaaaatctctggtaagaaaattaagtcagctccagatttgattgaagccacttctgatatgggtgactttgttcttttatctggtttattaaaacgtactgcaactaaactttcaaaaattgccaatgacttgcgtttactttcaagtggtccacgtactggcattaatgaaattaacttagaagcacgtcaaccaggtagctcgattatgccgggtaaagtaaacccagttattcctgaagcaatgaaccttgcttgcttccagatcattgcaaatgatttggctgtaacgttagctgctgaagctggtcaattacagttaaatgcaatggaaccacttattgcattcaaactgtttgaatcgatggacttgcttggtaaagcaatggcaatgttccaaactaagtgtattgatacgattacggcgaaccctgaacactgtaaagctttggttgaaaattcaattggtattgtgactgcacttaacccatacctaggttatgaaactacaactcgtattgctaaaactgcaaacgaaactgggcaaagcgtattggctttagttcaaaatgaaggtttattatcagcacaagtgcttgatgatatcttgtcgattaataatatggttaaaccaaaaatgtcggcttaa

SEQ ID NO: 57058 - DNA, 648 bp, Acinetobacter baumannii; identical to SEQ ID NO: 45147

SEQ ID NO: 57059 - DNA, 264 bp, Acinetobacter baumannii
atgccagtctcgccaatagaaatcaaaggaatccacaacatagccgcgaaagacccggtcaatcaggttgcccatggcgccaccgaggataagactgtaagcgatggcttctcctttatgacgattttcaaagatcagcttgatcagaaaaatcgagaccactaccgcgattccgataaaaaagtagcgctgccagcctccaccattcgcaaaaagactgaatgcggcaccggtattccatacgtgtacccagttaaagaatga

SEQ ID NO: 57060 - DNA, 897 bp, Acinetobacter baumannii; identical to SEQ ID NO: 52956

SEQ ID NO: 57061 - DNA, 408 bp, Acinetobacter baumannii
atgcgtattggtcagttggcacagtcagtaggggtagatacacagacgatccgcttctacgaacggcagggcttgttgccgccgcctggtcggcaggagaacggttaccgtgtctataccgagaaacacgttgagcggctggcctttattcgtcgctgccgcatcctggatctgtcactggcagaaattcacgaactaaagcgctatcaggacgaccctcatcagtcctgtaccgctgtcaatgccttgctcgatgatcacatctctcatgtacgctcgcagataaccgctctacaggcgcttgagaaacaactcgtttcactaagagcgcgttgcaacgatgaccgggaagttaaggcgtgtggggttcttgctggaattagcgagggaagcatgcaccagcagtag

SEQ ID NO: 57062 - DNA, 195 bp, Acinetobacter baumannii
atgttattcaaaaaattcgctgttgctgctgctgttgctgctactttagctttcgttggttgttctaagaaagaagaagctcctgctgctaacgctgcatctgaagctactgctgctgcatctgaagctgctgcttctactgctgccgcttctgcacctgccgcttctgaagctgctgcttctgctgcacactaa

SEQ ID NO: 57063 - DNA, 306 bp, Acinetobacter baumannii
atgatatataaaagattaatactaatatttatcgcattatgttccattgccacatatgcacaacaagatattgcaaaccaagaaaaaagttccgttaatttccctgtaatagagtttcccctgagtcagattcaacaggaattaaaacaattacagtccattgaaaatcaagagcatcccaagtattcagccttagctcaacaatggtctgaaactaactccatgattaacgattttatattttcaccgcttaataataaaacctgtctcttatacacatctccgagcccacgagaccgaggctga

SEQ ID NO: 57064 - DNA, 327 bp, Acinetobacter baumannii
atgaccggacaacctattactaacgattcacaagactggcgttggtactttaatggtgactttatggttgtcaaagtaaccgatgctgaagctactgtgcctggtaaaggttatcgaacccaaaatgaccgttatggatcgccattgtccggtgatggtggaagctggggtcaactaggtaccgagtccaccaatgatggaacatggaactggcaataccatggcacaactgaaggccagccggggccgggtggacctgcaattgttggggtggcaccacttacaactcaattgatcaatggagggaaaattctacaaacactttaa

SEQ ID NO: 57065 - DNA, 390 bp, Acinetobacter baumannii; identical to SEQ ID NO: 49298

SEQ ID NO: 57066 - DNA, 633 bp, Acinetobacter baumannii
atgactaaaccaatagttcccctaacaccttgtatagaaagcgaatcagtgaaggccttacttaagaaaattagctctgattcaatgccattttatgttagttgccaaccgaaccaatctgatatcgaaaatgagtgctttccattagtagacaaatatattcaggctcatggtggagaaagaataaatggatgggcactgtgggaacaacccaacctttatattgaggctgaatttcatgctatatggaaatcgccagaaggtaattatttggatttaaaccctcgccaacataaaacagtaaatattttatttttacctcagttggacttaacttatgaaggttttcaaagaaacaatattcgcctacccttgactaataataagagcgtacatgattttttaaaatttaaagattatgaattcgagtttaataatagagggaatcgaaaaggaatgcatggtgaggtttatataacagatccagctgaaataagagaatatgataatttaatgcgaaccttattaagattaggtatagaaatcaatcaactaattaagcctcttacaaactatgatccatgtatttgtggaagtggcaaaaaggcgaaatggtgtcataaacttaaataa

SEQ ID NO: 57067 - DNA, 891 bp, Acinetobacter baumannii; identical to SEQ ID NO: 46852

SEQ ID NO: 57068 - DNA, 345 bp, Acinetobacter baumannii
atgaaggtggagacgcgacagcgcatcgagcgccagattgcgcgcaaggccgccaaggacttgatcgcggcgggctacaaggtggccgtgttcgacggcgaggaaatcgccttagaggccagcacggacgtgcgcgcgatcatggccgccatgttcagcaccgacgaggattatctgtttgccatgacgcccggcgaggacgggaagatgaagcgggccggatgggtgcgcttcatctacggcaatatgggtttcgacgtcatcaacgactacaccacgaaccttgagggcgcgttggccgagacaaacgcgctcgccgaccagctcgaaacgcggcacggctaa

SEQ ID NO: 57069 - DNA, 486 bp, Acinetobacter baumannii
ttgcgtgatccagcggacgaaggccgcacccatgaaatgaccttgcccggcggatcgggcgcgcggatcggctacgcccgcgtgtccacgccggagcaggacatgagcttgcagatcgacgcgctagagcgcgccggttgctcccgcatttttcaggacgtggcgagcggtgcgaaggccgagcgcaaggggctggacgaggcgttggcctacctgcgccccggtgacacgcttgtggtgtggaagatcgaccggctaggccggtcgctcgcgcatcttgtcggcgtggtggaggacttgcgcagccgaggaatcggctttcggtcgctcaccgatccgggcatggacaccaccacggccagcggcgcgctgattttccatatcttcggcgcgctggccgcgttcgagcgcgagctaatccgcgagcgcaccaaggccggtttagccgtggcggccgaaggccagttgtcaccgctgccgtgctga

SEQ ID NO: 57070 - DNA, 264 bp, Acinetobacter baumannii
atgctgtcggcattctcggcgggcattcagctttcacagccacagaccaacgccagcacatacggaggcctcgattcacagcagattttgacgcaggaacttggccgccagcttggacaactcggcatggaaatggcgcggcggaacatgaacattcagccgacgcttgaaatccggcccggttatcgtttcgtcgtaatggtgacgaaagatattgtcctgccgccgtggcaaggccacccgcttgctgcgggtcaacgctga

SEQ ID NO: 57071 - DNA, 420 bp, Acinetobacter baumannii
ttgaataataatgaagttttctattttcctgctccttatggaatcgtaaattttggtggatctaggatctcaggaggtgattttctaagtacccctaatacggtaggtgatagccttacatgttcagtttttgttaattgtatatttgaacaatccggttttccaatcctagatttagatacctggaaaacaacagagcaggacattgaatggcaaactagtattcttgataaattaattggaaaattgagtccagagtttatgcggatacagcgtgaaaatgtaggtaaagttccgcggttacgtccagaacaaatggttggagcatgttgtgtttttgattatgagctagttgattttgatacagcagatagtgcagcaataattgttttagagcaattagaagcgctaggttgttaa

SEQ ID NO: 57072 - DNA, 1662 bp, Acinetobacter baumannii
gtggcccaatatatttatacgatgaaccgagtgtctaagatggttccgccaaagcgcgaaatcttaaaagacatctctttatcatttttcccgggtgccaaaattggtgttctcggtttgaacggtgcgggtaagtctaccttgcttcgtattatggctggcgtagataaagatttctctggtgaagctcgtgcacaacctggaattaaaatcggctatttagagcaagaaccgccacttgatccgactaaagacgttcgtggtaacgttgaagatggtgtgcgtgaagctttagatgctttagagcgtcttgatcaggtatttgcagaatatgcagacccagatgctgattttgatgcgcttgcaaaagagcaggaaaaattagaatcaattatccatgcttgggatgcacataacctaaacaaccagcttgaaatcgcggcagatgccttgaaccttccagcttgggatgcagatgtaactaagctttctggtggtgaacgccgtcgtgtagcactttgccgtttattgctctctaaaccagatatgttgcttcttgacgaaccaacgaaccatttggatgcagagtctgtatcttggttagagcgattcttaaaagatttccctggcacaatcgtggcgattacgcacgaccgttatttcttagataacgttgccgagtggatcttggagcttgaccgtggacacggtattccttaccaaggtaactacacttcttggttggagcaaaaaaatgctcgcttagaacaagagcagaaacaagaagaatcttttgctaaagcattgaaaaaagaacttgaatgggttcgtcaaaatgcgaaaggtcagcaaaagaaaaacaaagcgcgtatggagcgttttgaagagcttaactcacgcgaattccaacagcgtaatgagacctctgaaatctatattccacctggtccacgtttaggtaacaaggttgttgaagtagaaaatatcagcaagtcatttggtgatcgtttactttacgaaaacttgtcatttaccgtaccaccagcagcaattgtaggtattgttggtcctaacggtgccggtaaaacgactttattccgtatgatgacaggtgagcaaaaacctgacaccggtactgtaacacttggtgattcagttaaagttgcttatgttggtcagattcgtgacactttagatgataacaaaacggtttgggaagaagtttctggcggtttagacatcttgaaagtgggcgattatgaaattgcatcacgtgcttatattggtcgttttaactttaaaggccaagatcagcaaaaacgcgtaggtgaattgtcaggtggtgagcgtaaccgtttacaacttgcgaaaattttacagcaaggtgcaaacgttatcttactggatgagccatcaaacgacttggacgtagaaactttacgtgcacttgaagatgcaattttggtattcccgggtacagtcatggttgtatcgcatgaccgttggttccttgaccgtattgcgactcatatcttgtcatttgaagatgaacaaccagagttctatacaggtaactataccgagtttgaagcttatcgccgtgctaagctaggtgatgacgctcagcctcatcgcaagaaatacaaaaaaattagcggttaa

SEQ ID NO: 57073 - DNA, 546 bp, Acinetobacter baumannii; identical to SEQ ID NO: 55378

SEQ ID NO: 57074 - DNA, 669 bp, Acinetobacter baumannii; identical to SEQ ID NO: 55377

SEQ ID NO: 57075 - DNA, 1026 bp, Acinetobacter baumannii
atgggggcttggactcttttctttggcgccttggttttctttcttaatgtaagttccacccgcttatttgcagagtctgaattttggctggcgcttgtaaaagtaatcaccattatctgttttattggtttggggttactggcgatttttggctttattccttatcaggggcatgaaacagcaccattgttcagtaatttgactgctcatggttggttcccaaatggtcttttcccaatttttgccactatgcttatcgttaactttgcattttctggcacagaattaattggggtggcggctggcgaagctgagaatccagcaaaaacagttcctaaggcaattaatgcggctatttggcgcttattgattttctttgttggtacgattgtagtgattagctcactattgccataccacctagcaggtcttagtgcaaatgatgtgagcagtagcccatttgtgactgtatttaattacattggtattccgtatgcagaggatattatccgtttcgtaattattacggctttactttcagctgctaattcgggtctatttgctgcatcacgtatgatgtggtcgctttcagcaaaaaatcaattacctaaaattttcgcgaaactcacgccgtctggaacacctattattgccattattgtcaccatgtttggtgctattccaggattgctttcagaacaatttgcaccagaaacaatttttaaaaatttgttgggtgttgctgcttttacaatggttgtcgtttggattgcaatttgtatttcgcaatttaacttccgtagacagtggtataagtcaggaaaaacagtaaaagatctacgtttcgctgcaccactttttcctcttactccaattgtaggcgggctattctgtatagttacttgtatcagtatggtatttgatccttctatgcaagtgggctttatctgctgcattatttttatcttgctatgctatgtcagctatttcatcttttatcgtaaaaaagatatagctcaaaactaa

SEQ ID NO: 57076 - DNA, 462 bp, Acinetobacter baumannii
atgcaatcattaaattatcggaataatgatgcatcgcaacatggaagttctgcacctttgaaacgagcaatgagtactcgacatttggtgatgatctcccttggcggtgccataggtacaggtctttttcttgggtctggcgacgtaatctctcaagcaggtccaattggcgcaattatctcttatttcttgggcggtctaattgcctataccgttatgctgtgtctcggtgagctagcggttcatgtccctgaatctggctcttttggtgaatacgcacggcgttatatcggtccaggtacggggtatatgattacttggctgtattggctgacttggactgcaactttggggactgagtttaccgctgcggccttgttggttcaggagtggtttccatctacctcggtatgggggcttggactcttttctttggcgccttggttttctttcttaatgtaa

SEQ ID NO: 57077 - DNA, 459 bp, Acinetobacter baumannii
atgagcttgccacttgtttcgcaccccaacggatttcacttctttcgggttctttgctcctttgtctggcaaatagatattgatacggctatcgtcggtcggatccgtgtattcatagatcagtccgtcgtagtcatccatcacgccaaaggtcaggtcatgcttgtaactatccggaatgatattcctgaagttaaacagcattacagagttatcagttggacgttcaaaataaagcttgagcttattattttgccgatatgcagtacaaaatacggcatcacaaagattggtgaccagctcttcaaaagacaggtttgtatcatcaatcgtagtacagaactcagccgcaagtggtgtaccaaaataatcaactacatcgttataagtccgatagatattttccagatctatttcgtcgatcgtacggcggcctatcttgtcatccagtgccattga

SEQ ID NO: 57078 - DNA, 315 bp, Acinetobacter baumannii
atggctaagaaatatcaagaacttgcccagaagattcaagaagcacgaatcattggcaagaaagcagcagatgctgttgaagacaaaggtacttgcaacctagataaagtcgtaatttgtggactgccaaaggtgcgcgaaacctctctaaataatgtaggcattaactgctacaaacattggtctcatgcaggagcatttgttctttcaggtagttttggcatgggcgataaaaatactgctggtgtagaagctatgtctgctcaccttaaaagcttgggtgttgattgctacatccactggcaaatggattaa

SEQ ID NO: 57079 - DNA, 450 bp, Acinetobacter baumannii
atggaacgttcatttagttgtagtgatgaagtatgggatgtgttttaccatccagaagaggccctttcccttctacaagaaaatggtgatttagaagttggttcgtcattttttacaggagtagagctggttagaaaaccttgcgatttcttgtacaaccatgcggctcaattgctcgaaaacttagatgaaactctttttgatgaaactggaactgatgatgagttttataccagtaaacagaactatgcaaaacgagagcaactttcccagttaattggcgaatggctagatcaaaacatggaaggaaatctgtctttcatagaactgattgaagaaatcgaagtaactcaagaaatgattgacgctttccatgcaaacgcgccgattccattgcctgagtttaagcataaagaagaagtacgcgttcaggttgagggggtgaagtga

SEQ ID NO: 57080 - DNA, 207 bp, Acinetobacter baumannii
atgagtgagataagtatgaatcaaagaattgaaaagtacaagtttagccaagcctttagggatggttcgaaagctttcgtagctttctgggttatcaccttcattgtatttaccttcttacgtggctgtgccgacgagcaacacgtcaacgaactcaaagcaaaacagaacatgtatgtgcgtgtgcaagtggaaggagctaaataa

SEQ ID NO: 57081 - DNA, 423 bp, Acinetobacter baumannii
ttgtttttaaaggaaattttctctgaaagattggaaaaagaaaatgtagaaatgctttttactacggaatttttgaactttaaaattcaagcatttagttcaaccttatatcctgcaatcgttaacttagtggataacgcaatttattgggcaaacaaaagttcgtcattgcaaaaaaaagtaaagctacatgctgataatgagaatttatttattgccgatactggtcctggtgttccattaattgatagagagaatatttttgaattcggcttctctcgaaaaattggtggtcgaggtatggggctttatatcgcaagacaaacgctagaacgagacgggtttaatttagaactagaagaatttgatccagaaatcggcgcagtttttaaaattagtcatattgaagttgagggggattaa

SEQ ID NO: 57082 - DNA, 621 bp, Acinetobacter baumannii
atgcttacgctttcacaaaagctcccagattattttgaatatattgaaaatgatgttagctactcattacgtcaggttcagtatcctcaagatataccactattacaccgctggatgcatgagccacacgttattcctcagtggcaattaaataaaagcgaaatagaactcaaagtttattttgaaaaaatgctagctgatgatcatcaacgtttaatgattgtaggaatcaatggtcaagacgtgggttatgccgaaatttatgaagggaaacgtgatcgcctagctcgttattataaaggtgaagacaatgatttaggttggcatttactatttggggagaaatctgcttttggtcaaggctttttgcgcccaacaattcgtttattgaatttctatatttttgaaaattccccaacaaatagaattgtaggagaacctgatcatacagtgaagccttatgcggctgtagtagaagacatgtgctatgaagagcagggcttaattccaatgccggaaaaaacggcaatgttgtattactgtttccgtgaaaagttctatgacagattttttgagttataccaggcatcgcaacaaaaattacagcaaaaagcgagttaa

SEQ ID NO: 57083 - DNA, 1431 bp, Acinetobacter baumannii
atgaaattaaaacatctgagcactgcaatgattttagcaacgctgcctgcaactggggtttttgcagcagctttagatcgctctggacagtcaatgtctgcgttcttccaacctggcaattactttgaagcaggtatttctgttctagatcctgatgtagctggtaaagaagctggatctagtgccacacgtcgtgatattggcgatatggcgaatgactactacttcccaagtgctgcattaaaattacaaattaatgaccaattttctttcggtctactctacgatcaaccatttggagcagatgcagaatattcaggtaataacgtattcgtttctcagccaggttctgattctgttttatcagccactgcgattgatgggattgtcactaaaaaagcaactgaagctttgcaagcacaaggtttgcctgttaatgaccaaactttagctttagcaaaaggtcaagttttagcaagtcctcaatttaaacaacttgctggcgctcttgctgcggcaaataattatttaggtaatggtggaactaaagttaaagttgatacacaaaacttatcttttgtatttggttatcaaccaactaaaaactttaacttctatgccggccctgtattacaaaccgttaaaggtaatgtaagtttacgaggtcaagcttatagcctttataatggttatgatgctgatattaaagaaactaccggtgctggatggttagcaggggcagcttatcagattcctgaaatcgcacttagagcatctgtaacttatcgttctgaaattgatcataaagtggatattaatgaaaatctatctttattgaatttccctggtcttacttcagtacttactggtttagacgttccagcatctaaacttcaggcaattaattcatctggtaaaactacaatcacaacaccacagtctgttaaccttgattttcaaacaggtatcatggctgatacagttgcgtttgccaatgtacgctgggtgaactggaaagatttctcaattcagccatataaatttggcaaagtctcagaagctgtaggtggtcttgttggacgtccaaatggcttcaacctagttgaatattctgatgaccaatggtctgtgaacgctggtgtaggccgtaaacttaatgataaatgggctggtaatgtttctgtaggttgggactctggtgcaggtaatcctgtaacaacattaggaccaacagaaggttactggaacgtaggtttaggtgttcaatatagccctactcctcaaactttcattgctggtggtgtaaaatacttctggttgggtgatgctaaagctcaaacaggtgcgcaagcaggtagtgatcaatatgttgcagacttctctgataacaatgctatcgcttacggtttaaaacttggttataaattctaa

SEQ ID NO: 57084 - DNA, 687 bp, Acinetobacter baumannii; identical to SEQ ID NO: 55381

SEQ ID NO: 57085 - DNA, 1245 bp, Acinetobacter baumannii
atgagccaaattgcacaaccaatcacaattcgaaataccacatttaaaaaccggattattaaaggtgcaatgagtgaggcacttgcaaactatgaaggccagccaaatgacttacatttaggcttgtatagtacatgggccaaaggtggtttgggctgtgcgattactggaaatgttatggtcaatgtagaggccaaaaacgaacccggggtagtggtgattgaaaccgagcgtgacctagagcgtttaaaagaatgggcagcagtcggtaaacaatatgggatggtacaacttatccaattgtctcaccctggtcgtcagtgtccaaagggcttaaataaagaaacagttgcaccttcggcagttccttttagcccagctttagcgactatgtttggtactccacgtgctcttacgcatgaagaaattttggatattattaaacgttttgcgactgctgctcgtatttgtgaaaaggcgggttttgaaggggtacagttacatggtgcacatggctatttaattagccagtttttatcaccattaaccaataaacgtacagaccagtggggaggctcagttgaaaaccgtactcgctttttactagaagtttataaagcggtacgtgaagcaacttcagagaattttattatttcagttaagcttaactctgctgacttccagcgcggtggtattagcgaagaagatgtgatttcggtatttaaagccgttgatgaagctgggatcgacttaattgaaatttcaggtggtacttatgaagcacctgcaatggctggtgcaaaagccgataaacgtaaagcaagtaccattgcacgtgaagcgtatttcttagacttcgctgaaaaaatccgtcagcatgtaaaatgtaaacttatggtgacaggtggcttccgtacggtcgaaggtatgaatgctgcgctagcgagcggtgcgtgtgactttattggtattgctcgtccacttgcagttgaaactgatttaactgaccgtttaattgcaggccaagacgtgcgctacgccgtaaaaccgattaaaacagggttaccttttgtcgataaaatggcgattatggaaatcatttggtacgcagcacaatttaaagccattgggcagggtaaaaaaccaaatcctaaactttcacctttaattgtgtttttaaattatgccaagggtaatattaaggctgttgttcaaggacgcgtgaattcacgtaagtcagcgtaa

SEQ ID NO: 57086 - DNA, 1293 bp, Acinetobacter baumannii
atgatttttcaggagccttctacaactttaaacccattacatcgagttgaaaaaattgtaggtgaaaattttattttacaaggtgggtcaaaagcgaaagctcaacagcaggtaattcaattattaaaagatgtaggaattgctaatccagagtacattttaaaacgttatccgcatgagctttcaggtggacaaaaacagcgggtgatgattgcggctgcgcttgcacttcaacctaagattttaattgcagatgaaccaactactgcgcttgatgtgattttacagacgcaaattttagaattattaaaatctttgcaaagcaaatatggcatggcgttgattttgattagccatgatttaaatttggtacgccgttatgctgatgaactgattgtattacataaaggacaagttgtagagcaaggtaagcttcaacagatttttgaacacccaacttcagtttatacccagcaattgttagatcataatcttggtttcgctgagcaaccttcaaccagtcataaaattttatctgttcaacaactcaatgttaaatatccaatacgacgtggtttctttaaccgaattcagggttataccaatgcggttgaaaatgtaaattttgagcttgctcaaggcgaagcattaggcattgtgggtgaaagtggatccggaaaatcttcattggctttggctctggttcgattaattaaaagtgagggacagattaactttctagggcaagatataaaccgcttagaacaaaaagctttacgcaagatcaggtcagacttacagattgttttccaagatccatttggtagtctaaacccacgtatgacggtagggcagattgttgctgaagggttaaaagtcaaagcgatagctgataaagaaattaaacagcaagttgaatcagctttgataaaagttgagttggcagagggctttcaacatcgctatccacatgaactttctggtgggcaacgacaacgtgttgctttagcgagagctttagtagttcaacctaaacttttaattttagatgaaccaacgtctgccttagaccgaaccacgcaaaaagcgatgattcaattattacgacgtttacaacaaacagagcacttgagctatatttttattagtcatgatttaaatgtggtcaaagcactgtgtcataaagtgatggtattacgacatgcaaaagttgtggaatatcagccgactgagctgttgtttaatgctccaaaaactgaatataccaagcagttaattgcggcaagttgttaa

SEQ ID NO: 57087 - DNA, 1113 bp, Acinetobacter baumannii
atgaaaataaaattatcgaaaatagtaatagccagctcattattgatatttgcaaatatgagttatgcagagggagtaaaacggttttctgtctcggcaggttggttacatgtaatgcctcaaggtaaagctaatccatttaatatcaatacaagtgttaaaaatggaacagttgctaaagttggaagcatttcgccgaccagtttcttaaactccgttgatcctaatgctacagaggtagatgtaggcggtgaaccttttaatcaaaaagagtttcttgaactcgctttaaatgatgactttttaaaagggcttctacttgatgaagaaggcaatataaaacctgaggtagcaggtgaggcaacgattcaagggttagagcagtggcatcaaaatgatgccggccttgaagtagatgacacagacacattagggcttatgtttaactattacctcaatgacaatgtgtctttacaatttattggaggcattccccctaaagtcgatattaaaggccaaggtgaaatcttagctccattaggcggtgtcgcgttgtcaccacatgaattagttaaaattctttttccgaacggcattaccttaggtcaagcggtcccgattaccaatttaggcaataaacctaaagcagctagtgttcgtgcctggacacctgcaattgaagcacaatatcaatttgggaagagtggagtgaacaagtttagaccttatttaggtgtagggttaatgtatgctcattttaatgatattaaactaaatgacgaaattcgttctgacctgatctctgcaggtcatatgattcaaaatgtgttagatggtaaggctggggctgccttggatcgtaaagagtctagtggaaatatggtggttaaagtagatgcagatgatgcgattgcgcctatatttactgccggttttacttatgattttaatgattcttggtatacggttgcttcagtatcttatgcaaaactaaataatcgaacgcaaattgatgtcattaaccaaaatacgggcgctcgcttaattcatgggtcaactaaagttgatattgatccgatcattacatatttaggggtgggctacagattttaa

SEQ ID NO: 57088 - DNA, 882 bp, Acinetobacter baumannii
atgaaaaaattatttagcgtactgttcagcgcctctgtactgacactgactgcatgtaataaacagcctgcacaaactgaaaatacagcagcagcagccaaagataaaactgagtcagttcgtacaattaaattggtttcaacaggttctgatacggacgtatggaaatacgtagcaacacttcctgaaactgctcaagcgggcattaaactcgaagtgaccaatttaactgactatgttgtgctcaatacttctgtagcaagtggcgaacaagatgtaaatgcgtttcagtcattcaattatttggcagcttataatgcttcaaatacagctaaagttgctgctgttgcgacaacttacttggaaccaatgggtatttatgcaaataaagttaaatctgttgaagagttcccacaaggcgcgaccatcgcaattccaaacgatactgccaatgaagcgcgtgctttaacattattacagtctgctaaactgattaaacttaaaccagactttgaccctgtaaaagggacgaccaatgacgtcgttgaaaatcctaaaaacttacaattaaaaccaattcaaatgactacggcagttcgtgttaaaaacgatgtagatgcgattgtactcggtaatacattggcacttgagggtggcctcaatgtaatgaaagacgcaatcttccgtgagccaatcgatcagtctactaagctttatgtcaatttattaggtgttgctgaagcgaacaaaaatgacccgatctatacgaagcttggtgaactttaccacttacctaaagttcaaaagtttgtaaatgaaaaatttggcggcacaaaagttgaagtgaacaagcctgtttctgaatttgcagacatcaaataa

SEQ ID NO: 57089 - DNA, 477 bp, Acinetobacter baumannii
atgattccaccttggaaccatgaccttaaattttctaaatacacatacaatgctagaactgagacagtcgatacaaagcctagtttccgacatgcatgggctaaaagccagtttgctttgatacctgtagaaaagatctatgaacctcggtatgtgaatggcaaggctgagcgctggggtatctatcgtgaagacggcttacctttcaccgttgcagcaatttacgactctacagtgattgatggccaacaagtaagatcaatgtcaatgttgactattaatgcagataatcaccctttcatgagtcagtttcataaaccagaagatgaaaagcggtctattatcgttattcctgacgagtatcgagaagattggctgaattgcaaaaaagaagatgcagatcaatttttctttgaaatgcccttaggtgaatttactgcagactacttcccaaaaccaaaaaaaagtgcaaattag

SEQ ID NO: 57090 - DNA, 660 bp, Acinetobacter baumannii
atgaagctattccgatgctcaagcctacataaacttgtaggcgaccctaaaactaaaggctcagttcttagcgatacagctaagactgagatcagaacaattgttaaggaggacttgaccacgttcaagtctttcaaaggcaaccagtacacggctaaaggtaatgcgcttgaagaaattgcaattagcctgtctggcaaggttcgttttcgtcagtacttaaaacatcaaggtcgttgggaaaatgagttcatcactggtgaatgcgacattctcgatttaaacaataaattgatcctcgacactaaatgcacttgggatattgggactcatccattctttcaagatgaagcagaagaaaaggcaaagaaggcgggctatgactggcagatgcaaggctacatgtggctttacgactgtgaacaagcaatggttgatttctggctgctcccttgccctatcgagcttacaaatgattgggatgacagagagcagttgattgatttagtcgagcgtattgatttaagagaacgtttaacaactgtcacctacaaacgtgacgaagcaatgattcaaaagatcaaagacaaaattccacacgctcaagagtactacgcaaagttatatcaagagcgcattaaagcaaaggtggcagcatga

SEQ ID NO: 57091 - DNA, 549 bp, Acinetobacter baumannii
atgctttatgaacgtaatttaataatttccaataagtttttttacttattaaattattttgaagttgttctgagaaatgctgttgttcaggcaatagaaatatcttttaggtgtaatgaaacaaatagttggcatgaaaatgaagcttttattcgaagccttagccgtagagggaggtatagccctaaaggtatgtttgatagtgctaaagagaagttcccagattcgcctagtaaaatgatccctgagcttaaatttgtattctggcaaaagatgcttatggctaattacgaagaacgtatttggcagggatgttttaattctatttttcctaatgcaacagttgaaaacaggcaaattttttacgattggacagatcaattacgtgaattaagaaacaggattgctcatcatgaaccgattatttttaaccgtaatctagaaaatgatttagaggttttaacaaaatttatttactgtcgttgtattaatacatacgattttatcgagcaatctgcattagatctaaaagaatatttagatttttaa

SEQ ID NO: 57092 - DNA, 399 bp, Acinetobacter baumannii
atggcaatgactttagagcagacaaggcaagctattattgatcgcatgcaaagctttacgggtattgctcaagaacggattcagtatccaaatgcacctgactttactgttccaacaaaaggtgtatggtgccgtttaacgattgcaggtggcccgagttttacctcaggcattgcagataagccatgtacacgccgtaccggtaatatcatgatccaatgctttgaccgattacatactggagagaaggccgtaacggttctaagcgatgcattgctggctcattttgaatatttcataatcgaacacttagaatgtttgaatggccaatctatttatgcgggtaaagatgctgatttcattcagtataatgtgagcattgggtttaaggtgaattga

SEQ ID NO: 57093 - DNA, 219 bp, Acinetobacter baumannii
atgtcatgtatgctgactttagaagaaatcgaaattaaacggcaagaactggaaagacatcttgaagatgttatgtctgttgaactgaagaagtggcaaagcgaaaacaagctatgtgtttccgatgtgaatatacgtttggccaatgttaatagtcttggtggaactaaacataatgtagttactggagtaagtgttgatttagattacaagccttaa

SEQ ID NO: 57094 - DNA, 399 bp, Acinetobacter baumannii
atggcaatgactttagagcagacaaggcaagctattattaatcgtatgcaagcttttaccggtattgctcaggacagaatccaatatccaaatgcaccaggctttaatgtgccaacaaaaggcgtatggtgccgtttgactattgcaggcagcccgagttttatttcaggaatagccgataatccttgtacacgccgaaccggtaatattatggtccaatgctttgctcgtcccaattcaggaataatggaaatcacaaaactgagtgatgctttgcttgcccattttgaatattactcaatcgatcatctagaatgtttgcaaggacaatcaatttttgtcgggcaagatgctgacttcattcagtataatgtgagcattgggtttaaggtgaattga

SEQ ID NO: 57095 - DNA, 351 bp, Acinetobacter baumannii
atgagcaattttgtttttaagcgtggtgacactttcaacttaaatctgcaattagttgatatggatgaagcactgcaatatccagccaatgatgtacgtcgagcgattgatttaacgggatatacctttacttctcaagttaaaactttggatggaaccgctgtagcaaccttgacttgtgcagtattaaatcagagtactcaaaaggggtggctgaatgtgaaatcagaggcaagtactgcagcgtggcctttgggtctgtgtcagatggatatcaaagctgtggtgagcggtactactcagcatacagaaactttgacttttcaggtaattgacggggtgactgcataa

SEQ ID NO: 57096 - DNA, 219 bp, Acinetobacter baumannii
atgtcatgtatgctgactttagaagaaatcgaaattaaacggcaagaactggaaagacatcttgaagatgttatgtctgttgaactgaagaagtggcaaagcgaaaacaagctatgtgtttccgatgtgaatatacgtttggccaatgtgaatagtcttggtggaactaaacataatgtagttactggagtaagtgttgatttagattacaagccttaa

SEQ ID NO: 57097 - DNA, 219 bp, Acinetobacter baumannii; identical to SEQ ID NO: 57096

SEQ ID NO: 57098 - DNA, 351 bp, Acinetobacter baumannii; identical to SEQ ID NO: 57095

SEQ ID NO: 57099 - DNA, 465 bp, Acinetobacter baumannii; identical to SEQ ID NO: 50064

SEQ ID NO: 57100 - DNA, 456 bp, Acinetobacter baumannii
atgaagaatagaggaagctatgtacctacgttgaaacaaggtgtaattgtaaaaagaagagaagataaaaagttttatgtatgtattcaaccattatgtgacagcgtacgagttaaagatttaactaattttacattcttaagaatttcaaaagttccaaatgcgaagccaatgactcatgtaattcatggagtagatgtaccttacttggcctttgatgtcgatccaaaatcaaaaaatatttatatggctcaattcttaccagatccatcagaaaaaatggtaaaagctgaattatgcaatcaaaaatatatatttaaagctggggatgaggttttcgaatggtgtggtgaatttaaacaacccatatttcaaggtattgttaatgatgtaagtgctagtctagctagagttggatttgattcctttgaatggttacgtcaacgaaaatcttaa

SEQ ID NO: 57101 - DNA, 270 bp, Acinetobacter baumannii
atgtcaagttctctcaatttatcagaacgtcaattacaagttcttcaatgtgtaaaagacgctaaagcagaaggcaagcgcccttacacgagaggtgttgtaaatcgtatgaaggccaaaggtttggagatttcagaccgtcaagctgcatatgaccttggcgtgatcatcaatacagatggcacaggcgtctactctgctcgttatggcagtggcaaaactctatggatttatgaagagcctttagccaaggagccctctcatggataa

SEQ ID NO: 57102 - DNA, 192 bp, Acinetobacter baumannii
atgaatcaaagaattgaaaagtacaagtttagccaagcctttagggatggctcgaaagcattcgtagctttctgggtaatgacattcatcattgtttccttcttacgtggctgtgccgacgaacaagcagcaaacgaactcaaagcaaaacagaacatgtatgtgcgtgttcaggttgagggggtgaagtga

SEQ ID NO: 57103 - DNA, 216 bp, Acinetobacter baumannii; identical to SEQ ID NO: 42270

SEQ ID NO: 57104 - DNA, 219 bp, Acinetobacter baumannii; identical to SEQ ID NO: 57096

SEQ ID NO: 57105 - DNA, 420 bp, Acinetobacter baumannii
ttgtctaactgcccaaatgacctagagccaatcaccaaaccccaagaccctgccttgattagcggtgcggatgcgttgcgagctttggctgatgggaaagaggttgaagccaacaatagtgactttggatattggattgatgcgcgaaatcttagtgttaaggatttctttgatgatattcacattttccgcctcaaacctcaaaccatcaagcttgaacttgagctgcctaagccttttgagccagaggaagattgtcacgtttacatcttagatgacggaaaaacagatggctatcgtcgttattcctacgaagttcatggtgataaaggaaatacatttattggtatttggcgtaccgaagaagagatcaagcaagtcgtagagcaactcagaaagatacgaggtactaactcatga

SEQ ID NO: 57106 - DNA, 357 bp, Acinetobacter baumannii; identical to SEQ ID NO: 46762

SEQ ID NO: 57107 - DNA, 369 bp, Acinetobacter baumannii
atgggatggaaggggaaaaagccgactagttttagtcttgatgtgtctaaagcagcagaaaaccatgtaaagaatattgtcatggataccgtgcaatccttagttaatttaagtcctgttgatactggagcataccgtgcttcacatattgtttcggttggatccgctgattacggtgtacgtgaacctgaaacaaaccctattaacgatgcagcgattcaggcaatgaagattaagctaggcaatctagtttatatccagaacaataaagcttatgcactccgcttagaaaatggttggtctgatcaagcgccacaaggtatttatggcctcacgtttaactttatttctcaaaagtacggtggctaa

SEQ ID NO: 57108 - DNA, 210 bp, Acinetobacter baumannii
atgtctaatacagctattggtacagtaaagtggtttaatgaaactaaaggtttcggttttattcaacaagattctggtccagatgtttttgctcattttaaagaaattgccacttcaggctttaaaactttatatgaaggccaacgtgtaacttttaatattactcaaggccaaaaaggtcctaatgctgtgaatattattccacagtaa

SEQ ID NO: 57109 - DNA, 204 bp, Acinetobacter baumannii
gtgacaactcctgaagatcgagttgcagtaattaccactgagcctttaactcataatgaaacatggattgcttatcaacctggtgaaatgattttatttcaacatggtaaacctataaaaaaagcgattactcaagttgaaagattaatacgtgaagagaaaaatcctgaacttaagcgtattactcgtgctgaccaatattaa

SEQ ID NO: 57110 - DNA, 162 bp, Acinetobacter baumannii
gtgaaggaagttggagaagttcaggaagttaaaccaactgtaccagacaacgagttcccggttctcttagagcaaatcaaagccgatgcagttactaaagagtatgtattagaaggctatgcacttactaatacacaaatagctgaggtgaatgcactatga

SEQ ID NO: 57111 - DNA, 162 bp, Acinetobacter baumannii
gtgaaggaagttggagaagtccaggaagttaaaccaactgtaccagacaatgagttcccggttctcttagagcagatcaaagccgatgcagttactaaagaatatgtattagaaggctatgcacttactaatgcacaaatagctgaggtaaatgcactatga

SEQ ID NO: 57112 - DNA, 465 bp, Acinetobacter baumannii
atggaagagcgcaaaaatctggataccagagcttcggctttaatggtgcttttatgtatggtcttagggctgcaacaggtggttctgaaaatagcagcaccagatatttcgccgattatgcaaatcgctttacgttccggcttatctgctgttctagttttacctttattgtggcgagatcattcgattcatctattttcttatagacaatgcaaagctggcgctcttgttgctttattattttcattagaattttatttcgtcacccaagccttaaagtttacctctacctctcatacagtagttttactgtataccgctccaatttttgttgcattagggctccattggaaatttcctactgaacgtctgaatcgagcgcaatggggggtattgctctggcttttatggggatcattatcacattttacccaacaagcacagctacaaatgcgccagctctag

SEQ ID NO: 57113 - DNA, 315 bp, Acinetobacter baumannii; identical to SEQ ID NO: 44769

SEQ ID NO: 57114 - DNA, 1311 bp, Acinetobacter baumannii
atgcgacagtttacgtctcttcaggttgcgatattagcactcggaagtttatgcttttcttcagcttatgctggttctacattagttccaatgactgatgctgagttgtcagctactcgtggtcaggccttaatgagtatgtcttatattgcgcctaatgattcggcaaatctggaaaaattgcgtgatagcagtagtaatgtaggcttctttaaattaagtttagatgcggatgttgaacttaatactaatatccggaaactccaacttggctgtggcggtgcaaatggtgccggagcatgtgatattgatatcgataacttaagtttaagtggtttatctaatacaaatgatgggcgtgctagttcatctgcaaaaattactaatccgtttattgagtttgcaattaaaaatcctaacagtactgctttacgtgaggtgacgggattaagagtaagtgctgaggctattgaagggttattaacatttggtactgaaaacagtcaaacgaaaaatggtattaactcttttagtggttatatggtaactcaagcgactggaggtagtgttagtactgctgcccggccaacgggttctggattgacgcaagccaatttagggacacaaattactgggcgagcaaaaggaacattaattggtctagatgttattaatacgaatttccgttcaacaagttatgatctcggactcagtagcgcttctggtagtttatttttaccttctcaagtcattagtggaaagcgtattaatgccgcaaatttgactggtacggctaatgtaagtggtattaatttatcaggttcaattaaggcagacaccgatttaattatttctattgcgggtaatttaagtggaactattaataatttaggggtaaatgttgcagtcaatgaggatttaggctacttccataaagttaatttgaatggcacagcagcttctctttctttacaagcacaaaatttgcagtggccaggagccaagtcagtttctcagggaggatggtggttagagctttcgaatccaattgatattggtgatgtaacaccccagtcacaggtagtgattactgatgacgtggtaaaagccacgttaggaaaagttagtcaatatttaactaacaatcctgtcaattgcggaactttggctctggattgtgtattgggtaatattgatgttagtactgtagatttaacaggtcagtatgttccaatgaatttgagtaatttggttttaaaaaaccaaacttttgcatctaactgccatggagcagatgtaaaattctgttaa

SEQ ID NO: 57115 - DNA, 2154 bp, Acinetobacter baumannii; identical to SEQ ID NO: 45185

SEQ ID NO: 57116 - DNA, 1173 bp, Acinetobacter baumannii
atggctactttaaatccacgtgacgttgtgattgttgatggcgttcgttctgccatgggcaaatctaaaaacggtatgttccgtaatgtacgtgccgacagtttatctgctgaacttgtacgtgcgctcgttgcccgtaaccagtttgatgtaaatgaagttgaagacctgatttggggctgtgtaaaccagaccctagaacaaggtatgaacattggccgtaacatcggtttattggctggcttgcctaaaactgtggctggtcaaacagttaaccgtctttgtggttcttctatgcaagcgatccacactgcggctgcacaaattgcaacaaaccaaggtgatatcttcattattggtggtgtagagcacatgggtcacgtaggcatgatgcacggcatcgaccttaaccctgaagcatctaaacactacgctaaagcatctaacatgatgggcttaactgctgaaatgttaggtcgcatgaacggcattactcgtgaagaacaagatgcgttcggtgttgaatctcaccgtcgtgcttgggctgcaactcaagaaggccgtttcaaaaatgaaatcattggtgttgaaggccacgatgcaaatggctttaaaatcctttgcgacatcgatgaagtgattcgtccagatgcaaaccttgaagcgttcaaagcattaaaacctgtatttgaccctaaaggtggttcagtaacagcagcaacatcttctgctctttctgatggcgcttctgcaatgttgcttatgtctgctgaacgtgcacaagcattaggtttaaaaccacgtgccgtgatccgctctatggctgttgctggttgtgatgcagcaatcatgggttatggtccagttccagcaactcaaaaagcacttaaacgtgctggcttatcaattgctgatatccagactgttgagttaaatgaagcatttgctgcacaaggcttgtctgttcttaaaggcttaggtctgtatgacaaacaagacatcgtgaacttaaatggtggtgcgattgctttaggtcacccactaggttgttcaggtgctcgtatcaccactacgttgttaaatgtaatggaacaacaagatactcaaatcggtcttgcaacgatgtgtatcggccttggtcaaggtatcgcaacagtaatcgaacgtgtttaa

SEQ ID NO: 57117 - DNA, 279 bp, Acinetobacter baumannii
ttgatcgatgatccacaaacatttgatattatgccgtttaagactaaatctatttctatccattgggagttgatgttcacccgttcaatgtatgaaaccgatgatattgaaaagcaaggtgaactgttgcaacaggttgcccaattagttgaccagcaaaaaattagaagtaccctcaaccaaaatctaggcaatattaacgctgcaaacttggagaaggcgcataagttgcttgaatcaggtaagtcaaaaggcaaaattgtactagaaaacttctaa

SEQ ID NO: 57118 - DNA, 342 bp, Acinetobacter baumannii
atgccatattcagatctctcatttcgcgcgttaagcgtactccataagtctcgatatctttttaataaacatggttttcataacgtaggagtagaccgcattgtgcgagaagcagaggtgccaaccttggctgcacgattgagttactacagtgcaacttcaggaggcttactgtcgtgcctaccattgcaactcactttaagaggcaaaagcaccacacaaagctatcgccaacctctgtattacgtggatctaactttacgggagggtattggcctgaatgatacaattactcaggccaagcaaattgatgaacagagcaagaaggctatatttttttga

SEQ ID NO: 57119 - DNA, 741 bp, Acinetobacter baumannii
atgattaagttggaacgagggaaaaagccagagtacctaacagatgcacaagttgaagcacttactaaaaaatttaaagctaacagtaaagatgcagtctggaaacacaaaggtataaagagggcattattgttaagcagtaactctaagtgtgctttttgcgaatgtgaattaatggttagtggttcatatatggaaatcgaacattttaagctcaagaacgattatcctgatgaagtagttagttgggaaaaccttttgccttcttgcaaaagatgcaatacgacaaaaggctcccatgatgttgtagctgagccaattattaacccttttgatataaatccaaaagatcacttatcgcagagtaaacacaggatttacgctaaaaccccattaggtgaatccactacagttgctctcaaccttaacgatgaatcacttacgcggccgagatttttcgtgtcggactacgtaactaataaaatagaagaaatctatcaagatatttcatctaaatccaagttaacgagacatgatagaaataagctttccacgctgcttacttcttgtcaggcggatcatgcattttctgcattcgcttcaacagcattgcatgaatcctacgaatatgtagatgttgtaactaagcttaagaccgataaactatgggatgaacaaatggaagagttgcaccaatgctctctaaaattaattttagatagacgtgagaaaattaagtaa

SEQ ID NO: 57120 - DNA, 507 bp, Acinetobacter baumannii
ttgggtttgataaaagaaattgactatcgtcttgctgcaaaaggaaaatgtgctgcagaatttaatgggataattcttattgatgaaattgaaacccatttgcacccagtttggcaggggaaaatttgtattgttttaaaagagatattcccaaaagctcagttttttgtaactacgcacagtccacacgtcgttcagacagcaaatcgaaatgaagttatttcattgacgcgatcagacaacaatgaagtacaggtgcgtgatttaccagaagctgaatatgggtatcaaggatggactattgaagaaattctgaaagatgttatgggtatgcctgatctccgtacaaaaaaatatgatgaagtgaagcggcgttttgataatgcattagataaccaaaatataaatgaagcacgagaagcttataatgaattagatatgatgcttcacccgcgttatccattgcgacctgtgtttagaatgcagcttgatagtcttggagagtaa

SEQ ID NO: 57121 - DNA, 498 bp, Acinetobacter baumannii
gtgaatatacccccagtttcagaaaatgcaaccgtcacatttaagtatttagcaaatgaaattattcctttaaacatgcttaaatatgcaaatgatgagggtgatgggcctactaatacacttattacaaagcctaataaacctcaatttgcagacctacctatttatttacctagcaaagtatcagaagacggtatttttaaagtaataaaagcagatcgtgaaggtccatgtcctggtaaagatagtaaaaatacatgttatggtggcaatatctatattcaagcaaaaaatgtatttaatacctttaatgatacactcacatattatgtatatgatgcagatggaactatctcagctaaggctggaacaattaacttagtaaatacagcaaccacaactgatgattcacgtggcggtggaggtggcggaagtattggaatcctttctatcgcatcactactaagtttaattgcttatagacgttatcgtaagtga

SEQ ID NO: 57122 - DNA, 921 bp, Acinetobacter baumannii
atggaagaactgatccctgaccaacttctggaacaaatagatcgatatgaaaaaaatgttcttgactccttttactacacgtccaataagttcaatcaacttaaattcgaagaaataacttcccctactgaattcgataatgggaatcgatacgataaaatacttaaagttatatcaagcagtcctccattggactacacctaccttcgggaagaattgctgaagaatccatttcaaatagcatcagtagaaagcacttatattttttgtctatgtaaagatgcccgttcaaaaatacattcatcttccttgatagaagccaatagcatcatacaacgcattcaaaaggttcatgaaacaacacacaacattattaaagcaaggatagaatacattgctatttcccccaatatgacattttgtattaatgaagaagaaacgaaacaatcgacttatcaggataagctttactacctcccccattttaaaatccattttctacaagctttattagatgttagtcctgatgatttcattgaccgtaaaaccactctcacggatatacgacaagagatagaatatattctaccagactactacaaacagattctctataacgaacttaataaaatctttctagaaaatggggaaaaatggaaatctgttagcttggcagcgacacagcttgaaaacaaaataaatgaaaaaatatctgagctgattgactctaataaagatcatttcacaaaaggaaggaaagaactgattaagttttatcgtaaaatgatcgaacgtttaaatacagaaataaacgataatatttggctccaacaaaatactgaagacaattccaatgctaaggccaaagtagctaaattaactgaaatattatcaatagaaaaaaactttatgaaaacatag

SEQ ID NO: 57123 - DNA, 234 bp, Acinetobacter baumannii
atgataaatcattgtgttgagcgtcgattcaagattggagatttggtggttctaatcgatccgattcaggacactaaagtcagaaccgtggatgaaatactgcaccctcaatacgtggttttagacggttatcgacatctataccacactggctctattcgttttgctacccatgaagaaatcaaggttggttatcgaatagatcatcagattcttcagtttgatttaagctga

SEQ ID NO: 57124 - DNA, 1065 bp, Acinetobacter baumannii
atgggacaagccatcactcaccaacagcaaccttttataggaccatttgttggatcaaaaccttattcacgtcatagccgacgtggtaacaaagccaaacgattggctgaaacgaagcagatgagccgtgaacaatggctacaaatcagaaaacagggcattggcagcagtgatgccgcaactgcttgtggattgaatccgcacatgtcaatgctagaactatggatgataaaaacaggccgtatgcaacaaaacattgaagatgaaagtgcaggctatgcacctttatattgggggaaacggctagaaccattgatcgctgaatactacagtatgcataccaaccataaagttcgtcgagtcaatgcggtgttacaacatcctgatgaagacaaagcctttatgcttgctaatctggactatgctgttgttggtagtgatgaggtgcaggtgctggagtgtaaaactgttggcgaatatggtgctcgattatggcgagatggcgtaccactttatgtactgtgtcaggtacaacaccaattagcagttacaggaaagcaagctgcccatgtttgtgtactgatctgtggacatgaaacccgtatttataaagtgacacgaagtgaaagtgtcattcagcatatcacccatgcagagcggcatttctggaaatgcgtggaacaagatattcctccagctgtggatgcatccgagtcagcagccaaagctttacaagcgttgtacccagagcagactccactactgactgaagacttaaccaacaatcatgtagcgaatgccttgtttcgagaattactggaggagaaacgaaagatcgaaacccatcagcaactattcgatgagctgaaacatcaactacaaatgctgatgaaagaagcggagcgggcagtgtttacaggcgggtcggtgacgtggaaaaagtcacaagactcgatcagcctagacagtaaagctttattgaaacagcacccggaatacttagagcagttcccacaaattaaaacagggacacggcgctttcagatttatccgaatggaggataa

SEQ ID NO: 57125 - DNA, 900 bp, Acinetobacter baumannii
atgattaaaggtctcgcaatcacaccccctgttttaggtcgtatcagtatcggaaaaattgtagaaaagaatggcaaacgactccctgaaaaggatgatcaatttaccgttatcagccaaattcaaaataaggatagtggttgggtgaaacatccacttgatgaacaacttagggcaaaagctccgaatcaaaaactccgttcaatcccagtccgtatgatctttaatgatcctgagctaaatcttcgagctgaatacaccttgtttgatcgacagactgggcgtccgatttgtattggaaatggtgaaacctgccagagacaaggacaaaatggtgtagagcaacaccagtgcccatcaccgaatttgtgtccattggcacaagggggcttatgtaaaccttatggcagactgtatgtcaatttagatgataatgatgagtttggtacgtttatctttagaaccactggctttaacagtatccggacattggcagcacgattagcttattatcatgctgcatcaggcaaattgctttcctgtctgccattgcaattgactctacgaggtaaaagcaccacccaaagctatcgaaccccgatctattacgtggatctaactttacgtgacggaaccagcttacaggaagcgattacgactgcgaagcaaattgatgagcagagcaggcaagcaggattttatcaggaggctttagatgcggtggcgcgactgggctatgccaatgccaagtttgaagtggagaatgaagagggattggatgtggtggaagagttttatcacagtgatgaacaggaacaacagagtcaaacagaggtcgttcatacagatgtgagaagattgcaacagggattggcacggagtgtcagggcggtgaattga

SEQ ID NO: 57126 - DNA, 309 bp, Acinetobacter baumannii
atgagattggaagcagatgttggaatgattcagctcgagtatttaagattattttttagatatccaacttattgggacatcgttaaaacaaatgtatttggagctactcaaccaaatgtaaatggtactaaggtgagtgaatttaacgttcctattcctaatctagaaactcaaaaaagaattgttgatgaaatatcgagcctttcagatcgagtaaccgttttaaagaaggggcttagaaatatactttctttttgggaatcagtaaaagcttcaattcttgattctgctttacaaggtaggctctag

SEQ ID NO: 57127 - DNA, 945 bp, Acinetobacter baumannii
atgagcggtggtcaaaccaagaatgctgcattaacaacagccttagctttccattaccaagtactgattggtttggataagtgtttttcactagaggaaggtcaatcagtttggtttgaaaaagacggtgatgttagcctgatgtcaccagatacttcggcttcgactcaaactgaagtgaaagactacgcagctccacttactgaccaccatgagaacctctggaaaacactcaagaattggttatctcctgattttaaccatgctcaatatggtgttttggtgttgcatactactcaggcttttggtgcaactacccaactaaagaattggaacgctcagacagccgagcaacgtttggctgtgctacggactatatttgccaaacgtactgaagagcagcttaatgctaaaaagcaacctgatatcttcaaactgcaaaaatctgtgatgatggatactactcaagaagatctaatgattgtacttgcaaaagttgtattgcatgttgaatcggcagatttagaaacattgaaaaagagctacttcaacaagctgagtggttatattccaccagctaatagacaagcctttgctgagggtttaattggctttatctacgagcaggcgagtgatgtggaatgggtaatacataaaactgcttttgaccaaaaacgagaagccttaacagcaaaatgggggcctactttatttactattcctgatttttatgccagagatgcaaccgaggatgaagtagatatatatattaaagaattttttgctcaaaaaatcattgatattggcttgaagctctctggcattgatgtgatctggaaagatattgctgtaattatgataattttcttgggtggttttgttgggctattcgtccacagtaaatttgtgatgaaaggatcaaaatcacctgatcttattgattaa

SEQ ID NO: 57128 - DNA, 2106 bp, Acinetobacter baumannii
atgaaagatcaagcattagcattgttacgggaaatgacgggtaatcctgcagctgaattccacgatggacagtttcaagcgatttcgcaactggtggaatatcagtccaaactgcttgttgtgcaaaagacaggatggggaaaaagtgcggtttactttattgcgacgaaattattgcgtatgcaaggtaaaggaccgaccattattatttcacctctgattgctttgatgcgtaaccagattgaacgtgcaggacagcttggtcttaaagtcgtttcgattaattcatctcaatctcaagatcaaaatcatgctgcaaaacagcagattattaatcaaaatgtcgatgcagtgatcatttctccagagcaattagccaatgatgaaatgattgaagatgtactcagtcatatcatttccaatattgggttatttgtggtggatgaagcacactgtatttcagattggggacatgattttaggccggattatcgccgtattgttcgtgtattacagcacatgcctgccaatatgccgatacttgccacaacagcaacagccaatcaccgtgtgattaccgatatcaatcagcaattagggcggtatctacaaaccattcgtggtgatttaaaacgcaactcgctgtatttgcagaatatcccgacaagtagccgagttgaacgtatggcttggttagctgaaaaaattcctcagcttgaaggaacaggaatcgtttatgtcaaaacagtacgagatagtgagcttttggcggattggctcaaccatcatggtataaaagcagcatgctactatggtggtgctgatgatcaagaacgaattcggttagaacaagctttattgtcaaatagcataaaagtgctggtggcgacttctgcattaggtatgggatttgataaacccgatctaggttttgtgattcattttcagcttccgggtagtatcgttgaatattatcagcaggttgggcgtgctgggcgtggcatagatcacgcttatgggatactgatgaatggagctgaaacgcaagagattcagtcttactttattcaaaatgcttttccaaaagaagaagagattgaacaaatcttagacgcgattgaaaaatgtggtggattgaagttatatgatattgaaccgaagacgaatttgaaatttagtcgaattcaagcggttttaaaatttttaagtgttgaatcaccatcaccaatttataaagatgctcaaaataaatattgtcgaaacgagcaagattacagccttccttatgatcgtattgcacgtgtatcgcaagtcaaagagcaagaatggaaacagttaacagattatcatcaatctaaatcttgtttgatgaaagagctcactttagctttagatgatccattagccgataactgtaacaactgcatgaactgtgtgcctaagcagcaaatatcttctaatgttaagcatgaacttgtattagctgccgctgaatttgtaaaaatgcgttatgtaaaaatcaaagccagaaaacagtttgcacggtcttcttctgtggcaagagaagcatttcctcaatttcagtttgctttcagagatcagagtttacaggcatctgatggcttagcactctctcgttggaaggacggtgtttggggaaatgtagtcgctgaaggtaaaaagcaggggcgatttggtgatgaacttttggcaccgatggtcaaaatgatcaactcaatgcagtttgatcaaaaacctcaatggttgagctatgtcccatcgcttcgtcatcctcaattggttaaagattttgcataccgattggcagcccaattagggattccatgcaaagatgctattgtaatgacatcagttcgcccccctcaaaaaacgatgcaaaatagctttaaacaaagtcaaaatttagatggtgcatttgagattgatacgacacagggttttgcaacccccgtattactcttagatgatgctgtagattctgggtggacatttacggtagtagccgcactattgcgacgagcaggtgttcaagccgtttatcctattgctctaacgagtacagcgcagcaagaccaaggtgaataa

SEQ ID NO: 57129 - DNA, 1473 bp, Acinetobacter baumannii
atgcaatatgacgaaatcatgcaagccaccatgttgttgtgctgctactttaataaaaatgaagtaaaaaactttaaacctttgagtggcttagagtactcgaagcttgcacaatggttataccaaaataaatggagcccagcagatttattatcgcaaacggatgaaatactgacagaatgggatgaccccaaagggaaaataaccgtagagcgtatcaaacagttactcggtcgtggtgtcagtatgtcatttgccttagaaaaatggactaaacaaggcatttgggtgatttctcgtgtaagtgagttttatcctaaagcgatcaaaaagcatttaggtgagcagcgtcctcctgttttatttggcttaggtaatcaacaactgttaaaccaagcaggccttgggtttgtgggctcgcgctctatttctgaaaatgatgaggttttcgcagctgacaaagcgaaacaggcagttgaggaaggctataccatcatttctgggggggctaaaggcgttgatcaggctgctatgcgagctgctttagaacatggtgggcaaagtataggaattctagctgatggtatctataccaatgaaactcgacgtatttttttaaattatttacgtcaaggagctctagtcttgattagcccattcttcccggaagctggttttagtgtaggcagtgcaatggctcgcaataaatttatttatacgatgtcagaagctgtcatcgtagtgaaaagcgataaagataaaggcggaacttggactggagctaaagaaaaccttaataaaaaatgggttcctttattggtgagagatattgcagaggaaggcaatcaggcattaatccagatgggaggaattgctcttggacatcaccaagctccatatagccagtttttatccaaacatgctcaaaatagtgaagtaaaaatagtagaaaataaaatatttactgaagcggaagctgaagcagctcgtgtaattttacaaaccaaactagcatcaaatcctttacaacaaccggatttgttagctaataatttagatatgtttgagcagtcagctatagctccaaatcaacagtcagaagtccactttgacttgaaaactaatgatgaagcaaacgaaaattctgtagcagatactttagaaacctcaactgaattagatgtgaatccactacaaattgagttaatcactgagtcggataaacaagctgataagcatacagaggaaatgcgattagttcagattcagcagaaatatggtgcgatttttgaattatttgtgaacacattaatttcattatcaaaagataaaacttctttctttattttagatgacataaaaaatgaattccctgaattgcaagaaactcagattaaaaaatggttgaaagagcttgaaactgatggttgcctgcgtaaagaagggcgtaaggcacgttatacattcatgtga

SEQ ID NO: 57130 - DNA, 1941 bp, Acinetobacter baumannii
atgatggatttacagaatttaaccagcatttttaaagaacgattattgcggatacctgattatcagcgagggtatgcttggacggaaaatcaattaaaagatttctgggaagatttattacagttacagtcagaccgtgtgcattatacgggagtgatcacacttgaatctgtgcctgaaaaaatttggtcaaaatgggaagatgatcaatggattattgaggatctaggctataaacctttctatatcgtcgatggtcaacagcgtttgacgacgtcaatgatcttgattcaagcaattattgaaagtctggaagaaggccaaattattgcttctcagtctgcacaaaaaattaaagaaaaatttattgtgttgcaagctgaacaaagtatcgcaaaaagctttatttttggttatgaaaaagataatccaagtaatgagtttcttaaaacacaaatattcaatgagtcatcatcaaaatatgagtctaaagaaacactgtacactcgaaatctaatagctgccaaagagtttttcgctgagcgtttgcaagaaactgatatagatcaaattgcagtgatttataagaagctgacacaaaaatttaagtttaatctctatgaaattagtgatgagattgatgtcttcgtaacgtttgaaactatgaataatcgcggtaagcgtcttagtcacttagagttattaaaaaataggcttatttatctatcaacattattccaagataatcatggtaaagaaacgctacgcgcagatattaacaatgcatggaagacgatttatgaatatcttggaaagagcttaaataatacgttggatgatgatgcattcttgcggaatcattggattatgtactttaagttttctaagaaaaaaggtgatgactacatcaaatatttattggaagacaaatttactgccaaaagtgtattacatgctgaaaatgtaaatgaagcattgaaaatacaagaaatatcagattatgtcgcaagcctgcaaaaatctattaaatactggttctatatgcataacccgtattttaaagaaacgaatgatttaacagaacgtcagaaaattagtttagagcgattgaatcgattaagctttagacgctttaaacctttgattttggctgcatatgtcgccgggaaagatccagagcaaatcgctttaatgttagaaagaattgagaaatttaatttcacgatttttaatattagccaacgccgtccatctactcgtgaaactgagttctttaatttatcgagaaaattgctttttggtgaaattgaaatttcagaagcaattgataaaattaatcaatcatttaatgattactttgatgttaagcgctttattacagctatagaagataaatataaacttggcagtcgagaaggtttctatgactgggatggtctacgctattttcaatatgaatatgagcagcatttaaaacgtaatgccaaacaatcaacggataaattgtcttgggatgaatggaatgacagccaccataaagactttgtaacgattgagcatgtcttcccacagactccaacagatccgtattggatttcacatttcggtatgttgaataaagaacaacaacatctacttactcattctctaggtaatttggtgccattgtctcgtgcaaaaaatagtaaattgctcaatcatgcatttgacttaaaggtcaatgatggaaacggatgtggctattttaatggttcctatagtgaaattgaaattagtcagcctccagtggtgtgggatccagatcagattaagcaacgcggtctaaatctactgaattttttagaaaaacgttggaatattcaattaggtgatgacagcatcaaacttaagttgttgcatgttgactttcttactttcaatgtattggaagaaagtgcatga

SEQ ID NO: 57131 - DNA, 1152 bp, Acinetobacter baumannii
ttgtcacatcagaataccgtatttcatgagctaattaaacctgttgtgcgacaggattttgaacaacttgctaaagtacaccatgttggacagaaatttagagcggcttcccggtgggatcagtttattgccatattgatgtctcaattctcttgtagacaaagtctgagagatattcaatccaatttggagtgccaacaggaaaagctaagtcatctcggagcaaagtctattccccgaagcacgctggcacgaatcaatgagcagcagcctgctgccttgtatcaacagctatttcacaagttgcttaaatactatgaacactcaaaagtagctcataaatttcgctttaagaatcccttgtattccttggatgccagtcatattgacctgtcgctttccttatgtgaatgggccaaagttcacgactcaaaagccagcatgaaactcagcataggattgaatcacagcaatgatattcctgagtttgttgcagttgaaaatggcaaagaaaatgacatggtacaaggccgcaaattccagtttcctgctggcagcattgtagtttttgataaaggctatgtcgattaccaatggtatgcaaatctgactgctcaaaacattggatttgtcacacgttttaggcctaaatctgtgtatcaggtgatccagcaacatccagtgcttgaatccaaaggtattctaaaagatgaaaccattcagctgaatagcgcacatgccctaaaaagaaaagccccagtgttaagaagaattgaatatagagatcagcaaagtggcaagcactttagctttctcagcaataactttcatttagccgcctccaccattgcggcgatttataaagatcgttggaaagttgagctgttctttaaggcgattaagcagaatctcaaattaaaagcgtttctaggccgcagcaggaacgcaattcagacacaaatctggattgcgatgatcgcctatttattggtgagtttcgctcaacatttagggaaaacaggttggacagttcaacgtttactcagaataattcaagtgaatttgtttgaaagaagaactttaaaagctttattttcacccgataaaatacccataaaacaagaggaagctcaaatgagcttcctcttgtga

SEQ ID NO: 57132 - DNA, 315 bp, Acinetobacter baumannii
atgaatacaaaatcattccaatcattagaagaagatggactcattgggcttgaagaacaaaatgaaatctcatgtttaatccgaagatttgccacagagcaattcggatattcaagaatgagaatttcatctatgcaattaagacaaaaaaagccgcaaacgaacgtaactatcgcattggataaaagtttaattgatctttacctaaggttcggggaatatgcctttgctgaacataaagataaaaaatatattgttgttgctcgcatcggatttaagaaacagaaaaatggttatggaacggctttaatctaa

SEQ ID NO: 57133 - DNA, 912 bp, Acinetobacter baumannii
atgacaattaatttaagcaatcgagtggctattgttacaggtgcaggcgcaggtctagggcgggaacatgcattgttactggctcgtttgggtgcaaaagtggtcgtgaatgatcttggtagcgatgtaaacggaaaaggtggctcaaccatggcggcccaaaaagtcgtggatgaaattattgcggctggtggtgaggcgatggcaaatggtgcttcagtcactgatattgaacaagttcaacagatggtagatgaaaccattgcccgttggggacgtgtagatattttaattaataacgctggaattcttcgagataaaacttttagcaaaatgtcactagatgactttcgtaccgtgattgatgtccacttaatgggggcagtaaattgcacaaaagcggtatgggatatcatgcgcgagcaaaaatatggtcgtattgttatgacgacttcatcctctggtctatatggcaattttgggcagtccaactacagtgctgcaaaaatggcattggttgggctcatgcagacactggctttagagggtgaaaaatctaatgttcgggtgaattgtttagcaccaacagctgcaactcgtatgcttgaaggattattacccgatgaagcccttaaagctcttgctccaagtgcggtcagtcctgcaatcgcgactttggttagtgaagatgcacctacccgtatgattctttgtgcgggcgcaggtagttttgaagcggcccacattacccttacgcaaggaatttatttaggtacggatgaacaggttccgcatgttttagcacaacgtttagctgatgtttcagaccgaacagatgagtttgtgcctgtcagaggaggcgctcagggtgagcttgagctgaaaaaagcttcattaatggcaggagaataa

SEQ ID NO: 57134 - DNA, 348 bp, Acinetobacter baumannii
atgtttattaaaaatgcatggtatgtcgcttgccggccagaagaaatccaagataaaccattaggtcgcaccatctgtggtgaaaaaatcgttttttatcgcggtaaagaaaaccaagttgcagccgttgaagatttttgtccccatcgcggcgcccctctttcacttggctatgtcgaagatggcaacctcgtgtgtggctaccatggcttagtcatgggttgtgacggaaagaccgtttcaatgccagctcagcgtgtaaacgaaacggtttcccttgtaacaaagcatatgcagttgttgaaaaattcggctttatttgggtatggccaggtgaaaaagctttag

SEQ ID NO: 57135 - DNA, 591 bp, Acinetobacter baumannii
atgatagatcaaaaagaagaaatggcacctctatttgccttagcaaatatgtaccttattgatgaagatcgtttaaatagatgggtcaaggcttcattcgcattgggaaaagtggaaccattttttatcccaacatttcaaagcttaggtagactcgattcgcgcttagttttttttgataaaattattataaaaaaccttatgaaaggtgataaaggggatattgattttaatacatacactattgagcatttatcgcaagcaactctttggttgtttggagcttatgaaatagttagagtgctgaatggtaaagactttaagaaaaagcctgaaatggctacttataagaaataccaacctgaaattaatgctctaaaattaaagcttgcacgaataagaatgccattagcaaagtttgaaccagcagataaacataagggagatgcacatgtacccacaccaagttttaatataactcatggggttgcttggcaaattactgaaactgagtggattataagaaaagaactttcagatgaaatgcttgagttgctagaaaagatctttgaagagactagaactgaatag

SEQ ID NO: 57136 - DNA, 840 bp, Acinetobacter baumannii
atggctaccccatacataacaataggctgccctactactggcggcggtcaagtaatttcagggaacaatctgttccaaattgagggtattcccgttgcttgtactggtgacaaagcaacatgtccaactcataaagtcaccgcaactattgtatcaggtgatcctcacatgaacatctttggcaaactagcagcacgagctggtgatagcctttcttgtggatgtaagcttctaccaaagcaaaacctagttgttcaagataatggtggcggtgcatcttctgcaaaatctagttcaacaccaatggctcaaaatcagcaacaaactacggatagctttgtaaaggatgagtacgaaaattactacatagagaatactaaaacaacgctcgttccgtttaagccatggctgtatccatatgatcaagataaatcatcgttgtttggacaagcaatgcaagcattatcaggagcatgcacatttgaagtttcgcataaagtagaaaaacaaaatctattcgtgacagtaaccttattaccaccagcactacgtggggatgcaacaatttacccacaagcagcattacgactatttaagaatgggaaacagattagtgaagtagttaatttaaaagtaagcaaaggcgtttggaacactgaaaatgatagacagcctgtcggtagttgcaacattaaactacccgctccagatttatcagttatcacggtacaattaactatgaaatacgatgcaagatttgatggtggaggtgtaatcacaaaccctccgcacgtagtgcatgagttcacaattacatcagcagcaagacgtaaagcatga

SEQ ID NO: 57137 - DNA, 645 bp, Acinetobacter baumannii
atgaaaaattatttaactttatttattattagcacagcacttattagcggatgtagtaacgcatctaatagtacaaaacaaacagaagtaaaaactgaaaccccagcacctaagaagaagctatctgctaaagatcagcaaattttagataaacataatgaatacgttcagaagtattctcttgaaagtccagaagtctttcaaaagcgtatgaaagaattgctccctgaaattaatacaatgtcagataagagcaagcgtgaaatgctgcaaatgaacgtgtatttagcatcacagatgtatgatgaagctttagctttaaatgtaaaacaaatagcagaaaatcctgaaaaccctgctctatctatcgctaaatgccagattttaactttacagaaaaaagaaagcactctgattaatcaatgttttgacgaagctgcaaatgttctaaaagtagaactagataaaccagaaaacaagactgaccctgattataagatgggtgagttctcatacttgcttgctaaatacaaaggtgggcatcccgaatataaagagaaaatgaagaggttcattgatagtacaaatgatgaaactctaaaaacctctttaaaaacaatctacgatgcagaagtaggaaattaa

SEQ ID NO: 57138 - DNA, 294 bp, Acinetobacter baumannii
atgaacgatcaaacaaatagtgtagttgaagcagctgcaagcacggctgccgcgactgcaacaaaattcacttatggctatgtagtgggaggcagcttgatcggtgtaattggaaaaattgactgggctgttgtcttttcaatcttaatcggtgtagctacatacttaacgaatctctattttaaaagccgagatgaaaagcgaaagaatgagattcatgatcttcaaacgaagcaatatgaattaacgaagaaacggatccaaggggataatgatgagcagcgaacagactag

SEQ ID NO: 57139 - DNA, 672 bp, Acinetobacter baumannii
atgttaaaaaccattaaattatacggcgtactgggtcaaaaatttgggcgtgaatttaaactcgatgtggccaatacccgtgaagctatgcgagccttatcagttcaaattgcaggctttgagaagtttatgctgcatgctcatgagcagggtttgcaattcgctgtcttcctaaaaagaaaaaactcaagcaataagcgcggtaaaaaaagtccttcagtttacgaccatgaaactaagcgcttaatcactggcgacaatattggtgaagatcaacttgatatgaatacagaagctgaagttattcatgttgtacctcgtgtagtcggtgccggaggtggtggaggactacaaaccattcttggggctgtattggttgttgtgggggtaattgttggagtgtttgctggatggactggcgttggcgcagttgtagcacagggattgattggtgccggtattgggatgatggtaggcggtattgcaatgatgctgatgccaaaagtagataatacacaagatcaaaaccaagatggcaataaagcaaaccaaggtttcggtggtgcagtaacaacaattgcccaaggtaatcctgttccagttttatatgggcgacgggaagtaggcggatttattgtaagtgctggtcaatatccagaagaccagttgtag

SEQ ID NO: 57140 - DNA, 756 bp, Acinetobacter baumannii
atgaaactaacagcaaagattaaaaaagcaatcatgtcccatgcggatgattgctatccacaggaatgttgtggagtgatcgtgggtaaagaatatattcgttgtcgtaatatttcagataaagctgatgagtttgaaattcacccggaagatttaaccattgccgaagatcaaggtgaaatcatagcttatgtacattcccatcccgacggaactactcgagcaactgaccttgatttaattcagattgaattacataaaaaaccttgggtcatttgttcttatccggatctggattttcaagtatatgaaccttgtggttaccgtgcccctttagttgggcgtaattattaccatggctggcaagattgctatgctcttatccgcgatttttatagccgtgaattgggtgttgagctcatggattttcaacgtgctgatgcatggtgggaagataaatcacatccatctctttatctggagaactatgaaaaagctgggttctatgaagtagataccccgcaatatggtgacatgttagtttgccgagtagggcgtactgagcaccctaatcatgctcttatctggcttggtgataatggaaaattgaagtcagaacaaacggaaaactgcatcgggtcatctctaattcttcatcatccatataaccgtaaatcagtgcgagaaatttacggtaaacaatggcatgagcgtactgtaaaaatcttgaggcaccgagatgttaaaaaccattaa

SEQ ID NO: 57141 - DNA, 357 bp, Acinetobacter baumannii
atggctgttaaaacactagatcttgccgaagctttttttgttggtgaattgcgtactcaattatttgatgctcgcagttttggcaacgatttacctgcaggtaaaattgaaacattagctattaattatgataagccctctaattcagtgggcattgtagttacacctggtggcggtacaaatggaagcatgactttactggatgctgatattactcgatgggcaatgcaggcaattcaaaatgccgggtatttatatggcgttacagttaattcattaaatatgaaatatgatttagctacgaaaaaaattagcgttgaatacactccagtcgcggaagctccagctcaagcttaa

SEQ ID NO: 57142 - DNA, 342 bp, Acinetobacter baumannii
atgagtgatcttaaatttacttttgaatgtgacctggaaagtaataatcagactcaacgctttaatacgctatcaactaaatttggtgatggttatgagcaaacaacatccgttggtattaacaataaatctggtgaatggacttaccagcggacagcgtataaagctgaaattttccaaattaaagctttttttgatgcccacaaaggcgctaattcctttttatgggattcgccgttagatgggcaagtgcgtgtaaaagcaggtgattatcaacatacctgtttgggcggcgatgtctggcgcatatcaaccacttttactcaagttttccaaccttaa

SEQ ID NO: 57143 - DNA, 3969 bp, Acinetobacter baumannii
atgactcaagaatcacgtttagtcattactattgattcgaaaaatgcggaacgaaacgctagaaatctaggcaatgaactcgacaacatagaaaagaaaggtgattttgcctcaaagtctatggatagtgtttcagtggctactcgagctttagctgggcatatggcaggactagtaacaattggtgctgctgtctcaaaaatggatgcttatacgggattacaaaaccgacttaaattagtaactaacaatcaaattgagcttaataaagcaactgaagatactttcagaattgcacaaaaaacatattcagcttgggattctgttcttcaggtgtaccaacgctttagtgataatgcgaaaacacttaacttgaccatggatgatacagctcgtttaacagagactgtgtcgaaagccgtagcaattagtggtgcaagtgcagctgctgctgatgctgctttagtacagtttggtcaagcattggcaagcggaacgctaagaggggaagagctaaattcagtaatggaacaaaccccagcattagctaaagcaatcgctcaaggcatgggtattaccgtcggtcaattaagatcagtggcggctgaaggaaaaatcacatccaaggaaatcgttaaagcccttaaaaatgttcaagatgatgttgatgctctatttgcaaaaacggatattactattggtcagtctttgactctcttaaacaatgaaattacaaaatttgtaggcgaggctggtaaaggaagtggagcagctcaggttttagctgattcagttcaactgctcgcttcgaatttagagttaatttcaaatggagcaatggttttagggattggatatttaactaaagtaattgctgcgaaaagtgttgctgtttacgctgatgtagctgctacaacagcgaatgttaaggctagtagagataaagctgtggcagatgctttggaggcgtcagcggctgttaaaaatgctcaggctcaggttgtaagttctaaagctacattacaagttttagctgctgaaaaagccttagaagttgaaagattgaaagctcaaatgaacgcaattggccgtaatcaatctatgacacgattgattgaattgaagaaaattgaaacgcaagttacacgtgaattagctgcagctgaaaccgcgcttggtgcagcccaaacaaaagccaatgccacaaaggttacagcattatcaactttaggaaaattaggttcaggagcattgggactagtaggagggccaatcggtgcattggcattgggtgtaacagcattatccgctacctatgtttattttaaggacaaagcagaagaggctaataagaagctcgaggagcaagcggacgttgccaatagatctgcaacagaattaaaaaatttacagggtcaggccagaacaaaagcgattgatgatttaactacagcatttaaagctcagaatgatgagcttaaaaaaatggaatacggtgtaggctcagctctaattgatatccaaaactatgcacaaggcaatgtcgaagttacacgcatttcaaatgaggctcgtttaggaaccattagctataaggaggccctgcaacaactggcgaaagaaaagttacctccgacacttagaaaggcgctcgaggagcaaattgagaaatacaaggaagcatatgataaagccgataaaacaaaaacggccattaagcttttcggtaaagaagttgaattgacgggcaacaaggctcaaaacgccgctattgaacaacaaaaacatgctgatgctatcaggaatactaaagaggcagctgatgaagctcagaagtcactaagaaaaatgtatgaagacaaattgttcgatacaaaatttgttgaaaaggttatgcagcgcggatttactgaagctcaagcaaatgatcttttaaaaatctataaagattcaattgctaagggtttaaaagccgctgacctagagactattaatcttcaaaaagcgatttggaaatccgaagaatcgatcaaagcgcaaacagatgcaagaacagagtctattcgtgaacaaaataaagaattaaaaaatcagcaaaaagttatggctgtgaacgctcaggtaaaagccaatgcttctaaatataatttttcaaatcttgaatccaaatatgaacttttaccaggtctactttctgcgattaatatgcaagaaagtaaggggaaagcaagtgcaattggcccacaaactaaatatggaacagctaagggcgggtttcaaatgctggacggtacagctaagcgctggggtctagtcggcaaagaggtttttgatactggcaaagcagctgaagcagcggccaaatatttaaacttcctctttaaaaagtttggtaattgggataaggctatttctgcttatcatgcaggtgaagggaatgttgaaaaaggaacaaacattggacctgttaatcgccagtacgtcaaaaacgttaaaggttatgtggctggaaataatggttttgatatgtctggagtgtcagaaaaagattttgactcatatctcaatcaatttctaaagactcaagaagaggcagaaaaactacgagatcaatatcttgataaagatactctcgcagaaaaagagcatcaaaaaacaataagtgacctaaagctgcattttaaaggtgaagaattaaaacgtttaactgaaaaagaagttgggcggtttaatgcacaaaagcaactcaatgctcagcaattagaatatgaacttaatgaatatcacttgaatgaagttcaaaaacttgagatgcaaaagcaaactaaattgctgcaaattaaggcatcaaaagaatattctgatactgaaaaagagattcgtagcaaggctgtaacagccatgtttgattatgaaattgcggaatatcgcaaacttcaaaagcaaaagctcgaagaatatcaaaaagcaatgtatgagcaagcatctattgctcaagctgaggctttaaacttaaaagctaagaagaacctcactcccgaccaactcgatgcatggaacttacagaatcaatatagtgatgatatgcagaaggctaatgaatcttattcctctactgcaaaatcaatctctgaagataaaacgattgttgatgaagaaaagcgttttcaagctttgttagatgctgaagaaatatttcgtcagcaaaaatatgcaattaatgaaaaatatacgcttcttgagcaagacttacagaaatctgctagagagcgagaaatggaagggtatgggcagttgatgtctcaagcttcaacggtttggggaaatatgactgcaatggttagggagtctgctggagagcaaagtagcgcttataaagcaatgtttttagttcaacaaggtattgcaattgcacaaggtattattagtacagagcttgcagcagccaaagctttagagctcggcccaattttaggtattccagctgccgccgtcgtacgtggtttgggctatgcatctgtaggcctgattgcagcacaaacaatcgcaggtttctctgatggtggctatacaggaaatgggcttaaacatactccagctggagtagtgcataagggcgaagtcgtatggtcacaagatgatattaaacgttggggtggggtaagtgttgtcgaatctatgcggacgagttcaccaagtggttatgctaacggtggctatgtatcaaacaatcaatctgatgccattgcaacgagaagagagtctagacaatttgaagcgattaattcgaaccaaaagcaatccaattcgaacgagaccccgatcactgtttatgtcactgtaagctctgatggctcaagcaaaactgagactcagaatgattcaaaacagctaggccagttgattggtaatgctgtaagaaccattattcggcaagagcaaagacagggtggtttgttatcaaagtag

SEQ ID NO: 57144 - DNA, 417 bp, Acinetobacter baumannii
atgatgggtaatttcatgaaaaagattattttattgggcttagtttttggtcttggtggttgtgcagctacaactgatatgatgaacaatcaatacatgtctgttattccgacagcaacggatctaaacggatactggtcgggcaacaatggtccatatgctgtgacttattccttcaaaaaagacggtacagggcttatgtgttctagttggaacggtaaagattctgtcgaaaaattaaaagtaagtggaaatgaagtcatcgttcaatcaggtttgaagcaaactatcaaaagtaaaacagactctaaacttgagttaaaagctaactactatggtggaggtagttaccagtacagcccagatccaaacttacaaaatgcatcgccatattgtgagaaagcactgagaaattaa

SEQ ID NO: 57145 - DNA, 405 bp, Acinetobacter baumannii
atgttatatccgattgcaattgaaatgggatcagataccgaggcattcggtgtcatcgttcctgatatacccggttgccacagcgccggtgatacccttgaagaagctctcgataatattaaagaagcgattgcagggcatttagagattcttgctgaagatggtgaagagattcctttagcttcatcggtaagaaaatttatggaacttcctgaatttgatggaatggtttggttcgtaactgaggttgatttaggtcgttatcttggaacccctgaaaaaatcaacgtatccttgcctagtcgtttgattcgtaagattgatgatagcgtgggtaaagataagcagtataaaacccgatctgcatttttggcagctggtgctgaaaagctactacatgcttaa

SEQ ID NO: 57146 - DNA, 534 bp, Acinetobacter baumannii
atggctttaaaagtaagcattcagactagtaaaacagttagtaaatggcgcaaatatgttgacggggagggcaatgtattagctgaatttaaaattcgaggtatcgcatataagccttatcaagttgcccttgagcgagcaaacaatcaaatcacctctaagggttatgatgttagcaaggccactatagaggataaactctatcatgagcttcttttagaagcggctgcatgccatttaattgaggactggaaaggcgtcgtttttgaagaagagaatgccgaaaaagaaactgtagtaacggagccagaatattcacctgaaaatgcgacaaagcttttaaatatgggtgatattggtgtagcaatctggctttatataagacaagaagcagaaactatccaaaaggaggcggattcatataaggaagaagttgtgggaaagtcctcaagctctacaactggtccaagttcaactcagaagaagaagcgagcgactacagccagaagcaagccgcaatcgccaaagccttaa

SEQ ID NO: 57147 - DNA, 318 bp, Acinetobacter baumannii
atgaaaccagaacagtttattcgtgagtacgggcctaacactttcagaatatcaatgtcatttgtcaacactgctaagtatttggtggttcatgaaggtgaaattgattttacagatgaaatcaagcctcaccatggcgatcgtgtatttgagcgtgatgtagtcaagcgccttgtggagtctgttgatttagtaaatagcttaggtggattaaaagcagcacgttcagaagctcataaagattgctttgcgtataaccagctattgctagccgctattgcagcatacgaatcaatatacggaggcggggatgagtaa

SEQ ID NO: 57148 - DNA, 216 bp, Acinetobacter baumannii
atgagtaatttcggtaagtgtgaaatatgtggacgtgatgggaagttagttcgacaagagttaatcccttacaacccaatcctcaaaatagagccatgggttttccgttactacatgtgccagtggcatagagctgttgaaactaaacgtggtcttttatttgaaccaatggaatatatcgctgatgaagtgattctaggagccagccatgagtga

SEQ ID NO: 57149 - DNA, 303 bp, Acinetobacter baumannii
atgagtgagtttaaagtcggggataaggttgttgttaaggacacaccattttggccagatgatcattttattcaaactgtgaaagctgagcatattggtcagtggtacatgaattcatggagattggcagagcctgctgaagtacaggcaggcttccgcaaaggttgcaaagcttttgatgattattggtgtggcagaagcgaaaggtatgaacttaaagcaacagaaatgccaaacgatatgggcgacgacttccccatagaaaaccacatcagcccgctgtgtaaatcaaaggatgtttga

SEQ ID NO: 57150 - DNA, 528 bp, Acinetobacter baumannii
atgagcaaattattagcacgatctttatgcgcatatattggcactaaatcagtattagctactcaaatgacgcgtggagaatataacgaatatcgcgggtggcaaattcctgaaaatgaagatcctacagaacaaggctatttggttgaatatgtagatggcgggaagccaaatgatgagcgtcatgcaggatatatctcttggtcacctgctgatgtatttgaacgtagctataagccaccaaaactaaactcaaatcttacgtttggcgaagcattagaacatctaaaaaaaggtgaaaaagttgctcgtcttggttggaatgggaagggaatgtggctaatacttactaaaggccgtgtggttgaaaaccttgagccaaatagtttttatgagaaaagtggttttaaggctccagtaactatttgtagccatattgatatgaaggcagctgacggatcaatggttattggttggcttgctagccaaacagatatgttagctgaagactggatggttcttagttaa

SEQ ID NO: 57151 - DNA, 198 bp, Acinetobacter baumannii
atgtgtggagcactttcagcttcaagagaagcatttgagatgagcgaacgttcatcacggaagcgaccagctcagaagtcaaatgacaaacctagagaagtgtcaaaaaaagaatcattcaaatcatcaggatatgatgctgtcgatgcgcaactaaaaaatgctcaaagcatcatcatttattcatcactattttaa

SEQ ID NO: 57152 - DNA, 225 bp, Acinetobacter baumannii
atgagtaataagaaaaaatccccatacacagattactataaccatgaaatatttgaagatgacttaattcaacatccttcaggtgaaaaaggaattgtggtctttgaagagagatcagacagcgattcagataattggctagtcctatatgaagatggtattaaatcacggttatgtcttcaagttggcgataaaggccaagctgttgtggtaaatgcacattag

SEQ ID NO: 57153 - DNA, 2307 bp, Acinetobacter baumannii
atggcagtaccagaacagacgccatttatagaatatacagcgaatggaaccactacagtttatccgcttacgtttgactgtgataaatctgaatacttgattgtatctcttgatggggaagaggcgccagttggatcatggagccttactggcggctcaataactttcaattctgcacctgctaatggtgtgctgattacaattgaaagaaatacaccattccgtaggaccactgagtatcaatcttataacaactcatttcgtccatcgcctgtaaacaaagactttgatttaatctggtggaagcttcaggagcttggttatagagatcaagtaatttggctcgctttagttaaagagattgctgatcgtattgcaggtgatgacaatctacaaaaccaaataaacacgattgacgagtggcttgataatctacaacaaaacgtaaatgaaaatacgagtgacattgctcaattagttactgatctatcaaaagaaattgcagaccgtatagctaatgatgaagctctaaaagaaatgttcctcgcaatgatggatgaagccattaacgaggggacaattaatgcattagctattacgcatcttgattcatgggaagccttagaaagtgttactaatgtatgggacggacgcacaatctatgtaaaagatttaggcaactatcgttacgatgcattaacaacatcttgggtgaaggcatatcaagatgctgataatgtaaaagatggtgcagaaagtcaaaagcaaatcaatgatgaatcagtgcgaaagtttaactcgttaagtgatttattgtcatatacccctagagccgaaggccaaactgtaattttacagtctaaaaatggagtagatgatggtcgtatttttacctatgactcaacattagcggccactaacaatggtggtacgattctaaacggatgggtctttaagcctaaaggtattttgaaaacttcatggtggggtttgcctaaacaaactgggaattgttatagcgaattattaaccatggtaaatattgcaaaagccaatggtctagttattgaagttgatttacctggtacttacgatctcggtgataattacttcccagttcgtaaccctgcaactccatcagcatcgatacagtttgctgattacaataacttaaccatcaaatgtgttgagggcgttatttttaaaacgactgcggtaactggtcgagatgtatttcaacttaatgctgttaagaatttcaaattactaggttttcctaagataactagttcaataacaaattattcaggtgccggatcaaatggtgtatcaattacacatggtggggagaatattactatcgaagtggagggagagaatttaccttatgttgttaaatcgaattatgtagatgggggtaaagcggtaagtatccagacaggtgctgtttcaaatcttccaattagaaatataagtattactcttagaaaaacagcgaatgttggttatggatttaatgctgatattagttcattttatttgcaaaacaatcctatatcaaacattaaggtccgtggctttatcgaagatgcatatcgcggtgtagctatagttttagatcaaacagcagtgagtttgggtgcaaacggacttaacgtaggaattgatattgatgtggtcacaaaagattgccaacagcactatattgaacagcggtgctggaatttaaaaagtattgtttatgcgatcaataccaagacagctgcaaacttaagaaaaggcgtttcatatgacactgaagttcatgttgccagcataacaggtaagaagtatggatctgttttcattggtggttcagtattggatgtggatactgtttataaagtgggtggtactggatctaatggaggtgcaacgggcgcttgctcatttgctgatatgacctttaaagtaaacttcaccagtgcaactacgcaatttaatatcataaatagcggtggtaatatcgtgaactcatgtgatatttctacagcaaacgtcacaaatcttgatttaattacgttgcttaaatatagcaatacagtcaatcagtctggggctattgttaataaagactttaaaatttatgacactgtgacgttaacaagtacagcagactctcaaaagaaatttggagtaacagcgaatggtgttatggagctatcaggtttaacggccgggttggttggttcttctcaagtcaagaaaatacctattcgagatttgagtgataatgttattttatggattccagcatactcttcataa

SEQ ID NO: 57154 - DNA, 855 bp, Acinetobacter baumannii
atgactccattaagagtatttgacgaaattaaattaaaagcgctttttgttgttaatcatagtggcgggaaggatagccaagccatgatgattaagctgctggagtttgttcctaaggagcaaattctggtagtgcatgccagtctaggttttatggagtggcctggtgcattggaactcgcccgtgaacaagctgaaatagctggggttccttttatcgtagctaaagctaaaaaatcttttcttgatatggttctaaaacgttattcagaacggccagaagttccttcatttccttcacctaagtatcgtcaatgcactagtgatttaaaacgaggtccaattactcgagagatacgccgttatgcaaaagctaatggctttgatcgtatcgttaattgtgttggcttaagagctgaagaatccagtaaccgagcgaagcagcagatatttaagattgcatcagaaaatgggaaagcaggccgtacctggtatgactatttgccaatccattcattaacaaccagtgaagtttttaaaaccattaaaaatgctggtcagatacctcactgggcatatcaggataatgatcgattaagttgcatcacatgcattatgggtagcccaaaagaccttgttcacggtgcagttaaaaatcctcaaatttatgcattgatgtgcctagttgaagaaatcactgggtattcaatgcatgctagtttgcgcactctcccagatctaaccggtatacatccaaattattcacttttgtatgaataccagaatcttgtttcaaagttttcaaatacgcgctctaacagaaaacgtattccagtgctggaggttgcagcatga

SEQ ID NO: 57155 - DNA, 216 bp, Acinetobacter baumannii
atgactaatgctcctttgccaaaaacgattcagaccgaattaggtaccgaaaaactttgtattcattgcaaagaatattacccaatggatgaagagttcttctggcgtaaaggtcataccaaaaaaaatggtgcaccggctttttgtgctgcatgtaaagcttgttatgacatgcgatataagcgcagaaaatacaaagaaggagttaccacatga

SEQ ID NO: 57156 - DNA, 327 bp, Acinetobacter baumannii
atgtctaatttatcaaatcagtcgaataaagacaaattgttagagcagaaacgtcagcagagttaccaaagttggcatgagccagctttaataactttggctgggttgctaaaaaaacgtcaggaaaatttagctcgtggaaaccgcgatataaaaaatgcggcagttacacgtgatgaatttatgcaagctcttgtgaatcaacacggtgtgcatgggattaatctttatcacgcaggggtaatcatctcgagcctttatcgagcaaagcggatccgatacttgggtagctttattcagattttggatgaaggggagcctaaatga

SEQ ID NO: 57157 - DNA, 306 bp, Acinetobacter baumannii
atgcaaaacttaaatacgcattcaaagacaagcaaaaaattattagcaccaatgtcgacaagagtgccaatcgaagtgcaagaacttgtggatgaattggcgggtggtgctagagctaagtggattagagaggccattgaactaaagatcgaagttgacttgggccaatcatctattgaagagctaaaaaaatcaaagaatacaatgcattcaattgaatacatgagtttctttaaaagtattttttccgtattccaaacaaataaaaagcccgatgtgcgagatcgagctttaagtgttcattaa

SEQ ID NO: 57158 - DNA, 189 bp, Acinetobacter baumannii
atgaaacaaaactctatttcaagtcaaacctcggcgcgcttgtttcagcacccgactattgaagagcaacgcccttcacgcttagccgtttataaagccaatgcaattgactttattaagttcattatcctctcgatcattctttgggtcgtaatctcaaacgcaattgtttggatgtttgggggctag

SEQ ID NO: 57159 - DNA, 1029 bp, Acinetobacter baumannii
atgaatgctgcaattaattccgatgttttagaccaagttatttcagaaaacgttctagatcttcctggtcaagaacgtgtatatcaccacccaaccttcctaaaagttattaatgagctcgaagctccaaagagtcatgatagcgattacggcggttataagtatcgttcagctgaagatattcaagctgctttaaaaccgcttttgcttaaatataagtgcatggtttttacacgtgaatttgagattaaagatggttttaaggtttatgcatacatagtttttaaagatcaaaagtacatccgctgtgatttacctggtgtagcagtttttgattttgtaaaagacttagaaaagaataagaaaatatcaaagacccagcagtttgctgcttatcaaagttatgcaaaaaaatatgctctttgtaatttacttttgattgacgattcacagaacgatcttgatgctcttactaatcagaatatccaaaatgagcaacagtctaataacaagaagaactatcagaatcggtctaataaccgagtggtaacacaagcagactgtgaccgagctttaaaacaaattgaggaattgcctttaaacacttcacctgagcaggctgaatatattttcgatggattgcgtaatcaatatcctgaatttgataagcagatctatgaagcaggttgtgcgaaatacaacgccatcatgctgcatttacaaagtattagccagcaacaacaatctggccagcagtccagtaatacaacgcagcaacaaaaacagcagactcaacaacaacgtggcagcacagcccaagctcaaaactcaccaaatacacctaagccaggttgtatttcaaataagcaacgtgacgagctgcaggcattcatcaatgagcgtggcctagatactaaatatgtatgtgaatttctaggtatagatgccttggctgaaattcaagctgcaaaatttgaccaggtaaaaattgacatcgataaattagctaaacaggaattgagttcatga

SEQ ID NO: 57160 - DNA, 681 bp, Acinetobacter baumannii
atgaagggattaattttagacactgaaactcatgatttggaagggtatccaatcgaaatcgctcatgttccagttggttttttagaaaatggcgagctgattgtggataaagaagcttgctttgatgagtactactcttgtcctgagcctattaactatggagcaatggcagtacaccatattcttgaaacagacattgcagataagcctagttatgaaacttttcgcttgcctgaaggtgttcaatacatcattggccataatgttgattatgacattcgagctatcaaactcgctgacaaatcagttaatgctcaatcgatttgtacactagctttagctcgaatggtttggccagatgcagctcataacctatcggctcttatttatatgctttcgaaaggttcactgaaagcgcgtgaatcaattcgaaatgcacataacgcaaaacaagacattttgctaactgctgccctactaaaacagatttgcaagaacttaggcattaaggatatgcgttccctattccttgcctctgaacatgctcgcatccctaccaaaataacctttggaaaacataaaggtatggctattaaagatctgcctgccgattacgttacctggttgttaaaacaggatgacttagacccttacctcagcaaagcactactaaaaggataa

SEQ ID NO: 57161 - DNA, 1350 bp, Acinetobacter baumannii
atgaatattttaaataatcaagaagcttttgcagctttgcaaaaaggtaaaaacttactttgtcgttatatggatggtgactttctagaactagatcagttccctgcgaccgtgtttgggatgcctgactatcagttttgcatcgatattgaaaaaatcgaacttgctggttttacttttactaaaccttgtactttggatgagctagttgatggccaagaaatcttttgggttgaattttctaaatcaacaatcattgcaggtgatttcaacttaaaaaatacttacctcgtaaatcttgttaataatggtgttgtgcagcgagatttgcaaaatgctcaatttcttttagaagcttatcaagctcttattggtattaatcctggaattacggttactacttgcgatcctatttttaatgatccagatgaagataaagaactttctgcagaaacaaagccagcaagagcaaaaggcaaaaagaaaacaaaagatttgcctgcagatccgcaactagttgaagctgaaaaagacattgtgcttgatggtattagtcgtagcaaaaccgaatatgagattgattcactttgttatgacctagaaaaacacagcttcacacctgagcaattagaagctattcaaaatgctaaagatgcaaaattagctgaattggcatcaattaaaactgaagctgaaagtgaaaaacatgaattatttacttcagctgaagaagaatcccaagcgcctgaattatcagttttgtgtgaagctttcattgatgaaatttctaattcgaaaagcgtagaggatttaggttttattcgtagccgaattaactccaacggtgctttaacagaagttgaaaatgctgagctttgtacccgtctaaatatcaaggcaaaaacttttgaaaagactgattccaataatattgttgatgttgctgaagtcaaaaaaactgaagaacgtaaaccgattgaagaggaagaaggtaaatatcaaaaaaagcttgctgaactgaaaaagcgtgtagatgaatcaaagacagttgccgaagttaatgctgtcactaagtacaccaacccttggtcagcggaacagcgtgcacctttgttgcaatatatgcataaacgcctcgaggagctaaaaaaagagaagcaagagaatgaaccatctctttatatcaaaatccaaaatgcacctgacttagctgcattagatgcgtacgaaattgacatacatagtttagagccacttgctcagccaaaaatgatgcaagcagttatcactagaagaaaagaacttgatcaggctaaaaacgattatttgatcgatgaggatctgccatga

SEQ ID NO: 57162 - DNA, 144 bp, Acinetobacter baumannii
atgaaatttagatactcatcactaaacagaaccttaattgtcatcggcaatttcatgaatcaccactttgacaatgtgaatgcttcagaaatcgaacaatgtttgtatgacgcaatgttgaaagaaggtagctggagaaagtaa

SEQ ID NO: 57163 - DNA, 204 bp, Acinetobacter baumannii
atgcgaacggtcgttaaacgcaaaaacctcttagccttcaaaatctggttagcccttttgggctaccaggttcgagacatggaagatggacgtggttttaattttcggttcaagaaacagtacggaatggtaactcggggattggctggtaatgaactagcttactcactcggcaaagaatttgaagaacatttgagggcttag

SEQ ID NO: 57164 - DNA, 447 bp, Acinetobacter baumannii
atgaatgatttaaaaactaaacaagcattttgggctgaacaattgcccatatttaaagaaaaatattggattccaggtcatttagaagcacttgaatttgatatgaatggcggttgttttgatattgcagaaggtgtcaaaactgatctaagtgaagaagacctttttgataggtaccatcgtgtaaatagtgggtgggctatgtggataaaagccgttaatgttaacaagcctcaatggcaacctatcgaaactgcacctaaagatagagatgtcttacttagaaatcatgaagggatctttcagggtaaatgggatgaaaaatctaaacagtttcattcacttttgatggggtaccacggctgcggttgttgtgcaggagaagatccacagcctactcaatggatggagctaccactaattgttgaatctggagtaactccatga

SEQ ID NO: 57165 - DNA, 240 bp, Acinetobacter baumannii
atgaaaaagttattacttatagttttgctgctaagtggctgctcttctgctaacgatgccatcaaagcattaaaagccaatggatttaatgatatccagacacacggttatgcattttttggttgtggccaaggtgatactttttccacaaaattcacggcaaaaaaccataatgggcagaaagtaacaggtgttgtttgtagtgactggttgaaaggctcaaccattagatttgattga

SEQ ID NO: 57166 - DNA, 216 bp, Acinetobacter baumannii
atgaacgttattttaactgaagcagatttagatgttgcacttgaaaatggtgattcgtatagagacatccttaaccatgtcgcattcttacttattgaaaaagtattggtaaaaactagaggtaataaaactgaagcagcacaaattcttggtatgactcgagagactctaaataaagtaataaaacgcgttaaggcaaatcgggaggaagcttaa

SEQ ID NO: 57167 - DNA, 516 bp, Acinetobacter baumannii
ttgagccaccttttttatttcaaagccatttcccaaaccatttccgttaactcatcaattttgactttaccctcagatttataccaagttacagtccatgaaattgcaccgccaattaaggagattgcagttcgcgtgatgcaaacagccaaggcaatgggttaccaaaccgtcgcagtttattccgatgcagaccgtaatgctcgccatgtgcaagaggctgatgaagctgtttatattggtgcttcaaaagtatcagagtcttatctctccatcgctaaaattattgaagcttgcaaaaaaacaggggcggatgcagttcaccccggctatggttttttgtcagaaaatactgattttgctcaggcatgtatcgacaaccagattacctttattgggcctaccgcttctgcaattgagttaatgggcagtaaacgcctttcaaaaatcgccatgattgaggcgggcgtcccttgtgtgccggggtatgaaggtgaccgacaagatctcgaataa

SEQ ID NO: 57168 - DNA, 1980 bp, Acinetobacter baumannii
atgcggctgtggatacctgggcaaaaaaaacagctaaaaaaagagttgagcagctatgaatatgatgtctatggcaacttaaaaaaagaaatccattacagttcaattgatgctactgcagatgccacgacaggggtgatcaagaatcagggagttatggatgatgcagccgagctgattgactatgtctatgatgcacgtggtctattattgcagaagattacccgtcgtggtgcggaccgggccactgccggggtgacggcagcctcaagtgtacagtcatttgcctatgacgggatggggcgtgtactttcagaagtgggaagtacaggcaccaccagctatagttatggcaagagtaaaattaccgtaacgaatgcagcgggtttaagtacggttcaaagctttgacagttatggccgtttgactagtactgtacagactgccaccaatctatctgatcgtaccaccagctatctgtatgatgaggtgggccgtctgatttatagcaagcagccgagcggttatgagcaatttaatttctacgacaagaaaggccgtttaaccggtgtggtcgacagctcaggtctgttgaccgaatatgtctataacaagaatgatttacaaaccaaagaaatccgttatgccactgcggtgagtagtgctggatggcttgccaatggggtggtgagtaaaaaacgcgttgaagagatccgtcctgctgttgccggtctggaccgggtgattgagaagagttatgacagcagtagtcggttaatcagtgttaaacaggccaatggcttaatcactgaatatagctatgacagctatggcaatatcattcagactaaagctggcgaccggatcagccgctatttctataataaagacaacctgcaggtggctgccttagatgccgagggctatctggttgaaacggtttataacagtgctggccagaaagtccaggtgaatcgtcatagcaaagtcacgaccgagaacttgcgcgcgaccgggacattggcacagctcaaaccaaccggtacagataacacgatactgagcagtttctatttttatgatgcccaaggccagttgattgggacagtagatgaaaagaaatttgtcacggcctatttatataaccagaaaaccaatagtgtgaccacacgtcagtatgccttggccaccaccgccactgtgagcaataccagtgcgtgggcagatattattaagttacctgcagataacacctatcaagacacgacaaaatcctatgatctgcaagggcgtttgatcaaagtggtcgatccccgtcagggaactaccagctatgtctatgatgaggcggggcgtctcatcaaggagacgctggctgcaagtacaaccaatgaacgcgttgcctatacccgctataacgcctttggtgaagtcacccacatgttaaggggagaagctgccaatcagttaacgagtgggatgactgctgatcaggttgaacaggtctataacgagtacgccattaaaaccttctatgatgctgcgggcagaaaaacccaggtcatgagtgcagccgaacaactgactacgttctattatgataaagcaggtcgcctgacccatcagatcaatgctgaaggtaatgtggttgaaaccggctatagcctgtttggtgaggtcattagcagcacgcaatatagcaagagcctggcggctacagccaccgatctggctacaggtactacagccccgagtgcattggcgaaagcggtgggtgttggcaagaaccttaaagggggtgaactgaccacgacctttagcagtttggtgacagcgattaaagatgcgaccagagaccgtattgaaaactcgaatatgacaagctgggcaaggtcagtaaaaagaccgatgggctttctaatagtatcacatcagtttataacctgtatggtgagctggaacaacagacccagcaggtga

SEQ ID NO: 57169 - DNA, 1470 bp, Acinetobacter baumannii; identical to SEQ ID NO: 45458

SEQ ID NO: 57170 - DNA, 264 bp, Acinetobacter baumannii
atgcaaattttcacttataccgatgctcgcaataatctgaaaacggttttagaccgtgtcattgatgattcagatgttgcagtaattacgagaaaagaaggtcaacatgcagttgtaatgggacaagactattacaatagtataatggagacattgcacctcatgtcttctccaagtaatgcagcacacctagcgaaatcaattgcagaattacgggcatctaaagcaatcgaaagagaacttttagatgaaacggaagactag

SEQ ID NO: 57171 - DNA, 264 bp, Acinetobacter baumannii
atgaaacggaagactagttttactccaacagcttgggaggattatgtatattggcaaaaccaagacaaaaagactcttaagcgcatcaatacattaatcaaagagtgtcttcgtaccccctttgatggtattggcaagcctgaaccattactcggtgatttagcaggtttgtggagcagacgaatagatgaaaaaaatagattagtctatgaagtaactgatgtagcgataactatcatttcttgtcgttatcactacgaataa

SEQ ID NO: 57172 - DNA, 783 bp, Acinetobacter baumannii; identical to SEQ ID NO: 45400

SEQ ID NO: 57173 - DNA, 255 bp, Acinetobacter baumannii
atggataacgtagctcagctagaaactgatactaatttccaaagccgaaagaaaataacttggggtgtttttagtgtcctgctgttatttttatttgctggcatcttatattatttttttgtataccgattctatcaatctactgataatgcttatgtacaagccgatgtcacttgggtaatgccaaagatttcaggcgaagtgatggagttattaattaacgataatcagtttgtaaaaaaagggaaactttag

SEQ ID NO: 57174 - DNA, 705 bp, Acinetobacter baumannii; identical to SEQ ID NO: 45284

SEQ ID NO: 57175 - DNA, 720 bp, Acinetobacter baumannii; identical to SEQ ID NO: 49085

SEQ ID NO: 57176 - DNA, 399 bp, Acinetobacter baumannii
atgtacaagttaaagctaaatcctcagaccagcggctatggcgtaacaccgggtgatgatgtgaaacgtcagcagatggatggcggtcgtggtcgctattacatcgatgtaaaacgtaatagtcatattgtcgatgtgaactggaatttaagtaaatccgattttaataaaatgatggctttctggcgggtctaccagaataagccagcctcattctatgcggatctggtcattgatcagggaacacgtcagcaatatctatgcaatttcattccaaactcgttcaagaccaatgaagtgaatggcaacctttaccgggtaaatgcacagctcgaagttgttcaaaaccagcctaacctttcggccgatatagctttgattaaggattgggaggtctaa

SEQ ID NO: 57177 - DNA, 249 bp, Acinetobacter baumannii
atgcttgatattcttggcatgcgttcaatccacaatcccgcctatcaagctctgatcaaagaaatagtgagctaccgaaagtcaaaaaatatgactcaagtcgaactcgcttcaaaattagataagcctcaacaatatgtcgctaaggtagaaaatttagatcgacgaattgatgctattgaacttaaacaatggctaaaggcattgaatgccgatagagattttatgatcaaaattttgattgattag

SEQ ID NO: 57178 - DNA, 570 bp, Acinetobacter baumannii
atgaaaaaaattctattagctactttaattctgattggtacaaatgcaatggctgaaggggaaagcttgttcaccgagtacaccgtgaagccgggcgaatcattaaatgatatagccaagcgtaacgggaccacatgggcaaagctggcagccgataacaacctttccaattcatcgaaggtgtacgttggacaaaaactattgatcccaaaatcattaactaaagcagaatacgtaaatttgatttcaaaaacacgaccaacttgtaaaagtaaagccgaatgtgactcaaagatggaagctgctcatttgtgggtaagcaaaaatgcagattacaagatcagtaactcaaacaatgttttgattgagacttatgctccacgtgaatttactggcgacattgttgttgaagtcacaaaagaaccgtatgggaaggacacatacgcaatcgttgcaacgatgtcgtgcaacaacccaagcatgtttaaacagtatgaccctatgacaagctgcaatagaaatatttacaaggaagtggttaagttcaatgagtttgttaattcttattaa

SEQ ID NO: 57179 - DNA, 1227 bp, Acinetobacter baumannii
atgaagcgtacagagataaagcgtcgtccattatctgatacagcactagctaatcttgagcctgaatcaaaggaataccgggaactggacggcaatggtttgtattttcgtgtcaagcccgatggtaataagtcttggcaattacgctacaaaaagcctgatggtaaatggtcatggttaggaataggtggctatcctgaaataggtgggcaattggcacgaaagaaagcacaagagttaattgctgatattggtaaaggtgagaatccaatcatcactaagcaagaacgtaagcggaaagaacttgaagataacaatgccacttttgaggcactggcaagggaatggttagataccaaacaaaatagatgggtcgcagatacgatggtccgaaacaaaggggcattagaaaaacatatattccctgtttttggtaaacgcctatacaccacgatacgcccgattgaatggatgaatcatttaaaagggatacaacaagaacataagatttatgagcaagtaaaccgcatacgtgctatgtgtcgagatatttacgactatgccaaagtaacaggacgtattgattacaacccactggaggggctgcataaattcttagaacagggcaaaaaagagaatatggctcatgtggatgaaaaagaattaccgcaattattaagggctatagacaactacccaacacttgatagtcgcatcggattaaagcttttatctatgctgttttgccgccctagtgaattgagagaggcaacatgggatgagtttgacctagaaaattctctttgggaaattcctgaacaccgcatgaaaaaacgccgtgagcatattattccgttaccaactcaagcggtgcagttattaaatgaattacgagctttaagtggtaaatcagaatacttatttcctagtcggtcaaatagcaataagcctaaatcggatacagtatttattatggcgttacggcgcttgggttatgagggtagacagacaccgcacggctttagacatatcgccagtaccttgcttaacaacaagggttttgatgaaagacatattgaggcggcattggcgcatgttaaagatggtgtggcaggggtatataacaaagctcaatatctgaatgatcgaaagtacattatgcagtggtacgctgaccacttagagcaattgatggatgatcaaattatccaatttaaaaaagcatga

SEQ ID NO: 57180 - DNA, 2148 bp, Acinetobacter baumannii
gtgcttatttttcatggaaaacctgttcatggagctatcttcgatatggatgggacaatgtttgatactgaacggttgcggtttcaaacattgcaacaggcatctcaagaactcattgggcaggagttttcacacgaatatttaatgcaatgtttggggttaagtgcgactacagcggaaaagcttgcacaacgtttatacggagtagatgttccatataaggaaattcgaaaacgtgccgatgagatggaactagaacatattcgaaaacacggcgtacctattaaaaaaggtttggttcaagttctagagcgtttaagaaaatctggtttaagaatggctgtggctacttcaagccgtagagcaattgccgaagaatatttaattaatgcaaatgtttataaattttttgatgtcattacttgtggggatgaagtagaacaagggaagccacatccagaaatctttttaaaagcggctagtcaacttcatttagacgctaaccagtgtcttatgtttgaagattcggaaaatggtttaacttcagcacatacatcgaaaggtctaacgattttattaaaagatattaaagaacccaatgacgaaatgctggaaaaagcgcatttttattatgaccagatgtacgactttttaactgatcttgaccaatttattcccgttatggatatgccagagatacaggaaccttttccgcaaagtctgaatcagcttactgttggaatacatggtttcggtgctattggcggtggttatatagcgcaaatcttgtcgcattgggatggttatacgaaaccaaaacgtataattgcgtcaacacgaaatagtcttttccgcgaagctgtaaatgcgtttggaacctatagtattcgctatgggcaattttcttatgatgaacgtattgagaatatgaccattgttgattctgacaatgaacaacaaatgttagagatgtatactcattcaagtttgattgcattatgtttgcctgagcaagcgatcgaatctgaatcaaagataattgcaaaagggttatatgcgcgttttaattcgcaacttgaaatatgtatagaacctttaacctttctaattattttaaataaggttggtgcgaaatatttggttatgaagcatcttaaagaagctctactagagttaaccaacgatgaagatgtaaccgagcatattttaaaagagcattacttttgcgacaccgtagttaatcgcatggtttcaaaactttctaatcagaatttatatcgtcaacttcgtattaagcataattttcttgaacagcatttagaagatgtggagcaagaagaccaaatcgaaattgaagattgtaataaactgaatcaagatcaactaaatcaggcttctatctatgttgataacatgcgccgtaatttccagccgggacatatcttacaaagcatggatttaatcttgttccatagtgaaactgatatgccaatctatgtagagaaaggcagtcctttacttgaaaagttgcgtcaggtggtattggttgaccaaattactgacattcaactcattaaaaatcgtttatggaatggtgtacatgcgatgcttgcttggtatgcatctttaatgggttatgaatctattggtgttgccatgggcgatcattcagttaaagcatttgcagagaacttaattgcagaagtgaagcaaggacttgcaattgtattacctaactatgcaaaagatctggatcgaatgtcacaaagttttctagactcatgtgaatatgcatttaaagatccttgtcaacgcgtagctagagatccactacgcaaactcaatcataatgaacgtgtcatggcatcaattgctgtgaatatttgtcatgatttgccttataaaaatttattaaaaggtgccgctttaggttatgcctatgcgattcaatttttagaaattgaagagactaaagctgttgaacatctgcagcaacaaattcagaacctagacttgagtacaactcaaagaagacagcttgaagctgagttggttcaacttatccaatatttgttttctgaacaaggtaaacaaccattaggcattaagtcgaacaataccaaaactacatcaaatcaatatgtttga

SEQ ID NO: 57181 - DNA, 3753 bp, Acinetobacter baumannii
atgaacacaatggatacttttcatcaaatggataaatctcaccaaggctatatcaccgaattcaacgataaaagtgagtttgaacaacgcattaatacagcttggcgacgtgtcgaacctgaagctgtagaagagctattacaagctgctgcggtatctgatgatttagatcataaaatttatgaccttgcatttaaccttgcccataatttacgtgaacgtaagacttcttcaggtaaagcaggtattgttcaagggttattacaagaattttctctttcttcacaagaaggcgtggcgctcatgtgtcttgctgaagctttgcttcgtattccagacacagcaacacgtgatttgctcattcgcgataaaatcaatcaaggtaactggaaagaacatgttggccaaagcagcttaatgtttgtgaatgctgctgcatggggtctcatgttaactggtaagcttatggaaacaccaaagcaaaccagtctttcaagtgtacttactggccttttagcacgtagtggccgtggcattattcgtaaagcagttgacgttgcaatgcgtatgatgggtgaacagtttgtgactggtgaaaccatcgaagaagctgttgaccacgcaaaagtacttgaggataaaggtttccgctattcttatgacatgttaggtgaagctgccttaaccgaccatgacgctgaacgctactttaatgattacacacaagccattcatgcaattggtaaagcgtctaatggtaaaggcgtatatgatggcccaggtatctcaattaagctttctgctttgcatccacgttaccaacgtgcgcaaattgaacgtgttcacaaagaactctacggcaaagtatttgagctcgctcgtttagctaaacagtacaatattggtttaaatatcgatgcagaagaatcagagcgtttagaaatttctcttgagttacttgagcgtctctgttttgagccagaacttgcgaactggaaaggcattggtttcgtaattcaagcttaccaaaaacgctgcttctttgtggttgattatattattgaccttgctaagcgtagccaaaagcgtctgatgatccgtcttgtaaaaggcgcatattgggatagcgaaattaagaaagcacaaatcgaaggtatggatgactaccctgtcttcacgcgtaaagttcatactgatttgtcttatatcgcttgtgctaaaaaattacttgcagcaccagaatttatttatccgcaatttgcgacgcataatgctcaaactttagcaacgatctatcatttagcagatccaagcaaatattacgctggtcaatatgagttccaatgcttacatggtatgggcgagccgctttatgaacaagttgttggtccacgtgagcaaaataaattaggcgtgccatgccgtatttatgctccggttggtaaccacgaaacattgttagcttatttagtccgtcgtttacttgaaaatggcgcgaatacttcatttgttaaccgtattgccgataaaacacttaaagttgaagatcttatccagtctccaatttatgatattcgtaatgcagctaagcttgaaggttcagttggtttaaaacatccatcaattccactacctttagatatgtacggaacgcttcgtaaaaactctaaaggttatgacttagcaaatgacaccccacttgcagctttagatagcacagctcaagaattacgtaatcgtatttggcaaagccatccgttgttggctaatactgattctttagaacaaggtcattctgttgcaattacaaacccagcacaaaatgatgaaattgttggttatgtacaagaagctgatcttaagcatgtcgaaatcgctcttactgcagctgaacaaacccagtcagaatggtcaaatacacctaaggatcaacgcgctcaatacttaaaacgcgcagctgacctcatggaaagccgtattcaagagttgatggtattactttgccgtgaaagtggtaaaacttatgccaatgcgattgcagaagttcgtgaggctgtagatttcctacgttactatgcaacccaagttgaaaatcttcctgcaaatacagttattcagcctttaggtactgtactttgtattagcccatggaacttccctcttgcaattttctcaggtcaaattgctgcggcattagtcagtggtaactgtgttattgctaaaccagctgaacaaactccattgatcgcagcccaagcagttcagattttatgggaagctggtattccacatggtgctgtacagctacttcctggccgcggtgaaacagtaggtgctcagctcagccaagatagccgtattgatggcattatgtttactggctcgactgaagttgcaaaaattttacagaagaccgttgcaaaacgtttatctgaaaatggtcaatctattccactcattgcagagactggcggtcaaaatgcaatgattgttgactcatctgctttaactgaacaagttgtattagatgttgtaagttctgcttttgatagcgcaggtcaacgctgctctgctttacgtattttatgtgtacaagaagacagtgctgcaaccgttattaaaatgcttaaaggtgcaatgcaacagttgatcgtaggtaaccctgcaattttaaaaactgacattggtcctgttattgatgacgaagcaaaacagacgattgaccagcacatccagaaaatgaaatcgaagggttatccggtacatcaattgatgtttggtgcaacaagccaaacagaattagataaaggaacttttgttgtgccaacagcaattgaactgcctaatcttgatgacatacaacgtgaagtttttggtccggttttacacatcattacctataagtatggtgaacttgagcaactcatctcaagaattaatgcgaaaggttatggtttaaccatgggtctgcatacccgtattgatgaaaccatccaaaccgtaattcaacatgctgaagtgggtaacctttatatcaaccgtaatattgttggtgctgttgttggcgtacaaccattcggtggtgaaggtttatctggtacaggccctaaagcgggtggccctctttatatgtatcgcttaatgcagcattgttctaacaaagtattagcaactccatttgcggtaaaaaatgagcaaaccatttttgaaggctttaaccgtgaggtttatcaaagcttacaaaactgggcaaaacaacatttaccacaagcaaaccgtgaaattgaaccttttggtgttggtaagttttatgagttacaaggccctactggagaaagtaaccaatatattattttgccgcgtcatcgtgttctttcaattgctgatacagaacaagatcaattgcatcagttacttgcaatctttgcagttggcagccaagctgctgtaatgccaaatagtccattattggcaaaacataaacaaacgttgccaaaagatgtacttgatgcgattacaaccattaaaaacatcactacagatgattttgatgcagttttacatcatggcaaccgcgaagagatcttctcattacagcaagaaattgctagccgttctggcgcaattgttggtattactcatgttgaaccaaatgagtcgattccacttgaacgtttggtaattgaacgtgcaattagcgtaaatacagctgcggctggcggtaatgcaagcttaatgacaatgtctgaataa

SEQ ID NO: 57182 - DNA, 582 bp, Acinetobacter baumannii
atgtgtataagagacagactagttaaaatttttaacacacaaaacacactatcaaaaccaacttatcaaaataaaaaaaatacatggtttgttttagaaaatttgaaattagaaatttgttctatcaatccgtcaatcaataccgacgagatttttaatgcctcttggtttgagagagagctgaaagctttcaagggattcaatgaggggcgtaatcattctgatagcgacatgattaaattctttgcagagtggatgcttaaagcacgcgctaaatacgcaaagatgaaaacaccggcacctcgtacttttgaaaacaaaaactcaaatgaccatcaattcattcctgaaaacacattgcctgaagtaataacttttgcttcagataaacaactttttgcttttgctcgccgtttagctttgcatccgaatttgccagaaaaatacacgcagccaggtgaatcttggcaagacgtgggcaagcgtattgcaaatttacttgcggatcccgagaaacaaaaaccgttcattccatatttaatcgaaatgggctttaaaaacccaaccaagggggctgcatga

SEQ ID NO: 57183 - DNA, 474 bp, Acinetobacter baumannii
atgattaccttgaacacagctagtggaattcaaaaattaaaagaggtgcttcaggaatttgattcttgtatgtacatcgaacgcgacagtttttttgataagcattatgccctggttaaaagcgaagacgacatcgaaaaaatacgcaatacagttaaagcagcagaactaagcaagggtacacgtgtgcatgtggatttcactcatgtaccagacaagggacaggacagtattcgctttgtgggtaatggcaccgtcgatctttttgaagataaccgggtgtttggacgtttagatgacggtcgaccattttgctgtttggtctctgatattgagatccaagagcctgaagatcagcaaagcaaagcctcacaaaaaattgatggccatgatgaatcaaaagcaatcaataaaacttttttctttctttgtttgttattgggatgtgcagtagttaaggggtgtggccaatga

SEQ ID NO: 57184 - DNA, 705 bp, Acinetobacter baumannii
atgagcaaactaacacaccgccagctttgtgaaatcggcgcaaaatttctaaaacgccctgaatccgctaatggccatggttgtcatttcacaataattgaagcgtcctgttatggcgaaaaccctgatgtttttggtgtacgtcatggcattcattcgcatgggataggaacttttctactcgaggcgaaaacaagtcgggcagatttcttggcagaccgttcgaaacctcatcgtttaaatcctgaaatgggtatgggcaaataccgttattacatttgccccactggtttaattaagcctgaggaactgcctgaaaaatggggtcttatttacgttagtgaaaagggaatttgtaaagtaattgcaggggttttatctgcaccaaaaatcaaatatttctgcaaatggtccaataaaaataaaagtcatttcgatcatgaaaaagttgaagagaactttaagtctttagcttttgaagtacgaaacattcagaacgaaatgaatcttttaaccatggctttagctcgcctacaggatccagagcagatcctttacatgcagcgtaattacatacgattagagcaaaagaatgctgagcaggtaaatcaaatccgaaaattacaacgtgatctgaagctaaacactttcgttaaagcagttagtcagttaggtgatggaggagatcttcatgcaagcgtctaa

SEQ ID NO: 57185 - DNA, 417 bp, Acinetobacter baumannii
atgcaagcgtctaaatttattcgtgacaatgggattcaagcagcagccaaagtaatcaattctgcaccaggtaatgctgaaagttattgggggggatattactttcgagaaaaacccgattttcaattccacaatggaatacatgagtgctggaacttgactgaaaacaacggggaatatttcaaaaaacgtggctttgaaccagtaattattaaagacctaaaacgccttgttgagtcagttgattacttaaacgaatggtactcaggaaaaattgatgatgcttatgaccatgtggaaagtatgtatggaatgttaaagctgagacctcaatttcccaatcttcatgatcgtatcaagcttgtagaaggccatttatcaaattacgaatcaatatacggagcaagccatgcttga

SEQ ID NO: 57186 - DNA, 198 bp, Acinetobacter baumannii
atgcttgaagaaatatcaaaacagcgcccagaaggtgcaacacattggcaagctggagtgtattaccgactaagtaaatacggtgtttgggcaaaatgggataaaagttggatcacttgctttaaatggccggatggtgtcatgacgcctttactaggcaatgatgaagtgagagaggcgggtgtaaatcatgagtga

SEQ ID NO: 57187 - DNA, 423 bp, Acinetobacter baumannii
atgagtgagcccaagttatcacaaaggcagttggtgctcatccgtagagctgctgaagatgcgattcatgcatgtaatagacattatggaccatttgtagatgtggttgcccatcccttgaatatctgcgctttagtggatatggcccaaacgagcattggtcagcaaggggagctgaataagcttaaaggtcaaatggaacgtgcgggttataccgataacggtggggagttgatgaaaccaccaataggaaagcctccacgttttgatttattggatgagcttaaaaattcaataagtgaaatggctcaaaaatatagaactgaagcacacgaattaagtcgtattagagattttgaaaagtctcagatgtatagccattttgctaatgaattggatcgtttaaataagggaagtgcttga

SEQ ID NO: 57188 - DNA, 408 bp, Acinetobacter baumannii
atgacatccatgagcttagctgactatcactcaaagtttccgaatggccacaaagctaaaaagggtcgtaataagtttaatgcctctaaggttcaattagatggaatgacctttgatagcaccaaagaatacaaacgatacatcgaacttaaagcattgcaacaacgcggtgaaatttttggtttagagcatcatacaaaatttgaattagcacctagaacaaagatagagggggagaaacgcacaaagccagcgcttagatattttgcggattttacttattacctcatcaatggcgaatacatcgttgaggacgttaaatctattgctactagaaagctgccaagttatcgcaacaagaagcacctgatgaagacggtgcacggtatagatgttagagaggtttga

SEQ ID NO: 57189 - DNA, 285 bp, Acinetobacter baumannii
atgagcgacattgaaacggtaggctggacagcagataagcggtttttcattttaaaaataaatatggaaactagtttaactacagatgagtgcgaggttttggctgggctgtttgtagagaaatatagtctggagttttctggctgccagtttcgagggaggctcgcggtaatgtgtggggataaagtttatataaatccttgggcactagatcaagaagcaagtgtagatgaaccagttgaggaacttttatttagtgagttccagcagcttttaaataattga

SEQ ID NO: 57190 - DNA, 567 bp, Acinetobacter baumannii
atgcaaacttcgtttgtaatggattggtcaagatttcaaatttttgaatggttcgtaagtggcggaagccttaaatcaccatcttatggggctgcgaatgttaggtgtacagatgggaggtcaatagactttcaagataaattaggggtggtagctgctatgggtgatcaacttacaaaatcggttgcaatggtcattatgaccgaaggaaaatcacaacaggattatgagtacgttaggaatcacctggcgaaaatcatgatggatggagccaaaaaggataaaagaagagaaccggaaggaatcgctatttatcatttagcctggttaattgcccgtattgttattgactatgctttagatccagagctggagaacggacataaagatccagggcgcttagtttatgccggcattagaagttttcagatgaatcctgaggtgtatcgtcaaacatggaagcggtacgaaaaattaatggtaactgcattagaagaagaaattaaaaaagctacgaaaattgctaagcgttataaggaagaaactttaaatgaggtaagaaattag

SEQ ID NO: 57191 - DNA, 231 bp, Acinetobacter baumannii
atgactatgacaaacgcagaattagagaatgaaattaatgctcttaaaacaaaagtaacagctcttcaaggaactgttagcaacaaagctgatgcttcagcagttaatgctttgacaacccgagttacgagtgttgaaggggtgaatacaagccaggggagttcaatcactactttgaataatggcttaaatgcagttcagacgcgtgtaactgcattagaaaataaataa

SEQ ID NO: 57192 - DNA, 198 bp, Acinetobacter baumannii
gtgcgtatgcgtcgattaatgttagctgcagcaacaggattaatggcttttaattttagtgctttaacagctatggctgctgctatgggtgaagcttcaccatttgtaaataaattaaatagtgtgaaaagcaagcccaataaattaagccaaaagaagaaacgccttattgctcgtcgtctaaacaaacataagtga

SEQ ID NO: 57193 - DNA, 471 bp, Acinetobacter baumannii
atggcaacactaaaagagcctgtgaaaatctttatagttcagtctcttgcttgtcgtgacacacctcaagaagtagcagaactcgtaaaacaagaatttggcgttgatattgatcgcgttcaagttgcaacttatgacccaactaaggctgctggtaagaatttaagtaaaaagtatatcgagctatttgagaaaaccagagatgagtttgacaagggtttagttgatattccaattgccaataagtactaccgtctgaagcaatatcaaagacaacttgatagaacgcgaaatgttaaaacagcgttaaaaattctagagcaggctgcaaaagacatcggtggacaattcacgaatcgacaagaaataaccggtaaagacggcggtccagttcaaacggtcaattcagatgttcctgttccaatggaagagtacttaaaagcacggagggaggtcgtagatgagtactga

SEQ ID NO: 57194 - DNA, 5634 bp, Acinetobacter baumannii
ttggatgaagcactgaaatcggcaaatgacagtgattcattggcaggcgattataactgtaagaatcctgacatgtggtatagccattacggttatgacatgtctcagtattttaaaactacaacaactgggaaaataggtaatacagttttcagaaaggatacttcaaatccagttaactgttttaattacaataaacaatcactaccaaatacacgaacatatattgtgagtttccttgttcgtcgtagctccgattcaaatggtctttgttacattccaattggtcgtgcaaaaaatgatggggtattttcaacagcaaattatactagtgtaagtgttccaattgctgaaatcccagcaaatgagacttggactcttatttcaaaagtcatcaacatgacttcagttgctgatacatatccgcaaattcagttaggtattgctttaggtcatactggaaatgcgggttggtgggaagcacaagcatataaaattacaccagttctaaatgagtcagatgtagacagcacaattgttaagtcttctattcttgttgattactcaagtaagtcagatacgactaaagcaatctccgctgctactgagtctcttgaagccaaattccgtcagaaatttggtgatctatggactaatagttcagcaactcttgatagtactcgttacacgaaaactgaaacgaaccaagcgatagcagaggaaagtaaaatcatcaaagccgctatttctactagcgggggcgataatattattaaaaatggtgatttttctaagcctcttgaaatttcaaattggcgtcaaaatgcagcagtagcaggtagcttattagaagtttataaggactcaaatgggattacttgggggcattttaaatcaaccaatacagctacaaattttaaaggctttgttgagacgattactttagctgaaggtctagaatgcaaccagaaatacacgttgtcgttcaaagctaaatcattaacgactgcacaaacacaaattttcctaatcattcaccgtcgtgatgctgcaggcagcaacaaccaaattggcacaacatggaataatatttcgacagataaagaagtattatgtacttatacatttgatacaaatgttgttgatttacaatatattaatgtaattctgtatgctcaaattggatttgcacctgattttttaattcgtgaagttcaaattgaaaaaggtgagttagcaactggttttagaaaaaatcctcgtgaacttgaaaaagggttagaggctaatgcgactgcaattgaaggtaccaaggcagatgttaaaaagaatggtgaacaaattgcatctatttctgaaaattatgtaactttaaaatctgcggtcgataataataaattatctgctgacggtaagtttcaagaaattaactcaacaattagcgacaaccagcaaaatacaacacagtcaatttcgaacttagagtcaaattataaacaacttaatcaagatcttggtcaagttttcaattatcgtgtctactcatgtggttggaatggctttttcacagggataaaaaaccttaaaggtgaaatcaaatccgtagcttcagctcgcggattctcagttcatgttttagctgctgatgggtcaattgcttcttcaactcgatacgatacatatgctgctatcgcgaatgcaacggcgatgagtaatgctatcgccgcgattccgaatgacacatttgttattgtgaccaactacgacagtatcggagtaaatattgctactgttaaaaatgccttaatctcacttggggcaaatccatttacaattgatcaaattactggccgtgatgcatacatattagtaggtcaaaaaggaattggctcggggagaggtatcgaattacattcaacacctgatatgggcccaaatggagccaaacaaatcatgcttgccgttcaggtcgtaagtggtattccgattggtttggcaaataacagtggtaacttacaaaaggtgttagaaaaccacgctcaaatacttcaagaaaaaattactcgatctgatgctaaagaagtctttgcagaagaaattaaagtcttcaaagcacaattagataccttacgttattcagaagaaaactggattttactaggtgatgatactaaaaatttaagtatcaccactggtaccaatagaacagttgctgtttgggaacttcaatacaaacataaagaaattcccatagataaaggtgatccagttgttgcaagaatcaaatataccgctgcagctggtttggttggagcgacttgtagcattcaattccatggagcaacttatagcattggattaccttcatttatagttgctgctagtggtgaaattgaattgaccggtattttcccttctgatgtaaaagcaactgcatttgaagcaattccattagggctgcgctttgataatgcaccgtcaggtggaacttttacgataactaatatgtttatcagccgtggtaattctgcaccgaattttaaaggcggttttagatcctctcttaagcaaaatgcacagtttgtagaagatacctttatcaaagcagatgcaaacaaaggtgttattgcccagcaaattcaacaatatgatgctggtgtacctggtggattatctacagtagtgaaaacaacaaaagctacagctgatcaaacttcacaagatcttgcaactcttaaaaatactgaaatttcgcagttacaaacaagtactaacaatcttggctcggcattagaaaacacaacaatgctggcgatgatgattactaacggcaagttggtgcaaggagacgtgaactttaagaagggtaataatgcagtaggtgtatataacaatgctggcaatgggaatgtagctgttacacgtgttgcaaaaagtgcggataacccgactacatcaacacatgagctggaaatcaaaaccattggagctgctaatcctacatggggtggtttttatcaggccgtgaatggccgagcaaatgcggtcttcgttattaaatacctcattaaattgcccattggatataagctagtgaatgctggtaacgctatgggtactggtgcaattgatagatttattggaagtactgagggtacaggaaaattcgaaacttatattcggatgattaaatgcggtgccacaggttcaattacttactcaggacatgtttatgtagctggcggatctacaccaactgcaactgcacctttagtttggaccttagctcaaattgagcaatatgacgttactgattacgcttcagctgacccgacattacaagattttgtttctacagctacagactctatttcaacattaaccaatttcaaagaaacatgggcggccaaactttcggagatgtcttcaaagttagacagtaaaaacggcgcttatattctgaatgcggatatgacaaataccaatgttgagcgagctattgctgcatcctcacagaaaattacctcagaatatactaatgcaatgagcgttcagccactgggttcaggtggaggcaaaattttcgtgaagcctttgacttggcgtcaaccaatcacgactacgggaactcttgtaattaagacaccaattacaattggtgccttcatgactaaagttaaaatctcaggttataactacaacaacaaagaagacaatatttttgatttggacttggcattctatgcatatacgtcaacagtaccattttatccaaatatgacttcgcgttcttttggtatcaccttagatgaaagtaatactacgactaaaggtttggctttagctttagatagcaataataaagtgtgcatcttaattaccaaaaaagatgcttggtcttacccagctattacggttgagtcagcaacaattactcatacaaacccgccagataactttaaagaaggatggtcagcggctattgaaacggatttatcggcttataagtcagtaacgccgtttactgtcacttcaatgatggaaacgactgcaggttctcaagccaaagttgatattccaatggctcagttaagtgatattgcagctgataataaacttacacccgttgagaaaaaacaggcgaaattggtgtgggatactctttatcaaactgatgctagcttacgagctgaggctgtcacttatggtatatcttcagctgcttatgcaactgcttttagtactttaaatacatatctggcttctttgtttgccaatatgaatgtaaccagtacgattgatcgaaatcagtttattactaactttgctaatgttcacaatgcacgtcaagcactggtaagagcaatatctgaaaaggcaaaagagattgccgattctgcaaaagacttagcatcaactacaaaagcgacattagagcgtgattacatgacgtctaccaagacgaatgaagcaatcgcatcttcaactgaaagaatgtctgctctgtattctgcaaatggtcaaaagatcatggcttcagtactagatacgtggcaaaaagattggctagtaaaaaccccaagtggaaataaacctgagcttaatttagtggccgatgcaacttgccgtgggggatatgcactaagaataggtaataacgttggaaatgatgaagcttggttaaattggtttgcttctttgccaatcgatgacaacaaatactatcgagtgaagtatagattccgccgggttagtggtacgggggttgtatacgtaggggcaacttgtcagaacgccactaaaactaaatatgtggctcaagacaacaccgaaattaatgatattggatcgagtcattatcttgttgctggtaccgctccagcgcttggaacttggataactggaactgcatatttcaaaggtagatctgctggtgcaagtgcaggtgccggcactctactaagtccaaaaacatttgcaaataaagctgctttcttttctccaatgatcatcggtaactattcaggaaaagctggtgaggtggatctagactttattgatattgaagatgcagacaacattgcagattttgagaactttaaaaccacctatacaactgatgtgggtgcatatgctggcgcattacaaaccttagtttctgtttacggccaaaatgctatcaagcttaaatcacaagctgacttgattgatggtgtgaaaggtaaatacgtaatgggcatggataataacggtgtgttttctggcatgtctatggtcagtgagcaaacgaatggaaccgttatcagttcgataggttttcaagcggatagaattttcttcacaaccggtacatcttcaactaagtacatgccgttcataatccaagacaatcaagtcattatgaatagtgatgtattcattaagaatttgactgctgcaaactttaaagctaaatcacttactgctgaattgttcaatgtagataagttgagcgcgattactggtgaacttggaactctaatcacttataaggatccttcaaaaccgacaggaataagaactgtacaaaccggaggaaaaattgaagtgtatgacgacaataataaagtcagagttcggataggattttggtaa

SEQ ID NO: 57195 - DNA, 438 bp, Acinetobacter baumannii
atgccacaagggttacagatcctagatgaaaatgaaattatagttttagatttcactgacagatctgtgaatatgtttacaactttttatatcgatatgtatttaacaaaccaagttggatggggagcgggtttcgatcctaatacaccagcaaaggttacaggtactttcagtcaccaaagtttaaatcttggacaagctatctttattcctatagcaacaggtaaagatgatcccaacattcaagttagacatatgataacgggagctatcttaaataaaaataatgtttacggagagtatagcccgcaaagacctgattttattgtcaatggaaatactgtcacttggtcatttaatatgaatggttcagcttatacaggcgattatggtgattttattgttggtggttttctagtgcatgttggattcttctaa

SEQ ID NO: 57196 - DNA, 759 bp, Acinetobacter baumannii
atgagtatcggtttcgaatcatattatgctgaaggcaaagttcaaatatcatcagaaagccgagcattctcattaataaaatctggacaattaggggattcagacttccgtactatagatgttccagggactcaacgcgttagtgtagctacagttagcgtacctgaaggttttgtttatgattcacctttattgtttatcagaaataaaacagataatggacgagtgtgttgtttacctttttcaactggggtatcagttcttaagtggtggaacttgagtgcgggtacgggtgacatccaatattatttatttgcaagagttgctaaagcgccagggaatctaggaattcaaatatttgatggaaatgggacagctcaatcaaacttattatttgattctacgtggaatattcttaatatcaaaaaagttgtaagtattccaaaggataaaccacctttattaattggaagtgaagtaaatggaacttatacgacttcaaatacaggtctcacagctaatcatgcttattgtataccttctcctagatcggtgatgattcaaactcttactactgaagtcagactatttgagtgtgcatgggtgagtggaacagaaattaagattaactggataccccaagatggcggtgatacagctgatatgagaagaactgcctttacaaatgttgatagtgaaggaatgatattaatatgtgatgtagcaaatttccctcttaatttttcatataaaccttaa

SEQ ID NO: 57197 - DNA, 933 bp, Acinetobacter baumannii
atgaacttagttgtcaaagataattcattaattaacgctagttatacattgggattggtcgagcaacggctcattttattggcaattattgaagcaagagaaacaggtaatgggatagatacagaaacttttttagaaattcatgctcaacactatgcagagcgcttccatgtggatgttaaaaacacgtatgcaatgctgtcagatgcagtaatgacactgtttaatcgtcaagttacctatatgacaatagacgagaaaagaaataagcctgaaaagcgtgtggttagatgggttagtggtatttcttatgttgaaggtgcaggcatagttaaactacgatttgcacctgaaattgtgcctttaatcactcgattagaacaaaatttcactagctatgaactgatgcaggttgccaacctaaatctatatgccactcggttatatgaattattagtatcttggcgaagtacaggtaaaactcctattattgaaattagtgattttcgctcaaagttagggttactcgatcaagaatataaactaatgcacaactttaagaatcgtgtcctagaccctgcaattaagcaaattaacgaacatactgatataacggtcaaagtagagcaacacaagacagggcgctctattacagggttttcattcaagttcaaacagaagcaacaagttaaaaatgaaaaggtaatagagaaaacgcgtgatcctcagactccagacttttttataaaaatgacagatgctcaacgtcatttatttgcaaataaaatgtctgaaatgcctgaaatgtctatgtattcgcaaggcactgaaagctatcagcaattttctattcgtatcgctgagatgcttttacagcctgaaaaattcagagagctttatccaatcctagaaaaagcaggatttaaaggttaa

SEQ ID NO: 57198 - DNA, 540 bp, Acinetobacter baumannii
atggaatattgcataactacgaattttgatttattcgaaacggtaaaaattttctcaccatggttactggcttttacggtgtatttagtttggcattggcaaaaagaaaaagaagttatagcaagcgaaacaaaggatatattacaaataatagacgggttgaaagcatcttatacaacgctatatatccactatcacttatatctcaatagtaataatcactttaatgaggaaaattttcaaaaatcaaaggatgaacattatcaaattgaaaaagagttcactgctaaaattacctttttattaacactgattacagatgccgaaatatataaaatatataaaaattttaaactaaatgaagctaaattttctagcactcagttattatttgaaggcatccaagatgaggtggatttttttaaaacacttagtgaaagaataaatgaagatttagaccaactgaaaattaagttagtgggttatacgatgtataaaaataaaataaaaagccgaaatagaaagtgttttaacctttaa

SEQ ID NO: 57199 - DNA, 924 bp, Acinetobacter baumannii
atggcgatttatcattgctcaaccaaaaccgtaaaccgcagttcaggcagaaccgctgttgcatctatggcttatcgtgccggagaaaagctcaaggatgaacggacaggattgacccacgactttacgagaaaggacggtgttgcccacaccgaaattgtatccaacctcgatattaaaattgaccgtagcgaactttggaacttggcggaacagtccgaaaatcgcaaagatgcccgaaccgctagagaatgggtaatcgccctacccgatgaattagacgcagatcaacgtaaggacttggcaaaagcctttgccacggccttagttgatcgctatggcgtgattgcagacttagccattcacgaacccagcaaaggcggaaatgataaaaaccatcacgcccatatcatgctcaccacccgaaaggctgaattagaccctgaaaacaatctgaccctgaccacaaaggcagagattgaactcagtaacgccaaaagaaagaccctcaacatgggtacaacccaagaggacatcaaacaaattcgggcaacatgggcagacctggcgaatcacgccctggaacaagcaggacaacagcaaaaaattgaccaccgtagctatgccgatcagaacaacggactacaagcaacgattcatgagggaacttcggtcactcaattacgtagacaaggcatcggcaccgaaattagccgttataacgacaaagttaaacagcacaacgcccaatacttgaaccagaaagaacagcagaaagaaaccacgctccaacgtggttttaaccgtgtagaacaaggctttaaccaatggcagaaagaccgagaagccaaacgcttagaactagaacgccaagccgaacaaaaggcatcacctaatttgaataaaggcggatggtcaagatga

SEQ ID NO: 57200 - DNA, 960 bp, Acinetobacter baumannii
ttgaaaggtcctttattacttgttttaacacttagtataagtatctcaagccatgctgctattgatatttatcctaatccaaatttaacggatccatctttagcgacaatattttcatcacaattaagaaaaatgaaaataaaggaaatggaagaggttataaaaggtgaatgtaatcaatttaaagaatatgcatacttgtctacccaaaattgggaagatcttaaaaagaaaagaaaatctatagatgaagctgagcaatactctcagcaattagtacgagaaatgccatataaactatcttttcaatatacatttccacttggtattcgaatgtattcaatcgctgaagaacatataaaattaactacacttaatagtgataatttcgataaatacaaacttatagatagtgcatatgatgtttgtatatcaatgaataatattaaatattttgagttacttaccaatcaaaaatacttaacaggaaacgaaagtccttttgcttcagacagtcaaattttacaaaaatttgatccttctaactctttttttaaatcaatttctcctgttccctctgaaacagacaaattaacgccaccgaatatgacccaatccattaatttcacagatattgagtttggaatagcttacgttttaattaatgaagatataagaaatagttttttacaaagcgatatccgttggattgattacaaaaaatcttcaagagaaatgcaagaaaactttaataaattcatgagcaaaggtggaagaaataaaaaatttgctcaaatagctactgttgttaaagttataagtccacaaattatagttgacaatattcctcctaataacgatgtgattatgtcaacgctcaagaaaattgaactaaaaaatgatcctattgtaaaaaagaagatggaagatcttttaaagatgtttaattatcaaaattag

SEQ ID NO: 57201 - DNA, 333 bp, Acinetobacter baumannii
atggcattaattaattgccgagagtgcaatcattctatcagtgataaagctttagattgtccatcttgtggagcaaggttaaaaaaaattaaaagaggattctttggaaaaatctttaaatggttatttataatttttaatctttttatgttagttatggtttttaagtcatgtggtacagcgtctgaagtcattacatcaagtaaaaacgagtatgaacaagcaggtgctactattggtacaactcttggtttaggtgtaattataactttttgggcattaattgatgtaatactaggtttatttgttctttttactagaccaaaacgttaa

SEQ ID NO: 57202 - DNA, 393 bp, Acinetobacter baumannii
ttgtcgtacacttgggaatttggaaaaaagtttgccgtagaatttaataattatcctgaaaatcaacaagataaaattttagattttacagatgtatatgaacaaaacggattaagtgatttttccaaattccaaggtaaaatttcaccatcatggcgtggaatagacaaaacaaacccaatttatgatttcacttattcaaatagcctttggcattatcacgttggattacctgaatacattaaaagtaaatataacaattatttaacatctgacatgattctccattttcaatggaaaaatcactctaatcatattcgggtattggatattacgtggcattacaaacgtaatggcgaattttggttaccaaattctgattatttagattag

SEQ ID NO: 57203 - DNA, 171 bp, Acinetobacter baumannii
atgaatgtaatgagtcttatggtatcaactacaccaatccaaaaaactgcacctgttaagattaatcttgatagaatgaagtctgctttatctgcggaaagctttgtaatgcctcaaggtttatctcgtgaagaaaagcgaaaattcattatggaagcaggaaaaaaataa

SEQ ID NO: 57204 - DNA, 750 bp, Acinetobacter baumannii
atgcatgagattaccttgaacgaagtgcgtcaattaatcgcttctcttcgcactgtttacgctgctcagttcaataagcaatttccagcaacaggcgaaagcgcaattcctctgtcagtggttgagcaaatcgcacttaaaacactggttggcgttcaacaaaaccaatttaacaacgcacttggtcgtttacttacagcaggtggacgctttatgccgtcatttgccgagtttcgcacctggtgtatcggtgaaagttggatgtctccagaagaagcttggtctcgcgcatgtaagtttactgctgatcgttcggtggttattacacaaattacaaagtatgcattagacgaggttatgtatttgatcgaagccggccaaatgcgagcagctcaagataatttcttcgggacctacaacgtgatggttgctaaagctcagttaaaaggccgtcagcaagagttttacactccaccgctacaactagaacacaaagaacctaaacacgttcctgtgagcaatgacgaggctcaaaagcatctcaaatcattgatggaacgtttaaaaatcaatggtcgtaaacctgcaccagttcaaaaacttgaggcaaaagaaaaagagcctgagcttataaaagagttgggccctgatcctttcgataatccacacgaatacgcagagatgtgccgtcgggagggtatgccaatccctagaaatattcttcagctaattgatggggcgaatgtatga

SEQ ID NO: 57205 - DNA, 381 bp, Acinetobacter baumannii
atgcttgatttaaaagcacagttgccagatcgtgtattgcttgtaaagagttttggtattcaaaactatttaagtgttttgaaaaatgctttagcaatggtgggtaattcttcaagtggtctatcagaagctccagcattacaggtaccaacagtaaatattggtgatcgtcaaaaaggacgcttacgttgtgagtctatacttgatgttagattagacgaaagtgaaattttagaagcattgcaaaaagcaattaatttcccagacgatgaattgagtaaagttgttccaccattagggttaggcaatacttctcagaaaataattgaacttattaaaacgacggattttaaaaagaaggcaccattttatgatctttaa

SEQ ID NO: 57206 - DNA, 1056 bp, Acinetobacter baumannii; identical to SEQ ID NO: 45063

SEQ ID NO: 57207 - DNA, 174 bp, Acinetobacter baumannii
atgaattataactatagattattacataattttattaaaaattttttaaattttatgttagttaaattaaattgtgtggatggccctattgattcttttcttattagggaggcagataaatatttagaatcctctgatgatttatttgtcatttttaataagagtaatatttaa

SEQ ID NO: 57208 - DNA, 873 bp, Acinetobacter baumannii
atgtccaaagctttagcatacgcaccagctgttaatacagcaaaaactaagttacccagtactgaatcagatcctttttatggctcaatttcaaagcataaatatgctgaattttctctttgtgataaagatggaaacccagtagcatcaccagtaattcgtgctttgttgactgacggcgacaaaagtattgagagccaatggcaaactccatttgaaaatagcaatccagaactaaaaatgcctatgttaatggctaacttgcaaactgggcaaatgcttcaagctgcagctactctaggcgaaaattcaccatttatttcagcattaagcgatatggcatcaggacctttagcaacagctgaaaatgcgcttaagagtgtggaagggcgaacaaatttaaccaaagtaaatacaactcaagtattcctatctacatcatcagtacgccttaatttatcaatttttttcttggcttttagtgatgcgagaacagaagttgaagacaagatcatgcaattggaggcttggagtgtgccagtttcatgtggctgtaaattactgcctcaacaaaacttagttgtgcaagacaatggaggtggagccgttcaaggttctcaagcaagtaacgctactcaagatagctttatgcctcagactgatgaacacgggattaaatttcagttaaaagaccaagaaacgggtaaaccacttgcacaacaatacttcaaattacaaggtcctgatggcagtgaaattgaaggatttactgatgaaaatggatttacagagctaatcaaaacaggcaccgaagcaaaagaaatcgacttaacaactttcgatttatctcagccaatggctaagtgggaataa

SEQ ID NO: 57209 - DNA, 174 bp, Acinetobacter baumannii; identical to SEQ ID NO: 57207

SEQ ID NO: 57210 - DNA, 672 bp, Acinetobacter baumannii
atggctaaagagaatacacaacagaaagaaattaaaaaacaacctgctgttgaacttgctgtttttaacttaaatagcgtgacggatgtagcggacttgcaaatgatcgcaagtcaggttcagctgtatttacaagtgtgtggaaacacgacattagaacaaataaaaagtaaggccaatataaccacagttgctaatatttttgcattgacgggtagtgtactagatctaatgctctatgctacagataaaaaaactggtgatgctgctgtacaacgtggggcattacttgcggcaaatttaattggtttattttcagaaccgaataatgaagcacatgcgcgcatggctttacgtccgatgtttggcttaatggcagagtgcttatatcgagaaaatggaaaaattaaagaaacggatattaagcgtttaggtttacatctcaatgcgatgatcgctggagatctagagaacttcttaaaagagactcaagcgaagttaagcagtttacttactagcgctacaacattgggtgtaaccattctacaaagcatggcaaccccagcaacaggtataaatgcaggaataaccactgcggcaggtgcaaggcagaaaaacgagatccgaaactcaaatttaccaactgggctgttccactcattgatttattag

SEQ ID NO: 57211 - DNA, 2328 bp, Acinetobacter baumannii
atgtctcaagctgcgggcaaagatcaatcatttttatcttcaccggtgattgaacaaatgttcgcatgggaaaaaggtcaacccacattagatgctttgggtggtgaattacttcataagaaattaatcgatgctttagatcactcagaaaatggcgcatatcgttttaatcgtaattatcagccttatgtacatcaattacaaagctggaatgctttattaaaagacaagaaatctataatggttacttcaggaacgggttcaggtaaaactgaatgttttatggtacctattctaaatgatttatacgaagagtttattcaagcagggcaatccttaacaggtgtgcatgccttatttttatatccactcaatgcactgattaactcgcaacaagagcgattagatacttggactcgccatttttcacaatctaatgccattcggtattgtttgtataatggcaatacaccagagcataaatcacaggaaacaggaaaacaaaaacttcatcccaaccaagtgctcacacgtgaagaactgagattaaatccatctcctattttagtgactaatggcaccatgttggaatatatgatggtgcgccaaattgatgcacctattttgcaaaaatctcaaggaaaattgcgttggattgtattagatgaagcacatagttatatgggctcacaagctgcagaacttgcgatgcagttacgtcgggttctgcatgcttttggtgtggaagcaaaagacgttcgttttgtagcgacctctgcaaccattgcaggtgcagatgcagaagaaaagcttaaacaatttttatctgaaatctcaggtcaaagcacagagaatattttggtcattggtggtcagcgcgaagtccctgtattacctgtagttgaaaatcatcagcaatcttttgatgagttagtagcaattgatgctcaacacgaaatatcttatgagcgttatcaacaattagcagggcatccaattgcatgtgttttaagagaaagtatttgctcgcaacgtgctttaaccttagatgatttattaaaaattacccgagaaaagggtttccaactttctcaacatgaaattttggaatggttagatctattaacctatacaagaccatctgatgaagaacaagcttttcttaagattcgtgttaattattatcagcgtgtgactcatggtctatggagttgtacaaatgacaagtgtgataaaaaagacgatggtttaaaaaattggagctttggtcagatatatgcgacacatcaagaaaaatgtgattgtggggctcctgtattagaattaacgttctgtcacagctgtaaggaaccacatttaatcggttcattaggcaaggaagatgtgctgaaacagtggaccgttgaaattgaagatgaatttgcattacttcttgataatgaaacggaagaacaagaagaggttgaatataaaaatactatcaagaatcgtttagtagtattttctgtcaatgagaataaagaaaaaaactaccgccgagaccaactgaatttagaaaatttaaaactcggagaaatttctaaaaataccctgaacgtacattattttgaacctcataacagcagtgatccaattttatgtagtcatcctgaatgtggtgcaaagggttcgaagtttgatttgccatttaatcgtgcaattttaggtgcgccttactatattacacaaactgttccacagcttttacaatattgtccggatattgaacaaaaagaaattaatgaggcaagcaaaaattataatgacccagaatttattgaaggtgagtttaaagatttaaaggattgtgcaccggaggatatgccagctaagggtaagcgtttaatcacctttactgatagtcgtcaagggactgcgcgtttatccgtaaaaatgcaacaagaggcggaacgatcacgcttacgtggtgctgtgcttaaagcaataatacaacatacaaaagctcaagccaaaaccatagatccgatggaagtgctattacgtcagagattaaatgaagcagagcaagaaggtaatattgctagaataaagttctttcaagaagaattaaataatttaagtgctaataatacgccaatgacacttcctgaaatgaattgggaagagttatgtcgagaattagcgaaagatttcgattttagaacaggtattttgctcgccaatcgccatattgcaggtggaatttttgacgatgctggatcgcttaaacttgcacaaatgttactaacacgagagttttcacgtcgtcctaaaatgcaaatagtttag

SEQ ID NO: 57212 - DNA, 3237 bp, Acinetobacter baumannii
atggataataagaaaagtaactttattgaggatagtcgtattcttgcattttggcgtgatttagaaatatttactataccttctgctccaacttcaaaagataataataaattcacaaaaataataactttaagatttggtgagaaactaccttgggaaatggtggaatatcagccaacattaaaggatatgtatatccatacagtttatattggtgtagcagatcaagaagaattgactagacttgttttgcgtaagattgtaagcaaagagttgagtgataaagaacgtgaacgtatttcgggtactgggtggttagcgtcttttactgtaaacgaaaatggatgtttaagtgcagatagctatgcaccagccagttatgtatatggtacccaggctttaagtcaaggagagccccttattgacttaaatgcaagacttactagagctaaggaggagtttgctcagcgttgtcatcgcttagttcaattgaaagaggattatcgatgttcatggaaggatttgcaaagtgaaacggatttaattagatctatttttgctcatgatgagcagattggattagattggcgagtcgtagttgctacaaagcgattacctagaaaaaaagcgttagaggatattgaacaagaggttaattatctgaactcattttatttagatgatctagataaaatgctgaaacaaagttcattaagtcaaccatttggccaagcgttatctacatatctcggggcttcaattattcatgataagcgaatagatattttaaaaaatcatgaaattatgggaaaacttgtctgtgcagccaatttacctattgcgcgttggcctaacgcaccagatagacctttagtgttggcacagcaggcggtagttgctcatatagaaaactcattgaaaaatcaagatggtattctcggtgtaaatggaccgccaggtactgggaagacaactttactgtgcgatgttattgcgacggttattactgacagggctaagcgaatttctgcactttctacacctgaagctatatttaaacagcctattcagcttatgggacgaagattttcacccattgttgaggagttggtgcgagatagctcaatagttgtcagtagcaacaataacaatgctgtaaaaaatatttcacaggagttgcctgctactagtaaattagacaagcggtatgaaacagattctttatatttctctgaagtcataagtggagtttttgatagtcaacgagttcaggatgaaaatcaaaaaacaattcctgcatggggtttaattgctgcggctttaggtaacagtacgaatcggagatcttttgctcgtgctttttttaaagaggatcatattgctgagaatgatgaggaggagagcaaaaattcatttatatcgatgaaacaaatacttgaggatgcaattcctcatattagtgcttattgtcagaaatggcacacagtcaaaagtgaattaattgaattaattgaagaattagagaaaaagcgttcagttttaataaaagcagagcaggcttcacttgttatttcagaatgtatggagaggaagaaagaattatcggaaacgattacgctcaaaaatgaagaattaaataagcatcaagatttatatcgtcaaatacagggagagttacaagaccaggctattttaatacaatctaaacagcaaatattagggcaaattcagatatcacatggacctcggttatgggatcgtctatgtgcattatttggttaccggactcaccgtacagaagtctatgataagcgaattagtgaagcaactttatcattacaagaaactaccgctcgctatgaaaagctcatcaatgataagacatcaagccataaaattataaaaatttgcgagcaggagttattgaaattaaatgatgagcttcttgtaataaggcaaaaatgcgacaagttgatttccgatttacaggcggtacacgctttaggggtaagacatgtcattgggcctgatttttggaaattatcgtttgaagaattgcataggacttcagtaaatacttcagaaattatcgatgatattcgtgcccgtatttttattaaatcgatacagctacacagactaacgattttatctaatgccaaaagatttttaagtaatttgagaatggtcgggcaaatgctttcaggaaataccaaaggtctttcccttcatgatcgtcctgtaatttgggacagcctgttttttgtggttcctgtggtttccacaactttagcttcatttagtcggctttttgcaggcatgggacaagatagtttagggtggttattaattgatgaggcaggccaggctacacctcaatctgcagcaggtgcaatctggcgaagtaaaagggctattttaattggtgaccctttgcaggttgaaccggtatttacactaccagatagtgtagttgagattctacgcaaacaaaatgatgtggatttatcttggtctcctgtcttcgaatctgtacaaacaattgctgacagaataacgccatttggttcatggattgatgatggtagtggagataatcaatcaagaatctggactggtatgcccttaagaacacatcgtcgttgtgatgaccctatgttttctattgcaaacagtattgcttatgcgggtcaaatggttcaggggcgtgttgatcgcgaaggaaagcctacaccagcaaatatagcttatgatattggtgtgagtacatggatgcatgtagattcaatagattttgctcatcctgttaattctgaagaacttgatgtattgattgattctttaagaaagcttgaagaaaagcgaaaaactacaattaatagttcaaaaattaaaatatatgtcatttcaccttttagaaaagttattcaagcatgtaaaagcagtattgaagaggcaggaataaaaggcattgaatgtggcactgtacatacttttcagggtaaagaggcggatatcgtatttttagtattaggtacagcgaaggatcgtaccggggaaggagctagagcttgggcttcctcaagtccaaatttattaaatgttgctgtgacacgagccaagagtcgtttgtatgtgatcggtaatgtggatacttggtctaaaatggactatttttcaacactcgttaatatacttccggtgaaaacggtaaatatatctaacacttatacttaa

SEQ ID NO: 57213 - DNA, 2559 bp, Acinetobacter baumannii
atgccaaaaaaaaggcaagaatcttataaattattaaaacgccatatttgttactacttggcttctggtgtcgtcacaatgacaatgcctgtattcgtgcatgctgaagaaacagccgcgaatgctcctgtagaggctgaatttgattctgcttttttaattggtgatgcacaaaaagttgatatttctcggtttaaatatggtaatcctgttttaccgggcgaatataacgttgacgtttatgtaaatggccaatggtttggcaaacgtcgaatgttttttaaagcattagatccaaataaaaatgctgtaacgtgttttactggaaataatcttcttgaatatagtgtaaaacaagaagttttatcgcagcacactaccctccaaaaagaaaatagtagttgttataaaattgaagagtgggttgaaaatgcattttatgagtttgatacctctcgtttacgtgtagatatttctattccgcaagttgctttgcaaaaaaatgcgcaaggctatgtcgatccaagtgtatgggatcgtggtattaatgctggatttttatcttataacggtagtgcatataagacttttaatcaatctggcaatatacgcgaaacttcaaatgcatttatgggagtgactgctgggctaaatttagctggatggcaattacgtcataatggtcaatggcaatggcaagacacccctgctgaaaaccaatctaaatcaagttatgaagaaacgagtacatatttacaaagagcatttccgaaataccgtggtgttttaacgctaggtgatagttttacaaacggtgaaatatttgattcatatggttatcgcggtattgatttttcaagtgatgatcgtatgttgccaaatagtatggtgggttatgctccacgtattcgtggtaatgctaaaaccaatgcaaaagttgaagttcgccaacaaggccaacttatttatcaaacaacagtagctccaggtaactttgaaattaatgacctttaccctactggttttggtggagaaattgaagtttctgttatcgaagcgaatggggaaatacagaaatttgctgtgccttatgcatctgttgtgcagatgctacgccctggcatgaatcgttatgctttaacaataggtcagttccgtgattcagacattgatattgatccttgggttattcaaggtaaatatcaacaagggattaataattatctaacaggttatacaggcatacaagcaactgaaaattatgccgctatactgttgggtgccgcttttgctacaccaattggtgccgtggcgttagatattacccactctgaagctgaatttgaaaaacagtcttcacagtcaggacaaagtttccgtttaagttatagtaagttaattactccaaccaacacaaacttaacactagcagcttatcgttactcaacagaaaacttctataaattacgtgatgctctacaaattcgtgattttgaagaaaaaggtattaatacctactctgctggtcgtcaacgtagtgaattccaaattaccttaaaccaaggattgcctgaaggttggggtaacttctacgtagtaggttcatgggttgattattggaaccgtagtgaaagtactaaacaatatcaggttggttacagtaataacttccatggtttaacttatggtttatctgcaattaaccgtaaagttgaatatggctcaaccaatcaaacacacgatactgaatatttaatgacattatcgtttccgattgattttaaaaagaattcagtcaacgttaacgttactgcttctgaagacagtcgtactgttggtgcaagtggcatggttggagatcgctttagttacggcgcttcaatgtcacatcaggactattcaaatccatcatttaacgtaaatggtcgttatcgtaccaactatacaactgttggtggatcttatagtgtggctgattcttaccaacaagcgatggtgagcttaactggtagtgtagttgcacattcagaaggtgttttatttggacctgaacaaggtcaaacaatggtacttgtgcatgcacctgaagccgccggagccaaagttaataatgctgttggtttaagcgtaaataaggcgggttatgctgtagtaccttatgttactccgtaccgtcttaatgacattactcttgacccacaagagatgttgagccaagtagagcttgaagaaactagtcaacgtattgcgccttttgctggtgcaattgctaaagtagattttgcgaccaaaactggttatgcagtttatattactagtaaaactgctgatggcaacagtctaccgtttgctgcacaagtctttaaccaaaaagatgaagctgtaggtattgttgcacaaggtagtatgatttacttacgtaccccacttgctcaagatcgtctctatgtgaaatggggtgatgaaagcaatgaacgttgctcggttgagtacaacatcagtaatcagttgcaaaataagcaacaaagcatggtaatgactgaggctgtctgcaaatga

SEQ ID NO: 57214 - DNA, 534 bp, Acinetobacter baumannii
atgaaaaaacttgctttgatcgctgctctttcggttgtagggattgcgaatgctcaagctgctgatggtacaattacaattaatggtttagttacagacaaaacttgtgacatcgttactccagctggtaaagacttcacagttactcttccaactgtttctaagcaaactttagctgttgctggggatgttgctggtcgtactcctttccaaattaaattagctaactgttctgaaggtaaagtagctacttacttcgaaccaggtgctaacgttgactttaatactggtcgtttacttaacaaagatgctactggtgctaaaaacgttaacgttcaacttttaggtagcaataacaatttcatcccagttcttgctgctggtgcaaacggtgctcaagctaactctcaatgggttgacgtagctgcagctggtagcgcagaccttaactactatgctgaatactatgcaactggcgcttctactgctggtaaagttaacacttctgttcaatacacaattatctatcaataa

SEQ ID NO: 57215 - DNA, 2754 bp, Acinetobacter baumannii; identical to SEQ ID NO: 45396

SEQ ID NO: 57216 - DNA, 3924 bp, Acinetobacter baumannii
atgagtaacgctattgctgcgattccaaatgacacctttgttatcgttacaaactacgacagtattggggtaaacctagcaccagttaagaatgcactaatttcattaggtgccaatccattcacacttgatcaaataacgggtcgggatgcatacattttagttggtcagaaggggattggttcaggtcgtggtatagaattgcatgcaacaccagatactggaccaaatggggctaagcaaatcatgcttgcagtccaagtagttagtggtatcccgattggtctggcaaacaatagtggaaacttacaaaaggttttagaaaaccacgcacaaattcttcaagaaaaaattacaagatctgatgcgaaagaagtatttgctgaggaaatcaaagtttttaaagcacaacttgatactttacgttactcagaagagaactggattttacttggtgatgatactaaaaatttaagtatttctactggtacaaaccgaactgtagctgtttgggaactgcaatataaacacaaggaaattccaattgataagggtgatccaatagttgcgagaatcaaatacacagcaactgcaggattagttggcgctacatgtagtattcaatttcatggtgcaacttatagtgtagggttgccttcgtttgttgtagctgcaagtggtgaaatagaacttactggtattttcccatctgatttaaaagcctctgcttttgaagctattccattgggtttacggtttgataatgctccatctggtggaacatttactgtaactaatatgtttattagccggggtaattcagcgccaaattttaagggcggatttagatcgtctcttaaacaaaatgctcaatttgttgaagatacttttatcaaggctgatgtaaataaaggggttatagctcagcaaattcaacaatatgatgcaactgtacctggtggtttatcttctgtagtaaaaacaacaaaagctacagctgaccaaacatcaaaggatctagctacacttagaaatactgaaatttctcagcttcaaacaagtacaaataatcttggttccgcattagaaaacacaacaatgctggcgatgatgattactaatggaaaattgttgcagggagacgtaaatttcaaaaaaggtaacaatggtgtatctgtctataacaatgccggcaatgggaacgtgacagttactcgtgtcgcgaaaagtgctgataacccaactacatcaacctatgaaattgaaattaaaaccattggtgctgccagcccaacatggggtggatttgttcaactcgtttatggccgtgcaaatgctgtttttgttatcaagtatttaatcaagctaccagttggatataaattggtgaatgctggtaacgcaatggggacaggggcaattgatcgattcattggcaatactgagggtacaggcaaattcgaaacatatattcgaatgattaaatgtggtgctgtaggttctttctctaactcaggacatgtttatgtggcgggaggatctacaccaacagctactgcgcctttagtttggaccttagcccaaatcgagcaatatgacgttactgattacgcttcagctgacccgactttacaggactttgtttcttcagccacagactctatatcaacattaacgaacttcaaagaaacttgggctgccaaacttactgaaatgtcttcaaaattagacagtaaaaacggcgcttatattttgaatgcggatataacaaatactaatgttgagcgtgcaattgcagcatcttcacagaaaattacttctgaatataccaatgctatgagtgtgcagccattgagttcaggtgcagggaaaattttcgttaagcctttaacttggcgtcaagcaatcactacttcgggtacattggttattaagacaccaattacagttggtgcgtacatgaccaaggttaaaatttctggttataactacaataacaaagaagataatattttcgatctggatttggcattttatgcatatacgtcaacagtgccattttattcgaatatgacctctcgttcttttggtatcactttagatgaaagtaatgctacgactaaaggtctagctttagctttagatagcaataataaggtgtgcatcttaattaccaaaaaagatgcttggtcttacccagcaattacagttgagtcggccactattactcatacaaatccgccagattactttaaagatggctggacggcggccattgaaacagatttatcagtttataagtcagttacgccgtttacagtgacttcaatgatggaaaccactgcaggttcacaagccaaagtggatgttccaatggctcagttaagtgatattgctgctgataataaactcacaccagttgagaaaaaacaggcgaagttggtttgggatacactttatcaaactgatgcaagcttgcgagctgaggcggtcacatatgggatatcttctgctgcttatgcaacggcatttagtactttaaatacatatttggcagctttattcgcaaatatgaatgtaactagtacgattgaccgaaaccagttcattactaactttgctaacgtgcacaatgcacgacaagcattagtacgtgcaatatcggagaaggctaaagaaatagctgatactgccaaggacatagcttctactacaaaagcgacattagagcgtgattacatgacgtctaccaagacgaatgaagcaatcgcatcttcaacagaaagaatgtctgcactgtattctgcaaatggtcaaaagatcatggcttcagtactcgaaacatggcaaaaagattggttagtaaaaacaccaagtgggaataagactgaacttagtttagttgcagatgcaacatgtcgtggaggatatgcactaagaattggtaataacgtaggtaatgatgaagcctggttaaattggttcacatctttgcctatcgatgacaataaatattaccgagttaagtatagattccgccgtgtaagtggtaccggagttgtttatgttggtgcgacctgtcaaaacgccaataaaacaaaatatattgctcaagataactctgaaatcaatgatatcggttcaagtcattatttagttgcaggtaccgcaccagcgttgggaacttggataactggtaccgcttactttaagggccgatctgctggtgcaagtgcaggtgctggcactctactaagccctaaaacattcgcaaacaaagctgctttctttacacctgtattcattggtaactattcaggtaaagctggtgaagtggatctagactttatcgatattgaagatgctgacaacatagctgatttcgaaaatttcaaaaccacatatacaactgatgtgggggcatatgctggtgcattacaaactttggtttctgtttacggccaaaatgctatcaagcttaaatcacaagctgacttgattgatggtgtgaaaggtaaatacgtaatgggtatggacaataacggtgtgtttactggtatgtctatggtcagtgagcaaacaaatggaactgtgctcagctcaataggtttccaagcggatagaattttcttcacaactggttcttcttctactaaatatatgccgttcataatccaagacaatcaagttttgatgaacagtgatgtatttattaagaatttgacagccgcaaactttaaggccaagtctcttacagctgaattattcaatgttgacaagttaagtgccataactggtgaacttgggactttaattacttataaagatcctagtcagcctcaaaaagcaagaatggtcatttcagggaccgctttaaagttatatgacgataacaatattgagagaatttatattggtttataa

SEQ ID NO: 57217 - DNA, 192 bp, Acinetobacter baumannii
atggcaaaaaccgtgagattaagtgatgaagaacaagaagcgatccgcataaaagcggttgcgttaaataagaaacttatggaaaaaaataaacaaccactaagagatagcgaagttgtacacgctgttataagtctagcgcttgagaaaataagtgtaggtgcttcaggaaacttgattctagaggattaa

SEQ ID NO: 57218 - DNA, 228 bp, Acinetobacter baumannii
atgtataaaatggataaagaacaagcattcgagatcgtggctaagatcattttcgatagagcctgcaccttagttgttgggggaaatcctgcttacgagtcggaacttgttctacgtcacatagaaatgtgcatggtggagtggggctataagtctgccaaagtagcggagtactacgacatgttaaaagcagagaatgataattttcgttcgatggggatttgctaa

SEQ ID NO: 57219 - DNA, 1158 bp, Acinetobacter baumannii
atgggtgagtataaaaaacaaccaaaccccacagctttatcggggggattgaaaaatgcgatggttgtaacccccattaataagatgggggtaaagacatctgatacgcaactgcaagacgccgatctcccgtatcaagagcattcgttatacacaattccatacgctcacatggtgatgacatcttcaggtgttaaaccagttcaatgccgtctgcctgctgataatgaaattgccgtgattgactgggtaaatttcacaatcggaattgagactctaggtgataagtattggaatgaagatgaatacatcatcgatacacaccgttggacggctgctgtagaggaattggaccaccagttacatcatatctttggattctcaacgactgcatgccgtcatggcggtctgaatttctataaagaaagttatgtactaggtgaagatttcggctttgtctgcattggcggtcaacgtaataccatcttaattatgattaatggtcgtggttgcaactttgctaaaagtggttgggaattaagactttacaacttcttagtgactattgctaaacgagctaaattaactcgtgttgatattgcacatgatgactttgaaggtaaaaagatcaatgttgattggggcaatatgcaagacggtttaggcggttttagctgtggcaaccgtatgccaaacatcgaacataaaggcaattggaaacgtccaaacggtaaaggacgtactttaatggtcggtgcacgtgaatcaggcaagatgcttcgtttgtacgagaaaggtcgtgctgaaggtgatccgaatgataattggcaacgtgctgaagttgaatttaaatcaattgaccgtgttttaccgttcgatatgttgctggctccaagtgagtatttcatagcctcatacccatgtttcgcatttttatctgaagatattcaacctgcaagaattgaaacaattcaaaaggttgcacgcattaactttgatactgccattaagaaccttaaacaccaatatggtaagtatatcaatgtttttaaacaggtttttgaacctgaagagttaatcaatattatttcttgctctgatcaattcgcttatccgaagcggttagatcatgtgcttataactgctcggagaatgtag

SEQ ID NO: 57220 - DNA, 444 bp, Acinetobacter baumannii
gtgcaacaaagccattggaaggagcaacataacaaaactattcttgcacctgaagcgattgaaatttataaacttataaatgcagatataaagattagtgcagaatatattaatcttattaagaataatgttaataagaatttacagcctttactagcagtggaaatttttgaaaagtttggtgaatttgttgaaatacgtgaaaaaaggacggtagagcttatgtactttgctactttagcaaaaaatgaagaaattggtggtttaatacatgaatatgcatcatgtgttgacaaacaactaaattatttaaatcctataatgcgcagtcagcagattattgatcaaaatttcataaacaataataatatatttattaaagaattaactaagattcaattagaaataaataaaaagttaagtgattatattctattaaaatag

SEQ ID NO: 57221 - DNA, 204 bp, Acinetobacter baumannii
atgatgacggggtgtaccaaatcaacagtcttattgaggccaaacattccggctaatttaatgcagccatgtcagacttttaataagcttgagggtggtaccggtaaagttattgccctgtgggcggtaaatacagttgctaaaggtagcgaatgtgcagcaaaagtagatgcatggatagaaataggaaaagccctcagttga

SEQ ID NO: 57222 - DNA, 369 bp, Acinetobacter baumannii
atgtgggttgttgtggcaactaaattttggcgagagatcattattggttttctcgcttttttattggtcatctgtttggccatgcttaatcacaagactggtcagctaaaagaagctgatcaaaagtgtcagtcgcaaattcaagaaattgaacgtaagaacttaaaagcacttacagaaaagcagaatcagattaataaagtgagcgcagactatgaacaaaccaaggctgagcaaagcactaaagtcgaaacaattacacgtgaagtgcaaaaggtcgtggagcgtcctatttatctcaatcgctgtattgatgatgacggggtgtaccaaatcaacagtcttattgaggccaaacattccggctaa

SEQ ID NO: 57223 - DNA, 1542 bp, Acinetobacter baumannii
atggatgactacgatggactgatctatgaatacacggatccgaccgacgatagtcgtatcaatatctatttgccagacaaaggagcaaagaacccgaaagaagtgaaatccgttggggtgcgaaacaagtggcaagctcattttaatgcgtaccggctctggaacaagcttcgcttccagcgcaaatccattacctttgatgcggcaccagaatcagaattactggttttacgtgaccggatcgctgtagcagattatcgcaatggtatccatcaaagtggtgaggtggtgcagcaagagggtttaatcctgactttaagccatgatgtagattttattgcaggcaagagttatgtgatttatttgcaaatgggggatggtaccgtggaccttattcctgttaccgcaggatctgccaagaacaaagtagttttagggcgtttaccgaacggggccttaaagcttagtcccgatgactttgtgaatactatctatacggtggttaatgacgataccaaaggctcactgccttatctggttgcaaaaagagaaccggctgaccagttctctaatactattactgcaattaattacgatgaacgttattacctcaatgacaaggactttattgatgtaccagtagatgattcaccgatttacattcgatatgaccagcttgatattaatctggcacgtttgtatcagatgcaaagaggggatttgccaacgactggagaaatcagttttgtagttgaagcaggtgcactggtttcaagttcaagttcttatcgaccggaaaccagatttgtctataaattcaactataagtctagtcctgcaaaacgagagtatatcgttccagctgcatcagaattacctgctattgatactggtgagttcccacctgatctcgtggtaaatttgactattaaaggtgctgttgttggacgtggtggagatggcgggttgccacatctagcttacggagattgggaaaaagattcagacttcaattttaccaaaacccggcgtgatggttttcagggagcaccaggtttattgaaccggcacagcaaactaaacctgattatcgatggagggacgttagctcgaggcggttcaggtggtggagcaacaccaagtggtatttacactggatcatcttatggggttcagggaattcctggtggtgctggagcaccatttggtcgggtcatgactggacagccgatttcaaatgactcacaagattatcgcctctatctggagagttatttaatggttatgaaaatcactgatgctgaagcttcggtacccgggaagggttatcgaacgcagaatgaacgctatggttcaccactttctggagatggtggaaactggggtgaacgcggtaccaaatcaacaaatgatggaacatggaactggcaataccatggcactactgaaggccagccggggctgggtggacctgcaattgttggggtggcgccgctaacaactcaattgattaatggagggaaaatcttacaaaccctttaa

SEQ ID NO: 57224 - DNA, 672 bp, Acinetobacter baumannii
ttggatcaggcgagtatttcttatattggcgctggattgaaccaaaaagatgctcacaattactttgaaatcacttttgagactaagcactatgcgatttttaatggttattggcatagagacacagcctatctggattatgacttttatgcgttaggatcaagaagtggagtagcttgcttaaatggcgttttacttgaacaaataatgcgttataagcaggctcatccagaacgcaaaattattgttatttgtcattggggtgtcgactttaagcctattacaaaagaccaaactaaactcgcgactattcttactcaagcaggagcggatctgatcgttggtcatggtgctcatactattcaaccaatccagatcatcaatcaaaagcctgttgtttttaatataggcaatgcagtctttaatagtgacggtgaatatgaacagcaaaatgctttgccatttggctgtatagctagacttgatttggcaaaagatatcattcgcctttaccccatgtacaccaataatttacaaacattttggcagccttatcctgtagatgctgaagatttctcaaaggccaatgcttacataacatctttactgacccctgagaattacatggcatcccaagatcaattagggagatatcttgaagttaaattttaa

SEQ ID NO: 57225 - DNA, 1674 bp, Acinetobacter baumannii
atggcgagtccggcacaaatcattcgacataaatttctcaatacattcttttcacgccactctatttggttcttgtgtatttttactgcactcacaatcacgtggtttagaaccgtatatacacctcatagtatttattattttatttcggatactttactcaacggtttatgggtcgtcagtagcgcattaagcttattaggtctatatgatgtcctacaaaatagacattcaatcttaagaaattacccgattatgggccatttccgttttttatttgaagatatacgccctgaaattcgccaatactttattgaagcggatcaagatgcccttcctttctcgcgtatgcaaagaagtttggtttatcaacgtgctaaaaatgagaatgcagataaaccttttggatcaattattgatgtctatcaagaagattatcgctttattgttcattccattagtccatgtccaccagcggatcctaagagtttccgtattcaaattggtaatgcccaatgccttcaaccttatagtgcatctattatgaatatctctgccatgagctttggtagtttaagtgcgaatgcaatacgtgcattaaacaaaggagcacaattaggcggtttttatcacgataccggtgaaggtagtctcagcccttatcatttagaaaatggtggtgatattgtttggcaaattgccagtggatattttggctgccgaactttagacggaaaatttgatgaacagaagtttgctaagcagtctcaattgccacaaatcaaaatgattgagcttaagctttcgcaaggggctaaaccgggccatggcggtattttacctaaacataagattactgctgaaattgccgaaatccgtggtgtttcccgtgaccatgattgtatctctcctgccaagcattcaagcttttcgacaccaattgaaatgatgcatttcttacagaagttacggactttatctggtggtaaaccggtaggtttcaaactgtgtattggtcaaccttggcaatttatgagtattgtaaaagcaatgcttgaaacaaaaattatggctgattttattgtagttgatggttctgaaggtggtactggcgcagcccctattgagtttagtgactatatcggaacaccattacgtgaaggcctacgctttgttcataatacacttgtaggtgctggcctaagagatcaagttaaaattggtgcaagcggtaaaattattagtgcatttgatattgccagcacatttgctctcggtgcagattgggtgaactcagcacgtggctttatgtttgcagttggatgtattcaagcgcaaagttgccatacaaaccaatgtcctgtaggcgttgcaacccaagataaagatcgccagaaagcactccatgtaccgaccaaagcagaacgtgtatttaatttccacaaaaatacattacatgcattatcagaaatgattgctgcggcaggtttacgtcatccatcggatattaaagctcatcatttagctcaacggattaatgaccgtgaaattaaaaactatgctcaattacacttcttcttaaaagaaggtgagcttttacaatctgaactgaaaaatgatgatgataatttctattatcgtatgtggaatatggctgacgctaatcatttttaa

SEQ ID NO: 57226 - DNA, 375 bp, Acinetobacter baumannii
  misc_feature (334)..(343): n is a, c, g, or t
atgcgatttgaaaaatttacgaaccgcttgcagcaagccctctcagatgctcaatccttagcgatgggtaaagaccatacagctatagcaggtattcatattttgagtactttattggaagagccgtccaatattagtttgttgcaacaagcaggtgcacggttacctgaacttaaacaaaagctagagcaggctttaaaagatgctccaactattgctaacccgacgggcgatgtcaatttaaacccagaagcagttaaagcactcaacttggcagatcgatacgcgcaaaaagctggcgacgaatttttgtcaactgactgggttttgttgnnnnnnnnnnggcagaaactggtgaaacaaaaaatattttaa

SEQ ID NO: 57227 - DNA, 348 bp, Acinetobacter baumannii
atgactgctctaaatcaatatggaatgagtttagaaattacgccgcataatggatggtctcagcggttttgggaggatcttttaccagttaaggagcgggtgagtaaacatccgttttttactgaaatggccaatgggggattgagcctagaaagtttccgttatgctttacttaatttctatccattagtagcgcatttcccgtcatatatggctggtgcgttagctaaagcaactgcttttgcagaacctggcgttactgaaacaagagattggttaattcaaaatattaaggtcgaagagcgccatttacagtggtatcgggattggctaaaggttttggattaa

SEQ ID NO: 57228 - DNA, 1014 bp, Acinetobacter baumannii
atgagtaatgttgatcagcgtccaattattttgacaggcgaccgcccaaccggacaacttcacctcgggcattttgtcggttctttgcgttctcgtgtaggtctacaggatagccatcatcaacatctcttattagcagatgcacaagcgttaacagacaatgccgataacccagataaagtgcgccgtaacattttagaagttgctctagactatttagcggtaggcattgatccaactaaaaccacaatttgtgtacagtcatgcttgcctgcactgaatgagcttacaatgttatatcttaactttgtaactgtagctcgattggaacgtaacccaaccatcaaatctgaaattcaaatgcgtggttttgaacgtgatattcctgctggtttcctttgctaccctgtagcacaggcagctgatattacggcttttaaagcgactgtagtaccagtaggcgaagatcaaattccaatgattgagcaaactaacgaaatcgtgcgtcgtgtaaaccgtcaaattggtcaagaccttttacctgaatgtaaagcattgctttctaatatggctcgtttacctggttttgatggtaaagcgaaaatgtctaagtcattaggcaataccattgttttaaatgcttctgacaaagacatcaaaaaagctgtaaatgcgatgtataccgatccaaatcatcttcgcatcgaagatccgggtcaagttgaaggaaacattgtatttacttatttagatgcatttgatccaaataaagaagaagttgaagagctaaaagaacactaccgccgtggtggtcttggtgatggtacagttaaaaaacgtcttgaaggtgtactaaaagaattaattacacctatacgtgaacgtcgagaagaacttgctaaagatcctgactacattatggatgttttacgccaaggtactgataaatgtcgaatcattacccagcagactttggacgaagttaaagatggcttaggcttatttaagttctaa

SEQ ID NO: 57229 - DNA, 699 bp, Acinetobacter baumannii
atgtctgataaaaacttcgtatttccttcaggattaaccagtaaacgtgccagagctttagctaaagaagcaaaaaaactaaatggtacgcagctatcatatgaactggatttaatatctgaaaaagaatgccaacttccatggcataaagcagttgctaagtttaataatgaaaataattctactctacaaacaaaagtagaaggtattatgaataaataccccctattgggctatggtgggttttattctccattaatatttgtcgatcgatattatcaacgtcaacatagaatgactaaaaatgaatatgaaaagcactttctttcaggtcgtattttgagtgatgaatggctaaaacaaattaaacatgctcaaaaatttatgtcactttttgataaaaataaaaacataaatcacaatatgctaggttcttatggtttgaaacatgtttgtgaggattattgtggggaaattcttggacatcatacatatatctcaaatggggcattaataattggtgcaattttgaataattttaattttgaacaatatagtgaacaccatattaactgtagttttaatatttgtaaaaaaggggagttctatcaatggtatagaatgtggaaatatggctacaggccaagtcaacatctaaagttcaagatgttagataaaaaatttcgtcctaacaactaa

SEQ ID NO: 57230 - DNA, 192 bp, Acinetobacter baumannii
atgattaaagcagcctgcgtcactgccaaagcttcgaaacgatcacccaaaacaactaataaatcaggttgcatacgtttcaatgcatctgcaaatccaagtaagcccacacccattgatttcacaacagcggacgatgtatcagatgacagtagcatttctaccgattcggtaatttcgaaaccatcttga

SEQ ID NO: 57231 - DNA, 216 bp, Acinetobacter baumannii
atggatctttttcactacgtacatgcttcaaagcagaaagatttaaaacgtagtcaaaatcaccatcattctgaatatatgcatcatactcagcagagccaatatctagtgcaaatgtttggaaatcaccatcgatatagccaaacgagctacgaatatcacgaacaacttctgttagattattttccgaaatatcaacaacgtgtagtttcttag

SEQ ID NO: 57232 - DNA, 189 bp, Acinetobacter baumannii
atgaatgttcaacaactaagagagtattacggtgtggaaaataactctcagttagctaagaaaattaaaaaagtgcgttctgtattaacaaagtgggaaagagatggaattccaccacgcactcaagccactttcgaagtaataactaaaggtcagctaaaagcagatctacaagcattaaacgcttag

SEQ ID NO: 57233 - DNA, 687 bp, Acinetobacter baumannii
atggcacagtctgtttctgacagaattcaaatacgaatgcgagacttgggtttatctcaagcagatataatgcgtgcaacaaatgcagcgcgaggaactgtttcgggttgggtaaatggaagtaatagtccaagcgcaaaacacattgaatcattagcagaatgcttaaagactagtagctcttggcttttaaccggtaaagaaccttctaattcttctaataaaaacgtaaatgattctagtaatgtcacaaaaatagataaggaattaagaagtattccggtattcgattatgtacaagcgggtttatttcatgaagtaggttatgatggtattaatcctattggatctacttggactacttatgaaaattataaaccagaatgtatatttgctttaaaagttgaaggtttaagtatggcccctgatttcatgcctggtgatgaaattgtggtagacgcttgcttagaagccaagccagggtcctttgttattgcacaagaagtgcagcatggtatagctagaacaacttttaaaaaataccgtgtaatcggtgttaatgaattcggagtagacattattgagttggttccgttgaatcctgattttccaacctataattccactcaaattgaaatttcaattataggtgtggttgttagacataatagagaatttaaatattaa

SEQ ID NO: 57234 - DNA, 378 bp, Acinetobacter baumannii
atgagtagacatataacccttgttaaaagcctaaatgttatcaaatttcgggcgctaaacgaccttaaaataaactttggagagcgagttacagttatttgtggtaagaatggaaccgccaaatcaactattcttggtctgttagcacaaatctttagttttgagaaggattatactactgatactgagttaccattcactcccttacactcaccagtatttaaatcaaaatttagtgaacattttagactttcagaaaaatttgatttacctgggggattagaggcttcttatgagttatatgatgcatattttcgaagtgatattactcctattttaaaactgtatggctttgttgcacaaagatttaaaagttaa

SEQ ID NO: 57235 - DNA, 1104 bp, Acinetobacter baumannii
atgaatgtatttttccaaaaagctgaacgtaagcaggctaagttaagacttgctttatctggtcctactggttcaggaaaaactgaaagcgccctaaaacttgctactgggattggtggccgtattgcagtcgttgacacagaagatagtagtgcttcgctatatgcagaccgttatgacttctacgctgcaaacctaacaccgccatatacaccagaaaaatttacggctgcaattaaagcagctgagcaagctggttttgatattttaattttggacagtattactcatgaatggtctggtactggtgggtgtttagaaattgtagacaccttaaccaaaggtaaatttaaaggtaatagctgggctgcatggagtgaagtgacgccacgtcatcgtaaatttatagatgcgattctccattctagtattcatatcatcgtaactcttcgcagcaagatggatacgatccaaaccgaaactaatggcaaaaagaaagtcgaaaaggttgggatgaagtcagaacaacgtgatggtattgaatatgagttcactaccgttcttgacttaaatgctgatcattttgctaatgcaactaaagatcgaactcatatttttaatgaaccaatgatgattaatgaaggtactggtgtatgtctacgcgagtggcttctttctggttctgccgatgcaactatcgatggcaaccagttcctagaaattgaagatcttatgcatcgcgctgggatcaacatcgagaattactgcttaaagcgcaagttaaatagtttgatggatcttcaacaacaaaagtttgaagaaactaaaaatcagctcttaaacataattcgtaaaaacgaacaaaccgctcgtgagcatgaaaatcaattgagccaaagccagatgcaggcagcaaataatgttgttgagatttccgcagaacaacgcgatgagctacagaactttattgctgagcgcggcctagacgtgaaaacagtttgtgaacacttcggcatagatgcccttatccaaattgaagcagcaaaactaccagcagttaaacaagacattgaaacattagctaaaacggggatgacagcatga

SEQ ID NO: 57236 - DNA, 519 bp, Acinetobacter baumannii
atgtctcctgctatagcacaactgccttatggcccgaccacatgcattaatagtcttcaacaaactttccagaaaatcttgaaaatcaaagctatttactcattacaaactgatgaggatggtcagaaacgtatgggtttaaatcaagctggacaagagtttccttcaaacatctcaatcataaaagatagtcctttcacgaatgggcggatggggcataacaagatgagtccgttcctagaagccagctcttgtttcttcaatcagagtggactcctcttcattccccccaatcaagaacttaatcaggattttattctgaatagtattcaatactttaataattcattattaacacgtgaatatgatcaacagcttaaccactggaatgagcagtttaatgaaggtgaacaacggtatgatcagttcatgaaagacttaaaaaaacctcttaaaggttgcgacatgaatgaagtgatttgtgtctatcctttaaatcaaacactgggactgttctaa

SEQ ID NO: 57237 - DNA, 900 bp, Acinetobacter baumannii
gtgactgacattatcggtggtgttactggcggtattggcggtgacaatcctcttggtgtagtaactgacattatcggtggtgttactggtggcattattggtggtggaacatctcctatttctccagtaatcgatgttgttcaaggtggcatcgatattcttcaaggcgttgaaagcctgaaaactgaaattattaacactggtattgatacagtagccgacactattatcggtgtattacctcaagctgagcatccagtttctgaaattgcagaccttggcacattaactttcgaaacgtctcgtgacacggtcaatggtgctcttgaagttgtttctgatttagtcggcggtgatattccaggcgctactgaatcggctactggtattctcgatacgcttattacaaatggtacaactgcaactggtttagtaactgaaatcattggcggagtaacaggaactattggtggcgtaactggcggagatagcccactaggattagaaactgatttacttggtggtttaactggtagcgtaggcggcgacagtccgcttggcgtagtcactgaccttctcggcggtttaactggtagcgtaggtggtgacagtccacttggcgtagtcactgatctactcggcggtttaactggtggtgttactggcggtacagacaaccctatcggtatcgtaacggatatcgttggaagcttaacgggtggtgttactggtgaaggcagtttagatgttatttctaatttgctaggcggattaactggtggtagcttactcggtggtgtaacttctacagtatctagcgtaacaaatacaacgcatacgatcgtaccaacatcattacttactgataacttcctagaaaactctttcaatactgtttaa

SEQ ID NO: 57238 - DNA, 1401 bp, Acinetobacter baumannii
atgttcttactgaaaaatctcgtctcttcaatatcaaaagttactcaggacctgggtaatattgtatcgataacccctgtagtaaacacaggttcctctgttaatgtaaatgtttctgatatcaacattgctaatgtttcaacaacaggcttactttctaatgttatttcaactgtaaccgatacagtttcacatacaaccacagacttagtttctaatgtagttggtaccgtaacaggtactgtagggtctacaaacccaattgatactgtaaccaatattattggcggcgtaacgggtggcgttacaggtaaccctcttgaagttgttactgacattatcggcggagtaacgggtggtgttgtcggtggaacttctccaatctctccagttattgatgttgttcaaggcggcattgatattcttcaaggcgttgaaagcttaaaaactgaaattattaatacaggcattgaaactgtagctgatgcagttattggtgtattacctcaagctgagcatccagtttctgaaattgcagaccttggcacattaacttttgaaacttctcgtgacacagtcaatggtgctcttgaagttgtttctgatttagtcggtggtgatattcaaggcgctactgaatcagcgaccggtattctcgatacgcttattacaaatggcacaactgctacaggtattgtcactggtgtggttggaagtgttactgatgttattggtggcgtaactggtggtgttgatggcaacccacttgaagtgattacagatattatcggtggtgtaactggcggtgttgatggcaacccacttgaagtgattacagatattatcggtggtgtaactggcggtgttgatggcaacccacttgaagtgattacagatattattggcggtgtaaccggtggcattattggtggcggtacatctcctatttctccagttattgatgttgttcaaggcggtatcgatattcttcaaggcgttgaaagcctaaaaactgaaattattaacactggtattgatacagtagccgacactattattggtgtattacctcaagctgagcatccagtttctgaaattgcagaccttggcacattaactttcgaaacgtctcgtgacacggtcaatggtgctcttgaagttgtttctgatttagtcggtggcgatattcaaggtgctactgaaaatgcaaccggtattctaggaacacttattcagaatggttcaacagcgactggtattgtgactgatatccttggtggcgtgacaggtactatcggcggcgtaactggcggtatcggcggtgacaatcctcttggcgtagtaactgatattatggtggtgttactggtggtatcggtggtgataatcctcttggcgtag

SEQ ID NO: 57239 - DNA, 1392 bp, Acinetobacter baumannii
atgggcagtcttaatcttgcagctgtaacagctaccactccatatattaaaaagatccaatctgcattagaaaaagcaacaggccaaacaatagttacacaagagtttcgcaaaattaaacgtgttgctggtgtcagtgttttaccagttactttttacttttctggtggtgcaactcttacactttatgtacgtgctgtcgcggatgtaacaaaggcagaaattaacgataaagttgtcgtcttatctggcgatttcagtgatgactataagcctacttttgataatgccgtaaatggtgtggcaaagcttattcgtgaagcacaatcaaaaattcaagcccaaaacaaaagcgaaaaagtgcatttacctccacgccgtacttcagtagatcaaaaagctaaagaagttcaagaacaagagcaaaagcttgatgaagatttagcaaaacaaacggcgcaacgggaccaacttttggaaaaaattgaactagttaaacagcaacttggtatcagttctattacggaggctggtcaatccgaattgggaaagttcagtagtgtcattgatgaagctttcgatagtgttaactgggacgaaaatgaacatccaagagatgctaacggtaaatttagtgtaaaatctactactaatcacacttcaaacttaattaaaaatatgaagttatatcgcactgattggggaaaatttcctaaaacggttattgaccgtggacttggggatgcgtcttctcatcctaagtatgaagcagctaaggctggggatgttgaaagtgcttatgaattagctaaagatttagtttctgatgaagcaattgatgcactaaagaatataattgatggtcgggacacaatcattgtgccagttcatgctgaagaggcggtggggcgtaatatgatccctttagctacatcggctgttattgctaagaaactagggcttgaagttgatacaaatatagttcaagctataaaagtatcaagaactggaggtgacgggtggcatagactagctaatcctccagcatttgacggcggaatcgacaatgataaatgtgttattattgttgatgatacccagacacaaggtggtacttttgccgcattgaaaggccatattgaagccactgggtcaaataaagtaattggagcttatgcactgacgggtaaacaatactcatcacaattagctctaagtaaagaaactcttcagcaattgagggatgtatatggcaatctcgaagcatggtggaaatcgatttacgggtacgatttcgaaaagctcacagagtgggaagcaaagtatgtcctcaactctcgtaaaacagctgacgaagtccgagatagaatcattgcgtcaaaacaaacgtga

SEQ ID NO: 57240 - DNA, 195 bp, Acinetobacter baumannii
atggtttcggcaccgattgaagctgtaatcgttcaatttggaaccaccaatcgtcatcattcagaatttttaagccacgcagtttttctagatcatgagaataaaatctattaccactcatttcatattgaattttttgagtatcctcagcttgatgagatacataatccaacaattgaattagtttgtttttaa

SEQ ID NO: 57241 - DNA, 339 bp, Acinetobacter baumannii
atgatcacatctaaaacaattttagacatggttgagtactggcttaatcatccggttaatgggaagtatggttctgactttggtgcacctctttatgatttgctaatggcacctttagactcgagggtggcagatagttttcttattaagatgaaaaaggatctaccaatattatctgagcttaactctgaccaattagccctgtattcacaaaccgaaggatttgagacggttcatattcatttaagcatcatgaatgtgaatatagatcttaaccaagtagcagaccgattgggtaaatcagtaacaggtgagacatatgacattaacgcaagctga

SEQ ID NO: 57242 - DNA, 1044 bp, Acinetobacter baumannii
atggcaagatctagaaatattaagccctcattctttatgaatgaagacattattgaattaccgtatgaagcacgattgctatttattggtctttggactttagcagatcgtgaaggccgactcgaaaatcgacctaagaaaatcaaaatgtctttatttcctgcagacgatataaacgttgcagaacagttagagaacatttctaagttcggttttatcgagttatataacgctgatggtattgatgtaatccatatcgttaactttgttaaacaccaaaacccacatggtcttgagaaagatagtgagctacctgacagaaatggtatctacactgtctatgaacgtaacccgaaaaacaaaacaattgttggaaaaccaattcagttaaataaagctgatttaaagcatttttacgataaaacaggaccgtttgccccacaaaatactggttctgctgttgaaaacagttatcaagataacgaatcgaatcatgcaaacagtagtgggaacacacaagaacagttagataacggttctaaaactgtttctatctcagaccaaaacgccctgattcctgattcctttaatctgaatcctgattcccttaatctgaatcctgattcactgaatccagaagggaataacaactccgccgttggcgaagttgattcatcgactcaaacaaaatttagtttcaagaatgctttgaaaaaaaatggtgtacctgagaaagacgctgctgagttcttacaagttcgtaaagcaaagaaagctcaaaacaccgaaaacgcttttgaagcacttttgaatgaagcccaaaaagcaggaatcacactgcagcaagccgtcgaatattgtttgaaaagacaaaatccttggggtgccttcaaagcatcttggtacctaaacgaaaaacccgaaatgactaccggtcaacagtcaaaccatcaatcgttaccacgcaatgtaaatgatcaatggggcgcgccaaagaaatatgaaccggttgctcacacagctgtgaagggtgagttgatatga

SEQ ID NO: 57243 - DNA, 765 bp, Acinetobacter baumannii
atgaacgcagtgcctcaaaaattggaatataaaatttcccatacaaaccagatctgtaagatccacaaagaacacatgatcaatgtacatggtcgaatcgtttgtcagtcatgtgttgaaaaaatcatgaagcagtcaaatgaaaaatatgaaagcgataagaatattcgtattttaaatttgaaaatggctcgagctggtatccctaaaagacatgtaaatagcggctttagcaactatgcagtaactcacaaaggacaagacaaagctcgtaaaacttgtgaaaaatttactatggatttcaattcaggtgtttttcgaaatttacttcttgtcggccgtactggtacgggtaaaacacatctaggttcatcaattctgaaaaatatcatcattaaaaactgggaggctatatacattacgtctgcagatctagctgaagatatcgcgggtgcctatcgccgtagcggtgatagtgaagatgaagcgctaaaacgctatgtaaaaaaagatttattaattattgatgaatacggtttacatgaccgtgctgaaaaacgtccgcagcttcttgagagtgttcataaggttctactcactcgttatgacgagttgaagccaacagttgtgatttcaaacctaagtctttctgaggtccgcgaagatcttggggaccggctttggtcaagatttcaacatgatggcttagatattgtggaatgtgattgggatgatgctcgtataggtggaggtaaagcacagtga

SEQ ID NO: 57244 - DNA, 546 bp, Acinetobacter baumannii
atgttaggccgcatggacacaacgcaggtcgcattgatacaccaaattctagctgcggcagatgagcgaaatctgccgctctggatcggtgggggctgggcgatcgatgcacggctagggcgtgtaacacgcaagcacgatgatattgatctgacttttcccggcgagaggcgcggcgagctcgaggcaatagttgaaatgctcggcgggcgcgtcacggaggagttggactatggattcttagcggagatcggggatgagttacttgactgcgaacctgcttggtgggcagacgaagcgtatgaaatcgcggaggctccgcagggctcgtgcccagaggcggctgagggtgtcatcgccgggcggccagtccgttgtaacagctgggaggcgatcatctgggattacttttactatgccgatgaagtaccaccagtggactggcctacaaagcacatagagtcctacaggttcgcatgcacctcactcggggcggaaaaggttgaggtcttgcgtgccgctttcaggtcgcgatatgcggcctaa

SEQ ID NO: 57245 - DNA, 957 bp, Acinetobacter baumannii
atgactacgacagttaattccgacatgatcatctataaccaactggcccaaacagcgtatttagaacgtttacaagacaatttgaatgtctttaatgaagcttcaaatggtgcgattatttatcgtaatgaaatcattcaaggtgacttcaataaaaatgcattctacaaagttggtggtagcattaaacatcgtgatgtgaactccaatgcaaaagtcactccggaaaaaatcggtgcaggtgagtctgtaggcgtaaaaattccttataaatatggtccttatgcatcaactgaagaggcatttaagcgccgtgctcgtacaccagaagaatttgctatggttgttggttacgatcttgcagatgcattggttgcaggccgattagagtacagtttagcttctttaaaagctgctatttctagtaatcccgatatggttgcgaaaggaagtatcgttgttgatggccgcaaagcattaactcgtggtatgcgaaagtttggtgataagtttggccgaattggcttatgggtgatgaactcagatacatatttcgatattgtcgatgatgctatcactaagcaaatttacggtgaatctgaaatcgttatctatggtggtttaccaggaaccttaggaaagccggtattggtgacggatgctgtaggtgataacgatgcttttggcttgcagtatggtgctgtaacagtaactgaatcacaagtaccgggcttccgagcttatgacatcaatgatgaagaaaacttagcaatcggtatgcgtgctgaaggtgcatttaacctagatattcttggttatagttgggatacatcgaaaggtgaaaatcctgatcttacattacttggttcaagtgctaactggattaaatatgcaaccagcaacaaaatgacagcaggtaccttacttgatttatcaggtacagcgacaactggttaa

SEQ ID NO: 57246 - DNA, 2058 bp, Acinetobacter baumannii
atgcttaatgctgtcaataatagaccagctttagactttgaagatttattaaaagaaaaagcaaatcctattacgcagtcttttgttgtagccgacaagtttgtaaaagactttgctgatgtattggagcaatcagttagtgaccttaattcagcaaataaagaacaaatcaaccaacctaatgcacgaaagccagctatagaaattaatagtcatgaagacttatcaaaaattgtaagctcatctgcaccagaacgtgatgagaaaggccgttttgtatctaacaataatgatgatgaaaaccaatcatcaattagaaaggttgctcagatgataactacggcgattaaaggtgtaatgccgaaatcaccgcaaggtgtagatcctacagttgatgctatcaatgaagttggtcatttactttcacctgtccgccgtgccgctggtttagccttgcgtccattaactggtttgatgcgtagtaaaaagcgcaatgagccattacctcgtgaacaagagaatcataaccgtaaacaaataaagttattgcagcgcattgccgataatttagcggctaagggcggattgttaggttctatagggaaattacttacttccgctttatctgctggtggcgggcttctaggcggtgctttgggcaaaggtaaaaaaggtatagggaaattaggtaaaggtttaggtaaatttctaaagtttggtcgtggcttacccgttattggagcattagccgctggtgcatcattgttagattggaatgaacagagcacacaagaaaagggcggtactgtaggtagtcttgctgggggtatgattggtggtacggtaggatccatatttggtccagctggaaccttgattggtggcatggctggttcttggataggtaataaacttggtaccgcagttgcgccgtattttaaagagtggacagattcattaattgctgcagatgtaccaggtattattaatactgcgtggaaaggatttgttagttatgcagcgaatgcttttgatcaagcaaaaggctcagcttcaaaagttgtggaaggtgtcaaagatactgcaggtgatacattagatttcatcaaagataaatttaatcggtttaatccatttcatgacggcgttccaacatggggagtagggcaaggagtttataagccgggctttgggtcaaacaaaaatattcctgcttatggttcaactaatactaaagctttggaaatgattggcaataatactgtcgaaagagcaagtagccttctacgtaaatttgaaggatacaacgatactgcctattgggatgtgaatgctcatcgtgttggttatggtagcgacacagtgacagatgaaaagggcaacgtaaccaaggttactgcaaatacaaaagtcaaaaaggcagatgctgaaagggatttggaacgccgtacaagaatattcgcagctgaagcaaggagtaaagtcggagaaaaagcttgggataacttacctatggacacacaagcagcgttaacatctgtagcatacaattatggtgcacttccaaagagtgttgttaaggctgtgaaaactggcagtgtagaagaaatctctacttctgttagaaatttacagaatcataataatggaattaactcaaagcgtcgaaattcagaggccgatatcatcaagagttcagtttcaaaaacaaataatttactaaaaccttctgaagaaattaacaagggaggaagtgatattaatgaaaaaattaccttctctaataggttggaggagtccaaaaaatcaattaaacaggttttagctactaaaccagcaatacttccgacagctcaaaaaacaaataatgttaattcaaaacttaagacccaagttaacactgctgtccaatcatttaagcagcctctcaatacacctaatccacaagaagtcgttgttgttaatggtagtagtggtaatatttcgcagaacgtaaacgatagatacctagctcatgctctaacaggtgggataggtatggggaaattagatgtataa

SEQ ID NO: 57247 - DNA, 321 bp, Acinetobacter baumannii
atggttcaggcaactttcggtaatcacttcaaaatcgaagaaggcaaagtagttgcctatgatccaaacggcgaaaagatttactcccgtgttcgccctggtgagcttgcaaatgttgacgaagctttagagtccttggttggtggatacccgcataaagacttaattcttaaaggtggtaaagggacaggtggtggtttccaaagtgggggcaaaggtggagctccagcaggtatgaagcgaagcgagatgtcagtatctcaaagagccgattacatcaaagaacatggccaagaatccttcctaaaactaccgaactaa

SEQ ID NO: 57248 - DNA, 906 bp, Acinetobacter baumannii
atggctagcaaaaatagaaagacaaaagttctatcttacaacttacattaccgatgccgtaaatttaccggtgttgatcgaagtaatgtcgatgtagatgcaatggtcaacttgatcaacagtgaccatgtacaagaaatggttgctactaattcattacaaggtttttacggtcatcaaattcgacagcgctatggtatggtgccgcctgaaacggtgatcattaaaggtaaagttgtatatctttcacgggcgtttaaaacaattgaattacgtgcttcaaaggatggaacagttgagcaccgagaagagttttatgataacgagcctggtgagatagcattacaagattataaagcccaagcgggtggttttagcacttcagtcaattacaagaatgtcggtggccgtttaattccaacgggtttttttggttttgatttcgttgcgcaaccaaattatgcaagtaatgtaggggatggtcagttatttgatggattatttgttcctgaagagccagaaggtgttgtttcttgctttgatagcgcaacagatatttcacagttatcacagcccgaaattattattgcccaattacttgaagatcaaattttacagacatacgacaatatcaatagtcagctgcatctattaaccgagttaggaaatgctcaaggattagtgggtgaattatcagaaaaagttgataaacagaaacgcttgcaacaacttagagaagaacgaaaaaaagaactctatacgggtatggtaaatcctgtgaagagttttgattcagtacaacaacaagctgaacaaatcattcaaagtttggacaatccaaacgtaaaagagaaagctaaaaagccgaaaaagtcttttggcaatatctttagtgtatgggggtaa

SEQ ID NO: 57249 - DNA, 1368 bp, Acinetobacter baumannii
atgcttacacgttttttactgccgattttgggcactaccgttttagttacaggctgtgcttcttcctctcaatatccgattaacgagagttatggtccagagccaaagttgcctgaaccgaaaataagcttatttccgaccgtaaatatagcaccggcacaaggttggccaagtggtgtgatgccgactccggcagaaggtttaaaagtaaaagcatttgctaaaggacttgagcacccacgttggctctatgtattaccaaatggtgatgtgctggtggctgaaacggatgctccacctaaacctgaagacagcaaagggattaaaggcaaaattatgaccttcgtaatgagacgggcagggtcatctcatccaagtgcaaaccgaattagtttactccgtgatacgaatggcgatggtatagctgaccaaaaaacggtattccttaaaaacctaaactcaccgtttggtatggcactggtaggtaatcatttatacgttgccaatacggattcactcatgcgttttccttaccaagaaggggaaacacatattacttcaaccggtactaaagtattggacttaccaggtgggcctctaaaccaccattggaccaaaaatgttattgccaatcgtgaaggtacaaagctctacattaccgttggctccaatagtaatgtggccgaaaatggtctagatcaagaaaaaggccgtgcacaaattatggagttcgatattgcaagtggtcagtcacgtccatttgcaacaggactgcgtaatccaaatggtatggcttggcagcctcaaagtggcaaactttggacagttgtaaatgagcgcgatgaaattggtagtgatttagtacccgactatatgacatcggtacaagatggcgctttttatggctggccttatagttactatggtcaacacgtagatgtacgagtcaaaccacaaaatcctgacatggtggctcgtgcaattaaaccagactatgctctaggtaaccacactgcttcgttaggtcttgcattttatacagccgaactcatgccacaatttagaggtggagcatttattggacagcatggttcttggaaccgtaaaccacatagtggatataaagtcatttttgtgccatttagaagtggtcagccctctggtccaccgcaagatattttgacagggtttttaagtgaaaaaggcaaagcgtatgggcgtcctgtcggggtagcaattgatttttcgggtgcagtattagtcgcagatgatgttggtaatacaatatggcgtgtttcaccagttgctgaaacaacttatgagagtccaacccagcaatccattcgtagttcagtaactcaaccttaa

SEQ ID NO: 57250 - DNA, 354 bp, Acinetobacter baumannii
ttgggcagcgattttgcaccagacagtgataaagctcgtctggttaaactggcaaatgtctggatgaaaaacagaataggttttgtaccagatcctattgacccacttcttaaggatgcagcttgtgaaattatcaaaggaattctggccaaggtaatttataacggcaaagatcagcagctgaagcgcaagaaggtcaaagctgattctgttgagtcagaaaaagaataccaagatggatctgaagcaatttctagctttgaacagatagcaattgattttattgactcacttgatttgaaagatccaaatgcaagttttaatggctttggcatacctctttacagggcatga

SEQ ID NO: 57251 - DNA, 273 bp, Acinetobacter baumannii
gtggcattagcatttgctgacgaatttggaaaacaagcaaaattaacaaccgttgagtctgttctagcaattgtagttaaggtaaattcgaaaatgtctttactagctgaaaaaataggcgcatctgcattaaatacattagctccgccaatatatatacgcaaattggctgcattgttccctccattatcaaaggtaacttttgctctgacggtaacagtaataccaggtgcatttaaactttttgctaagggatatgatatttgtacataa

SEQ ID NO: 57252 - DNA, 348 bp, Acinetobacter baumannii
atgctcggcgggcgcgtcacggaggagttggactatggattcttagcggagatcggggatgagttacttgactgcgaacctgcttggtgggcagacgaagcgtatgaaatcgcggaggctccgcagggctcgtgcccagaggcggctgagggtgtcatcgccgggcggccagtccgttgtaacagctgggaggcgatcatctgggattacttttactatgccgatgaagtaccaccagtggactggcctacaaagcacatagagtcctacaggttcgcatgcacctcactcggggcggaaaaggttgaggtcttgcgtgccgctttcaggtcgcgatatgcggcctaa

SEQ ID NO: 57253 - DNA, 669 bp, Acinetobacter baumannii; identical to SEQ ID NO: 55377

SEQ ID NO: 57254 - DNA, 204 bp, Acinetobacter baumannii
atgtgggatggtaatcggaatccagtttcttatagttcattagaagagatgaatatcgatttgaatgagctgaaatttaccaaattaaatgaagataattcttctaaaacactggataaaatatctattcctgaagctaagagactattagctaattattttgatgtccctcaagaaaatatttcaattacaatcaatatgtaa

SEQ ID NO: 57255 - DNA, 843 bp, Acinetobacter baumannii
atggctcgcaagattgaatactcggaagaaatttggaaccggctaaaagaagtctatgaatcttcacctaagattacatggcaagctttagtagatcaggttggcgaagaactcggttgtgagatgccttcgccatccgttgtacgccgtaaagcacttgctgagaaatggaaaaagaaagctaaatctctagtcaaaaagacagcccaagagctcaataaagagattaaaaaattgaccaaaaaaaacaatggtcaagaaaatacacaaactactgataaatcggaaaaaagtgatagtcaaaattctgtcaaaaaaacgtcaaatattgctgaatttaatagtcaaaactctaaaaataatggtcataacaacggcgggcgttctacagtcaacgagaactatctaaagtcagctttggttgtcaaaaataaccgtataagagctcataagcttggagagttaattacagacactatcgatagtgttattcatattagagatgaagtactgaatttaaataatccaactgaggaacaattagcattagtcaagttcaagatgggacttatatgtcaagttgtagatttaaacgttaagcaaagtatcagcatttctaacattgccaagacagaagcaatgttctggggcttagatgtagatgatcttaaagaccagtcggaagttcaagcacggcgtagttcagttatttcaggtgctgaagaaagaatggcaattgcaaaagctaatatgaaaaagaaaaaagaagaggcgtttatgcgaaagttagcgttaattgaagccggtgaagtagagcctgaagatgaaaaaagtgaaaattga

SEQ ID NO: 57256 - DNA, 276 bp, Acinetobacter baumannii
ttggctcgaaacgctgatgaaattactgtgttagaaatcattgaagccgtaaatgaaaccgttgatgcaacgcgttgtgaccataaaggcaactgccaaaatggtgcaatgtgtcttactcacgatttatggcaagaactctctcatcatattgccgactatttagctaaaatcactcttgccaacctcattagccgagacaacgttcaaactgttgcattacgccaaaatgtaactggcacagattcagctcttttatcgggtacaggtatttga

SEQ ID NO: 57257 - DNA, 312 bp, Acinetobacter baumannii
atgagaattacttttttaattatgagcacgattacttgttcagttacttttgctggtatagataaatgctcaaatttgccaaatcaatcggctttaaatacttgctcatcaaatgttttgaattctgcaaatcagaaaattaattccgtttatgcaaattatatgaaagagcttaacccaacagagaaacttcaattaaaagaggctcaaagagcttggattcaatacaaagaaaaagattgccaatttcaatcttcacctgttttaaagggctctttatatccatttgttcataatagatctctttcataa

SEQ ID NO: 57258 - DNA, 1056 bp, Acinetobacter baumannii
atgaatgccttaaatactttactaactcaaagcactacaaaagaaacaccagttagtttacctgttcagttaaaagctaaatacccgcttgtgcagaccttcgcacgacaaattgcagaacatcgtcaaattattcaaaatattcttgctggcaaagatcagcgcttaatggttattacaggaccatgttcaattcatgacccagttgctgtacttgaatacgcagatagattgcaaaaattacaagaaaaagtaaaagatcaaatcttcattgtgatgcgtgcttatattgaaaagccgcgtacaacagtaggttggaaagggtttatgtatgacccaaaccttgatggttcatctaatctacaattaggtttagaaaaatcgcgtgagctatatttacaaattattgaaaaaggcttgccgatcgcgagcgaaattttaagcccaatggcaacaggctattttgatgatttattggcttggggtgcaattggagctcgtactagtgagtcccagattcaccgtgaaatctcaagtcatatgccatacagtatcggtttcaagaatggtacggatggttcaattcaaattgctttagatgctattcagtctgcacaaaatgagcatcaatttttaggtatgaatcagcaaggtttgccttcagtgattcagagtgctggaaatccattgccacacttgattttacgtggagccaatcatggccctaattatgatttcgcttcaattcaggcaattagagaaaagcacaaacaaaacctacctgccttagttattgactgtagtcatggtaacagtggtaaagatcctttacatcagccagaagttttacagcaaatcgttgctgaacgtctaaaaactcaggtaaagggtgtcatgattgaaagccatttagttgatggtaaccagaagatttcatgtgaaatgacttatggtcagtcggtaacggatggttgtttagggtgggataaaactgaacagcttttgttaaatgttgctaaacaattaaaagcaagtgaattagctcattcggcttaa

SEQ ID NO: 57259 - DNA, 726 bp, Acinetobacter baumannii
atgcctgagacacaattaacggctgactggaagttgagagccattggtaacgctataaaagcatgtccgtcacggatgatggacgattcagaagcaatgctttctgaatatagaaaaagccaaacacacggtgaaaactcaaaagttattttaccaatcatgctcactgcaactgcttcagcagatcagccgcccgatattagtcaattattaccagtacccgattttgttgaaactgtcattgatgagaaacgtgtaaaagttcgtctggtaccaacaacagtaagagctcaaatcgcattctttgccaacaatcctaacgatctgcgttcagtcattgggcaattttgcacgtacatgtctagcagtgataaccgccgttttaatgtgccatttcagcaatggaatgatcatgttgttaattcaacattcactgtttttgaaaatgaactttttccatcaccagtcccaagcgaagcaatcaatctttctatctcaactgtagatattcagctcgtgggttatacacctaacgtcatcggtttcggtggtccattcgaccaaaacacaggtaatggctatgaacctgacggctcagcaacggaacagcccgcaatcaacgacaaagttgtagtgcaagctgatcagtacacatcactcgatcaccagcgtgtgaagggtgatagagaaacaggtgaaattacagttgagcgtatagatgactga

SEQ ID NO: 57260 - DNA, 573 bp, Acinetobacter baumannii
atgcctatgttgatggcaaacctacaaaccgggcaaatgcttcaagtcgctggttctttgggggaaaactcccctttaaagtctgcactatttgatatggcctcaggtccattaacaagtgctgagaatgcacttaaaagcgttgaagggcgaacaaatttaaccaaagtgaatacaacccaagtattcctgtctacttcttcagtacgtctaaatttatcaattttcttcttagcatttagtgatgcaaaaacagaagttgaggacaagatcaaacagctagaggcttggagtctacctgtttctttgtcttctgattcaacactgcagaatgtcgttaatgattcaaattcaaccttagaaggattgttttcaggtgtaattccaccgttcgtaactcttacaactcacggcaaaacttataaaccattcattattgaaagtgtgtctgctccaatagtcgctccaattgatgaaaatggtaaccggttaagtttggccgtcaatattaatttaatgagtcgaactgcatgggactcaaaagatatttactcattatatggaggcaactaa

SEQ ID NO: 57261 - DNA, 699 bp, Acinetobacter baumannii
atgattacatttgaacccgtgcaagttggtaaaaatactttccaaatgcaagagcttagtttcgagcagtgtcttaaaatttcagtaattgcacccaatttaaatgaaaaaagacttacagcttttcttaaatcagttttagaaagtgtgtttgatccgttgctcttaacgattcaagagcggtatttactattacttaaatatctagaaaaacaaagtaatactatgttggatgtaaatacagactggtcaaaagttttccttcagtccgaaaataattggaaaactgaagctactcaaaatggagttacggttagacagctgataggaatggaagcggagttcttagaggcaaattgcaagaatgtcgctgaatggattgcctgcatgatggcatttcagttgagttattctaatcatgagcacttagctttattgcccgatagaacaaatcctcaattatttgaagaacaatttaagcagcgtctggatttcattaagaaaatgccagccagtgaatttgatttgtgctatcaagatttcaataacttaaataacgagctattttctcatttacgtttaagtgttgataaccatggcatattagtggaaagaggtgcagatgacgcgccagcacgatttcgcaccgcttccgtctttacaggaatcatcaaagagttggaccgatcttttgcttga

SEQ ID NO: 57262 - DNA, 1125 bp, Acinetobacter baumannii
atgatgaaaaagtcattattttgtatgacagctgccttatttgctctgccaacagtcacttccgccgcttccccatattttagtttaaaagatggtgatggtttcaaacgtttttcagtctcagctggttggcttcatgctatgcctcaaggctcaggaaaccctgtcaatatcaatactagcgttgaagaaggtacaaaatctaaagttggagatgtcactgttgactctgttctaggtgcgatagatcaatccaccgccgatggtaaaagaaaacatgataccctgaaaaccctaaccgacaatccactcacaagcctacttatcactcataaaggcgaagatggaaaaacatatttaaattcaaatattgctggtgaagccacaatcaatggattatctaattgggaagctcaaggcactggcttagaagctgataatgttgatacagtcggtattatggccaactatcattttagtgataatttgtctttagaaattaaagctggtattccacccaaagttgatattaaaggtaaaggaaatatttatgctccattatctggaatagataaaccaggtggtattggtactattctgggtgatattcccttaaaacaagatatttttatcaccgatctcactcaaggtagtaaagctgcttcagcacgtgcttggttaccagctgtagaacttcattatcagtttggtaaatcaggagtgaataaattccgcccttacgtgggtgcaggtgtgatgtatgcttatttcaacgaattagaaatgaattcaggaattgaatctgatttgataaaagcgggtcatatgattcaaaacattcatgatggtaaagctggagcagcactagatggtaagacatcatcagccaaacccatcgtgaaactagaggcgaccgatacttttgcacctattgttactttaggggcaacttacgacttcaaccctaactggtttgctgttggttcagtttcttattcaaaaatgaatagtgaagcaaaaatctatgtgactgaccaaaatacaggtaaagagctaattaaagcgaataccaaaattgatattgatccacttattacttatttaggtgtgggttaccgattctaa

SEQ ID NO: 57263 - DNA, 1074 bp, Acinetobacter baumannii
ttgcaaaatggtggagttcgtagagatcaacagagccgccagcgtgcagatagagaacagcgggcatttgcagaaaaagaaattgaatatgatgattggggacgaaagatccctaaacctatgttcttgcgaccacaagatattgcacaaggcgaaaaatatgatgtagagagagtgctttttacaaccttaggtcagcgaaatggggaagtgccacggcgtattacccgtgatgatattttggcatttcaggaaaacattcagttattaaaagatcagtatagtaagggtattacccctcaaaacatcattaatttaagccgacaagacgatattgatcgggcaaatgagcaaatctatttggcggttccagtaagcagaaaagctggtttagttcacttgcttactaatgccggtccaaatagtaaagtcttaaatcatcacgttgagattgagttttcaaactttaaatctgttgtttttgatatcgataaacaggcattaaacaccgtcaaaaaccgcttggctaaaggcaaaatcaaatttcagtgtgattgcgaacgtcatacattctggtaccgctatatggcaactattggcggctacaatttaggacgtgatgagggcggctttccgaaaatacgtaacccgcatttatccggtgtggcttgtaagcatgtattgcgcgttgttaagtggattagttcaccagcagggattgcctaccttaaaaaggaagtagagaaagaccgtaagaaacaagttggtgcacggtataagcaaacagataagcaaatacagaattcaattaacgagcaagtaatggatttgatgaatggttctgttaagccaatcaaagccaatatccaaaaagcagaaaaagaaatgatgcgtagagctgataaagttgccaaaaagctcttagaaggcgaattaaaaaccctcaaacgttttgaagtggaaactgttagagcgagtcaaattgaaagaattcaagccttacataaatcaggcgcaatcgacaatgacatgctaaatgtctttatgaagggtttaagtcgaaatgctaaatag

SEQ ID NO: 57264 - DNA, 246 bp, Acinetobacter baumannii
ttgggaaatgctcaaggtttagtgggtgaactatcagaagtagttgataagcaaaaacgtgtacaacaacttagagaagaacgcaaaaaagaactctatacgggtttggtaaatcctatgaagagctttgattcagtgcaacaacaagctgaacaaattctgcaatctatggatcaaccaagcgtaaaagagaaaccaaaaaagtcgaaaaagtcttttggcaatatctttagtgtgtgggggtaa

SEQ ID NO: 57265 - DNA, 804 bp, Acinetobacter baumannii
atgaattaccccaacgattcgcttaaatgcatccaaaacgcttggtataagcagcttgtcaattttcgtgcttggtatatgcctgagacacaattaacggctgactggaagttgagagccatcggcaacgctattaaagcatgtccgtcacggatgatggacgattcagaagcaatgctttctgaatatagaaaaagccaaacacacggtgaaaactcaaaagttattttaccaatcatgctcactgcaactgcttcagcagatcagccgcccgatattagtcaattattaccagtacccgattttgttgaaactgtcattgatgagaaacgtgtaaaagttcgtctggtaccaacaacagtaagagctcaaatcgcattctttgccaacaatcctaacgatctgcgttcagtcattgggcaattttgcacgtacatgtctagcagtgataaccgccgttttaatgtgccatttcagcaatggaatgatcatgttgttaattcaacattcactgtttttgaaaatgaactttttccatcaccagtcccaagcgaagcaatcaatctttctatctcaactgtagatattcagctcgtgggttatacacctaacgtcatcggtttcggtggtccattcgaccaaaacacaggtaatggctatgaacctgacggctcagcaacggaacagcccgcaatcaacgacaaagttgtagtgcaagctgatcagtacacatcactcgatcaccagcgtgtgaagggtgatagagaaacaggtgaaattacagttgagcgtatagatgactga

SEQ ID NO: 57266 - DNA, 1164 bp, Acinetobacter baumannii
ttggatgaagcaaatcaacgtattgatcaatcaattcaagcgaatgaggcgttggttgctgatgctcaacaacgggctattcgagctgagaaagaacttgatgacaaaattggttttatcaaaagagaaactgattcaattattgatgatgttagaagtgatgcagatgaaattcgcatattagctgaaaacgcaaaaaaagttgcagatcaagaagttctagaccgaaataagcaagcagctgaaactcttattgtaatagaccgaacaaaagccgctttaaaacaagatattgatcaaaacttagttaaagcaggtcaaatgattgatgatgctaaattagcattaggtgaagaaactaatactctcattaatcaaaaaattgaacctattgtgagccaaactgaagctgcagttaaaaaagtagatcaagttgcagcccagtatgttgaccttaataagaaagtcgattcgggctttctagctgaagctgaagcacgtgcaaatgataaagaggcattaactcaaagctttgagcttaagtttgctgaaatgcaaactgaattgggaaaatcaaacgccttaatctcagaagaaattaaaactcttgcagcaaaagataaagctataactgaacaaattagtactgctcagtctcaaattggtgataacaaagctgcaattaataatgttgaacgtacagtagttgatcttggtaagtctgttgctgaaaagactgatcaaattcaagcaagtttagataccacaaatgcaagtttgttaaatgctaccgagttagcgcgaatgcaatcacttggtaagcctttacgtgacgatcctacatttctatctgggaatggaggattaagtgcctatgtggtaccagcaggctcaacactaactcgacaagccaaatctacggataaccccgtaaatagtacccatgagatgcttttaagatctacatcatctttaggtggtggctggtatccaactgttcctacacttgtagctgcgcctaataaaacctttttaataaaacaaattattaaaatgccaaaagggacttatttattaccagttggcaatgctacaggtacgggtgggtatttacgagtacttggaaataaagaaggtacagggactgttctaaattttgtgtaa

SEQ ID NO: 57267 - DNA, 630 bp, Acinetobacter baumannii
atgtgcgcaaactatgaaccaataagaaaagatcgtgtgtacctcctagatctattcgaaccaacattcgactataagaatgatgtttatccgggttatgactgccctctttttttttctaaagatgggaatattgaatggcgccaagttaagtttggcatgatcccaccttggaaccatgatttaaaattttctaaatatacttacaacgctagaactgagacagttgataagaaaccaagttttcgtcatgcatgggctaaaagtcagtttgctttgatacctgtagaaaagatctatgaaccgagatatgtgaatggtaaagcggaaagatggggaatttatcgtcaagacggcttaccttttacagtagcagctatttatgattcaactgtgatcgatggtcaacaagttagatctatgtcaatgctgaccatcaatgcagacaatcaccctttcatgagccagttccataaacctgaggatgaaaaaagatcgattattgttatacctgaagaatttcgagaagactggttgaactgtaaaaaagaagatgctgatcaatttttctttgagatgcccctaggtgaatttactgccgaatatttcccgaaacagaaaaaccgctaa

SEQ ID NO: 57268 - DNA, 582 bp, Acinetobacter baumannii
ttggctcaacagcaagcagaattagaagcaaaaaaacttaatgaagccgaaaatgaagcaaaccaaagaagagatgaagaagtattagcagcacgtgcagctggtatatctgaaaacaaaatgatgcaggcatggttagacactttggaaaatcctgaagattctaacaacattgactttatggcttgggtttcagatcgccgtggtgaattcttaaaaaactggaatggggccgaaggttcacaagaatatttaacagcattttatgaatattcaagagcatgggcagatgaacatttagcggatcgcctcagtaataaagagccagcccaaaattcagataatgatgaatctaaagaactaaatgctccgacagaagttgaagatcttcagcctagtacgacaaatgatgaaggtaatcaactttaccgttcagtaattgaagggcaggttaaagttaatcttgagttattagagcaaattcgggacgaagcagaaaaagatttaaatgatccacttcttattccagcagtgacagagcttttgaatcaagtacagaaaatggaagcggagaatatctaa

SEQ ID NO: 57269 - DNA, 582 bp, Acinetobacter baumannii
ttggctcaacagcaagcagaattagaagcaaaaaaacttattgatgccgaaaatgaagctaaacaaaaaagagatgaagaagttttagctgcacgtgcagctggtatagctgaaaacaaaatgatgcaagcatggttagacactttggaaaatcctgaagattctaacaacatagactttatggcttgggtttcagatcgccgtggtgaattcttaaaaaactggaatggggccgaaggttcaccagaatatttaacagcattttatgaatattcaagagcatgggcagatgaacatttagcggatcgcctcagtaataaagagccagcccaaaattcagataatgatgaatctaaagaactaaatgctccgacagaagttgaagatcttcagcctagtacgacaaatgatgaaggtaatcaactttaccgttcagtaattgaagggcaggttaaagttaatcttgagttattagagcaaattcgagatgaagcagaaaaagacttaaatgatccacttcttattccagcggtgacagaactcttgaatcaagtgcaaaaaatggaagcggagaatatctaa

SEQ ID NO: 57270 - DNA, 279 bp, Acinetobacter baumannii
atgtctgatcatcaggcaattgaagtaacagtcactacttttgctaataaaactaccttctggagtggtttagcaagtgcttttggctctttaacatcaattaattggttgagctatacaggagcaattgtagctgttgttggcctattcattagtttcatttttcagtggagacgtgatcgcagagaacgtaaagaaagtgaattacgtgaaaaagaaagcgagttacgaatcaaagtcttagagcaagatagtttacgaaaaaggaaagatgaatga

SEQ ID NO: 57271 - DNA, 771 bp, Acinetobacter baumannii
atgaagtttattgaaaataatgcttggcagtacctttctgtcaagctaccgacaattggtgcattcatcatgctaattttgttgccagcacttcaatggggtgttgattatgaggttatccctgaaaaatatcatgcatttgtaaccggtacattaatgcttggtttgtcatggataggaaagaaaatttctcagccaagacttaacggcccgcaattaacaggacagttggtaggaattaatactttattaaatttacctactcctacaaaagttgatgaattagcttggatagccgaagcaaaaaaacatattggtctgcaagaaataccaggtaaacaacacaatccaactattttgaaatggttaaaagagcttaaagcgtggtgggcggatgatgaaacagcgtggtgtggaactttcgtagctcattgcttgaaagcagctggaatcgcttatcctaaacattggtaccgagctttggattacgtgaattacggcgcaaaactaataaaaccagcatatggttgtgtagccattaaaactcgcaaaggcggggggcatgtttgttttgttgtaggacgtgataagacttctgggaaactcgtttgccttggcggaaaccaatcaaataaagtgtgttatgcgctatatagtgaatctgaattccaagagttccgttggtatggacgtacacctcaaccagccagtaaacgttattctttaccgcagttaaagggtgtaactgctacaagagtttctgaagcctaa

SEQ ID NO: 57272 - DNA, 1089 bp, Acinetobacter baumannii
atgcaagaccaagctttgccatcattccctcaagatttaaatgaggatcaaagtattacacgtctaccaatttcacactcaggtattcatcattttaaatttcacggtaatgcctcagaatattttggaatttggatcgttaatattcttttaactattattactttaagcttatatgcgccttgggctaaagttcgtcgtttacgttatttctatggaaatacagagttttttgaacgtcgttttgattttactggtattccaaccaagattttgattgggcgtttaattgcattaggaatttacgtagcattttcaatttcatcacagtattcaatgattgcaactatagttggaatagttgtgttatatatggctgtgccttggctaattcgcgctactttacgttttactgcaagaaatagtaagtatggtaacgcacgcttttattttggtggcactataaaagaatcttataaaattttccttttaagtatattggtatatatctttacattaggaatttttacgcctgtagctatttggctatataaaaaatattatcttaatcacctatatgctggacaattaaattttaaattaaacgcgaactggactgcatatatggctgcagtttatgtacccatttttattgctcttggcatcattgctatcttttcaattatttattttagtattttaggaacactttccgggttctcatcgaattctgtaatctttgggatatttatgatgtatgccattattggattatttatttatccattaattgctgcgcgtcttttcattactacatggaacaatactacagttggaaacagtcaatttaaaacagactgtaatcaatggcgttttgcatggattgtagcatcaaactgggtggtaaaaatcttaaccctaggtttaatgtctgcttgggccgctgttcgcattcacaaatatcaggttgaatcaatgagcttaatcttgctagatgatccagataaaatgatgaatctagctcagcaagaacaaagtgctttagctgaagaaatcagtgatatttttgatattgatatctccctataa

SEQ ID NO: 57273 - DNA, 474 bp, Acinetobacter baumannii
ttgaaacaagtagataaacatgcctatttagctctttatataatttattatatctatttaaaagacaagtacgaaaatgaaaaagagcgaaagcaaaaagtaactaaatttatgcagaaacatgaaaagaagatatcgaatccttgtattgaaggtcttatagttaacgctttgctaagattccaaattcaatgggatattaaagatcatgaaaaatatttaatacagtattttaaagatagagataaaaaattaaaaataagatgtcctgatatttttgaatcagcaatgattcttcaattagctgaacgttatagaaaagatggtaaagagacaaaagcactagaactaattgaaatggccgttgaaaacctaccctatcataaggagctacgccatttcgagaaagagtataaaagattatctcagcctattgatgaaaaagaaattttattccctttagtagaagaataa

SEQ ID NO: 57274 - DNA, 948 bp, Acinetobacter baumannii
atggctattattgattttaaagaaattcctccagcacatggaaatggggatgaaggtcttagagattcttttgaattatttgcagaagaattttttaaaagtcttggttttacaattattgagggcccatcaagaggtgctgataatggaaaagacttgattgttgaagaaaatattcaaggtatattcgaccaaagtgcaactagcgtacgatggttggtaagctgtaaacataaagctcattctggcaactctgtagcaccagcagatgaacttaatttaatagaaaagttaacagctcatagatgtaatggttttattggtttttattctacacttgcatcaactggtttagatacactgattactggtattagaaatttaaattatagaactagagttttgaatgcagaaaatatagagagtattttattagagagtaaatcaggtattagtcttattgaacgtttttttcctgaatcgtttaataggtggagggctgaaaatccggtcaaagctaaaatttttagcgatgatgagtttccattaaaatgcatggtatgtggcaacaatttagtaattaataataaaatgcacgggaatttatacaccattaagaaagtaaatgatttaaattcaattgttgcttttaaatggagttgctcgggagaatgtgacaaagctattaatccccccgaaaattttaaactgcatggtctgatagaatattttgaccatattgaaaataaagctacaccaacaaccttcctactttttgttttagatataattcgagacatgcaaaatggaatgggtatgttaagcgaagaagcttttaaggatttacagtattttttatgtgctatttacccttatgtgacccgtaacatgactacaagagaaagtgaaatccttggtatggacctgatgtgtcgtaatataggataa

SEQ ID NO: 57275 - DNA, 204 bp, Acinetobacter baumannii; identical to SEQ ID NO: 57254

SEQ ID NO: 57276 - DNA, 270 bp, Acinetobacter baumannii
atgtcatcaaatcgtatcactgcagctgaagcaactaaactggcatcttcaattccagaaactagtccagattccattcttaatgatgcttatgacagtattaggctcaatactaaaaaaggtgagattgttcgtctttataatgtaaatactacatctttaaatattttatcttctgtagttaacacattaaaacaagatggatatcaagcagaagctgtgccacatactgaagggttttatagattagttgtaagatggaatgtttga

SEQ ID NO: 57277 - DNA, 339 bp, Acinetobacter baumannii
atgatcacagctaagtcaattttagacatggttgattattggcttaatcatcctgtcaatgggaagtatgggtctgattttggtgcacctctttacgatttgcttatggctccactcgatgcaagggtggcagatagctttctaatgaagatgaagaaggatctgcctttattatctgagcttaattctgatcaattagcgctttacacagaaactgaaggttttgagacaatccatatttatctaaacatcatgaatgtgcctattgatattaaccaagtagcagaacgactaagtaaaccagtaacaggtgagacatatgacattaacgcaagctaa

SEQ ID NO: 57278 - DNA, 708 bp, Acinetobacter baumannii
gtgattgtcattggcaaagatatgaaagagttagtacatcaaaaaacgcatcaaagtaacaatattactgtagtgcagaattggattgactcatctgatattggtacagagcctaaaactaataaccgaattttacaagaattgaactggttggatagtgaaactacgatttttcaattcttcggtaatattggtcgtgtacaaggcgtagaaaatattctgcatgctattcagaaaatgaaatatgcacatttggcaaaattcatttttattggtgatggtgcatatgttgctcgtcttaaagagcaaatacagtctttgggatctcaaaatattctttattatggatctttagatcagaaagaaaaaacaactggtttaaatgcgtgtgatgttgcattgattactttggctgatgggatgttaggtttaggggttcctagtaaatcttatttttctatggcggcagataagcctttgctagcaattatggatagggagtcagaagtagcagatatgattaatactcatcatatcggttgggtagtcccacctaataatgaagaggctttggcaaaacaacttgatgaaattgtgttagcaaaatactgctatgcattcaattcatcaagagaagtattaaatgaattttattcagaaaaagtagcaatgagtaaaattctaaatattattagaaaatttacttaa

SEQ ID NO: 57279 - DNA, 204 bp, Acinetobacter baumannii; identical to SEQ ID NO: 57254

SEQ ID NO: 57280 - DNA, 627 bp, Acinetobacter baumannii
atggctgcagcaacacaaaacactgacgaaactttagcttcaactgacgaacaagcgactactaaaccaaaaaacacacgtaataaaaccaataaaactacagaaacacagaatacccaagctggtgatgaaaaagcttcagaccaaggtgatttgttaaatagccaaggtcctgaagacggcgcatctcaagatgaaggtaataaacctactgatttgaaaaatggcgattcagataatgaagagtccaatactcaagaaaatggaaatccaactgaaacatcgaatgattctgtcaaaccttcaaatgatctagattctaatggtggtaagtctggtgatgatgtggggaatgaatcggatcatgtccttaaagaaactgatacttctaaagttaatactcccattacggatttgttaacagtatcaggtgggagtagcgtggatccgctagttattaaaattactaataacggattttcaacagttttagaaccgttatcacgtgttgctattgaggcaggtaaaacagcaagtattacgtgtcataaccaaacatttaaacatcaagtactggaaaacttacgtcagttgaaggggcttggtaagaatctaactgttgagtaa

SEQ ID NO: 57281 - DNA, 435 bp, Acinetobacter baumannii
atggacgataaagagtatttttggctaactcggaaaaaagaacctaaaaccaagcctaaatccagaccactgcctaaggcgaagcaaaaatatctcgaggctgaggcaacacttaaggaagaacttgaggatttggcgattggatttgaacagaagtttcagccaatccataccaaacactggcgctttgactttcatattgtgaaattgcgtttgctcattgaaattgagggtggtccctggtctggtgggcgtggtggaaagctgtcaaataaagcatggagtcttgatcgatatgatcttgctgaagagatgggatacaaaatagagcgctttcatccagattctattttgtcgggatatgtcatcaactggataaaaagtgaattagcgagaattgaagatggagcaaataagaccatttccaccgactga

SEQ ID NO: 57282 - DNA, 192 bp, Acinetobacter baumannii; identical to SEQ ID NO: 55638

SEQ ID NO: 57283 - DNA, 552 bp, Acinetobacter baumannii
atgtttccgcgctgtcttttgagtcttaacatatttgatgagtttgggtttcggcctgggaccgacaaagacggttattatcaaggtaacccagaatatgcacattatcctttatttgaagatgtccttgatgattttgaagtaacggaggaagagcgccagagttatcaaccaactgaaattgcacatcaggtgagagagtttctagaaaattcctataaagactataaagccgtttctgctttattagctgtagctgaagaagaagttattttgtacagtccacctttacgaaaagcaaccagtgctgtaggtatagcggtcgagggtggtggctattaccatgtgcatggagtatctgaagatgaaactgctgaggcagcagatgacgatcatgaagaagatctatggtttattttaatgcaagcttgtacagaagaagactacacttatttagaaaacctatgcctcgaatactgtgatttatgggaaaagttttgggatgttcaaatggaaaactcgaaatcaatcttgaaacaaaatttagcttaa

SEQ ID NO: 57284 - DNA, 480 bp, Acinetobacter baumannii
gtgttgacgacgaacattggtgcagaaagtatttctcgtgcaagcattggatttacagagcaagaccatagttcggacaaccaagaagccatgaaacgtgcattctcacctgaattccgtaaccgtctagatggtgttattcaattcaaagctttaccaaccacagtgattgaatctgtagttgataagttcttgacagaattgcaagcgcagctagatgaaaaacgcgtagttttagatgtcgatcaaagtgcacgcgactggttggcgacaaatggttatgatcgcttaatgggtgctcgcccaatgcaacgtctcattcaagaacacttgaagaaaccattagctgaaatgattctgtttggtgaacttgcagatcatggcggtaatgtggcggtatcagtgaagaaagaagatggtaaagcagtgggtctaaaacttgaagtgtttgaagatcaccatacggcagaaccagcttaa

SEQ ID NO: 57285 - DNA, 372 bp, Acinetobacter baumannii
atgaatatatatatgattttgaatgactatgataaagcgcatgctttaaatgataagcagcttgcacagaaaccaaatgacacagcacgacttacatttagatgtcagttactttcactacaagggaaagaagccacttcgattaataggtgctatgactatgtggcagaggttctaaaagtagagctgaacaaaccagaaaataagaaggacccaaattataagcaagctgaattttcatacttacttgtaaagtataaagctgggcaccttgaatacaaagagaaaatgaggaaattcattgatagtacaaatgatgaagctctaaaagcctctttacaaactgtctacgatgcagaaataaataattaa

SEQ ID NO: 57286 - DNA, 201 bp, Acinetobacter baumannii; identical to SEQ ID NO: 48494

SEQ ID NO: 57287 - DNA, 273 bp, Acinetobacter baumannii
gtgaaaattaaagatcagttaatccacgttccataccgttttgatgactttgctcgttataaaatcttaagcaaagacgaaatgaaacggatgggaattaaatcaccggatatcggtgatgcttttgctttcttattcttggaaaacgttcactacactgaagcttacgaaactgtaaatgtcactgacgatacaccggaaggccgtgaacaagctgaacgtaagtcaagattcagtgctttaagagaagcagctgaaaaagaaaatgattag

SEQ ID NO: 57288 - DNA, 474 bp, Acinetobacter baumannii
ttgttaaatagccaaggtcctgaagacggcgcatctcaagatgaaggtaataaacctactgatttgaaaaatggcgattcagataatgaagagtccaatactcaagaaaatggaaatccaactgaaacatcgaatgattctgtcaaaccttcaaatgatctagattctaatggtggtaagtctggtgatgatgtggggaatgaatcggatcatgtccttaaagaaactgatacttctaaagttaatactcccattacggatttgttaacagtatcaggtgggagtagcgtggatccgctagttattaaaattactaataacggattttcaacagttttagaaccgttatcacgtgttgctattgaggcaggtaaaacagcaagtattacgtgtcataaccaaacatttaaacatcaagtactggaaaacttacgtcagttgaaggggcttggtaagaatctaactgttgagtaa

SEQ ID NO: 57289 - DNA, 363 bp, Acinetobacter baumannii
atgaaaagtcatgatcctttgctcgataagcaatatgatgaagaacactacaactgtgttcactttgttcatgaagctgcaatggacctatacggcatagatcgggcggaagcgcttgaactctttatgcagcctaagggcaaaattacttttttatcttcacggttaaaacttttaaatccgctgcccatgcctaaggaaggctgcatagtcgccttccatcctagacaaagaaataagcccccgcatgtggggctttttcgtgggcaaaagattcttcacctcatggaaagcggagtcacttatttgcctgaagaggtcgtgatggggatggggtttaatcgggtcagttattatgattaa

SEQ ID NO: 57290 - DNA, 249 bp, Acinetobacter baumannii
atgccggatgagtttgaacgggtaatcgaaggccaatatcccgatgtaaagccaaccgtaaattaccggatttacagttcagacaatctgaattctccaatgttttatttactcggactacaactctcaagtgtcgccatgaaccataaagctgtgacattcaaggctgaatcaccacgattaaataccactaaaactggggacatttttgcactggatcgctttagtggtttgaagggggctatatga

SEQ ID NO: 57291 - DNA, 354 bp, Acinetobacter baumannii
atggaagatcttaataatttgatgattgaactcagacaagaaataaaggggacaaaattaaagcttttatataattatattgattttgccgaaatactcattaaacctttgcaagagtcaaaaattaaattggatttaagtcttatttctaaaagtaaaaatactcaggagtttgtactttggcttgctggttttattgagcgaattaccacaggtggacaagaaaaattacctccaattcgagctaaaattactttacccgcctatgcctatgaagaaacttacccttcgcagaaaaagcctgtaaataatggggaagaaataattgaatattttaagaaaaatcaaagttaa

SEQ ID NO: 57292 - DNA, 279 bp, Acinetobacter baumannii; identical to SEQ ID NO: 53681

SEQ ID NO: 57293 - DNA, 531 bp, Acinetobacter baumannii
gtgggtggtgaagataatgatgatttaaaagaagtaacctacgaaggttacggtgtaggtggtgttgctgttcttgttgagacaatgacagacaacctgaaccgtacagttccagacgttcgccattgtttcagcaaaactaatggtaacttaggtaccgcaggttctgttgcttacttatttaccaaacgtggtgagattacttttgacgatgtttctttagaagataagatcatggacgttgctttagaagctggtgcagaagatattgaagtttcagaagatgaaattttagtaatcacttctccagagacttttggtgaggttcaagatgctctagcagctgctggtttaaaatcagacaatgctgaagtagtgatgagcccttctactaaagcagaaatcactgatattgatcaagctaaacaagtgatgaaactcattgatatgcttgaagatctagacgatgtacaaaacgtttatacaaacgttgagtttagtgatgaagttttagcgcaacttgatgcctaa

SEQ ID NO: 57294 - DNA, 321 bp, Acinetobacter baumannii
atgtttagggcacttaagttaaaagctatcgatcaactttgtgaaatacggttaattgttcagccaccacttaaaactcgttcttacagcgctaaaacttatccacgatttgatattgataactatccaaaactactaattgatagtgtcaaaggtgatggcttgttattcaaagacgacaatattttcataagtgaacaaatcaagctggcagaaccatgtgaaaagggttgtgtctggctttcctgtgtttttactgaagaaactgattggttgtcaaaaactgtagattttgattggttagctgggagaagcatttaa

SEQ ID NO: 57295 - DNA, 303 bp, Acinetobacter baumannii
atgagctatttaattttcaatgaaaaaggtaaaaagacaggcgacattgaaatagctgaacaatgtacttctgcaatattcaattaccaggtaatcgggaacggggcagaagtagagtttttcggaagcaatattccatatgcagatccgcaaaacgattctcactgggtgtctattcttacattaacagctgctgcgcctgatactgaaccgtttagacagcattgctgggataagctccgttataaagtgaaagcaggtgataatgtggagatttatgtttcaagtggtgtaagcggatag

SEQ ID NO: 57296 - DNA, 201 bp, Acinetobacter baumannii
atgactgacttaatcgataaggcacaagaaagtgctgattatttattgcagcaagaaattgcaaagcgatgccgttttgaaggcgaatctgaaaaagaatgtattgaatgtggtgaagagataccagagcgccgccgtgcacttggtggggttaaattctgcattgaatgtcaaaccaagatagaacgtaaacggcgctaa

SEQ ID NO: 57297 - DNA, 201 bp, Acinetobacter baumannii; identical to SEQ ID NO: 45735

SEQ ID NO: 57298 - DNA, 201 bp, Acinetobacter baumannii
atgactgacttaatcgataaggcacaagaaagttccgaatatttactacagcaagagattgctaatcgttgccgttttgaaggcgaatctgaaaaagaatgtgttgaatgtggtgaggaaataccagaacgccgccgtgcactcggtggcgtgaaattctgcattgaatgccaaaccaagatagaacgcaaacggcgctaa

SEQ ID NO: 57299 - DNA, 204 bp, Acinetobacter baumannii; identical to SEQ ID NO: 57254

SEQ ID NO: 57300 - DNA, 177 bp, Acinetobacter baumannii; identical to SEQ ID NO: 48448

SEQ ID NO: 57301 - DNA, 408 bp, Acinetobacter baumannii
atgagccatttccaagataagcatgtgattcatgttgatgaacaaaatcaagttatcaagttcacacgtagaaatgagattgtggagtgtgatcacgggcgtattcaaatatcaaaggaagataatgagatcctttgtatggactgcaaaacaaaacttaatccagttttatggattgccaaatatttagaccaattgaatcaagtcacccaacgtaataacagaatgctggcagaggtccgtgaaatacaggcaaagcttgaaaagaaaaataagtttatgtgcaaacactgccatgaagtaaacactattgattttaagaagcttccttcacaagcagctgtagtgcgcggtatggccgtaattgatcaagagtttgacggtatgaaagtggagcatagccgatga

SEQ ID NO: 57302 - DNA, 279 bp, Acinetobacter baumannii
atgagaaatgattatcgaaatgctattagagacttaattcaccggaatcttcaacaaaataatattcagaatctgattgtttgggaaatcaaagacgatgaatctcaagatccatcactgttgagtttgaaattatatggttcaagaaaccatattgatgcagtacttgtggcgtgtggtgtgaacggcgtttgggaaaagttacctcttcataaggtggcttttccaaggcttgttgatcttttaagacttcaaaaagaatacttgcaggataattaa

SEQ ID NO: 57303 - DNA, 348 bp, Acinetobacter baumannii
atgccagttaaaaccggatacactgctggttacggtcaaattgtccgtattggtactcttgcagatggtactaacgtttaccacgcaccgtcagcacaagagcttgtagctgaagcagatacagcgtttgatatgcttttagtgggtcgtggtaatgagccaattcgtgcgccgttcgttggctttattcaaactcctctttcagttattgaaactcgaccagacgcgcgtgaatcagtacttactttaatcggtgctcaagcagccgaaatgaacccgttagaacgttatgctgatcaaagctatgtcattcactgtatcaatatgccatccctcaaaaattcgtaa

SEQ ID NO: 57304 - DNA, 339 bp, Acinetobacter baumannii
gtgccatttcagcaatggaatgatcatgttgttaattcaacattcactgtttttgaaaatgaactttttccatcaccagtcccaagcgaagcaatcaatctttctatctcaactgtagatattcagctcgtgggttatacacctaacgtcatcggtttcggtggtccattcgaccaaaacacaggtaatggctatgaacctgacggctcagcaacggaacagcccgcaatcaacgacaaagttgtagtgcaagctgatcagtacacatcactcgatcaccagcgtgtgaagggtgatagagaaacaggtgaaattacagttgagcgtatagatgactga

SEQ ID NO: 57305 - DNA, 204 bp, Acinetobacter baumannii; identical to SEQ ID NO: 57254

SEQ ID NO: 57306 - DNA, 183 bp, Acinetobacter baumannii
atgcaccatgaaattcaattcgtgcatcatcgtctaattcaattactggatgtaactgtcccagagcaccaatcaatttcatatcagtgtattgataatgacgctgttgttctaattgctcaccatatcgaatcagaacttcagtttcagattgagctgaaatctgagcatggtatggtttag

SEQ ID NO: 57307 - DNA, 642 bp, Acinetobacter baumannii
gtgggcggctcattaccgatgctcaccaagaacccgattagcatggctgcaaacgcagtgactcaatatcaaaccattatgggtaatgcagttgatccgcaacaagcggcagtgttatcgattggctcaatccaagctggaaactcgaataacgtgattccttctactgcattggtcaaaatgaatttgcgctggtttgatcctaaagtgcgtgaaaccatgctaaataatattaagtctatgagtgaaggtgcggcgcaaatgcaggggatgggtaaagatcaattacctacctttacgtttaaaggttcgagcacacctgtagttaacaataaagaattttcggcacgtttaaatgggcctttaaaagcactattgggagataaacatgttctaactgagtatcccgcggttatgggatcagaagatgttcatcatttattgggcgaacaaaaagacattccttttaactttatgtttattggtgtggcagacccagttgtgtttgcaaatgcagtcaagcaaggcaaacctgtgccttatattccacatagtccaaactacattgttgacttaaaagctttaccagtgggagccaaagtcactacagtttcgatgctagaactacttactaaaaaataa

SEQ ID NO: 57308 - DNA, 348 bp, Acinetobacter baumannii; identical to SEQ ID NO: 57134

SEQ ID NO: 57309 - DNA, 159 bp, Acinetobacter baumannii
atgattgaagcagacggttggtatcaagttagggttacaggaagtcatcatcacttcaaacaccctactaagaagggactggttacagttccacatcctaaaaaggatttaccaagcggaactgttaaaagcattttgaaacaagcaggtcttaattga

SEQ ID NO: 57310 - DNA, 621 bp, Acinetobacter baumannii
atgacaaaaattgcagaaaaatcgaaacaagaatatggcgacttattaaaagaaaaagaccatttacaagatatggaacagcttgagatgactattgtctcgattcagacgccgtatccttctattgtaagaattcaaggaaaaatcaacacattacaaccagagctttggcaagcccccaatttggcaattcggttaattgtgagcaatccgccagagggacaacccatttcacgcgtctatacggttcgttcatttaaccctataaatgctcaaatcgaaattgattttgttaaacatgaagatttaagcccagcaatggaatggcttaattcggctcaagtgggtacaaaaatcgggcttattggccctcgccctcattttattcccaacttcacagccaaaaagcatgtggtcatgtttgccgacgatacggctgtacccgcgttatattcaatactcaagcaatgggaactcggcataagtgcggatattttcattgaaagttttgaaaaagatattgctagccaattacccgaacttgagcatgtcaaaattcattcgttccataaagaacatcactcatttttgaaggtcgtagcattagttatgctgaggtag

SEQ ID NO: 57311 - DNA, 546 bp, Acinetobacter baumannii
atgagtaaatatgtccctaattcatttcaggtggcaaatgcgtttgttgatgaggcaatgagtaaaatctcagatgcatcagtgaagatctatttaattattaaccgtaaaacacgtggctgggcaaaagagtgtgatgcgctttctattactcaattagaggagttgtcaggaaaaagtcatcctacagttgttagatgtacaaaagagcttgtcaaagttggtttagtaagaaagcatgcccaatctgtatacgggaatgtttactcattaattgataattattttgttggtgagtacattaatttcccaaataaaagctcagttcttgttcaatcttttggtttatttaatggccagctagttaaaaattttaactaccagaaacctgcacccaaaaaattaactaagggcaaaaagagtaaaaatctctgtttaaatttccctcaaaaatcgcgcttgctagttaaaaattttaactactttgaaaaccctagccagttaaaaaatttaactacactagtaaaaattttttaccgctactag

SEQ ID NO: 57312 - DNA, 330 bp, Acinetobacter baumannii
atgaaaacttataattttatctttacgtatgccatgtcacagagtggctaccctagtgacaagaaatgtgaatcaataaaaaaattagaaaataagattggcaataggcaaatagaaaaatggaccaagctagataaagtagaaaatacttttataggtgagttagtacttcactcatgtagtatttctgaaaaaagcgaagaagctaagcggattgtaagaactgtattcgaagagatgatgtttgaaatagaagtatatagtgatgttacttttactatagccatgttggttgatgggttaggtgaatatttggaatttaatgcttag

SEQ ID NO: 57313 - DNA, 516 bp, Acinetobacter baumannii; identical to SEQ ID NO: 57167

SEQ ID NO: 57314 - DNA, 357 bp, Acinetobacter baumannii
atgtggacagtcattacaacggatctgtttaatgaatggcttgaacagcaagatgaagcaacacaagagaaagtcttagctgcattggttgttctacaacagcaagggcctagtttaggtcgtcctttagtagataccgtctacgattctaaatttaccaatatgaaggaactacgtgttcagcatcgtggtaaaccgttaagggcattttttgcattcgatcccctaagacaagcgattgtgctgtgtattggtgataagagtaataaaaagcgtttttatacagagatgctagcaattgcagatgagcaatacgcacttcatctctcaactttaggagatcaatctaatggctaa

SEQ ID NO: 57315 - DNA, 906 bp, Acinetobacter baumannii
atgaagcttagattgtttgtcattaccttaatattagtcacatctgcatgcagtcagcagaaagaagaacacacttatggagctttgactaaagattataaagatgtgtctgaatataagtctaaacatgaactagaagaggctgcaaaagcaaatgacgttgaggctatttttgtattagcatctatgtatgccacaggcgaaggtgaaaaacttgatcaaaagaaagcactggaactatttgagaaatctgcacaactaggctcctcaaatgccatgttgcaattaggattaatttatcggaatggtaatgatttaataaaaaaagatgatttaaaagctttaaagtggtttgaacagggggctaagaaaggtaatccttcagctatacataatttaggcgtttcatattataaaggattgggtataacagaagataaagcgaaagcttttaagtattttagtcaatctgcagaattaggcttattacaatcacaggtaatagttgcgggtcttttatacaacggtgaaggtgtaactaaagatcacaaaaaggcttttgagtgggcattaaaggcagccaatcagggggatgttgagtcacaaaacaatatcggtttagcttatgaaaatggagatggggttgcaaaaggccctgtgcttgcaaaaaaatggtttgaaaaagcagctaataatggttctgtattagggcaatataatcttgcacttaagtattttgatggtaatggtgtagagcagaatttttcaaaatcaattgagtatgcagaaaaagcagctaatgcgcagaataaagctactatacaattgttggttgatatctattcaaatgatagaagccctaaatataatcctgagaaagctaattattggaaatctaagctttaa

SEQ ID NO: 57316 - DNA, 2442 bp, Acinetobacter baumannii
atgtataaatattttagttctttaacacaagaaagtattcaaaaaaataaagaagctacattgagtatattgggtatttcgtatccagaactacgtgatgttctaggacagcagatgtctcaagctgcgggcaaagatcaatcatttttatcttcaccggtgattgaacaaatgttcgcatgggaaaaaggtcaacccacattagatgctttgggtggtgaattacttcataagaaattaatcgatgctttagatcactcagaaaatggcgcatatcgttttaatcgtaattatcagccttatgtacatcaattacaaagctggaatgctttattaaaagacaagaaatctataatggttacttcaggaacgggttcaggtaaaactgaatgttttatggtacctattctaaatgatttatacgaagagtttattcaagcagggcaatccttaacaggtgtgcatgccttatttttatatccactcaatgcactgattaactcgcaacaagagcgattagatacttggactcgccatttttcacaatctaatgccattcggtattgtttgtataatggcaatacaccagagcataaatcacaggaaacaggaaaacaaaaacttcatcccaaccaagtgctcacacgtgaagaactgagattaaatccatctcctattttagtgactaatggcaccatgttggaatatatgatggtgcgccaaattgatgcacctattttgcaaaaatctcaaggaaaattgcgttggattgtattagatgaagcacatagttatatgggctcacaagctgcagaacttgcgatgcagttacgtcgggttctgcatgcttttggtgtggaagcaaaagacgttcgttttgtagcgacctctgcaaccattgcaggtgcagatgcagaagaaaagcttaaacaatttttatctgaaatctcaggtcaaagcacagagaatattttggtcattggtggtcagcgcgaagtccctgtattacctgtagttgaaaatcatcagcaatcttttgatgagttagtagcaattgatgctcaacacgaaatatcttatgagcgttatcaacaattagcagggcatccaattgcatgtgttttaagagaaagtatttgctcgcaacgtgctttaaccttagatgatttattaaaaattacccgagaaaagggtttccaactttctcaacatgaaattttggaatggttagatctattaacctatacaagaccatctgatgaagaacaagcttttcttaagattcgtgttaattattatcagcgtgtgactcatggtctatggagttgtacaaatgacaagtgtgataaaaaagacgatggtttaaaaaattggagctttggtcagatatatgcgacacatcaagaaaaatgtgattgtggggctcctgtattagaattaacgttctgtcacagctgtaaggaaccacatttaatcggttcattaggcaaggaagatgtgctgaaacagtggaccgttgaaattgaagatgaatttgcattacttcttgataatgaaacggaagaacaagaagaggttgaatataaaaatactatcaagaatcgtttagtagtattttctgtcaatgagaataaagaaaaaaactaccgccgagaccaactgaatttagaaaatttaaaactcggagaaatttctaaaaataccctgaacgtacattattttgaacctcataacagcagtgatccaattttatgtagtcatcctgaatgtggtgcaaagggttcgaagtttgatttgccatttaatcgtgcaattttaggtgcgccttactatattacacaaactgttccacagcttttacaatattgtccggatattgaacaaaaagaaattaatgaggcaagcaaaaattataatgacccagaatttattgaaggtgagtttaaagatttaaaggattgtgcaccggaggatatgccagctaagggtaagcgtttaatcacctttactgatagtcgtcaagggactgcgcgtttatccgtaaaaatgcaacaagaggcggaacgatcacgcttacgtggtgctgtgcttaaagcaataatacaacatacaaaagctcaagccaaaaccatagatccgatggaagtgctattacgtcagagattaaatgaagcagagcaagaaggtaatattgctagaataaagttctttcaagaagaattaaataatttaagtgctaataatacgccaatgacacttcctgaaatgaattgggaagagttatgtcgagaattagcgaaagatttcgattttagaacaggtattttgctcgccaatcgccatattgcaggtggaatttttgacgatgctggatcgcttaaacttgcacaaatgttactaacacgagagttttcacgtcgtcctaaaatgcaaatagtttag

SEQ ID NO: 57317 - DNA, 603 bp, Acinetobacter baumannii
ttgaccaataaaaatgatggtcaagatgcgtcacaagattctgaaaataaacaaaaaaatgatagacaaaattctgtcaaaaaaacgtcaaatattgctgaaattgatggtcaaaactcaaataataatggtaagaacaacggcggcaactcaacaatcaatgagaattatcttaagtcagcattagtagtcaaaaataaccgtgttagagctcataaacttggagaacttattacagatacaattgacagtgttattcatattcgagatgaagtactgaatcttaataatccaacagaagaacaattagcattagttaaattcaagatgggacttatttgtcaggttgtagatttaaacgtgaagcaaagtataagcatttctaacattgctaggacagaagcaatgttctggggcttagatgtggatgatctgaaagaccagtcagaagttcaagcacggcgtagttctgttattgctggggccgaagatagaatggcaattgcaaaagcaaatatgaagaagaagaaagaagaagcatttatgcggaaactcgcacttgttgaggctggtgaaattgagtatgaagatgtacaagaataa

SEQ ID NO: 57318 - DNA, 426 bp, Acinetobacter baumannii
ttgagtccttatttttttggtattagcccttggtttttatatgcttttttggtggttcttgctattgctggcttatttgtaattcgtgtaaataaacttaataacatcaaaggtagtgcaattggtttaattttgattggagtagctattttaggaggtatctcatattcaaactatatgagtaaacctatttccgaacgaaaagctgagcagcttgacttagccattaaccaatcttatggcaatccgagtgcagatgaatttagagcagcattgtctgagttaggtgaaaaaaagggtaatactactggtggctctgctttcgctttagaaggaagtaagatttacttagactacgtaactagaaaagatttcaatcaacttgtgaagttatatgaagaaagtaaaaaaaatgacctaaattaa

SEQ ID NO: 57319 - DNA, 501 bp, Acinetobacter baumannii
atgacacctgatgaaaaaaagttatatgcactgatggcagttgcagaacaacagcagaacttagtcaatcaggctgttaaagagcttcaaatcacggaagaacgcattcaaaaggtcatagcagggcaaacccacagtaccgtatcaaaatcgctaaatacgggcttacaggagggtacagcagagcttatcaagaccgccaaagcacttggaaatttaaaaaactcgattgaatcaaccagtgatcaattttcatggaaaatcatcaccatcattttaggcattttcgccattctgatgcttggcatcatttggctgtttagtgtttatatcaaacctttagaaaatatccctcagatcgagagcttaagacagcaaggtatccagtttgatattggaagctgtactgttggaaaggaatctaaaccgtgtgttcgtgtgatgaaaaagcagtgcggatatggaaaaaatggcgatttttgcgtcatagaccctaaatga

SEQ ID NO: 57320 - DNA, 930 bp, Acinetobacter baumannii
atggcgattgctcgtttaagtgtcaaagttggtaaagcaggcaaagcagcaccgcatgccgaatatattgatcgggatgaagaaaagaagctgaaacaggagcaggcagaaaccgaccttgaacatagtgcctatggaaatatgccgaaatgggctgaacataatccgattaccttttggcaggcagccgacctttacgagcgtaaaaacggcagtacctaccgagagtatgaaatagctttgcctagagagatgaatgccgagcaacgcttagaactggttgaggacttcattcagtctgaaattggctcaaaatatccgtatcagtttgcgattcataaccctaaagcaatggacggcaatgatcagcctcatgttcacctcatgtttaatgaacgtctgcaagatggaatcgagcgagatccagagcaatatttcaaacgctataacagcaaaaatcctgaacgtggcggagctaaaaaagacaatacaggcaagagttaccaggaacgaaaaactgatattaaagacctacgccaaagatgggcagatttatgcaacagccatttagaaaaacaccaaattgatagccgtattgatatgcgaagctacaaagagcaaggcatagagaaagaacccgaaaaaaaactattaccaagccaagctaaagaccctgaaatcagggaagccttgcaacagtcacgtacagcctataaagagcttgagcgactagacttaggcgaccctaaaaacgacctgaaagacctcaaaaacagccctatctcagacaaagaaattaaacagggcattgagagctttaaggctgattttgatagctttaaacagcttgccttacagcagtacaaagaacagcagaaattagaacgagagcaacagaaaacaatgaagtttagagggatgagccgatga

SEQ ID NO: 57321 - DNA, 156 bp, Acinetobacter baumannii
atgcaactaaaacaggtattgggaaagatcaaagatattgtttttggcgtgatcgtagcaccgctacttatcatcattatgatgtgggcttcaatactcgatcaaagagcgtttaagagagaactggatagaaaaaagggacaggataaaacctaa

SEQ ID NO: 57322 - DNA, 417 bp, Acinetobacter baumannii
atgaataatgattggctgtctgaaaaaatcacctatatttctgctttaaagaatcctagtgatgctcaaaaacttttattggaattagccaaaatccaataccgtacacccgaccaagaaaaaaaacttaatgcccttattaaagctgaaaaagccattgatcgagcgaataagcaaaaagtagcagttagaaaattattgaatgcagaaaaggaagctgaaagaaaagctcgtacacggcacctcatccaattaggcgcactttttgaaattgctaacctagatcagcgtgacccagccgaattacttggagttcttcttaaaactgccgaaattgatccaaatgatatgaaatggcaaatttggaaagagctaggtcaagaagttttaaatcaacgcaaaaaagataaaatttaa

SEQ ID NO: 57323 - DNA, 516 bp, Acinetobacter baumannii; identical to SEQ ID NO: 44116

SEQ ID NO: 57324 - DNA, 495 bp, Acinetobacter baumannii
atgagcgaaattgcaccgtccattatccagataaaaccgtacatcacacaaagtattgttttatctgaagctttatcatttaagcaagttgtaccgtcaactcacatgcttatcccctacgcacttgaaaagatttccgctggtttccctagccctgcacaagattacatagacaaagtactcgatatgaatgagcacttaattaagaacgaaacttcaacgtttattgtaaaagttgcttcgctttcgatgcttaacgcaggcattgatattgatgacgagttgattgtagatcgaagtcttgatgccaaacacggcgatatcgttgtggctctagtcgataatgaatttactgtaaagcgactaatgattgatgaaagcggccaatggcttaaagctgagaatcctgaatataaaaatatctatctacaagaaggccaagaactaattatctggggcgttgtcactcatatcattaaaatgacacggcattaa

SEQ ID NO: 57325 - DNA, 348 bp, Acinetobacter baumannii; identical to SEQ ID NO: 57227

SEQ ID NO: 57326 - DNA, 906 bp, Acinetobacter baumannii
atggctagcaaaaatagaaagacaaaagttctatcttacaacttacattaccgatgccgtaaatataccggtgttgatcgaagtaatgtcgatgttgatgcaatggtcaacttgatcaacagtgaccatgtacaagaaatggttgctactaattcattacaaggattttacggtcatcaaattcgacagcgctatggtatggtgccgcctgaaacggtgatcataaaaggtaaagttgtatatctttcacgggcgtttaaaacaattgaattacgtgcttcaaaggatggaacagttgaacaccgagaagagttttatgataacgaacctggtgagatagcattacaagattataaagcccaagcgggtggttttagcacttcagtcaattacaagaatgtcggtggccgtttaataccaacaggtttttttggttttgatttcgttgcgcaaccaaattatgcaagtaatgttggtgatggtcagttatttgatggtttatttgttcctgaagagccagaaggtgttgtttcttgctttgatagcgcaacagatatttcacagttatcacaacctgaaattattattgcccaattacttgaagatcaaatcttacagacctacgacaatatcaatagccaacttcaacttttaaatgagttaggaaatgctcaaggcttagtaggtgaactctcagaaaaagttgataaacagaaacgcctgcaacaacttagagaagaacgcaaaaaagaactctatacgggtttggtaaatccggtgaagagctttgattcagttcaacaacatgctgaacaaattctgcaatccatggatcagccaagtgtaaaagaaaaagctaaaaagccgaaaaagtcttttggcagtatctttagtgtatgggggtaa

SEQ ID NO: 57327 - DNA, 2607 bp, Acinetobacter baumannii
atgaatattgcggcgcagcctccagttcaggcagatcaaacagtttatttaaaagattatcaaaaacctgcgttcttggttgaatcaattaatcttgatattcaagtctatgacgataaaacaattgttgattcaacattggtcatgaagcgtcaaacttctggagacttggtgctactgggccgtgatcttgagttgcaatctattcagctcaatggccaagatcttactcctgcacaatattcactcgatagtgaacaactggtggtcactgatgcaccagatgaagtcattttacaaactcaagtgattattcacccggaaaccaacactcagctggaaggtttatataaagctggcgacttatttgtaacgcaaaatgagcctgaaggtttccgtaaaattacgttctatccagaccgcccagacgtactttcagtttttactacacgtgtagaagcagacaaaaaatatccggttttacttgcgaatggtaacttgcttgaaacaggtgaagttggtgaaaaccgtcactttgcgatctggcaagacccgactaaaaagccaagctacttgtttgcttgtgtgattggtgatttagctgtattgaaagaccgctatacgacttcggaaggacgtgatgtcgctttagaaatctatgccattgagaaagatattccaaaatgccatatcgcaatggaagcattaaagcattctatgcactgggatgaagagcactatggccgtgcctatgatctcgacaactatatgattgtggcggtgagccagttcaacatgggtgccatggaaaataaaggtttaaatatctttaacacctcatgcgtacttgccgatgaagaatacacaactgacgcagcgattatgcgtgtacagtctgtgattgcccatgaatatttccataactggacaggaaaccgtattacttgtcgtgactggttccagttgtgcttaaaagagggtctaactgtattccgtgatcagtctttctcggaagatttacaatctgctgcggttcaacgtattgatgatgtcgctgttcttaaatcacatcaattcccagaagatgcaggtcctttgtcgcaccctccacgcccagaccactttgtcgaaattaataacttctatacagcgactgtttatgaaaaaggtgcggaaattaaccgcatgatgtcgacattacttggtaaagaaaaattccgtcagggaacggatgaatatttccgtcgtcatgatggacaagccgtaactgttgaagactgggttgctgcactctctgcaggttcaggtgttgatttatctgcattcttaacttggtataaccaaccaggtacaccaaagcttgaagcgaaaggtgaatatgatgcagcagcgcaaacttatcgtctaagctttaaacaaagcctaaaagcacatcctaaatatccaaacttaaaagctgtcccaattcctgtagcgttggcattatttaatgcgaaaacaggtgaacaatatacgctccaaagcgaaagcctatttgtaaatggtgttaaagatggcgtgtatttgtttgaccaagatgaggcaactattgagtttacaggggtaactgagcaacctgttgtttcactactacgtaatttctctgcacctgtaaatctggtatttgattacagtgatgaagaattagcattcttaattcaacatgaaacaaatggttttaaccaatggcaagcaacacaaaccttgcttgaacgtattttgttagaagatcactctgcggatacctatattcaagctattcaaagcacattgcctgaattagttggtcgtgatccacttttagcatcgcgtttgtttgatgtaccaactgaaggttatttaggtagccgtattgatcaaaactatgcaccagccgatattcatgtaaaacgtgaagccttactcaatcgtttggctcaagagttggggtcgttctggaaagatacgtaccttacactggaccctgacttgcaaaaagaattttctttagcgatgggtgtacgtgcattaaagaacattatgctcatgatgatggcgcgtcagggtgaccaaagtgcatttgaattagcttataagcaatatcaaagcacggggaatatgtctgaacgtttaggtgcgctgcgtgtactagtgtggcaaagtgcgcctcaagcacaagaagccctagctgatttctataaccgctttaaagacgaagcattgtctttggaccaatggtttatgattcaggcggcaaacccaaatgctacagttgagacaattgaatatctaactcagcatcctgattatgacttaaccacaccaaaccgtattcgcgccgtgagtggtggtttgtcaaataaccctgaaaatacgtggggctttggtgtagctcactttattaatcttgcagaatatctggacgagaaaaacccgattttaggttcacgcttattacaggtgttatctcgctggtacacgcttgccgaacctcagcgcactcaagtgcaacaggctttacaagcgttgcagcctaaagtgaaatctaaaaacgtttctgaaactttaaatagtatgctgagcatttaa

SEQ ID NO: 57328 - DNA, 672 bp, Acinetobacter baumannii; identical to SEQ ID NO: 57224

SEQ ID NO: 57329 - DNA, 2094 bp, Acinetobacter baumannii
atgacttcaatgtcgaacactacccaaaagcattttattgttgagcagtttcctttaccgacttgggtcagtgatgaaaaaggcttaattttatactgcaatacggagtgtacaaagtactggcgcgatacttctcctccattgtttcaacaatggctagatttcgtgtaccctgccgatttagaagaagttaaaaacaaatggttagatgcgatacgactccgatcaagaattgaatttaaatgccgtcttttgcataaaacccattattatcgatggtgtaaaatttctattcaattgtcgaaataccatgaatcttctcaagaaaatgaatggtttattagttttctagatattgaccaagatatacaagagcagcaaagcttacgaaaagatatcgatatacaaaatcaaatgctcgatatcagtgtcgattgtattaaggttttaaatacagatagcacagtatctcatatgaataaatcagggtgccttgcattaggtgtacctgtagatgaaaaaaaattcggtatgcggtggttagatcttttaccccctcatattcgtaaacgtggaagagttgctttaaaaaaagccatgcaaggtaaagtagcccgattcgccggcatgagttgtttaccaaatcaagagcctgagtattgggataatatgctcaccccaattcaacatacaaatggtgaaattattcagatattgtgtgtttcgcgaaatgtcactcaacagtatcttactgaaaaccgattaagagatattagcgagagagatgaactcacaggtttgtttaatagacgttcatttaagctacaactaaaacgcaccctagcttactcaagagaaacccaaaccagtgtagggctacttttaattgatctagatcatttcaagcatattaatgacactataggtcatagtgctggtgaccacttattaaaaatactttctaaacgttttaatcagtgcgtagaccctgaaagatgtttagttgccagattaggtggtgatgagtttgcagttattgttagccatttagaaaatgagaatgatgttcgtgaacttgctgaagtattgcttcaacaactcaatcaacccattacatatgctgggaatgtgctcaacggcggcatgagcatcggctgcgccatttaccctcaagatgcagttgatcaatcgagcttattaagttgtgccgatatggcattacatgacttaaaagcccgtggtcgtggcggcatacgtatgtataacccaagtatgatgcagttaaccgaggcaatcgcctctcaactcaacattgctcgccagcttattcgtcatcataccattcagccctactatcaacccaaagtcgatctaaaaactcatgctgtagtgggctttgaagcattactccgctggcatacgacttcggcccaaagaggtttgccttctcagattgctgaagcttttaaagactacgatttagccagtaaaattggtgaaatcatgcaacaacaagttttgcatgatattgctaaatggataacattaggttttgagccgcttcctgtttctctaaatgccgcaccggttgagttcttaagagataactatgctgaacgtttattaaaaaagattaatcaacttgaaattccaacctatttaattgaaatagaagttactgaacatatgctgggtgaccgtggttctgaatatgttattcgcgcactcaataaactaaaacagcatggagtacgcattgctttagatgacttcggaacaggtttctcttctttaacacatataagagactatccaattgattgcttaaaagttgattgtagctttatacaaaagatgcaacatgatccatccatttatgcaattgttcaggcaattggcttacttgctccaaatctctcactcggattaattgcagaaggtattgaaacaccagaacaagaagagttgcttcttcaatttggatacaacatagggcaaggttttttatttgaatcagctattgacgctaatcaggtgatctctattcttaaacagggtcaggcttatctagaaagtcactattctatgaattag

SEQ ID NO: 57330 - DNA, 339 bp, Acinetobacter baumannii; identical to SEQ ID NO: 57277

SEQ ID NO: 57331 - DNA, 357 bp, Acinetobacter baumannii
atgcaaattcaaatcggtatagatattgtcttaattttcgctttttctgcgtatctttatttcataacagggtggaatggcaaaaataaagcggcatcaataaaacaattacgccaaattccaattagccttttatttaaagatataagaaggatgtacttcatatgtatggcatgcgtattgatcacaatttttttagttgattggcgcatctatcacgttgcttactactttgatgcattaagcgtttcgctttggatctttcttatctattttactattttttctacttatcaaattggcactgcaattttactaaagcttttgactatttttagcaatagagcaacttcctaa

SEQ ID NO: 57332 - DNA, 714 bp, Acinetobacter baumannii
atgaagttatatcgcactgattggggaaaatttcctaaaacggttattgaccgtggacttggggatgcgtcttctcatcctaagtatgaagcagctaaggctggggatgttgaaagtgcttatgaattagctaaagatttagtttctgatgaagcaattgatgcactaaagaatataattgatggtcgggacacaatcattgtgccagttcatgctgaagaggcggtggggcgtaatatgatccctttagctacatcggctgttattgctaagaaactagggcttgaagttgatacaaatatagttcaagctataaaagtatcaagaactggaggtgacgggtggcatagactagctaatcctccagcatttgacggcggaatcgacaatgataaatgtgttattattgttgatgatacccagacacaaggtggtacttttgccgcattgaaaggccatattgaagccactgggtcaaataaagtaattggagcttatgcactgacgggtaaacaatactcatcacaattagctctaagtaaagaaactcttcagcaattgagggatgtatatggcaatctcgaagcatggtggaaatcgatttacgggtacgatttcgaaaagctcacagagtgggaagcaaagtatgtcctcaactctcgtaaaacagctgacgaagtccgagatagaatcattgcgtcaaaacaaacgtga

SEQ ID NO: 57333 - DNA, 702 bp, Acinetobacter baumannii
ttgttatgtccatttaatacaccaaaagatagctttcttggtttctttaagccacgactgcttgaaagctataacactttggccgactctttaattattaataaaggacatttatatagtgatgcttcttcagttggtctagctggctgtgaaaagtttgatcaaagaggaaaaaggcgtagtggttacgatgaactttgtgatttaggtgcaattgaatatattttaaatagtgaaatctcgccggttggtcaagatatccgttatggccaggttgcaaaatttagtattttaggttctttaagtgaatcagacttagttacacctgctacttgtaaacgtctatttggagaaaggtctgatggtaaggattggcagccaggatgtttgaaaattatacaaaataaagatactccaatttcaaaaggaactttaattcttgatcagagtggtaatgtcacttacacgccaaatggaaattggcatggtgccgatatttttagtattcaggttgtgacgagtgtaactcgttttaatgaaggggttgattttcaatatatttctattcctacgactatttcacaagcacctttatctggaattgaagataaatctgtaagtactggtgggggcggtagtataggaggaggatttttattaagtttattttccttaattgcattgcgccgtttaaagtcataa

SEQ ID NO: 57334 - DNA, 279 bp, Acinetobacter baumannii; identical to SEQ ID NO: 57270

SEQ ID NO: 57335 - DNA, 402 bp, Acinetobacter baumannii
atgtcatcagtcagcattgctgaataccgtaagttatttcctattaagaaaaataaaaagcggcgttcagcaaagcaagttgctagacaaccaagtgtgggtgaaatggtactggcaacgcatttaagagcgtgcaagattggttttgaacaggaatataagttccatccaaaacgcaaatggagagctgattttttaataacgggtacaaagattttgattgaggtggaaggtggtatctggagcggaggccgtcatacaagaggcaagggctatataggggatatggagaaatacaactctgcagcaatgatgggttttacagttttacggttcagcacagagcaagttaaatccggtatggcattaaagcaaattgaattattaattaagggtaaatag

SEQ ID NO: 57336 - DNA, 1614 bp, Acinetobacter baumannii
gtgggtaatacttcagtggctggcaatagttctgttgcgggaagcatggctgttggtacaactcttactgttgcaggtgtacctattgaccctaaggcaattgatggtgcattaaaagatgctcttgataagttagagggtttaaaggaggagttaaaagaacaaggcgaaaaaattgatgaaaataaagaccaagtaagccaagaaattgatgaaaaaataaaagaagtagaagagttaatagataatattaaagactctgatgccttcaaattgcttgaagaaggtattaatcacattgatgaagaagtgcaaaaaattcatgaccaagtaaaagaagtaggtcagatagcacaaagtaaagttgatgaaattcgggcttatattgatcaagaaattatcgatacaaaacagattgttgagcagcatgtaagtgatgcaaatattcgtttggatgaagcaaatcaacgtattgatcaatcaattcaagcgaatgaggcgttggttgctgatgctcaacaacgggctattcgagctgagaaagaacttgatgacaaaattggttttatcaaaagagaaactgattcaattattgatgatgttagaagtgatgcagatgaaattcgcatattagctgaaaacgcaaaaaaagttgcagatcaagaagttctagaccgaaataagcaagcagctgaaactcttattgtaatagaccgaacaaaagccgctttaaaacaagatattgatcaaaacttagttaaagcaggtcaaatgattgatgatgctaaattagcattaggtgaagaaactaatactctcattaatcaaaaaattgaacctattgtgagccaaactgaagctgcagttaaaaaagtagatcaagttgcagcccagtatgttgaccttaataagaaagtcgattcgggctttctagctgaagctgaagcacgtgcaaatgataaagaggcattaactcaaagctttgagcttaagtttgctgaaatgcaaactgaattgggaaaatcaaacgccttaatctcagaagaaattaaaactcttgcagcaaaagataaagctataactgaacaaattagtactgctcagtctcaaattggtgataacaaagctgcaattaataatgttgaacgtacagtagttgatcttggtaagtctgttgctgaaaagactgatcaaattcaagcaagtttagataccacaaatgcaagtttgttaaatgctaccgagttagcgcgaatgcaatcacttggtaagcctttacgtgacgatcctacatttctatctgggaatggaggattaagtgcctatgtggtaccagcaggctcaacactaactcgacaagccaaatctacggataaccccgtaaatagtacccatgagatgcttttaagatctacatcatctttaggtggtggctggtatccaactgttcctacacttgtagctgcgcctaataaaacctttttaataaaacaaattattaaaatgccaaaagggacttatttattaccagttggcaatgctacaggtacgggtgggtatttacgagtacttggaaataaagaaggtacagggactgttctaaattttgtgtaa

SEQ ID NO: 57337 - DNA, 459 bp, Acinetobacter baumannii; identical to SEQ ID NO: 45472

SEQ ID NO: 57338 - DNA, 1437 bp, Acinetobacter baumannii
atggaaactttagattcttcaatttttgacctcaccccaattccaatgtggattgaagactttagtgaagttaagcagttatttgacttatggagaaatcaaggggttgaaaacttatatgaatttctaagtcaaaatgaaaatctagtggttgaatgtgctcataaaattaaaattattaaggtcaaccaaaaagtattagacctttttgaagcaaaaaaccaagaagagttatgtgccaacttaaatcttatttttaaaaaagaaatgtttgaagctcatattcatgaactcgaagccttatggaatggcaaaactcatttctcgagtaccactataaattacacgctctctggtaaacgtattgatgtacaactacgtggagcaattttaccgggttctgaaactacgtttgaccgtattttaattaccaccgaagacattactccgtatcaaaatgcacttcgtcaggaagagaaaaatcgacgcctagcagaatcaatgtttatctactccccgacttcgctttgggttgaagattttagccgtattaaaaatagaattgatcagcttaggctattaggaattgaagactttaggacttttttagatgtacatcctgaatttgttcgccaatgcatagaagacattttaattttagacgtcaatcagtcgactctagatttatttaaagcaccagataaaactactctgttaaaaaatacccataaaatttttgccgaagagatggtggaaacttttagagaacagctgattgaactctggcaaggaaatattcaccacaagcgtgaagccgttaactatgcgttagatggccaaatcagaaatgtcttattgcaatttaccgtattccccggttatgaagagacttggggattggtacaggttgcgcttacagatattactgcacgaaagaaagccgaaaattatctagaatatttaggccagcatgatgtactgaccaaactttataaccgagctttttttacagaagagcttaatcgtttaaatcgcagtattatccgccctgtttcttcaatttttttagacatgaacggcttaaaggaaaccaatgatcaacttggccatgatattggtgatggtttattacgtcgagtaggtaatattttaaatcaggcaattatgaatactgcttatacagcttctcgaatcggtggcgacgaatttgtaattttaatgcctggtgcagatgaagcgaatgttttgatgatgctgcaaaccattcaggagctttttaatatagataatcaatattattcaagtcatcctattagtattgcgattgggcacgccacaacaaaagaaaatgaacaagttgaagatatgctaaaacgcgcagatcatcatatgtatcaaaagaaaaaaagttattatcaagaaattcttctaccataa

SEQ ID NO: 57339 - DNA, 765 bp, Acinetobacter baumannii; identical to SEQ ID NO: 57243

SEQ ID NO: 57340 - DNA, 1152 bp, Acinetobacter baumannii; identical to SEQ ID NO: 57131

SEQ ID NO: 57341 - DNA, 246 bp, Acinetobacter baumannii; identical to SEQ ID NO: 57264

SEQ ID NO: 57342 - DNA, 225 bp, Acinetobacter baumannii
gtgggtgaattatcagaaaaagttgataaacagaaacgcttgcaacaacttagagaagaacgaaaaaaagaactctatacgggtatggtaaatcctgtgaagagttttgattcagtacaacaacaagctgaacaaatcattcaaagtttggacaatccaaacgtaaaagagaaagctaaaaagccgaaaaagtcttttggcaatatctttagtgtatgggggtaa

SEQ ID NO: 57343 - DNA, 273 bp, Acinetobacter baumannii; identical to SEQ ID NO: 57287

SEQ ID NO: 57344 - DNA, 897 bp, Acinetobacter baumannii
atgctcaaacggagcattgcttttgcattattggctgctgctgggcacgcttattctgctgatattgaagtcacaactacaattgatgaagatgtcgataatacagtatgctcattacgtgaggctgtagaactaataaataagcgtaattcaagtgattctaccgtggttgcctcagtaaaagatgggtatcatggctgtggaaataaagatagttcatcaaatattattttacagcgcgataaagaatatacgttaaatagcagaataacgattacagcaccccttacaattagtacagcaaaaaacgattctacattagttgatactgatcagcccggttctcataatgcaactatcaaaatggcaggtacagatcagctatttaaaattgatgatgagagtgttgaaaaactttcttttgctgtgacgttgagtgaccttaacttacaaggagctcggtctagcaataccatattagaaggtggattgatttataaccatgaacaactcaccattcgaaattctcgtttgataaatggttatgcaacacgaggaggtgcaatttataatgcaggtaatttatctaacacacccaatacagcgggcacagttactcttgtcaataatttaattcaaaataataaagctgcagaaggtggagttttatatagtggaataccactttattttattactcaatcagttatacgtgataatgaagtcacaacagcagataatgctttattttatacacagactaagttttctgatgaaagtactggggggtatttaacttcacgggctattggtataagtaatagtacatttttcataataaaggcggttttattgcaaatgttcgggatgggatgtttgttaataatattacgatga

SEQ ID NO: 57345 - DNA, 240 bp, Acinetobacter baumannii
atgaaaaatggttttcttataagtagttctatcaatgaaaaagtttgttttggaagatcattccacattgcaaaatcatatgcagttcaaagatcaaatgaaggaataattattggggtaaatttagaaaaatatttgacagatcctaacttaaataataaatatttttttgatcaaggggatttaaagtttttaataaatattaatccagatgttatctttggacatattgaactttaa

SEQ ID NO: 57346 - DNA, 813 bp, Acinetobacter baumannii
atgtccaaagctttagcttatgcaccagctgtaaatacagcaaaaactaagttgccaagtactgagtcagatcctttctacggttctatttcaaagcacaaatacgctgagttttctctatgtgataaagatggtaacccagtagcatcaccagtaattcgtgctttgttgactgacggcgacaaaagtattgagagccaatggcaaactccatttgaaaatagcaatccagaacttaaaatgcctatgttgatggcaaacctacaaaccgggcaaatgcttcaagtcgctggttctttgggggaaaactcccctttaaagtctgcactatttgatatggcctcaggtccattaacaagtgctgagaatgcacttaaaagcgttgaagggcgaacaaatttaaccaaagtgaatacaacccaagtattcctgtctacttcttcagtacgtctaaatttatcaattttcttcttagcatttagtgatgcaaaaacagaagttgaggacaagatcaaacagctagaggcttggagtctacctgtttctttgtcttctgattcaacactgcagaatgtcgttaatgattcaaattcaaccttagaaggattgttttcaggtgtaattccaccgttcgtaactcttacaactcacggcaaaacttataaaccattcattattgaaagtgtgtctgctccaatagtcgctccaattgatgaaaatggtaaccggttaagtttggccgtcaatattaatttaatgagtcgaactgcatgggactcaaaagatatttactcattatatggaggcaactaa

SEQ ID NO: 57347 - DNA, 459 bp, Acinetobacter baumannii
ttgtgcaacaaagccaaatacacttataacgccaggactgagacggtagataaaaagccgagtttccgacatgcgtgggctaaaagccagtttgcactaataccagtcgaaaagatttatgaaccacgttacgtaaatgggaaagctgaacgctggggaatttatcgtgaagacggattacctttcactgttgcagctatttacgattcaacagtaattgatgggcagcaagttagatctatgtcaatgctgactattaatgcggataaccatccgttcatgtcgcagtttcataaacctgaggatgaaaagagatctatcatcgttattcctgaagagtatcgagaagattggctaaactgtaaaaaagaagaggctgaccaatttttctttgaaatgccagtcgcagagtttaagtcaaattattttccaaaacctaataaaaaaccgccagcctaa

SEQ ID NO: 57348 - DNA, 312 bp, Acinetobacter baumannii
atgaaaattcctgatgacttaaaagatcaactaacagaatatagaaatattccaatactgcaaaaaaaccgtttacttcatctaaaagggggaagaatcaataccgcaaccttattcattctcctatccaaaatatccaaatacaagctgctaaatggtcttaaaaaaatttatattgaggaacaaagtaaagtaaaaatacttagcactttcaaactccttgaagtaataaagaacctagttgacactaacaccgcattcaaacagaataatggtgctctgccccatccaatcgaaaggttggatagttaa

SEQ ID NO: 57349 - DNA, 330 bp, Acinetobacter baumannii
atgaatcagaaatatatagtcagtcaatctgccccatctacccctatttgttttgtaccagaacttagcgggaataaaacaaataaaccagctacttctagtctttatcagcatccatctgcagaggatctaaagtttaaaaaagatagtaaatggccgtatgtcttatgctttcttatatttagtgcacttgctattgctttcctttatgcatgtgatgcagaggctcaagtgcgtgagcagaagactcaacattggcaacaacaatttaactcaggtgaacctgttgatgttcaagtacatgtagttaaattaggtggtgcacaatga

SEQ ID NO: 57350 - DNA, 324 bp, Acinetobacter baumannii
atgaacgattggaatctttttgatgaagtaataatagaaaaaaattcagatatatatgttgtatttgctgttgataataacactggaaaaaaatatcaaatacaaatggaagatagccaaagatggggaatccctgattcaaataacgcatattttattgaacaaaaaaaggtctgtcatattctgcaaaaaaatggaaataatttactttacaatggtgaaaatcatgaagaaatgtttaacgaaatttctgaaaaagtgaatcaagctcatgttcgaacctatagtattaattgctcaggaaatatctataataataggtag

SEQ ID NO: 57351 - DNA, 252 bp, Acinetobacter baumannii
atgagtaaaccaccacttgcaccaccaccaccaagtgcccagccatcatcacctacaccattagcaccatcaccaccagcaccccagtttgatactggacttactgatgcgccgcctttgtggtttgtttggtttgcagctgtaccagcgttaccaagcttgcgtgaaatttcggttatgtttgatgtcacagtgattacacctgctaaaccaccagcaccatttgagaaagcactaccattcgaccactga

SEQ ID NO: 57352 - DNA, 387 bp, Acinetobacter baumannii
ttgcccgtaccaagcgatttaagagatcaaacagtagtagtcactgactcacctgaccaagtacagaactggcaattaagtttcaatgctaaagaccacttagaggaggtgatttcaatttatcaagctcgttacaaagcaaagttaattgaaattgagccgaagttaaaccagtacaaccctaaaaacgtacttgaaatccgtaaggtcgataaaaacggccttcagcaagaatttgatagcagcagcttaaacaatggacatattgcaattctattagcggtttgggctagtacgaaaattgccaaaggcttttcaattactgaaggcaatcagtttgaagaagatgctgtagatccaacaatgcttcctttttcaatcttttaa

SEQ ID NO: 57353 - DNA, 687 bp, Acinetobacter baumannii
atggcgaaaaagagcgatttgcaacgtcgagtacttatcggaagaaaacttgcaatggcgcgtgacatggctcaattacgtcaagaagacgtagcattagaaatattcggtacaccgcataaaaatcgaatgagtgaaatcgaaaatggtaagttaatgccagatgcagaattactttctttgctatgtcaaaaatatggtgtttcagctgactggattcttggttttacgattgaaccggaactagataaaacagcttctgtagcaggtattctgtttaacagtcttggtgaaatgatgagtgaatatactcaagctatggcatttcaattgagtatggctgcggcacagcatattacttctttccctaaagccttaacggttgagttacttgaagcctcaaaggggcttattcaagcatgtttatctcaagaacagtctatccaagaaaaggttttacctgaacttcacaccctcatgcgtatagtgcgtgagtgtgaacaaaatcgtgcgaaacaaatccgtaacttagaaatggctatcgatgatgtattccaacgcgaagagaacgatttacagcaaaaagctctaattgatctgatccaaaataaaaaacgttttagcaaggcttctttacagcaacaagctatagctgaagtaaaacaaataggtctatttactgaataa

SEQ ID NO: 57354 - DNA, 372 bp, Acinetobacter baumannii; identical to SEQ ID NO: 57285

SEQ ID NO: 57355 - DNA, 624 bp, Acinetobacter baumannii
atggccgcagcaactcaaaacactgacgaaactttagcttcaactgatgatcaaactactaccaaacaaaaatctacccgcagtaaaactagtaaatctactgagacacaaaatactcaatctggtgatgaaaaagcttcagatcaaggtgatttattaaatagccaaggtcctgaaaacggcgcatctcaagatgatgattcgaaacctactgatttgaaaaatagtgtttcagataatgaagtgtccaaaaataaagatgatggaaacttaactgaatcatcgaatgatgctgtaaaaccttcaaatgatcttgattctaaaattagttggaatgttgatgagttagggtttgttgcaaataatcctcaacaaactgatattcccaaagccgaacatcaaagtgtggaaaatctaactggttctagcattagtaatgtagatccactagttattaatgtgactaataacggattttcaactgttttagaaccgttatcacgtgtttctattggggcaggtctaacagaaaaaattacgtgccataaccaaacatttaaacatcaagttcttgaaaacttacgtcagttgaaggggcttggtaagaatctaactgttgagtaa

SEQ ID NO: 57356 - DNA, 504 bp, Acinetobacter baumannii
atgacaggttggcgtattggctatgcagccggcccagcaaaaatcattggtgcaatgaaaaaaatccagtctcaatcaacttctaacccgacttcaatttcgcaagttgctgctgaagctgcgttgaatggcccacaagatgttttaaaaccaatgattgaagcgtttaaacgtcgtcatgacttagtggttaatggcttaaacgacatcaaagggatctcttgcttacctgctgatggcgctttctacgcgtatgcaaatattcgccctcttattcgtgcaaaaggcttaaaatcttgcacagaattctctgaatggttacttgaagaaactggcgtagcggtcgttcctggtgatgcatttggtttaggtggtttcatgcgtatttcatatgcaacagctgacgaagtacttgttgatgcgttagcacgtatcaaaaaagctgctgaatcaatcgaaggcgttgatgctgcaattgcatctatcgaagctgagaaagcataa

SEQ ID NO: 57357 - DNA, 306 bp, Acinetobacter baumannii
atgctgggtgatctggaccagacattaacagtctctatatctggtttaggtgatgtaatgccggatgagtttgaacgggtaatcgaaggccaatatcccgatgtaaagccaaccgtaaattaccggatttacagttcagacaatctgaattctccaatgttttatttactcggactacaactctcaagtgtcgccatgaaccataaagctgtgacattcaaggctgaatcaccacgattaaataccactaaaactggggacatttttgcactggatcgctttagtggtttgaagggggctatatga

SEQ ID NO: 57358 - DNA, 192 bp, Acinetobacter baumannii; identical to SEQ ID NO: 55638

SEQ ID NO: 57359 - DNA, 489 bp, Acinetobacter baumannii
gtgcctgattcaaaaatcaaagcacacagaaatgttgttaaacttcctggcgatataccaccagatcaacttttatttgagttcttatataaattacccgaggacgatttatactgggataataaacttggtttcacaaaattagtatttaatactatgtcaagcgtaactagtatttataatgccttatctttacctcatcaaccaagtgaatctttttcacttaaagcatttattgataactaccgttatcctgaaaatgaaatggaaaggcttcgggcattatttaaaaatttctttaaatccgttgaaatccaagctcttattaagaatgcaaactctctcaatccttatcggtatttagtttcaaaaaatccttcattaaaagaaaactttactaaggatcttatttttgctacaaaacacgtccttacaaaaagtaaaggcatatcttctcacttggtggaaacatggtatgaaaacgtttag

SEQ ID NO: 57360 - DNA, 312 bp, Acinetobacter baumannii
atgaaaattcctgatgacttaaaagatcaactaacagaatatagaaatattccaatactgcaaaaaaaccgtttacttcatctaaaagggggaagaatcaataccgcaaccttattcattctcctatccaaaatatccaaatacaagctgctaaatggtcttaaaaaaatttatattgaggaacaaagtaaagtaaaaatacttagcactttcaaactccttgaagaaataaagaacctagttgacactaacaccgcattcaaacagaataatggtgctctgccccatccaatcgaaaggttggatagttaa

SEQ ID NO: 57361 - DNA, 279 bp, Acinetobacter baumannii; identical to SEQ ID NO: 53681

SEQ ID NO: 57362 - DNA, 279 bp, Acinetobacter baumannii; identical to SEQ ID NO: 57302

SEQ ID NO: 57363 - DNA, 201 bp, Acinetobacter baumannii
atgatatttgaaggttacttaattgaattatatttcagtactttaaattttaaaaatgcttataaattaggtttcttaattaatgaaaatgagatatttattccctatgtaaatattctttctcagaaggaaattgtagaaaccttaaaagaaggtggaaaacttgttgaaaaaatgtttaacggaattagtccacaatga

SEQ ID NO: 57364 - DNA, 357 bp, Acinetobacter baumannii
gtgtataactataatgctttagagttacttcacaaagttgataatcttttagcaaaagattctttaatttatcttgaccctccctattacgttaaagggcaaggattatatcgaaacttttacaaacatgatgatcatgttttaatacgcaatgcattagatcaggttaaaacgaaatggatcgtttcttatgacaattgtcaagaaataaaagatatttatcaaggttatagacaagatgaatatgatttaaattatagtgcttattttaaaatgaaaggcacagaagtaatgatttattgcaactcaattaaacctgtaaatgtttcagctaagcaagcagagttagaattatag

SEQ ID NO: 57365 - DNA, 246 bp, Acinetobacter baumannii
gtgccattacctgagattacgatgtatatcggtattagcgtttatgaagaatacagtaatggttttgcaatattcatttcaccaaatacaccaattttaagaagatttctttttagaaagttagatattactcaccatattatgttgctacaaaattatattaatgtcattttgaagtcccatgccggtatatatgatgtgcaatggtgggaggaaaatgagtttagatatgttgcagcgcattaa

SEQ ID NO: 57366 - DNA, 201 bp, Acinetobacter baumannii; identical to SEQ ID NO: 57296

SEQ ID NO: 57367 - DNA, 339 bp, Acinetobacter baumannii
gtgccatttcagcaatggaatgatcatgtatttaattcaacattcactgtttttgaaaatgaactttttccatcaccagtcccaagcgaagcaatcaatctttctatctcaactgtagatattcagcttgtgggttatacacctaacgttatcggtttcggtggtccattcgacaacaacacaggtaatggctatgaacctgacggctcagcaacggaacagcccgcaatcaacgacaaagttgtagtgcaagctgatcagtacacatcactcgatcaccagcgtgtgaagggtgatagagaaacaggtgaaattacagttgagcgtatagatgactga

SEQ ID NO: 57368 - DNA, 318 bp, Acinetobacter baumannii; identical to SEQ ID NO: 44624

SEQ ID NO: 57369 - DNA, 213 bp, Acinetobacter baumannii
atgactgtctcttgcccaatcgactataactactttggtagcttcgcgaatatcggtactaacggtagtgttcaaccgggcaaaaaacaaattgatggtacagctgaacttgttaatcgagttcagcaagtgatcaatactgctcaacaagcgactaatcttgcaaatgctgtgcaaggcgttggtcgtcaactgggcaatctttttgggtaa

SEQ ID NO: 57370 - DNA, 201 bp, Acinetobacter baumannii; identical to SEQ ID NO: 57296

SEQ ID NO: 57371 - DNA, 378 bp, Acinetobacter baumannii
atgaatatgttcgctaaaccagagttgctctgccctagctttccttacttggatttgtctagtgacattcaagttgaaggagaaacggtttatttcgaccttacttggggctgcaatgctcttaattgccagatcaaagctgagtcatcttttgatactcgagaagtaaatgtccagttcagtgaatgtgcacgtgatcagcaatatgaagtgctttcagtagacacaagaactcctgcagttgtgaccgataaagacggcatagagtcaccaataggcttacgtttcaagctcacagaagcacaagtaaacagcttaaacgagcagcttaaatactacgccgaagaattggcagataaagaagcgggagtggtgtga

SEQ ID NO: 57372 - DNA, 795 bp, Acinetobacter baumannii
atgaataactacaaaatcaaagttaaagatgaagctgagagcaaagaggttcaggagttgttttttcggcttggtgcaaaacgaccagatggcactacaaacctttatcactcaccatcagtgtttgggctattagttgtagaaggtttgttgaattacgtatttgcggatgttgtttttagggacagtggagcaaaagaactcacccttccacaactccgagaccttattgtgttgaagcgtaatgatgtgaaggatgcgactcatacttgtgaaaacaacttcaaatacatctgcattgaaaatcgatggtatttaatgactacagatggttggtttcaagtttctgttaatcctaaggctctcaagcctattcaaacagtagaagcagtcttaaataatttggacgaactccgtgaagaatacaaggactaccaccaagaccaaggcttgattagcggggctgaggcaatgattgctgcacttgacgaccaagaagttgaatacagatgggtggatggtagctgcaattggcgtccttttaatgatgaggactggtcagtagaagacttaaagtctggaacatatagcttccgcctcaaaccgcaaaccatcaagcttgagcttgaaattcctgctccatacaaagcaaagattggtggacgtgatgacacttcattcgttctgaatgtgggtagacatcagtatctttaccagaatgaagatgactacaccaaagctagaaatgctttagaggcagtgtttgacgctgctttaggaggtaacaactcatga

SEQ ID NO: 57373 - DNA, 744 bp, Acinetobacter baumannii
atgagcgagatcaacgaccgcataattgaaagaatgcgagagctcaaattgagacaggtagacttgattgatgctacaggcgctaagaaaggtactgtttctaagtggatatctggtattaacacgcctagtgttgaatacatgccagctctcgctcaggtgcttaagacaactgaaagctggttattaacaggtaaagaaccaagcagatttagtaatttaaatgttcaagagttcatggataagcatgggcttaataaaaaagaagatgcatcatttgataccgacgacatcatggaggccgatgttgttgagtatgaagtggctaacggttatgtatggattgatgtcgtggaagctagtttttcatgtggtacaggggaatctattgagttccattttgatgtaattaatgggaaataccctttcccgccttcattctttcaacgcaagatgattgatcctaaatgcctaaaacttataaaagctaaaggcgatagcatggaggagtatatttatcatgatgatttggtagggattgatatttcccaaactgaaatcattgatggtgaaatctatgccgtttactttgagggcgaaggtatgatcaagaagatcttcaaagaagaaggaggtactttaattctccatagccttaatgaaaaatacagagaccgtaaggtgactgagcaaaacggaattaactttaaggtaatggggcgccaggtatggcgagctggataa

SEQ ID NO: 57374 - DNA, 189 bp, Acinetobacter baumannii
atgacagtagatgatttagtaactcactttaaggttgctaaagacattgaattaactgcaaagctgaatgttactcgtggaactgtgagcaagtggcgctctaaaggcattccacgtgatacacaagcccgaattcaaatcttaaccaaaggcaaacttaaagccgatttacaagcattaaccgcttag

SEQ ID NO: 57375 - DNA, 537 bp, Acinetobacter baumannii
atgaatgcggcagtaaatcacattatgcaaacaacggactggactaaatacagtctcgaagaatggctttatcaatttggggcttggatgtactcaaattctggaacgtgtggaaagagcataaacccgattgctgtcgctatggatcaggctgctaaaaaacgtaagcaagaggtcaagggtaaagagcagatcatggctgattggctgtgttctgatgatgatacgccaatgcccaaattgcgaggcaaagggattacatgtgagattacggacaatgaagcgcgtgcagttcaacgtcttatcttggatatgcaaggccagtctgaaatccttgatgagtggcttgatgctgtgattgatcgctatctttatggcaactcatggtcagacatggtgattaaagtagggcgtgtagataacccaaccattctccgtacccaacacgatgctcgtgaagatgttcgctgtggtttagcagctatgcattgtagatacccattcattcgttttgacttaaagaatagaggcaagtaa

SEQ ID NO: 57376 - DNA, 174 bp, Acinetobacter baumannii
atgaagttcgcactattttattttacatccatgctcgccctgtatgtcattgcgtttccagtattttttctaagtgatttggaaatagtagttactacagcaatctggcttctctcagtagcagtttgttttcctcttgctatatatgccaagaaaacattaataaagatttaa

SEQ ID NO: 57377 - DNA, 258 bp, Acinetobacter baumannii
atgtacccttttactgtctggccactgcaattaataattcaacgaatattggaagaaaaacatatgaacactacagagcattctcaacttgagtgtggaagcatcccaaaagggacaaaagtaaaaattgatggttgtccattcgtgttgcaagacgatgtaaaagttgctgcttcacaagaaatcgtagatcttgcaatcaaaaaccaaaacgacttttacaatggtattggcgttgtaggtgaaaaaacagaatag

SEQ ID NO: 57378 - DNA, 540 bp, Acinetobacter baumannii
atggaagaacaaatcaaaggcgcagaacccttaaagaatttacgccatgaagagttctgccacgaatatctaaaaacgttgagtgctcaagaggcaggtaaagcagtaggttttaaaacccgacaacatgcttgggatgtgcttcaacgagaagaagttgaggaacgcatagcttacttaaatgggcagcgcatcaaacgcgttgatgtagatgcggactatgtacttaagcgccttgtagaaatcgaccagatggatgttttagacatcatggacgataaactacaaatgagaccaatgagtgaatggccgccagtttggcgtcaattcattaataatgtagaaagtgttgaaatcgccgaaggcgctggctggcttaagaaaatcaaatggccagacaaagtgaagaaccttgagttgttaggcaaacacattgctgttggggccttcaaagagagtgttgagcataagcacagcggctcagttgatatgaatttaaaggtggtattcgaagatgatggagaaacgagtaccaagtaa

SEQ ID NO: 57379 - DNA, 2250 bp, Acinetobacter baumannii
atggataaagacgaaaaagacattctcgctcaagcaaagaagtttcgcgacgatgctcaagactattggaacgatatttattgccaaggtcgagaagataaagagtttgtgacagttaaaggggctcagtgggacagtgaagctattaagaagcgcaaagccgaaggtaagccaacactagagtttaaccttgtgcatacttactgccgtcagcaagtaaacactcacaagcaaaatagacctcaaattcaagttgtgccagttgatagtggtgctgatgaggaaatggcaaaagttcttgctggtcttatcaaagacactgaagaagcaagtaactttgaagatgtaaacgacatagcggttgaaaatgctgtttatagtgctgttgggtttatccgcatcactgctgattacatccacgaaaagagcttcaatcaggagccaaagttcaaagctgtacataaccctgaagcagtcctaattgacccgttatcgcgcgaaatggacggctcagacatgagcaaagcgcttgtgtgtgagtgggtgtgtaaagacaccattgaaaagcagtacggcaaagaggctgtatctgactttgaaatggacggcattgagaactggttcaatgaaactgaaaatacagtccttattgctgaatacttctataaagacgaagttaaagacaagttaattatgcttgaagacggcacgactgattttaaatcggtcttgctgcaaaccttcaatgaagaagatctaaaagcattcacggttaacgagcgtgatacaacccgtaccgaaatcaaatgggctaagttatcaggctgtaaagttcttgaaactggcgtgttccccggcaagtacattccaattgttccagtttatggtgaagttatctggattggtgacaagcgacacattttctcacttgtacattttgctaaagatccacaacgcctattcaactattggaagtcaactgaagcgaacattcttcagaaaaaccaagatgagttgactgtggtagatgcgaaagctactcaaggttatccagagtgggatgacccatcaaaatataagcatcttcgctacgattacattgatgaaactggcaagcagcgccccgggccagtaaaagttggctcagcgcaagtacctgtaggcattttaaacgcttctgaatctgcaaagacattaattgctgatacgttgaatatgcatgctccgcaaatggggcaagatgttaatcaacaatcaggtaaagctattggactattgcaacgtcagggtgaaacgtctcagttccacttccaagacaatgacaataagtcaattcgtcattgtgggcgcattttgttggggttattccctgtttactacgacactcctatggtgcgtcgcataattggggcagatggtgagtcagaaatggctaggcttaatgctaaacctcagaatgaagatgaaatggctaaggcaattgatggcgtcttaaatgatatgtcagttgggcgttatgacgtccgtatggatacagggccttcatttaatacccaacgtgagcagtcattccaattgatgatgcaattagctcagtttgcgccaaatatcatgcaagctgctggtgacttaatcattaaagattcacctctcttgaattctaaacagattgcagagcgcgtgaagaaattaatgccgcctcaagtgcttgaagaaggtcaaattaatcctgagcaagctaaagcgcaaatcacgcagcttgatcaacttgtacagcagcttactggtgagcttgaagctctacagaaagaagtgcaagacaaggttgaagatcgtaaccttgagttactgaaagctcgcattaatgccgagaaagatttgcaagtagcacaaattaatgctgctagccgtgcagatgttgaagaactgaaaggaacagttgctcttcttaaagagcatattgggctaaatcaagttccacagcaatggcttacacaaggtgaatcattacctgactaccagacagatttgccaaaacaagattatccgctgcaaggtgcgcctgaaccaccacctgagcaagcgcctagcattcagaaccctgccgaacagcagggttttttaatgcctgatgaaacggttcaacaagaagacttcgctcctagtcctgatcaggctggggaaggcgcacaactgatcgaaggtaatttattgccaaacttggagcaacaaaatggatccgaattctga

SEQ ID NO: 57380 - DNA, 828 bp, Acinetobacter baumannii
atggatccgaattctgatactcaagacatcgttgaaaccactgcaacggaaaatacaagtgttgaaagtcaagagacaaattctccagaaacagaaactcaggaacctgagaccgctgaacagccagaaaatgatgaagcgaagaaggaacctgaaaagccaaagcgtaatcgtgcacaagagcgaattgagcaattagcacgtgaaaatgctgaacttcgacgattcaaagcagaatcagaagcaaagcaaaacgcaccaaaggctaatgagaagccagctaaaccaagaatcgaagactttgagacatatgaagagtacttaaaagagcacgatgcatatgaagaaaagctagatgaatggcgcattagtgaggctgagcgtcgtattcaagaaaagcagagcaaagcatcaaaagaaacagagcaagttcagcgtgaagctgaatatgaggctgttattactgagttggcagttgaaggtattgatattgatcattacaccaagaaagctgagcaattgcctgctttgcctattcagctttttgagcttggcttacccactaaagacacattattgcttgcaaaagacctgctagatgacgaagccacttatttagaactgtctcggatgtcgccagcacaggcaattctaaaaattggccaatacatcggcactaagtcgacaaaaagcgctcctcctgtttcaaaagctccaccaccaataaaacctgtccaagcaaatgcgcctgctgttcgtgacccatctaagatgagcgatgacgaatggtacaaggctgaaacacagaaacgaaataaaggaaaataa

SEQ ID NO: 57381 - DNA, 1197 bp, Acinetobacter baumannii
atggctaataccattcttacgcaccaaatgatcgcccgtgaagcagctaaaatgcttgaggaagaggcgccatttattgcgaatatcaacaaagggcgtcaagacgaatttggcaaagacgttcaaggctataaaaaaggcgacactgtaacaatcaaggtacctacatcaggccgtgtatttaatggtgcagtatatgcagaaggtggtgctggttcagacttcttggaagaagaagtaaaccttacactagatacacaaaaacacgtaggcttaaagtttggtgctaaagaaaagcttcttgatatcactgactttaaagaacgtattttacgtcctcaaatgcagacgctttcatctgttgttgaagcggatcttattgcgcgtggtgtacttggcaccccaaatcaagtagctatgtcattatcaggagcaaacccttctaatgctttagccttgggtcgtgcaaagttaaaccaatacttagcacctgccggtgatcgttcggtaatcctttctagtacggcaaacgttgccttaagtggcgaagtatcacgcatgtataacccaacacaaacctcaagcaaggcttatctgcaaggttatgttgccactgcatttggcgctgacttatatgagcatcaatcagttgctgtattcaataacggtactgctgctggactaactgtaaatggagcaaaccaaacaggtaaaatcgtaaaccttgcagcggccactggtggcaccttgacacaaggcacagtgttcacaatcgcaggtgttaatgccgttcacccacttactggtcaagacctcggtgttcttcaacagtttgtagtaacagctacagtaactgtaggagcgaatactgctgtttcaatcttcccagcattgaatgcaacagcaccgaataaaactacaagtgcattgcctgcgaatggtgctgtggtaacagttgtatctacgaatggcttccaaaacttagagttccataaggatgcctttactgctgccttcgctcctcttcctgtcttagcttcatgtgaaggttatacagctcgtttacctagcggtatttcggttcgtgtgatgacatttggtgatggtttgaatgatttagagcgtacccgtattgacgtgttgtatggtttccaagttgttcgccctctacatgcttgccgtatcactcaagcctaa

SEQ ID NO: 57382 - DNA, 429 bp, Acinetobacter baumannii
atgtcaaatgaatatccaaagatgctctacaagggcgatttagttaattttgaatacactaccgccaattcggaagagcaccaagaagaactaaaagcagatggctgggttgagcatcgtgatcttaaagctgctaagccagaagtagaagtaattgcacaggcatctggttcaagtggtgaattagctgaggctaaaaagaaaatcattgaacttgaagagcagcttgctacagcaaaaggtgagtacatctcacaaattaatgcactcaaaaaagaaaacgacacctacaaatattccgcaatggatgcaggtgagttaaaagccattcttgatgagaagggcgttaaatacggatcacgtgacggtaaagatgtgttggtgaaactggtgctagacagtgaatacaacactcaagacgaagaatga

SEQ ID NO: 57383 - DNA, 699 bp, Acinetobacter baumannii
atgaacgtaagcaaaatcgcagaaaatgcaatgaagcatctcggaatcttggctagtggtgaaagtgcttcaggtgatgaattgatggatgtaatagaagctctagaggggcttcttgcgcaatgggcaacgagcaagttgtatgtctataaaaccaatctcttaacactcgaactcactaaaggcattggtacttactacatcggtgtggttgatgataagtgctgcaattatcaagttacttgttgcaatgaggttgtgacttcattgccagacattgaatcagagatttcaatgatttctgatactgcatggcttgatgactgtgaaatcaaaatcatccgtgatttaaacaacacttctaatagtcgttatgtgcccgtgtggtatcgcaaagactatcctaattgggaaattcatgttttagagtcagcaaaaaaacttactcttaaaacatattctctaccccataaattaaagccaaaagatgagctccaattccctcccaactacaaacgaccactagaacttactttggctttagagattgcaccaatgtttgggacagagccttctatgcgcttacttcaaaaccaagacaatgcagttgaaatgctcaagtcaagcaattctgttccagcatattcaagcaatgatttacctgtaggagttagatgctatggtgagcaccgttattga

SEQ ID NO: 57384 - DNA, 1407 bp, Acinetobacter baumannii
atggtgagcaccgttattgatattcctatagtggggcagtcatatcatcttgaaaactggtctgtggactgtcaacgcacacttaatcttttcccgcaagttgttgaaagtggcaatgcgccacaagttgccgctttacttccaactgctggactaattaaaaagtttgagtttgacagttatattcgcggcatgtacgcaatgagtgaccgtttttttgtggtggctgggcaaaagcttttatcaattaaagcggacaattctgttaaagagttaggtgaagtcagtggaattggaagagtatattttgctgataattctgttcaattaatgattgtaagtaataattcttatagcttggatcttaagagtaatactttaaagaaacttgaactaggcgaattctttggtgcatcagatgtaactgcacttgattctcgctttatttggactgtaccgcaatctggacggtttcagtggtcaaacctgttatctactgacactagcgcacttaattacgcaactgctgaggccaaatctgacaaccttgtacgatgcattgaaaacaacgatcagctttggcttattggtgaaaagactacagaaatctggagttctacaggctctagtgaggcgccttttcagcgtatgggtggggcgattattccaacaggttgtgttgctcctgcttcggtttgccgttttggaggaagcttggcttgggtatctcgaacagaacatggtcaaggtgtaattgtaattacggaaggttttacaacttctcgaatttctaatcatgcaatcgaagccgatatctcaagttataagagtattgaggatgcctacagtatttcttatcaagaaaatgggcactctttccttctaataacattcccaagtgcaaagaaaacatggtgctacgatggcacaaccaaaatgtggcatgaacgtagttactttaatcctaaaacctacttacatgagcagcatcgcgcctttgtacactgtttctttaatggtaagcaactggttggcgaccgtcaaaacgggaaaatatacgagcttactctaaatagtagaactgatgatggcgacactattgtaagagagcgtattactccggtaatcaatcctcaaacacaacgaatgattttccacgaattagaaattgtggctcaaatggggcaggacgtcgatgcaaaacccatgctaatgctcgactggtcaaatgataaaggccgcacttggtcttatacacgacaagaagacttaggcggtattggtgaatatgaaaaaagattgatctttaggcgtctaggccagtcctttagccgtgtattccggttccgtatgacagatgcatcaaagcttgtaatcacaggcgcaaaagtgagggtgagtcaatga

SEQ ID NO: 57385 - DNA, 123 bp, Acinetobacter baumannii
atgaatttaattcctccataccaacatccacttttagatagtaatgggcgcctaacccaaccgtggcgaagttttttagacaaccttgtaaaggcagttaataaactgaacgaggcaccatga

SEQ ID NO: 57386 - DNA, 447 bp, Acinetobacter baumannii
atgattacgataaggcgagaaaggtggattgattgcatagatcagattatgccactttgccaaatggtgcatgatcttgttgaaaaagaactatatggcctgccactcgactttgatagcgagctataccagcagtccgaagaccttgaccagttccattgcttagtaatgcgcaaaaacggtcatccaattggttttcattggatggttatgtatgaccttgctagatttaaaggaaaaaaacaagcaggaactgacgcaatctttgttcatcctgagcatcgccaacattcaatgaagttgattcagtttagtgagcaatatgcaaaaaaacacggctgtatgacttgggcaattgccaccttagacccagagtacagaggccagttgtgggaaagaaaagggtttaagaaatctgaaacaatttttataaaggtgatgacatga

SEQ ID NO: 57387 - DNA, 651 bp, Acinetobacter baumannii
atgagtaatgtaatcggtgcaatcactggatcaagcaaacaggcaaaagcacagaaagaggcaggcaaccagatggttgatgcttcaaatcgagcaactgacgtacaaaaacaaatgttcgatcaaatgcgacaagatcaacagccatatatgaatgctggtactgatgcacttaaaagccttatgggcggaatgggtgagaacggccagtttatgcagacatataatggtcaggatatttataacgacccaagttatcaattccgtttaaatcaaggtcttgatgcagtccaatctggtgcagcggcagcaggtggcttgttgagtggtgcaacgcaaaaagcgcttgccaactatgggcagaactttgcaagccaagaatatcaaaatgcctataaccgctttaatgcggatcaaaccaataaatataaccgcctttctaatattgttgggctggggcagaacgcggcagctggtgttggtaatgctggtatccaaacagggcaagcaattgcgaacaacactatggcaggagctaatgctcaggcagcaggaacaatcgcagcaggcaatcagcgtgcgaatgatttccaaaccatgttaggcctagccaatacagcagcgaagttttataccggtggaatgatttaa

SEQ ID NO: 57388 - DNA, 1320 bp, Acinetobacter baumannii
atgcttgatccaagtatcattactcgcggagctgagcgtgctcaattacagcaacagcaaacaaacgaaatgctcggcaatcttggtggggcattgggccaaatggttttaggtcgtcgaattaatcaaatgcgacaacttggaacgcccgatgaacaaaaagcttttgctaacaattctattttcgctccacaattaaatcaggttcttcaaagcgatcaagcaacggctcaaaaaaatgctattgatttacttaaggctcaagcggaaataggaaaaacaaatagtgaggctaccaagaacaatgcccaagcaggcggttttacattagataactctcagaagaagtttggcgctgttcaaggtgtttttcagcaagctgcaatgactggtgataaaggacaagttttgttgggtcttgatgcactgcaacgcacggggatgatctcaccagaggattatgcacataactttgcaatagttcaggccatgacgccagaagacgttaaaaagtatgctagcggcattgctctcacagacaaagatacagcaccattcttgtatcaaaccaaaaacaatgaagcagacaatgctacatccgttgctaacaatatccgcacaactgatgcgtcaaggtatgcgactgataccgcagctgcaacagcagataaaaaccgggcgcaagatgctcaacagttcagtcagaaacagcaacttgacgaatggttagcgaagaataagcctattggaacagagatggggaacgatggttatatgtatgccatatatccgggtgggaaaggtgtaagaatctcagatgagagaggaactccaatccaagttcaacctaaagggtccaatagtactgttgcttctcagaatgaggaaaagcaacgtattagcagagttaatgccgtgctcgatgagattcaaggaatcttgccgcaagctacagcgagctatgcaggtcgaggtatcgatctgttagcacgtggagttggtttagcaactccaggtgatgtagcaactggtaagcttggaacattaggcggtcaattagtagctcttatgccgaaaatgtcaggacctcaatctgataaagacgttgcaatgtacaagcaaatggctggtcagttagatgatccaaccattccattacaggttcgacaggcggcattagagactattcgcagcttgaataataagtatgctgaaatgaactcgcaaaggcctgcaactgttccataccaaaatgatgcacctgccaatgcacaacctcaaaaccaagcgaaattgaacaacattctgtttggtaaataa

SEQ ID NO: 57389 - DNA, 252 bp, Acinetobacter baumannii
atgaataagatacttataatcctagcaatatctttgttaacagcttgcagcaaacccaatagtaagccaagttatggtgatactgggttaccaaaaaattgtcgagctataatcaaggccaatattgaagagtacagaaaaatacgtgcctcacaagaggactattctgttcaaatggatgaaatagacggtctgtttagttcaatggatagaaactgtggggaaaatggttattcatgggaatatgaataa

SEQ ID NO: 57390 - DNA, 618 bp, Acinetobacter baumannii
atggcatcagctcaaaagtacatgcagctactaaataatcccaacgcaaggcgcatgcttgatttgattgcaagtgcagaaggcgttaagcatggttataacactctgtttggtaatcaacgttttgatgacttatcagcccatccaaatattcgaaaggcatttacccaaacagatggcaagaaaaactacacaacagcagcaggtagatatcaattcctgaatgacacatggaacggcttatcacgacagtatggtcttagggacttctcaccacagtcgcaagacattggggcaattgctctccttgatcagattggtgcacttccatatgtgttaaagggtgactttggcactgcaattaaaaagtcaggtggtacttgggcatcgttaccttcatccaactatgcacaaaataagcgttcttgggactttatcaacaagcaactaggtaacaaggtaagtacttttgaacctgagtttgttgatttaaagaaagttggtatttcttctaatttccaaccgaaaatggttgatcttgcaagcgttggaattgggacaaaatccgattttcagcccgaatttgtggacttaaagtcagttggaataggtgtttaa

SEQ ID NO: 57391 - DNA, 2217 bp, Acinetobacter baumannii
atggctagtcaaaatgatatttcagcccgtattgcaactgcaaaaaaagaagggttttctgatgagcagatctattcaagtttagcttccaatgctggttttggtaagcgtatctcaatggccaagaaagaaggttattctgatagtgatatagctaaaacacttgggcttaatcttcagaaagatcttggtgttcaacaacctattaaagttaccacaactcgacaaccttttgactggcaagctgctcaacagaaggctatgcaagaacaagctaaagcggcgggccctacaaggttatgggagtctactttacttggtgcatcagacttaggtgctggtattgtacaaggtttctcttatgctggcgataaacttggacaaggtttaaacgctgcattaggcacaaactttgatactggcgcttatgatcgctttactaatcaacggaaggatattcaagaatttcatcaagcacgtcgacaacaagcgggtcaaggctatgatgtggcacgtctaggtgggcaaatagctgcaactgcaccattaggtgctttagggcgaggctatgagggggcagccattctttcaaaggctggcgcaggtgttgcagcacaaaatgcagcagttggcgcagcaatcggaggtgctggttttgctgagaatggcaagcaacgcctagaaaatgcagcactaggtggtgtcggtggtgcagcaggtgcagtaattggtgaaaagattgggcagggtgtttccaaggtcgctcgatctgttaaaaacacaggttcacgtgcagcacaacaaacagcacaagctattgataaaaaccttgatgatgccttgcgtcaaaatggaatgtctcttggtgatttatctgatgatgtcgctaatggtttacgcaaagaagctcgcgatgcgttaaaagcaggaaagaacttaaatccagaagcagtggcgcggaaggccgttttagatcgtttaggtttgaagggcactaaagctcaggttactgggaatgcaattgattggcaaaagcaatctgagctagctaagctttcaggagctggcgatcaattaagaggtaaattaattgatgataatgtccagctccaaaatcttttaaatcaggctgctgaacgtactggtggtaatgcgactgatcaatttggcgcaatgcaaggcgctataagttctctgaactctcaacttgatcaaaataagcaattcattggtgctgcatatgaggctgcaaaaaaagcagctggcaatgatgtagtgattgatgggcgcggattcgcaaatgacgcttttacagctcttgaacagaattacgcagcttcaagcctgccatcaagtgttcaaaagatcataaaagatgtggcagacaacccggataagttcactttaggtaagtcagaagaattaattaagattcttaaccgcgaatacaaatcatcgttacagatgggtcagccgacaagttcgacatactcaattgggttagttcgtgatgccttgaataagcgccaagctgaagcaatgcaggggttattgactagtggcaatgatgctgcccaagcatatcaatttgcaagacaggcgaatcaattcaatgcaaaccaaattgaaggtatgcctttactgcaagatgtgcgaaagggaattgagccagacaagctatttaataaacatatcttaaacgggaatgttaacgagcttgatcgaacaattgagttgctcaacaacgttaatcctcaagctgttaatgatattaagcagcaagtagttcaatacatttcaggcaaagcaattaatcaaaatggacaatttagccctgctggaatgaagcgtgctttagatgcaattggtgatcgacggcttgctaccatgttttcacccgatgaacttaaaaaccttaaggacattgggaaagcagggcagtacctagttacccaacctcctcactcttatgtgaacaactccaatacatcagcagctttaatgaactatttaggtggaatcattaatagaccgggtgttcgtgttcttttagccccagttaaagacatagctgataatcgggctgtaaataatgctcttcgccctgacgtaacaggcacgccaattactacaccgcctacaacccaagagcaaaccttaatagatcgactggttcaagcaggcttgcttagtggagcaggcgcaactaaacagtaa

SEQ ID NO: 57392 - DNA, 873 bp, Acinetobacter baumannii
atgtacccattaatgacgaatgtcacagcacaatttgttgatgacaatggaaggcctttgactggggggaaggtgtggacctatgaagctggtaccaccacacccaaggctacctatgtagatccagatgggggtgccaaaaacaccaatcccattatcttggatgaagcaggacgagcaaatatctatctagacgatggtgcataccgggtaagggttttatctgctgatgacgttttaattgctgatacaaataagctttcacgctatgtaacaagtactgaattagatgaatttatccagcaagtacaagatggcttggatgagttaaatcaggtcaaagaatcgcttaataccattgttgagcaaggcattgaagcccaaaagggtattgctggtggcttagctccattggatgaaaatgacaagatagatccgctttatctcaaaacgagtgacgctctagatgtcgatgattcaaagatattagcgacttcaaaggctgcaaaaacacttcaggacaagaagctcgagaagaaagacttggcctctggtgatgcacctatttatgcagttcgtgcaatgggatcgttcacaggaacggctacaaagattggcactggtggcaactttaaggcggttacgcgaattgagcttggcaaatttgaagttgaactcgaaacggctatgccagacgcaaactatcgcgttttcttaactgcttcgaacaataacggttcagcagctcaaagtgcaagtatcgattacacctttactcagacgacaacaaaatttcgaattatctgtacatatggtggtgacaacacccttggcagatttgacccagaccgaacagattttttagttatttaa

SEQ ID NO: 57393 - DNA, 2220 bp, Acinetobacter baumannii
atggcacaactcgctccaatgatgcaattacgtgctcgctttgaagacaaatgtgggcacccgttagcaggtggtagtgtatttgcttttgaagttggcacttccacaccaaaagatacttttaaggatgctaatggcacaattccaaatacacatccaattaaattagattatcgcggtgaggcagatatctatcttttatccggacgttatagatttgttgtttactcatgtactggagtgaaaatctacgatgtagacaatgttggtgagtggcttggaactattaatgcattagcagttacgcatgttgatagtttggaagggctgaatgctatttcaaatgtatgggatgggcgcacaatctatgtaaaagatctgggtaactatcgttacgatgcattaactacatcttgggtgaaggcatatcaagatgctgataatgtaaaagatgggtctgaatcacagaaattaatcaataataaaacaattcagaaggttgaatctatttctgacctaatcaacttaaatccaagaggtaatggtcaggtcgtacaggtattatcctttcatgcaggaaaagatagggggggtgattattttaaatgggcagccactttgagcaaatctttgcatgatggcggttatttcatagaccctcttattgcaatacctccattagcaactttcaacacctattattcaccaagaaatagtggtaatggtatttgggtgcgtttaaataataagcaagatatttatgcggaggcatacggtcttgtaaagatgtcagatgatcctacagctgtatggtcatgtgctgcgattcagcaagcaatttataaagcttctgtaaaatcaaatactgattattttgctaagactgtaagagtaggtggagggcgatactacacaacaaatccaattgtattgacacaaatggatggcttttctgctcgtttaccagctttaattggtggtaatggtaatagtatttatgatgttgaacttataaagactacacaaaatactgtcggtcctggttactatggtggtgatgttgatgcagttatatttacatctgcaaagacatctggatcacagtacgtttatggtgagaaaacttcagggttcacattaagtcgaactgatttagatgttggttacggatatttcgcacaaaattctgtccaagcttatcgaggaaatattcaagctgttggacatgcacaaaacatttatacaaatgattgctggatgtcacgtttggggtttatacgctcatatcagggtaagaaagggatcgcaatccgtggtggaacatcaaactttggtgggccactatatgtcgacatggcaaaagaacatggctatgatttttatgggctaagttattctgatcttaactgtgcttgtgatggggttggtgcaggcttggcaaatggcggtattgcttacgatttatcattctgtaagtctgttagtggtacatttgccgtagagaggcacaaaggtattgagttctaccttaataataccgatggtggctcggcgaaagggcgtagttatcactcaactgctgttccagcactaacatacaaagtatgggttcaggctggcagcacgtttagttttacaggatacaactggaaagaatcattagttaatctatctactgctgataaggcgaactatagacttacaaataaagtaaagtatcaggggacgtcatcagtagaatattccggatgtgaattctcacctgagtttgcgagagatggctttgctgggcaacttgatagtaagtttgcggctaaggtaatagacgctgcttatagtgataacgctggaatcattgctcatacaattgcaattagtaacatagtattcaaacggctttgctggctcggccagtcttctgcggttgaattaatatctgcaaatgcggtgaatccaacatattcagatcgctattacagcaatgcttttgtgcttactgagggaactcctaatactattgctaatccaaaacccaaccggatagcaaaaacagcaatttcaactgattcagcgaatcccaccattttgtggtatttatatcaaagtggagcaattacaaattcgcacttacgtggatatatagatgcagatggctggctctgtgtacaacatagtgtggcggggaatggcttggaatatcggtttttagtggtagtttga

SEQ ID NO: 57394 - DNA, 519 bp, Acinetobacter baumannii
atgatgacgtttgaaaaagcatttgatcgcttgataggtcatgaggctggttattctaatgatcgtcgtgatccgggtaactggacaggtggcattgttgggaagggagttttaaaaggcacaaagtttggaattgctgcaaatacctatccaaatctagatattaagaatctaaccattgagcaagcaaagcagatctataaaaaagattggtgggataagttaggtgctgactcactacatccagctattgtatttcagctttgggactttgctgtcaatgctgggaagagtagagcagtgaaagagcttcaacaagttgcaggtgttcctgatgatgggattatagggcctaaaactatctcagccgtaaaagcaatggatgtaaacgatgtgcttcttaaattcaatgcagagcgtttgaagttctacacttcgctaagtacatgggccacacacggcaaagggtggacaaatcgtgttgctgagaatctcatctatgcatctcaagacaattag

SEQ ID NO: 57395 - DNA, 957 bp, Acinetobacter baumannii
atggcgagtcattatgaaatgttcccagcggttgttactcgtgtggaacagctaacccctttaatcaaacggtttacgttcaaacgtcaagatgggcagaactttcctcgatttagtgggggaagccatattattgtcaaaatgaatgaacaactttccaatgcctactcattgatgagctgtacgcaagatttatcaacttaccaagtctgcgttcgtaaggatgtggaaggtaagggtggatcagttttcatgcatgatcagtgcaatgaaggctgtgaaatccagatttcagaaccaaaaaatttattcccgctagctgaaacaggcaataaacatatcttgatagctggtggtattggtattacaccattcttacctcaaatggatgagctggcagcacgtggagcagagtatgagctgcactatgcttaccgttcacctgaacatgcagctttacttgatgagctaacacagaaacatgcagggcatgtatttagttatgttgactcagaaggcagcatgcttaatttagatgaattaatttcatcgcaaccaaaaggcacacatgtatatgtatgtggacctaaacctatgattgatgcggtgattgattgttgtaacaaacaccgttaccgcgatgagtacattcattgggaacaatttgcctcaacagttcctgaagatggtgaagcatttacggtggtacttgccaaatctaatcaggaaattgaagtacaaagtaaccagactattttacaagccatcgagacattaaatattgatgtggaatgtctatgccgagaaggggtttgtggtacatgtgaaaccgctatcttagaaggtgaagcagaacacttcgatcaatacttaagtgatgccgaaaaaacttcacaaaagagcatgatgatttgtgtatcaagagcaaaaggcaaaaaattggtattagatctttaa

SEQ ID NO: 57396 - DNA, 999 bp, Acinetobacter baumannii
atgttacaaggctcaacaatattagtaactggtggaacaggttcttttggtaatacatttgttccaatgacattggaaaaatataatcctaaaaaaataattattttttctcgcgatgaaatgaaacaatgggaaatggcgaagaaatttaaagatgataaacgtgttcgctttttcattggtgacgtgcgtgataaagaacgtttatatcgcgctttagatggggttgattatgttgtacatgctgctgcaacaaaaattgtaccaactgctgaatacaatccttttgaatgcatcaagactaatattaatggtgcaatgaatctgattgatgcatgtattgataaaaaagtaaaaggtgttgttgctctttcaactgataaagcaagtagtccaattaatttgtatggtgcaacaaaacttgcatctgacaaattatttgttgctggtaatgcatactctggtgaacacggtacaaaattctctgttgtgcgttacggtaacgtaatgggatctcgtgggtcagttattcctttctttatgtcaattaaagataaaggcgtgctgccaattacagatgaccgtatgactcgctttatgatctcgttagaacaaggtgtagagcttgtttggcatgcatttgaagatatggttggtggtgaaatttatgtgaaaaaaattccatcaatgaaagtcaccgatcttgctgcagtggttgctcctgaagctaaacaagaagttgtaggtattcgtccaggcgaaaaattacatgagcaaatgatcagtgtcgaagacgcttattatacttatgaatatccagagcattataaaatcctacctgtaatcaatgattgggcggaaacacaagaacgtattaaagacggtaaacgagttccagaaggtttccactattctagtgataataatactgaatggatgagtccagaagatttacaaaaatggttaattgaaaacgctgagaaagtaggaaatatctaa

SEQ ID NO: 57397 - DNA, 420 bp, Acinetobacter baumannii
atgggctttaattttcgtaagagctttaagatcgctcctggtgtccgccttaatgttagcaaaaagggaattagcagcgtttctcttggaggaaaaggtgggcgggtaagcgttggcaagaagggcgtacgctctacaataagtgcaccaggtacaggtctttcatacacctctcatcaaccatttaagcaaactagaactaacaattctattcaagagcagccaaacactttatttagtgaagttcctccagctttaccaacttatagacaagatagaaatgtttccctcattctaggtattggaatattttttatgccttatatattcgcttggtttactttaagagagggatactcatcactagccagattttctagctttggatggatgatacttataatcttactggtgagataa

SEQ ID NO: 57398 - DNA, 426 bp, Acinetobacter baumannii
gtggaaataaaagatatcgctctgaatttcaggagtgcactgaactccttaaaggctgatggggagctagctaatttttatggtcttaaaaattttcccacaggtgcttgcggggatatttccgacctttttattatttatatgcaacaagaatatagtcttaatctggaatactggacaggatactttgaagatgaacgctcacatgcttggacaatactgaacgacacttgtattgatttaactgcagatcaatttaactctgttttaggtgaatatagcgaagtaatagtttgtgatcgtcaagactatcctttaaataatctcctgattagacagaataaaggcgtgggtccaactgctacaagtattaattatcattggcaactctacataaaaataaaaaataagatcaaaagcctgtag

SEQ ID NO: 57399 - DNA, 804 bp, Acinetobacter baumannii
atgagtttagagcagacaaaagcaagtagtgtcacagctaagattattcaacttcaaacgtctattacaaagaccactacagctagcacactaaaaactaagctttctgaaatcagcagaaaagaacaggaaaatgcacagatccagaaaaaactttcagatctgcaaaaaaagaaaactgatatccaaaacaagttattaaaagaaaaccagaacttggctaaagctgaagcattagaacgcaaaaaattagatgctctagccaagaagcaacaaaaagaagagatcgaacatcaaaaaaaactgaaacgtgaaattgaaagtatcaaagcatccacccagcatatcactggtgccacggcgtccccttatctcgatgtcacacctgaacctgaatatgatttattcatctcccatgcttcagaagataaagatgactttgtgcgccctctagccgagacattacaagggctaggtttaaaggtttggtatgatgaattttctatgagagttggagatagtctgcgtcggaaaattgatagtggtctaaggaattcacgatatggaactgtagttctgtcagcagatttcataaagaaagaatggaccaactatgaattagatgcattagtggccagagaaatgaacggtcataagatgatattgccaatttggcataagatcaccaaaactgatgtgatgaactatagtccaaatctagcggataaaattgcattgaatacttcttttagcactatcgaagagattgctcatcaattggctgatgtcgtattagataaataa

SEQ ID NO: 57400 - DNA, 1137 bp, Acinetobacter baumannii
atggaaagaaatctcgaacaatatcgtacacctggacaagctctttcagctcttctaattgagaaggggtggaatggtagagtcttagctgggattttacaaattgatgagtctggcgttaataggctattacaagataaaaaatctatttctcctaatttagctattatttttgaagatatctttaaagtaccagccgaacagtttattaatttgcaaggtcaatatgatctagccaaagctagacttaaaattatgccggaccctcagcttgagtaccgtgctaagttattcggtagtctacccatagccgatatgattaatcgctcatggctaaatgtagaaaataagaaagatttcaataagattgagtcagagttattacgtctttttaaggtagattctttagaaaagataatagaaataacccctcatagtgcaaaaaaatctaattgtgatgatattgctacgcccgtgcagttagcgtggatcaatcatgtaaaaagaatcgcctcggaaatgattgtgccagcctatagtccagaaaaaggaaaaatggcagctgaaaaattaaaacctttactgtattccgctgaagaaattagaaaagttcctcgtattcttatggaacacggtatccgctttgtgattgtagaatcgcttaaaggatcaaaaatggatggcgtatgtctatggttaaatgatggaacttcaccagttattggaatgtcattacgttttgataggattgataatttttggtttgtattacgccacgagttagaacatgtcattcagggacacggtaaaattgtcccaaaaatcgatatagatattcaccctggtgaaagtgaagatgaggatgagaaaattgcaaatgaggctgcggcatattatgcaatcagtgagcaaaaaatgaatagttttatcgctcgtaaatatcctttctttgctgatatcgacattatgggattagcaaatactattaaagtacatccaggaattattgctgggaaacttcagtaccatacgaaaaaatacaatttatttagaaagcatttggttccaattcgaccaattcttacaccttcagctgtagttgatggctggggggatgtttatccacttgaagactaa

SEQ ID NO: 57401 - DNA, 495 bp, Acinetobacter baumannii
gtgaatcaaaaccaagcatttcaagaagctataaggctttacaagaggaaaaccgggctatcggaagttgatttaaaggaggtggcaaagtttgctgttgagcagctgggttataaacttccagaacctgtcgatcctttagatgttttagcaaaaaaaattgctgttgcagcgagagaggagactagaacagataagtcgacaggacgaccataccgagtaaaccatgcagtgcccaagcaaggctctcaacagtcattatggattgatattgatgaagctccacgcccattaatacaaaagtcattcatgaagcgaagagatggaattctcggtgatgcattgcagttatcattagatatggatcattggaatagcgtcaattcgaccgaagagccaattctaattcctatggactttacagaagacgtagaggaaagaaagaatgctaccaatcatatgaccgcagatacagaaaacaaaaaaccgatataa

SEQ ID NO: 57402 - DNA, 204 bp, Acinetobacter baumannii
atgaatttagtaaaaatttgggataaagaaattaaagggaggttgtgggccgttgaggatattcacggttgctacaacctgcttatgactcgccttaaggaaatcggttttgactttgaaaatgatttactggtagcagttggtgatctagtggatcgtggcatccagaacgaagaatgcataagcctgatcgataaactttga

SEQ ID NO: 57403 - DNA, 729 bp, Acinetobacter baumannii
atggatggcttccaaaggattggaggcttaattatgaatacctcccttacttctcttttgccttctcaacaaatgcttagttcagatatttcagctattactaacatccgcttagattctgtcaaaagaacaatcgaacgtttagctgaacggcgtgtcattactttaccaccaacggtggaaaagcctacagccgggcgtacaagcactgaatatgtattttcaggtgaacagggaaagcttgactcaattactgttgttgctcagctttgtcctgaatttactgctgctattgttaagcgctggtatgagcttgaaaagcggactccggcattcgacattaataatccacaacatcttcttaatgctatcgaagtgcaagcaaagcagaatctacaactcaattcagaaaacaaaatcctcaccaaagctatcgagacgattactcacaccgagcacggcgttaagttccaacaggcatgcaaaattttaaatactaagcagcatattttagccaaatggctacgtgaacatggttgggatcggtatcttaatgatgctcgtgcttcaacctactacagtgaaagtcgtggctattgtgaaactaaatactcccataaagaaggtgtaaagccttcaggtcaatcatacagttatacacagactgagttcttcatattgccaaaaggtatgcagatcctagctaaaaggtttggggagcggccatga

SEQ ID NO: 57404 - DNA, 1053 bp, Acinetobacter baumannii
atgagtaatattaaagatattaaaaatccagcccctttctatacattaaaggatgcagcaaaagagttaaatagaatcttaaaagtggattactacgatacaaagaagctattaaacatggccttagtgtacgatctgaagctttatatttttgctaaaggatgggaaggagtagcttattattctgaagatatgacaccagaatatgatgagcgtactgatgttgataaatttggtggatataccgatatacatatgagacacgatgacacaatagaaactattgtgaatgcgacacttaattcatttttgagcaaaggatgcttacttcaaattccaccagaagctatcaaaattttaactttagaaaaaaaatgcaattttgatagcaacattagtgattttcttaatttattagatattgccgactcttttacggcaaatcctcccaattactttttagaattatttaaaagcggaagcccttccactcccattacaaatcatcttgaccacagtaaaattgatatagatgtggttaaatctgttgttgatataatgatctatggaatacggcttaaatcaattagtaaatacatgactctaaatgattttgtggagccaaaagaaaaagttcacataactattgatggcaaaattacagatctcttgcttcaaattatcaatagaacagatattctcataacacattatcaacttaccagaatcatagatggtgtattggttatccgagacaaagaacagccaacttttgaagatttaataacacaccaaccatctaaaaaaccccaaggtaaaagtcaggcaaaaatagaggcacaagtggcagcaagagcgattgcgctacacttatggaaaaatgacaaagagcaaaaaataaaaataggttcaatgtgtcagcatgtctggaatacattgtgcgaaactgaacaccgagaacagctaccagataaaatagaatctttaaaagattggattacagatattgctcccgcatatgcaaaactgggaggcagacaaaaagaatattga

SEQ ID NO: 57405 - DNA, 342 bp, Acinetobacter baumannii
ttgtatttaccattaattgaagaaactattctaaaagttaatgaaaatattgaatttattgagcaaattggagtgtcagtgagttcatatagatcaatgataaatctcagtgatttagtattgtactcaaaattttatactcagactaaaatcgcagcttgtaagttagatgatatgataaatacaataatctatcctgaacacttaactgcagatgatatttctgaattaaacgatgactttgtggaaaacgttattaaggcagaaattccccttgatgatcttctaaaaatatcaatttattttagttttgatcaccaagaaagtagagatgttgcttga

SEQ ID NO: 57406 - DNA, 297 bp, Acinetobacter baumannii
atgcaaatagaggcggcgcacgtccttgcgggagtaggaaaagtcgctgtagcgcaaagtaaacatgccggaaagcttgttgatacgcgactaagcgaacttgtatacgaacaagcacctcttttacgccaaattcaggtggtaaaaccaaattggcataaacggtacaatattgacactgatggtttgcatcatggtgatcatgatggtcaggtacttgcgcctgttcgatatgatgctggtgatgtgaatggtgcatggcatgtgacatggcttccgtctgtgcttttggtttaa

SEQ ID NO: 57407 - DNA, 381 bp, Acinetobacter baumannii
atgagctttatcactgaacaagaagcgatagaacatgttgaaggctttgatgctttatctgccagtgataaggctcaattcctccaaatggccgaggcatatctgttagcacgtaacgtaaagccttatgaagacgttacccaagttcctgaacctctaaaaactgcctcatatcaaataatcaagggcattatgaaaggtgatctatatcaagggcaggaacaggcactaaaacgtaagaaagtcaaagctgatacggttgaaactgaaaaggaatatcaggacggatcagtaaagcttagtgcgattgagcaattcattcttgatttgattaagccttacagcaaacgaaaagctgtattttttgttaggaaaatctaa

SEQ ID NO: 57408 - DNA, 714 bp, Acinetobacter baumannii
atgtttaaaagaactttaagtcaaaagataaaggatgttgtattttactcattagtatttttcatcctttatacaattattgcttatcttcttgaaactaaatggctaagttcaactattgatttgccaaaacttaatgggattttaaaagatagtttaacattgacagctgcttttttagctccgggcgctgcatttatattatttactgactggagagagcaacataataaacaagttcgtaatgaatttggtttaaaggtatttaatcaatttgaaaaattttctaaagaaatagatcagttaggtttcatttatacagaacttgaatacctattacctgatgaagctaaagataaattggatccttttagaataccattgggtttagatcacccagttttcataaagaatgagcacttaatattaagttattttaaacgagtgcatataattcaagaagaatttaacactttaattgataagtttaggtattttggtgttgttacaaatcaattaaaacctatggcaccttggattaaatgtattttagaagattttgccaatatacatgatgagctgaatgatagttattcagaatatttacaattacttgaaattattgaagacaaaatcagcctatattcaaagcttagaagcgaagttgaggaaaaactaactttaaatatacttcagcaacttcaagaagagtaa

SEQ ID NO: 57409 - DNA, 369 bp, Acinetobacter baumannii
atgggatggaaggggaaaaagccgactagctttagtctggatgtggctaaaacagcagaggaaaaggtaaagaaaattacaatggatgctgttcagtctttagtggtttcaagtcctgttgatactggcgcttatcgtgcttcgcatatcgtttcaattggatctggtgattatggtgtccgtggacctgaaacaaatgctattcaggatgcagctattcaagccgtgaagtttaagttgggcaatttagtttatatccagaacaaccagccttatgcagagcgcttagaaaacggctggtctgatcaagcgccacaaggtatttatggcctcacgtttaactttatttctcaaaagtacggtggctaa

SEQ ID NO: 57410 - DNA, 534 bp, Acinetobacter baumannii
atgaaaaagatttttttgttgggcttaatggctttgttgggcgggtgttcaaccacgatgccaattaattatgttgcatcaccatctatccgtggacagggtgatattgctgtcggtaaatttcaatatattccagctcaaaaaggcttggtaaagaaaaatgaatttcaaaagccatctgctgcaattggaacaatgtatatgtccgataatgctgatgtattgttaaaatcatctttaacgaaagaattgatagcagctggatttaatcctaaagaaaatgcggaattaaaaattagtggagatattcagcaattcttgtatgactggattggatttattgaagtagatttttatttagatgtggaatatacagtaactaaaaatgatcaagttatttataagaaattaattaagactcacaaggcttcacctaaggcaatgggcggtacagactccgaagctgttcgttcggcaatatcaactaatattggtgagttattgcaagacttgaaaagtcaaaaaattatttga

SEQ ID NO: 57411 - DNA, 3951 bp, Acinetobacter baumannii
atggcacaagaatcccgtttggtcattgtaattgatgctaaaaatgcagaacgaaatgcgcgcaatctaggcaatgagttggatagcattgagcgcaaaggcgactttgcaagtaaatcaatggatagtttgtctgtggcaacgcgccaacttgctggctacatggctggattggttactgtaagtgctgccattaataatatggacacttatacgggccttcagaaccgtcttaagttagtgactaacaaccaagttgagctaaataaggctactgaggacactttccgaattgctcaaaagacatattcagcttgggattctgtattgcaggtgtatcaacgttttagtgataatgcaaaaacacttaatctcacaatggatgacactgctcgtttaactgaaacagtgtctaaagctgttgctatcagtggggcgagtgcatcagcagctgatgctgctttagttcagtttggacaagcattagcaagtggaaccttgcgtggtgaagaacttaactctgtaatggagcaaacccctgcattagcaaaagcaattgctcagggtatgggaatcaccgtaggcgaattgcgttcagttgcggctgaagggaaaattacatctcaagagattgtaaaagcactccgaaatgtagaaaaagatgttgatgcactctttgcaaaaaccgatatcactattggacagtctttgacgctgctcaacaacgagattactaaatttgttggggagtcaggaaagggctcaggtgcagcacaagttttagcgggcaacattcagactttagccggaaacctagatgttttaacttctgcaatgatggttggtggtgcttattggcttggaacctacattcctgcaatttatgcctcaggtgttgctgtagctgcaaaaattaaggaattagctgctcaaacagttacgcaatatgctgcaattcaagccgagcgcgcagctgcagctcaacaagtaattagcactcaaacagttgttgcaaatacccaagcgactttagctgctattgcggctgagaaagctttggaagtacagcgattaaaatcccaaatctctgaaaaaggccgtgctgctacattaactcgtatggctgagttaaagaaaattgaggctcaagttacaagagaattggcagtagcggaaggtgcactggcaacggctcaggctagatcggcagcagctggtgcggcaagtgtagggattggtacacgacttttaggcttactaagtggtcctgttggtattggcatcacagtagcaagtttagcagccggatatcttttaatgcgagacaatggcgataaagccaatgacatgcttgagaagcaatcacgttatgcaggcatggcagctgatgaactcatgaagcttgaaggtgcacaaaagcgagcagcggaaggtgaactgacaaagcaactaagtttacagaatgctcaactatctaaatctcagaacgagttcttgttacttactcagtctatcactgacaacaataagcaaagtgctgaagcttatcgaatatgggcagaattaaaaactggcgttattgatgtaaaccaagctttcaatagattaaatcaactttcgttcatcagttcggatcaaattaaccagctggctgatagcaagaagaaagtagatgaaaactcaaaagctgttaaacaaacaaacgcagagttaaatcaggttcgcgcgtctggtgccaatgcaaaagcaggtttcaatgatgttagtcaaggtgcgaaaggagcagttcaagacgtaactgagcttaataaaaagcttaaggacatcaataaatcacttgcagatcgtaaatgggatgcagactttaagtcggttttgatcactaaatatggtagatcagcagaagaagcagagcttctgttacagacttatcgagaaaaccagaaaaaaggttttgcaggcgtcacagttgaacaagacaaaattattaaaggcattattagtcaggaaagtgctcttgataatcttgtaaataaggataaggagcgcactaaagagcttgaaaaacagcaaaaagtgctttctgttaatgccaaagttcaggctaatgctgcaaagtatggttttgctggaattgagtctaaatataatttgccagctggtactttgtctgcgctacatatgattgaatcacgtggcaatgccagagcatataacaagactactggtgctacaggtgggttccaatttcttgaaggcacagctaagcaatatggcgtaaaagaccgatatgatttagctcagtctgccgaaggtgctggaaagtacatgtcttatcttttaaagctcttcaagggggatttagagaaggcagtacgtgcttatcatgcgggtgaaggcaatgttcaaaaaggtaaaggtattggcaagaataacaaccaatactggaaggattatcaaggctatatggctggtattaacggctatacagctggggatattacctctaagggatttgataaattacttcaagacgctacaaaaatggcagaagatcaggctaaattgcgccttcaactggaaaacgatgtagctgatgaagtgaccaagattagaaatgatcttgctaagaagttggaagatgttgataaagccaactttaccccagagcgcaaagctgaaattaaggcagaacttcaagcccgtgctgacaatgatattgcaatcgctcaacaagcgttaagaaccaagttggatgactataagcaattcaacttgaccgaagagcagttacttaaggaaagttttgatcgtaagaaattttctgcggcacacgacattgaattaagtaagtctgagcagaagcaagctgttgaattgctagaacagcaatatcaggatgagttggaattaatcaacctcacaaaggcagcacgccaagcgtcatatgatcaagctaatttaaaggcattgcaggagctaaaacaggagcgagacattttagcagcaccaatatggcaaagagctggactttctttacaatttggagaaagaaatgctctttctgaaaacgacgccactcttattaataagggtgacgaggctaaaatgaagctcaagcggaaagaaattgatcagcttgaatacaataagcgaattgaagatgctgttaggatccatgaagagaacaaattcaagatccaagaggaatatgcacagaaatatcaagatttgcagcaatcacagcatcaaactcagcttgaattgtatggttctctattgtcacaggcttcaacagtttggagcagtatgaccgagatggttaaaagctcggctggtgagcaaagttctgcatataaagccatgttcttaatgcagcaggcgattgcaattggtcaggcgataataagtactgagctagcagcaacaaaagccttagagcttggccctgttctaggtattccagcatctactttagttcgtggaatgggttatgcaagtgttggcctaattgcagcacaaacaatcgctggtttctcagacggtggttataccggtaatggccttaaacacactccagcagggattgtgcataaaggtgaggttgtttggtcgcaggatgatattaaacgttggggaggagtgagtgttgttgaatcaatgcgaactagctcacctagtggttatgcaaatggaggatatgtttctaataatactagtgaagctatagcagcccgacgggaggcacgacaatttgatgcgattaattcaaatcaagcacaaagcagttcgagtcaagttccaatcaatgtttatgtaacagttaatccggatggatcaagtaaaactgatacccaaaatgactcgaagcagcttgggcaattgatcggcaatgcggttagaacgattatccggcaagagcagcgacagggtggtttattggctaaatag

SEQ ID NO: 57412 - DNA, 273 bp, Acinetobacter baumannii
atgggaactgatgttaacccagtggcatgggaaaacgctgaaattactgcttacgcattaattaggaaccctaatagtaaaaacttactggattattatctagagtttggttcgtatttagataaaaaacatggtgaattctctgttagtagcggagaaaaaccggtatttaggttaggagataggtcatttattctaaatgatttaaatcaaccgtatttagaatctctaactagaattctttacgaacttttctacaaacaccaattctaa

SEQ ID NO: 57413 - DNA, 327 bp, Acinetobacter baumannii
atgaaggcaattcaatttaagaaaacaggccaatacaccggtaatcatgatgaagtaacacgtttactgggcggcacagtaacctatgttggtcaacgtggaagagaggcaaataagacttatgaacgagatggggaaactttccctatccaattcgataattggcttgtagatattgatggtgtaatttttgttttgagcgaaaagcaatatgaagctcttaaatcggtggctcataagcatatagggttaggtgaggcgattgcgcggcatgtcaatgagtacttaagtcaacaacagcgacaaggcggtttattatcaaagtaa

SEQ ID NO: 57414 - DNA, 336 bp, Acinetobacter baumannii
gtgaaaaagtacattatgacttttctgcttgctttattgattgctgtagttttctacataagtgcaaatttaattgattttaatctaattgaatatgcaacgggtttcgtctttggattgtcattcaccctcatttttaaaaaacaatctaagagtactaaaattgctgacttaatggacaagcaattaaaagaatggggagttcgtgaaagtaggcgggcaggtttattcgctccagatcaagatacgaaggatctagaaagttgcaaaaaacgttttaaagacagatcagaacctatgaaaattgattggccaaaaaatcatgagcaaccttaa

SEQ ID NO: 57415 - DNA, 327 bp, Acinetobacter baumannii; identical to SEQ ID NO: 56662

SEQ ID NO: 57416 - DNA, 795 bp, Acinetobacter baumannii
atgacacaatccttacatcctgccgctcaaaaaggcttcagctctgctgccgagctttatcagcaagttagaccaaattatcccgtagaaatagtaagttggctacaagatcggctccaaatccatgaaaattctactgttatcgatcttggatcgggtactggcaaattcttaccttacttaaaacagacacatgccaatattattgcagtagagccaattggcgagatgttacaacagcttcagcaagcctatcctgatattaaaactttacaagcctttagccacaatattccggtaaatgaccaacagattgatgcggtcatttgtgctcaatcttttcattggtttgacaacatagaaacattgaccgaaatccatcgagtattaaaacctcaaggacatttaggacttgtttggaaccagcgcgatgaaagtacagactgggtaaaagctttagcggattttttactaccactcgaaggtgatacacctcgttaccatagtgaaaggtggaaaaaggtttttgaagagcaaaatttatttacttttgacaatttaaatactttttcgcaatcgcagcatggtactgtcgaacaagtggtgagtaaacggttactttcaacaagttttattgcagcaatgactgaaaaagatcaactacagctcaaagctcagtttgaaaaaattgtttatgattttacagggctaagcccacaagatcagattgatttcccatatattacatatgcatatcattttcaaaaaaatacgtcgtcaaatcatagagaatag

SEQ ID NO: 57417 - DNA, 564 bp, Acinetobacter baumannii
atgaaaaaacaacgtttgatgatagctttgctggcgactttaggtatgggttcagcatttgcatcaacctcgagtgaatacaatattgccaatggtttgcttccagttgaaaaagatcaatcaatttctgtattacaaccatttcagggaaattttaggattttaggttcaaaaatttatcacaatgatgagcaagccaaattttcaccgattgattatgcggtaagttggggtttatttgctcaacctgaaatcgcgcgaaatatttcagtgaaacaatatgaccgctatttaaactggaaaatagcaaaacttcctgtaccagctgagcaagcgatgcagatggtatcgaatatgcacattattcctgcaaaccctgaaatcgcccaacaaattaagcaagttaaacgtggtgatttggtttatttaaaaggtgatctggtcgaaatcaaagataaagatttggtttggaagtcatctttgaccccaactgatactggcgatggtgcatgtgaacttttccgtgttcaatccattcactgggttgaaaaacaaaatatttaa

SEQ ID NO: 57418 - DNA, 1230 bp, Acinetobacter baumannii
atgaaaaatattcaaacgacagcgttgaaccgtacaacgttgatgtttcctttagctttagtgctatttgaatttgcggtttatattggtaatgacctgattcagccagccatgttggcaattactgaagatttcggtgtaagtgcaacttgggcgccgtcttcaatgtcattttatttattaggtggtgcatctgttgcatggttactaggacctttatcagatcgattaggccgtaaaaaagtacttttgtctggtgttttattttttgccttgtgctgttttttaattttattaacgcgacaaattgaacactttctgacattacgttttttacaaggtattgggttaagcgtaatttcagcagtgggatatgcagcaattcaggaaaattttgccgagcgtgatgcgattaaagtcatggcacttatggcaaatatctcattgcttgcgcctttgctaggacctgtacttggagctttcttaattgattatgtttcatggcactggggtttcgtggcaattgctttacttgcactgctgagttgggttggtttaaagaaacaaatgcctagtcataaggtgagtgtaaccaaacagccttttagttatctttttgatgactttaaaaaggtatttagcaatcggcagttccttgggttaacgttggccttaccgcttgtaggtatgccgcttatgctctggatcgcgttatcaccaattattttggtcgatgaactgaagctaacgagcgtgcaatatggtttagcacagttcccggtatttttaggtttaattgttggtaacattgttttaattaaaattattgaccgtttagctttaggtaaaactgtcttaattggcttaccgattatgctcactggtacgctaattttaatattaggtgttgtctggcaagcctatttaattccttgcttgttaataggtatgacactcatttgttttggtgaaggaattagcttctcagtgttgtaccgttttgcactcatgtcatctgaagtgtcaaaaggaactgtagctgctgctgtttcaatgctattgatgacgagcttttttgcaatgattgagcttgtacgttacctctacacccaatttcatttatgggcttttgtcttatctgcttttgcatttattgccttgtggtttactcaaccacgtttagctttaaaacgagaaatgcaggaaagagttgcacaagacttacattaa

SEQ ID NO: 57419 - DNA, 678 bp, Acinetobacter baumannii
atgttgatacttgatcaattcaaacaggctgctttaacagaaaaaattgctactttaacgagtacagttattttgataggtatttcttataaattgggatactacttcacaagattacttgatagtttgtggataattcagtttttcaatgtttttgatttggcatattcagcattaaaactagtaattatatattttttaattcttatctttcatgacaaggtttttgttgaggggagcggtgaaagaaatattttaaaatttggcttaggtttaattgctatatgtctatattacatatacgaaatgataactgtaggttacgcttatagtttcttctttgcagttgctctatttttaggaatattttttacttttacattatataactctaaaccttttgtgaaatatatcgcaatcgtgttcttaattatagtaattccttttcttcaaggtttatctgatatacaaaaaaatatacaccaagcagatttgccaagagtttcaattaaagatagttcagcaaaggaagattggaggtttttagataaggcaaatgataaattgatacttcttaaccagaataatcctaaagaaattaaaattgttggaatggatgaagtaaaaaaatttactaatagtagtgacaataaaatcaatggtaagatcaaaaattaa

SEQ ID NO: 57420 - DNA, 909 bp, Acinetobacter baumannii
atgccatcccaaaccaacttggcttcaacttatgtcttgcttgtatttatctgggcaacgacacctttagccattgtatggagcgtatctgacttacatgtcatgtgggctttactgttacggttttatatagctttgcctctgtcggttattgttttacttgttctaaaaacttcttttccaactcataagcaagctttacatagttattttgcagggtcttttagtttaatcggctcgcaaatttttacctatgctgcgacccaatatttaagttctggcatgattgccttgatgtttggtctagcgcccattatggctgggttgattggtcgttttgcttttggtcagcatctttttaaattgcagtggctaggtatggctgttgctgtttgtggactagcgatcatttgtttaaatggttcaaatcaacatgtgcatccatttggtattatcttaatgttggtcagtgtttttgtttattcattttctatattttgggtaaagaaagtgaatgccaaaattcagccaatggctcaagcgaccggttcgatcttggtttcttcaattttggcaagctgccttattccatttatttggcaatatgcaccgactcatttaccacaagctaaatctttatttgcattaatttatacagttctgatggcttcacttgtggctatgttctgttatttcaaacttgttcagaatataaaaccgaccactttatcgttaacgacagtcattacaccaatgctagcaatgatcattggagctgttttaaaccatgaacaattgtcgattatggtttttgtgggagctttcattatcttatttggtctatttctatatttttataaagacattcaagcaaatcgtaattttgctcaacatattaagtctaagtag

SEQ ID NO: 57421 - DNA, 258 bp, Acinetobacter baumannii
atgaaaatcactgatgctgaagcttcggtgcccggtaaaggttaccgaacccaaaatgaccgttatggatctccattatcgggtgatggcggtggatggggcgaacgtggtaccaagtctaccaatggtggaacatggaattggcaataccatggaacgactgaaggccagccggggccgggtggacctgcaattgttggggtggcaccgcaaacaactcaattgactaacggagggaaaatcttacaaacactttaa

SEQ ID NO: 57422 - DNA, 297 bp, Acinetobacter baumannii
atgtcgaaacaaactactccagagtttcttttcgagccaaagctgcttccaatgcagcttttcgaaaagttcattgtgttcaacgtaaatgccgggtatcgcaggaaaggtacaccgcatggcgtgaacttaattaaaggtaataaagccaccctttcagtaagcaacgaaggtgtgatgaacaaagcagctcaagagcgatacaaactaatgcttttgaaatatttcaaagaaggtcgctctgcaatggatgagctggaccatgaagttaaacgtatttatagaatggtggcctaa

SEQ ID NO: 57423 - DNA, 705 bp, Acinetobacter baumannii
atgaaaaaaaacatttttattattacgggattattcttatctttatcgagcactatttatgccgctacaattcgtctttcaccagtaacggtggaaattttaagtaatcaaagtgcttcttccattagtttatataaccagtcaaatgaaagtaccgatttacaggtgcgtgtatttgagtggagtcaaaacaatggacacgatcaattaacccctacggatgaaattgcggttagtccaccttttttaaaattacaacctaatgactcttataatttacgtgtagtgagggttaatccaacaccagtttctggtgaaaaaacctatcgtattattattgatgagctaccaaaacctatggatagccgcaaagttagtcaaggtgtaaatgtcttacttcgctcatcattacctgtatttgtagtgaataaagatgcgattactcaactaaattggaaaattgataatagtcaaaaaaccacttctttaaatatcagcaatattggaaacaggcatgcacttttaaatgacttaaaacttgtagatctaacagcaaataagagttactccattaaagtaaatacagtgaatggttatattcttgcagaacaatcacgaagctatccgattagtaatttttcatatcagcccgaccataaatacagtatttccttaacagttaatggtaagaaagtcacgctataa

SEQ ID NO: 57424 - DNA, 198 bp, Acinetobacter baumannii
atgggggaatggtctgattactttgaggattttccagaagaagatccatgtaattatattaatggacaatttaacgaagaattggctcaacaacgaagaagccggttaaattcagtttcaagtactccttctgaaaaagagaggcgtctgagaaaagagcagcaagatttacttttcaaacataaaggtattaagtaa

SEQ ID NO: 57425 - DNA, 315 bp, Acinetobacter baumannii
atggaagagtttgagcagtggtacttagatacatattacaagccttatggttttgttccgcccgctaatctatttgaacgctatgaagatacgtacattagagaaaatgtttatcaacacaaccttgtatggcagcacctgcaagcgaaagtagttgaattgcaaaagcgtttagatggggcattaaaggagactcaatatgctttgcagtatgttgaaggggacatgcgcggcaatcatgaatttctacaaatggcaatgattcgaacctttaaagctttagagcaagtgctcaatggtggtgagcctaaatga

SEQ ID NO: 57426 - DNA, 351 bp, Acinetobacter baumannii
atgagtgagtttaaagtcggggataaggtcgtatttcaaaacagtaaatcagacgatacagagatttacactgtagaagctgttttagatggcggtagatttcttgggattaacgattacaggcaggcattttcatcaatcaaattcagacatgctgagccacaagaaaaggcagcagggcatcgtattgaatcaagcaacgatcaagcaataagtgattgtagtgtttcaaatttatgccaaaacgatacacaaaacagtttgcctatcaagcaagagaatcaagacatgggcgacgacttccccatagaaaaccacatttcgcctaactgccaatcgagggatgtttga

SEQ ID NO: 57427 - DNA, 276 bp, Acinetobacter baumannii
atgggtttatcaatggaagtggaagtatcaaccaaatcacttgctgattaccttaattctttgcctaacaaagaagctaaagagaagtttgcaaaaaaatgcggatcaactcttggttatttacgtttagtcgtaaacaaatttcgtttttgtagcgcaactttggcaattgccttagaccgagaaagccacggaaaagttagttgcgatgaattatgcccaaatgctgactttgactatgtaagacgtagcacaaaacccaagcgtaccgcatag

SEQ ID NO: 57428 - DNA, 765 bp, Acinetobacter baumannii
atgaatgttgtgtccatgaatcttaaagaaatacgtcgtaagaacttgcgtaagctaattgaccagttactttctgacaaaatttacgagcgtcaagaagactttgcagttgctgtaggcatcgacaaaacctatctctctcaaatgcttatggagcctgatcaaaaaggttcacgaggtgttagcgaggcgaaagcgcggcagattgaaaaagagttaaatttagaggcaaattttctggacctacttgatgaatcaagtccgtttggtaaaagtaaaattgagaatggtgttattcgtcctgcttcaaaccttgatgattcaggtgactatgtaattattccgatgtatgacattaaagctgcatgtggtaatggttatacaaatgaagatgaattgattaaaggcgggctggtttttaaagaaagttttatccgtaaatgtgggctttcgttaagccatgaagataccggtattattactggtgatggtagaagcatggagccaacaatcaatcatacggatgctattcttacagacctacgggtaaaaacgattgatcaagtcattagtgataaagtttacgcttttgttgcaaataaagagttaagaataaaaagactttttagaaaaaccaacggcggcttaagaattgttagtgataatcccgacaaagaaacctttccagatgagcacattgaaaaggaagatttagatgccattcaaattaaaggtttagtacgctggagatgcggagaagtataa

SEQ ID NO: 57429 - DNA, 480 bp, Acinetobacter baumannii
atgcgtactagttcacaactttttccagaaaacaaaagcgtgactgtggatgatcttgttacagcacgtagcgaagcgaaaaatgatatgggtgatatcaatgccctactgtccgcaattgagctaagtcttgttgaaaaactaaaggatcacaacttaagtaagtttgcctttgataaaacctttcgcttgattgatattgccaaaactcaagcagatttatctcaagattatcacaacggcgaacttgctcaattaactggtggtcaataccaacttgatgagctgaaaaataatattacacacctagaggtcgtcccagagacgcaaaaaatcaacataaatcatttagctccagcgaatgcagctatctctaaaacgcttaataccaattttgaaaagttggatataaacggttttccagaaaagagacgtttaagcattccagaagaaggatttaaacatgacgcacggcgttaa

SEQ ID NO: 57430 - DNA, 237 bp, Acinetobacter baumannii
atgacgcacggcgttaagtacgccgacctctctagggaggttctttttaaggcgtttttattatggcttacaaagattgggtatcgcggaattgttagaccttgtgggcgcatggagttttattgcgccacggtcagcaaactttttcctagaaacgtacacatcatgtatgacgggaaaatgaataaagcagctacccagctttataaagaatttgaaaatcatttaaaggcgtga

SEQ ID NO: 57431 - DNA, 474 bp, Acinetobacter baumannii
atgaaaaaaatgaataaagtgcttattggccaccaaattgagcagtttaaattgcattgtctaaagctatggtttgtaggtgacctggcagcaacttatcaaaattcggatctacttgattacttcattcatgatagtggatttgtttattggtctaaggaacaaattcgtcaactttgggatttttggcaatctgcacaatctaataaaccaattggggattatccagtttactcagttgttggtttagatctagaggttaatgaaccacatttaatactgggtgatgattatctaatggttagtgaatgttttcatacaaatgatggtgatgaagcacaagagaagcttcagcaatttaaaaaagcttttcctaaggtaatggtcacaaataacgccattatttcattggagtacttgggtattaaaaagaaagagcttgaaaaagagcttggcattaccaacgagggctaa

SEQ ID NO: 57432 - DNA, 834 bp, Acinetobacter baumannii
atggcgattcagttcaaacagcataagccttggttactcggaattacgattttaatcgtagttctgggccttgtcggttaccgttatattaaaaataaacaagccgatgatgttttaacgattggcattagcccgccttatgcagagctattacaaagcgttgccaatgaagtagaaaagcaaggcgttcatgtcaaactcgttgaattttctgattggcgagcacccaatgttgccgtacaaaacggtgatattgatgcaaactttttccagcaaagcgtatttctacgtaatgctgttaaagaaacgggttatgacttacatgcatttggtgtgggttcaggaagtcatgtgggtttatattcaaaaaaatataaatcacttgaagatttacctttaaatgcacgtgttgccattccaaatgatccggttaatttagcccgtgctttaattttattgcatcgtgctggcttaattcagcttaaagatattaataatgaactttcaactactcaagacattatagctaatcctaaacaactgagctttgttgaagttgaaggcccacagacagcacatgcctataacgatgtcgatttaattttcggcttcccccactacttaaaaatggcaaaggtaaccgacccccatagcgcattatttttagatccaatcgataaaaaatatgcaattttgtttgtgacccgtcgcgattaccaagacaaaaaccaaaaacttgcaacctttgttaaagcattccagaactcaaaacaagcacaagatattctggataaagactttggtaaaggtatgtggtttcaaggctggaaataa

SEQ ID NO: 57433 - DNA, 309 bp, Acinetobacter baumannii
  misc_feature (295)..(304): n is a, c, g, or t
atgacaactttaaatctaatttctactcaagatattgctaagaatccattagttgtaattgatcaaatgattagtttctttaaacctaaacagccctttactgggcttttgaagggtagaactaataatgtgaaaacagccaaaggacaaaagatttctactgtattcgctttagttgatattgatcaagtaattgcatctcatacagcaactggtgcggaaaaccctaattatccgcaagaattgcagccacgagatcgtagtcgtgaatcctcacaagcatgggtacagaaannnnnnnnnngctaa

SEQ ID NO: 57434 - DNA, 1155 bp, Acinetobacter baumannii
atgacagaaggtgttggcctacctttatggttattagcggagttaacttatcgttgcccgctacaatgtccatattgctcaaaccctttagactacgcgcagcataaaaatgaactgaccacgcaagagtggtttgatgtttttgatcaagcgcgtcaaatgggagctgtacaactcggtttttccggtggtgaacctttggtgcgtcaagatctggaacagcttgtggcgcatgcacaccaactaggcttctacaccaacctgattacctcaggcatgggacttaccgaacagcgtatttctcatttaaagcaagctggcctagaccatattcaaattagctttcaagcgagtgatccggttgttaatgatgctttggcagggtcgaaacatgcttttgaacaaaagtatgaaatgtgccgacttgttaagaaatatgattatccgatggtcctcaattttgtaattcatcggcataacattgaccagatcgataaaattatcgagctttgtctagaacttaatgcagatacagtcgaactagcaatttgtcagttttatggttgggcgtttttaaaccgtcagggtttattaccgacacaagaacaactcatacgtgctgaacgtattaccaatgaatatcgggaaaagttaaaagcgcaaaatcatccttgcaaacttatttttgtagtgcctgattattacgaagaaagaccaaaagcctgtatgaatggctggggtaaaattttctttacagttgctccagatggtatggcgctgccttgtcacgcagcaagacaattgccgatttctttcccaaatgttcgtgaacaaagcctatcaaaaatctggtatgagtctaccggttttaaccacttccgtggtgatgcatggatgccagaaggatgccgtagttgcccagataaagaccgcgactttggtggctgtcgttgtcaagcttatatgttaacaggtgacgcaagtaatgcggatcctgtttgtggtaaatcgccgtatcatcaattcattgagcaggcacgtgccgagagcgaaattgattcctctctggaaaaattggtattccgtaatagccgaaattcaaagcaatttacggttcaacaaaacattccggttcaaaatattgtaaatgattag

SEQ ID NO: 57435 - DNA, 297 bp, Acinetobacter baumannii
ttgaaagaagactcggtacgtggtggtgtaacgttaactatttcccgtgaagatgaagttgcgattttccgtaaaaacccttcttggtggtggttacccatgccaaaaccgaaaatgccagtacatttagttgtaggaaaagagagtgccttcttaaaaagaggttttcctcaaatggcaaaacgtaaaatggggattccatttagtgtagttgaaggagggcatatgttccctctagagcatccgattgatacagtgaattatattaaggaacttattcaccgtaattcacgctaa

SEQ ID NO: 57436 - DNA, 3261 bp, Acinetobacter baumannii
atgattgaatcagacatagagctgatggcaataaaacaacttgaggctttaggttatagctatttatatggtcctgatattgaatcaaaaggtaaaaatcctctaagaagttataagcaagtcattttagagtctaaagtgctagaagcattgcaacgcttgaatcccaagttaagtggtgaaaaatgtattgaagcattaaaaagaattactaatattcagtcccctgatttactttctaataatcagaattttcatcgattattaacggaaggaattaatattgagattaccaaagagggtaatactcaaggtgagcttgcatggcttatcgattttaataacccgatgaataatgaatttcatgttgtaaatcaaattacaattcgagaggaccgttggactcgtcgtccagacatgattatttatgtaaatggtttgcctttgattgttattgaacttaaaaatgcaacgaatgaaaatgcaacagttgaagacgcttataagcaaatacagacttataaaagccagattcaatccctatttacatataacgctttcaatatcatttctgatggcttagaggcaaaagcaggaactatttctgcggatttaagtcgatacatggcatggaagactacaaacggtcaaaccaaggcaaaaaagacacaagcccagcttgaggttttgatccaaggattgcttaatccagttacattgctagatatcattcggcacttcatcgtatttgagtctagtaaacaagaagatgcaaatggcttaatcacaattaaaacgattaagaagatggctgcttaccatcaatactatgcggtgaatgctgcagtactatctactattcgagcttctgctgtaaatgcagagtctaaatcagcagaaattgcattgcagcagcagggaagaagtaaattagagctagtgcagcaacaagctgtaggtgatagaaaagcaggtgtagtttggcatacgcagggttctggtaaatctttatctatggttttctacactgggaaaatagtccttgccctagataatccaacagttgtagtcattacagatcgtaatgatttagatgatcaactatttgggacatttgcagcatcaagccaacttctcagacaaacaccaaaacaagctgaatcacgagaagagcttaaagaattactgaaagttggttctggtggagtgatctttactaccattcaaaagttccaaccagaagatggtggtagtgtttacgaagaactatcggatcggacaaacattgttgttatcgctgatgaagcacatcgctctcagtatggtttcaatgcaaaagaagtcgatgttaaagatagtgatggcaaagttattggtaaacgtactgtgtatggttttgctaaatatatgcgtgatgctctccctaaagcaacttatcttggatttacaggcacaccaattgagaaaacagatgtaaatacacctgctgtttttggtaactatgtagacatttatgacatttctcaggcagtagaagatggtgcaactgttcgaatcttctatgagagccgtttagctaaaattacaatcagtgatgaaggcaaagagttaatccagcaatttgatgaacagttcagtgaagatgaactaaaccagactcagaaagagcgtgcaaagtgggcaagagtagagggattaattggcagcaaagatcgcatcaaggctattgcgaaagatatagttgagcattttgaacagcgtctaattgcaaacgctacccaaggtaaaggcatgattgtcagtatgtcacgccgtatcgcagtagagctctacaacgagattgtcaaaattaagcctgagtggcatagcgatgatctaaatgatggtgtaatcaaagttgttatgacttcatctgcatctgatggagaggacatcgctaagcatcatacaactaaacagcaacgtcaaaccttagcaaatcgaatgaaagatgatgatgacaaacttaaactcgttatcgttagagatatgtggcttactggttttgatgcgccaagtatgcatacactttatatcgacaaaccaatgaaaggtcatagtctcatgcaagctattgcacgagtaaaccgagttcataaggataagattggtggattggtcgttgattatttaggtattgcttctgatctgaaagaagccttgtccttttattctgaagcaggtggtaaaggtgatcctgcacttatacaagatgaagcagcaacaatcttgcaagaaaaattagaagtcatagatggcatcatgcatggttatgattatcgagagtacttcacagcaaatacttcaagaaagctaaatatcattttagaagctgaagatcatattttaggtgtagatcaagggcaggggaaaaatagatttctaaatgcagtaactgctatgtctcaagcttttggtttagccacaccccatccaacagcaatggaatcagcgcatgtagtggctttctttcaggcagtaaaggcacgcttaactaaatttggtgatgggtcggggtcaatctctggactcagtaatgctcaattagaagctaaagttaagcagactattgatgaagctttagtaacagagaaagtcgtagacatctttgatgcagcaggtattcaaaagcccgacatttcaattctttctgatgagttcatgcaagagatgaaggactatcagcataagaatattgctttagaaactttgaaaaaactcttgaatgatgaaatcaaaatgcgcggtcaacgtagtattacccaaggtaagaaacttatagatatgcttaactcgtctattaagagttaccaaaataaagttcttactgcggcagaagtaattgatgagctgatcaagttggctaaagcaattcaggagtctgacaaacttgcagaagaattaaagctaactgaatatgaatatgctttctattctgctgttgctgagaatgaaagtgcgaaagagcttatgcagaaagaaattctgcgtgaactcgccgttgtactaacagcatcaattcgtaaaagtgttaccttggattggacaatcaaagaatctgcacgagctaaattacgagtcatcgttaaacgattacttaagaaatatggttacccccctgatatggctttattagctactgaaacagttttggagcaagctgagcagttggcagaggagttagcccaattagaagaaaatacagttgaaagtattgtttga

SEQ ID NO: 57437 - DNA, 1275 bp, Acinetobacter baumannii; identical to SEQ ID NO: 47200

SEQ ID NO: 57438 - DNA, 363 bp, Acinetobacter baumannii
atgaaaagtcacgatcatttgctcgataggcaatatgacgatgaacactacaattgtgttcactttgttcatgaagctgcaatggacctatatggtatagatcgggcggaagcgcttgaactctttatgcagcctaagggcaaaattacttttttatcttcacggttaaaacttttaaatccgctacccatgcccaaggaaggctgcatagtcgccttccatccgagacaaagaaataagcccccgcatgtggggctttttcgtgggcaaaagattcttcacctcatggaaagcggagtcacttatttgcctgaagaggttgtgatggaaatggggtttaatcgggtcagttattatgattaa

SEQ ID NO: 57439 - DNA, 642 bp, Acinetobacter baumannii
atggagcagatcagaccattcccaccaactgattttattgaccaagctgaagaagaggaagcaatccgtttaataccggcaccagacctaaagaaatgggttgtggccaactacttaacgataggtgggcctctttataaccccgatcatgatcacatagctgagctgcttcacgataatgacgagtttttagcattcgcgtgggcctcttctgcatataaaagcaagcaagctatggtgttaggccagtgcgaaaaagtcatgttcaatgttggtggctggcgtaaagcaagacaagagcaacaaatgcgcgactggtttggttttgtaccaacatatttaataacggtcgatgcatctttctgtgagcgtgcaaacgatacagagttctgttacttgcttgaacatgagctttatcacattggtgtgatgaaggacgaagaaggcgaaatcatttatagcgatagtacggggctgcctaagcattacttagctggtcatgatgtagaagaatttgttggcgtggttaaacggtggggaccaagtaagaatgttaagcgacttattgaagtcgcaaaaaatccgccgtttgtttcgaatcttgatatttcaaaatgctgcggaaactgcgtaatcaactga

SEQ ID NO: 57440 - DNA, 597 bp, Acinetobacter baumannii
atgacatttaacgaatggttggaaactcaaggtaatttcgcgtttcttcatgcaaattgctgtcgtattgcttttgagggcgggcagatgtcaatgcaagttaaagtggatggtttgaaaggtcagctcatcaaattaggttttactgataatggtggtccattaatgaaaccaccgttaggtatgccgccacgttttgatttaatagatgagatcaaaaactcattaaatgatttggctcaaaaatatagagctgaagcacacgaattaagtcttattagagattttgagaagtctcagatgtatagccattttgtaagagagatagaacaactgcttaaaggggctggaactcaaaataaatacgattgggctttgattcctgaacacgtcaactttatggccacagatgaggatgggatggcatatggttggttagttgagcctcatattgttggtaatgcttggagaaatcaatcacatctttcagcattttttaccttaacacgacgccaaaaccccttcagaggtgattggaaagactcacttgagaaacgtcctgattatgtagagcccgtgcttaaggatggtgcttga

SEQ ID NO: 57441 - DNA, 1002 bp, Acinetobacter baumannii; identical to SEQ ID NO: 51344

SEQ ID NO: 57442 - DNA, 174 bp, Acinetobacter baumannii
atggttggatcagtttcatatggagaatatggtttagctggagtaacaggtatcgccactaaaagggtgggtaataccgtgtatgtggggtattaccaccagtctggaggttccggagtttggggggatactttaaaattaccttattatttatatgtagcctatattccttag

SEQ ID NO: 57443 - DNA, 273 bp, Acinetobacter baumannii
atgaaatacttgataatattgtttgttttcttaagtggctgctctacatttattgagcataatagagttattccatttcctgaacgaactatttcacatattgaaattagaaaactaaatggaggtaatcccaaaatactagcttatgcggatattactggtgatacttgtgtcatatatttaagaaaataccctcaatgcttagcacatgaaataagacattgctatgaaggtaattggcatgaagggcgtgaaagtcaagaatggtgctaa

SEQ ID NO: 57444 - DNA, 1038 bp, Acinetobacter baumannii
atgcaaataaatcatagaaatattggtatacagtatccaccttatgtgatagctgagctttctgcaaaccataatgggcatttggaaactgcacttaaaattattgaggaagctaagcgctgtggtgcagatgctgttaagttacaaacttacagtgcggatactattacattaaacagccaaaacgaagagttcatgattcgtggtggtttatgggatgggcagtctctatatgagctctatcaaaaagcacaaatgccatgggaatggcataaaccgctttttgactacgcgcgtgctttagatattacgatttttagttcaccatttgatcgtactgcagttgatttacttgaggatcttaatgcgccagcatataaaatagcctcttttgaagcggttgatttaccattaattaaatatgtagcttcaactggcaagccaatgattatttctactggtatggcagataaagaggaaattggtgaggcgattcaagccgcttatgatggtggttgcaaagaacttgtagtcttgcactgtgtgagtggttatcctgctccagcagaagattataatttgctgactatggtcgatatgatgaaatcttttaatgttcctgtaggtttatcagatcatactttagataataccaccgcaattgcggcggttacattaggtgcttgtgttattgaaaagcattttactcttgatcgtaatggtggtggaccagatgatagcttctctttagagccaaaagagttacaacacttgtgccagtctgcgaaaactgcatggcagtctcttgggcgagtagactatggtagaaaatcaagtgagcaaggtaatgttaaatttagacgttcgctttattttgtgaaagatttaaaagctggtgaggtgattgacgaatcaagtatccgaagcgtacgcccagggttcggtttaccacctaaattttatgatgaaattttaggaaagaaagtaacacgggatattgtaaagaatagaccagtgaaattagaggatatcaactaa

SEQ ID NO: 57445 - DNA, 438 bp, Acinetobacter baumannii
gtgtataagagacagccctttagggcgaaagatctagctaaggatttagaaagtttttatgaaaacaatcttactaaacaagaaatagaagattatgaaaacaaagcatttgcaatttcagccgaaattttagcagagctaggaaatattaatttctctaagaaaaactttgtaaatattaagtttcacgataaatgcttaaatttatatagtgagacttataagttactcacaaatattattatgctttgtgatgcatggacctgtttagatttatgcaaaaaagatgctagtaggcatgaccaacttccgagtttgattgctcgtgaagatgttagcagtgcaattttttttcaatctgctagaaaatttctaggattatttgatgataatttaaaagaaattgataacttggcagatgaacatagaattaggtaa

SEQ ID NO: 57446 - DNA, 516 bp, Acinetobacter baumannii; identical to SEQ ID NO: 44116

SEQ ID NO: 57447 - DNA, 1356 bp, Acinetobacter baumannii
ttgaccaacgaatcttctacacttcaacgaggactaaaaaatcgacatatccaattaattgctatgggtggagcaattggtaccggattatttttaggctcggcgcaagtgattcaatctgcgggaccatccattattttaggatatgccattggtggcttaattgcttttttaattatgcgccacctgggagaaatgattgttgaagaacctgttgcaggatcgttcagccattttgcgtataaatactgggggaaatttcccggatttttagctggatggaattattggatgctctatgttctggttgcgatgagtgaactcaccgcggtagccaaatatattaattactggtggcctcatattccagcatggacttctgtcttatttttctttgtcgtgattacggcaattaacctaacaaacgtcaaattttatggtgagtccgaattctggctcgctattattaaagttgctgcggttatctctatgattgtttttggcctttatttgctatttacagcagatgtaggttcaagcatttcgtttagtaacctttggtctcatggtggattttttccaaatggctttagtggcctcttctatatgttggctttcttgatgttcgcctttggtggtattgaactgattggtatggccgcggcagaagcaaaagatccgaaaaaaaccattccaaaagcaattaaccaagttgttttccgtatcttgattttctatatcggttcactagcgatcttactttcattagtgccgtggaaccaattagatctaggcggactcgataaaagtccatttgttatgatttttagtcaaatgggtattggttgggctgcacacttactgaactttattattttaaccgccgctctctctgtttataacagtgggatgtttgcaaatagccgtatgctttacggtttagctcaacaaggcaatgcaccaaaaattttcaagaaagtaaataaacaaggtgtacctgtaccagcagttttgctatcggcattactcatttttggctgtgttcttttaaattactttgtaccagaagatgctttaagccacttaatgtacattgttgttggagcactggtattgaactgggcgatgatcagtatgactcaccttaagtttaaatcagcaatgaaaaaactcggtcaaaaaactcactttcctgcactttgggcaccgtttagtaactatttggttttaggttttattgctgtagtactctacattatgtggagtcagggctttaaagaatcagtgatgatgattcctatttggatcgttctcatgtttattttgtttaaagtactcaatgccaaagaacagtaa

SEQ ID NO: 57448 - DNA, 372 bp, Acinetobacter baumannii
atgttctgtacgggtggtattcgctgcgaaaaatcaacttctttacttcttcaagagggctttaaagaggtttaccaccttaaaggcggtattcttaaatatttagaagaaactcctcctgatgaaagcctttgggaaggtgaatgtttcgtatttgatggacgtactgctgtaactcatggtgttgaagaaggtgcaaacattaaatgtcatgcttgtggctggcctttaactcctgaagagtctgcgctaccaagctatgaacatggtgtttcttgcttgtattgtattgataaaaccactgaaaaacaaaaagctggtttccgtatgcgccaatcacaaattgctgccgctaaacgtaaacgtttataa

SEQ ID NO: 57449 - DNA, 381 bp, Acinetobacter baumannii
atgagctttatcactgaacaagaagcgatagaacatgttgcaggctttgatgctttatctgctagtgataaggctcaataccttcagatgtcagaagcttatctattagcacgtaacgttaagccttatgaagatgctacccaagtacctgaacccttaaaaacagcctcatatcaaatcatcaaggggattatcaagggtgatctatatcaaggacaggaacaggtactaaaacgcaagaaagtcaaagctgatacggttgaaactgaaaaagaatatcaggacggatcagtaaagcttagtgcgattgagcaattcattcttgatttgattaagccttacagcaaacgaaaagctgtattttttgtcaggaaaatctaa

SEQ ID NO: 57450 - DNA, 294 bp, Acinetobacter baumannii
atgacagaaacaaaaattgctgaactcgaagaacaactggcaacagtaaagagcgaatttattgcctttcaaaatgataccgaagcaatgaaagcacgtattgctgaacttgaatcaggtgaaggtggtcaaacacctgaagatgaccaaaaaccaagtaatactcaaccacaaccaattaactatgctggtctaaaagtagatgagcttcgagctgtactaactgaaaaaggcattgcatttgaatcaggtgctaaaaaagatgaacttttagcattaattccaaaggaataa

SEQ ID NO: 57451 - DNA, 399 bp, Acinetobacter baumannii
gtggttctgtttcgcattgaacccgctcgatctgtaaaagtttcaatttctgaaggagataccttccctgtaaatgtgggggcttcgggtaaaattcttcgcgcattttctcaaactgaagtagatgaaaatctacaacaagtccaaaagcaattttgggcaagttcatttggagaacgtgacccagaaacgtcctctttgtctgtacctgtatttagcaatgggagacagttacaaggggcgcttaccatttcagggccttctgaacgtttaacacaagaaaaaattgccgaaaatacttcgcttttacttgaatgcagtatccaagtgtcaaagtatttagcaggcagtatttatggtttagaagatgctataaaacttttaaaagctgcacattaa

SEQ ID NO: 57452 - DNA, 516 bp, Acinetobacter baumannii
atggctttaaaagtcggaattattaaaagctcagacgtatcaaaatggtgtgaatacaagggtgctgatggcgatgtacaggctgagttcaaagtccgtggtatcgcatacaagccttttcaagtagccattgaacgggcaggaaatcagatatcgtctaaaggctatgatgtgatggtcaaagatgaagatgccaagctttatcacgaattgttaatggatgcatgtgctgcccatttaatagaagactggaaaggtgtggtatttgccgaaatcgtagacggtaaaactgttgagtctgaaaagccatatacccctgagaatgcctcaaagcttcttaatcttggtgatattggtatttcgatctggctattcattaaagaacaggcccagaagattcaggaagaagccgacaaggataaggctttaattctgggaaagtcatcgagctctacaaataccaaaaaacgtatgcgtcgaaaacgccgcacgaaatcgaacaaatcaagttcttag

SEQ ID NO: 57453 - DNA, 603 bp, Acinetobacter baumannii
ttggtaaaagtctttgaagatattggtcaagtctttatttatcgtggtattcaagtgaatacaggtgaaatgacgatccagaccacaggcaaaatcactggtaactttggtttagtaggtagctcatttacgcgacagcaggttaatcctgttacaaatcctattccagcatcgactcgccctctggtgagtatgccaaatgttgaaaagctacttattaatggtcaatcaattcagggtaaagcttgtctgcagacacttaccatcaactttagtaataatctggaagcgatccgttgtatcggttctggtaagtacacgcctgagttttacttagagaaaatgatggatattggcgtaaatgctaatttcatgttttcagcaacatctgcttcttggattgatgctattaaaacccgtgatgtatttacattgaccttcgatattacagataccaaaggcagtaagtactcgtttaacttcccgcaacttgaagttaaggaagcaaatcaccctgatggtggtggcgatgacattattacaatagatatcaattttgcccaagtgcgtactagtccaacgattgtacgtgctcttgtgtaa

SEQ ID NO: 57454 - DNA, 567 bp, Acinetobacter baumannii
atgcctggaaatttaacaattactcgcttgcaaacctatcttaattggctacttaatgatctttatgaattaaatccattggtagcagaagatgctatgccagagttatcgaatattaaagatattgttgttcgagatccagtaactggaggaaatatagcctctactgcaggaaaacctacatttggtaagacgtttaatattgggaaagcagctatagaccttgttaaacaggctttaaatgacacaaaagatatatctgaccatcagttagagcaaatgatatcggcaaaattggtgatcgaatttaaaaagcctaaaaaagatgatgatgagcaaattaaaagagcatttggagcacttttgaaacccgtatcagacttagataattttgagttcatgactagaggaaataaaagaattatcaaggggaagaaaatattaagagtaaaagaagttacaatagaaactacagattcaaatcttctaaatgaggctcagctatcacaagagatgaatagatttattagagagttagaaaatgaacgtaaacaagctactgggtaa

SEQ ID NO: 57455 - DNA, 447 bp, Acinetobacter baumannii
gtgggtaacgaagatcctgactttattgggggaagttatgcatttatccaaaaatatacccatgatatggaaaaatggcgtgccttaagcgatgaggaacaagaaagagttatcgggcgtaaaaagttcaacgatattgagcttgatgatgacgagaagcctttaacagcacataatgtagtaagtaaagcgcatgatgcagaaggcaatgaactaaaaattatgcgtgcaaatatgcctttttcgaatccatccaaaaatgaatatggtactttttttattggttactcacgtaaatttagtacgacacgtcaaatgcttgaaaatatgttcttaggaaatgagcaaggtaatcttgatcgattacttgactttagtactgcccaaacaggaactctatttttcgtaccgacagtagattttctagatggcttgggtgacgagtag

SEQ ID NO: 57456 - DNA, 531 bp, Acinetobacter baumannii
atgcggaccatctgccaacactggaagtgtattgtctgcaagcgtccaggtaccgtcaccattgttcactgccggataatccacgccatccacagtcactacaactgtcgcagtaggatcatcaatcgtaccggtcaatgcaggagttgtatcgttagtcgatacatccgcgaaagttactaccggtgctacaagatcaacgataaagccgtctgtaccgtcaagtacatcgcctgtacccaagttacctgcaacatctgtgtagctgccatcagccacggcaatgcttggtgctgtgcctgtaccatccggtgtgaacactgctgtccaggtgatgttgtccgttgtagtcaggccagtcaatgtaccgcctacaaccgtgatgtcacttacatcaaagcctgcaactgcctcactgaacgtgaaggtaatgttggcatcttcacctgccgcaagtgcaaggtcatctgttgtgatcgcaagtgttggtgctgtcgcatcaacagtcactgtacctgttaccggagttga

SEQ ID NO: 57457 - DNA, 162 bp, Acinetobacter baumannii; identical to SEQ ID NO: 47991

SEQ ID NO: 57458 - DNA, 255 bp, Acinetobacter baumannii
ttgtttggttatggtgcgattggtttccaagatattggtgcaccagttggtgtagagactgaccgagacagcctagcaggtacagatattcttattaaccgccgtcactttgtattgcatcctcgtggcattaagtgggcaggtgatacaggtattgcacctaataatgctggtctagcaacagccgcaaactgggaacgtgtctacgatcctaaacagatccgtattgtggcattcaagcacaagatcaaataa

SEQ ID NO: 57459 - DNA, 264 bp, Acinetobacter baumannii
atgagtggatttgaaaacctgaaaattgctattactgaagatcagcccttaaatcttgtttgtgatgtactgatcgaaattggatatagcccaatcaataaatattcaattgagaattaccataagtttgtcaccacaaatatcaagggccatataacaggttggaatttaaatttgctttcagatacggattttaaaccaacctcattaagtgatttgatcaagttgcgtaataaagttaaagcggaaagtaaggaggggtga

SEQ ID NO: 57460 - DNA, 258 bp, Acinetobacter baumannii
atgcgagttgttgaagtctctcgaataacaccgtctgcaatagctcaagaaaggcttccagcattccaagaagaaacaagtattttatgcctacttaaagatcagcaaaaagggttttggtatccacgcccttacgctcttttgatcgaagttggctggtggataccacaaaaagaaatatttgtttgcgatggcgttgaagatgcgaaacacatcatttctcactggatgccactaccagaaccaccaaagaattag

SEQ ID NO: 57461 - DNA, 600 bp, Acinetobacter baumannii
atggaagaacaaatcaaaggcgcagaacctttaaagaacgagcgtcatgaactgttctgccacgaatatttaaaaacgttaagtgctcaagaagctggcaaggcagtaggttttaaaacgcgtcaacatgcatgggatgtgctacaacgtgaagaagttgaggagcgcatagcttacttaaatgggcaacgcatcaagcgcgttgatgtagatgcagactatgtacttaagcgccttgtagaaatcgaccagatggacgttctagacatcatggacgataactatgcatttaagcctattggcgaatggcctcctatctggcgccaatacgtatcaaatatcgaaaacattgaagaatttgacggccgtggcgacgataaaacacaagttggctggcttaagaaaatcaaatggccggacaaagtgaagaacctagagttgttaggcaagcatattgctgttggggccttcaaagagagtgttgagcataagcacagcgggtcagttgatcttaaaagtgttccagatgatgcattagataagcggatcaaagaacttgaaaataaggtgatgcaaaatgacaagagaggagaagcttga

SEQ ID NO: 57462 - DNA, 1452 bp, Acinetobacter baumannii
atgacaagagaggagaagcttgagtatttagcattgctggaagaaaaggcgcgacgccttgaagaatatagatataaagactttggcgcaagactttacccattccaaaaagaattagtttgggcaactaaacaatattcacaagtcatgttaatggctgctaaccgtgtcgggaaaacaatgaccggtacttatgtagacacaattcatgcgcttggacattatccggattggtgggatgggcatacttttgataaagctcctttaatctggttattagggtactcaggcgaaaagatcagagaccttttgcagactcctatttttggtagacgtattgagaataattggactggggggctaattccgcctgaatacattcttgagcatgagtcaatgacaggtacaccaaatgctatgcgtactgtttatgtgcgtcatggtggtggtggtgatgttcaataccaaacatcaaaagttcagttgtggtcctactctcaagggcagcatgcattgatgggtgacagtgttgactggtatcacattgatgaggagccgaaggatcaacagattttcccacaggttttgactcgtactgcaacaggcgatcaaggcagaggcggtagaggaattctaacgttcacacctgagaatggacgaactgatctggttattcagtttatggatactccatcaaaaggtcagtatctgattcaagctggttgggatgatgtcacacacttatctgagcaaacaaagcagacacttcttgaatcatttccaccacatcaaagagagatgcgtacaaaaggcgttccgatgcttggtcatggccgtatctatgatttgagtgaagatttcatcacatgcgatccgtttgagattccagatcactggatggttattgatggtatggacttcggttgggaccacccacaggctcaagtacagcttgcaatcgacttagaagcggaaactgtctacgtcactcatgcatggaaacagcggcaggtttcaccaaatgatgcttggggtgcagtcaaaggttgggcaaagggtgttcctacagcatggccgctagatggcctgcaaactgaaaaaagctcaggcaatcagcaaaaatcatattacaaagaggcaggctttaacatgctagctaatcatgcaacttggcctgatggctctaatggtgtagaggcaggactttttgaaatactggacttgatgcgaaaaggtaagtggaaagtatttaaaggacttagggtctttttcgatgagtttcttcaatatcatcgtgatgaaaaagggcgaattgtcaaaacaaatgatgacgtgcttgatgccactcgttatgcctacatgatgcgaagatttgcagttcaaaaaggcttaattggcaagccaacaggcgcaccacctccacctaaagccgcttcatcttggatgggataa

SEQ ID NO: 57463 - DNA, 420 bp, Acinetobacter baumannii
atgtcaaatgaatacccaaagatgctctacaagggcgatttagttaattttgaatacaccaccgccaattcagaagagcacgaagaagaattaaaagcagatggctgggttgagcatcgtgatcttgaagctgctaagccagaagtagaagtaattgcacaggcatctggttcaagtggcgaattagctgaggctaaaaagaaaattattgaacttgaagagcagcttgctacagcaaaaggtgagcacatatcacaaatcaatgaccttctaaaagagaatgcaacactcaagtattcagcaatggatgcaagcgagttgaaggccattcttgatgagaagggcattaaatatggctcacgcgatggcaaagatgtgttggttcaacatgttttagagagcgagttctcaaccgaataa

SEQ ID NO: 57464 - DNA, 756 bp, Acinetobacter baumannii
atgatcgtcagtaagattgtagaatctgctatgaagaagctaggaatcttggcttctcgtgaacgtgctagtggcgaggacatggctgatggcattgaatgcttgcaggatcttttagaccaatgggctttagataagctttatgtttacaaggcaagtactctaatcattccgcttaatggagcaggtgagtaccgcataggcaataaagcagacattcaagactgttgtgaatacgagattttaaattgcccagtatgcacaccagaggaaccagcagaagagccttgcgaatgtatttgtgggtgtactagtgagacgccaaaaccaaccatgtttgctgatatttctatgatatctgatgacgcttggcttgatgactgtaagattcagctcgcacgtaatacaaaccgtactccgccagtttatgcccctgttgagtactggcaagaacctgatgcttgggtgtttaaagttgaagaaggaaacttcaagcagcttaaattgaaggtttatacacttcctaagaacctcaagccaaaagatgaaatccctctaccacctcaatacaaacgtccattaaagctgactttagcaattgagatcgcttcaatgtttggtacagagccgccattaagtgtggtccaaaaccaaagcaatgcaatagaaatgcttaaatcaagcaattctgttcctgcatattcaagtaatgatttacctgtaggagttggatgctatggtgagcaccgttattga

SEQ ID NO: 57465 - DNA, 444 bp, Acinetobacter baumannii
atgaaaaagttaatattattattaggcttcagtgtttctaatttatgtttcgcagcagattgggtatatgttgcggctggtggaggccaaaatttctttattgataaaagtttttataaatatgatgcagctaacaaaactgtagatgtatggagtaaagctacccaaaaaaagttaaatgatgatctatactatactgaatccaaaacactaattaggtatttgtgtcctagcaaatcttcgaagaatttagcaactattagttatagtgaaagtgggagtgtaataaagtcatcaacaaagcctgctcccgacttctcgataatcttccctgatacaattgatgagactatatgggaagtagcatgctcaacaagaggaaagggttttaagttatataaacctgaaacagttgatttaaaatcagttggaataaatcaataa

SEQ ID NO: 57466 - DNA, 792 bp, Acinetobacter baumannii
ttggaagcacaagaagaacatgaagctgaattaaataccaatatagaagaattaaaagagcaaaagaaaaatcttcaaaacaacataaatcagcataatgcagaaattgaatctcttagttcacaaataaccgcaaaagataaccaactatcaaaattgaatgatgattttttagagctgcagaaacgctcaaaatatttaactgaaggtaatgagcgcctagaagaaagaagaaaagaattagaaaaatcagtaaatctatttccagataatctggaaggttttgtagcaagagcaactaaaactaaatggacttatggttttttagcatttattcctctacttattttgggatttattgtgaatctttcttgggaaactttaaaagattttacagcaatatcaacagtagatactttcgaaaaagcatggatcattctaattcaaagattaccctttacattacttataattaccttagcatcaatgtgtttggcttttctatataaaatggttcgtcatttaactgagattcaacagcaagagttgaatttatcaaaaattagtatgcttgcacgggatgtttctgatagtgaacatagttctctagaagaagaattaattcaaaaattacgtattgatcgaaaaatgaaactaataagagaatttttaaattcagaatttaatagatatcaaacatttattgacaaagaggagcaaattaaagacactaaatttataaaaatagacttaccattcaaaggtccttttatctctagaactaatgattaa

SEQ ID NO: 57467 - DNA, 288 bp, Acinetobacter baumannii
atgtcagaacataaaatactcgaagaagatttaggcatagatgtatatttctgtgacccacattcaccttggcaaaaaggcacatgcgaaaatatgaatggtttaattaggcaatatttacctaaagggattgatttaaatcaggcagatcagcattatttaaatcaagttgccatgtcactgaatactcgtcctagaaaggcgttagattggcttacaccattagagaaatttgctcagcttgttgattatcatatggcttttgaaactgtcgcacctcatgtttga

SEQ ID NO: 57468 - DNA, 288 bp, Acinetobacter baumannii; identical to SEQ ID NO: 57467

SEQ ID NO: 57469 - DNA, 1392 bp, Acinetobacter baumannii
atgactaagaaaattagttttaatgcttttgaaatgaattgtattgcccaccaatctcctggattatggcggcatcctcaagatcgatctgttgaatataaagatttagaatattggacagatttagcgcaaattcttgagcgtggtttttttgacggtatttttattgcagatgtgcttggtatttatgacgtttatcatcaaagtgctgaacatgctttaacaggtgcagtacaagttccagtcaatgatccgctacagattgtgccagcgatggcagccgtcacaaagcacttgggttttggtgtcacgacttctatttcctttgaacatccttatccttttgctagacgtattagcacgctagaccatttaaccaaagggcgagtcggttggaatatcgtgacgtcttatttggaaagtggttcgaaaaacttgggcctaaaaactcaggttaatcatgacaatcgttatgatattgctgatgagtatttagaagtcctttacaaactttgggaaggttcttgggaagaaggttcggtacttcgtgaccgcgaaaatggtatctttgctgaccataaaaaagtgcatccgattcagcacgaaggtaaatactttactgtaccgggcatccatatttgtgagccatcaccgcagcgaacgccagtactttatcaagcaggcgcatcttcacgcgggcagaagtttgccagtcaaaatgccgagtgcgtattcatcgcagcgccgtctaaaattgccactaaaaaagtggtgcagggcattcgccaaaaattggctcaagaaggccgcgatccgtactcagttaaaatttatgcacttttgtcgattgtcactgatgaaaccgatgcaaaagcacaggctaagtttaaagaatatcaaagctatggaagctgcgatggggctttaacattattgtcaggctggtcgggtgtggatttttcgcaataccagccaacggacaaagttgaatatattcaaaccaacgcgattcaatctttattagactcttatgtaaatgcagatccggaacgtgtctggaccattgaagaaattgcaaactggaacagcttaggtgggaatggacctgttcttgtaggttcggcagaaaccgtttcggatgctctacagcaatgggttgaagataccgatgtcgatggctttaaccttgcctacattctggcccatcaaacctttgccgatgtagttgagtttattgtgcctgagttgcaaaaacgtggggtatatcaaacctcatatgcacaaggaacattaagagaaaaactatttggtgctgggccatatttgcctgaaaatcaccgaggtgcaaaatatcgtaatctaaaagagttaaaacttgctgaggcgagttaa

SEQ ID NO: 57470 - DNA, 1296 bp, Acinetobacter baumannii
atgacaaatttaaattttgagcatcatctcggttcgttaactcacgctgcactgagtcaggcttcaatcatttcgcgggtatggggtgaaggaccttctgaacggtatgatgaattggcaagtaacttcagaccgacttttgcccgtattaaagaaggggctttaatccgtgagcagcagcatattttgccctatgaacaacttcaatggcttaaggatattggttttacacggttaagacttccaaaaactcatggtggttttgatgcaactattcctgaactatttgcattgctcattgaacttgcagaagccgactcaaacttaccgcaagctttgcgtgtgcattttggttttactgaagatgtcttggtgagtaaagataaggcgtttcaacagcgttggcttaaccgaattgccaatggcgaaacagtgggtagtgcatggtctgaaggcgggaaagagtcaatcgatcagtttgaaacgcacttatatcgagatagtgacggaaaaattcgcgttaaaggcaaaaaatactacaccacagggagcctatatgcagactgggtggatgttggggtaacagatttaaaaggagagtctggctcagttgttgttcgccgtgaagatgaaggtgtagaaattgttgatgactggaatggctttggacagcagcttactgcaagtggtacggcatatttccacgatgtattggttgatgaagctgaaattttacctgacgatgaccgttttaaatattcggcggcttactatcaactggttcaactggcaatcattacaggtctagggcgtgctgcaacctatgatgtttctcaagctgttgctaaacgtacccgaaactacacgcatgcgaattccctgtttgtaaaacaggatccgcaaattttacaagtagtaggacaaattcgtggcgcggcttatagtgcaggagcgattgttgaaaaagttgcacaaagcttacagcgtgcttacttggctgcatttcaaaataatgagcagcttgaagaagaacaaaatgcacttgccgagcttgaaagtgcgcagtctcaaacggtcattaccgatctaattttaaatacttccacgattttatttgacgctttaggtgcttctgcaacagacaaagatttaggtctagatcgatattggcgtaatgtaagaactttatcttcacataacccaagagtatttaaaaatcgaattgtaggtgattttagtgtgaacggcacattaccaccatatcaatggcgaattggtgaagtttctaaacaataa

SEQ ID NO: 57471 - DNA, 819 bp, Acinetobacter baumannii
atgtttatcacttctcaactgaacattatttataaaattattaaaaatcagtctatttccaccttggtaatagatcagttggaacagacttatgtgaaccttgaagcaaccttacttagagcgaaagtactcagggatttttctaaaactcaaaccgtgtatttaattcagtctcacattgagccacagcaaagcagtttggcttatctattctcgccatttatttttgcaaacttaaacaaagcagccatttatacaacaccggcgactccacctgtgctaaatatccttaataaatactatcaagctgacaagaaggtcgtatttaaggtagacgaagttttagaaagcctaaaaatatatctagatttagaattaatagagatgggagaagctgaatttatttatttaaatttaattaaagcattatgtcgaagtgatatctctacagtttttttaatcacctatttagagcttgatttagaggctttaaagcaacttgaacagttcttaaaaataaaaattcattgggtaaaagtcgtaaaagatgagggtctaaaagacttggatcagttggatatgtgtaaattattatttaaaaataaagatgaagtgtatgttcaattatgcgctctgtttgctcaaatgaatgcagcactagtcggcctatgcgatacctttactgtcaatcaaatgacacacttaattgatgacatgttttactcagagcatattttcgaaaaactttctgtctattcagaatatatgcaaaccttattgcaaagtcagcatagtcttcacaaaaaacaaattgcttag

SEQ ID NO: 57472 - DNA, 1446 bp, Acinetobacter baumannii
atgagcctcggtctaaccgctttagaattagcacgaatacaatttgcttttacagtatccttccatattatttttccggccacctctattggacttgcctgttttttggcagttttagaatggaaatggttaagaacgcaaaaccctatctataaagatctatttaaatattggattaagatctttgccgttgcgtttggtatgggagttgtttccggtgtcgtgatgagctatcagtttggtaccaactggagtgagttttcacgagtagcaggaagcattactggtcctttacttacctatgaagtcttgagtgccttcttcttagaagcgggtttcttaggaatcatgctatttggttggggccgtgttggtcctagagcccatttctttgcaacgcttatggttgccatcggaacatgtatttcgatgttctggattttatcgtccaatagctggatgcaaacaccgcagggttttgccatcgaaaatggcattattgtgccaaaagactggctagctattgtcttcaacccgtccttcccttaccgctttgcgcatatgggtgctgctgccttcttggtttcatctttattggtagtgggaacatctgcttggcacttggtaaaaggccgtcgtgatgaattggtgaaaaaatcattctcgatgggtttatggatggtacttgtgacttcttgtttacaagtggtgatcggcgataaccacggtttaaatactcgtgagcatcagcctgccaaacttgctgctatggaaggccactgggaaactaatcataacgagcctatgccactactgttatttgccattccggatatgaaagaagaacgaaatcactttgaagtgggcgttccatatttgggtagcttaattttgactcacagtttagatggacaagtgactggcttaaaagaattcgcacctgaagaccgtccaaactcgaccattattttctggagtttccgtgtcatggtgggtcttggcgtccttatggtcaccttatcactcattgctctttggttacgtaaaagaggaaaactctatgaaacatcatggtttcataaatttgctgtagtgatgggacctgcaggttatgtggcaatgctggctgggtggattactaccgaagtaggccgtcaaccttgggtggtatatggcattatgcgaaccaaagatggtttatcgcatactgtttcggcagatcaggtgggtctaagtctctttatttttgtagtggtttacaccatcgtttttggtagtggaatttactacaccttaaaactcattaataaaggccctgtatttatcgacacgccaaatatggaagcaggcggcgtaggacactttaaaacaccgatgcgtccacttagtgcagttgatgaaaatattgacagcaaacaaaactctggggagaatcgtcatgattga

SEQ ID NO: 57473 - DNA, 1005 bp, Acinetobacter baumannii
atgattgatctttctttaatatgggtcggtattatcggtttaggtgttttaatttacgtggtcatggatggctttgacttaggaatcgggattatgttccccttcattaagaatagccaagaacgtgacgtgatgatgaataccgtcgctcctgtctgggatggtaatgaaacctggatggtacttgggggtgctggcctgtatgcagccttcccgctagtctattcaacggttttatctgcgctctacctgcctattattttcatggtcattgccttgattttccgtggggttgcttttgaattccgttttaaagctcatcggaccaaacacctttgggacttagcttttatttggggttcggttttaacgagcttcctccaagggattattttaggggcctatattcaagggattaaaaccgaaaacggtatttttgccggtggcccttttgactggcttactgcattctccattttcacaggtattggtgtagttgccatgtatgccactttaggctgtggttggctcattttaaaaactgaaaaaggcttgcagcaacgtatgtatgagctgatgccaaagttaattattgcgctgctcattatctttggtgccgtcagtttatatacgccgttaacacaccccgaaattgcagatcgctggttctctttaccaaatctgttttattttagtccagtgcctattttggtcttactatttgttggcctgattttatcggcatgtaaaaaacagcaagaccacaaaccatttatatataccttggcattggtcttccttgcctttactggttttgtgattagtttgtggccaaatatcattccaccatcagttacgatttggcaagcggcagcgcctcattccagccaaatgtttgctttagtgggtgcgcttattttgattccaatcattattacttacaccattgtgtcttactgggtattccgtgacaaagttcgtgtaggtgatgaaggttatcattaa

SEQ ID NO: 57474 - DNA, 135 bp, Acinetobacter baumannii
atgaaaaagtcgtcagttaaactcagtcaaacccaatggtttattctgttatggcttggtggttttttagccttagctgtgattgcgggtttgtttaaagtgatattgatttatgctgccccttacttaaaataa

SEQ ID NO: 57475 - DNA, 1419 bp, Acinetobacter baumannii
atgtataaatcagaacaactcgcccatagcattcgccaacttattgaaagcggcactttaaatgcacatgagaaattaccttcattaagagatcaggtccaacgttctggttttagtttaatgactgtgatgaatgcttatcaggagcttgaatcacaaggtctgatctattcaaaggaaaagtctggctattttgttgcggagcaaattgcactaaaaccactggaacaatattcggtcgtttcactcaattctaaaattgaaattaattctttagtttttaaataccttaaatcgattcaacatgagtctgttgtgccttttggttcagctttccctgatagtcaacttttagctgctcccaaacttattcaaattatggggcaacttgcacggcaaaggcaaagctatgaccagacagcaagcctacctcccggtaatttagcgttaagaaaactgattggtcagcgctattgtatgcaaggtatacagaccgatccagatgacattgttattacatctggaggattagatgcgctcaatctttctttacaagcagttgctaaaccgggtgactatattctattgcaacaaaccgtgttttacggtgcttggcaagctgctgaacgtttagggcttaagatcattaccattcccgaacatccacaacatggttttgacctagaggcttttgagcaggttattcatacatatccaattaaagtatgttggctcatgttaaatagccacaacccgatcgggtttacagtcagtgatgagattaaatataaaattgccaaactgcttcatgaacaccaaatttacttaattgaagatgatgtgtatgaagagctttattatggcgggcaaaaaccactttcgatgaagtactttgaccaacaaaatctggtactgcactgctcttcattttctaaaactttaggtgcaggttttcgggtaggttgggtctatgcgggtaaattttcggaccatatccaacacttgcagcttatgagtactatttcagtgaatgcactcatccaaaatgccttggttgagttcttgtctcatcatcattatgaaaagcatttgcgcacacttagactttcacttgaacgttataaaaagcagttttaccactatttgaagcaacatctgcccgcgacctgcgagatttattattacccaagcggttattttctatgggttaaattgcctcataaactcgatagcatgcaaatttatgaagaactcatccaacaagatattggtgttgcgccaagcccactctttagtgttttacccgcacagcagcattatttaagaatcaattgttcttttgagtggaacgaaaaaattcaagctgctttagatcaagtcatcaaaactattcaacaaagggtcgaagcaagcctgtaa

SEQ ID NO: 57476 - DNA, 918 bp, Acinetobacter baumannii
atggaaatagatgaagaactgactcttaaaaaaatacagatttttttggcctttatgcgctgtggcaacttgtctaaaaccgcggcagaaatgcaactgagtaatgtcagtgttcataaagcactacactctttagaaagcgctttacgttgtcctctttttaaaaatgaaggccgtaacctcattcctttaaaaagtgcttatgtatttgaagaacgggcgcaaaaaatcgtacaagacatttttatcaccgtaaataaaaccagagaagccgctggctttgcagccaaggttttacatttagggtctctttattctttgacggtaaatacaattccaaatgtgattagcggtctcaaactcagacgtagtgagcttgatattcaactgttgctgagttcaaatcaggatttggtgaaaaagctcaaagcaactgagctggatgcaatcattgtagctttaaatgaaaccactcaagatgatgactttgaaattttgccaatgttttcagacgacatttttttggcagtcaataaagattcaaaatatgccgattttaaagacattgatttaagtcttttaaaagaagaaacttttttaactttaaccaagggttttgcaactcataacgacagcgacatcatttttaaaaaagccggtttttcacctaaagttgctttgcaggtcaatgatatttttaccttaattagtatggttagctcaggtgtaggtttcgcactattacctggtcgtatttctgcggtttatgaaagttcggtaaaacttattccgctaaaacagcaataccacatgcaacaagaaatcggtctggtcttcttaaaaagtaaagaacgcgatccaaacttacttgctctgattgctgaatgtcgtatgtttgcttctaattttaaaagataa

SEQ ID NO: 57477 - DNA, 765 bp, Acinetobacter baumannii
atgatggacgctataattgctgtattatcaaaaaatgcattagttactgctcttgcagtaacgggtttaatgatgttcatttcccatttactctcaaaatatttgacgaagggaaaactacaaagctctgcaatcgcgattactttaggtttggttgtggcttactttgcaggggtttatacgcaaggaaccaaaggtgtttcggacatcgctattttttctggttttgcgctgttgggcggagccatgattcgtgatttagctattgcttcaactgcatttgaagttgatgtgaaagaagtaaagaaagcgggcaaaattggtctaattgcattaatgcttggttgtgttgtgccttttgcaattggggttttggttgcatggagcatgggctatcgagatcccatttcgatgacaacgatcggtgcaggcgcaatgacttatattgttggtccgattacaggaaccgcaattggcgcaagctctgatgtgatcgcactttctattgcgattggattaatcaagtcagttttctttatggtagggacgccactgcttgcgaaatttatgtatttaaaaagtccacgctctgccatggtctttggcggtttggcaggaacaaccagtggcaccgcagcaggcttagctggtactgatgttcgattggtaccttatggcgctttagttgcaaccttctatacaggacttggctgtttacttggaccttctgtatttttcctaacggttaatgcaatttttggataa

SEQ ID NO: 57478 - DNA, 402 bp, Acinetobacter baumannii
atgattatatatggaacagcaatattagcgatctgccatttattaggcgactatcttggtaacaccttaggcatggtattaggcgttaaagccaatgtcggtggagtggctatttcgatgattctgttaatcttatctaaagaattattggcaaaaaaaggttacttacctcaagtcacacaatttggcgtcttgtattggtcaggtatgtatattccgatcgttgttgcgatgtcggcaggtcaaaatgtcgttgccgctttatcaggtggcatgttagggctgattgtctctattgcatcgttgatcggtacggttttagtcatccgttatttaaatagaattagtggtgactatgaaacttatgaatggacgttagaaagtaaggaaaaaatagcctaa

SEQ ID NO: 57479 - DNA, 933 bp, Acinetobacter baumannii
atggcttcaatttgggtatatccgggacaaggtgtgcaaagaagcaatatgttgcacgatttacctcaaaccgcactggttaaagaataccttgagcgtgcatcggatgcactcaaagaagatgtcttgatgctagatcgtccggcagcattaaagtcaacgcgtgcagtacagctgtgtttgcttatttcaggtgtggtgagttcagctctattaagggctgaaaacttaaaacctgattatgtagcaggtctatcaattggtgcatggtcggctgcagttgtagcagaagttttagcctatgaagatgctgttcgtttggttgcctatcgaggtgaactcatgcaaaacgcctatccaactggctatggtatgacggccctgattggtacagaccgtgcagctgttgaaacatgggtcaaacaaatttatgaaataacgccagaggtgtttgtcgcaaatattaatgcacataaccagattgttatttcaggaagctttgaagccatgactcaagttgctgttttggcaaagcaacaaggcgtggtggcaaaaaaattagatgtatcggtgccatcgcactgtgaattattaagtcagcaagcaaagcaacttgcagcgtctatggagggagtgactttaaagcagcctaaaatacgttatttaagtggtacaacggctcgtacgcttagcaggccagaacagattggtgatgacttggcttttaatatgagtcgaactgtagattgggaaagtactatccaagctgcatgggagcgaggtgtaaggttgcagatagaagctttgccgggaacggtacttactacgcttgcacgtcgaacatttaaagaaggaactgtattgtcatttcagggaacacgtttagacagcattcaattggcaatgcaaaacaaaaataatgtttctttgtaa

SEQ ID NO: 57480 - DNA, 603 bp, Acinetobacter baumannii
atgaaacttaagctcgaagcccatgatttgttgtggggtatgacggtcgattgcttggctgatgatgctccgcattgggtgaaagaagtattgcaacgaggtgatcctgttgtagttcgacgggcaattactcctgtagatcaggtggctgtgggggtaagagggcaatttcgtcatcaacgatatgcagctcaaatgccacgatcagcgattagcagacagctcaagccagaagcgctgactcgcatagatacgcaacagtttgagcacttggcagaacgtttacagagcatttctagcattatgaaaaacttttcaggatgttggggatatacgggaagtttcggctttgaactagcaacgggcattaaaacagtaaatcagcaaagtgacatagatttgttgattcgagctgaacaaccttttgccaaaaagcaggcagttgagctactcgaaaattttcagcaagcagggctgaatgtggatatacagctacaacttccacaaggtggtttggcgttaaaagaatgggctgggaatagcggaaaagttctattgaaacgtcttgatggtgctgttttagtagaaaacccatggaattag

SEQ ID NO: 57481 - DNA, 828 bp, Acinetobacter baumannii
atgaatatcgccgttgatacattaaaagcatctactcgtggtgcacattggtttaaagcacttacgcagggttttaagacagttgaaggttttccagcttcgatttgggtggctgatggtcagattgatcagcaagcggtgcgcgtgattgccgttgtgcaagataccaataatctgttcccacgggcaaaacaaggagaagttggattattagaaggctggagtttggcaaaagtagtcgatgacgtgattcaagccgatacacaggctgaaactaaaagcgctattttatgtctggttgatgttccaagtcaggcctatgggcgtcgtgaagaattattaggcattcatcaagctttagcgggtgcagtagatagctatgctagagccagattggcaggtcatccaattgtgagtttattggttggtaagtcaatgtctggtgctttcttgtcgcatggataccaagccaatcgtattattgccttaaaagattcgggtgttatggtgcatgcaatgggtaaggaatctgctgcacgcgttaccttgcgctcggttgatgagttagagcaattggcgtcaagcattcctccaatggcttatgacattgaaagttatgccacgcttggtttgttatcggaactgttatctgttgaaaaccctgaacaaccgacaaacgatgatcttttgttagcgaaacaggcaattgctcaagcgtttaaagaaattaatgctgagcaatcgagaggactggaacaaagactgcatggccaaaaccgtcaaatgtctaaaaaggtccgtgaattattgcgtgagcaatggtcatga

SEQ ID NO: 57482 - DNA, 852 bp, Acinetobacter baumannii
atgactgatatcgagagtttgttaaataaacaagattttattgagctgagtgcgagagagcgtgctaaagcattattagatgaagggacttttcgagagttactcgacccatttgcacgtgttatgtcgccttggctcgttaaacagaatattgtgccgcaagccgatgatggtgtagtgattgcaaagggatctattcaagaacgcccagtggttttaatttctattgaaggcttatttcaaggtggcagtttaggtgaggtgggcggtgccaaaattgcgggtgccttagaacttgcggttgaagacaatctaaaaggcattccaacagctgcaattttattgttggaaacgggtggcgttcgcttacaagaagcaaatctgggtttggctgcaattgctgaaattcaggctgcaattgtgaacttacggcagtatcaacccgtaattgctgtggtcgcaggcagtgtagggtgcttcggcggtatgtcaattgcagctggactatgtagctatattgtaatgacacaagaaggacgtttaggtctaaatggcccacaagtgatagaacaagaagctggtgtacaagaatataacgccaaagatcgtccatttatatggagtattacgggtggtaatcagcgcttcactagtggtttggcagatgcttatgtagacgatgatcgccagaaaattcgtcaacaagtcatcgcttatttaactcaaggcgtacctcatcagcatcgtagttcaaattactcattctatttagaaaagctacaacaagttgatactgctgagcagattaccccagcacaagttcaagctttgtatcaaggagagcaagcatga

SEQ ID NO: 57483 - DNA, 300 bp, Acinetobacter baumannii
atggaaacacttcattttgaatttgtggccacagagccacctgtaaaaaaagcactagtaggatgcgttggctcgggcgatttagaaattttgatggaacccggtgaaaagggaaagacctctattcaggtagtgacttcggtagatggcagtgcagcacgttggcacaatctttttgaacggatttttactgcgcaaataccgccagcggtcaatattgatattcatgactttggtgcaactcccggtgtagttcgcttacgtctggaacaagcattggaggagattgctcatgactga

SEQ ID NO: 57484 - DNA, 885 bp, Acinetobacter baumannii
atgatggcacaagttcaatatcaaacgctcagcgatagtcagcttttggcaagtttagcagtcgaagcgttaattgatgaagtgaatctgacccctaagcccgccttggtagatcgccgtggcagtggtgcacatgatgacctgactttggagttaatggagcgctctgcgaaaagtttaagacctatgtttgatgcgatggcgcaagctgcaaagcatcatggaaaagtctgtttggccttgcgtgaagacattggagaaattggccgccaaggtgaaaagaccatgatgttggcgacaaatggtgtaaacacacatcgcggtgcaatttgggcattagggttaatggttaccgcagcagcattggcgcgcaccaatcaacagtacttatcggctgttgagctatgccagttagcaggccagattgctcagcttgaagatcgttttattccgaagcaggccttgagccatggtcagcaagtacaaaagaaattaggcatcttaggtgccaaagaacaggctcaacaaggttttccaactattgtgaaatttggcttaaagcagctttaccaaagtcgtagtaaacccatgaaagaagagttcgctcgtttagatgccttacttgccatgatgaccaatctgaccgatacctgtgtgctttatcgatctggaacatatggcttaaagcgtatgcaacaaggtgctcagcaagtacttgatttgggcggcagctcaagcttggaaggtcgacgtgctttacatcttttagagattgatttgcttcggatgaaagcttccgctggtggtgccgcagatttattggcagccacattgtttatagatcgtgttgagcagtcatctgcgaaaaataaaaaggaattttga

SEQ ID NO: 57485 - DNA, 1680 bp, Acinetobacter baumannii
atggaaggatcagttcagaataaagaacggttatggtcaaagcggcgtcatgccaaacaattaaaactagagatggcaaaccaatataccgatggtatggtgattccaactcaagacattattaaagttttggaaaccttaattacaccgggtgacaaagttgtactcgaagggaataaccaaaagcaggctgattttttatcgcgctctttggctcaaaccaatccagatattttgcatgatttgcatatgatcatgccaagcgtagggcgttcagaacatcttgatctgtttgaaaaaggtattgcgcgtaagctcgatttttcttttgctggcccacaaagtttgcgtattagtcagttaattgaagatggtttactagagattggtgcgattcatacctatatcgagttgtattcacgtttggtggttgatcttattccaaatgtagtgctctcagcgggctttatggcagaccgccaaggcaatatctatacaggtccaagtaccgaagattctccagcacttattgaacctgctgcttttagtgacggtatcgtgattgttcaggtcaatgaactggtcgatgacgtttcagatttaccccgtgtcgatattcctgcttcttgggttgattatgtggtggtggcagatcagccattttatatcgaacccttgtttacccgtgacccgaaacatatcaagcctgtgcatgtactcatggcgatgatggcaattcgcggaatttatgaaaagcataatgtgcaatcgttaaaccatggtattggttttaacactgtggcaattgaattgattttaccgacctatggtgaatctttaggtttaaaaggaaaaatttgccgaaattggacactgaatccgcatccaaccttaattccagcgattgaaaccggttgggttgaaagcgtgcattgctttggtaccgaacttggtatggaaaaatatgttgcagctcgtcctgatgtgttctttacaggtcgtgatggcgctttacgttccaaccgtatgatgtgtcagcttgcaggtcagtacgccgttgatttgtttattggcgcaactttgcaagttgatggcatgggccattcttcgactgtcaccaaaggtcgtttagctggtttcggtggtgcaccaaatatggggcatgatccacgcggacgtcgtcacgatacacctgcatggttagatatgcgtttgcaaggtgccaatgaaaccgatacctatttggcacgtggtaaaaagttagttgttcaaatggtggaaaccttccaagagggtggtaagccaacttttgtagaacgtcttgatgcgattgaagtggctaaaaccgcaggtttgcctttagccccgatcatgatttatggcgatgatgtgacccatttactgaccgaagaaggcattgcttatctatataaagcaagcagccaagaagagcgccaagccatgattgctgcggtagcaggtgtgaccagtattggtttaactcaagacccaaaaacgacagcgcgcttgagacgtgaaggtctggtggtattccctgaagatttaggtattcgccgtaccgatgccacacgtgaacttttagctgcaaaaaatattgccgacttggtgacatggtctgatggtttatatcaaccccctgcaaaatttaggagttggtaa

SEQ ID NO: 57486 - DNA, 915 bp, Acinetobacter baumannii
atgaattcaccagtttatctcaatgcacttcgtgcttttgaagccagtgcacgacacaaaagtttttctgctgcggcaaaagagttaaatgttactccggctgcggtggggcaattggtacgtacacttgaagattggttaggttttcctttatttcatcggcaaacgaatggcaaaaatcgactggttgctaccgaactggccgagtcggttttaccggatattcgggcggggtttgataaactgactttggctttagaaaaattaaaacaagattctctatcgggcgttcttaatattacggtgagtcctgcatttgctgaaaaatggctactaccaagaattgatcattttcaaaaacaatatccagatattgatattcgtttagacattaacttgaaaaccgtagattttttagaacaaaaagtcgatgtgggtgtcagatatggtcaaggacaatggcaaggtttagaagccgttaaacttatggatgaagaggtttatcccgtatgttcgcctacatttttaaatgaacattcatcgcttttaacgccgaacgatctaaagaatatcactttaattcatgatctttctatggaaaaacatcaacagtttccggggtggcaatcttggctaaaaagtgtcgggctggaagatattaatattagccgtggtatgcaaattaacagttcatcagccgttttacaggctgcaatggaaggtcatggtgtggcattagcacgtagtgtcatggcgcaaaaagatatacagactggacgattggtgcgtttatttcctcaaattcatttctcttcgtcattttcttattatttggtgtaccgaccagagtatgcaaatttgcctaaagtcaaaatctgtctagattggttttttgaagaaattcatcgaatataa

SEQ ID NO: 57487 - DNA, 675 bp, Acinetobacter baumannii
atgttgatccatgccgatttttcacaggctgtgattgtcaaacctgaagactatcactgggtgaaatctccccgtggggaagttgatcgtgtcatgctcgatcgtattggcgatgaaatagctcgtgcaaccagtttggtgaaatatgcgccccatacaaccttccctgaacatcgacatcatcatggtgaagaaatcctcgtactttcaggcgtatttactgaaaatcaaaatcagcactaccctgctggatggtatttacgcagtccccatcagtcgggacaccaaccatcgagtgaagaaggtacattgatttttgtcaaacttatgcaaattcctacgtcagaaacgcaaaccttacggatcaataccaacgacccagcacaatggcaagaaataggttcgcgtttaatttgcacattggttgatgcaagttatgaacacacttatttagaaaaactcaagccgcaacaactttttcttgaagaagctgagggtggaatcgaaattttgattacccaaggtcagttggttgataaagaaatagtttatgaaactggcacatggatacgcctacctccaaaaacacctgcccattttcaagcgggtttatctggtgcttctctttatgtaaaaaccggacacctagcctcagccattgctgaatataattaa

SEQ ID NO: 57488 - DNA, 1188 bp, Acinetobacter baumannii
atgcttcaaaatactatgcaccgccaagtattaattttggcgagttcccaatcccttttccaaaccgtttctgtcatggtcatgaccattggtggcttggctggggcaaatattgcaaataccccaacacttgcaacgctgcccatcgcatctatgtttttgggtacggctttaatgatgttccctgcctcaatattaatggcacatattggacggcgtaacggttttctattcggtgcttttttaggtgtgctcggcggcattatcgcatcaattggtattttttatagttcactcatgcttctggctctgggtacgctatgtgtcggggcctatcaatcctttgctcagttttaccgttttgctgccagtgaagtggcaaatgatgcgttccgctcacgcgctatttcttgggtaatggcaggtggaattgttgcagcactgattggcccaactttagcacgcttcggcggacctttattccagcatttagaatatatcggttcatttttaattattagtatcatctcacttgtggcaatgggcattttatctaacctacatattgccgatacagttgagcagaaatccaactttactgctggtcgtccgtggcaacagattgtctttcaacccacctatttagttgctttatttggcgcaataacaggttatggcatcatgattttaggtatgactgccacaccaattgctatgcgtcattcacaccatgaacttgggtcaattacgacagtcattcagctacatgtgcttggtatgtttctgccttcattctttactggaaacttaattgctcgctttggtgtgcttaaaatcatgtttgcaggtcttttattatttgcctgctatatcggatttgctctctcaggtattcagttcacatcttttgctatttctttaattttattaggtgtgggatggaactttttatttattggcagtacttctttactcacaggaacttattctgtggctgaaaaagccaaggcccaagccattaacgatatgaccgtttttgttgtcggtttgatttgttcgtttagtgcaggtgctttactggatttattcggctggaaagcaatgaatatggctttaataccatggctagtaattaccgcagcttctctcttctggctaagccaaaaaagagaaaaacagcttgcttaa

SEQ ID NO: 57489 - DNA, 594 bp, Acinetobacter baumannii
atgtctttgactacacctgttgagttattgggtgaacacgttattttaaagccgctagatgtaactcaagctgaagcgctcaaagaggccgtttgcgatggggaactctataatctttggtatacccgtgtgccaagacctgaacagatgactgctgaaattgaaagacgtcttgatttgcaaaaagctggctctatgttgccattttatattgaagaccgaaaaacggggcgagcgctgggcatgaccactctcatgcatattgaagaagctcatcgccgtgtagaaattggttcgacgtggtatcgaaagtctgcacagcgtacgcctgtaaatactgagtgtaaaaagctattgttggctcatgcatttgagactttaaactgtattgcggttgagttacgcacatcttcattaaatgttcaaagccaagccgcgattgtacgcttaggtgcaaagctcgatggtgtgctaagaagccatcaaattgtgaaagatgatattttacgggacactcatgtttatagcattttaaaacatgagtggcctgcggttcgccaaaatctagaatggctattgaataaaccgcgttaa

SEQ ID NO: 57490 - DNA, 636 bp, Acinetobacter baumannii
atgtatatccctgatgattttgcagaaaaccgtttggatgtattgcattctcttattgcagactatccatttggggtgctttttacgcatggaagtaatggcttagatgcaaatcatcttccattcgagctgcaagcaaatgaagggaaatttggcatgctacatgcccatgtgtcacgaaataattctgtttggcaggacattaaaaatggagatgaggtgttggtcgtttttcaagcaggagatgcttatatttcaccaaactggtatccatctaaacatgaacagcacagacaagtaccgacgtggaactatagggttgtgcatgcatatggcaaagtgacgattcgagatgatgaacgctatgttcgtggtgtagtggctcgcttaacccgcacccatgaagcttctcaacttgaaccatggaaaatgtccgatgcaccaaaggattatcttgaaccgatgttaaaagccattgtaggtattgagattgaaattaccaagctgcaaggaaaatcaaaactcgggcaaaacaaagaacgccgagacattttaggcgcggcagatggcctatcgaaatctggtcatcaaactatagcgaatgccatgtacagtgtggctgagttaaataaataa

SEQ ID NO: 57491 - DNA, 1491 bp, Acinetobacter baumannii
atggcaagaatggcaaaagttgtggaacttccgtctattgcaaagattgataagagccaaggaaagataagtgctcaactgactcaagctttacgcgaagctgtacaaagtggtgatttacagcccggcgatccgttgccttcttcacgcgaactggctcaaacacttggggtcgctcgcggaacgattatcgaagcttatgatcagcttttagctgaaggtgtttttgactctcaagcacgaacgggcacctatgtgtctcatgctttagctaaaaaaactacaccgcaacattctcaaaaagagaccacacctagcgtaatccctttaacgaagtcggcactctcctatgctcaagtgcttaaagagtttaaaccgcttcctcatgccccttttgcagtatctgttcccattgcccgcacccaaccgagcgacatctggcgtaagtttggtaataaatttagatctcgaggtgcaggtgctccttcgggttatggcgaacctcaaggcgtgctatcactcagagttgctatagcagactatgtacgcagatcccgctctgtacactgcgaacctgaacaaattgtgattactcccggtattcagcaatcactttatatttgcagccaaattttatttgaagcaaaagatgaagtttggattgaagatccagcttatcgtgggacaacagccatttttgagcatactgtgcaaaacattcggatggtgcgtgttcctgtcgatgaagaaggtattcaggttgaaaccggaattaagctttctaaacatgcacgtgctgcttttgtgacaccctctcaccaatatccacttggcatgccaatgagtctagcaagacgcacggcattattagcttgggcaaaacagcaaaatgcatggatcattgaagatgattatgacagtgaacttcgttacaacggtcagcccttcccatctttacaaggcatggcacctgaccaagtcatttatcttgggactttcagcaaagtcttatttccatcgcttaggcttggctatgcagtgttgcctaaagaactggtagctcctttttgtgggctcagagtattaattgatagacacccgcctgctgccgaccaacacgttttggctgcttttattcaagagggttatttagaacggcatattcgacgtactcgaaatgtctatgcagaagttcgagaatacattattgatctgattgaaaaatacatacctcaagaactggcttggttacagccgggcgatcaaggcatgcatatggtgttatggcttgctcaacatattaatgatattgacgttgcaagctcggcagtcgatgcaggtattgccatcaaagcaatttcgccgacattttcaaaagagcggcaacgttcgggtttaattgtcggcttaggcgattttgaacccgaactgatgcaacaagctatcaaaaaattatcaaagattattcaacaatatgacaggcctttttag

SEQ ID NO: 57492 - DNA, 690 bp, Acinetobacter baumannii
atgaatatctggtcaattctttgtctcatctggactttggtcgcttatgttgtggcaaagcgaatctatcaaaaacatccaaaactttggttatcacccgcaattagcgtgcctgtacttaccatcattttgatgacgatttttggaatttcataccaaacttattcagaagatacccagtggattgttaatttattaggtcctgcaacggtagctttcgctataccgatttatcgctatcgggaaacgattcgtaaaaaccttggggtcctttcgattgcaattattgtggggatgagtgttggtgtgatgtcagcctatgaaatggcacagtggttccactttagccctgaagtcaccaatagtttgatggcccgttctatttcaacaccatttgccatgattttagcggaagatattcacggttcggcagcattggtttctttatttaccgtcattacgggtttggtcggtatgatttgtggtgatgcgattttagcgattactaaaatccgttctaatgtggcaaatggggcagccttcggcaatgcagcgcatggttttggtacagttagagcacagcagcgcaatagcgaagaaggtgtgattgccagtttgactatggttattgctggtattttaatggtgctgattggaccatttgcgattcatctatggttgctgttgtag

SEQ ID NO: 57493 - DNA, 432 bp, Acinetobacter baumannii
atgagtactgaatctgcttctggaacatcctcacaaccatcactgttcgtgttagttaaacaaattctcattttggctggtttttggtggatcgggtatctcttacaccaaaaactcggtgtgcctgtctcggcaggtattttaggtatgtttttattgcttttatgcctgttctttaaaattatcaaaatggatcaggtggcaatgggagcaaccgtggttttaggtgagctattactgttttttgtgcctgtagtcgttgccgttgtccagtataaaaccctgtttatgaccgaaggatggcaaatcgtcttaagcattgcggttggaaccattttagtcatgttaagcacttcactgactattcattattacaatcgtttgaaggcttacttacaggctagaaaacgtcttcaacataagcatatctaa

SEQ ID NO: 57494 - DNA, 906 bp, Acinetobacter baumannii
atgctttctctaaaatcattacagtgctttgttactctggttaaaactaaaagttttacccgtactgctgaagagttatatctgactcagcccaccattagtaaaatattacaacaactcgaagagcagcttcaggtacagcttttagttaaacccgatcatggacgaaaaagacaaattgaattaaccgaaattggagagcgtatttatcaacatgcagtcgagcttcttcaggcagaacaaaacatctttcttgagatagaaaactatcaacaattaaaaacaggtactttaaaacttggcgttccacctttaggttcgcagctcctaacgactgccctatttgactttcatcgccaatggccagatattgaattggcttttatggaagtgggttcacgcggtattgaacaggctttactcaataatgagctagacgttggtgttttattgcaaccttttgatgaacaaacttttaatagcatcgagttatgtaactaccctttaatggtacttttacgtcgtgatgcaacttgggcaacacgcaaaaaaataaatctagaagagctacaacaccaatcatttttaatgtttcctgaaaatttctctttaaacagtattattctcgatgcttgtaagcagcatggtttttacccaaccattgcttgccgtaccagccaatggcatctcttggcagacatggtgttacaacatatgggaattgcgcttctccctcaatattataccgacatgcttgacccgactttatttgcagcagtgccactcgaaaaaccaaatattcagtggcacttagtcatggcttggaaaaagaatcttcctgtctcaccagcagtacaagcttggcttagcattgttcgtcaacattttcagcacattaaaccctaa

SEQ ID NO: 57495 - DNA, 627 bp, Acinetobacter baumannii
atgaataacgagcattttaagctgtatacagattcacaatttctaagtccctatgcatttacagtttttgtaggactacacgaaaaacaaattccatttgaaatagcaaccatcgacttagctcagcaaggccagtttgaaacatcttttgtagaaaagtcattaacagctaaagtgcctgtacttgagcataacgattttgccttatcagaatcttctgccattttggaatatttagaagaactttatccagacacagctatttttccaaaagatattcaagctcgcgcaagagcacgacaaattcaggcatggctcagatcggacttagtggcactaagaactgagcgtccaaccgatgttatttttattcagcccaagtccactccactttcagaagaaggcaaaaaagcagccgagaaacttttctttgttgcagaaaaacttcttgcgtctgatgctgaatttctttttggttcatggagtattgtggatgctgaacttgccctgatgttgcaacgccttattcaaaatggtgataccgtaccacagcgtttaaaaacctatgcattactgcaatggcaacgtccgtctgtacaaaaatggcttgccttgcgacataaataa

SEQ ID NO: 57496 - DNA, 861 bp, Acinetobacter baumannii
atgagtgattcaaactatattcctccacaagtttggcaatggactggagaaaaaaccgatttaaaccaacctacctcaggtgcgcgttacgagcatacacttccagtaggaaaacatccgctccaactctactctttagcaacgcctaatggtcaaaaagttactattttgcttgaagagcttttagcgttaggacataaagatgctgaatatgatgcttggctgattaaaatcggagaaggacagcaatttggcagtggctttgtagaaattaatcccaactctaaaattccagcattggttgaccatagccaaaacccgccattaagagtatttgaatctggctcaattttgctttacttggctgaaaagtttaaagcgtatattccgactgatattgctgcacgtactgaatgcctcaattggttattctggcaaatgggcagtgcaccttacttaggtggtggttttggacatttttatgcttatgcccctgttaaaattgaatatgcaattaaccgctttgcaatggaaacaaaacgcttacttgatgtattagaccagcatctggcaaaaaatgaatatttggcgggttctgaatatagcatcgctgatattgcggcattcccttggtatggcggtcttgttaaaaactgggtgtataacggcgcggagtttttaggtgtcgatcaatataaaaatgttcaacgttgggcagatgcgattttagcgcgccctgcggtacaacgtggccgtatggtcaatcgtacttttggtgatttagctacgcagttgcatgaacgccatgatgcgagtgattttgagaccaagactcaagataaattgcagaatcagtcttaa

SEQ ID NO: 57497 - DNA, 921 bp, Acinetobacter baumannii
atggacaaatttgataccttgcaactttttacccgtatcgtagagctgggtagttttagtcaggcagccgatcagctaaatatcccacgtgctacagcaagtaatgccattaaggagttagagaataacttacagtgccgtttgctagaacggacgactcggcatgtaagaccatcactagatggacaggcattttatgaacgctgcacacaaatattatcggaacttgatgatgccgaatcatctttacgcaatgtaattgctcagccccgtggtttattacgtgtcgatttatcaggcgcacatgcaactaaaattgttttacccaatatcgatcaatttcacgagttataccccgacattgaactggtaatcagtacgggggatcgcttggttgatctgatcagggaaggcatagactgcgtagtgagggcggggcgtttagatgattccactttaattgccagacatttggtcgatatgccacaagtcatttgtgcaagtcctgactatttaaataaacatggaacgccagagcaaccagaagatttgttatcacattattgtgttaatttcttctcgacatcaggcgggcgaaattatccatttgaattaatggtgaatggtaaaaaacaagattattttttgaaaagctggatcgcggtaaatgacgctgaaaactatgtattatctgccttacaaggggctggcttaattcaagtaccgcactaccatgtggcaaatgaattaaaaaatgagcgactggttgaggttttatctgaatgggaaagcccgaagatgtcagtttctgcactatatccgcagcatcggcagctctcgccgcgcgtacgagtttttgtcgcttggctgagtgagttatacacgggctattttgccaactttgaatacccgcaaaaatga

SEQ ID NO: 57498 - DNA, 738 bp, Acinetobacter baumannii
atgaatatttcaagaaaaacagctctggttactggcgcatcacgtggtattggccgtgctattgcagaacgcttagctcaagatggtttttatgtgattgttaactatgctggcaataaagcgcatgcccaagccactgcagaacatattattgagcaaggtggtcaagcctcagctattcaagcggacgtcgcaaatgaacatgaggtgagccgtttgtttcaagaagcaaaggccattaacggtcggttagatgtggtagttcatagtgccggtattatgcctatggcaaaaattacacctgaaagcctgccagatttcgacaaagtgattcataccaatttacgtggcgcgtttttaatattggcacatgcggccgaaacagtgccagatggtggtcggattattgcgctttcaaccagtgtaattgccaaatcttttccggcatatggcccctatattgcttcaaaagcaggtgtcgaaggtttggtacatgtgttagcaaatgagttacgtggacgcaatatcactgtaaacgccgttgcacccggcccgacaggcactgaccttttttacaatggaaaaactgacgagcaagtagcggctattgcaaaacttgctccattggaacgaatcgggacacctgacgaaattgctggcgtagtggccatgctggctggtccagatgggggctgggtaaattctcaaatcattcgtgtaaatggtggatttgcttaa

SEQ ID NO: 57499 - DNA, 510 bp, Acinetobacter baumannii
atgaacgctaaattaaatactgaaactccacaaagttttatctcaaatggttcaaatacatccttttcagccgaagatattcttgctaaagcacagcaatatgcacaagaacatgaactaaattttagtggcagtttatcacctgttgatgcatggcaactcgtacaacaaggagaagctgttttagttgatgtgcgtaccaatgaagaacgtaaatttgtgggttatgtccctgaaagtattcatgtcgcttgggcaacaggcacgtcatttaatcgtaatccacgctttttaaaagaacttgaatcaaaagttggtaaagacaaaaccattcttttgttatgccgtagtggcaaccgttcagcacaagctgccgaagccgcatttaatgcaggttttgaacacatttataacgttcttgaaggctttgaaggtgatctaaatgaacagcaacagcgtaatcagaaaaatggctggcgcatccaccaacttccttggcaacaagactaa

SEQ ID NO: 57500 - DNA, 924 bp, Acinetobacter baumannii
gtgactcaatggaacattaatgcggttgtacaaggtttacaacaagcaaggcatgactggcgtcagcagcaacacaggaccaaagaatttgggggccgtgaacttccatctaaagaagctttaaaggccattttagatgacctgtgcgggattttatttccaatgcgtttaggccctgccgacttacgtcaggaaactgaagattcttatattgcctataccttaaatcgggtgctaaccgccttacatgctcaagtacaactggctttaaattatgaagcaaaacgacatgtgggtcattcaagcccagtgcagcagccacaagaacttgctcaaactattgtgcaggatttcgccaacactttgccctctatacggcgccttttagacggcgatgtgcgagcggcttatgaaggtgatccggcagcacatagtgtagatgaagtattactctgctatccgggcatatttgcgattatctatcaccgaattgcccatcagctctatgctcaagtgcctttattgtctcgcattatttcggagttggctcactctgcaacaggtattgatattcatccgggtgcgcaaatcggtaaaggatttttcattgatcatggtacgggtgtggtgattggtgagacttgtgtgattggggaacgcgttcgtatttatcaggccgtgacccttggagcaaaacgctttgaaaccaatgatgatggtgctttgaaaaaagactatatacgccatccgattgttgaagatgatgtcgtgatttatgcaggtgccactattttaggccgtattaccattggtcgagggtcaattattggggggaatgtttggctaacccatagtgttgctgcaggtagccagattttacagtcaccgaatgagtcttatcaaaaaaatcatattgccggttaa

SEQ ID NO: 57501 - DNA, 933 bp, Acinetobacter baumannii
atggcgaaaaatacagacaaagcccaacttgcacttggagaccacgcggcccgtcaactggccaatgcaaccaagacagctccccagctttctacaattactccccgctggctgactcacttacttcaatggattcctgttgaagcaggtatttatcgcctaaaccgtgtcaataataccgatgatattcaagtagcttgtacacaacgtgatgaagcaactttacctcagacttttgttgattatgaccctgagccacgcgaatactttttaaatggtgtctctactgttttagatgtgcatacacgtgttgccgacctttacagcagcccacatgaccaaattaaagaacagcttcgcttaaccattgaaaccattaaagaacgtcaagaaagcgagcttatcaataaccctgaatacggattactagcaagtgtgacagatgaccaacgtatttcgactttaaatggcccacccactcctgatgatcttgatgatttgctacgtaaagtctggaaagaaccgggctttttcctagcacaccctgatgcgattgcagcatttggccgtgaatgtacacgccgtggtgtaccgcctccaacggttagtctgttcggttcgcaattcattacatggcgcggaattccacttattccatcaaataaaattcctgtagaagatggcaaaactaaaatcttgctgcttcgtgttggtgaaaagcgtcaagggattgttggtttgttccaaccgggtcttgcgggtgaacagtcaccggggctttcagtacgttttatgggaatcaaccgtaacgcgattgcgtcgtatctaatctcgttatattgctcacttgcagtactcactgatgatgcgttggcagtattagatgatgtggaggtggacaaatatcatgactacccagttaactacaagtaa

SEQ ID NO: 57502 - DNA, 1962 bp, Acinetobacter baumannii
atgactacccagttaactacaagtaatctgcaaggtagtccaacggggcctgaagtgactggtgttaatccaccagccaacttccctgatgagtccaccattgctcgacttgctaatgagtttttttcagcagtgccaagctcaagcagttcagcttctccatcgggccttaacttggatttacctgtcggagcaccacctcacccaccacaaccgggtgaaccattttctgcactcagtggacgtgcacccaatatcgcctttcagaaaagtctcaatccggaatatcctgagcatattccaaatttgccagactaccctgaacgccgaattgtagcgtctgcgcctgtggtgggtggagctaatttgccacgcccaccatttgaaccacatttaccacaagctgctcatagtgaacccaatgtgccacgcattgaaccaaacttacccactggtgcaggtgaatcaccttattattttttaaatgatttttctgctcccaatacagcagaaccatctgttaaaggtgttgaagataattattcggttgcacagtcttttcaattgccacatggtgaccagctgaaatcattgctgacggaagatcgttttgcaacgaacacgcctccccaaagttcggcaagctctgcattttattttttagacttgcctcaaactggacaaagttatagtcactatcaaccatcacagcccacttttgtagcaagcggtgctcaaccactcgatgtgcatgccatacgtcgcgatttcccaattttacaggaacgcgtcaatggtcgacctctagtctggttggataatgctgcgaccacacaaaaaccgcagcgagtgattgatcggattgcttatttttatcagcatgaaaactcaaatattcaccgcgctgcacatgagttagcggctcgtgcaaccgatgcctatgagcatgcaagaaatgtagttgcccgatttattggtgcaccctcttctaaagaaattatctttgttcgaggaacaaccgaaggcattaacctgattgcaaaaacatggggtgagcaaaaaattggtgaaggtgatgaaattattgtttctcacttagaacaccatgccaatattgtgccttggtatcaaatcactaaaaaaactggagcgaaattaagagtcattcctgtggatgacacgggccagattattttagaagagttaccaaaactgattaatgaacgcactaaactgctgtcaattactcaagtttcgaatgctttgggtacagtcacacctgttgctgaagtcattaaaattgcccatgccaaaggtgtacgcgttttagttgacggtgctcaatctgtttcgcacatccctaccgatgtacaagctcttgatgcagacttttttgtgttttctggacataaagtgtttgggccaacgggaattggggctgtctatgcaaaaccagagttgctagaatgcatgcctgtttgggaaggcggcggtaacatgattcaggatgtgaccttcgaacaagtagtttaccaacctgcaccaaacaagtttgaagccggaactggcaacattgctgatgctgttggtttaggtgctgcacttgaatatgtcgaaagtctaggcattcataacattgctcgctatgaacatgatctactcgaatatggtcaaaatgcgctgagtagtgtgtctggtttacgtctgatcggaacggcacatcataaagccagtgttatgtcctttactttacaaggctattcaaccgaacaagtcggtaaagctttaaatcaacatggtattgctgtacgttctggtcaccactgtgcacagccaattttacgtcgttttggtgtagaacaaaccgtgcgtccgtctttggctttttataatacaacggaagaaattgatttattggtgtcggtgttacatcaactaacgcgtaatagacgtagcaattaa

SEQ ID NO: 57503 - DNA, 639 bp, Acinetobacter baumannii
atgtggcagttgtatggacatgagtttttaacgctagctcttattcactttatggcggtgattttaccgggaccagattttgtgattacggtaagacaaagtgtacgttatggctacttaattggatgtctaaccgcaattggtattggtgtcggaatttcagtacatgtgttttatacacttgttggtattggctttttgattcagcaaagcgaatggttcatgtcactgatcagaacagcgggggcagcttacttagtgtatttaggatggcagtgtttacgtagccagccgaataccactattgaaattaatggccaagcaggtaatgacacgccaagtttatttaaagcttttacgatgggttttcttaccaatgcgttaaacccaaaagccactatcttttttctggcaatttttacgacggttgtaagtacgaccacaccaatgaaagttcaggttttttatggggtttggatgtgtatggtcaatgctatttggtttatggtggtgagtgtactgtttgcacagcctattgtacgtaaacggtttttggagtttggggtttattttgagcgggtgatgggagtgttattaattggaattgcattgagattgatttggggattgtttaattaa

SEQ ID NO: 57504 - DNA, 936 bp, Acinetobacter baumannii
atgagcacaaatcaaagtctggttctgttaaatgaaatggcgactttcgttaaggttgtcgagtcggaaagcttttctgaaactgcacgccagcttggtacaacaccttctgctgttagtcgtgcgattgctcgtttagagcgtgctttaggcacccgcttactctatcggaccacacggaaacttcgtttaagtgaaagtggacaacaggtctatcaacgctgtttagatatggtgaatgcggcacaagcagtcatggaaagttcgggtcaatttcatgttgagccagaaggtattattcgtatgagtgttccgaaagcggtgggacattttatgattcatccgcatttacccgaatttttagaacgctacccgaaaattgatattcaaatgcttttagaagatcgctatgtagatctcattgatgatggagtcgatttagcacttcgaattacagagcaaccaccgggcggccttatgggtcgaaaactcattgatattgatcacttggtttgcgctacgcctgagtatttggccaagcatggcataccgagccaccctcatgatttaaagcagcatgaatgtatttacttaggtgaacaagccagtgactcaaaatggaaatttcagcaaggaaataaatcgataagtgttgccgtacgtggtcgttatgcagcaaatcatacgggtgtgcgtttgagtgctgcattacagcatttaggtattgcgagcttgccgtacttcgttgcacgccatgctctacaacaaggcaccttagttcaggttttaccagattggtattttaaaacctattacagtggtgggctgtggttactttacccaccgacacggcatgtcccacctaaattgagtgtattgattcaatatttggcagataaattagcagcagagccgactttatttaagttaaagtaa

SEQ ID NO: 57505 - DNA, 666 bp, Acinetobacter baumannii
atggaacttgattatctatttcaagcgagtcacctcgaacgtttaatgtggggactttgggcaactgcaaaaattgcatttatttcagtctttttctctgcaatttttggcacagttttcggcgtcattatgacttctaaaaacatagtcgttaaatcgctgtgccgcctgtatctagaagccattcgaatcattccaattttagttttgctgttcgtgttttatttcggctttgcgacatggtttaactggcagttttctgcaatgtgggtgtgtgttgttgtgtttgttttgtggggtacggcagaaatgggcgatttggttcgtgcagccattacttcaattgatcaacatcaacgcgattcggcctatgcgctcggacttacccacgttcaagctttgatctacgtcatttttccgcaaagtctaaaacgagtaacaccaggcgcgattaatttatttacccgaatggtgaaaaccagctctttggcagtcctgattggtgtggttgaagtcattaaagttggccagcaaattattgaaaattcgctgttgaccgtgccaagcgcttctctttggatttatggctttatttttattttgtattttctgatttgctatcccttatctcgtttggcagcacatttagaaaaggtctgggggtaa

SEQ ID NO: 57506 - DNA, 660 bp, Acinetobacter baumannii
ttgaactggcagtatatccatagtgtgttgccgcaatttttctctgcaactttgaccacgctgaaaatttcaattatcagcattattttggcaattattgtagggctaatttgcagcattttaatcacatatcgcgtgcgggtgctaaatagaattgcccagttctatattgagttatctcgaaatacccctttattaattcaactgttctttttgtattacggtttgccaaaactcggtatcaaaattgatggttttgcctgtggtgtgatcggactgacctttttaggcggaagctatatggccgaagctttccgagctggtttgcagtcggtggccaaagggcagattgactcagcaaaaagtattggtctacaaccgactcaaatttttagatatgtcattttccctcaagcgcttgccatttcaattccggcaataggggcaaattgcctatttctaattaaagaaagttctgtggtgagtgccattgctgtcgttgagctgctttttgtcactaaagacttaattggcatggactataaaactacggaagctttgtttttactcatcatggcttatctgattattttattgcccgtgtctattttaaccagttatctggagcacaaaagtcggaaggtgagccatggaacttga

SEQ ID NO: 57507 - DNA, 3474 bp, Acinetobacter baumannii
atgccgaatatgagtgttatgccagattcttcacgcccccaacaagcgccacaacgtgtgatcaaaacacgccgtgaatataatatttgggtggcagatgaaagtatcgaagattatgcgctccgctacgcacccacctcagtaagaaaatggtcaccttggaccgtaaccaataccgcaatttcaacagttagctttttagcgatggaagccattggggcgaccatgctttggcagtatggctttagcaatgcagtctgggcagcaattgtcgtatgtaccatcatatttttgaccagttggccgattagttattacgccgcaaaatataatgtagacgtcgatttgcttactcgtggtgcaggttttggctatattggctcgaccattacgtctctgatttatgccagctttacctttattttgcttgcgtttgaagctgcaattatggcaatggcacttgagcttgccttaggcattccgcaagttattggttacttaatttctgccttagtgattttgcctttagtggtcaaaggcattggttttattaataaagttcaggcgatcacacaaccaatctggctcttattactgttattaccgtggttttttgtactttggaaacagccacaaattttaagtagtagcttgcattttgttggggcggtttcaaactcaaccgattttcacttgtattactttggtgcggcgtgcactcttattttttcatttgtgatccaaattggtgagcaagctgactatttacgtttcttaccacaaaaagaaaagaacagaactgcatggcgttttgccgtttttttaggtggtccatcttggataatttttggatttttaaaagttttgatgggcatgctgctgatggtgttggcttttcagctgtttattcctgtctctgaactagacaatccgacttatttatattgggttgcttatcagcagtttattccaaatcctcagctagcgttaatattgactctagcactggtttgcttggcgcaaattaaaattaatatgaccaatgcctacgctggttcattggcatggtctaacttctttgcgcgcttaactcatagccatccgggacgaattgtctggcttctttttaacgtgtttattgccattgttttgatggaaatgggaattagccatgcggttgaacgtattttgggactatatagcaatatcgctttggcatggattggtgccgtcgttgccgatttaattatctgtaagcctttaggtctaagtccgaagggaattgaatttcgccgtgcttatttatacgacattaaccccgtaggtgtaggtgctttactgattgcttcagtgctatcgatgctgagttatttgggcttttttggactcatggcgaaaggtttggcgagttttgttgcgctaggaactgcgttgttatgtgtacctgttattgcttacttaaccaaaggcaaatattacattgcacgccagcctgaaaaaattcaggcgacttcggttgctaactgcgtggtatgtgaacgggactatgagcttgctgatatggcgggttgcccagcctataacggtacgatttgctctctatgctgttcactagaagcacgctgccacgatttatgtaaacctgatgcacgttggtcggtacagcttaaaaaagccatttggcgctatttaccagaacgttgggctagtcgtttaaatagcagggtcagtttgtatctattgttgactctaggattgtctattgttttggcagtgagtttaagtctggtttatatccaagaaaaaacctatttagaaaccattaatgcggcagccgttccacagctctttacactgtttgtgaaaatttacaccattttatttttattaatgagtgttgctgcatggtggttagtactaaacgatgaaagccgtcgtaatgccgaaatcgaaacgcatcagcaaacagcattattgattgatgaaattgctgcccatgaagtcacttcaaaagacttacaagatgccagaatagcagcagagcgggccaatgatgcaaaaagccgttatgtcattggcattagccacgaactacggacacctctaaatagtattttgggctatagccaattacttcaaaaacaagaacaactctctgaacaaggcaaaatggcgctcggggtgattagccgtagtgggcagcatttgacttcactcattgacggtttactagatttagcacgcattgaaacaggcaagatttctttaaatgtagtggatgtgcatttccccaattttattgaacaaattattcaaatgtttcaaccacagtttgaacagaagaatttacagtttgtttatgaaattggagataacttaccgcactatgtccgtaccgacaaaaaacgcttagaacaagtgctcatcaatttgctgggcaatgctttaaagtttacaacgagtggcacaattactttaaaagtcgagtaccgttttcaaacggcttattttgaaattagagatacgggctgtggtattgccgaggcagatttagagcgaatctttaacccgtttgaacggggcagtaatgtggttcaaggcggatttaccggaacagggctaggcctacccattgtaaaattattagtcgatttacttggtggccagctatctgtgactagtcagctcaatcagggttcacagtttaagattaaattttacttaccttcaaaagaagtagttcatccaatttctaatgtttactccaatcaaatcacaggctatcaaggcgagcgaaaacgaattttggttgtcgataatgaagctgtggaccgaggcctagtcgctaattttctaaaacctttggggtttattattgaagaagccgagtcgggcattgactgtttaagacgtgtacctattttccaacctaatctgattttgatggatttaaatatgcctttgatgggcgggtgggaaactgcgcgattattacgtcagaataatattaccaatgtgccgatcttaattatttcagcgaatgcaggagagcgtgaagtcaatccacaagacgccgtcttaagtgaagactttatgttaaaaccaatcgatctcaatttgttgctgagtaaaattggagataagttgggcttggtgtggattgattccaaatcagagacactccttgaaaataatgaagttcaagcactcgatttaaatatatataagcaagagcaagttgctgttcatacaccaattcaacaaccagaaaataatgatctgcttgatttaccgcaaagcttgcaacagttaaatgatttaattggacagggttatattcgaggaattcaacagactttaatgcaatgccgtcaaaattttccggagcataacgagttatgggaacagcttgaacaggctattcaaaagtttgatttaaaacacgcgcaacgattgattcaggataagcaatga

SEQ ID NO: 57508 - DNA, 456 bp, Acinetobacter baumannii
atggatcgcacggataaaaagattcttgctgaattgcaattaaatggccgattatctattactgaattggcagaaaaagttggtttgagcatttcaccttgtcacagacgagtgaaggctttagaagagtcgggagctatcaaaggctatcgggcagaacttgacccaaacttagtcggttttgagttttcagcgattgtttttattacgcttaaagaaggcgataaacaggcggttgagaagtttgaaaatgccgtgattgagattccgcaaattattcaggcgcagcgtttgtttggtgaacctgactatttactccatgttgttgctaaagatttaccggcttttcagcgtttatatgacgaaaaattatctgctattccaagtgtgcaacggctcatctcaaccattgtgatgaaagatgtggtgcctgaacgtttatttcctattggctaa

SEQ ID NO: 57509 - DNA, 612 bp, Acinetobacter baumannii
atggcttttaacatttttattgcattttggagtgtctccattctttttattattacgccaggggcagactgggcctatgccatttcggcaggaattaagggcaaagtcgtcgtaccggctgtcgcaggtatgctatttgggcactttattacgattttattggtagcggctggtgttggcctgcttgtagcaaataatccaactgcactcatgatcctaacaattgcaggttctgcttatttgctatggatgggaataaacttattacttacccctccaactccgaacgagtctgattctgaaaaggctcagtcatggttgagatgggctaccaaaggcgtttacgtgagtggattaaacccaaaagtttttttgctctttttagcgctgcttcctcaatttattgacaccactgcttcatggtcagtaacgacacaaattcttgcctttggtgttgtccacataattagctgcgcgattatttacttaatggtgggttatggttcagaggctattttgaaaaccagaccacaggcagcccaattagttggccgtttttcgggtggcttgatggtcgttatcgctacatgtttattgattgggcaaacttaa

SEQ ID NO: 57510 - DNA, 237 bp, Acinetobacter baumannii; identical to SEQ ID NO: 44371

SEQ ID NO: 57511 - DNA, 2292 bp, Acinetobacter baumannii
atgagtaaaagagaaaatcctatattagttattaaaccctcagtacgagaccacaggcctttggaaaatccaaagcctggacctgcgaaaatttttggagatggggctagtaaagaacgaagagagatattagctgaacaaacagaaactacacttcaatctttattaccagaatttaagcgttggccaaatatacctgctgtggcgaaaattactttgaaagaagaggccctggcaaaatcacatcgtcctacggctttatttaccaatactacttgtcctattattggtactttaggttttggtgaaattttagtaagtgccacaccgatggggttgagtagacttaaaagtaaaattttaactacagatgcccaaaagccaacagctaatatttcaactattgaaaaaatagaaccctatactgaaaatgagagattacataatcataattggaaagaattagaaggaaaaataaaagataatctcataaagctatcagtttttgatcatcaagatgatgaggaaaatgagaagttagtggcagccctttttaaattagccaatgactataatatacctttaaaggagttaaaatatggaaatattaaaaacctatatgtcgcgaaagtaaaagatgaagaagggaaaaaagcaatcgctaattttattggtctgagatctgtacttcctatgccacattatcagcctcttaatatacttaatccgatgactatattaagtaaagctgattactctatattccctttaccagataataatagagattatccagttgtgggaatctttgactcaggagtgtgtcctaataatactttattagcaccatgggttatagcaaaggaaacatatgtacctaaagggatggaagattataatcatggaactatggttgctggtttaatagtaaatagtcatgtactgaatcataaggatccaagattcccaacttcacaagctaaaatagttgatataaatgtttttcctaaaggtggacaagtttcagagagtgatttggtggcagctattgaagagatcattccaaaatatccatcagtgaaagtttggaatttatcattaggagcatctaatccagttagtgagactgatttttcagatttcgcctgctttttagatgaaatgcatgataaatataaatgtctatttgttatagcctcaggtaaccaattagatcgaaaatgttggcctacaatgagaaatgctgcttcagtaaatctgaatcgagtttcatcgcctgctgattctgttcgaggtttaacagttggaagtttagctcataaagatacaactttgactcttgttaaaacagacgaagtatcaccattctctagaattggtccagggccatgttttattccaaagcctgaaataactcattatggtgggaataattgtttaaatggaaattatactcaaactggtgtaattagtcttggaccaaatgatacgttatgtgaatcaataggtactagtttctcagctcctatagtcagtagtttggctgctgagatttatcattttttattaaagaataagagtgaaacagtaactcctgaaatggtaaaagcacttttaattcactcagctctagtttcgaatacaagaaaaatttcggcagataatttaccttattacggattcggccggcctcaaggcattgtagatactttatattgtgattcaaatgctattacgttgttctttaatgtagatgtacgtcatggcggttttgaatttgaaaaagttccttttcctatggcatcttgtttattaactcctgaaggcaaatttaaaggagaaatacttatgactttagtatattctccattagtagataaaagatttgcttctgagtattgcagaacgaatgtggatgttggcatgggaagttatgatttaaatacaaagaaaaataagattgaatttaatagtttaattcctgcaacaccgagcgatttaaaactaagatatgaagaatcacaaataaagaatggctttaagtggtcacctgtaaaagcctactataaaagatttccgcaaggtactgatgttgatacatggcgcttaaaaatgaaggtgatgcgtagagcagaagaagagaaaccaaataatgctcaaaatgctactttagttttaacaattagagcacttgatcctaaactgcctgtgtacaatgaaatgatacaagagttaaggagtttagggtgggtaactcagcctatcgataatcatctaagattacgtccttaa

SEQ ID NO: 57512 - DNA, 1125 bp, Acinetobacter baumannii
atggatcatgtatcagaagttttaaagatcattgagggtggaattaaggggaatattacccaagtttctacctatgcgtcgttgctagccgataaattagaaaaagaaggactagagagacaggcaaaaaatatacgtagtaaaattaacagttcactttcttctattcagagttttaatacagcttctttgaatggaggtaacattaataattttttgccagttgatggagatagccgtctaacccttggtgatgagacgagaccgcaattaattgataataatgttttatttaatatatatgttcaaaatcagatagatgagtttttaacttttattaataaatcaaatttattagaaaatgaaggcgttggtattgccccatctatgcttatttatggcccccctggatgcggtaaaacgatattagctaattatattgctgctaaattagaattaccattgattactgcaagatgtgatacattaatttcctcttatttaggttccacctctaaaaacttaagaagtctatttgatcatgtcgctagtagaccgtgtgttttctttttggatgagtttgatgcgcttgctaaagcacgagatgatcagcatgaattaggagaactaaaaagagtagtagttagtttattacaaaatatagatgctttacctacaagtacaattttattggcagcaacaaatcatcatgaattattagatcctgctgtgtggagacgctttgcatatagagtacaaattccattacctgataaatctcttagagaattgttaattaaacagtttttaggtaaatatgctccaaaaaatattaagagtgtgatcgaggctagttatggaatgagtggtgctgtaattaagcaggcatgtcagagtgctattagaagtgcgattctcgctaataaagatattgtagaaattgatgagttagtatttaaattaatacataatcagtatgatgaaattatatctaaggatacgccactcgatgaaaaaattagaaagctaagagaattaaatccaaaactatttacaggagctaaattagcatccctatttaatatatcatctggtaaagtatctaatattataaattctttataa

SEQ ID NO: 57513 - DNA, 1071 bp, Acinetobacter baumannii; identical to SEQ ID NO: 56980

SEQ ID NO: 57514 - DNA, 630 bp, Acinetobacter baumannii
atggtaaaaaaaatctttgtttttttagatcgtggtgtctcttgggctgaaattatatggaaagctattgcattttctattgtattattaggtgggacaactacggcttttcttgctaaaacctcagaactttttaagaattattctttatttatatctgtattaatcggtatattaactgcatttttactaactctacttttttacttcataaatctagcacgtaagtcttcagcagaaatagattatctaaacaagctctcccagccaagctcagcaataaatcccttatctgaagtttttgaaaacagagttattaaactttctgacttacaattacctttaaattcaccacacaaaaataagttatttaagcgatgtcagataataggtccaggttcaatattcatatctagtggatcctatagtagtactaatttcataaattgtggtgatgtagtattagtaccagaaggcgtatttttagctgggataattgttttagaaaattgcatgcttgatcaatgcgctctaattgatataaccattgttacttccaatacgcctgaaaatatagttagtttaaaaacaatgggagcaaggcttattgtgggcgaattaaaaaaataa

SEQ ID NO: 57515 - DNA, 144 bp, Acinetobacter baumannii
atgagaaacttttttatcggtgcttttcttgttggagctgttttgagctttttagcaggatttatttcaaatgataaaagtttttttattattgcatttttagttgcatgtgctgcatggctaataaaaagtagcaagacctaa

SEQ ID NO: 57516 - DNA, 1011 bp, Acinetobacter baumannii
atggctttcgcaatcatgatttatcatttaactggttggactttatttcatcctgaagcaggaagcgttcttggaaacttcggaatttatggagtttctatattttttgttttgagtggtctgagtatggcgattgtttacaatcattttataaaagactttcggacatcattagttttctttgtaagaaggttgtttaggcttctaccattgctctggattgctatttttgttgtaacgtttgccctctactttatgaaaggggagccactagatatttataagatttttttaaatattactcttctttttggatttgttgcgcctgatgcttatatcaatactggtgcgtggagcattggtaacgaaactttttactatgcatttactccatttctaataatgctttatgcaagaagtaaacttttaggcaatttatctgtcttggggttagtcgctttaggaatgtattttgctttcactgctttagaaccaagcaaaactttatcagcacagtggacaatttatataaatccatttaacaacttctttttatatgcttgtggtttggcgttgtactacaatttccatgacataagcatgaagaatatcgcgaatattttaatagtaatttcacttgcagttttatgcctgtatccagttactggggatcaaattaatattgtcacaggaatcaatcgtatagtttttgcattagcatctattatgctaactcttggtttctacaaattagaaattgagttacctaattggttcgctaaaccatttgcaaaccttggcgaagcaacatatggtgtttatttgttacatccaatagttttttatgcgacaaacaagctgatcggtaacccttatttatgtattgccttaacatctttcgcaacaattattgctgctaacctttcttaccatatttatgaaaaaaaattcataaaaatcggtaaaaaagtaactacaatagagcatcgcgtatatgagagtgcaagttaa

SEQ ID NO: 57517 - DNA, 930 bp, Acinetobacter baumannii
atggcaactttagtgcttaagtcatcaaacgcattggatgcatccgttgaagctcttgaattcactttatataagcaacgagtagttgctgatggtggctttattgcaaatgaagcagcagtaaaagctgcttttcaatattgttttgataacaatttaacagagagtgaggttttttcagcaacaagcgctagctggggtgtcaagcttgaggctggtaaacctaaaaagctttattctctctttaatgaatctggcgatattgatgtaacagttgggacgccagcatcgatcaattacaacactacatcatttagtgtgcctgttattgaactaaaagcctcatcaagtaatggtttaaaaacactgggaacggcaaacaatgttaaatcctctggtctgtgtattattgctagagctccaattcttgcaagcggtagtgcgtatggtacggtaggaacgtttgcactgggtgagttatcaaacttaacaccatctgtatcagccggagaaacgcttgataagcgtatgaacacagagttttatattcgtagtgcaaatactgagattgctaatacatggcgtcatttggcttatggttatggttctcagggcaatatcgaaacaacagcggctgagctttcagatgcatcggtttggaatagaacgtcaacttatttacaagcgggtttaatgcagctttataaagatgggggcgtgctaaaacaggatacgacagtattagagaaaacttggatcaatgatttatattttaatatcggtcgatcaagaaatgcgggtgttactaatttagactatgcgtctccgttttacggttatattgctgaagcatggtgtcttgtaaatacaacagccgaaaagatgcgtgtattatctttaaggtcttcacagctatatgcagctgtttag

SEQ ID NO: 57518 - DNA, 1779 bp, Acinetobacter baumannii
atggcagaactacctagtgctgaagcctttgtgggttcagatgttacagagagtggttttaaaactgcacaaacacaacttattgaattcataggtgaattagatggtagggtttcggcgattggtggaggtcgttatggcgtagacacatatgcgactgcagatattattaaatcatcattacctgctgggaccattattgaagttggaaatgatccagacccattgaaaaatggttcatatatttgggatggtgtaactttaacgaaatcgcagtacgatccaaaaacacaggccataaatgcttcaaaagattatgttgatcaaaaagctatatttgaaaacggattagatatcgttattcaaaaagatgttaacggtaaaaccgtttttgtagtaaagaaaaatggtaagttttatatagttggtctttctaatgacgttgcatcgtcaattaatcttttaaatagtctgatttctacttcaaataaaagtaacttaatagaagcactcgacataaatggccgtcctttattttcacagaataaatatggcgatttaatattgcctagtattggcaatttgacagtggctttaaaagccttaaagaatgatgtcttgagtcaaaacgcattaaatcttcctgcagctcatttaagcggtaagtatgcagattctattttgacagaaacaatgcaagattttgagaatactgattatttacttaaagcttcagatgtaaatgctctcaatattttcccacacgcagtgacaatgctccgcatcccagcaattaccagaattgggaaatcaaagtatcttttattctttgaagctcgagaaagtgttgatgactttggtaagaatagtcaaggtgttgccaccattgatattaacgaaacctctggtgtagctacaatttctaatttgcaatgcttgcatgccgcattcactgactcagaaaataagctccgtacatttatgaatgcttgtgcagtgaagttagatagtgggcgaattatttgcttatacgtacgccgatatggaactacagagcatcaattatataagcgctattctgatgatgatggtttgacgtggtcaaactatgaggatattaccagcgttaaaggttctaccggctggaacctgctttgcccatgttcacagggtttagttaagcgttatgggcaacataaaggaagaattgtatttcccctttggacttctggtactgcttattcagtaatcgcatttagagcgggctatatatactcagatgacaatggctctacatggcatctcggagagtttgctgacttttctacagctaatgaagttcaatgtgctgaagatttgaacggagatatgttgtttagtattcgcttagaaagtgcaaatccacctaaaattcttgcaagacattcagatttaacaaagaaatatacgatgttgcagaccaacaagccgctaacttcagcaatcgtcatgtctggattgattcaaggtgaaaacaagtacgataaaacagcaaataaatttcagttaactgcatgtcgaaccatgagtcggcaagagcttttaattcatacatcttacgatggtggagaaaactggcgaacctatttacttccatcaactattggtacagcggttgcatactcatgtattgagaatatttctgcaagcaaaaagtttttgatgtgggaggcggatggagccgttaactttaaatattctgtagtggcattatcaaatttagtaaatgaggttcagtaa

SEQ ID NO: 57519 - DNA, 858 bp, Acinetobacter baumannii
atgagacaagcttccccgaaacttattgccttgttagatgcaaatcaattcatcatggctgatctatatacgattaccacgattcagggcattgcatatcgctttacaaactatgactttgatttaaccgtgggcggtaaagtattttcatcacaaggtccaattataagccgtgagggtattagtctttctttaggcattgaagtagataatttatctatcacgattggtacaaatgaaagtactaaatttggcgaagtgccagtggctcaagcatttcataatggtgtgcttgatggtgcgagatttaagttagagcgtatctttatggatgctcagacaccaacggatacaagtgccggcacattggttttatttgaaggtcgaattgtagagccagagtttgaccgttacgaaattaaagctagtgtggtttcagatgttgacggattaaaacttcagatgccacgcaacctttatcaaccaggttgcttaaacacattgtttgatagcgcttgtggcttacatagtgctgattttgccgttaatacaactattgcagcaaatagcacgcctaacaggattctatgtgaactaagccagccacaagggtggtttacacaaggtgttgtagagtttttagaaggggtaaatattggaattaaacgtactgtacgcttacatgaaacaggtgcattacttcttactttaccacttttagaaatgccagctattggtgaagctattcgagtctatccgggatgtgataagcgcttagaaacttgtataaatcgttttaataatcgtgctcggttccgtggttccccatttgttccggtgccagaaacttcagtttaa

SEQ ID NO: 57520 - DNA, 645 bp, Acinetobacter baumannii
atgtcagatgtcttttttcctgaattacccggtttggagtgggacttgtcaaagagtcccatgtttaacacaaaaatcatgacgtcagttaatggacgcgaattacgtgcaagttatcaagcggttcctaaatatgaaatttcaatgtcgtatgcattcttgagagagtcgaaaggcaagcaagaactacagcagttagaaggattctttttagagcgccgtggttcatttgattcgtttctgtacaaaatgccagatgataatcagttcacatgcacaattattggagatggttctagggaatatcaattatttaagcaagttggaacagctaagcttttattaggaaatactgagccagattcaagtgaggataaggaccccaagatgtgggattctatttcatctaagctaatgtggagtaatgacaataagttaatgtggttttctagttttggtgttaaagcaaatggtaaggtggttttttctgcacccttacaagcagggcaaaaagttaccgtatcaggaactttctattatcggtgcagatttaaagatgatgaacaagagtatgtcaactttatgcataaactttggaaaatcggaaaagttgaaatgataggctctctaggaaataagatatga

SEQ ID NO: 57521 - DNA, 3828 bp, Acinetobacter baumannii
atgagtaaattggcagcaatgaagctacgtctaacaccagtagctcaaatggttcaagcaaatattggtgatgcatttaaccttgatgcattggcccaattattcgttaaattggaagaatttaacgaaatggatcctcagcttcagcaagtgatggattatgctaaatacattcctgttaaacctgtcagtgctgtatatggtggaggagaaatcctaagccgtaagaagggtgtgggtttaggtaaagatcattcaggaactggcaatgatattcctttggccgaagttgaatatgatactgttcaattgccagtgaaggtcggcactattggttatatgtattcagtgctggagttagaagcagctcaaaaattaaatttagcacttgaagcagataaagtagaggcagctcgtcttgctgcagaaaaacacttaagtaacattgcttggtatggcaatgctcttactggagttaagggcttcttaaatcagacgggtgtaaccatagttacagcccaacataactgggccacagcaaccattgaagaagtactaagtgacttcaatgcaagcttggcagatgctgaagatcttgttgatggggatgtatccgtacagccagatacttatttgatggcatcaaatcagtatttacacctttctacccgtgtagttgctgattctggcggtaagacattcttttctttagaaaataaccccgttcacacggggttttttatttttcaaatttaccttgcatcggcaaggtttttttatgcctatgaggtgtctatggcaaataataaccgtgtcgaagtgcatgttggtgctaaaacttccgagttaaaggaaggtatgcaagatgcagaaaaaatagtttcagattccgccaagaagattgaaagtactgggcataacattgattttaaacttgatctttctaatctacggtcagagctaaatggctttgcctcaaacctttctgataagttcaagacagtaggcaatgatattaagagctcgctgactaatggcctatctttagtcagaggcggtttttttcttggtattggccaagagattgctagaagtgcagccgaagcggttgcagcaattcctgatcttgtatctgcagtgggtaaggcttcaaaagagttagagattcaagcccgactagcaaattctaatactttagaatttcaagaatgggcatttgctgccaaaaaagtaaacgtggagcaggacaagctgtcggacatcatgaaagatgtaaacgataagtttggtgacttcatgcaaaccggtggtggtgagatggccgatttctttgagaagatcgcgccaaaagtcggtgtcaccgcccaacaatttaaaggcttatctggtccgcaaatcctagaaaagtactaccagactttgcaaaaagctaatgtgtcacaggctgaaatgactttctatatggaagccattgcgaacgatgcaacattattagctccattactggataacaatggtcaaaaattaaaagagtacgctaaacaggctcatgatttaggcgtaatcatgagtgaagatgccatagctgctaccaaagaatttaatacgtcccttgagactgttcaaacaacacttcaaggagtattaacccgtattgcagcacaagcagctccatcccttactgaattagctaatcaatttttaacttttgcagttgattccaaggatgccattgatgattcaattaaatcgattattggaatttttgaaagtctcttcagcattgcaggggaaattttcaatactattggaggtatttggcaggacttaactagcaatattggcgatggttcattagcacaaattggttttatggatgccgtttcagttgtgattcgagcattaggtgttgtagttaccggctttcaggtaggtgtgcaatctgcttttgcaatcattcgtgccgttgttgttacggtctgccaagcattaatcattgcatttaatggccttatggctggctttgatatggtaagaagtactattcagtatggtctggatgtactacaggttaagtttcaaacatttggcagcgttgtaaataatatccttcattttaatttctctggcgcgaaagcagcatgggagggtggtttatctcagcttggtagtattactgatcgatacactaatcaaatgaaaggacgcatggctgacctaaaaaactcttggaatgcgggagccactacagcagccaattcacttgtcacagcaggaaagcgaattcttgaggttactacagcgggtaatcagaagattaccaactatgtgtttaaggatccgaccaaaccagtcgagccgccaaaaccacctaagcttggcttaggaactgcaccacctaatacaaaattaggtataggtactggtgaaaaagacgagaaaggcggttctaaatcatcagctaaatctaaggctgagcaggaagctaaagaacgtcagcgccaagctgaacaagcagctaaagcacttgccgatattcggtataaatatgcatccgaagaaaagaaagttgctttagatctgcaaaaggcattggaagagattgaaaaatccaagatgactgcagatgaaaaagccgctgcaaaagtcaaagccgaaaaggatgcttcagacaagatcattgctattcgtttaaaagagtttgaggaatataaaaaagctcgtgaagaacagatagacaattatcaaaaacaagcccagcgcctttatgaaattgaagcagcgcgaattcaggcagagtttgacgccaagaaaatttcaaatgtccgtaaagtccagttggaaaaacaactagaagatcagttacgtgaaattaaacggcaaggtcttttagagcgtttagcacttgagaacgagcaaaccggtattacgggtaagcagggcaatcaaaaccaaatcacaaacaacatttctgatttagagacagatcagaaagttgctgacactaagtctatgggcttaatcagtgatgcggagatgaaggactttgaggctaagttcggtggctttacttctcggctttctaacctatgggatcagggcattcagtcacttatgaatggcacactgacttggagtaatgcaactaaagcagtactagctgacatggggcaatttgccttgcaaacagcaacaaaggagctacaaggctggttaagaatccaagcgattaagttggcccgtaagcttggcttcgttggtgctgaaacggcggcagaagcttctggccaagctgctcaaacaggggcaaccattgcaggtgaagcaacacgtaccagcgttactgcagcaggtggtttagcacgtttaggcttaaaggctgccgaagctatcaaaggcatcatgatgtctgcatgggaagcaatggctggtgcatttaaagcgatggtcgcaattccgtatgttggtccaattctcgccgttggtgccggtgcagctgcatttggtttagtggcaggtcttgcgggcaagatcaaatctgctcgaggcggttacgacattccatctggagttaacccaattacacagcttcatgaagatgagatggttttaccgtctcaacatgcaaataccattcgtgaaatgggtaacgcattacgcaatggggcaagttttggagctgctgcggttgctgaaggtgggggaggtggtaccactgttttcaacattagtgccattgatgccaaaggagttagagactttatgaagaaacatggccgtgatttggctggtggacttaaaggctataaccgcagttttgggaaataa

SEQ ID NO: 57522 - DNA, 303 bp, Acinetobacter baumannii
atgaagcgtaaaaagtttaataaaaaacggttttatcgccgtttagaagcgcagggaatagttaaaggtggatatgtcaattggaatggcgaactggaaggctggcaacttccttactgtaactttcctgatttagctaaagcagcgggtaaagctgcggaaaagtttcaagaggtggtggaaagtatcaaaaagatagattttcagcctccaaatattaaacccattaaaacaaaaatttttattgatggtgtcgacttgggtgcaggcaaagatttttcagttacctattcaagaacttaa

SEQ ID NO: 57523 - DNA, 249 bp, Acinetobacter baumannii
atggccaatcaacaagaccttgattatgttgctcaaaaaatcattgaagtcctacgtgaaaaatttccgaatgatgaaggatatgttcaatccaaaatataccgtctggctgaaatggacaacaaataccaaaccttcgcatgggcactagatcaacttgaccacgggaacaaaaaacgattgttcgaaaaattgggattggacccagaagacgaaatccattatcgacatttatttctgcaactttaa

SEQ ID NO: 57524 - DNA, 825 bp, Acinetobacter baumannii
atgaatacacttacacagattgacgatgctgtatttatccaagaccaacaggtaaaaaccgatagcctcaaagttgcagaaattttcggtaagcagcataaggatgtactacggaagatcgaaagcctagattgttcatctgaatttgcgtcagcgcatttttgcgctcacgtaaaaaccattcaggctggggccgttcaacgtgaatccaaatattatgaaatgaccaaagacggttttattttcttagtcatgggttttactggagctgctgcagctaaaattaaagaagcctatatcaacacctttaatcaaatggctgccatcctttacaacagtgatggcagtcaccagcagatccacgaaggtgctgtagttcagctgaaatcaggtggcccgctttacacgattagtaaaatcttttatgaccaaaatggttatatgcagaatgctgaagtcatatggcacaacaaggccaatctctgcagagaactattgcccattaactgtttaacgcttgaatccaagaacctgattcaaaacaaaacactagaagatttttgggcatcactgcacaattttggagttggtaaactcaaccatagccgaaaccaaaatattctggcacttaatctcatgcagatttaccaatgcattgaaggtttaccacctaaaaaccaactgtcagcaatcctaatgcatagtagcaatccctttcccatttatatgcagcacaatcatgcggtcagtagtgccattaccaataaaacggtgaaatgctggatatttaataccaaacaacagcaaatcccattgctagggtaa

SEQ ID NO: 57525 - DNA, 303 bp, Acinetobacter baumannii
atggctggccgcttcttcgttcgcggtattctcacccctgttcagtctgtcaccattaccgtgagaagtgatggtgtcaggtttaaaaacttgaacgaggatcagcaaatgaaacatttcgctttaacgcattcgtatattcaaaataatgtaaaagaacactcacctatctatgatctggctgcatatcagcagcgccagcgtcaattcaaacggcaaaaattactaaagaaccttttcgacactgccatatttgtcagcgttgccggcttcactttctcaatgttgttttggggagcctaa

SEQ ID NO: 57526 - DNA, 168 bp, Acinetobacter baumannii
atgtcgttacccttgaaccctaaagttcaaggtggaggtgacgcatacttgctgggtttcctactcggggtaggcatacgctctaaatatgcagaacaccatcctaaagagatgatatcggctcaggggaatcagaccggctggcgaacatcccagagacagctttag

SEQ ID NO: 57527 - DNA, 441 bp, Acinetobacter baumannii
atgaaaaaaatcttaatgttgttaagtacaataggattatcttcgtattcaaattgtgcagaaattaatttaccaaaaataccgcaggtaggtgtgagcaatgcagttggaattattaaggcatctggcttgaaacctgtaaaaacaatagatagtactgatagccgtgaggctgcaaagaaaatatataagtttgatggtgtttttaaccaacttgaatttagtaaaaattatatttctattacttggttccaacataataaaacaagtttggataaagctgtacgtttaggaatggcaacgctaggtaaggatgctggctattttattcataaggtagatattcaaggtcaacatactgattattcaattcaaggtcataggataattaatagcacgtgtatatctaaattatgcgctataacaatacaaagaaattaa

SEQ ID NO: 57528 - DNA, 2064 bp, Acinetobacter baumannii
atggcagcacaatatcattctatcttcactgagcaaggtctatcacttctacgtgaagcaatccaaaatggtaccaaacttggtattacacaaatgtcatttggtgacggtaatggattcgttcctgagccagatgcaacttttacgcatcttgtaaatgaaatatatagaacagatctgaacagactagctccgtcagcaaacaatcctaattggcttgaagctgatgctgttattccaagtgcagttggtggtttcaatattcgtgaagttggattatgggccggagaaatacttgttgcatattcaaattaccccccaacctataaacctactgcagatcaaggtacggctcagattaagactatccgtatcgttcttcaaattgataacacagctaattttgaattaaagattgatgcttcagtagttatggccaccattcaaagtgtacaagacgctaaactggatgtattaaattatgttgatgaaactaagctaagttcatttactgatatcaataaactaaaggatacacttaccgataaagagtttattttatataaaaataatatgtatcgttggagcgtagactctactgatctacctgatgatttattcattattaaaagtaaccttcatgaaaatggtcgctggatactagtcaataaaaataactacagattagaaattgctgaaaataatttacagacgcttttaagacaatcatcaaaaattcatattgataaagtttatgaactgactaacacattagaattagctacgctgaacaattcaatgcttacaggtattggatatgctagtggattcaaatggataggtgagaatggagctggatcgactaaaaatacttggctacctatacttaaagcttatggacaatcatggcagacgaactctgcaatctcgggggtaaaattcagagattttaagattgatgttgataacaaatcgaatgtatgtgcgattgattgtcgttatataacaaatcaatctaagcttgattcaattaaagtggcctcactaggcgtaaattctgttgggttctatctttcaaagtcttggtataaccgaacctctgactgttctgtacgaggagttttagcaaatggtaagaacggtatcggtgtttttgttgacactgtctcagatgcttctacaggatcagtaaatcaagtcaacgctgtacctttagatatctcagtacacacgtgtgatattggatatttaattgatcaaagtcgatatatttatagcctgaatattcctgcttcagtcactattgaacactgtaacgttgggataaaagttcaaggaaaagatgctgcatatattgtaagaaatgcgattatttctgcttactttgaatctaatggtacagatgtaatttggggagagactgattcaacaagagatgtcgattcaaatattttatggcttgcagcttccttcaatgataacggctcaaaagttgttttaaatgaaggacgtcatactttcattggatgtacgggactcgaaacattagaaataaacaattatgctgaagtcgagttaataaatactatcgttgataatattactggtaattcaaattcaattagaaaactagcccgtagaaaaagtagaccttcagttactgttacagcttcaaatgatggaatggagttcttaaaacccgtctcagctaagagacttacacaagcttcctcaggggcagttacttttgatttagcaaaagatttatttaatattgactcctactggggaagaaaggcagaaattaaaatattaagtcgaagacagtttgatacaaacaattccgcttggtatgagggcataattttaaaaaatagtgtaggtgaattttacgtgcagcgaaaagatggaagtggtgcagagacatatacagttaatggttctacggttactaagaacaaaaattatgatttaactgtatcaataacaaccggaggtattcttacagtcaatagtactcagacggagactaaaaattatgaagtcttattgaatatctactaa

SEQ ID NO: 57529 - DNA, 606 bp, Acinetobacter baumannii
atgaatctactacctccaaacacgacagccttcgaaaagaaaattattgaaacaaccgccaaaacaactgagttaaatactaatttatcaagcttaattcgtgttgatgaggctcccgtagatttcctatctattttagcttggcagttttcagtagatcgttggcaagatgactggtctgatgaagttaaacgggcacaaataaaaaattcaattaaagtccacacctataaaggaacaaactttgctcttcggtcaattgtagaaagtttcggctattcattaactgttcatgagtggtggcaagaaagtcctaagagtgaaccgggtactttccaaattactatcgatacgaatagcaaaccattaactgaaaaaacttataaaacactggttgagctattacatgacgcaaaaccattaacacgtgaactcaagtctattgaaattaatgttattgccgttaatggtgacacaaatgtcgcagcagctatgtatgacggtgaagacatcacaatttatcccaaagttgatgatcctaactcctttctccattcagcatttgggttttatgaacatgaaattacagcaatttacccgaaatag

SEQ ID NO: 57530 - DNA, 765 bp, Acinetobacter baumannii
atgttgagtccagctcgacggcatcgcctacattccttagcagctaaagcagctgctaaggttgaaaatgaatttggtgatgtccgtgaagatgccagtgtgtatttattacaactggccgaattaaaaaacgaccaaaatttactacgtggcattaaatctgaaattgaacgtgcagaacacaaagcaaaattgatccctaaatatatgccatatgtggatggaattctttcagttgaagaacgtacgccacacatgcgtgatgatgttgtcacgacgattatgctttggtgttttgatgctgggatgtttgaagacggtctccgcattgctgaatttgcgctgaagtatggtcttgatatgccagattctttcaaccgtgatacagcttcaatcgtagctgaagaaataggtaatgctgctaaagcgaaacatactgaaggtgaagtttttgacatagcaattttagaaaaagcaaatgctctcacctccactttcagtatgcatgaccagatccgggcaaaactttatgtcgctatgggccggacgtatttgcaaaatgagctttatgccctagctgtaacgttcctaaaacgtgccattaaacacaatgaaaattgtggtggtaaacaagaacttcagaaagctgaacgcttgctgaaaaaacaattagaagaaaacccacctcagccattaatcaatgctgatggttcacctgttgttgatgattttggcaatcaggtatttgagggaatttcttcttaa

SEQ ID NO: 57531 - DNA, 1014 bp, Acinetobacter baumannii
atgcaaaatttaacacgtgaaaaatatactgccacagtagaaaaaattgctctggcaaacaatattgcagatccttcaaaaaaatttagtgttgaaccctctattgcacaaaaaatggttgaggctgttcagcaatcttctgagtttttgaagaaaattaatattcagcctgttggtgagttagaaggtgaagcaatcggattgaaccaaggttctaccattgctggacgtaccaatacaaaaggtggtacgcctcgtaaacccgtagatccaactggtctagaatcaaacaagtacaaatgtgctaaaacagattttgatgtcgccttacgttacgaaaaaatggatgcatgggcacgttttcctgatttctatgcaaaatggaaagcctttgttgaacgtgcgattgctttagatatgatcatgattggctggaatggaaaatcagttgcagttactacagatcgtaacgcaaatccattattgcaggatgtaaacattggctggttagaaaaaattcgtacagctgccccagctcatcatatgaaagaggtaatagctggatctggaaaagttgtagttggcccaacaggtgactataaaaatttagatgctgttgttacagatgtagtaaataacttgattagtgaaatacatcaagatgatactgatcttgttgttatttgtggtcgtcaattattgaatgataaaaatttcccattagttaataattcaaaagacaatactgatactttagctggtcaaattttattaagtcaaaagcagattggcggtttaccggctgttcgtgttcctttctttcctgaagatgcctttcttgtaacctctttcgataatttatcaatttacttccaagaaactggtaaacgtcgtcaagtcacagataattcgtctatggatcaagttgaagaatatcaatcttcaaatgatgcatatgtaattgaaacttacgacaaagtagcatttgtcgaaaacatccaaattcaagaataa

SEQ ID NO: 57532 - DNA, 804 bp, Acinetobacter baumannii
atgagtaagaaatccaagttttatcgagttgcagtggctggagcaactacagatggtcgcgttattgaacctgaatggattcaacagatggcgaaaaactatagccaggatacatataccgcattagctaatattgagcatttacggggtcttcttcctgacacccctttcggtaattatgccaaagttattggtgtaaaagcccaagaagatgttgttaatggtcaaaagaaatgggctttatatgttcaattggaagcttttgacaatctgattgaattgcatgaaaaaaggcaaaaactgtttaactcaattgaagtcaatccaagctttgctgatacaaatgaagcgtatttagtaggtatcgcatttacagatactccagcctccttaggcactcaaattatggagtttgcatctaaaaatcccgatgtaaaccctttcacgtctaaaaaacagcacaaggacaatctcttcactgcagctgaagaaattactttggaatttgatgaagaatctccagtttcaaatttattttctaaagttattgactggctaaacccaaaacaagaagaacaaagccaaaaaaataatggccagttcaatgaaattgcgaagtcagttgaagaaattgccaagacctttggcaatacgcttaaagagctaagtgatctcaaagagaatcattcaaaacttcaaagtgagttcaaagaacttaaaacaaaattaggccacgagccacatccacaaacaccacctgctccagaaagcaacggtaatttctcagaacgagttgagtactaa

SEQ ID NO: 57533 - DNA, 1008 bp, Acinetobacter baumannii
atgtctgacagcaaagtccaggcttttaccttcggagatcctgaaccggttctcaataaaaatgacttttctcaatattatgagacttggttaaatggtagatattatgaaccacctgtgagcttgaatggattggctaaatccttttctgctacaccttatctttctactgcaatcacctataaaaagaatcaattagtttcagcttttagaccacatcgattattgagttctgcgaattttgaaagaatggtattggacaatttagtttttggtaatggttatatccagcgtattgataatagacttaatgaacctatgcagttcaaagggttaatggggaaatatatgcgtcgcatgaaagaacctaaccaatatctaatgttgacagaaggatataaggaacatgaattctctcctgatagtgtttgttgtgtaaaaacgacagatattaatcaggaaatctatggtgtacctgaatatatgtcagcgttgcaatcagcatggcttaatgagtcggcaacattattccgtcgtaaatattataataatggttcacatgcaggttttattttatacatgactgattcacagattgatgatgaagatgtagaaggaataaaacaggctatgaaagattcacgtggtccaggtaactttaggaatttattccttcatgcaccaggtggaaagaaagacgggttgcagttaattcctattagtgaacttgcagctaaagatgaatttacaaatattaaatccattacccgtgatgacatacttgcatcatttcgtacaccgccacagctgctcggtattattccttcaaatgctggtggctttggatcaatcagtgaagcaagagaagcattttggtataacgaaattgttcctgaacaggcacgtattgcaaatacaatcaatgaatgggctggggaaatgattattcgcttcaagaactatggtgaagtgaactacaaagggcaggatgaccctaaacctgcctga

SEQ ID NO: 57534 - DNA, 501 bp, Acinetobacter baumannii
gtgcagggaaaaaagcaccaagtagtggaaaagggcatattttttatgatgaataagcaaccattaatttttgatgaaaagaaatatccgataacatggcgttttaattcagttgattgttctttatcagatgaggataagcataaaattattttcttgatacaagatgaatcaaaaaagctttgggattctttatttccgtttaataacctaatggaaattaaagagaattattttttactagctgaaaaaaaagatttggattttgatgaagaggataggtcgagagatttttttgttcaaaaattgcaaacaactgaattattaatttttttttggggaagaagtaattgtgcaattattccatcaagtatacttataaaagcatggagtgactttttctatccaagtgctgaggattgtattgtttatttagttaacaaagaaaaaattattttttcatatgaggaaactttcttttatggaaatattttgttgtaa

SEQ ID NO: 57535 - DNA, 4893 bp, Acinetobacter baumannii
atgccaacagcaccaaaaactatttctcaagcgaaagcaaagccaagtgtgagaacaaataccggacaggttgcggtagtacctttaaataaattgtacgccgccgatgttaaagcaggtatgaataaaattgattcatggttaaaaacgaataccaaaggttatgtcgatttaaatacgattaaaagtactcttggcacactgccagtcattggaaatgcaattgctttagtcgatgcaatttatgatgttatagacattagtaaaaagcctagcccagcttttacagattggttgaatttgggactggatgttattggtattattccagcaccgccaaccatggcaacaatgcgaatgagcctaagacctacgttgaatttggttagacaaaaggcgaaaggcacaatttctgatacgattttggtcattctgagcgatcatttaaatgaaagaattgctggggaattagaccaatttgcgaaaaatgcccaaccccttgtcaaccagatgttgcaaaattgtggtacaaaaattacagctatcagtaatgattttgctaacggaattcaaaaagtacttaatggaaaagtatatagctctgcgggtaatttaaaaaacgcacagaaacaattaaataaagttaacttaaataatttacaacgcaaccctaaagcaacgatatcaaatgctgttgatgggctcgtaaatatttggaaagcaggtgtaaaagagcaaataaataccgttgccaaaggtgtatctgctgttgtgcctgctagtgcaacacaaccgatccagaatgcaatcacttccattcgtgtttttggtagaaaagcaccttcatatttaatggctttggcagatccagcgaaagcaatgagtatcgcttggctactcaatgttttgcttaaagctgtacagaagttcaaactaaagggtacaaaaactgcaaatattaaacatacacaagtcactgaaaaaagaagacaaaaaccaaacggagagcttgagaaagctaatgttcaagcaaagtcaaagggtaatccgagtgaaactgtatgtgcattaaatttaaggggtggtaaaagcaagcccaaatctacctctggtacaaaaagaaatattacctttgctttaggtacagagtgtttaactcatcaagatgcttatgtgtcatcaattttaagctttgtattaactcggaaatatgcatctaatctttatcaactagatcatggtgaatttggtgcaagatggataacaccgtttacaacccgtattgttccacagagtgaatatattgaagagacagaggaacgcgctggatatttaaaacacttaagtggttttgagtttattggagcagatgctcgtccagttaaattaccaaacctgaaagtaggtgagagtttccataataagactgaagatttttactatagtgtaatttctgaaaaagttcagatgatctcttatcaaaaagaagagaaacacttatttgaaaaatatcaggatggttatcgactttcagccatagaatacaagaatggacttactttagcagtacgttatgaccatcacttcgaaggtctaagttttatttcagatattgttattaaagaaaaacaaaaacagttaattcatgtagcatttcaggtaaatgcttctggaagaattgaagatgtgtggctggttgaaaatggtcaacttgctcgaccacttgcgagttataactacaatgaaaaaggcgatttggttgaagcgattaccgaaaatggagcgagctatcattaccaatatgaccatcatcttttaactcgttataccgatcttacaggtcgaggcatgaaccttgaatatgatggtgtcgaaccaacgtctaaggcttaccatgaatgggcggatgatggcagttcagatacaactttacagtgggacgagaatattcgcctaacgtatgtgacagatgcttatggagctgagacttggtattactacgatattgaaggttatacctatcgtattatttatcctgatgggctggaagagtggttcttccgtgatgactttggccgtgtaactaagcatgtagacactgatgcagcggtgactatttatgattatgatgagcacggcaatattgtgtctatgacacaaccagacggttcccttctatattatgcttatgatgaaaaccgtcagcttataggtatggtggatgctgaaggcggacgttggtttaaagaatatgatgcggctggaaacattactaaagaaaccgacccactgaagcgtgaaacacaatatagctataacggtttaggtttacttacttcaattaaagatcctaaaggtggtactaaaaccttaagttatgacgaccaaggcaatttaattagttatatcgattgttctggtaaagaaaccaaatggacgtacgacaaaaaaggtcgagttgttgcaatagaaaatgctttaaagcaaaaagttgaatatttttatagtgatctaacaattgagcaacgtgaaccagttattaaaggtttacctctaaatgcttttggtcaacttgaaaagattaaacatgctgatggcacagaagaacacttcattcatgatgctgaagggcgtttactggcacatatagatccgaaacagaatatcactagatatgaatatgatgcggcaggtttaattgcatcacgaacagatgcactcaatcataaacttaaatatgagtgggataagcttaatcgtctcaagcgcctaattaatgaaaatggtgccagttaccaattcttctatgatgtcgcaagccgactcgttaaagaaattgattttgatggtaaagaaaccatttataactatgacgaaacagacggaaaccttgttagtagtgttgaagtcgcttctatgcatggtcaagatttacgagatcgaattgcaccgaaagatcgtattcaaaagtttcttttcgatagcatggggcgcttagaacagcgtacagcaggctatggatatgttgagcatgatttagagcaacaattagttgaagaatttgcttacgatagtaatggcaatcttattcaagccaaaaatgctgaaagcaacctacagtggtattacgatgctgtaggcaatgtaattcgtgaacatcatcaagactataaaaccaagaaaactggagtctggaaacacagttatgatgaaattaatgatcgaataaagactgtgcgtccagatggacaaaagattgactggttaacttatggttcaggtcatgttcatagtctgatcgtgaatggccaagatgttgtaagtttcgagcgtgatgatttacatcgtgaaatagcacgtcactatgccaacggaattagccaagaacaacattacgatacgatgggacgtttaacccagcaaaatattgttaatggtcatgagtttggttatccgtcaaatgaacaagttagccagaacaatgcaattcaagaaacccagcagttgattcaacgcttatatcaatatgataaaactggtcaattaataggaattaatgatacgcgtagggggaatatcaattataaatatgacccagttgggcgtttgcttgaggctagcagtaagttaggtaaagaaacatttagttttgaccctgcgagtaacattctagattcatatcatagtcagaaagttcaaagccattcacaaaaactagatgaaacaggctatggttataatcgtttggttaataatgtagttaaagaatatctagatcaacaataccaatatgatgtttatggacaacttgtttgccagaaatcaaccaaaggtaatttatatcttgagtgggatgcgtgtggacgactaattaaaagtcgtaatgctgaatatacggcagagtaccgctatgatgcattaggacgccggattcaaaagcggagtaagcatcaccataccgatgatgagcataacatcatttatggatgggatggcaatacacttgcttatgagtcgaatgagcaaattaccaagcattatatatatgagaaagattcatttgtaccactggcacaggcggtttatgcagaagaaatagaacttcatcaaacacctgactgggcagataagccttatagtttacaacgtgacccattatggaaagtaacgaaaacaccaaaagactttaaagatttttggttctatcattgtgatcatttgggtacaccacaagaaatgaccgatcatactggtgcggtcatatggaaagctgaatataaagcttggggtgagtgtaaagctgaaaaaactaagtcaaacttctttgaagactctgagatcatcagtaataatatccgtttccaaggacagtattttgatgaagagacagggcttcattacaaccgttatcgttattattcaccctatgtagggcgttttatttccaaagacccgattggattattgggtggagataatgtatacgcatatgcaccgaatcctgtggagtgggttgatcctttgggattgatgaaatgtggtcttacaggagaagaagtaggcgatgcaacaaacttgccgataataaagcctaacacacctcaatggaaacaagcagttgattcaataaagaatgatggtaaaagtaaaccgaatttcagagtgcaagataaagaaactgctaataaaatgctacgagagtctaaaaagaatttgcctcaatatgagacttatacagatgaaaaatataaaatgggttatgaatatcacccaaatgaatcgcatacaataaatgccccgcaaaataatcttccacatataaagtggagtgattatagtgcagggaaaaaagcaccaagtagtggaaaagggcatattttttatgatgaataa

SEQ ID NO: 57536 - DNA, 1977 bp, Acinetobacter baumannii
atgtttggccgcattgatcaggcgaaataccaaactggtgttgccaaatgcaaaaactattatgtcgaactgtttggcggccttgtctatcgtgcaggcttccgctacgtacaccattacccgaaatcaatgggcaaaatgcgtttaatccgttttgtctttagtgaagaacaagccgttgttttggctattcgtgcaggtgctgtaaatttctttgctgatggcgggatgcttttagacgataacgatcaacctttagaggtagcattgccgtatgccgagcagcatttaatgcagctccgttatgcacaatctgctgatgttattacaatcacgcatccagactacccaccgcgtaaaatcattcgtaagggcgcaactgaatggacgactgagatagtcacggtggggtatggtttagctcaaccgcaaaacttgaatggtaccgttaaaaaggtaaatgaaaacggctacattgaacgtgaatacgtatatcaggttactgccgtaaacgatgaaaatgaatctcaagcttcagcaaaatcacctgttctaaaaaatgacttaactttatcaggtaatgaaaatattctgacttgggatgcagtgccgggcgcgacccgttacaacgtattcaagttgcgttcagggttagctagttacattggggaaacaacagaattaagttttactgatgattacatcgaaactaacggcgcaattacaccgcctttaatccgcaatcctttcgagttttacccaatggccgttgcatatcacggtcagcgaaaagtttacggcggtgggtataaatccccccaatggctacgaatgtcacgtacagcaacagatgataattttgggtatcacatccctttacaagatacggactctatccaaattcgctttgctgcacgagacggtaacggcgttcgtcaccttgtgccaatgagtgacttactcattctaacaagtggcgcactttggaaaatgtcagctgatggagctgtaactgctgcaagtgttaatgtgaataagcaatacagtacaggtgcaaatgacgtaacgcctgttgaagttgacggtgctgctgtatttgcttctgatcagacagggcatgtacatgaagtgtcattagcaagtggttataacgcttcgttttatcaaacgatcgatttatcaataatgtgtccacacctttttgatgggcataaaattgtagattgtgcattgctacgcaaccctttgaatattatatattttgttcgagatgatggcgtcttgctttcgctaacatatgaaccgcaacaacaggtttgggcttgggcagaacatcatacagacggtaaatttctttcattagcagaaatacctgaagataaccaatctgttttatatgcatttgtagaacgaaacggcttttacacaattgagcgaatgcttacaaggcagccactagatatgcaagataagtgttacctagacagtagcattcaatataagggcaaccccacatcaactttaaccggcttagattggttggaaggtcaaacggtatctgtatttgctgatggtggagttaagccaaatgttaaagttgaaaacggcacaatcaaattaccccgtgaattgtcaaatatttgggtgggcttagggtatgaagcagaaatgcaaacattgccaatttttcaagagcaaagaagccctgttaaacctaaagtggtgaataaagtatttttacgtgttttagattctcaaaacattttggtcggcgctaaccaagatattgaagaccgtacgccaatcgatgagtttaaaccgcgtagcaacgaacgctatggcagccctcttaaattgtattcaggtttggtagaggtaccagttgacagcacttacgaaagagacattcaaattactgtaaaacatgataaacctttacctatgaagctattggccctagaggtagaaatgacatga

SEQ ID NO: 57537 - DNA, 471 bp, Acinetobacter baumannii
atgagacgaaataatattgagattcgcaagccaacagagcgcgatattcgtattcttgttgaaaatctacgacctgcggatcaagaagaactaaaagcctatttcagtgataactatcaatggattgtgaaaacatgtgttaaaggttcccgcgattcgtgggcagtcgttgttaacggcaaactgctatttatttgtggtgtgggcattacaagcctaattggtaaagtagggtgcccgtggttgcttggtaccacgcacattagcaagtacccaatcgaatttattaagcagacacgcaatattctaaaagaaatgcttttagatcatgacctacttcgaaaccatgtttacatcaaaaacgatgcggcaattcgttttctaaaacacttaggttttaaattagatgctccagaagtgcacgggataaacggtgaatttttttatccgtttagtatggtggctgcatga

SEQ ID NO: 57538 - DNA, 672 bp, Acinetobacter baumannii
atgatgggcggcggaggtggcggcggccaaatgggcggtggcaatctgtaccaagcaattgctactgctgccgttaaaggtgctacaacatatttaaaattaaaagcgcttaaacagtccttagaacagcaagcggatattgcaggcgaaaatgcaactcttgcagatatacaagcgcgcgatgctattgatgatgggcgtaacagtgttacggattatcagcgtaatctttcaggcttcaagtcaagccaaatcaatgcgcttgctgaaaacggcattgatgttacacaaggttcagcgattgatattttagcttcaactgaaatgatggcccaaaacgatattgataccttgaagtacaatgccgccatgaagtcttgggggcatcgtgttcaagaaaccaatttcatcaaccagaaaaactctcttttggcgcaagccaaaacagtgcgcccgcgcctaaatgctgaacttgcagcaatagaccaatttgcatcttcaatgatgggtggtggcggaggaagtccaatgcaaggcggcgagtctctaacaatgacgcaacctgtaaacggttcgtataacgcgaatagcaatttttcaatgtctctttacggtaaagaacaaggggcatcttggcaaaactacaactggaattggatgggggctgcttaa

SEQ ID NO: 57539 - DNA, 2262 bp, Acinetobacter baumannii
atgcgtataccacagtttaactctcaagtcgctgaagccgacatgcctaacgtacaaatcagcggtggggttacacctggtcaagcagtggatatggtcggcaataaaatagatggttttgccaatctagctaatacggtcgccaataaatataaagaaatacaagatgagaacgaccgtgtgcgcgtgattgacgcgcaaaacaaacttgccgagttgcgtttgcatcttgaaaacaacgataccgatggctacatcaagaaaaaaggcgcagacgtggtcggttttgatgacggggaaggcggcaactttgttgattactattctcgtgcatatcaaaacggtgttggtgaaattgctaataagttaagcaatagccgtcagcgtacgatgtttcagcaaattgctgcacgcgatgcgcttcaatttaaaggtactttgcaaaattacttcgtacgtgaaaatgatgtttatcagcaaagtgtttactcatcttctgcagaacgttttatccgtgaaataaatgaaaatcctgccgacttcactaagattgacgaaagccgtgaaaatctaaaagcttcacttggcaaactaatgtccctcaatggtaaatcagctacagaagctgaaaacatgtacctaaagtcaatttcatctgcgcatttaaacaacctaaacgcctttattcaaaacggcgaattaaaagcagcagcaacttataaaaagaaatatggcgatgaaatttcccttgctgatgattatgtgattaataaaagaatccatgaaaagcttgaagaacaacagatcgaacttttagttaataaggctacaactgggacccaagagtatagtaaccctgccttaaacgcaccgcctcaagcttcggcggcaattgctaaagagttaaaatcattgacgcctgaacagatgaaaaacatcaaatacaatgatcaacgtttggatgtttacactgtgcatgctgcaaaagaaaaaggcatggaatgggcagcgcctttaattttaggactaagattggctggtgaaaaatctaataatagtgccgtttctgaaaagggtgctaaatcagttatgcagtttatacctgatacatggaaacagtacagtaaaggcggtcaaagggatattaataaccctgccgatactattgacgctgctttcgattttatttcagacattagtaaaaaatataaaacaaaagacccaatggttattgctgcttactatcatggtggggatgaagacgcaagaagagtattagcagggggacaacctaaagggcctagaggtcgcgcgtatttagagcgcatggataaatggttatctcaagattttggtgattatgcaaaaaaacctgctaagacacgcgaacaagcctatgaagagctttggaacagtaacgttcctgttgatgtaaaacagaaagcactttcccttactgatagatactacaatgggttggataaagctaaagaagaaaaacaaaaccaagtatatgattattactttaaaggcattaattcagggcaatttacttatgaacaaattcctgtggtagatattaatgctttagaacccaaccagatcaaaagtttagaagcggttagtaatgccaaatttaaaaaagatattaaaactgaccctacgatttacagcatgattatgctaaataaagatgagcttttcaaaggaaaaccacaatcagttttgcatcagtacgctgataaattatccccatcagattatcgtgctgtcacaaaaatgtacatcgatgttaatgcttcaccaaaagatgcaagaaaagaagatgctattgaagttagccctaaaacggtttcggattatttaaatccttatttaccaatgcttggtattacaaataagacaaataagaatcagatcgatcattatgctgctgttcaggctgacgtaacgcaaacattgcgtgaagctgaagctcgaaaaggaagcaagctgaccaaggatgaatttagtcgagccgttcttaaaactatcggcctaaataccaaaatcacaacatcacgttctttgtttggggtgtcgattggtagttctgaaagcactttaaatcgcatatactctgttaaaagcaaagacgatattgctcctaatactcaaaagaaaattgatgacttatttaaaaaacaaggtcgtgatttatcaaaagtaacattagcagaatatcttaatgcttattactcaatggctagaaggggtttttaa

SEQ ID NO: 57540 - DNA, 711 bp, Acinetobacter baumannii
atgcttattactcaatggctagaaggggtttttaatataatgagaattttaattttgttagcatcttttttatgttttattccatctgctaatgcggaatggattgatatttttaaagatggcaaagaaatctactctgtggataaagaatcaatggatttagatttagataatgaaaaagcaaaaatatgggttaaaaacacagttaatattagtaaacctaaattgaacgatgttgtggaagtaaaaacatattttgatattgcgtgtaaacaaagaacattaaatttaatttctatggtttcttataataataagaataaagttgttaaatcatttaacccttcaactcctttaaaaattaatgcgattcccgaaacagtcggcggaaatatttttaatgcgatgtgccaagacttaatacccgcaatgaaagatcggccatttgagaaattcacttcctctgttataaagacggatcagtgtttaaaagatgctgtaaattctaaaaggtattcagttgcaaataaaagtaagctaaaagatgttgctttagaaaaatgcaactctttacttaataattcatatagcactggggtatcttatgcttctatcgaaaaaggagaaaatttaacggatgaagaaatccaagtcgttaaattaaaaatttataatcgattggaagaaaaattagacttttacattcaataa

SEQ ID NO: 57541 - DNA, 240 bp, Acinetobacter baumannii
atgaattatttagtcattaaaaagctaggtcacggtttttatttaggtaaaggcaatactcgacaaggaggtaaagaatttatcgttataaagagcgataaagaaatgctcgtaggtgctgaaagttataaatacgatgcttcaagcaatcaattattatgggaaggtatccaaaacctaggacaagaagtggtcggttttgctgacactgaagaggaagctttagatttggctttctaa

SEQ ID NO: 57542 - DNA, 2415 bp, Acinetobacter baumannii
atgacagttcctatttccgaccgtttaagccaactatatgttggtaacggcacaaacacccgatttgattttacctttcgtgttttcgatcaagaggacgcaacaggcatcgcagtccgtaaaaaaggtagtactgattttgaaacagtagacccatctgcctatgtggtaacaatcaaccctgacaatatggggggttatattacctttaattctccaccagttgtgggaatgtatttttatattgcaggtgccacaccattagatcagcttttagatatcacaaactatgacaatttttatccagatgcgattgaaagggcgttagataaacttacggccttattacaagaatggggaacgcaattagatttagaaaaacaggccagaattctagccgatattcactacgattcgttggcaatggagcgtgaagaaaatcttgaaaatcgattgctttcatacatcaacgcaattgtgggtattaccaaccctaaaatttttgatggtatttctgaccgtatggttattaccgaggacggtcggacacaacgtgagtttaataagtcaatccctttttggactaatgattatgtcgcttttaaacaagagacgatccaaagagaaaagaaaattgttgattatacagatcaagaaaacgataaattagatgcgtctttaagcctaaaaatttcaacagaaactgaacgtgcactgttagcagaagagctgctagatgcaaaaactaatgcaatcggcgtgggaaataaagcctataaaacctatgctgaaatggacgcagataaagcaaacattcctgcaaattcaaaggtcactgttactaatgactcaacccaagaaaataatggtgattggcaatatgatggaacgacttttacgaaatcaacatacgacccaaaaacgcaggctattaattttgcaattgaatatgttgatgaaaaagccattttaggtgcaggggaagatattgttattcaaaaagatgtgaacgggaaaacagtttacttaattaaaaaagatggcaagttctttattctgggccttgcaaaagatatcgcaacttcaatcaaccttttaaatagtcttatctatacttctaatacagttaatctaattgaatctattgaccgaaatggcattaaaacgcttgtacagaatgttaagggcgatttgattttaccaaatatcggcaacttaacaattgcactagatgccctaaaacgaaacgcatctaagcaagacatgattaatctgcaagccgctcatttggctggtaaatacgctgattatgttttaactgaaagcatgcctgagtttgaatatacagattatctacttaaagcttcagatgttaatgctctcaatatttttcctcatccagtaacgctattacgcatcccagctatcacgcggatcggcaagacaaaatatcttttattctttgaagcccgcgagaatggtgatgactttggtatgaacagccaaggtgttgcgacaattgatgttgatgaggcaactggcgttgcaacagtatcgaatattcaatgtttgcatgctgcatttacagattccgataataagcttcgcacatttatgaatgcttgtgcagtgaagttagatagcgggagaatcatctgtctatatgttagaagatatggagaaactgagcatgaactctataagcgatattcagatgatgatgggttgacatggtctgagtatgaagatattacgagcgtcaaaggctcaacaggctggaatttgttgtgcccgtgctcacaaggtttagttaaacgctatggtcagcacaaaggccgtattgtattccctctctggacttctggtactgcttactcgacaatcgcatttagagcgggctatgtttattcagatgacaatggctctacatggcatcttggtgaatttgcagattatgcaacagcgagcgaagtgcagtgtgccgaagacctcaatggcgacatgttgtttagcattcgcctagaaagtgcaaatcccccaaaaattctcgctagacattctgatataactaaaaagtacgccttggttgagacaaataaatcgctcacttccgcaatcatcatgtccgggttgattcagggcgagaataagtacgacaagtctgcaaataagtttcagctaactgcatgtagaacgatgggacgagcagatttgcttatccatacttcttatgatggaggcgaaaattggataactcatctattgccttcaacggccggtacgggtgtcgcttattcttgcattgagaatatttctgcaagcaagaagtttttgatgtgggaatcagatggcactgtgaattttaaatactcagtagttgcattatcaaatttaataaataatgaggtcagttaa

SEQ ID NO: 57543 - DNA, 930 bp, Acinetobacter baumannii
atggcgactttagttctcaagtcatcaaatgcattagatgcatctgtagaagctcttgaattcaccttgtataaacaacgagtaattgcggatggtggatttattgcgaatgaagtggctgttaaagccgcttttcaatattgttttgataacaatttaacagaaagtgaggttttctctgcaacaagcgctagttggggtgttaagttagaagcaggtaagcctaaaaaactctattcactttttagtgaagcaggggatattgatgtgactattggggcccccacatcaattaactacaacacaacaacattcccagtcccggttattgagctaaaagcagcatcaagtaatggtttgaaaacgctaggaacagcaaacaatgttaagacatctggcttgtgtatcattgctagagccccgattctagcgagcggagccgcatatgggtctacaggcacatttgctctaggtgagttatcaaacttaacaccatctgtatcagccggagaaacgcttgataagcgtatgaacacagagttttatattcgtagtgcaaatactgagattgctaatacatggcgtcatttggcttatggttatggttctcagggcaatatcgaaacaacagcggctgagctaataaatgcttctgtatggaataaaacatcaacgttcttgcaggctggtttgatgcaactttataaagatggtgctgtacttaagcaagatacgactgtgctagagaagacatggattaatgacttgtactttaatatcggtcgatcacgaaatgcggcaacaaccactgtggactatgcgtctccgctttatgggtatgttgcagaggcctggtgtcttgtaaacacaacagctgaaaagatgagaatcttatcattaagatcttcgcagctatatgcagatgcttaa

SEQ ID NO: 57544 - DNA, 333 bp, Acinetobacter baumannii
atgaataggctccaatttctacttttaaaactttctgaagagtgcaacgaagttgctcaaatggcttctaaatgcatgcaattcggtctcttggaaagacaccctgaacttgatgagaacaacaagcagcgcttgcatgcagaacttaacgacctaaatgcaattatcaatatgctgaatgctcaatttaagtttgggtatgaaccagacaataaagcaatgaatcgcaaagtatccaaggtagtgcattacatggagtactccgtatcaattggttgtgttcactacgaagtgccaaaagagcagtacgaagatgcgcgaatcagtaattga

SEQ ID NO: 57545 - DNA, 480 bp, Acinetobacter baumannii
atgacggctaaagttttagacccttgttgcggttctcgtatgtttcattttgatcgtagcaatccaaatgtgacctttggggatatacgtaaagaatcacatattttgtgtgatgggcgctcacttgaaatcaatccagacatcgaaatggatttcagaaacatgccttttgaagatgagacttttcatgcagtagtttttgacccaccacatttagtgcatgcaggcgataaaagttggcttgctttgaagtatgggaaattaggtgaaaactggaaagaagacttggccaaaggtttttcggagtgctttcgtgtgctcaaactaaacggtatgttgattttcaaatggaatgaaacccaaattaaagtcagcgaagttctagccttaacagatcaaaaaccgtggttcgggcacccaagtggtaaacgtgcaaatacgcattggatcggttttatgaaatcggagccaaacccatga

SEQ ID NO: 57546 - DNA, 294 bp, Acinetobacter baumannii
atgtcgataagccgtagctttaatttgagcgcacttgaaaacttagcacaaaaaattgaaagggttaaccaaaataaccacgaagttttgattaataaactaaataattttgtaaatgccaatactagatttgaaagtcttaaattgctcttcttagaggctggatttagtgtcgaaacttcagaagattttgcgaaggtacctcaagatcaaattgacgcttttgtcaatgagcatacccgttttgaaagcctaacagccttgcaaaatgaagctttaaaagaatatttataa

SEQ ID NO: 57547 - DNA, 390 bp, Acinetobacter baumannii
atggaaaattttttaacttcaaatgggctagctgccgcttttaacctttatggcactgtcatgatggtggctttagcagtgagcttagttgttgcagtagttttaattatgcgctttccacgttcacctcaagaatggatcgttggtttgatttgtacggttgtttcaagcttgactggtggctcattcattatcatgaaatggaatttacatgagtgggtgacagatatatggggaatgatcactttaggtggattcttctttatttgtggcttacctggttgggcaattgtgaggtggatatttaatttcattaataaacaagaaggaaaaaccattgttgaagtcatgaaagatctaaaaaaagcgaaagatgatatccaaagctaa

SEQ ID NO: 57548 - DNA, 219 bp, Acinetobacter baumannii
atgtcgaaaaatagcgatttatttgatcaaatcaaagcagtaagcaacgggatagacacctatgaaacccgttcagaaatgttggcagatagtgcaaaaatccctaaacatacagttgtaagattggttcaagattcaaaagtagaaactgggtgttgggatggtgttgagtttaaaccctttgagcattgtaaacacctgttgacagtgcaagactag

SEQ ID NO: 57549 - DNA, 447 bp, Acinetobacter baumannii
atgttatcaaaagctaagaaactacatcgtcaaaaagccttacgtccttctactgaacaatgggaaattatcgcaactattggatttgccattattcttacagttatcgggtatttttgcattgggggagctaaagcgaatgcagcggtggtagcgagagcagcgtctgtatcctcagctcgtccttcgacatcttttgcgcggtcttacagcagctcgtccactacaagttttcgttctagtccagttaagactgtgacaaaaccgagtacgattcgttctgtgaagcctgttacaacgcctgctaaaccgatgcctgtttcttcttcatctacacagaagaaatcgcgtaagattggtttccaatatgattactatgcatttacagattgcatcccttattcaagcggaagtttccaaggttggaagtgtattgatcgggattaa

SEQ ID NO: 57550 - DNA, 867 bp, Acinetobacter baumannii
atgattaaagtagtaagtttcagcggtgggagaacttcagcataccttttacatctttttaaagatgatcctaatgctcgttttgtgtttatggatacaggtgcagaacatcctgctacataccaatttataaaagatattgtgaaacattggcagatcgatctgacatgcctaagagttgtaattaaccctgagatgaacaaaggcggcagttacaaggtcgttgatttaagcgaattaaaacaagacctagaaccttgggaaagtatgctttccaagtatggagcgcctgcatttgatatgccgtactgtacagctcgaatgaaaacagaaccttttgaaaaatactgcaatacgacatttggcaaaggcaaatacgaacgttggatcggaattagatttgatgaacctaaacgcttacctttagaaattcttgagaaattgcaattaccaatccatgcaaaagccgtacatcaaaaatgtggttttcgttacttagcagaaataagcactttcgataaagacgatattttggattggtggagtgaacaaccatttgatttagccattactgaacatttgggaaattgtgttttctgtatcaaaaaaggtttaaacaaaatcgcgcttgcagcaaaagatgagccagaaatggcagttaaatggattggcttaactgaagggccaaatgtaagaacagaaggccgtaaacacaatcataaacggatgtatcgacaacgcttgcacatgagcgatgtcgttgagattttcaagggtcaaacccgtgatgaattatacaaagggttaagaagtagtaaacgctttgaaacaggctcttgttcggagtcatgcgaggcattgacgtaa

SEQ ID NO: 57551 - DNA, 261 bp, Acinetobacter baumannii
gtgaattttacaaacaaggaaaaagttgcatgcccgaaattaaatgaaattgagcaagaagctcttcaattcatcaatgaaaacaaggttgcttatacacgccaaatgtatagcgctcttcgcgttaaagataaagggctaagtcttaataagtttagaaaattacttcaaggacttagtgagaaacaacttataaaatttattcctgcacaacaagacagcttatctgcttggggtgcaaataaggcaggtgaaaaatga

SEQ ID NO: 57552 - DNA, 480 bp, Acinetobacter baumannii
atgacagcgaaagttttagacccttgctgtggttcaaggatgtttcattttgatcgtaaaaaccccgatgtagttttcggggacattcgtaaagagtctcatatcttatgtgatgggcgctctttagaaattagtcctgatatcgaaatggattttagaaatatgcctttcgaagatgaaacatttcatgcagtagtttttgaccctccacatcttatacgtgcaggtgataaaagttggcttgctttgaaatatggaaagttaggacaaaattggaaagaggatttggccaaaggttttgccgaatgttttcgtgttcttaaacccaatggcatgctgatttttaaatggaatgaaacacaaatcaaagttaatgaaatattagccttaactgatcaaaaaccttggttcggacaccctagcgggaaaagagccaacacacattggattggttttatgaagtcggagtcaaaccaatga

SEQ ID NO: 57553 - DNA, 2229 bp, Acinetobacter baumannii
atgattacacgtcgtaaatttttaaattactctttaaatatgggctttggcgctgcagcgttagcggctttcccatcgagtattcaaaaagctctagcaattcctgcaaataataaaacgggcactattcaggatgttgaacatgtcatcatcttaatgcaggaaaaccgatcttttgaccattattttggtacgttaaagggcgttcgaggctttgctgaccgttttacaatccctctgccaaatggtcgccgtgtctgggaacagctgagaagtaatggtcaggttttaaccccatttcacttagatggaacagccaataatgcacagcgtgcagatggtacgcctcatacgtgggatgacagtcagttggcgtgggacaatggacgtatggcaaactggccaactcataaaaccgatatatctatgggctattttaaagaaaaagaaatcccatatcagtttgcacttgccaatgcctttacaatttgtgatgcctaccattgttccatgcacaccggaacagatgcgaaccgctcttttcatttaactggtaccaatggtgcaacaccgaccaagcgttcatttgtaaataatgaatgggactggattgatggtaacccagcaacggcagaccgtggttacacttggaaaacctatgccgaaagattagaagaagcagggataagctggatttgttatcagaatatgccagatgaatggggcgataatatgttgggtgcattccgttcttttagaaaggccaacattgcatccggttatcccgtttcaagcggtggggagccgaataaaccatatgctgatacgggtcaaaaaccaccgtataaagcctatgatgcggctactgataatgccaaaaatccactctataaaggcattgcaaatacgctaccgggcaataaaccagaagagtatctcgacgcttttaaaagagacattcgtgaagggaagttacctcaagtttcttggattaatgcgccatcaatttactgtgaacatccagacccttcaagcccagttcaaggagcttggtttatccaagaaattattgatgcattaactgctgtaccagaggtgtggagtaaaacggctctgctcatcaactttgatgaaaatgatggttactttgaccatatgccatcgccatcagcaccatctcgactcaaaaacggccagtacgcaggtaaatcgacactaagcagtgttgatatgcaggatgaatattttgatcatgctgcacctgaaggaagtcattctcagcctacacctgatggacgagtttatggtccgggccctcgtgttccgttatatgtgatttccccatggagccgtggtggctgggtgaactcgcaagtttttgaccatacttctgtgctcatgtttttagaaaaacgttttggtgtaaaagagccgaatatcagtccataccgccgtgcagtgtgtggtgatttaacaagtgcatttaactttaaaacaccaaatgcagatgttttaccgcagctgagtggtaaacaaacacgtctgcaggcagatgcgctaagggaaaaccaagaagctttgccagctgttcctgtacccacggatattaagttacccattcagcaaagtgggatccgtctatcacgggcgctaccttatgagttgcataccagtgcgcgttgtaaagcagatggtaaggtgcaattgattttttctaatacgggtaagcaggcagcggttttccatgtatatgacaagctcaatttagaccgtattccaaagcgttatattgtcgagccgaataaaactttagatgatgagtgggatgctttaaacgataacttaggccgttatgacctatgggtacttggtccaaatggctaccatcgtcattttaaaggggatactcaacgtattatcgatagtggtgttaaacctgaaattcgagtgtgctatgacattgctaatggtgatgtttatgtcgaactcatgaatgagggagccaaggatacaatattgacagtaaaaccttgtgcatatcgacaagatgcgccattgcaactgaccgtaaaagcgggacaagttgttaagcaacattggtcgttggctgatgttgggcattggtatgattttgaagttacgagccagagtgatccgtattattaccgacgttttgctggccgagtcgaaacaggtgaggactcctttagtgatcctgcaatgatctaa

SEQ ID NO: 57554 - DNA, 435 bp, Acinetobacter baumannii
atgactaaacccgttttaaaaactcgtgatcaatttaagttctttttagatattcaaactcgctgggcagataacgatatttacggtcatgtgaataatgtgacttattatagctattttgatacggcagccaatgctttgctcatccagaaaacaggttttgatattcatgaagcaaaatcaattggtttagtcgtcgactcagcttgtagtttttttcaagagttatcatttccagaaattattcaggtaggtgttggggttggtaaaattggtacaacatctttacgctatgaattggcaatctttaaacaaggtcaagaccaagcatcagctcaaggacattttgtgcatgtgtttgttgaccgtgaaacacgcaagactgttccaatatccgagtcagtccgtaaggttttagagaatttcttattataa

SEQ ID NO: 57555 - DNA, 1158 bp, Acinetobacter baumannii
atgagccattttcagtttcagaccgttcccaacattatttcaggactcggttctatacaagaattacagaatgtgttggcatcaaaaacttaccgcaagttattactggtaactgatgcgggtatgattaaaaatcagttacacctgcctattcttcaaattttagatactcttaaaattgaacatgtcatttatgctgatgttcaggccgacccaccagagcaagtggtattagatgcagcgaattatgctaaacagcaaaatgtagatgttattgtcggctttggaggcggaagttctttagatgtagccaaagtgattgccttactcgcacatcctaaccaaactcaaaacctacaagaaatgtatggggtaaatcaggtcaaaacagcccgacttccacttattttaattcccactacagccggtactggctcggaagtgacgcccatatcaatagtgactacaggtgaaacgacaaaaatgggaattgtctctccggtactctatgccgatacagcaattcttgatgcaacttttactcaaaatctacctgcccatattacggctgctacaggtattgatgcgatggtccatgccattgaggcatatacctctaaacataagaaaaatatttataccgatattttagcgaagcacgctttaaagctgctaaaccataacttaccgaaagttcttaaaaacggtaatgatttagaggcacgtcagaacatgctgttcggctcaatgcttgcgggtcaggcatttgcaaactcacctgttgctgccgtgcatgctttagcctatccattgggtggacattttcatttgtcgcatggacataccaatgctttggtgctcgttgaagtactgaaatttaatgcgccctatgccaaacaatactatgcagaacttatgcaatggcttgatccatatagtaatggcagcaccgatggtttgtgtgatctgtttattgaccatatgcaaaatcacttagaccgtagtggtttgactttaaaacttagtgatttgagtattgaagagtctagcttaccaagacttgctcaagatgccatgttgcaaactcgattactgcaaaataatccacgtgacatgacagaagcagctgctttagcaatttatcaggcgatttattaa

SEQ ID NO: 57556 - DNA, 1245 bp, Acinetobacter baumannii
gtgaaaatagatactgatgtcaatactggatacggcaaggataccgacaaaaatggatatgcaaatattaagtatcgtgagctaattcaaaaattaacagcaacattatcattgacgcttttgtcatttggatggggctctacagtaaacgcagcacaacaacaaatcgctttagtaggaacctggacatctatcccagatgcaccacttgtgcaaaaaccagaaaaagccagtgaaggtttgtaccagctacaagttaatgctgacgggaccttaactcctgttaaggtattgaaaatgaaaagtccatcttgggttgtaaaatcgaaagatggccgttttgcatataccactaatgaagaaaatgaaggggcggtaacggcattatcggttcaaaacggaaaggtagaggtattgaacacggtaaatagtcatggcgggcatccaacacatgcatccatcagtttagatggtaaattcctatttgtatcaaattactctgcatttgataaaggacgtggcggtgtcgctgttttaccaattttaccaaatggtcatttgggtgaaatggtacaaaatattgtttttgcggagggttctggtcatgttaaagggcgtcaggatagtggccatgcccattcgacaacttttagcccagatggtaagtatttatatgcaagtgatcttggaaatgacaaagtctatgcttttcgttacaacccaagtaagcctcaaccacttgaagcggacaagagccgagatgtgagttttaagcatggttctggtccacgtcatatggtcttttcaccaaatggtaaacaggcatacattaccgcagaaatgcgaagtgaaattgtgacgtttaacgtacaagatggccatttgaaaaaagttgctgagctaaaactggttcacgaagacaaaacacctgaattcaagagcgcaagtggaattattcttagtccaaatggtaagtatgtgatcgctgcaaatcgtggtgcggataacaaacttttggtatttaaaatccaacagaatgggctgttaggtcaaccgcaagtttataaggccaatggtattgaaccacgtgctttttcatttgatgagtcaggtaaatatctgtatgtgacgaatgtttatagtaataacattagcttattccgttttgataccaaaaatggctcattaaaacctttaggcgatgcagctaaaatatcgactccaactgatatcaaattcttttaa

SEQ ID NO: 57557 - DNA, 615 bp, Acinetobacter baumannii
atggtcaattcaaacctgataagaatgaataattttgtcgggtttttgcagatttttgcgtgtaaaatacttatttatttttttagtttaagtggttggaataaatttctaatggaagcacagtataaggtgttatgtgtctgtttaggaaatatttgccgttctcccacggctgaagtggtttttagacattattgtgatcagcatcaactcaatatcattgtcgattcagctggaacaagtaactatcatccaaataaagcacctgatcagcgtagccaattgcatgcaaaaaaaagaggctatgacttatcttctttgcgggcaagacaactttcaactcaagactttttagattttgatttgattttggcaatggatcatcaaaactttgatgatattcacgacttgctacaaagagctatcttccaatttggcagtcatcaaattcgggcaaaagtggcattaatgagtgaacatgatcctcaatatccacaacaagctctgcctgacccttactatggtggagatgagggctttgaacgtgtactcgaccaatgtgaatcaagtgcgttggcgtggattaatatcctaaaaaaacaattgaatgtttaa

SEQ ID NO: 57558 - DNA, 339 bp, Acinetobacter baumannii
ttgttccttcttacatttttcattccttggagtgcaattaatttagttgattactattttatttctaaagaagaatgcgatgtagatgccttatatgacccaaatggtaaatatggccgctggaacacgattggaatcgcttgttattgtattggtatcttacttcagttgccctttattgatagtaaattctataaaggacaaattgccgaaatgttgggtggagtcgatttatcctggttagtgggattgttatccactgcagttttatattatgtacttgccaaaagagctcaaataaaaatttcaaaagctcttcaacttgaacgaataaaataa

SEQ ID NO: 57559 - DNA, 2211 bp, Acinetobacter baumannii
atgcttttagaatatggagttaaaccagaaattcttcatcatgaagtaagtagtacctttacctgtaatgacttggacaagtgggttaacgatgctttttatcaatttgatacttctcgtctgagacttgatatctcaataccacaagttgctttacaaaagaatgctcaagggtatgtcgacccacgtttatgggaccgcggtataaatgcagctttttttgcatacaatgcttctgcctatcgtattgtaaataataaccatgaaacaaatcatgcgtttatgggtacaaatgttggtctaaatctctatgattggcaattacgccatactgggcagtggaaatggcaagatcataatgaaatacaagaaaaggtttcttcctacacatcaaataatacatatgcccaaaaggcttttcccaagctcaatagtgttgttactttaggtgattattttaccaataataatttttttgatgccctaccttatcgtgggattaacatatcaagtgatgaccgcatgcttcctaacagtatgctcggatatgctccccaaattcgaggttatgccaaaagcaatgcaaaagtagaggtacgtcagcaaggaaatttaatttatcaaacgactgttacacccggaagttttgaaattaatgatctttatcccacaggcttcggtggcgaattacaagtctctatatatgaaacaaatggagaaattcaaaagttttctattccttatgcttctgtcgttgagatgctacgacctaaaatgagccgatattcttttactttgggacagtttagagatgccaatatcaatctaaaaccatggctagtgcaaggtaaatatcaaagaggtattaataactatttaacaagctatacaggctttcaggcaactgaaaactaccagtcttttttaataggtagcgcatttgcaactccaatcggtgcaatttcatttgatgcaactcagtcgtcagctgaattcgaacaaaagctcacccttaaaggacgaagttatcgtttaagttataatcgactatttactccaaccaacaccaatttaactttagctacgtatagatattccacagaaaattatttgaaattacgcgattcaattttaattcgcgacttgcaacaacaagatattgatagcttttccgtggggaaacaaaaaagtgaatttcagatcacattaaaccaaggccttccaaatcaatggggtaatttttatttagtaggctcgtggattaattattggaaccagcctaatcgtaatcaacaattccaatttggatatagtaatcagtttaaagatctaacttacagtatttctgcaattactcatgagcttgaccaagaaaatcaaaattctggtcatgaaacgcaatatttgttgtctttatcttttccacttcaatttaaaaaaaataccgttaattttaatagttctatttcagaagatagccgaactttaggaatgagtggttatatcggagaccgctttgattatggctcatcaatttcatatcaagatcaaggacaaacaagcctaaatatcaatggcacctaccgtactaactatacaactataggcgcttcttttggtcagtccgatacataccaacaagaaatgatcaatttaaatggaagcttggtcgctcactcacaaggtattttatttggcccagaccaagcacagaccatggtattggtatatgcgcctcaagcgactggtgctcgagtcggcaatacctctggtctaagcattaataaacaaggttatgctgtcattccttatgtaaccccctatcgcttaaatgacattagccttgaccctcaagggatgccatcaactgttgaacttacggaaacaagtcatcgtattgccccgtatgcaggatcaatcactaaagttaacttttcaacaaaaacgggatatgcagtttttattagcaccaaaacacctaatggcggccatttgccatttgcagcacaagtttttaatcaaaacaatgaaatagtcggaatggtagcacaaggtagccggatttatttacgtactcccctaactcaagatcatctttatgtgaaatggggacaaagtaatagtgaagaatgtcaacttgattatgacattcaatcaaaaatcttacaggaaaaacaatcaattattatgacagaggcagtctgcaaatga

SEQ ID NO: 57560 - DNA, 1020 bp, Acinetobacter baumannii
atgaaaaaaatgcttataaagagcggtttactcatcactagtttttttatttataaccagacctatgccaactgtactttaagcaagggctttaccacagtcgatattccaatgacgattgggactattgtagtacgcccgaccgatccaatcggaacagttctccaaaagaatacttttactatttcacccaataattctactgcaacttgcaaccgtgccagtgaccaaattacagcggcacttccattaaactatcctgttagctcgattggaaataatgtgtatgcaaccaatattccaggtataggtattcgactttatagagaggcattcgactctacggatttttctggatattacccttataaacgcagcttgactcctaatacaacatatacactttcaccaggctattttgtcatggaagtgattaaaactgctgcaactacaggttcaggtgcattagttgctggtcgttacagtacctattatgtaacaggacaacaaaatcgtcctttcttaacaaccacagtattaagcagctcccctattcttattgcatcatcttcttgtgaaattcaaaacggtatagatacggttgttcagcttcccactgtgatgaaatcaggttttagagccattggatcaactcaaggtgagaaaaactttaatttatcgattctttgtaatggtggggaaaataactcgggtgtaccaacgagtaatacactgagtttaagctttgactacaattctgatacttcaaatagtcaggttattaataacagtgctgctgactcaactaaagcgaacggagttggtgtggaattgttatggaatatgaatggcgcgaacaatcctattcgaaaaggaaacaaactagatattggtacagtaagttctaaccagacagtacagtacgatattcctttaacggcgcgttattatcaaactgcttcgaatgtaacagccggtgaagtcaaagctaatgcaacggtaacgatccaatatgattag

SEQ ID NO: 57561 - DNA, 1581 bp, Acinetobacter baumannii
ttgcaagtagtagccaaagaagcaggcaagattgcaggtactgaccttgctttgcgtactgaactatcgggacttatccgtcagcgcttcaagcaattaaccaagatcagtatttcagcgcgtgaagtgaatatcgcaatgggtggtcgcaaagtgcaaattgcacttgatgatgcccaaaagcggccgatgactgaatttggtaatgcttcaagaatgttagacgcttacggcaatgaaattatgtttattgccgaaacaaatacctggtatcgatggaacggcgtttattgggaatcgtgcgtgaacatggtcatcgagcagtatgcaaagcaaactgttttggctatgggtgacgaagctaaaaagattgatgacgatgcacaacgtgccgagttctatcaattctgtgcaatgtctcaaaaagcgttcatggttaaaaacatggtgacgcttgctcaatccgacccgcgtgtattggttccgatcaaagaattagacagtgatatttatttattgggctgtgcaaatggcgcggtgaatttgcgtgatggtgaattggttaagccaagtcaagaattgctaatcacatatagcactggtgttgaatacaaccctaaagccaaatgtcctctatttgaaaagactgttcttgatgccttttttggcgatgaagaaatggctaattttttccgtcgtttaatgggctacgcgattttaggtaatcctgtcgaaaatctaatgatcattcctttcggggatggtgccaacggtaaatcaactgtattcacaacaatttctaaagctctcggcgattattcaacgactactccagctgaaacattcttaggcgatgccaaatcttctgcgggtggcgcgcgtgaggatattttgcgtttacgtggttcccgctttgtctatgtcggtgaaccggaggaaaacaaagagctgaaagaaaatctcgttaaaaccataacgggtggcgagaagcttagcgcacgcggtctttattctagacacacagtcgagttttcgcccacttggacggttgtgatgcctacgaaccacaagccaatcattaaaggaagcgaccatggtatatggcggcgtttaatgatggtcccttttgaacgtaactacgataaagacaagacgcttgttaaagacccttttctagcaacgaagttgcttaatgaattaccgggtgttttagcttggcttgtgcgtggggcaattgaatatcagcaagaaggtttaaacccgcctgaaaagacgaaaaaagcacgtgacgaataccgcgatgaaatggacctgttgaaagactggattagcgaatgttgtgaagttggggaccctgaaacggtttctgagttgtcctcaaagctttgggaaagttggcaagagtacgcttctaaaaaaggtgaattgcggtacataccgacttcaagaagtttgggacggcgtttgagttcaaagttcaaaacagcaaaaggcgcaaatggtgcgagaaaaatgctcggtattcgtgtgcgagtttctgcagattcagatttgtttgaggacgaaagcggtaagcagtag

SEQ ID NO: 57562 - DNA, 210 bp, Acinetobacter baumannii; identical to SEQ ID NO: 42012

SEQ ID NO: 57563 - DNA, 729 bp, Acinetobacter baumannii
atggctttacgtggaaaacaacaacgatttgttgacgaatatctgattgatcgtaatgcaacgcaagctgcaattcgcgcaggatattctgcaaaaactgcatattcaatcggcgaacagaacttgaaaaaacttgaagttaaaaaagccattgaagaaggcgaaaaagaacttgcagaacgcaacaagatcacacaagacaaggtattaaatcgcttatgggaaatggcaacggctgaccctaacgaattaacgcgatacacacgtgttaattgccgattctgttggggtattgaccacaattaccaatggacagtaggcgaatttaaaagagcaattcaacacgcgcacgacacgaatgcacctgaaccaaaatgtgaaggtggtttagattttgatcgtctcaaagcgccgaatctagattgcccagaatgccgcggcgaaggcgttgggtatacgtatatcgcagatacgacacgtgtaagtgaccaagccaaattgctttatgcaggtattaaagaatctcagcacggcatagaaatcaaaatgaatgaccaagtcgctgctttgattaaagcaggtcagcacattggcatgttcaaagatcgtgtagaacttggcaatgacccagaaaacccgttaaccgatccaaaagcagcaagcacacagttaagccttcttgccaagttgaaaaaggctaaggctaaaaaggagaaagacaatgcctga

SEQ ID NO: 57564 - DNA, 963 bp, Acinetobacter baumannii
atgaataatctaatcactgcagctgaagcatttgcagctcttcaaaaaggtaaaactgttctttgtcgtcctattggagacatgttggacttttctgacttagatcaattccccgcttctgtttttggtaaaccgggttttgaattctgcatcaaaatcgaaactattgagctggctggcattacattcacaaagccattaactattgatgagtatgaagaaggtcaggatgtttttgtaattactacatattcgccttctatttacgtcgtgaattttaaaaccaccgcattaattgaagctattaatagtggttttgttcagcgtgatgctgaaaatgccaagcttcaattaaaagctttttcaaaagcactcggtattgaaatcaacaatgatttaagtgttattcgtcttggtgaggaacctaaaaaacagagaggcaaaaaatcaaaagcagaaaagcctattgaagttatttctgcagaaattcaaccaacaattgttattaccgaacaaacaaatgtcaccacatctgaggatctaataattccagaaactaacgagcctaaagtagatcctgaatatcagaaggcattagatgcccttcttcagcgtgtaaaagaatcaaaaacacctgaagaggtaaatgcagtttatcgatatacccgtacgtggaatgacaaacaaatggaacctctcctacttgccactcacaagcgacttgaagagctcgaaaaatcaaaggtacctgcaaatgaaccaccttcactaatggtccagatccaaaacgcgcccgacctcacaacattggatgctttggaaatagatgtggccgcacgagatccacagattcaatcacgactcatggattttgttaagaaacgtcgctttgaattagagaaccatacatctacgccacttcaagaggctgagcctgattatttattaggagacggtttctaa

SEQ ID NO: 57565 - DNA, 771 bp, Acinetobacter baumannii
atggatatggaattatataaatcagtagtagatttcgttagaaatcataacaaagctagcacgtcacatattcaacgtgcatttaacctcagttataaccgtgctgttccaatcatggataaattagaagaagactatgtaattagtccaatgtcagcaaatggcaaacgtgaagtttatccagaaattgtggcggagctccagcaacaaattaaagttctaactgccgatttaaaagagtcacaaagtgattttgcttatgcatataaatctgtcaccagctggactgaacgtgcatataaacaacgtgaaaaagttgaattaattaagaatgaggttgagcgattccagcaatcaggatcacctttagacctaaatcaattcttaagtaatttaattgaattggccacatttaaaaatgatcttgaatttacagaccatttattagtaccagcacaaaaattctttacccatgattttaatggtgatgggtttaaatatcacgattcactagaagaagctcagaaagaagcagaagttaatctcgactattacagagatagagttgcagatggccatcatgttgctgatgaaggtgaattttttgaactttgctacggcgttgttattgcatcagcaggatacacagttgatgacgttgtgaccgaggatcaccacaaaaaagatgagtttacaaaatatgaagtgggcacagaaatcttaagccttcactttaataaatgtaatagcgaatcgggagctgaaggatga

SEQ ID NO: 57566 - DNA, 729 bp, Acinetobacter baumannii
atgttatacggcgatttcggtgcgggtattgaagacgacccttggcaagttattcctacagaatgggttgaagcagcacaagcacgttggaaaccacttgaagacatgcgtattttgcatcgtggtgatttcaagatggattcttacggattggacgttgcacgtggtgggggcgataacacaattggctttgcgcgatatgcacattggtatgacaacccgaacgtacttgaaggtaaagattcaccagacggaccaacaagcgcctcgtttgctgtttcacatgttcgtgaccatgcgcccattcatgtcgatgtcattggcgttggtgcaagtacatacgatttcttaaagcaatcaggtattcacgctgtgcctgtggacgtacgcaatgcggcaactgcattcgaccgttcagggcaacttagtttttacaacctgcgttcacaactctggtggcagttccgcgaagcattagaccccgcatacggcagtacagttgcattgccgcctgaaccaaagcttttagccgatttaacggcgccacgttggggattgcaaggaaccaaaatcaaagtggaatctcgagaggaaattattaagcgtattggccgcagtcccgactacggctctgcaattatcaatgcgcaaattgatacgcctaaacgccacattatgcagacgatcaatgcatcagctgcaagacgtgattatgacccttacgcgtag

SEQ ID NO: 57567 - DNA, 285 bp, Acinetobacter baumannii
atgtgcagtagcaattttacggaccttttatttggcggtaatagcgtgattgataagacagcaaagcttttcggcatggatgcaaagaaggcagatattcaagcaccaccaaagccaccagtacgacaggactctaagtcaccagatgcatcagcaactatcgatcgtgttcaaaacgcacagaactctatgtcgggcggcattgcaaataccttgtacacagatgcaacaggtgttgatgacgagaatttgcgtttaggcaagaaaactttactaggcggctaa

SEQ ID NO: 57568 - DNA, 1692 bp, Acinetobacter baumannii
atgactgaagacgatatcagagcgctgaaaaaacggtttgatgcagtttggcaaaatcgtgtcaatgatatggacgactattgtgccgaattagcattacacgttttgcctgttgctattaaaacgattaagaaccaagaaaagcatgaccgatctgcatggtccaaaattgttgataacacaggtaaagattcgcttaagactcttgcggcgggcatggtatcgggtacatgttcaccgagtcgcaagtggtttacattgcaggccgccgatgaagcattgcaaaaagatattgaagtaaaacaatggcttaaagctgttgaggacgcttgctatgttgcttttgcaaagagcaatgtgtatcgggcggtacatcatatctatacgcaagaaggggctttcggaattggggcggcattagctcctgatcacgggccaaattcaaaagctcaaccaatggacgttatcccaatgacgttcggcgagttcgcaataactacggatgagttcaataaaccaaatggtattttccgcaagttcaaactaaccacactcaatatggttaagcagtttggactagaaaacgtttctgatgctattaaaagtgcattcgaaaataagaactttgaacaagagtttgaagttcaccatgctgtttatgaacgagtagatgcaaaagggtatggcccaaaaaacatgccttatgcatcgatctactacgaaccaagtgcaacaaacaagttactacgtgaaagcggcatgatgagctttcaggttatttgcggtcgttggacagtatcaagtagcgatgtatacggtgaaggtcctgcaagcgattgtattggcgacttgcgcgcactacagaaagggcatcagcaaattgctgtaggcgtggactaccaagttcgaccgcctttgcttttacctgattacttaaaaggccatgagcgcgagacattaccaaatggcattgcgttctaccaagcgtcaccgacaagccaagttgctcaagttcaagcaatgttgaatgtgcagttcgatttgaacggcgttatggcacagattgcacaatgccaagagcgtgttaaacgcgcatttcatactgatttgttcttgatgctcgatgcttttgacaaaggaaaaatgaccgctaccgaagtgtacgagcgtaaatctgaaaagatgctcatgcttggtccggttgttgaacgtcagatcgatgaattattacgtccacttgttgaaatctgtgtgcaacgtgtgctttcacggaataagtacctccaacaaattgcacctgaagctattcaaaacgccgatgttgaaatcaatttcgtatcaattcttgcccttgcgcaaaaagcttcaggttctgccgtccttgagcgtgcattagcgatggttgggcaagtcgcacagattgacccgcaagtgctagataaattcgatacagataaatttatcgatgagtacatggatattaacggcgtatcgcctaacgtattcagaccaaaacgcatcattgaccaaatccgcagcgaccgtgcagcacaacagcaaattgcacaacagcaagctttagaagctcaacaagcccaaactcaaaacacaaatgccaatacggtgaaaacggttagtgatactgacgctgaaactgtatctgacttgttcttgcaaggtggtgcggcatga

SEQ ID NO: 57569 - DNA, 333 bp, Acinetobacter baumannii
atgagcgacctagaaaccaaagctaaagattataagagcgagcgtgaccaggaactaaatgatctgcgctcaatcttggaaacggaacacggtaaacgttttctaatgcgcctgattaatagatcgaactatctacagccaacctatggcacaggcgcacatatgagtgattttgcatttatggaggggcgccgagagtttggcgtttacatcattggcgagattacacaggtagattccaacgcatggctagacatgcaaagagaccattttaaaaagactgaacagaaggtgaaccatgagcgaagtgacaacaactacgacagcaactga

SEQ ID NO: 57570 - DNA, 846 bp, Acinetobacter baumannii
atggaacaatcagtagacaaaatcgcagcgttagcaattgcggctcaaggcaacttacctgtacaagttgataaaaccgcttcaattgcaatcgtacctgaaggttttagagtacatagcactgaaaaatttaatgctctgcgtgaccgtttccgcggcactttccaaacagatagtatcgaatcttttgtggattatgcaaaagctcgtggtgttgcaggtttaaaaaatttcattaatacccgtggcaccctaaaagctgaagcattttttaatatcggtaacgaagcagaccctggtcacgctgacgacacagccgttttagttttggataaaaagcctgaatttattgcttttgaaaatgcgaatagccgccgttataaccaagaaaatttaattgatcttttagacgattgggccgagttcgttactctccaaggtaaaaccactggtgaagatggttcgtccttaaacactattatcccattcgacaaaggcattcgcgcacttcgcaaagtaaaaattgccaaaaacgccgaattaaatagccatgtaaacgaaatgggatatcaacgcagcgccgcagaaagcctagaagcttcaggtattgatgaaaatttacctactgcaatcgtgttgaacactgaaagctacaaaggcttgcctattgaagcaattacaatttcccttcgtatctcggtaaaagactccgagccaacttttattttacgttttgtaggtaaagacaaccacgaccaaaaacgcgctgaccaatttattgaaattctcaaaaataaattggctgaacttgaaggcgaattctatcaaggcgttttcgaagcctaa

SEQ ID NO: 57571 - DNA, 846 bp, Acinetobacter baumannii
atggaacaatcagtagacaaaattgcaaatttagcgattgcagcacaaggcaatttgcctgtacaggttgataaaaatgcttcaatcgcaattgtacctgaaggctttaagctttatagcactgaaaaatacaatgctttgcgcgaccgtttccgcggcacttttagcacaagcaatatcgactcgtttgttgattatgcaaaagctcgcggtgtggcaggtttaaaaaatttcattaatacccgtagcacgcttaaagccgaagcgttttttaatattggtaatgaagccgacccgggccatgctgacgatacagccgttttagtcttggataaaaagcccgaatttattgcttttgaaactgccaatattcgccgttataaccaagaagatttaatcgatctattagacgattgggccgagttcgtaaccctccaaggtaaatctactggtgaagatggttcaaacttgaacactattatcccattcgataaaggcattcgcgcacttcgcaaagtaaaaattgccaaaaacgctgaactaaatagccatgtaaatgaaatgggttatcaacgaagcgccgcggaaagccttgaagcttcaggtattgatgaaaacttacctactgcaattgttttgaacactgaaagctacaaaggcttaccagttgaatcaatcgtaatttccctccgtatttcggtaaaagactctgaacctacattcattttacgttttgtaggtaaagacaaccacgaccaaaaacgtgccgaccaatttatcgaaatcttgaaagaaaaattagccgaacttgaaggcgaattctaccaaggtgttttcgaagcctaa

SEQ ID NO: 57572 - DNA, 495 bp, Acinetobacter baumannii
atgccttcgtcaattacatcttgcttgagcgtaggacggggtaggttttgcggttggaataatcggcccgcccatcgtcctgtgcgcgatgcaccgttaaactgtaaagttccgcgtaatcgaccgtctgagctaacacctttagcgagcgcggcgtattttgctgtactggtagttgaagcctgtaaacggatggcaagcaattcgcgaactgcaagtggcaaagagtcgtcattaatacggcgctctaaagttgatttctgcatatctggcagcgaaacaccatgcgcttcaagaatatgcttaagcattgcatcgcgttgggtagctgcctgtacttcaccatcggttaacgcaacggtgcgttttgccaatcctttttgcgctttgtctactgcttcaattgcagattcaacaagatcaaggtcaatacaaacgccacggtcattaattttttggtcaaggtgccaaagtgctaattcagctccacgataa

SEQ ID NO: 57573 - DNA, 288 bp, Acinetobacter baumannii
gtgttagtcgcatctgctggaatgtttttcagaacaccagtaatcgtgacattacctgctgcttctgatgcattaatcacattgtcagctgttactgagtcaatcgtaaaggtaacgccagctgtatttggagcagctgtatcaactgtcacaacacctgtatctgtacctacgttacctgctgcatctgttgcagtcacggtaatggtgtgtggaccgtctgcgagtgttggaagtgtattgtctgcaagcgtccaggtgccgtcaccattgttcactgccggatag

SEQ ID NO: 57574 - DNA, 708 bp, Acinetobacter baumannii
gtggaccgtagacctcgtacttatattttaacttcagagggggagcgtctggccaaaatcgtgacacgtatgatggaagaaacattttctattgaacgtctggctcaggcaggacaacaggaaattagtggagtagtttcggtaagtctaccgccagctacggctgcacatttggtaatgcctcatcttggtaagttttatcgtcaatatcctgagctacaattgagaatactcggtgatgttcattatgcctccttacagcatcgcgaagcagatatcgcagttcgctttggacgccctaaagatgattatctaattgcgcgtaaagctggtgaagttccttttggcatatatgcagcccaagaatatttggatgctatacaagaagaaaactatgaatggattagtgttgaagttggtggagttcaaggacaaaaacagcaaaagctaaaacaacggttaaattataaagagcctgttatggttacgaatcatcctgagcttcaatggcgggctacttgtggagcagttggtttagctgtactacctgattttttaggccagcaaggtcatttagtaaaattacctgatgatgaaccaatgagtgctgaaatttggttagtaattcatgaagatctgcggagtagtcctgcagtaagagcagtgatggattttcttttagattgttttgaatctttttgtgtataa

SEQ ID NO: 57575 - DNA, 702 bp, Acinetobacter baumannii; identical to SEQ ID NO: 53406

SEQ ID NO: 57576 - DNA, 618 bp, Acinetobacter baumannii; identical to SEQ ID NO: 53405

SEQ ID NO: 57577 - DNA, 435 bp, Acinetobacter baumannii
atgctaaagacaattgttgaatttaaatttgatgattatcagctatatgatcaaaatttatcagcagaagacgggaatactttagtacagaaaactgaagatattgcacaatatatttatagtatattaaaaaatagatatcacttaaatattgagttaaatgctgagcgttggggctgggaaatagaagtgccattacctgagattacgatgtatatcggtattagcgtttatgaagaatacagtaatggatttgcaatattcatttcaccaaatacaccaattttaagaagatttctttttagaaagttagatattactcaccatattatgttgctacaaaattatattaatgtcattttgaagtcccatgccggtatatatgatgtgcaatggtgggaggaaaatgagtttagatatgttgcagcgcattaa

SEQ ID NO: 57578 - DNA, 984 bp, Acinetobacter baumannii
atgcgaattttagcatggaagacagtacgtcggttcttctataacaaccttcataatcatgattacgaaacgacagtaagtcgatgtattaactactttttagttttcttaattattgggaatgtagttgctgtattactagaaacagtaaatgatctgtattacagctatcgtatatggtttgactactttgaaaatgtctcaattgcaattttcagtattgaatatctcttacggctctggagtatagtcgagcgtgatccgacacaagctgcatggaagcagcgtttagcatggatgaaaagtggtgaagcactgattgacctcatggcaattttgcctgcgtatctaaatttctttgtacgaatagatcttcgtatgttaagaattttacggttactccgattattaaaattaactcgttatttcatctcattgcaaatattgctatgtgtgattaagcgagaaaaaggttcttttcaggcagtgatttttattttaatcattatgattattatgactgcctctggtatttatgtcgttgagaataaagcacaaccggaagcttttagctctattcctaaagcaatgtggtgggcggttgtgactttaactacagtcggatatggcgatgtcacaccagtaactagcctaggaaaattattgggagccttaataacaattctaggggtagggattgctgctttaccggctggtattttagcttctggtttggccaatgaacttaaccagcgtaatcagcgccttgaacaagagttccgtgagttacttcaagtgcgtggtattgatatcatgcatgatgaagttgaaatagaacgtattcgacaaaaagtagggctaccaaaagaacaagcgcataatctgattattcaaattatgcgcgaaaaagtattagaagagaaagaagctgttagagagaagaaatgttattgcccgcactgtggtgaaaagttaacagattag

SEQ ID NO: 57579 - DNA, 411 bp, Acinetobacter baumannii
atgttgtttagtatccgcctagaaaatgctactaccccgaaagtaattgcaagacactccgacttaaccaagaaattcacaatgcttcaaacaaataagtcgcttacttcagcaactgtaatgtctggattgatacaaggtgaaaataagtatgataagacggctaataaattccaattaacagcctgtcgaacaatgggtagaacagatttgcttatacacacttcgtatgacggcggtgaaaattggcgaacccatttacttccttccactgttaacacatcggtcgcatattcttgtattgaaaacatttcatcaagtaagaaattcttactttgggaatctgacagtaccactaattttaagtattcagtcgttgcattatcgaatttggtaaatgaggttaattaa

SEQ ID NO: 57580 - DNA, 930 bp, Acinetobacter baumannii
atgtcgacattagtgctcaaatcattaaatgcattagatgcatctgtagaagctcttgaatttacattgtataagcaacgagttatcgctgacggtggctttattgcaaatgaagcagcagtcaaagctgcatttcaatactgttttgacaacaatttaacagagagtgaagttttctctgcgactagtgcaaattggggggtgaaactcgaagcaggtaagcccaaaaaactatatacactttttggtgaagctggcgatattgatgtgactattggggtgccagcttcaatcagctacaacacaactacatttaatgtgcctgtcattgagttaaaagcttcttcaacaaatggtttaaagactaaaggggctgccaataatgtgcgtacttcggggctatgtattatttcgcgcgcaccgatcttaaatacaggggcggcatacggtactactggaacatttgcattaggcgagctatctaacttatctgaatccatatctgccggagaaaccttagataagcgcatgaattcacagtattacgttcgaactgcaaatactgaactcgcaaacacatggcgctatttggcatatgggtacgggacccaaggaaatattgaaacaacatctgcggagttagccgacgcggcggtgtggaacagaactaccacatttctgcaagcaggtttgatgcaactttataaagacggcgcattattaaaacaagacaatacagtaaatgaaaaaacgtggattaatgacttgtatttcaacatcggtcgatcaagaaatgcgggcataacaggcctcgactactcatctccgctgtatggttacgtagcagaagcatggtgtttagttaacacgaccgcagaaaagatgcgagcgttatcatcaagagcttcccagatttatgcaaccgtttaa

SEQ ID NO: 57581 - DNA, 780 bp, Acinetobacter baumannii
atgccatcttttcaatctgccgatgcacaaattaactatcagacctttggcgaacagtcttcccctgctctggtgttttccaattctttgggcaccaattatggtatgtggcaaaaacagtttaatgagttaaaagatcaattttttgtgatctgctatgacactcgtggtcatggttcatcatctacgcctgacggtccatatactgtagagcaattaggtgaagatgttgtccgtttactggatcatctgaatattagcaaagctgctttttgtggtatttccatgggcggtttaacaggtcaatggctggcgattcactaccctaaccgttttagtcatgtcattgtggcaaatactgccgctaaaattggacaagaacaggcatggcttgaccgtgcaaaattagtacgtgagcaaggtttacaaccaatcgcagctacagcagcttcgagatggtttacagatccctttatccaaagtcatccttcaattgtcaacaacctgtgtaacgacttaagtgctggcagcgcaataggttatgccaattgttgtgaggctttggctaaagcggatgtccgtgagcaattaaaagacatcaaaattcctgtattggtggttgcaggaactcaagaccctataacaaccgttgcagatggcgagtttatgcagcagcgcattcctcaatcaaaacttacagaaatagatgcctctcatatttctaatgtcgagcaaccagaagcttttaataaaatcttaacggattttttagtgaactaa

SEQ ID NO: 57582 - DNA, 741 bp, Acinetobacter baumannii
atgtttcagtttatccaacagcaaaccgaattggttgatgttcttcaacaaatggatcaatgttcaacttatgggcttgatacagaatttattaaggttgataccctttggcctaaacttggagtatgtcaagtcaatgtcaacggaaatgtatatttgctggatggagtgtctttagatttaagcgagttttggaaaaaaatctttcttgctcaacaaaatatttttcatgcatgtggtgaagatattgatttaatctatcactatgccgatgaacaaaacctattaaatgtttttgatactcaagttggattatcctttttgggacatggtttacaagtaagttatcaaggtgcattaaagctttgtttagagattgatattgaaaaggaccagactcgatcagactggttggcacgtcctctatctccgcaacagctatgctatgcggcaaatgatgttttataccttatgcaattggctaaccatattaaagatcagctcaaacaaaaagggctttatgagtatgttcttgaggattgtagtagtttaacgaaagaaattattagtgaaacaccaaccccattgttatatacagatgtgggcaattatcgtcattcacgccgccaattaatgcaattgcaaaatttaagtgagtggcgtgaagaggtggttagagcaacaaaccagccacgtagttttatccttagaaattcgacgatgattgatttagtcgaataa

SEQ ID NO: 57583 - DNA, 213 bp, Acinetobacter baumannii
atggatgcattgattgctaaagcgatagaacaaacctctataccaaaagaagttttacttcgtaagaaatggttaaatgcgattcatcagcatgtgcttactaaaggtgatgaacaggatctcccagattatttattgggttggcgctatgagcttttaactaagccgcttattcagttatttaaagaagagaaagccagtcttttattttag

SEQ ID NO: 57584 - DNA, 342 bp, Acinetobacter baumannii
atgtttgaattcgccaatattcggcagaataaagttggtagtttctatggtggagaagacggtggtagaattttacaagatgatttgattagtcagacagattggaatgatgaagagagtgttattagttttctagagaattttatttattatctggaacatgacatgagaaataatgaaagaaagaaaatttatattggtggaattactcaggatagattcgaactgtatgattatatttttggtttacatttcttaaacgaacattatgatttacaaaataatggtaaaagtttagaccaattatcaccaggtgaaaaaggtgggcgaattcaaacatga

SEQ ID NO: 57585 - DNA, 549 bp, Acinetobacter baumannii
atgaaaaatatcggtttagccattttagcaatcagcctttcaggttgtgctgcaatgagcgtagaagaatgtaagactgcgaattggtcattagtgggtgagaaagatggttcgaaaggttcttcgccacgtttagatcaatattacaaagcatgtggaaaagccaatattgttccagatcaaaagtcatatgaacgtgggtataaagaaggcctaggttattattgccagccagcaaatattttttataacgctttagaaggtaacggtaatattaatgtatgcccagttgagcagcgtaatcgtttaagaccttattatcgagctgcctcagattactataatgcaaaagctgaatatgagcgttatgacgagaagtttaagcaatattctgatagcgcttataacgaaaaattaaagccagaagagcgtgaacgttatcgtaagcttttaagagaattacaaattgatcgtgaccgtattaacagaaactattggaactcaattcgagatatcgaacgttttaaatatgatcatggattaaaataa

SEQ ID NO: 57586 - DNA, 342 bp, Acinetobacter baumannii; identical to SEQ ID NO: 57584

SEQ ID NO: 57587 - DNA, 204 bp, Acinetobacter baumannii
gtgacgactcctgaagatcgagttgcagtaattaccactgagcctttaactcataatgaaacatggattgcttatcaacccggtgaaatgattttatttcaacatggtaaacctataaaaaaagcgattactcaagttgaaagattaatacgtgaagagaaaaatcctgaacttaagcgtattactcgtgctgaccaatattaa

SEQ ID NO: 57588 - DNA, 666 bp, Acinetobacter baumannii
atgagcgaagtgacaacaactacgacagcaactgatgcagcaaccacagctaccactactgatgcacctgctgcaactaacactgaaacaggtggggccaatcctgttacaactcaggttgaaacaacacctactacaacgacgaccacagaaaatgttgaaaccactgaaaccaagcctgaagttcttttagggggtgaacagccacctgctgaacaaccgattcaatacactgaattcacaatgcctgaaggctactcaatgaatcctgatgattcaaaagtgcttcaagagttagggcaacagttcaaaatgccacaagaagctgtgcaaaagcttgtggatttaggcgttcaaatgcagcaacgccaaatacaagagcagcaaaaaacgattctttcatggcttgatgcagcgaaggccgataaggagtacggcggtgaaaaccttgaaaaaaacctgttgacagcgcaacgcgccttcagcttaccacggggcgatgaaatctctaagattctctatatgagcggacttggtaaccatcctgcagtaattggctttatgaccgaagtaggtaaattgttggaacccgacaatatgacccatggtcgtgggacaaatacagcgaatgtggcaccagcggccgtatggtatgacaaatcataa

SEQ ID NO: 57589 - DNA, 498 bp, Acinetobacter baumannii
atgtgtataagagacagcggttattatcaaggtaacccagaatatgcacattatcctttatttgaagatgtccttgatgattttggagtgacggaggaagagcgccggagttatcaaccaacagaaattgcacatcaggtgagagagtttctagaaaattcctataaagactataaagccgtttctgctttattagctgtagctgaagaagaagttattttgtacagtccacctttacgaaaagcaaccagtgctgtaggtatagcggtcgagggtggtggctattaccatgtgcatggagtatctgaagatgaaactgctgaggcagcagatgacgatcatgaagaagatgtatggtttattttaatgcaagcttgtacagaagaagactacacttatttagaaaacctatgcctagaatactgtgatttatgggaaaagttttgggatgttcaaatggaaaactcgaaatcaatcttgaaacaaaatttagcttaa

SEQ ID NO: 57590 - DNA, 552 bp, Acinetobacter baumannii
atggtgtcatttttatttattggacttgtagtcactattttgttgactccaggaccaacaaatacattattagcctcggctggcatacaagcaggggtaaagcattctcttaagttgattccggcagaggtcataggttacctgatcgcaattacctcatggggtgttttacttgaatcggtgtctcatttcattccatggcttccagccatattaaagctgatgagtgcgggctttatactctatcttgcttttaaactctggatgacatcgtctgaagatattaagttagaccgaccgcttattacgccaaaagctttatttcttgcgacacttttaaatccgaaagctttactttttgcttcagcgatttttccccatgcagcgtgggaagttcctcatttatattttattcacattgttgtctttttagctttaattaccccaattgcttttttatggattatgtttggtacagtattaatctcaaataaagtcacttggttaaatcctgtctcttatacacatctgacgctgccgacgaaggcttag

SEQ ID NO: 57591 - DNA, 231 bp, Acinetobacter baumannii
atgtttaaaaagtcctcagatgcaggcatctttttatggatgacttaccagacaatgcaaaacatgggtttagatgccgaatcaatttttgctagcgttaacttaccaaatcagccaccagataagactattcgacgcgataattcgacccaatatcggttttggaatgcagctgaaataatcagtaaagatcaagatattggcttgcattgtctggtaagtcatccataa

SEQ ID NO: 57592 - DNA, 339 bp, Acinetobacter baumannii
atggctttgcacgatggtgacactaaaggcgattacgaaggttacgcaggtaactacttcatttcagcacgtaataaaacacgtccaacaattttcgatcgtgacggtaaaacaccgttagttcaagcagacggccgaccgtacgcgggttgctacgtgaatgctgcgattgagctttggtgtcaagacaacaactacggcaaacgtatcaatgcatcgcttcgcggtgtgcaattcctgaaagacggtgaagcgtttgcaggtggtggcgtagcgtctgaagacgatttcgaagacttaagcgcagatgaagaaggcgcggaccctctattcgcataa

SEQ ID NO: 57593 - DNA, 426 bp, Acinetobacter baumannii
atgagtaacatcggttcttgtttatgccataaagtaaaattctctgtactttgtgaaatcaaaacggtttatcactgccattgcagcttatgccgaaaacaaacaggtactggagcgaatgccgctactttagtaaaagaaaatcagtttaattggttgatgggtaaggaatatgtggctacctataaaaaagaaactggttttacttcatcattttgtaatagatgtggttcgcctgtccctaataaaattaatggtacaaactatatgtggataccgttggggcttctcgaacaaccgtttaaaccagatttaaaacttaatttttgtatagagtcaaaacatgattgggttgtgttaggggatgctcataaaaactttgcacatttacctgagttagaagagtttttaaaatattttgaataa

SEQ ID NO: 57594 - DNA, 342 bp, Acinetobacter baumannii; identical to SEQ ID NO: 57584

SEQ ID NO: 57595 - DNA, 162 bp, Acinetobacter baumannii
atgtctgctgaaactgtgcctgtacctggcaatgaagtgttgcctgcagggtcagttgctgttgcagtcactgtatcgccatccaccaggttacctgggtttggtactgaccagctaccatctgtgcctgctaccactgttgcagttgtgccatcaggataa

SEQ ID NO: 57596 - DNA, 372 bp, Acinetobacter baumannii
atgaatgaccctttaacaattaaatccttaccttggtttatcaagatttgggcggcggtgatgggcggcatttttgcgctcatgttaagtggtgatattgatgttgaaggaaagataaaaatcaacattggtgtgattatcaaattcgcaattagcgtttctattagcttatacggcggttcagcatttattgagtatcaagattgggggcattactcacatatgacccaagggtttgtcatgctgatttttgcagtattcgggatgttgcttattggtatttggtatcaggcaattcaattactgaaaggtaaaaccattagtgaattgatctttgaaatcaaagaagcattcaaagctatattcaagtag

SEQ ID NO: 57597 - DNA, 291 bp, Acinetobacter baumannii
atgagaaaacaccgcaccgcagaacagtggcaagtcctaatcggtcagcagcgtgacagcggcctgtcggccacgcagttctgcaaggagcacaaactcggttatgccagcttctgtagttggcgcaagcgcctgttgagtcagccggtcggtgaggctgcggattctggttatgccagcttcctggatctgtcatcgctgatggatgactcggcctctcccggaagcggctggaatatcgtgctgagcctgggtaatggtgttgagctaaggctgagccagatcagatga

SEQ ID NO: 57598 - DNA, 324 bp, Acinetobacter baumannii
gtgcataaatctgttggtacagcgggtttacctatctgccttcaagggcatgtagttgggcctgcaaatgctaccgttacagtgacacttgaagaaagtgcggacggtacaacttttacagcggcagccgcatcaaaagcgtttaaagctgctgaactgaacaaaggtacgttcttttacgtaaacagtgcgacaaaacgttttatccgtttgtcttatgcggttgccaatgcgcctactggatctatttcggcttggttgggcaatgaagcggatatccgtacaaactatgacgctgtaagcggcgcaactgttccagtttaa

SEQ ID NO: 57599 - DNA, 324 bp, Acinetobacter baumannii
gtgcataaatctgttggtacagcaggtttacctgtctgccttcaagggcatgtggtgggacctgcaaacgctaccgttacagtgacacttgaagaaagtgcggacggtacaacgtttacagcagcagccgcatcaaaagcgtttacagcagctgaattaaataaaggtacgttcttttacgtgaacagtgcgacaaaacgttttatccgtttgtcttatgcagttgccaatgcgcctaccggttctatttcggcttggttgggcaatgaagcggatatccgtacaaactacgacgctgtaagcggcgcaactgttccagtttaa

SEQ ID NO: 57600 - DNA, 162 bp, Acinetobacter baumannii
atgtctgctgaaactgtgcctgtacctggcaatgaagtgttgcctgcagggtcagtcgctgttgcagtcactgtatcgccatccaccaggttacccgggtttggtactgaccagttaccatctgtgcctgctaccacggttgcagtggtgccatcaggataa

SEQ ID NO: 57601 - DNA, 162 bp, Acinetobacter baumannii; identical to SEQ ID NO: 57595

SEQ ID NO: 57602 - DNA, 948 bp, Acinetobacter baumannii; identical to SEQ ID NO: 48681

SEQ ID NO: 57603 - DNA, 819 bp, Acinetobacter baumannii
  misc_feature (805)..(814): n is a, c, g, or t
atgtttcagtttatccaacagcaaaccgaattggttgatgttcttcaacaaatggatcaatgttcaacttatggacttgatacagaatttattaaggttgataccctttggcctaaacttggagtatgtcaagtcaatgtcaacggaaatgtatatttgctggatggagtgtctttagatttaagcgagttttggaaaaaaatctttcttgctcaacaaaatatttttcatgcatgtggtgaagatattgatttaatctatcactatgccgatgaacaaaacctattaaatgtttttgatactcaagttggattatcctttttgggacatggtttacaagtaagttatcaaggtgcattaaagctttgtttagagattgatattgaaaaggaccagactcgatcagactggttggcacgtcctttatctccgcaacagctatgttatgcggcaaatgatgttttataccttatgcaattggctaaccatattaaagatcagctcaaacaaaaagggctttatgagtatgttcttgaggattgtagtagtttaaccaaagaaattattagtgaaacaccaaccccgttgttatatacagatgtgggcaattatcgtcattcacgtcgtcaattaatgcaattgcaaaatttaagtgagtggcgtgaagaggtggttagagcaacaaaccagccacgtagttttatccttagaaattcgacgatgattgatttagtcgaaaaaaatccacgcaatagtttccaattatctcaagtaaaagatattcgtccgaatgttgttcgtgaannnnnnnnnncgtga

SEQ ID NO: 57604 - DNA, 351 bp, Acinetobacter baumannii
  misc_feature (15)..(24): n is a, c, g, or t
atgttgttcgtgaannnnnnnnnncgtgaatacggcaaggttattcttgatcttttaaaagacttacctgttgaagggcactggccagctaaaattgctaaaccttttaaaattacatccaaagaaaccctgaataaaatggatgcattgattgctaaaacgatagaacaaacctctatacctaaagaagttttactacgtaagaaatggttaaatgcgattcatcagcatgtgcttactaaaggtgatgaacaggatctcccagattatttattgggttggcgctatgagcttttaactaagccgcttattcagttatttaaagaagagaaagccagccttttattttag

SEQ ID NO: 57605 - DNA, 669 bp, Acinetobacter baumannii
gtgagtattttaaggactatatgtagtattgttgtgtctataacatcaataggattggggttgtatttgttactaacaaataagattcaaggtacagaatttgttgccttaattattgcttttatcatcttatctgtttttattattttatttccaaatgtgcatgaaatatctatagggccaagcttagttaaattaaataaagcgaaagaggagtccgatcaaataatacaagatcttcgtgacaccagacttgagatgtttagaatgttattaaaagactccttaagtgatggaagtttttgggggagtgatgctctaaaagataaccgaatcattatttttttgagaacatataataaaattgtagaagcaaaatgcaaaaatgaattaacagcagaaattaataaaatattaaatttacttatagaggttcaatctaaaaaaataaaaaactgtagtcccaaaatggccgaaaaatttgaaaaagatgaaattatagtaccccccctaaagtattcagtttttctaaatgacgaaattgttgaagattttaggtctcggcgtagacctcatttagatggggtgcaggctaaaacagaaattattgaggctattaatgaatatgcaaaaatataccccatatacatttctgaggtagttctttag

SEQ ID NO: 57606 - DNA, 1425 bp, Acinetobacter baumannii
atgaataatggaaataatctgaaaaaaggcagtctaggactatggacggtcgtattttttgttgttgcagctgcatctccattgactggagtcgtgggtgcaatgcctttaaattttatgttaggaaatggagcaggcgtacccggctctttcattgtagctgctttactactgattattttcagttttggttttatagctatgagtaaatatgtcgtcaatgctggggctttttatacgtacattgtacaaggtttaggtgttggaccaggcatttcgggtttaagtgttgctattttggcatatacggcaattcaactatcagtgacagccatgtttggcttctttactcaacacttggtcgtttctcacttgggaattgatatatcttggtgggtttatgcattggctatgcaaattgtggtcatattactgggtattgcaagagttgaaattggaggaaaaattctaggcctcttaatgattcttgaagtgggtattattttgctaatagatattgcgatattccagaagcccataaattttgaatttacttcatttcaaccaagtacaatttttaccaatcattttggtatttcaatggtatttgccatctgttcatttataggatttgaggcagcggcaatttattctgaagaatgtataaatcctaaaaaagtggtgtctagagctacttttattgctgtaggtttaatcgctatattttttgtatttacctcttggagctttatcctttatagctcatctggagctattgtagcaatagcaagcaaagatccgggaatgtatgtgtatgatgtggctaccgctgttttgggtaaatggtcagtagacgtaatgtcggttttattattaacaagtctatttgctgctactcaggcttttcataattcacttgcacgatatatgtataccattagtcgtgatggcttattttggtcaaagctttcaaaaactcatgctaaacatcaaaccccatatattgccagtattgttcaaggcattatcataatgatgtgtattgtcgtattcgcagttatgcattttgatccgatgattgatatcttctcatggtgttcggcttttggaagtatggcaattttagctttacaatttggcgtaagcttggcggttatttcatattttattaaaaataaagacctcaaagttagcatgtggagccgcttaattgctccaactatttcaagcataggaatggcttttattctttatcttgtgattaagaatttagatatcatgagtggtagtaatagtccgactatttatattatgcctatagttttatttataagtattattgctgggttagtgactggtgctttcctaaagaaaaaacatattgatctttataataatatttatagtttagttaaaagagtttaa

SEQ ID NO: 57607 - DNA, 768 bp, Acinetobacter baumannii
atggataactacaaaatcaaagttaaagatgaagctgagagcaaagaggctcaggagttgtttgctcaattggaatatattcctttcgaaattaatcgtgtaggtatggttgcaacatacaacaggaagatatatccagatgtaattgggaattgggataagtatgacggtgaagaactcaccctccctcaactccgcgaccttgttgtgttgaagcagaatgatgtgaaggatgctactcaccaagacaaatatgatgcatcactgaagtatgtatatctaaatggcgaatggtatgagtggataaatggctggatgtctggttgcattaatccagcaaagctaacgccaataacccaaccccaagacccagccttgattagcggtgcggatgtaccacggttaattaaagaaggtaatcaaattcaattaagagccgctatcggctttaagttaggcgaatggaaagaccttgatctagaacgtgacgaggaagagttaactttaggtgatctgattaattctcgttttgaatggcgcctcaaaccccaaaccatcaagcttgaacttgagctgccgaagccttttgagccagaagaagattgttacgtttacatcttagatgacggaaaaacagatggctatcgtcgttattcctacgaagttcatggtgataaaggaaatacatttattggtatttggcgcaccgaagaagaaatcaagcaagtcgtagagcaactcagaaagatacgaggtactaactcatga

SEQ ID NO: 57608 - DNA, 228 bp, Acinetobacter baumannii
gtgtatataaatgaaattttttcattaaataatgaagaccatattaatgtaataatttattattttgataactattcaaaatttaatttacttacaaatcttttacatattttaggcaaagaaaaagttgaaagatggatgaaaaaaaagtggttaagatttgaaccaaatcctaatattgtaaaaattaataatattgaacctgttgatttatctaagttggaataa

SEQ ID NO: 57609 - DNA, 1278 bp, Acinetobacter baumannii; identical to SEQ ID NO: 48898

SEQ ID NO: 57610 - DNA, 534 bp, Acinetobacter baumannii
atgttaaaaaaaacgcctcatatcatcttaatgtctttgctcagctctagcctattattgacggcttgtaaaaaagcagatgagccagcaaagactgagcaacctcatacaagttcatctaccgatcaggtcttagaaaaactcaatgaaagaccagtgaagaaattcccagctactgcggatgacgctcatgatattgcgctactagaagattacgaccgtcgctttactgaaatgagtgatgaaatggaaactgagctagaaaaaatgcatgaggcaggtacgctcaccacagaatttgaacaaaaacgtacgcttgataatgtgcgctcagcattgaccatgttaaaagacctcgatttaaaaactgaacaaggtcgttatattcagggcttactctatcaatattgggaaaaccaagaaaagaactttagtgataagcaggcaagtaaagatgaacaggtcaaacaacttgccgactatttacaagcacaaaatcaattaaaatactggaaagcctcacagcagcattaa

SEQ ID NO: 57611 - DNA, 597 bp, Acinetobacter baumannii; identical to SEQ ID NO: 48901

SEQ ID NO: 57612 - DNA, 1119 bp, Acinetobacter baumannii
gtgcatccatacgctcctactttacagcgcgttttattgtttgggctgttttttatcctgatctttttaggatttaacatcctgaagtactttattgtacctgtactttgggctgccattattgcctacatgacttggccgatttatttaagaattcagcatttttttggtgaaaaccgaaataatttaaatgctacagttatgattagcttagtcattttaattgttggcgtgccatttacatgtgctatttttattctacaacatgaaggtcgtaacctttattttgatttacagcgtcaagtcttttcaggtcatttaagcgttcccgattttattcgtaatcttccgtttattggtaaagaaatatctcgcacactcaacgaaattaacacggaccctaatagtactattcaaaatattgcagcttgggtacaaagccatttaagttatgggcgtgtgttattaaatgaaattagtaaaaatatcgtcaaactttgttttgcgattttaagtcttttcttcttttatcgtgatggccacacgatcttaacccaagtgagtaaagccctagaaatggtgattggaccacgtattcatcattatctcgacacaatttcagaaaccacacgtgccgttgtgtatggcgtgggtttaactgcaattgctcaagctgtacttgctggattaagttatttcgtcgctggtgtacctaacccaatggttctcaccattgcaacgttcttattagccctaattccgtttggtactcctgtttcctacttaggcgttggactatggttgttctctcaaggtcaaaccatggaagctattggcgtcatcttatggggtgtgctgattgtaagtagttcagacaacgtgatccgtccacttgtaatctctggtgcgactcaaattccgtttttattgattatgttcggtgtattgggtggaattgcaagttttggtttagttggtctatttattggccctgttattttagctgttttattagcaatttggcgtgaatggcttcacgagacaattgaccctgaacccatgccaaaaacgaccatgatttatgattcagatgatgatttaccaccatctaaaaactaa

SEQ ID NO: 57613 - DNA, 576 bp, Acinetobacter baumannii; identical to SEQ ID NO: 48902

SEQ ID NO: 57614 - DNA, 2151 bp, Acinetobacter baumannii; identical to SEQ ID NO: 48903

SEQ ID NO: 57615 - DNA, 1230 bp, Acinetobacter baumannii; identical to SEQ ID NO: 48904

SEQ ID NO: 57616 - DNA, 366 bp, Acinetobacter baumannii; identical to SEQ ID NO: 48905

SEQ ID NO: 57617 - DNA, 588 bp, Acinetobacter baumannii
atgagcaatattttagtcattaatggtgccaaacaatttgcccactcaaatggtgaattaaatgacacactcacgacactagcgacgaatcacctcactgaactcggccacgaagttcaagtcactcatgcagatagtgactacaatgctgaagccgaagtagaaaagtatttatgggcagatgtcgtaatttatcaaatgcctggctggtggatgggtgcaccgtggaccgtaaaaaaatatattgacgatgtatttacgacaggtcatggttctctttatgcaaacgatggtcgtagccgctctgatgcttcaaaaaaatatggttcaggtggtttaattcatgacaaaaaatatatgctgtcgcttacttggaatgcgccaatggaagcatttgacgaggcggatcagtttttccatggcgtgggtgtagatggtgtttatttaccatttcataaagccaatcagttcttaggtatgagtaccctaccaacatttattgtaaatgatgtaattaaaatgcctgatgtagatagttatgtggaagcatacaaagcacatttgaacatactatttgcagcagcctaa

SEQ ID NO: 57618 - DNA, 315 bp, Acinetobacter baumannii; identical to SEQ ID NO: 48907

SEQ ID NO: 57619 - DNA, 369 bp, Acinetobacter baumannii
atgcaacgtttatttttaatttctgcactctgtgctggacttatgacgggttgtgcaaccacaagtaaattaattccttttgtgggctcagaaaccccaatgcaacaagtacttaaaacgcaacccgagattgtaaaagagcataacaatacttcagttcagcaggtatttaaccgagtagaatccccaactgtttctcgcattactgttatacaaaccggtttaatggatgactctgtctcagcaattcggacggaatatttatttaaattggttgatgaaaagtggcaattgcaaaataagcaaaagagctaccaatgtgcaagaggaaaaggttctaaaggtttccaaacgcagctttgttcttaa

SEQ ID NO: 57620 - DNA, 228 bp, Acinetobacter baumannii; identical to SEQ ID NO: 57608

SEQ ID NO: 57621 - DNA, 297 bp, Acinetobacter baumannii
atggcgaaacgctttagcaccgaatttaaacaacaatcgatagagtacgcactagcaaacacacatgaatcactagctgctatagccaaaaagttaggtgtgggctattcaacgctagataaatgggtacgagaaacgaatctggcaggaaccagcaaacgacaactcacagcagaacaacaacgtattttagatttagaaaaagaagtcaaacagcttagagaagccaatgacattctaaaaaaggcgcatgtgtactttctgacagtcgatcaaaccaagaaaagtacacggtaa

SEQ ID NO: 57622 - DNA, 279 bp, Acinetobacter baumannii
atgaatgcacaattagaagtgatgtcagatcaggaattaaataaatatgaacaagagctccttgctaaatggacaccgagagtggcgcttgaagctcaaattgatagacttaattctcaacgatctgaattgttagaaatttatcacaaattaaagaatccaaggcatccacaaaatacaagattgatccattcaataaagtcattaaaacataagttagaggactttgaagatgaattagatgatcttattcaggatggtcaattcaagcaacattaa

SEQ ID NO: 57623 - DNA, 1206 bp, Acinetobacter baumannii
atgtcagataaaaatactattaatattcatgccgccattattcatagaattttaaaagaacaagatcaaaagcgggaggatgcaaccccacctgtaattagatcaaatttacataccaacaatgaacaaacagtaaagttaattcaatttttagatcgtgagcttagtaagtatggtcttgcacattcaatttcttcaacatttgagcaaagcacaacactgagcaaaaatattaatgattatttgtttaatgagggtgacttacaggttgaagatgatgaaagtgaaacattaattgagtttgagacagaattacaaactagatatagacgattaactaataagcttacacatgctttacattattggatttatagtgaattaaaaactaatggagatcatttgccaattattttctatgaagagaataatactaatttcctttatatggcattattaagtttaaggccatctattacaataaatgaatcaactggtgaaattattgatacttcattaatagatacccaagctttgaaagttgcttttaaaatagatttagatgcaatgaagcttcattcaaattcggatgcaagtattaaacctagtaattatatatcttggatacaaaagggtaatgatgatattcccaaatatatccaaaaatatattccaattatgtacagtatcgatgataaaatttcaactcgaaaattaatggacaccttaggagaatatttagcccaaagtgatttttccaatgaaatttctagtttaattcatgaggaagtacttactcttctaaaaacaaaagctgctcagaaaaagccaattaatattattgaagatattgatccgattattgaaaataaagctcaagtccatggagtcgacataacagagaataactttaaatctttccgggcaaccaatggatatggggagcatgatctagatgctagtaatatattttccccagcaagtgcaacattaacaagttttgaaaaatttactttatctattggtaatcaaaaacaaattaaaatttctggtagaaaggccgatatagagcatacaatagtccttcatgatcaagatgaaaatacgccttatattaaggttgatcttaagaaggaagagttgcctgaagcccgaaaagttttaaagaaaagaaagccttatgaatcagacaagagtgaagattga

SEQ ID NO: 57624 - DNA, 417 bp, Acinetobacter baumannii
gtgattagaaagcaatttaattcaaattttgtcgaaaagttttgtttggttttaattacttttatagcttcttcaataacctactatttgggctttaaggggtttaaatcattttttgtttctacagaagttttaaattttaaagataccgtaacttttggtttaagtgtctcctcccttgttctagcgctaattttatatagtgactggcgggaaaaatatgtggctgaatctcttgataaggatttgcgagaaataaaagctcatgtaagtgacctcaattttattattaatagatttccctcttcggatagtgagtctgatgttaatgagagagctgagttttttaaaatttttttggaaattgagagtgttaaattcaaatataaaatattcaagtttatatacgctcaatag

SEQ ID NO: 57625 - DNA, 996 bp, Acinetobacter baumannii
atgaaaatcttaatctatgtgcctcagttttgtatttattcagtcatagctggaattaatgatattttctggattgctaacaatattataaaaagcaaaaacttattgaattttaaaaacttaagtgagattaatgagtttaaagttgacctcgtaagtattgatggtaagcctgtcgtaaatgcacaaaacaaaatgatagatgtagatctttcgatagaagaagcaataagtagtgatttaattatcgtgccaggaatgatgctgagcgatgagcaaactcctattatgccttcagaatataaagcagtattaaagtggcttcaaaacgaaaatatcaaaaaaacaattatatgtggtgtttgtgctggaaccttcgtacttggagatgcaggcttattaaataggaagaactatgccactacatggtggttgtatcatacctttcaaaaaagatttccccatgggaaattaagttggggcaaaacctttgaaaaagataaaaatattattacaactggtggtccgctatcttggattgaactcgtactttatattattaatcaatttgcaggaccggaagtcgctaaagcaacctcagatttagcagttgcaggagcacagcccgtatctcagcaaatatacgtgcctgaaggttttacgagttcagttgatcctttgctcatgaaaattgaagagtttgttaaatatactaatccgaatatttcacttgaagaactagcagaaaaattaaatataagcgaaagaacgctttacagaaaagttaagaaattgacgaatgaaagtcctaaagatttaattactagatttaaaattgaaaaagcatgttacttattagaaaacaataatttatctattaagataatcgcacaaaattgtggctacagtgaagacactgcctttaggaaagcttttacaaagatcttaaatatgaacccattagaatatagaaaatatattaaaaatagagtttaa

SEQ ID NO: 57626 - DNA, 1110 bp, Acinetobacter baumannii
atgaaatctcgtgcagctgtcgcctttgccccaggaaaacctttagaaattgttgaagttgatgttgcaccacccaaggctggtgaggttttaataaaaattacccatacaggggtatgccataccgatgcttttacattatctggcgatgacccagaaggtgttttcccagcgattttaggtcatgaaggtgcaggtgttgtagttgaagtaggcgagggcgtaacaagtgttcaacctggcgaccacgtgattccactttatacagctgaatgtaaagaatgcttattctgtaaatccggaaaaactaacttgtgtgttgcggtacgtgcgacgcaaggtaaaggtgtaatgccggatggaactacacgtttttcatataacggcgaaccgatttaccattacatgggttgttcaacctttagtgaatatacagtagttgcggaagtctctttagctaaaatcaatcctgaagcgaatcacgaacaagtttgtttacttggatgtggtgtaacgaccggtattggcgccgtgcataacacagctaaagtacaagaaggtgattcggttgccgtatttggtttaggcggtattggtttagctgttgtacaaggtgcacgtcaagcgaaagcaggacgcattattgtcgtagatacaaacccagataaatttgaacttgctaaacagtttggcgctacagatttcttaaatccaaaagattatgaccaacctattcagcaagtgattgtagaaatgacaggttggggcgtagatcattcatttgaatgtattggtaacgtcaatgttatgcgctcggctctagagtgtgcacatcgtggttggggacaatccgttattattggtgttgctggtgctggtcaagaaatttcgacacgcccattccagttagttacaggccgtaaatggttaggtactgcgtttggtggagtaaaaggccgctcacaacttcctaaaatggtcgaagatgctatgaaaggtgagattcaacttgaaccttttgtgactcatactatgcctctacaagacattaataccgcttttgatttaatgcacgaaggtaaatcaattcgtactgttatccatttctaa

SEQ ID NO: 57627 - DNA, 1872 bp, Acinetobacter baumannii
atgataactaatcgacaaaatgtgcaaaataatactaatacatcacctcatccaattacccaaaatacacttattgatcggtttagtcctatttactggagaatagacggcccacaaaccacgtcttttgccattacaaattatggaaatggatttgaagcatcttttagatcacgtatgacaaatgacttggtagggattagctgggattcttatgatacgaaagatcataaacttttagcatatgaaaccaaatatagttatgcaggggtagtttgggattttgatattgaattatcggcttctatgcccgtacttaataatccaagtttaacgccaactttaacggtgtactatcatgacaatggcgtagataaaattgcatatatcgtcttatttaattatgcaaataatccttcgtcgcgaacggcgcacattcatattaactgggatacagttaaagccggtttttctgctacagatagctttccggtaaccaatattcaacgtatctcattttcaggctttactagccactataacggccagtcagctacgcctttaagccagccggaagatggttatattcgtattaccaattcagtcgtgactggaacaaatgcaaagttaaatctgagtcgtgttgttgtaccccagcacaattatgggatctgtaccagctatgatgaccattatgacttgaacccgcagcgcctagtcaacaatatggtcgctttgggatatcagggattggtaaaccactattgtggaatgtcacattatcctgaaatgacatggaaaagcgatattaataaatggcaaataccagatacgttggtaacaggtgaggcagtcgtcaacgcatgtacccgaaaatggcatgagaaatatgcccaagctctacataatgcaaacatgcaacccatttttggggtaagttttgagatgtattcacttggagcaaatgagttttgggcacagcgtgactggaatagcaatttaggtaaaacaggttaccaaccaccgagttatttctttagcttaagtgatcaaaatgctttggcttatttgcacaaagtttttattgagttcgcagatacaatggttgctggcggctgtaatgttaacatgcaaattggtgaaccttggtggtggtataacacggacacgaatctaccttgtgtgtatgactatccaacaaaattagcctttaatgccgatacaggactatatgcgccagacctaggcacaatctatgaggctatgaataaaacaggtacgccgtatgatgagtttaaaacttggttaagaaataagttaggacagacctgtcaaaatattcgagcagccattaaagctaaatatgcaaatgctcaagtgtgtcctttaatatttttcccatccattcgttctccaatacaaaccctagcaacctatatcaactatccaagccagcactactcatatccaaattttgattacatcatgactgaagcttatgactggcttttagaagctaaattagatttagctcatcaagctgtttctcagataccaactcaagatttaggttatccggcaaataaagttgcttatttatctggatttgtaccagatgcatctattgcttatatctatggattcgacaaaaacaaaccttatcgaactccaatttggcagaggatttttggcgatatgaaaaataacgtatctcttggcctaatgaagcagtttatctgggcctatccgcaagtcatgttcgattcaattacaattgatacgacccaagccccaaatggcttctttgttgaaaatacactttactcaccaattagtgataacacaccgtatccaccagatatttacctttaa

SEQ ID NO: 57628 - DNA, 1461 bp, Acinetobacter baumannii
atgcaggcggtagtttaccatagccaagatatccaggcatgggagcaacgttggtttgctgcgcaaaactcctcattaggcctaatgcaacaagcagcttggtcaatcactcaacaactcattgtactttttcaaaaacaaaattttaagaatattgctgtttggtgcggacagggtaataacgctggtgatggctattttatagcaagctatctcaaacaagctgggtttcaggttgaaatatttgcggctgagttgggcgagtcagctgatttacaccacgctgtccattttgctaaagcaaatcatgttcaaatacaccaaggttttaagatcaacgggacatttgattgtcatattgatgcattgtttgggattggtttaaaccgtgaattaaacggttattggcaacacgctattcaacaatttaatgggcaagcagggctaaaaatttcgattgatataccaagtggtttaaaagcaaatactggctctaccttatcttttgcaatacgggctgatcatacatttactgttttagggcttaaagcaggattatttacaggccaaggcaaagaatatgcaggacaaattcatttaattaatttaataccaatagaccaagagctgaaacctcttgcttacttgacgccaacacatatcaaacttcctaaacgtttggcttttggacataaaggaagttatgggcatgttttggtgataggtggacatgagcaaatgggtggggctgttattatggctgctgaagctgcttttcatgcgggtgcaggcaaagtgacagtggtttgtcatagcaaccaccatcaggctattttgtcgcgagctcctaatattatgcttcgtgatattaatgatttcgatgaaaacggtattaaagaaattttatctcaggttgatgcagtatgttttggaatggggttaggtcgtgatgactgggcacaccaaatctatcaacagtggtttaattatttaaatcagacttcacatttagaagttgttttagatgcagatgccctatggtttctcgcaaagcagcctgaaaaattgagtttacatatttatgcaacacctcatccgggggaggccgctacactacttggttgttctacttggcaaattgaaaatgacagaattgctgcgatttatgcgttgcagcaaaaatatgcaggccagtgggtgcttaaaggagcaggcagcttaattttagaagataacttgtatatttgtacgcaaggtaatgcaggtatgggaactggtggaatgggagatgtgttggcgggcatgattgcaagcttaaaagcccaattccacaaagcagttaccctacatgagatcgtaactctccatgctcaggcaggtgaccaacttgccaaacaaggcatgcgcggtttacaagcttatgagatgaatcaagcaattactcaagtagtaaatcaataa

SEQ ID NO: 57629 - DNA, 537 bp, Acinetobacter baumannii
atgaaaaaactgtcagtttcagaactagcgaaattatatggatattcaagacaagctgtatatgcccatataaagaaaggaaatttatcaaaaggatcggatggattaattgacttttcagaagccttgagagtttttggggaaccacaaaaaagcaattctagtgtcaaccaaagtcaatcaactagtaggcataacttaacagaagttgacttgctaaaacgtcaagttgacatgctggaaaaacaattaaatcaggcaatacagagagaaaatcaatcattagaacgtgaatcgttttatcaagaacagattgaggccatgcagcgcttactggaaactccaaaagccaatatgactacgtttaccgatcatgaatctgaacaggatatagcaacagattctcggccacagactgaatcgaactatgacggattgactactccagagaacaaacgcatccctgttccagaacatattgagcctacacctaaaaagagaggcttcctgagtcgttttttccttccttacggttaa

SEQ ID NO: 57630 - DNA, 372 bp, Acinetobacter baumannii
atgtcaagatttaagataaacatatatgtaataaatttttttaagttaagaaaaaaatatttttgtattataattcaattatttattttgctggtaaaaactttgaataacttaactgtccaagaaaagaaagaaattaatgaatacattaatatttataagaatttaaattttagtaagcattatgaagttaataactatatttcaagaaatcagttatggggaagattccctacaataagatcaaggaatactcatgcaaatggggcagtcgttccaggaatatttccaaagtactatgccattgtttgtgaattagtaggaatggaaagtggtgagggcactagtttagaaaagagtgaagagtattaa

SEQ ID NO: 57631 - DNA, 174 bp, Acinetobacter baumannii
atgagcgattctttttgtagaccttatctaaatccacgaaccaaaaatatgacgtatggaagcgctgcaagaaatgggcgcctaaaaacattaggaggtgttgatggcgttgttgctaaagcaactgctttcttaataagtcaagctgataccccccaaacaaagactaagtaa

SEQ ID NO: 57632 - DNA, 1047 bp, Acinetobacter baumannii
atgaatacaaggggttgtattccctactctcggaaaacactaactgttgatgaagtagtagagaaattaaaaagtgaagggttaaattttagtaatgaaccacaggctaaagaatttcttcaaaaaattacttatcatcgattcaagttttacttacatccatttctagtaagtttagacccaaaagacaagccaaagcgttttaaggaaaatgtagatttttctagtgcaattaacttgtatctattcaataaagaactttcaatactgattttacagtatatttctgaaattgaagtttttcttagaaaagctttggatagtttttttatctcacaaaataaagggtatttttggtatttagaagattgttatatctttcaacctacccaaactcaattgcacagatttcgtcatgaagatcctgcctataagccccctgttcgaagaattaaatcgattagagaaaaattaaaaaaacaatttttagaaagccaagaactgcataatcagcattatagaaataaatacaagaatggaagtcatggcgagcttgaagagcttccacccttctggcatatatctgaacttatgacattagggcaactatatgattacattaatagtcttaatgtgaatatgttcattcaaaatagtcgaactaattacttagatgaactagcactccaatttggagcaacgaagtttaagcatcttctaacatggattgaagcacttcgagaaattcgtaaccgctgtgctcaccataaccgtgtttttaatgcgaattatattaaccctaatttaaaggacataaatttagaatatcgtccttctaaacctaaccgtttatatggaatcctcttagtgttagacgctatgtactttaagctgaaaaatgagcatatcaagaaagatctagaagctgtaatagacaaatacaatattgacgctcatttaactagctgtggatttcctaaagaatggagaacagataaatgttggacacaaccgttatctttagtggaatctgcatctgccggttaa

SEQ ID NO: 57633 - DNA, 948 bp, Acinetobacter baumannii
atgtttttttcagatgccttattagatttcattttttcttcccaaaaagcagcagtatctaaacaagagctctatgtagagttcttagaaatttggaaaaataaaagttataaaaatataaatatcatagacttaagatataacagcaaatattacaaaagaaaatttaaatcagtaattagatctttagaattatgcgatgaattaaaagtaattggtgatgaaactataggaccaacatatttcataaatttaaggatcactcctataaatccttataaaattatttgcgacctataccctcttggttatgtttcacatttatcagctatggaaattcataaattaactactaaaacaagtgattccatatactttacaacgctaaatagaactaattggaaaaagaattttttatctgaattaaataaacatgattatccattttttagagagtcctatgattcagaaatcattgaattaattccaagattccctactgaagaaaaatatttaaataaggatttactagtttttactcataagaatcttatgaattatgaaatgtttaatggggtaagagttcaagagctaactttattgtttatagaaatgacaagagctccacaatactgtggaggtattgataatgttatatctgtattcaaaaatcatgcaaaactgataattgaagatattctagaatctacaaataagaatggtacaaatatagataaagctaggattggctttatcttagatgaaatcttaagaatttctcatccaactttagaaaaatggaagctagaaatggttggtcaaagaggtggttcacgcaagtttatttcgtaccttccttttgaacctaaattttcaccaacatggaatatctctttaaatcatactgtagttagccaatatggaatttctagttacaaaaatgagtga

SEQ ID NO: 57634 - DNA, 276 bp, Acinetobacter baumannii; identical to SEQ ID NO: 48683

SEQ ID NO: 57635 - DNA, 624 bp, Acinetobacter baumannii; identical to SEQ ID NO: 48684

SEQ ID NO: 57636 - DNA, 168 bp, Acinetobacter baumannii
atggtgattaccaaagaattactgtcactctatccaaatgtagttaaacgcccatttaaaccaaaccttaaacgttctattggtcttgcagtaaaaaataagaaacacatcagtccagccgtaaaagcatttattgaagtcgcgcaatcggtttggtctgatcattaa

SEQ ID NO: 57637 - DNA, 375 bp, Acinetobacter baumannii
atgagcaaagtatcaaccgaattgagtgcaagggctagaaatgaagtttctagagttttgcaagcccttgcatcaagcaatcaaagtcaggttgctgaacagttggggattgatccaagcacattatcacgaatgaaaaatgatagaaaatccaatggcttgactgagcttgagaactgtttagtgctattggatgttcttggattcaaaactgtactcaagaaatatcgaatgattagcgaggaaaaactaaatgcgctttttgtgatgtcaaaagcgtggatggaaagcaagcaaaccattgacgatctttttcaagatgacattgaagatttcggcatgtgttttgagcttggatataaagaaaaagcctga

SEQ ID NO: 57638 - DNA, 216 bp, Acinetobacter baumannii
atggacaactctaaactaccaatcaaccagattattgctcgtatcaatgatgcagctaaacatggtgaagctttggtgctgactgctgaagaggtaaagattctttctaaagatattggcgacaaagtctttattcctgtgcttactaatgagcaggtcgtgcagttggtaaaagaaggaaagctaggacagaaaattaataacacaaaagattaa

SEQ ID NO: 57639 - DNA, 246 bp, Acinetobacter baumannii
atgctatcaagtgcaggtaggaaagaccctaaaaatgcagggcgtaatattagtatcgttaatggaattgggtactctggtatgcttttagctcctgcaatactttcaactatagtaagtcagtttggtattgaaagattactttatttccctatagctctaatgataattttcgtaatcatcacacctattataatgaaagagaaaaagaaaaataaatttgtcaaacttcaaaacgcgaattag

SEQ ID NO: 57640 - DNA, 1095 bp, Acinetobacter baumannii
atgttttatgtaaaaacagttatgataggagcttgcggaggtacgaatttagttatgcaatcaatagaagcagttgatcttttctgtggtgtgggcggtttgactgccggccttataaaatcagggataaatgttaaggctggttatgatattgagtcagactgccgttatgcttatgaatttaataataaggctaaatttattcataaagatgtagcagaagtcactggtgaggaaatcaataaatgtttttcaaatggcgtaatccgcttattagcaggatgtgcaccatgtcaacctttctcaacatataatcaaggaaaggatgttactcaagataaaaaatggccactattaaatcattttgctaggttaattagagaagtacaaccagaattagtcacaatggaaaatgtgcctgatgttattaaacataaagtttatcatgattttattcaggagttagaagaactcggctacaaaatatttgctaaggaagttgcttgtgtagattatggggttccccaaactcgaaaaaggcatgttgtattagcttcaagacttggtgggatagaattaatatcaccaactcattcttttccgattgctgttcgtgaagtcatttcacatttagaacccctagaggcaggacagcattctaaaaacgacaagatacatatttgttcaaaattaactgaaattaatttacgaagaatcaaagtctcaaaacctggtgggacttggagagactggcctgaagaacttagagcaaattgtcataaaaaagcttctggccgaaattatggagctgtatatggacgtatggaatgggataaacctgcaccaactatgacaacgctttgttatggatttggaaatggaagattcggtcaccctgaacaagatcgagctatttccttaagagaagcagcattactacaaacctttcctcaaaattatagttttgtacctgaagatcaagttgtttcaattaaatctgtcggaaaaatgattggtaatgctgttcctgtaaggttaggtgaagttattggtttgagttttactaaggcaaatttaaatatttcttgtcattaa

SEQ ID NO: 57641 - DNA, 732 bp, Acinetobacter baumannii
atgtttttaaatcctattacaaatccacatttgctagcagctcatgaggagtttaaagaaaaatgtcttgaaattgaaagatttttatctcttgtaaatgatttagactcaggtacagaaaataaacttctttataaaggcattgataacatttgggaaacaaaacctatttcacgagaagttcaaaaaacccttagagcttcttgctatttacttatttataatttacttgaatcaactacatgtgaagctttagatgcaattcatcagactcttgctagtgaacaaattgatttacaaaacttatctgataaattaaaaaaaataatttttgtaaatttaaaagatggtttaggagaaaaaggtataaaagaaattatcgaacgtcaaattgatctgcgtatagtaattatgaatcatggatataataagcgaaactttttaagtggaaattttgatttagatgcagtaaaaacaattgaaaaaaaatatggttttaacctgcatgttccttcagggcgtgacggaacatatgatcccgaagtaattaaaataattaaacgaaaaaggaatgcactagcacatggcagtgaatcatttgaacaatgtggtcaaaatattcctgtttttagtatgaatgataattataaacatgctaaaaacacattactggcattattcaatggagttaataattttattaatgacaagaaatatttaaatttgccttag

SEQ ID NO: 57642 - DNA, 1074 bp, Acinetobacter baumannii
atgcctgattttaatcatgaattaattgaacaacaaataaagagtaatcaaaaagattttgattttgatattagagagtacacgattgagtttcttgtacagcaatttgatcctgatccaaaaggtaactctgatatttatattccagaatatcagcgtgatgatgtctggacagataagcaaaaatctctctttatagaatctttattgattggtttaccaatcccttatatttttgttgcagatgtagatgagattgaagaacaagattccgatggccgagtagagattattgatggagctcaacgtacccgtacgattcaccagtttaagcataataatctaactttaataggtctagaaaaactacctgcacttgaaggagcaaaatttaatgatttacctttatcacgtcaaaggcgatttaacagaagctcagtaagattgattgaactcaaaaatattaatgaagaaggccgaagattgatgtttgatcgtcttaatacgggtggaagtccattaactgatatggagaagagattaggaactgaaactagccctattattttatttataagaaagcttgcaaattctgaaagatttaagcgtcttgttcctttaccagatgcaaaactaaaacgtaaagaacatgaagaatatgtattacgattctttgcttataaagataattatttaaattttggacatcatgtcacggattttttaaatacatatataaaagatatggaagcgacctttgatgaacaagtagctgaaaaatatgaaaacattttctatgcaactttagattttgttgaaaggaattttccaaatggttttagaaaatcaattggttcaaaaatagtatcacgtattagatttgaagcaacttcagttggggttgctttagcattagaagaagaacctcaacttgctactcaaacaataaacaccgattgggcttacaaagatgaagattttttaaaaatgatgcgttctgatgccagcaattcgagacctaaagttaaagcgcgtattgagtttgtaaaaaataaggtattaggaatacactga

SEQ ID NO: 57643 - DNA, 555 bp, Acinetobacter baumannii
atgcggggtttttgtcattctggggtgtctatggctgatgatgatcaatttgataaagaagtttataaaacactttatgagtttcaattaaaagggcttgaaagtgtaaaggcattacatgcaaaacatgaggataaagctgctaaatatctaacatttacatcaataattattgcggctatgagtatattttcaaaacagtatttgtttgatgttgaaaataaatcttttatattttacgtaattgtcgttttgatggttttagttttcttgtcattatccagtatagctagaaatttatttcatgttctagaagttagtaaggtgggtaaactagaaaataataaggatatggtcaattactttacacagaatgagctagcaactatctactactatctttccatcgatatggctggggtgattaaaacatatgaagatagaaattctataaaagttaattatttgaataaggcttttaaagagataaaattctgtggattaatgtttgtgttaactgtactattgattatagttgatattttgatcatttaa

SEQ ID NO: 57644 - DNA, 264 bp, Acinetobacter baumannii
atgccgtttggaagtggtgcaaagtcttgtgaatatttaggttggccacccgctgaaacggtaaataaggtacggccgtggaaagcattgttaaatgccacaatgccacttttacctgcaacaccgctgtcgagtccaactttacgagccagttttaaagctgcctcattcgcttctgcacctgagttacagaagaatactttatcggcaaatgtattttcagtgagttgtttagcaaggcgtagtactggttcattggtatag

SEQ ID NO: 57645 - DNA, 507 bp, Acinetobacter baumannii; identical to SEQ ID NO: 46159

SEQ ID NO: 57646 - DNA, 363 bp, Acinetobacter baumannii; identical to SEQ ID NO: 46158

SEQ ID NO: 57647 - DNA, 1623 bp, Acinetobacter baumannii; identical to SEQ ID NO: 49098

SEQ ID NO: 57648 - DNA, 942 bp, Acinetobacter baumannii; identical to SEQ ID NO: 49421

SEQ ID NO: 57649 - DNA, 129 bp, Acinetobacter baumannii
atgactctagttggtttttcagattttctaatctttcatgatgtattggaatttgacggtgttcattttccaaaatttgttgctcaagctttaagttatgttcttgtgctttcaattgatcaagtttga

SEQ ID NO: 57650 - DNA, 933 bp, Acinetobacter baumannii
atgaataagtcgacaccaaaaatttatcgcacaaccaattggtcttcatataaccgagctctcattaatcgtggaaatattgccatttggtttgatcctgctacgcaatggtatgccccatcaaaaggcaaacaaggacgaaatcaaacttactccgacgcagctatccaatgctgcctaatgattaaatctctctttcgattatctttacgcatggtcactggctttgttcaaagtctcatccatctttgtgggttaaattggatagcgccagactacactacaatttgtagacgacaacagcatattgatattgtgattagctatcaaaaaagttgtgatggactatatctaatcgttgactctacaggtctgaaattcttaggtgagggtgaatggaagcgtaaaaaacatcagcctgaatatcgtcgccaatggcgtaaattacatattggtatagatgctaaaaccttacaaatacgcgctgttcagctcacaaccaacaatgtgagtgattcacaggtacttggtgatttactcgatcagattccacaagatgagagagttgactccgtctataccgatggagcttatgataccaaacagtgccgacaggtcattgcggataggcaagcacatgcagtgattccaccaagaaaaaatgcgaagccatggaaagataaaaagatgggctcgctagaacgcaatgagttgcttcgaacagttaaacgtttaggaagaactatttggaagaaatggtcaggctatcatcggcgaagtttggttgaaaccaagatgcattgcatcaaattattaggggataaactcagtgcgagaaattttcaaagccaagtcaatgagattcatgcacgtatggcagtattaaataaatttacggacttaggcagaccacatacccgagttgtcacttaa

SEQ ID NO: 57651 - DNA, 183 bp, Acinetobacter baumannii
atgtcttatacaattcaacaagatacatatgcagtactactgccagcgtttaatgatttgaatattagaaatattgcagagccttttctaaggaaaggtggatgcagtattctattaggtgaaacgagagaagaatatgtaaacagaagagatgaaattccttatcaactcattttatgttag

SEQ ID NO: 57652 - DNA, 531 bp, Acinetobacter baumannii
atgtggaccatctgccaacactggaagtgtattatctgcaagcgtccaggtaccgtcaccattgttcactgctgggtaatccacgccatccacagtcactacaactgtcgcagtaggatcatcaatcgtaccggtcaatgcaggagttgtatcgttagtcgatacatccgcgaaagttactaccggtgctacaaggtcaacgataaagccgtctgtaccgtcaagtacatcgcctgtacccaagttacctgcaacatctgtgtagctgccatcagccacggcaatgcttggtgctgtgcctgtaccatccggtgtgaacactgctgtccaggtgatgttgtccgttgtagtcaggccagtcaatgtaccgcctacaaccgtgatgtcacttacatcaaagcctgcaactgcctcactgaacgtgaaggtaatgttggcatcttcacctgccgcaagtgcaaggtcatctgtcgtgatcgcaagtgttggtgctgtcgcatcaacagtcactgtacctgttaccggagttga

SEQ ID NO: 57653 - DNA, 132 bp, Acinetobacter baumannii
atggccatggctgctgatgtcaccattgcccaggtttctgaagtggttgagttaggtggattagatccggaacatatcattaccccaggtatctttgtacagcacgttgtacaagtacagcccgcacagtaa

SEQ ID NO: 57654 - DNA, 198 bp, Acinetobacter baumannii
atgagtgtggttgatgagtttggtcgtgttcacaccttagacaatgtgcggattgtggatgcatcgatcatgcctgagatcccgagtggtaatttgaatgcaccgatcattatgatggccgaaaaaatggccgatattgttaaaggagttaagcctttgacactgaatcaacctgtagattattacaaaccgaattga

SEQ ID NO: 57655 - DNA, 1068 bp, Acinetobacter baumannii; identical to SEQ ID NO: 43479

SEQ ID NO: 57656 - DNA, 234 bp, Acinetobacter baumannii
atgagtctcaaacgtaaaggtattattttagcgggtggttcaggtacacgcttacatccaattaccaaaggtgtatcgaaacagcttttgccaatttacgataaaccaatggtttactatccattgtctgtattgatgcttgccggtattcgtgaagtcttattgatttcgacaccagaagatttaccccaatatgaaaaactgctcggtgatggttctcaatttggtatttaa

SEQ ID NO: 57657 - DNA, 606 bp, Acinetobacter baumannii
atgcttgaaaatatatttaagcctttgaattaccttgccattaagtgggaagttaaaggtgccatttcaaagaaaaaatttgatttcttcatcccggctatattggctttaataactagcgttattttgttaggaatagatatatatgcctataatccattgaaggaaattgaacctaatattttcaaaaatgattttgcagtattgttaaccggctttttacaaactattcctggtttttatattgcagctcttgctgctatagccacattgactagtgaagttatggatcggccaatgtctggtgtagcccctaccgaaaaaatacttgaaactaatcctgatagagaagtagaaattcctctctctcgacgaatgtttttgtctcgtctattttcatatttagcatttataagtttaattctttattttttcgttcttacttttaaatatttctatagtttagatatatttagtacctctcaattttggtatgagcttggatatgtattttgtctttttattatctgcttctttatgttccagttattattgctgacctttttaggtttatattatctaggtgatagagtccatagaaattag

SEQ ID NO: 57658 - DNA, 1008 bp, Acinetobacter baumannii
atgtcggataatttactcgttactttccacaagcttaatacacaagtattatcattatcacctgcgagtcctaaacctaatataaatttcaatctaattgagttttttgaaaaacttaaacaatggaattatgaaggttttaaatatccttattcaaatgatcgtttttgtggattgttaggaaaaattgatattgatcctataaattttattattcgtttagtttttgttgttgctgacgtagaagctgatcctcaatgtgctcgagatctcgatactaaccaaacacgtctattacaacgccgtccaggtgaagcagcagataaacgtgtacatattgttttaaaagttgatagatcggcgccttttcttgcagatgtgggtattgagcatgaaagtggagttactatgcgtatttttgttagtaccctaaactatcttgctaaacatgcacgccgtgaaaatatagattcaaagagttactttattggtgagcatccaactgaaagatatgaacgaggccctaaaaaagatttaccaaaagaacttggttttaaactcaactttaaatatgaatctattttaagtgatgaaattattgatgcatttattcatggcagagtaaaaaatgttgagtttactcaagctccacaatttcaacaaaattgggataatcaaggtatttttagacaaaatgaagtgaaagttagcttaagtgctagtgcggttattattcctagtagtatacgaacaaaagaacagaaagcaggttttgtaaaacgtattttccataatctaattcaacaacatacaaaccttcaaggagttttgtttaaaataaaatttgaagacggtaaaggtagtgaacggcttgctcaatataatcccgatcttgatgagtttgtactagtgaagaaagaaagaattcctgcttctttacgacaacctatgacggcggatatccaaattaaccataacctatgtgatagaatacagtctaaattatga

SEQ ID NO: 57659 - DNA, 675 bp, Acinetobacter baumannii
atggctataaaacatattttgattgatttagatggaaccttaacagaccctaaagttggtatccatacatcaattcgttatgcaatggataagttaggttatccattagctgccgatttaaatattgattggacgattggcccacctttaaaagcgtcattagcaaaattattagctactcaagatgatgcactagctgagcaagctttacttgcttaccgtgagcgtttctcggtgattggtttatttgaaaatgaagtatatccatctgttgcggaaacacttaaggccttaaaagcagaagggtatcgtttgttcgttgctactgctaaaccaacgatttatgcaaaacgaattttagatcattttgaattaagccaatattttgtacaaatttacggtagtgaattaacgggtgagcggaccaataaagctgagcttatccattatattcttgaacgtgagcaattaaacccagaagaatgcttgatggtgggtgatcgtcaatatgatgttttaggcgcccgtcataatggtattgaagcggtagctgtgacttatggttatgggacaccagaagaacttactcaagcacaacctaaagcaaagattacaaaattttctgaacttttagattatgttgaagaacaggccgcacaaaagaaagtttcttaa

SEQ ID NO: 57660 - DNA, 927 bp, Acinetobacter baumannii
atgaaaaaaaataaattagaaattgattatcttgaagttgtagttgatattaatcataagccagaagaagtagcatcatgttatcaaattgttagtgatgaaaaatataactttgatgaatcaaaaattaaatatcgatcaaaaaaaatattatctgaatttgatagtattataacattacaatcattttcattgttaaatgattataattctaaattaaagataagtggtaatttttataaatggttgaatggtcataatgtgacaggttgcgaaaatttaatagatttagttttacagactattgagaaattgaaaaatttaaatttagtcgatccaacaaaagaacaattagaaactattcgtctcggtaattttagactttatagagttgatgtaaaaagagacttggtttttgatagtaagcaaaatgctattcaatatttgtctactcttagaaatttatcgacttatccaaagcagaaaaaaacaatatttgagaatggtatctattttggttttacttctaagcgttggtctatttgtaattatcataaaggtcaagaagttagagataactataaaagatctaagacaaatttagaattacaagcattagctgatcttatgattcgtcaagaaataagaattcaatcgaagcaattagctacatgggaactacgttttggccaccaatggcgtgatttaaataatattgagaatttttttaaaaatatacttgataaaatatatataccagcaattaatcttaaagattcaaaaaataatatttgtgataaaagtgatagaaaattctataattgtgttatcaacggcgaccataaagaagtttactcaagagcaactattagtagaaaaagaagaattttcttagataaatataatattgatataaataatgtataa

SEQ ID NO: 57661 - DNA, 2040 bp, Acinetobacter baumannii
atggctgatcagatcgttactcgacaggacctcgtagatgcacactatgatgcagaaaccttaggggagtgtattaacggggaagaaaatacagaagtaacttcgcggttaggtagaacatattggaccttagccacaattaattacctaatttcacagggccaattaaagatcagcgaccttcaggaggctattgatattgcactagctgctggagcaggcgaaaacgggtggatagatacactggtactgactttaactggtgagaatctcagggaattcaataaaaaaacaatcagtactttagattgcattgatgatctaacaaatacattgccgtggcctgggcgcacggtaaatgtacgctcagtcattagaaataaacatctaggtggcgggacatttgtatttaatcagaatagcaccagaaccccagacgggtatatcgttgttgctgatgttggagggaattgggaaaaaatcacagttgcttttccaaccgttgatgatttcggtggacttggtgatgacccgaactatgatgatgctgatgcctttattaaatgtgcgttaagcccatacacaggttcaaatatttatcttgctaacagacaagttgaataccgtatcaataaacaagttgattgcaagggtaaaggtattgttggtggtggatttagcagacaaaatgctactgcgtatgcaatgaactctctaaaggtaagaccaggtgattattcaaattcaaacactcttcttaataatgtggcatttattaacgttggcgccgaagtaagagacttacaattagtaagtgagggtgtttcagagaatatctcgggtttaaaagtcgacggttacaacttcacactttcaaacgccaatatttcaggtttttacaatcaagtatatttatcaaacgcaacagtttcattccgcgttcaaaatttgatgtcgattagtgcggcaaatgcagggttctttatcgcagatgtggaatctaaacaaagtacaactgcatattttgataattgctcgtggcaatggggtaaataccctgtgctgtttgctaaagaagcatatcagtgcgtctttaataatattattcttgaatatatgcagtacggtttaactgccggtatttggtcgaattgctcattcaatgcaatttgggcagagcaaacaagagatggtgtagctcgtgactggcttgtaaatacttcttatcaacaaacatttaattgcatcactaataatctatacattagaacgccttggctaaatcgagctgacacaactgctttggctgtatcagataatatcggtggtgttgttatcgataagagccgcattaccttgggcggtgcgacgggtgcgaaaatacaactttccccatctgggttggcaacactttttgctaattggtatggtggtattaatcgaagattattaattactactcaaccgactgcggcagattctgggtataaaacaccaatccacatcaatgcacctaatagcgaattgtattttggaaatcaggatgaaacatcagtttcaagtgtagtatttaagcgagtaattggcgctactgctacaaatacaccttatattgcgtcagactcgtggactaaaaaaattcgaaagtggaatacttacaatcacgaagtatcaaaagtcgggcgttttattgcaccgatgatgctgacttatgatgtcaactttactacccaacaaaataacgcaggctggtctatctcaaaagagtctacgggagtctatagattgcaacgagatgcgggcgtaacaactgaattagcaaatccgcacatttttgtttctggcattttttctggaacgggattaggtgatggaaaggctatattgccaccgacgctacaagcaattgaagcatacagtgggagttggtcgtcttacaaagttgcagctggagtcaagttgttttttatagatttgacaggtgcgttagttgatccaatgcgcttctcagtatcattcacactagaatcaggaatttaa

SEQ ID NO: 57662 - DNA, 2823 bp, Acinetobacter baumannii
atgcctgaatctgtaagccgcttggttattgtggtagatgccaaagatggcaaaaaagaagtcgatgctttagataagtctctaggtaatgctgagaaacaaggcgataagactgcaaaatcaattaaaaatgtaggtcaagagacaggtaaaactactgatttattctccaaatttaaggaacaaattaattcatctcttggcaatacacgccttgggtctgttattggtgatgtcactgaaaaagttgcagctttgcgtggtggcgctttgatggcaggtgcagcacttacaggaatggcggtgggtggtgcagcagtagcatttgctggactttctgcaatggcaattcaagccgctaaagcggatgctgagatgattgttttagcaaatagagcaaacactagcacacagaactttcaaattctttcacatgctgctgaacagcttggtatgtcacaagatggtctggcacagtcattagctgatgcacaagagaagctcggtgaattcactgctagtggtggcggaggtgaggcggcagacttctttgacgcattaaaaaataacaccaaaatgactgatgcagagattcaaaaatttgcgaagacattgcaaggtaaagatggtgttgaagcacttcagctaatgaaagataagcttgatagtgttggagcatctgcacaagaacaaagatttgtctttgaaagtctaggtaatgatttaggtaatttacttccattgttcgaaaatggaggggctttattagatcgttatggagaggcattaacagaagcggggattatcaaaagcaaagaagctattgaacagtctcgactgcttgccgctcaaactaagtcagttcaaactcgttttgagggatttaaaacccaattagcatctcagatgatgcctgtcttgaactcacttttaagtagtttcttacaaggggctgaagatggtggccaatttggttccgtaattcaatctgtaggtgtaattgctaagggtgtagcagtagggattattgggctagcaagtgcaattcaggttgttatacgactcattcaaggctttgtagagcaggctaaaaatattggttcgactgctgttaatgtttggaatgctgatggagttgttgctaaagggcaagctctagtaaatggttttaaaaatggttggtctatcgccagtgatactgtaaacgattcagtagcgaccattaaaggctcaatgaagtccatgaatgatgtgctggatgcatcagttcctaaacttgataagcttggtcagttgtattacgacaccagtggtgcaatagacaaaaccaacaagggccttaaaacaaacgcaaaagaagctaaagacgcagagaatgctgcaaaaaaagctgctcaagaatcgaaaaagcatgctcaagaattagagaagatcaatgaagaacgtctcaaaattcagtatgaatactctgataaatccaaacaaattgagatggatttgcagaaggaaattgagcgcttacagaaatacggcatgactcaatatgtctctgtagcgatacagaaagcgaatgatgcaaaactcattagtgaagctcaacttgcttatgatctttattccttcaagatgaatgagcaagagaaacttaacgcaaaaactaagattgaagggctcagaattcagaagagtcttgaatataacgctgaggaaaagaagtctcgtttaaaagccttaaaggaacaatacgattatgaaactaacctaatcaatcttgctgctgaacaaagaaaacgtgcttacgagcagacttatagtaattcactaagagatattcaacaggctagagcgctcttagcagcacccaaaggtgaacgtgaaggtttatcaacgcagttcggggaaagtaatgcaatgtctgataatgacaatgcattattgaatgaacaagataacttaaaagcaaaactagccaaaggtgaaattctaactcttgaatacaacaagcgtattgaggatgctgttaggctccatgaggagaccaagcataagatacaagaggaatatgcacagaaatatcaagatttgcagaagggtcaatatgaatctcagttgcaaatctggtccagtcttttaaatcaaggacaatctgtgtggtctaatttaactcaatcagtaaaggatgcaagtggagaacagtctaagagatacaaagctatgtttgctatgcagcaagcatttgccattgcctcaacaattgtttctgctcatttagcagcagcagaaactacagcagatattacacttccattcgttggaaaaataccagcagcgtctgcaatcttgggctttggatatgctcaagcagcaatgatcgcagcacaaacaatcgctggctttgcaaatggtggtcagattcgtggagctggaactaatacaagtgacagcatcccgattatggcttcacatgaagagttcatgatcaaggcaaagtcagccaagaagattggcttagacaatctaaattacatgaacagaactggtgaattacctaatagggagatgaaccaatacaacgccattaactctggtcaatcctttggtagttctggtgcaactgtcctagaaccaatcgtgaatgtctatgtcatggaaggtcaaactgctgacgtgactagaaatgacgatggttctttagatgttcgcattaggcagattgctggcgaagttgcggagcaggttttcctacagggaattcaaaaccctaatagtagaatcagcaaggcattcaagcaaaactacaatgcaacacctagacggcaataa

SEQ ID NO: 57663 - DNA, 381 bp, Acinetobacter baumannii
atgaaaaagataattgtattaggttcagtagttttctttagtggctgtgctacgactgcaaacttttttgagttaacacctacagtaacaaccaatcacggctattggacaggtgcacattcgaatgtttctgttgcaactttaaagttaaatcaagatggttcgggtgttatttgccaagattatcaaggcgaagcaagagtacaatcaatcaagaaagtaggcaataaagtttatacgcaggacggatctttctgggccattaaaagtgaaactaatacaaatcttgaactagcatatggagttggtggcagctacaaactaattaaagatgatcagaaaaccaatatgtcacctgcctgcaaggctaaattagattaa

SEQ ID NO: 57664 - DNA, 762 bp, Acinetobacter baumannii
atgcttaaggactatcttgggcctgccgctgaacataagcacaaagcagaacaagccattaaagaaaagagatttgatgatgcttggcgtcatcttaatgagcaaaaaataaattattttcagcacgcaaaacaatgtaattttactgaaaagcaaactttggggcttgatgcggttgtgcacatcacaatgggcaatttactgagaagagaaggtaagcatttacaagctttgtatcacattgcttatgtttataaggtaggtaagctagagaacccccaaaatgacagtaacgatgataggctaagaatctactataaaagagcaaagaaagatggtggattcgagaactttaaacaagggcttgacctttttcccagttatgattatcagtcagtgcaacatttcacaagcagccttttaaattctggagacgtaaaacaaggagctattacttctcctcaaattgaggaaaagcctattacaaaaatcccagaaattaataagaacgctataaataataagtttttggctgaacgcaagaaaaaaaaggaagaacatattgggattcctcctccattaaaaaagcccgagaagaagcaagttattcaatatgaaaagatgaatagccaaataagtgcaacacctgttagcagtagttcaaaaactgaaggatgtaggagttcggtttcagggttctttattgcagcgacttgcgtggtgataggtttaattctgcttgtttggttgctttcatactaa

SEQ ID NO: 57665 - DNA, 792 bp, Acinetobacter baumannii
gtggataatatagaattattgcctagtgatgatgaaactatgctgaccgttaatattaagaataaagccccagttgacttaatcgacttcgcccaaagtatgattagtttaggtgctgagtattcggactatattgcggagacaaataaccatttagtttcagatgaaattaaactttatattaaagaaattagacccggttcaataattacggaacttgttgctcttgctcctgcactaatgccttttgctgagcatgcaaataccgtgattgactttacgagccacatgaaggcttgtattgattttttaaagggatctggtaataaaccagataatctcgacaaacagactttaagcagggtttctaagtttgttgagccaatagcaaaagatagtggatcaatcctccaagttgatgcatccaataataccggaactattacaatcaacattaatagtttggaggctaatgctattcaaaataaggcatcaaaagaaatagaaaaactaaaggagccaatagttggattgcatacaaaggttgtactctattggacacaaactcgatctgataatcggaaaggttataagggtgtaattgagagcatctcagataaagaagttaaagttctatttgataatgacgatattcaacatgaaatgattcatggtgaagatcagatatatgaaaaagcctatctagtagacgtaaacgttgaaacaataaaggatcagccagcagcttataaaattatcaagttccatgagccaattgatttaccagaataa

SEQ ID NO: 57666 - DNA, 495 bp, Acinetobacter baumannii
gtggcttttgatattgttgaaaagaacaaagatattacttacccatttgaatgggtagacttcccaactggtggaaaatttaaaattaatggaattatgcagccagagtttcagcgggcacttgagatttttaatctagaaaccgcagaagaaaaggctgacattaaccttattacaaatgagcgtattgaaaagcgtaacgacaagttcgcgtatgcagtcggtgtgttccttgtgaatgattggaagggcattgaattaacagatgggtcggcacttgaatacaaccgtaccaatgttgaaactatcttctgtaaatctgcacaaaagaatcagttaattgattttgtgattaaagaagctacccgcattcaaacagaatcccttaaaaagcttcaggacatcgtgggaaagtcacaaacctctacacctacgccaacaagtacgcggggctcacggaccacgaaaaaaagcaaagagaagccctcggtgtaa

SEQ ID NO: 57667 - DNA, 531 bp, Acinetobacter baumannii
atgaatgcaattgtaaattttgaaaaaaatccatttatagaagtggaacttaatggtgaagtccagttgggtgtgaatgcccgtgatctgcacgaaatgttagaagtaaaagccgagttctcacactggattaaacgaagaattactcaatgtaaatttgaagaaaattttgattatgtggttatcgtcaaaaaagacgaaaacctaaaaggtgggcgaccaacaaccgaatacatcatttccgtagatatgactaaacatttaggaatgatggagcgtaatgacaaaggtcatgaaatccgaaaatattatattgaacaagaaaaaattgcccgtgatgcttttacgggtcttcaactagagataggcaaattgacactcttggctgatcaatggactgaaacactgtctaatgctggtcgaatattaaatattggtggcaagcagattaagccaaagatactgaaaaaattagacgaattagtcaagaaaacacagcacaaactagattttgatgatgatcaaaactaa

SEQ ID NO: 57668 - DNA, 483 bp, Acinetobacter baumannii
atggaaccacgattcgtcatcaaaaaccattctgacatcaactatgtgacgaactatttaaataaaaaccatgcagaagcggcagttgaaggcaagcctttagtggttttaattgcaccacaagagaaagaccggacaaaagctcaaaaccgtttgtactggatgtggcttaatcaatgggctaaacgtcaaggtacagataaagattatgagcatctgttctttaagaagaacttcttatccaaaatctatgaccgtgatgatgttgggcaatacaagaaaacattcaaggctgttagagaattgaaggattgtaagcatccagcctatcaacaagtagctgatggactttgtgagttaatgagcactacagacgcaagtacagctcaattcacagaatacctaaacgacattcacgcattctgcaataaaaacgggtgttatttggaaacgcctgatgaccttaagtatgcgcttgaataa

SEQ ID NO: 57669 - DNA, 219 bp, Acinetobacter baumannii
atgtctatgttgcgtcgtggtgatgttgtgaagcactcaaattatccatttaactttaaagttattgaagttacaaagcagtgggctacatgtgaaggtatgaatgaacatgggcaaagagtagttgaagacttttcgcctgagtttctggaagtggtttctcgaaaacccggaatgaacattaacattgcagatgtcgagaaagccttctcaaaatag

SEQ ID NO: 57670 - DNA, 399 bp, Acinetobacter baumannii
atgatttttatcgagtttagactttgcttgccttgggtttatgttcgacatgagtttgggcatgaatcttttgacaagatgattcgcatagatatgggattctgcacaatattcatcaccaagaacagtagccgattgactaaaaacttagagcattttttacatggtgttggggcagaacaattgcctcaataccgcactcagattaaagcaatcaagtcaaaagcaagagttcaggctgctaaagataaagaacagtgcatagagcgcctgattgctgacaatcaaagacttgtcactcagtacagtgagttaaatcgaaagctatctagctacaagaacctagcttatgcagttcgcaatattaaagaagttgatattgaggagctaactaaatga

SEQ ID NO: 57671 - DNA, 411 bp, Acinetobacter baumannii
atggataagtgcagagaagaatttgagaaacattttttaagtttgaaatttgccacggaaggagttgcgcaaactgctcttgacgcttgtaactttgataaagatcaaaatgtatatcttcctaatatggaatggtttctacataacgattatcaagaaggtgttgtgtattgcagtatgttaaacacttgctacatgtcgtttcagagcctccagaccgaggtagacgaactgcaaaacctatatacgcaacaaggcataaatatgctgaagctgcaaaagcgggtggattccttaactcaaacaatggaagagctacttgaggaaatgaaatatccaactgctacttttgaagaggtgatcgtgtgcggtgtgaaagagttagagcaagcgctcaagggggaaggatga

SEQ ID NO: 57672 - DNA, 516 bp, Acinetobacter baumannii
atgagtgagtttaaagatagtgaagtgctgagatatgccaatgaatgcgtgacctatgatccagacacggggttgatcacctataaggataatgaatctgtaaaaaaagtgctaagggggacagttgcgaatagcacttacaaggcttctggttataagagaattgttcttaataaacaatcatttctacaacatagacttgcttggcttctacattacgggaagtggcctgaaggcgatattgatcatattaacggaaagcgtaatgacaaccgcattaaaaaccttagggatacatcaaaaaacttaaacatggaaaaccaaaggaaagcaaaagtcactaataagactggttttttaggtgtccgcaagaggaatcggaaggctaatccgtacaacgcccaaatcaaggtgaatggtaagacaattgatcttggggtttataaaaccgcagaagaagcgcatgcggcttatgtggtagctaaacgcaaataccacactggttgcacaatttga

SEQ ID NO: 57673 - DNA, 285 bp, Acinetobacter baumannii
atgaaaccagaacagtttattcgtgagtttggtgtggagaaggcgagagaggttgtagctagcggcgcagactcttttacttttgtgcttaatgacggaataagaagtagacataaaagcgtttctgtgcaatcgctcaagcgtctcgtggagtcagttgatcgagttaatgcatttggtggcttaaaggacgcaaaagcagtcgtaaagatgggtaagcactacaagtacttgaaagcccacattagtaattacgaatcaatatacggaggcggggatgaatag

SEQ ID NO: 57674 - DNA, 750 bp, Acinetobacter baumannii
atgtctttacactctcgaattaggcaaaaacttgaagaaaaaaaattaagagccgctgatttagcaagagcaacaaaaaaatctcctgttgctgtaaagaaatggctagatggcactagcgtccctacagcggaaaacttgaaagtcatagcgaaatttttaggtgtgagtgacgattggttgctttatggcggaccggttgaacaagaatcgaacaatttacttcaattaaatgttcttgatattgaagcctttaagcagaagtacaatattccagatagtgaagatgctgttaagtttgttcaaacatcagataaaccattccccacccaaaaaagatatgttcctgttaaggcttactccaagatgggcatggatggctatttcacagatatgggttatgaaggcaatgctggagatgggtatgttccaactcactcagcaggaccaagagcctatggcattaaaggcactggcgactcaatgtttccagcaattcgtaatggctggtatgttgtatgcgaccctgatgcagatcttgtgccgaatgagtttgttcaggtgtgcttgaaggatggaagatgcacaattaaagaatttgtcggcatcaatggtggggttttaagtttgctttctgtgaatggtggtgagcgatttttctttgaaatggacgaggttgaaagtattaccgctattacagatatcgtgccgccaagtcagcatagacaagaacatccttattcgcattaa

SEQ ID NO: 57675 - DNA, 480 bp, Acinetobacter baumannii
atgattgataaaaatatatggatggagattttgaaactaacatctcaaagccaatccaaaggcgaagcactttatttggatgggctgaagaagcaatttcctgaaaaccagttggaatacaatattaaataccttgttgatcatggcttaatagtgaaaaacctaacaaacctcgatgactcatttggttattcagagctaacaaccacgggttacgattttttggaaaaagatggcggcctaactcgcgaagtaaacgagaagctcaacactatctttgttaagattgatgaagagcaatttcgcacactactgtttgataaaattagccaaatggatttacctgaaacccaaaaggaatccattacttcagcgataaaaaatctacctgcggattcgctaacacaccttgcaacaaaactacttgatgctggtctagagagtctaccgaacgtactccaatcaattggaattggttag

SEQ ID NO: 57676 - DNA, 387 bp, Acinetobacter baumannii
atgaataggaattggcaaagttctaaaaattatataaatgaaaaactcttaaatagtgaagagagcatcaccttaacaaagtcggttgaaattaattacaagtccgtaagcattccacctgccgaacaagatcatattaaaattcaagccctgtcttttttctgtgacagccttttagtgtacgcagagacagaacaggatgaatttatattaggccttaacaaccacacttatttggagttcaaacgcaagcacaataacgatgaaaaaactaaccaattccaattgattggagtacgttcggtagactctctagaccagcatcaagtagttttgttgcaaggtgtgttagcgaatccgcaggtagattttttatcgctgaagtaa

SEQ ID NO: 57677 - DNA, 207 bp, Acinetobacter baumannii
atgaatcaaagaatcagaaagtacaagattagtcaggctactgttgatagcttttctggctacttaatcggatcagcactatcagtaattctcggactagtaattgtagtccctttccttcgttcatgtgccgacgagcaacatgtcaacgaactcaaagcaaaacagaacatgtatgtgcgtgtgcaggttgagggggtgaagtga

SEQ ID NO: 57678 - DNA, 771 bp, Acinetobacter baumannii
atggataactacaaaatcaaagttaaagatgaagctgagagcaaagaggctcaggagttgtttgtacagcttggatttgagaaaacaggattttcatgtgatgaatttccttgctacttggcaacatgggaaggtggtttttcagactacgttcttgattccctgagcattagtagagaaagaaaagaactcaccctccctcagcttcgagaccttgttgtgttgaagcgtaatgatgtgaaggataagacacatcgcgacaagcgggatgaatcaatctatttaactagcgacaaggttatttattactggcagggtgaatggtgtaaatcagctattaataaatcaaatgactatgaaaactatattgctaatagtttgacaccaatcgctcaaccccaagaccctaccttgattaccggtgcggaggcgttgcgagctttggctgatgggaaagaggttgagtttaaacatgatacccaaggttgggttacttgcttaggtttgaatattgaaagagttctaggtggttggcatcaaatgcgcctcaaaccccaaaccatcaagcttgaacttgagctgccgaagccttttgagcctaaagaagatggatatgtctacatcattgatgactatcaagtttctggatatagaaaatattactttgaagttgaagataataaagaacttagcttcattggtgtatggcacaccgaagacgagatcaaacaagtcgtagcgcaactcagaaagatacgaggtgcctcatga

SEQ ID NO: 57679 - DNA, 210 bp, Acinetobacter baumannii
atgaatatgttagccaatatctcgtttgatgctgctgaatcaaagcttttgaaggacttaagcaaacaccctgagcttctagctggcgcagttgaatatgccttccaacgtggtgatatcgactctaaagaataccgtaactggcaaagcaagattgcagaaatggagcgtcaacacactgcaaaccttttagcgactattaaagcgtga

SEQ ID NO: 57680 - DNA, 315 bp, Acinetobacter baumannii
atgggctttttcttcaatacagaatttcttgaacagtttggtttcagtgttggtgaagaagatgaagcaactcactacagcactttcggtggcagcgattggaaattgaaagctaataaagaccagatgttctactgggatgccctttcaaaatcttggaaaagatgggctttaactttagagcactgcacacctatcggtgaaaaagaaccaaattacaaatgcggaccagttaatcaagtcgtagttaagaaagatgaaacgactcgtgaattgtctccgatttattcaaattcgaaatataaaggtgattaa

SEQ ID NO: 57681 - DNA, 609 bp, Acinetobacter baumannii
atgaatgcacaagttaataatacgctggtcattgaggatttggtggctattcaacatgaacttaaagcccctaaggataaattcaactcattcgggaaatacaattaccgatcttgtgagtcaatccttgaggcggtaaagcctttattgcacaaatataactgtactttggttctatcagatcagtcaaaagaattgtgcggcatccctatcgtaactgctattgctaagtttattgatagcaaaggcaaagaaactgtagttcaagcagaggcaggtgttgaagttaataaaaaagggatggatgttgctcaaacatttggagcgtcaagttcatatgctagaaagtacgctttaaatggattgtttcttattgatgactccaaggatgctgattctgatgaataccaaaatcagcaggtttcacagcaaaaccagtatcaaaaccaattaaaagccgagtttcaaaaagcgcttaaagatattgagaatgcagagagttattcgattctagtgtcaatctggaacaaatttaaagctacaaattatgctgaacaaattaagaaatcaattggtgctaaacgtgacaaagaaggatgggcagcatga

SEQ ID NO: 57682 - DNA, 402 bp, Acinetobacter baumannii
atgacagatttgaataagggaagtgaagttaatctacgctttgagcaagacaatggtgcggtttgggtatttgcaggtgatagacaatttggtaccgaaatcagccatttaatgatgatgcatgcagatgaatatagtgaagatgaattacgtgttacttgtcaccatgcagcatgtgaaattgacaggcttagagcagagctagaaaaagccaaagctcaggcggtgccagaggggtatgtggttgtgccaaaggaaccaactagagagatgctaaaagctggagttcacagctacctacaccaagattctatcaaagagaaagatggctcaagtagcgtaagttttaaacatatatatcaggcaatgcttgaagcaagcgaatcgggagctgagggatga

SEQ ID NO: 57683 - DNA, 363 bp, Acinetobacter baumannii
atgggtcaaactgaatcccatgtgaattatgagccaagtcagatcgagccaaaaccatcgaccgaaaaagccagagctgttcaaacaccactagaaggtacggtgatgcaacatgcaattcagaaacaacaaccatataaacaagctggtgatttatatcgtagctattcagcactagagaaaaaagacttaatccgtaatctagctgcagacttagggcaagtgaagaatgttgaaactaaaacggtcatgctgtcctatttctataaagcagatgcagattatggtactcgtcttgctaaagcagtaggtgtagatctgaaaatggtgcaagccaaagcagcccaactaaaagatgaataa

SEQ ID NO: 57684 - DNA, 426 bp, Acinetobacter baumannii
atgcttcaatataacaaaaaaatgattattcacgcacttgcgcttgcacccatcccattgctgagtatatctgccttaggaataatcatcttcaatgcggaatttagtctttattcggttggagttatttttctagcccatttcttattttatttacttttttatggccttctggttattcctttcgcatatatcacttcatattttctcgcgcgtaaaaatcgtttaaatctgataagtatttttatctgcgtaactgtcatctggattttgattagccctattacgcgcttaatttttgtcggatcgtttccttctccttggtggcatatttataagatctatagtttttatcttatgattttatttaccagcttttgctactggcttggcttggaatggctaaggcgaagacaaatcggctaa

SEQ ID NO: 57685 - DNA, 807 bp, Acinetobacter baumannii
atgggaagtgttttaagtaaaccgccagtatttcacactctagtacaaataaacatcaatgaaattccgaactttaaagatgttgtagacttgatccatcaagaattttacaaattaggttttattgaaaaacgaaaagaagagatcgaagagttagagtttacttctcatgttgctcaacctaaagtaaaaaaaatgacgtcttggcattttattaattttgaacaaaatgctggctttgtcataaatccaaatttcatagcttttcatacaactaattatagtagttttgatgactttataaaaaacgttttattagctatagacatccttaacagacatttagatttggttgttattgagcgtttaggattacgttatttggatgccgttattataaaagatggtgagaaaattgataactatttatcaagagatttattatcagttcaggatactcttggtctagataataatggatttaagatccaacattcaatgaatgaaaagatatttgtaaatgcgaaattaaatgaaacttgtatttgccgtgttgtttctgcaaatttaattaatagtaatccattgttgccacaagagcttgtgccgttaatacaacatttaaaaattaaaaaagaactaacagatattagtggattaatgacattaattgatttagatgcttcaaaaacacaattacgattaaagactgttgaaaaatcagaattaattgatattttaaataaattgcatgataatcttagttgtgtatttgagagccttgtaaatgtggaggcgtttaaatga

SEQ ID NO: 57686 - DNA, 606 bp, Acinetobacter baumannii
atgacagtaatttcttatgcttcaccatatgtaagtaataaaactaaaacttcatttaccgagatttgtttcgctggtattgtgggtttttttggtgcaatgggtacaggaagctctttaaatcaaagagatgtgtatgaacatgctgcatacgtaattccagtagataataaaaatgatgaagctgaaactgacaaaaaaattaattacttaagtatttctgagcaagttgaaataattaaaaatagttttggcttaaatatgtctgctatggcagagctattaaatattagtagaccgacaatttatgcctggttaaaaggagaacctcctaaaacccaagataatatttctcatattagtttcattgtaaaacatgctttaagctatcgtgatttaaatttagatagacctgataattttattaaaagacctattttcgatagtgagagtttattttctttattaagagaagaaaagcaaatcactgaatctatgtatactcttataaaagatttagatactaaggagtctcaaactagagctaatggcttaaagaaaaatgaactcagaacatccgacgatattttgaatgatttagcgtaa

SEQ ID NO: 57687 - DNA, 834 bp, Acinetobacter baumannii
ttgaacttagtagttgaacctcagtgtgaatgtggaagagttattgcaaaattcagacaaggatcacttataagggttgatgaactgcatactgatgatcgttcaaaatttggaaatgatgaatatgtgtttgtgatatcacatgattgtgatatcacagcagaagcattaaaagaaccttttattgaggttttacgagttgaaattttaaatgagggtgagcaaaattctaatttaatctatggaaagagtccaagagaaatacatttacctattttattaaacaatactcaaaaatatttaaaattatctcagttaacaaaagatcaaatcagtaagcgaaataatatacatgtcgtagctgatgaaagtttttcaattggtgataaaggtataaaattactccactcatggttgtcatcaagatataaaagacattcctttcccgaaagtttagcggaacgattatctaagttacagagtaaaatagagagccgttgtaaaaatcacacaagggcagaaggtattattgctctctttattaatgtagatccaagtgatcaggagctcgaaatagatgaggcatatgaaatagatatagtaattgtatatgaaagtgatatacaaaatgcaaaagaaaattctctaaatttacaaaaagatatatcaaaatgtttggagcaaattgaaagtcaatctccaaatagtatttggggtgaagtgcatataagaagcgatgctgagtttactttcaaggacatgcgctcctatgttgaatggaaatttgaacatctttcatttagaggtgaagttattggttctatagttgagtaa

SEQ ID NO: 57688 - DNA, 165 bp, Acinetobacter baumannii
atgtcacctgttgagcaggggtacatggatgtaccctctgatcaacaaagccttttgtttacttttgggctttcaaaagtaaaaaatgtctatacacactcaataaaatctaacatggtattaaagactgtatggcagcatgaccatactaaatatcacgcatag

SEQ ID NO: 57689 - DNA, 276 bp, Acinetobacter baumannii
atgagaatttttgacacaacagagaatgtttacaatgcagttgatgctattatcaaacatggatttgctgttatttcaggcaccaagatccctgccgttaaatatgctagtcgaataaaaaagtgcttaaagccttataaaaaaattgatcctcatctcagcatgcatgtaaatattccaaatcatggttatctatattttgtatatgatcagaatcgttttagtcacagcgaattagaaaaaactattcaagaaattggattgcatcatccataa

SEQ ID NO: 57690 - DNA, 732 bp, Acinetobacter baumannii
atgaactacgaacaagtcaaatttatacatgaatacttagtacgttttttcgagaattcagatgaccctatctctccttctggtataaaaaatgaagaaacattaaaatcagctgtagcacgaccatttatgtctgtaggaggtcaagatgcatataaaggtatttttcctaaagcggcggctttatttcactctataattaataatcattcatttcataatggaaataaaagagcagctttattaactacaatcgtttttttatcagaaaatggctggtggatttcacgcccaaatgatgatgaactatttgagtttacgcgacaggccgcagcacatgagttatgcaacaatagagttgatgaattagattatattactaaatggtttcggagtaactgccgtcgccgtgttatttataatcatggattaaaattacaccaattaagacaaattctctcagaatttgaatttaccatgattgaaaataataagaatagatttgaaatttataattcaaatggagattatattacggatgtaataaaaaaaggaaaacatggtaaagaagactatgatgtagcatatatttcaaaacttcggaaaaagctaaaactaacggaagaatatggaattgatagccaatgcttttatggtggttttagtgaaattagtatgaataaatttatgcattctagacatgaagttatgcgtaaacttgcaaaaatttaa

SEQ ID NO: 57691 - DNA, 741 bp, Acinetobacter baumannii
atggcaaatattgtattagtgcaaatgtgggggcctatccgtaaacaatttatcagttctcatagattttatgtagaacaaggtaaaaaaaaattgctttctcagtttgaaaatatggaagaggaagctgataatttcgctaatgaatggttaaatgaaaatagtcaatactttgaccccgatctacatgatgatgcatatttttatgagcgggcagaagatgaaagtaatgacttttatttaaatctattagatcttaaagatcaaactcgctttgcattaattgcggggatgtatcataagtgggataaacaattacgcgattggttgattctagaaaccaaatttctaaaatgttataccgtattaaaatctaaaatttggaatgttaacttaggaaatattattgatttctttgatgggttaggttggaatatcagaaaagaaaaattctttagcaaaattgatgcttgtcgcttaattgttaatgtatataaacatgggaatgggaattcttttgatgaattattacttaaatatcccgaatacgtggttaatcccttgcctggattagatactgcttacctagactatgagaatgtagttctaacagatcaacatttacaggaattttctgatgctattattgaattttgggaaactgtaccagaaaatttttttatttctaaattttctggctatcctcactggatagaaaaggagttaaagaaaaataaatag

SEQ ID NO: 57692 - DNA, 600 bp, Acinetobacter baumannii
atgaataaaaaaattaaagtactagatatctatctagataaccttaatcctcgtcatgaccctattagtgatcaacaggaaattattgatcatttgttgaaaaaagaaaaagttaaaaatttagctaaagatattgctgaaaatggaattagtcctattgaacttttagcagtagttaaagataagaataataaatatatagttgttgaaggaaatcgccgtatatgtgctttgactttattaaatgacccagataaggctcctgaccaaagtttaaaagattattttaaaaaactaaaagaaaaatcagtatatattccggattttgtacaatgcgaggtattccaaaaaagagaagatgcagacttatggattgaacgccgtcatgaaggtgagcagtccgggactggtactagacaatggaatgctgaacaaaagactcggcataatgccagattaaagaaaagtgatgctaatgctttagcgcaagctatttttgattttgcgcttgaatataatttaatagagaataaggaaattggtagagttttaacgactgcttcaagatatttgggtaatcccttttcagaaaaactctag

SEQ ID NO: 57693 - DNA, 840 bp, Acinetobacter baumannii
atgactgtctcttcaagatctaatagcaaagatgtagaacagtatgctaaacagttaataaaagatggttttgctccagtaacatatatcgaaccttattttttatcagatgctatatcttccatttcaggtagtgagagtgttaactctcctgaagatactggaacaaaggaagggtataatcaaggagctgatgaaacaagccatccccaagatgaaggagcaagcggagttagtacattgggagctgatagcgttgtaggtactactctacaagaggatgacatacaggagactcatacaacagaagatgaagcttctgacacagatgatactcaagatgaaggtgacactgggcaaccaggaacaacgagagatcctaatacaagaatgtatttattatcaggcttaaagggatgtataaaagatccaatattaagaagagtctatagtgagttaagaaatattagaatttcagaaaatcctttagcagttatgttagtagcaagagcttttttagaaggaatttatataagttattatgaattaaaaaccagaacaaaagttccccctagaacaaaagttcattctattttattagaaattatcaaggtaatagaaaaagataaggagtctctgtcaaaagagcaaaagaatgcctttgttgcactaacaaaattacctcatgataaacataaaatttttgcattaggaaatcttggtgtttatgcacatgctgctgaatatccagataatattaagcggattataactgaatgggataatatttcggcaatagttcaatatatgttagttgaactatataatgctcataaataa

SEQ ID NO: 57694 - DNA, 156 bp, Acinetobacter baumannii
atgccgcagacaccatcacctttaagataccctggggggaaaacttctatttggaaaatggtgtctacaattataaaagataatcatttagaaagagggcattattgtgaaccctatgcgggggggggcggggttggccttatcactactttttaa

SEQ ID NO: 57695 - DNA, 753 bp, Acinetobacter baumannii
gtgaaccctatgcgggggggggcggggttggccttatcactactttttaaaggttatgttcatgaacttcatctaaatgatattgatcgttctatttgggctttttggaatgcagttctacaccaaactgatagtctgatcgaaatgattcaagagacagatgtcacaattgaagaatggtataaacagagagaggtacagttaaataaaaataaagtaagtgactttgagttagctttttcttcattttttctcaatagaaccaatagatcaggtattatattaaaagcaggaatgattggaggttttaaacaagaaggtaattataaaattgactgtcgttataataaaaaaactttaattgataaaattaaaagaattgaaaaatacaaacatagaatacatttgtataatctagatgccttggagttttttgaggttactaaatcctctttgccaaaaaatagtatgtattgtattgatccaccttattttgaaaaagggcagactttatatactaatgcttatgaaaagcaggatcatgaaaaaattgcagaaacaatattaaagctgaaaagaccatggattttaacttatgataatgctgaagaaattaggaagctttatagaagtagaaagcaatatacatttgatctaaattacagtgcagctgaaaagcgagtaggaactgaattattagtggttagtaagaacattaaaatatctgatgaactaaaagttcaaaaattataa

SEQ ID NO: 57696 - DNA, 627 bp, Acinetobacter baumannii
atgattgataatattattaaatgcttacctatttttttagctattgttccattttttgtatggattgataaaagtaaacgtttttctcatagaagaaaattttatctgaatagattggaagctatatcagtttatatagagaattattataataataaagatatcagtaaagttgaaaaagactgtgctgcacaagctttagcttgttctgataagataggacacctagaagttgattatgtaattgaaacatgtcctcataaatttttctttattataaagaagttaacccgtataaaatttttaattgatacggttgtaaaagaagaaaaaatattcctttccactaggtcttcaaagaacaattataaaaaaaagaggattattttattttttagctatatttcttcaatatttataatttcaattaatcatatttttgtttttcttatagattggttgggagtatttaaacctttttatgtggaaagttgggtattaaatctagggttgctaatattaatttttattggaggaagtgtagctattatttctggaattttatttttttctatagatatccttattgaaatttatgatgacttgaagttgtcaaatttatcttag

SEQ ID NO: 57697 - DNA, 483 bp, Acinetobacter baumannii
atgtcggcgaacaggacttatattaaatttatctgtgtccttctgtttatgcttttcatgaatggttgtgcaaattcccagataaatagcgatagagaagctttagttaatgcaggacgtggcgccgtcaatgtaataattacaaattaccgagtgtacagatatgcccctcaagaaaaaaatagtgatgtcacaaaatcattagtttatgcaacattaacaaatgcaaatatattaaaggcttttgaagaagaagctggaaatggttatgttattgaagaaagtttgaatactcgtaagttgaatgaaatctgctggatggcgaaatttgtacgtgaaactaaagatgtaatctcacccaaagaacaagatcactataaagatatttatgcttggttaaataacaaagaaaaagcttgggtgaaaaaaataaattcttcctatactaaagatgaattaggacctgacgattgccgcaaataa

SEQ ID NO: 57698 - DNA, 2283 bp, Acinetobacter baumannii
atgacagttcaagttaccgaccggctcagtcaactttatgttggtaatggggttaatacacggtttgattttacttttaggatttttgatcaagaagacgagacaggtgtagctgtacgtatcaaagttggaaacgagtttgaatttcttgatgagactaaatacaccgtcacaattaaccccgataatctaggtgggtatgtaaattttcttgatgcgcctgacgcacaaacatatttctatattgcaggtaaaacacccgtagatcagttattagatataactaactatgataatttttatcccgatgcaattgaaagagcattagataaacttacagccattttacaagagtggaaacacttagttgattttgagacacaagcacgcattcttgctgatcttaactatgacgaactggctcaacaacgagaagctgaattaaaagcttatattgatggcatcgccagtgctatcactggtcaaccagtacttggtttacctgctaagtttgttgttgatcaaactggtaaaacccaacaacagttaaatgatgcttcaatttacactgttggttcattagcagagatgctttcgcttaattcatattacagatcaaggaccattcgtattaaagcgactggcgcaatgtatatttatgatgaatctcaagcatctgtaaatgatgggttctataccttaaatggctggattttagttggctatcatgatcgccttttagctaaaacggcgggtttaaaaggtgacggaactaacgaatttactaagctaaaatccctatttgatgtttcaagcacattaaatatgcctatccacatgtgtggactgaaagttcaaacatcaaatattgtcgctacgggtaatcttaagctaataggtactggtggtattaaattatttgcaggttctcaaggtactcttctaaatactgcatataatttaattgttgatggtgaaattgagtttgatcaaaacaaagctaataatgcgggcggtgtaatcggagccgaaacacattgtgcaattaaacattcaggtgacattttagtattaaaaggggctaaatttaaaccttccacttcaattaacgtagttactcgagcagttaaaagcgttaaatgcgaagacattgaagttgatgggggaatgatcggtttatatgcaatccccggtgttaatgcgaaggttgaagtacttctcggtgagtatatgaatgcccatcaatatgacaatatccagattcttaatggttcagatattattgttgaaggtgttaaatctcatgatgcagcaagaagctgtattgtaattagcaactatacggccaaagcccgaatttatgcaaatactacctacggcggtaaagtcgatgcagctaatcagggcggttggggaattattgcttcagtaaaatctcaagactcaattgtctctttgaacaactgttatggcaaccaacgcggtccaatgactattgatgtttatcctgatagtggagcaggggttgataataggattgtcgttagtgggaatatttgtaatgctgaatacaacggcaactatggcacttcaggaatggtgctaaatgataccaagcacgctaacgtgtatggaaatattattttccgtgctgcacaaggtatggtttgtgtagatgcggatggatctaatattcacggcaatacctttattgattgtcgtgactacttcctaaccgctgttacatcacacaatcttgtattttcgggtaagaatacatgtgatggtagccctgtgacaggtgctgctgctattcgtttcctagattgtaatcaatttcatagtggtggaaacatcattcgcaaccttacaggtgcagcaccttttgtttatagggtcagtggtaattccaaagactggacaattgaagccgaagattgcattaaatctggtgcgggtactggttatatgttccacattattggggcgggtaatactggtggtcgtattattagaaacagaatcaaatcaccaggtgttaaaggctttgattggtacatcgtttcagataatttagcccaatttgaatcttttaataactatattgattctgttggtacgggctatattactagcggtgccaatgtaacagctggtgatgatacatttaatggcagtaagaacttctttgcagcagctccaaccacgtttaagtctattactggacaggtagcaaatattgcgggtgttcttaaaacttataatggttcagcttggatataa

SEQ ID NO: 57699 - DNA, 453 bp, Acinetobacter baumannii
atgagcactacagaaaaaagaaagttaataaatagcttattttcattttcttgcagcgcatttgttataggctttttcttttactcttatgttagctttgagagctattatagatatgaaaatctaattaatatttacagtatgcttttgttttttataaacataattattgcttttttaactattaaatacagtcacatattatccgatgaggaagtggactatttggataattctaaaaccataggtttgcagaatggaaatatgttagggctgttatttttaagctttttcaatattttactttttaatccgattttctcttttgtagagttttttgataaaggtgaagaaagtttgaatctagcttatttagcaatgacatgttcactttttgttggcgcagttttattgtacacatctagacagcaaatcaagttgttaagcgaatag

SEQ ID NO: 57700 - DNA, 690 bp, Acinetobacter baumannii
atgaaaaaaagttttttaatggtgtgcgttttagcactacccctgcaagttttttctgcagaaactgctttgcagccatatccattaactttaaaaaaattaccacaacaggagtttggacaattagtttataaactaattcctaacaaaaacgagaagaagccttattgggattttcgttctaatgataaatccatagtctggcttgatagtttttatgttgaaaaaaaattagaggatggcacattttattcaagtagaaagggtgtggcacgtgtaaacgtccttggcacaaaaagtactatcgtagatcaccgtacttatgagcttccttggtcagtaatgatggaaggcaccgtgggtaaatttggaccgaatacaatttcgctgtacccggccacggtcgcacgtgagcatgaaaacatctgttttggtgaaaattttgataattgcgagttctcaccattcaaatctttaactaaagcaaatattaaatttaagaaagtgtgtgaaaagaatttcggcgctttgaattttgaggaagcataccttttaacagcgcctaataaaaaagctgtatatggggtttggcagtcaagtagtggctctggaggtacaagtaacttatttagaattgactattccgaaaaccaaaaacaagtttgtgatagtttgatgggcgggctgtaa

SEQ ID NO: 57701 - DNA, 2253 bp, Acinetobacter baumannii
atgcgtatacctcagtttacttcacaagtcgctgaaggcgatatgcccaatgtccaacttagcggcggggttacacctggtcaagctgtcgatatggttggcagtaaagtagatggttttgcaaatctagcaaatacagttgccaataaatataaagaataccaagacgaaaacgaccgtgtacgcgtgattgacgcgcaaaataaactttctgaattgcgcttgcacctcgaaaacaacgacacagacggctacatcaagaaaaaaggcgctgaagtagttagctttgatgatggtgaaggtggaagctttgttgattattactcacgagcttatcaagacggagctggcgagattgcaagcaagttaagtaatggccgacaacgtgctatgtttcagcaaattgctgcgcgtgattcacttcaattcaaaggcactttgcaaaattattttgtgcgtgaaaacgatgtttatcaacaaagtgtttattcatcttctgctgagcgctttattcgtgagataaacgaaaaccctgctgacttcaacaagattgatgaaagccgcgagaatctaaaagcatctttgagcaaactcatgtcgcttaacggtaaatcagcaactgaagctgaaaacatgtacttgaaatcgatatcaggtgcacaccttaacaacatcaatgcttttattgaaaatgatgatttgaaatcagctgtaacttataaaattaaatatggtacagagatttcacctgcagatgattatgcgcttaataagcgcattcatcagaagttagaagaacagcaagttgaaatgttggtgaacaatgtcacaaccggaacgcaagaatacagtaaccctgctctaaatgctcctccacaagcatcggctgcaattgccaaagaactgaaagccttaacacctgatcagatgaaaagtattaaatacaatgatcagcgcttggatgtttacactgtgcatgctgcaaaagaaaaaggtatggattgggccgcaccacttttacttgctattcgtttatctggtgaaaaatcaaataacaatgcggtatctccaaaaggtgcaaagtctgtaatgcaattcatgcctgaaacatggaaacagtacagcaataatggaaaaagagatattaacaatccggcggacacaattgatgccgctttagattttatttctgatatcagtaaaaaatataaaaccaaagacccgatggttattgctgcatattataacggtgggggcaatgctgctaaagcagtgatgaacgggcaacagccacccgcatcagaaacgcgaaactatattcaacgtgttgacaaatggcttactgacgatttcgggaactatataaaacagcccgcaaaatcacgcgaacaagcttatgatgagatttggaaaagcaatgcaccgcttgaagttaagcaaaaagcattaattgctacagatcgttactatggcgggcaagataaggccaaagaagaacgtcaaaacaaagaatacgacacattatacaaaagcatcgtgtctggaaaatatacgtttgaacaaatacccgcagggagcatcacatcattagagcctaaccaaatcgatagtttgcgttcagtgagtaagtcgatttactcgaaagatgttaaaacggatcctgttgttttaagcatgattacgcttaatcaagaagaacttttaaaagggaaaccaaaatcagttttacatcagtatgctgacaaattgtcgccttcagattaccaagaagttactaaaatgtacgctgaacaaaacggccttaaggatggtaaaaaagaaaaaccaaagactttcttgatcgatgacaacactgtatcaagtgcattaaaaccttatctcggcactattggtattactgatacaaaagataaaaagcagcttttacactataacgcagttaaaacggatttaatgcaaactctaagagaggccgaagctaaaaacggggggtatctaagttgggaacaggtaaaccgtgttgttttgaaaaatattaataaccaagtgcgtgtcactacttcacggcctttcttcgatgataaagttgaattaaatcgtgtttactctcaagttaagagcaaagctgatattactgactcaatgaaggcaaaaattgataatatatttaaaaagcagggtagaaatccaaataatgtaacggattcagaatacgtgaatgcttattatagttttatgagacggggttattaa

SEQ ID NO: 57702 - DNA, 687 bp, Acinetobacter baumannii
atgatgggtggaatgggcggcggcggcggaggtggcggcggtcaaatgggtgggggtaatctctatcaagccattgctacagctgcggtaaaaggtggtacaacctatttaaagttaaaggctcttaaacagtctttagaacaacaagctgaattggcaggtgctaacgctacacttgccgatatccaagcacgtgatgcaattgacgatggccgcaacactgtcacggattatcaacgcaatctttcaggctttaaatctagccagataaatgcgcttgctgataatggtattgatgttacgcaaggctctgcgattgacttactagcaagtacggaaatgcttgcgcaaggtgatatcgacactatcaaatacaatgcggctatgaaatcttggggtcatcgtgttcaagagacgaattatattaatcagaaaaattctcttgaagctcaagccaaatcggtacgtccgcgtttaaatgctgaacttgctgctatggaccaatttgcatcttcattgatgggtggcggttctggtagtccaatgcaaggcggtgattcacttactatgtcacaacctacaaacggctcgtataacactaatagtaatttctcaatgtcgctttatggcaatgagcaaggcgcatcgtggcagaactacaattggaattggatgggagcatcgtaa

SEQ ID NO: 57703 - DNA, 474 bp, Acinetobacter baumannii
atgagacgaaataatattgagattcgcaaaccgactgagcgcgacattcgtattctcgttgaaaatttacgccctgcggatcaagaagagttaaaagcatatttcagtgataactatgattggatcgttaaaacctgtgtgaagggttcgcgtgacgcatggtcagttgttgtaaatggtaagttgcttttcatttgtggtgttggtcttacaagcttaattggtaatgtcggttgcccttggttacttggtaccacgcacattaagaaatacccaattgagtttgtgaaacaaagccgcagtattttacgagagatgcttgcgaattatgacgctcttaaaaaccatgtttacaccaaaaatgatgcagcaatacggcttttaaaacatctcggtttttctattaaagaaccagttattcatggggctaatggtgaattatttcatccgtttagtattacggtggcatcatga

SEQ ID NO: 57704 - DNA, 2013 bp, Acinetobacter baumannii
atgcaattttcatttaatggtggcgttatatcaccagatatgtttggtcgtattgatcaagctaaatatcaaactggtgttgccaaatgcaaaaacttctatgttgaattgtttggcggcctgacatatcgagcgggtttccgttacgttcaccattatgaaaaaacattaggcaagatgcgccttattccttttatcttcagtgaagaacagacagttgttttagcaatccgtgccggtgcggtaaatttctttgctgatggtgggatattgcttgatgacaacgatgcacctttagaaattgttgtgccttatgctgaacagcatttaatgcaacttagatatgcacaatctgctgacgttattacgattactcacccggactacccaccacgaaaaatcattcgtaaaggtgcaacggaatgggtaacagaagttgttacagttgggtacggtttaaatgcaccgcaaaatttaacaggtaccgcaaataaacctaatgaaacaggttatatcgaacgagattatgtgtatcaggttacagctgtaaatgatgaaaatgaatcacaagcttctgctaaatctccaattctaaaaaatgatttaacattatctggtaacactaacgttctaacgtgggatgctgtaacaggtgctacgcgttacaacgtttttaaacttcgctcaggccttgctagttatatcggtgaaacaactgaattaagttttactgatgactatattgaaacgaatggagcgattacaccgcctttaattcgtaatccgtttgagttctacccaacagccgttgcatattttggacaacgtaaggtttatggtggtggctataaatcacctcaatggttgcgaatgtctcggactgctaccgatgataattttggttatcacatcccacttcaagatacagactcaattcaaatacgttttgctgcacgggatggtaacggtgtaaaacaccttgttcctatgagcgatttaatgattcttacaagcagtgcagtttggcggctttcttctgatggtgcagtaacagcagcaagtgtaagtgttaataaacaatcttcagaaggggcaaatgatgtaacgcctgttgagattggcggagctgcaatttttgcttcagatcaaacggggcacattcacgaaatctcacttgcccgttcgtacactgtttcttatcaaacattagatttatctattttgtgtccgcaactgtttgatgggcataagataattgattgcgcattgttgcgtaaccctatgaatattatatattttgttcgtgatgatggggtattattatcgttatcttatgaaccacaacaacaagtatgggcatgggcggagcatgatacagatggtaaattcttatctgttgcagcaattcccgaagaaaatcaaacagttttgtatgcactaattgagcgtaacggcttttataatattgaacgcatgcttacgcgacaacccatagacatgcaagataagtgttttttagatggtgggcatcaatataaaggggtgccagttacttcactatctggcttagattggcttgaaggtcaaacagtatcagtatttgctgacggtggtgtaaagccgcctgttaaagttgtgaacggaacaatccaattatcccgcgaattatctaatgtttggattgggcttccctatgttgctgaaatgcagactctaccaatacttaatcaacaaactaatccagtaaaacccaaagttttaaataaagcttttctacgtgttcttggtactcaaaatattcttgtaggtgctaaccaagatattttgcagcctacagcaataactgaacataaaccacgcagccgtgaaccttacggcagaccattagacttaattgacggtattgttgaagttcctgttgccagtacgttcgagcgagacgttcaaattacggtaaaacatgataaacctttacctatgaaattattggccttagaggttgaaattaaatga

SEQ ID NO: 57705 - DNA, 555 bp, Acinetobacter baumannii
atgagatcaatcgttgatctttgcaatttggccttgtcgcacctcgcgcaaggctatgttgtaaatgagattacagaaccaacaaaacccgcaaatctgtgtaatacgtattacccaatttgccgacgcgaattgcttgataacgaacaccaatggacctttgcggtaaagcgcgttcgcttaaatgtcgatgcgggttatgagttcggcaccgcctatgttttgccaagtgacaaagtgcgattgtttcagcttgagtctggtactcgtttctacgttgaaggcaacaatttatttacagatgaccctgcgccagttcttcgatatgtccatgatgtaaaagatttagccttaatgactgacagttttaaactcgcattgtcatatcttttggcagctcgtattgcaggtcctttgactcaaagtgaaccgttgcaaatgaagatgttggggctttacgggcaaactttaggtcaagcaatttttattgatcttcaacagcatcgacttgaaaaacgtcctgagcatgtaggctcaatgactgaggtacgataa

SEQ ID NO: 57706 - DNA, 366 bp, Acinetobacter baumannii
atgtctgaagaacaaattgaacagcaaattcaagagaaaggtttaacagcgccacgcattacaccttcacacattgattcaaaagttaagcaagtttattaccattcaccattagctgctgttgatcctgaacaggcaatggatgaaaagacgtatcaaacattacgctgtttaactttctgcacaatcgttttggaaaacggctttacggttacaggtgaaagcgcatgcgcaagccctgaaaactttgacccattcatcggcaaagaaattgcctataaaaatgctcgcgaaaaaatttggcagcttgaagggtacttattgaaagaaaaactttatcaagctgatttagacaaacagttctaa

SEQ ID NO: 57707 - DNA, 258 bp, Acinetobacter baumannii
atggaatataagcaagttctagcgaatcaaaaaggattctataacgatcgcttaattcaagaaggcgaagttttttctgtacctgaagaagaaacagcactctggtttgatgatgttgagccaaaacaacctgaatctaaaaaccctttttcatcaatgaataaggaagcgctaactcaagccgctttagataagggtattcaattggatggctcagagacaaaagcacaaatcattgagcttctattagctgaataa

SEQ ID NO: 57708 - DNA, 405 bp, Acinetobacter baumannii
atgtttattgataaattattagtgatgtcggctgatcaggctattactgtcacagcggcatctacagacacacttgatttgcagaaggcatcaacaagtgtaaatcgattacctgttttggtacgtggtaaaaacttagcaccaactacggcaaccattactgttcagcttcaacaatcaagtgacaacagtacttgggaaaccattgatacttctcgtgcttatacaggtgctgagcttaattcgggtgttattggtgaagtggtattacccgtaaaacctaagcgatacgtgcgtttaaactattcggttggtagtggcccattcacagcaggaactgtgttttcacacatttctgatagtcgtgatgttagcgctgcttatccagtttatgcgggggcttaa

SEQ ID NO: 57709 - DNA, 996 bp, Acinetobacter baumannii
atgtctgtaatcgcacaattacaaccgaccttgatggatttatctgcacgttacggacaaacacccgaaagcgcagttattgaaatccttagtgcaagcaatgaattgcttgacgacatggtttgggttgaagcaaatgacggtactggtcataaaacaacaattcgcacaggtttacctaagggtgcttggcgtttactaaactacggtgtgcctagtgaaaaagctgctaccgcggcaattcgtgatacttgtggacttttagagacatattcagaagttgataaaaaactttatgaaatggaacaaaaccctcaagagtggcgcgcaagtgaagatgcggcatttgtagaaggcctaagtcagactatgggggaaaccatcttatatggtaactctcgtgatactccagctgcctttacaggttttgcgccacgctttaatgacattgctcaaaccaatcctgcaaataaacggaatattcttgatgcaggtggtacaggtaataacaacacttcaatttgggttgttgtttggcataaagatacggttcacgggatttatccacgtggtacaaaagcgggtcttcaaattcgtaacttgggtgaagcaactgataaagatgcgaacggcttaatgcatcaagtacttcgtacacactttgaatggaatgcgggtattactgtgcgtgattggcgtgcattggtgcgaattgcaaatatcgatgtggctgctcttacaaaagatgcaagcgcaggtgccgacttgtttgatctattagctcaagctgttgagcttttaccacgtaaaacaagtggtcgtgtagcgatttatgctaaccgcacaatttcttcattcttacgtcgtcaaagcgttaagggatcgaatgtccgtattacaactgatgaacagggtggacgctcagttacaaagtttgatggtattccgattcgtcgtgttgatgcattgcttaacactgaatctcgcgtggtttaa

SEQ ID NO: 57710 - DNA, 666 bp, Acinetobacter baumannii
atgagcgaagtaacgactacgacagcaactgataccgcaactacaaccacaactgcggcacctgcggatacagcaaccacagcgatagatacagcaactacgcctgtaactactgaaacaacagcggttgaaactacgcctagcaatactgctactgacacaactgagcaaacgcaagaagttttgttaggtggtgaacagccacctgctgagcaaccagttcaatacactgattttcaaatgccagaaggttttactttaaatcctgaagatcaaacagtacttcatgaacttggtcaacaattcaaaatgccgcaagaagctgtgcaaaagcttgttgatttgggtgttcaaatgcagcaacgacaagtgcaagagcaattaaaaaccgttgcttcatgggtcgatgcagccaaagccgacaaagagtatggcggggaaaatctgcaaaagaacctgttgacagcgcagcgtgccttcagcttaccgcgtggcgacaaaatctctaatattcttcataagagcggacttggtaatcaccctgatgttattggctttatgaccgaagtgggtaagttgttagaacctgacactatgactacaggtaaaggaaccaatacagcaggtaccagtcttggcaagctttggtatggcgatgataaataa

SEQ ID NO: 57711 - DNA, 330 bp, Acinetobacter baumannii
atgagtgaattagacaagaaagcggacgaaaacaagcgtaagcgtgaccaggaactaaatgacctgcgcactatccttgcaactgaacaaggcaaacggtttttaatgcgcctactcaatagagcaaatctattacagccgacttatggggtaggtgcaaacacaagcgatttcgcattttttgaaggtcgtagagagtttggtctctacattctcggtgaaattacacaagcaaatactgatgcatggttagacatgcaaaaacaacattttaacgaacttaaagagaaggtgagccatgagcgaagtaacgactacgacagcaactga

SEQ ID NO: 57712 - DNA, 1689 bp, Acinetobacter baumannii
atgcaacaagacgatatcagagcgctgaaaaaacggtttgatgctgtgtggcaaaaccgtgtcacagatcaggacgaatattgtgctgaattggcattgcacgttttgcctgttgctatcaaaacgattaagaaccaagaaaagcacgaccgatcagcttggtcaaagatcgttgataacactggtaaagactcgttaaaaaccttagcagcgggcatggtatcaggtacatgttcgccaagtcgaaaatggttcacacttcaagcttcagatgaagttttgcaaaaagatattgaagtaaaacaatggcttaaagcggtagaggatgcgtgttatgtggcattttctaaaagtaatgtataccgcgctgtgcatcatatctacatgcaagagggtgcatttggtatcggtgcagcattagcacctgaacatggcgataaatccaaagtggcattgatggatttaatccctatgacatttggtgaatttgccatcaccacagatgagtttaataaacccaatggtgtatatcgcaagttcaaattgaccacgataaatatggtcaaacagtttggcttaaataacgtttctgactcagttaaaagcgcgtatgacaacaacaacttcgaacaagagtttgaagttcaacatgcgatttatgagcgtgaaaatgcaaaaggtcatggccctaaaaatatgccgtttgcatcgatttactttgaaccaaacgcaaatgacaaattactacgtgaaagcggaatgatgagctttcaggttatttgtgggcgttggacagtttctagtagtgatgtttatggggaaggtcctgcaagtgattgcattggtgatttacgcgctttgcagaaagggcatcaacaaattgctgtaggggttgattaccaagttcggccacctttgcttttgcctgattacctgaagggccaagagcgtgagacattgccaaatggtattgctttctaccaacagtcaccaacgaatcaagttgcacaagtccaagcaatgttgaatgtgcaattcgacttgaatggggttatggcattaatcgcacaatgccaagagcgtgtaaaacgctcatttcacactgacctgttcatgatgcttgatgcttttgataaaggcaaaatgactgcaacagaagtgtatgaacgtaaatcagaaaagatgcttatgcttgggccggttgttgaacgccagattgatgagctactgcgaccacttgtagaaatctgtgttcatcgcgttctatcaagcaatgcttatcttcgtcagattgcacctgctgctattcaaaatgccaatgtcgaaatcaatttcgtatcaattcttgcccttgctcaaaagtcttcaggttcagctgtgcttgaacgtgctttagcaatggtcggtcagattgcgcaagttgatcagcaagtgctagacaaattcgatacagataaattcctagatgaatacatggatattaacggcgtatcaccaaatgtatttagacctcaacgcatcgttgatcaaatccgtggacaacgtgcgcagcaacagcaaatagcacaagagcaagcgcttgcagcacaacaggcacaaacgcaaaacgcgaatgcaaacacgcttaaaacggtaggcgataccaatgcggaaactgtatctgatttatttatgggtggtagcgcatga

SEQ ID NO: 57713 - DNA, 282 bp, Acinetobacter baumannii
atgtgcagtagcgattttttatttggcggtaatgacgtactagacagaacggctaagttgtttggtatggatgccaaaaaggcagagatacaagcaccgcctaaacagccagtacgtcaggatgctaaatcaccagacgcatcggcaacgattgaccgtgttcagaatgcacaaaattcaatgtcaggtggtattgcaaataccttgtacaccgatgcaacaggtgttgatgatgagaatttgcgcttaggtaaaaaaactcttttaggtagtggcggttaa

SEQ ID NO: 57714 - DNA, 1623 bp, Acinetobacter baumannii
atgaccaaaaccactgatgacgaaatccttgcattgcttgccgaaatggatgaatcagagattgagcagtatttattgacgctcgatgaagatgaacaagcagaaatagcaaaactacttgccgatgcgcctatttggtttccgttggaaggcccgcaaatggctgcgtatttatcccaagccgatgttattggctacggtggtgcggcaggtggtggcaagacggatttaattgtcggttcgtctctcaatattcataagcgcgtattggttgtacggcgtgaaaaagcacaaaccgaggggataattcaacgtgctgaagaaatcttgggccataagaacggctacaactctcaaaaatcattctggaatttaggtaaagggaaattaattgagtttggtggcttggataatcctggtgatgaaaaacgttggcaaggccgtgctcatgatttgaaggcacttgatgaagctactgaaattcgtgaatggcaagcacgtttcgttatggggtggaaccgttcatctgacccaacaatcaaatccaaatgccttttgacatttaacccgccaactacagcagaaggccgatgggtaattgatttctttgcaccttggattaagaaaggatacccgaaccccgcacagccgggcgaactacgttggtttgcaagggtaaacggtaaagaacaggaagttgaaagcaataaacaatttgtacttattgataatcaaatcgtttatgactttgacccaaaagattacaagcctgaagacatcatcacaccgaagtcacgcacgttcattcctgcacgtgtaacagataacaagtattacatggagacaggctacatgagcacattacaagcattacctgagcctttacggtcacaaatgttatacggtgatttcggtgcaggtattgaagatgacccttggcaagttattccgaccgcatgggtagaagctgcacaagcacgatggaagccagaagatgaaatgcgccttatgtacaagggtgtgtttgcaatggattcatacggcttagacgttgcacgcggtggtaaggacagcactattggttatgcacgtcatggcttgtggtacaaccgtgcaaatgtacttgaaggcatccagtctaaagatggacctgcaagcgcatcgtttgccgtgtcacatgtgcgtgatggtgcgccaattcatgttgatgtcatcggtgttggtgcaagtacatacgatttcttaaaacaatcaggcatgcatgttattcccgttgatgtgcgaaacgctgcaaattctttcgaccgatctggtcgcttaaccttcttcaaccttcgatcacagctttggtggcaattccgtgaatcattggaccccgcatacggaagcacagttgccttgccgcctgaacctgagcttttagcagacttaactgctccacgatgggggttgcaaggcgcaaacatcaaagtcgaatcacgtgaagatatcgttaagcgtattggccgcagtcctgactatggctctgcaattatcaatgcgcaaattgacacacctaaacgtcaagtcatgcaagccatccatggttcaagtgcaagacgtgattacgacccttacgcgtag

SEQ ID NO: 57715 - DNA, 261 bp, Acinetobacter baumannii
atgaataccattctaagtatcacaatcacgattatttttgccagcatcatgaccttggttgctgtgaaaatcaaagctattcataagtctaaggctcttacctttcttacatggaatctatttatcaatatcccattggagtacttcaaactctttgatagccacacgcgtgatctaggcgatatctggttcatttttgctatgggttatttctttatctacgaatacggagaaataattatctatgaccaaaaccactga

SEQ ID NO: 57716 - DNA, 318 bp, Acinetobacter baumannii
atgagtcttacttctgaagagctagataaacaggttgctgaatttcttgcaaaaggcggaactattcagccaatcacagagaataaataccctaaacgcaaacggacgctttgttcatttcagcaaggcgaatacgaccaagttattgctttcataaagttaagccctgcgcctgtaatgtttacggacattgttttgtacttggattatccaaaatctaaagtccgcgcaatattggcgtgtgcagaaggcaagggcaaattgaaatatgaaatatgcccgcatcaaaaggtcaagttgtggagtgcggctagatga

SEQ ID NO: 57717 - DNA, 327 bp, Acinetobacter baumannii
atggttgtaattgaagatagcaatatagtgaattgggataattaccctgaatacatttgtgctgttgtgggtgtcacattaaaagacctacacaattcaagaacccttgaattaatgcctgctggtagtaaattcatttggcttcttgataaatcaccatcaattactaatggagtggtgaatataacgaacacagacatcaatggacttggaactatttatagcgaagagaaaggtgcttgcaaaattttagaaattcattttaagcctcgccctaaaccagacttaaccaagagttccaaaagtttggagggtgtgacgttatga

SEQ ID NO: 57718 - DNA, 534 bp, Acinetobacter baumannii
atgatgcgtgaacaatttgaaaaaactttatccgaaaatagcagtctgcattctggtcatattttttggcatgaagagagccaacagtaccacgctagggatgacgattatgttgaagaagctaatggcatgaactggtctttagcaacattcacaaaatgccgtattgattacgaacaccttcttggtaaataccgtgcaacaaagcagcttcaatacagcacatctgaacataacgcacgcctgcatagaactttgctattcgtcaaagatcaattttggttgagcgatttaggcagagtccttccacgcgtctatgaagaaatcacagagtgcttagaggatcagccgcgcaaggtgcacaacacttcatgcacatatcaatttgaacttgcatttcacaacctgcaagacacgcctgagctacgcaagatttattggtctgcattaggccaattgcagtttgattctaacgatcaggttatcccaccagtgcttgaagagtgcccatgttgcacacagaaagaggattga

SEQ ID NO: 57719 - DNA, 741 bp, Acinetobacter baumannii
atggctctacgtggaaaacaacaacgctttgttgatgaatatctgattgatcgtaatgcaacacaagcagctatacgcgcaggttattcagctaaaacagcagggtctattggggatgagaaccttaaaaaacctgaaattaagaaagcaattgaagcgggtgaagctgaacttgcagagcgaaacaagatcactcaagacaaggttttaaatcttctttgggatatggcaactgctgaccctaacgagctaatcaagtatgtgcgtgttaattgccgttactgttggggtgaagatcactattaccaatggaccaagggcgaatatcaccacgcttgttataacgcgagagcaaaccagaagcctaagcccgactgtgatggtggttttggatttgataagaccaaagtgcctaatcctgattgccctgaatgccgtggtgaaggtgttggctatacgcatgtttcagacacaacaagagtgagttcaaaagccaaactgctttatgcgggcattaaagaaaatcaatacggcgttgaaatcaagatgaatgatcaatttgctgctgcggttaaagcgggtcagcacattggcatgttcaaagaacgtgtagaacacagtaacgaccctgaaaacccactaacagacaccaaagcatcaagcagaaaacttgctgcgcttgccaaactgaaaaaagcaaaagctaaggccgataaagcaaaggggaatgatgatgcgtga

SEQ ID NO: 57720 - DNA, 429 bp, Acinetobacter baumannii
atgtctaaaatcattattggtattgatcctgatttagataaatcgggtgttgctgtacttgggaaatcacaatttgaattaaaaaatcttaattttgctgaagtgattgaattattccgggcagaacaggacctaatcaaaaaagttgtgatcgaagcaggttggctaaacaaaaaagctaatttcagaaatggcgctaataaatcccttgctgtgaatgagcagatttcaaaacgtgtgggtgaaaaccatgcaacaggtaaattgctcgttcaaatggctcaacacatgggtttggcagttatcgaagtaaaacccactaaaaccaaagtcaactctgatgagttcaatagaattacaggttggcaaggtcgaacaaatcaagaacaacgcgatgcgggaatgttgatttggggaatgtgggtatag

SEQ ID NO: 57721 - DNA, 753 bp, Acinetobacter baumannii
atgaatgcgatggtgaatattttaaacggcttcaaaatggctgaaggattctgtgaaatccaccaggtgcaaaaagtacaagcgggaccgcatcaaatctgcccacactgtgcaattgaccatgttcacgattcaaagcaaggcgaccaatcacgtgtagatcagatggttcgtgataagcattttggcggtgcaatgctacctgaacgccatgctcaatcttcattttcaaattatcaaacacgtacacaagcacaagcaaatacgcttaccaaatgcatcgaatatgcccaagcattacttgcaggtaataaatccaatttcatcatggttggttcaactggcacgggtaaaacccatcttggctgtgctactgcatcaacacttctaaaaaaaggcctgtacgttcgatacatcacaagtgaagagcttgcgcagcgtgtcatgaatgcatgggataaggacacaaaagatcaatcagaagcatcggtaatctttgagttcactcaatacgatttattaattcttgatgaatacggtttgcatgaccgtgacaagcgtttagagcttgttcataagattttgacagcacgttatgaccgtaaaaaaccaacgatgctcatttccaatttttcaatgaacaaactcaaaacagatttaggcgaccgcctatggtcacgctttcagcatgacggtttacacactgttgagtgcaattggtctgatgctcgcgtaggtggtacccatgtctaa

SEQ ID NO: 57722 - DNA, 987 bp, Acinetobacter baumannii
atgaacaatccacgaattgcattaacaccactcgaatgtgatgtttcaaattttccatttatgccactcgatattgatcgacttttgaattctgaaacatggattcttggagacgattcagaaaaagttgcaagcttcactctgtggctgaaaagttggtcgcaaatccctgcggcaagcattccaaacaacgacaagatgcttgcacacttatctggcatgggtagtaagtggaaaaaagtaaaagaacatgctttacgcggatgggttgatggtggtgatggtcgtctatatcaccacgttgtagcagaaaaagcactagaagcttggattgaaaagcttgcaaacgctatatctggcgcgcaaggcaatgcaaaacgatggagtattcaaattgatacttctgaattagaaagtcagctacgcgatgcagtttaccgcctaaaaactatcgcacctcaatccaaagcgttgacaaagaagattgccaaaattgtcgagtcggcatcgcctaccgtatcggggggcgataacaacccgaatcgtcaggggatcgcaatagacagtaaagagaatagacagggaatagataatattaatacacactcaaatggcacaagcgaaaacctgctcgatgctgacttgagtttatggaaaccttcacttcatgaaattaattcttggagacaaagagcagggttaccgaaaacaactcaggatgagtttgatacgttcatgattaccttcctaccgcattacgcacctgaaatccgttcaggtcgtctcattgaaaacaagatttacgcgaaatatatccagtgggtgaaagacgatgctttgaaagcaagccgtctggctaaaagcaaacccgctgttaaaaccaattcggctaatgattctcgaaacgtcaatgacgcttggaaagacgagcctaaatcagatgatcgcccgttcacaggaaccgtgaacataccggaggatttttaa

SEQ ID NO: 57723 - DNA, 369 bp, Acinetobacter baumannii
atgacagcgatgatcacccttgaaccaagccgttacatgaaacgtaaaggctttggcaatgaaaactgcaaagcaataaaacaatcagttccttttgttgaagcacgtcgtggtgaatacacacatcgagttcgccacgtaacgcttattactttccgaaataaatcacattttgccgtgcattgttggtgcggcatgaccatgtgtgtcggtggtacagggaaaggaacagggattttacttgatacaccaagcgctaatcgtcctatgtgcgctacctgcgaaggtagggtaatcggtgcgggcttgcttggttcacgtgaaatatctggccgacaagttatgtatcgagcaagtgaggtggtatga

SEQ ID NO: 57724 - DNA, 675 bp, Acinetobacter baumannii
atgaaagaacgccctattatttttaataccaatatggttaaggctattttagaaggtcgtaagactcaaacccgccgtttggtaaaagaaaaactgatttctgaacaggcagaattcgagtctggaaatagacctaatgtcatccgaagcgaaccaagcctgcaatattacattgataacgggtgtccatttggtcaaattggcgatcgtctttgggttcgagaaacgttttgtattggtacgattgaagaagaggaccactatcaaggctctccaaagcctctatacgttcatcaagatggggatcctaagcaatatccaatttataaagagtattgcttaagagacaacatctcaattgatgacgtgttatggaagccttccattcacatgcctcgatcagcatcaagaattttgcttgaaattactaaaattcgtatcgaaagactaaatcaaatatcaagccaagatgcattgcaagaggggcttcttaaattaccagcttcaggtcggtacgttgtaaaccgaggtgatcaatatttcggagctgcaagcaataatccgtgcgaagtatttaagtggttatgggaaagcatttacggatccagctcatgggaattaaacccctgggtatgggttgttgagtttaatgtaatccagggcggtgaatcatga

SEQ ID NO: 57725 - DNA, 579 bp, Acinetobacter baumannii
atgatcgaaaaaataactattaaaaatcttggtaagcatcaggatgcgtgggcaactatctatattgagcctaacaatacctacagtgaatgtggtggtcgcattactgtcatactagaggattatataggtactgcatttttcagccactgtggaactaaaacgtttcaagagttcattgctaaaactaattctggctatttgatgaataaattattcaatcggaataatcaaattcctgactccattttcattgaagatggtgacgcaatccttgaacttattgacaatgaaaagaaagaagaaataaagctcgcatgtgaatatggtgatgaatctttatcaaaagaagctttagaaagccttcgtgatgcactctccggtgaacaatttgatacagcaggtgagttatatcgtcacttagattctgatgagcaagaaacaatggatagcttattcggtgaggagtggggatttgatagttcgctaaaaaaagcaaatccaaaatatatttatgtcaaatcaatagtggattcaatcattaccgagtttaagaaattaagcgaggtgcagtcatga

SEQ ID NO: 57726 - DNA, 222 bp, Acinetobacter baumannii
atgactaatttaacagaacataagtgcaaaaacaaatgtcctgagtttaaaggagagcagtgtaatcactgtttagttcaacctgtggaaatgcgaaaaattgaagatatgggcgatgaccgtcacattgaaaatcatgtttcaaaaaactgtcaggttttttcttgcgatgaatctgtgcatctcagtcgtgattttgtagctatgggagaggtgtcatga

SEQ ID NO: 57727 - DNA, 333 bp, Acinetobacter baumannii
atgcacatccaagaactttcgaatgatcccaatagcaacaaattgttagttggaaagttgctcgaaaatatgagtacgcgagtaccaattgaagtaaagcagctaatagatgacttagctaattcaaacggaagtgatcgggctaaatggatgagagaagccatagatttaaagctcaaagttgatttaggaatagcttcaaccgaagagcttgtagaaacaaggaatacaacgaaatcaagcgaatacagaaatgtattcagaaatttaagagcttttctaaacgcattaaaaaagcccgacgttgcgggtcgagcttttcgcgttcattaa

SEQ ID NO: 57728 - DNA, 306 bp, Acinetobacter baumannii
atggtcgatgttggcaaaactcagctaaagcaatttcttaaaccgcttaccaaagcggaaagacttgcatttgcagagaagtgcggaacaacgctcggaaatttaaaccaaatcatttacagcaaaaccacatgtggcgcggctttagcaattgcaattgaccgtgaaagtaaaggttcagtgcgttgtgatgatctctgcccaagtgctgattatgagtacgttcgtaaacaaaatgaggagttaaaggaaaagaaatgcacatccaagaactttcgaatgatcccaatagcaacaaattgttag

SEQ ID NO: 57729 - DNA, 819 bp, Acinetobacter baumannii
atgaaaactgaatatttaagacgcattaacttgcgcaaagcgattgacacaattcgccatagagataagttgcgatctgatgccgctttttgtgatcattttggtttaacgcctagccacatttcccagatgattagaggaaaaggaagctttggcgaaaaagtcgctcgcgatttggaaaagcaaattggtttggcagaaaattatcttgatcaaaatcataactttccgcttgatgatgactttctaaaaaaagtttttggaattgaatatttagactttaaatcacaggaagcttctgagcagaatgataataatcactcaatggaacttatgatctatgaggatggtgatccggtaccagatggatataccgctattgattattatgatgatgtttatgtaagcgcggggagtggatacttgaatttaatgcaaccaagcgcgaaaaaattctttgtacctacatatttaatgcgtgagtgtaacgttcagccttcaacagctaaagttgttaaagtacgtggggatagtatgttccctgtcctgcaggacggtcagcccatttcagtagatatgtcagcgaagagaattattgatggtgaaatctatgctttccaagtaggagatgaaaccaaaattaaatacctatcagtctataacgaagaaggaaaaggcggattcaaagctatttcagcaaatcctgataaaaaccgttatccagatgaatactattcacctgccaggatagccgctgaagaaattgaagtaattgggcaatattggatgaagctcgataccaaaaaaataaaacgctaa

SEQ ID NO: 57730 - DNA, 375 bp, Acinetobacter baumannii
atgccagctaagaacacttcattcagtcaaaccctagcaaatcttcaacgtggcgacacgattgaacaactcgatgagcttttgactgaagcacttcaagcttcaaacgacacaggcaaagtttcaaaagtaacggttactttgacaattaagcctaatggccgtggtacctacaaaattcaggacgatattaagtcaactcttcctaaattcgataaagaaccaactgttctatttacagatggcgaccaacagcttgtgcgtgaagacccacgccaacagaaactaaatcttgagcatattgacgcgggtacacctgctgaactcaagcaaattccaactgataacaaaccaacaattaagcctttaagttaa

SEQ ID NO: 57731 - DNA, 879 bp, Acinetobacter baumannii
atgagcgaacttaacaatattgcagaaactaattacaagcttggtcaagaaagcttgaaaactgccaccaaatcaacagacgttttaccttttgttgtagtgccaaatggtagtgaagtacacccatttaaagagttattagctcgtcctattaacttagagcaaagtgtttctttaaatacagcaaaagactttatcgcctatgtaacgcgttatgctgataaaaattctttagtctttgttgatgtgttggaaggcaaatttaaagctgtactcgattatcacgaagtggagaaagaaactaatactggcgctgttctttcaccacgtcacggtaaacatattgctcgttttgtcgcagaaaaaacacctgaatttaaaaaaattgaagataagtcaggtgaaaagttcagccaaacaaactttgctttattcctagaagatgtaatgccttacatcaatcaaccagacgcagcagttttgtatgaaatcgtacaaacattgaatgcaaaaacgaatgttgattttaaatctggcatccgcacagataacggccaagttcaattgacttacaacgaaacaattgaagcacgtgccggcactgcgggcaatctcactatccctgaacaaatcgttttcggtatccaagtacatcgtggtggcaatcactatgccctgcctgcccgtttccgttatcgcattaaagaaggtgtgattacgttctggtacgacttagaccaacttgaaaaagctatcgaaaaatcaatggaagacaccgttgaatatgttcgcaacggtaaaactgttgggaatgatgaagttcaaggccaattaaacggcattccttcttatgtgcagattctggaaggttcagtttaa

SEQ ID NO: 57732 - DNA, 573 bp, Acinetobacter baumannii
atggttagtcaaatttcaaataatcatcgtaatctgattaaaggattaattcgaaaacaaaaagtaaagcgcataaaaaaagctttgcgaaataaactcgaccaattaattgcggtaattaaagacgcatataaaaacagccctgctttaggttttggaacatgttttattggtgggattgttgttttggtgttgacgatgagttttgccctagcgtctgctcacatggcttataaaaatttaggcccacagcaaataagtattttttcacctatttacacagtagatgacttggatttaggaccttacaacgactgccacgttgattgtcatgcatcaattcttaccagtgatatgcgctttcgcattgaagttggttttgacttctcaggatatgacaacagcaatggttttaaccgtgctacaggtattcaaattgagcgtttagagccaatcaatgtcgttgatgaagaaggtgttgtaaatgcctatatcgaccgctttgagcttgtaaagatcaatgaagcacttgaagaatcaattgaaactaaattagcaaagttgggtggctga

SEQ ID NO: 57733 - DNA, 303 bp, Acinetobacter baumannii
atgaaaattcattctcaacctatggacctaagagactatttcgccacagctgcgatgcaaggtgagttgtcagctcaaggtgaagatttttcttgggcaaatgaaaaaacgcttgctgttcgtgcatatgaaatagctgacgcaatgattgcagaacgcgaaagcggatcatgtgaaagcgtagattcaaccaaacaaaaacttgttgaagcaattaatcgtaaacactctggtttaactgtaagtgtaaacgagtcagttgaacaacttattttccatctagaaacaggcctgccattttag

SEQ ID NO: 57734 - DNA, 981 bp, Acinetobacter baumannii
atgaatacacatgttgatcgtgaaacattcctagcaaaccgtaagaaaggtattggcggttctgatgtggcagccatactaggttttagcccttataaatcaccatatcagttatggcttgataaaacaggtcgtagtgaaaagtcagatcaaaatgaatctgctcactttggtaacttgcttgaagatgtagttgctaaagagttttcacgccgatcaggtatgaaagtacagcgcgtaaaacagcagttatttttggaagatcacccttgggcgcttggaaatattgaccgtgctgtgatcaatcctgaaatttcagggaacgtacgctttaaagatggtgctttgacaactgatcaattactcgaatgtaaaacagctagtgagtacatgagcaaattgttcggtgaacaagacactgaccagataccagactattacctaactcaatgtctttggtacctgatgattacaggctgtcaagttattcatttagctgtgttgattggcggcaataagttccgtatgtaccgcatcgaacgcgatgaagatttaattaaatctattttcaaccaagtaaaagcattttggtttaaccatgtgcttgcagatgtaccgcccgacccgacttgctttgatgatgttttacatcgttggtctaaacacgtggtgggtaaacaggttgaagccaattttaaacaaatcaagcttgcagaagaactcattacagttcagcaaaccaaaaaagatgctgaagcacgtgaagaagcaatcaaacttgaattggccactgatatgcaagatgcggaaatgatgattagccaaggcaaatcaatctgctcttacaaagaacaatcttcaacacgcattgatagcaagctgttgaagaaagaacaacccgaattattcgagaaatacagcaataccagtagtacgcgtgtatttcgtatttcaaccaaatttaaagaatctctaatttaa

SEQ ID NO: 57735 - DNA, 933 bp, Acinetobacter baumannii
atgaatgcattagttcaaaacactggctttttaactccgacaactttagctgaagcaatgcaggttgcggatttattagcaaactctgaaattgtcccaaaggactatcagaaaaaaccaggcaacattttagttgcaatgcaatggggtgctgaaattggattacagccacttcaagcaatgcaaaacattgctgtgattaatggtcgcccttctctatggggtgacgctgtacttgctcttgtgcgcagttcaggattacttgaacagtttgaagaaactcaaacagaagatatggcaacttgtaccgttaagcgtaaaggtcaaaaggcggtaacgaaaacattttctaaagaagatgctaaacgagcaggtttattaagcaagcaaggtccttggtcacaataccctaaacgtatgatgcaaatgcgtgcacgtggttgggcattacgtgatgagttcaccgatattctaaaaggctttggcgtagctgaagaagaacgcgacaaagaaattgatgtaacacctgaaccatcaaatcttccaaagcatcaaggtaccacaggcttaaaagcgcagttagcggaacgtgaagaaaagcaagctaaggtgattgatttagctgtgtcattcaatgttgaaaaatgcattcaagatattgggcaggttgaaaacctagctgatttaaaaacacttggctcaaccattccttctgatcttggtgaaccggcacagactgacattaaaaacgcatacgcaaatcagaaattttaccttcaacttgtagatgatttggaaattgcaaactcaattgaagcaatcaattcaattatggaaaagcaatttgaaccaaacacatcgttcttaactgatgcacagattgattctgtcagcgcattgtttgaaagaaaaacggctgaattaaccgcataa

SEQ ID NO: 57736 - DNA, 1482 bp, Acinetobacter baumannii
atgaaaccaactattgaacaaaaacaagccattgatatggcaattaatggagagtcttgcaaggttacggcttatgcaggcgcagggaaaacatcaactctaaaattaattggtaatgctaaaagctatcaatctggtatgtacttggcattcaacaaagcaattgctactgaagcagaaagtaaatttaaccggaacgttcgctgcaaaactttccatagtcttgcatttaattcggtaccgcgttggtttacgaataagcttaaaaatcgtcgcttaatgtcgaatcaaattgcttcacgtcatgaccttgaatcgtatcaagtacccgtggctttagctaaacagcgtggtgaagatgataaaaagcggttgttcaataataagcgcatggctacttctttaattaatgccattggttatttttgccgatctaattattcagaaatccagttagcacaagtttatgcagctctacccgattggatggaagaaacacatcgagctgaacttgcaaaaatcctattacctaaggctaatgactattggcaagacattcttgacccgttcggtgtaaaccgtttagagcatgaccactatttaaagtattgggcactcagtaaaccagtcatcaacacagattttattttgtttgatgaagcacaagatgctgacccgatcatgcttaacgttctaaataatcaaggcgctcaggtcatttatgttggtgacagacaccaacaaatctatgcatttcgtggtgctgtaaatgcaatgcaatcgcttgaaatacctgaaacacgactaagccagtcattccgttttggtcaagatattgcggacctagcaaacacaattttattcaatgtgcttgatgaagaaattcctttgcgtggctttgaacaaattgaatcacaggtatgtgaagttcatgacagcgtagccgatgcaattattttccgtactaatgccgctgcgctttcacacatggttgagcttattcaattaggccgtgaaccacgtcttgaagttgatacaggttctttaattaaaaatattgaagatgccaaaaaagttaaagcaggtgtacgtgttgcagatggaagtgcatttgaaggcttcagcacttgggaagaagtacttgaatacagtcatgaagtttcaaacagcgacattaaaccactagtgagcctgattgaaaaagtaggtgaaaacgcactcattgaagctttattgaaaagcagctcaaacgactatgactgtgttgtgacaacggctcataaatcaaagggccttgaatttaacaaggtcaaattaggcggtgactatttctataaagaagcagtttcagaaggtgaaaagccattaacaccagatgaagcacgtttgttatacgtggccgcaacccgtgcaaaaaaacaactggatattaccgccctcaaccctcttttcaaaaatattaaatcgggagttgcagcatga

SEQ ID NO: 57737 - DNA, 237 bp, Acinetobacter baumannii
atgattacatcaaccgtagttgtttcattagatcaaattagagctgtgcttgagtcaaacactaccaatgcacatgcagaagtgatggcccttttagaaaagccattattagcggaaacgttgattaaaacacgcggcaaccaaactaaagcagccgaattgcttggcttgaaccgtggaaccctgcgccaacgcttaaaagctcacaacattttaaaaacgaaggtggcggcatga

SEQ ID NO: 57738 - DNA, 354 bp, Acinetobacter baumannii
atgaaagacgaagaaattgaaagaagtaattttgagctatatgaattaagcaaaagaccttgcgctaaacgcgaaagcatttttgaaagattcgattcaaatggacttggcgagtgtgaacaacactatgttgggaaatatgttgatagttacatgcaagaaaaatgggagttatgggcaaaagccaaatcagaaacggtaccaaatgaaatcatcaatgaaattcaatcttggatagcagttaaatcaaatcaagcaatggaattagatggagaagaatttgttgttggggctaatgaattggctgaatttatcgaccaattagttaaaagcgaatcgggagctgaggggtga

SEQ ID NO: 57739 - DNA, 204 bp, Acinetobacter baumannii
atgaaaccattttatttagtttggagtgaaggtcgcggcaatcctacttacaagcatgaaagctatgcgaatgctgaacgtgaagcacaccgattggcaaaacttaatcctggtgaagaatttcatgttttggtatcaagctgcactcttcacattccagaccctgttattaaaacagagcatttggaagacatgcctttttaa

SEQ ID NO: 57740 - DNA, 273 bp, Acinetobacter baumannii
atgcgatatttaagaattgttattactgaagataataccgttcgtgatgttttacagtctcttcaagatatgggttataaatttaaaacacctgatgaagaaggttacacaggaactattacgactgaagatattaaaacggtgttagttgatggtgatgaagttaaactttttgatgaagaagtaaaccctgaccctgaaaaatttactgatatgtctcttattgagctgattaaattaaaggtgaaagtatgggcaaatatatctttgtag

SEQ ID NO: 57741 - DNA, 297 bp, Acinetobacter baumannii
atgggcaaatatatctttgtagttgaatcagagaatccgccacaagtttatttagatgatgtgattccaaatattggtaaagttattgagcttaaagccgaagaaataccgaaccgtgtgccggcttcatggctaatggaacgatataatttatcaagaaaaaccattattgatgaattaagagcttttaatcttggcggtgatggaaagcatctttatagtcctgctactgtcatgccgattttagataatctaaataaggctaaagcccaaaggcaatctagacgcaagaattaa

SEQ ID NO: 57742 - DNA, 324 bp, Acinetobacter baumannii
gtgtctgtaaaaattacgggaagtttaaaaggtttaaaacagcttactaaaaatgctgaagagttaaaagcaaaggggaaagcttcttttactgaaattgtgagccctgaatttatcagctcacatactgattacagcgatatttttgatttatttaaacaggctggatttgaagttgagacaattgaagaagttgaaagtattccagaggaagatttagacaacttcattcgtgaaaaaaccaaatttgaaagctttgctgacttacaaaaaaaggcagcttctgagtatatgagaaaacaattatttaatggcgtgaaataa

SEQ ID NO: 57743 - DNA, 222 bp, Acinetobacter baumannii
atgcaaaagtcggttaagcgctgggacgcgtggcgcatcactcttcgttacttaggcaaacgttatacggctactcgagatacagcgaatgagtgtgaacaatgggccgctaaaaaattattagaattaaaatctgaacaggctaatcctgagtctgaaaaatccatatctccttctatgccctttttgaacagtactatcaagaagaaggcagaaaaatga

SEQ ID NO: 57744 - DNA, 528 bp, Acinetobacter baumannii
atgactgttgcaatgagcatcatgatttcaaccgaagaaattcaagcaaaagtcaaagagctcggcgagcaaattaattctcactatgcaaatagtgacaaagaattggttctgattggtctacttcgtggttctgttattttcatggcagacttatgccgtacgattaccaaaccacatgaactcgactttatgacagtgtctagctatggcggcggtaccacttcaagtcgagacgttaaaatcttaaaagatcttgatggtgaaattcgtggtaaagacgtgcttgtggttgaagatattattgactcaggcaacaccttaagcaaagtcgtggaaatgttgcaaactcgcgaaccaaattcaattcaattgtgcacattagtgagtaaaccatctcgccgtgaaattgatttagaagttaaatttttaggttttgaagttgaagataaatttattgttggttatggcttagactacgaccagaaatatcgtcacttaccatttattggtgaaattggtctgtaa

SEQ ID NO: 57745 - DNA, 699 bp, Acinetobacter baumannii
atgattaaaaaattaggaatattggcgttatttagtttaactacaagtttgagtttcgctaatgtagatactgttcgggaaaatattaaaaaacaatatcctaatttgaaaattagtaatattcagaaaaccgaaatgcctggactatatagtgctaatctggaccagcaaattatttatcttggtgaagatgggcagcacatgtttgtaggctctatgattcggttaaaagaccaaaagaacttaactaaagatctggttttaggacagaactcaattgattggaaacagttgcctttaaaagatgctattaaaacagtcaaaggtaatggtcagcatgttttagcagtattttctgatccaaattgcccttattgtaagcagcttgaacctgaactcgacaagcttaaagatgtcactatttacacttttatctatcctttaaaacctcagtctattgtggtttctagacaagtttggtgtgcaccgaatcaatcatattcatggaaaaaattaattgagcaaggtgttaaaccaatggttgcaagctgtacaaacccgattgaccgtaacttggaattagggaaaaaattaggttttaatggcacgcctactctcatttttgctaacggatttaaactcgtcggagcgcgctctgctgaagaaattcaggcagtttggaaagagttaggtttataa

SEQ ID NO: 57746 - DNA, 426 bp, Acinetobacter baumannii
gtggttgcagatgcagtgacttctgtttttgcaattgtagcgcttttcgcaggtaaatattttggatgggattttttagatgcacttttaggaattttaggtgctattttagttgcaaagtggtcttttggcttaatgaaagagacaggaaaaactcttctagatgctgaaatggaccatcctgtagttgatgaaattcgggaagtaatagctgaatttccgaaacatgcggaaattacagatattcatgtctggaaagtcgcaaaaggtaaattttcttgtattttggcacttgaaactgatgatatctctttaaatgcagaccagattcgtgatgctttatcgattcatgatgaaattgtgcatatttcagtagaaattaataccttaaaacctgtttatgttccacgtgaaacattggcgtaa

SEQ ID NO: 57747 - DNA, 1314 bp, Acinetobacter baumannii
atgcctcatgttccttctgaggatatggacatgacaacaaagactgttacagagaatatgagtagcactgaagctattcaaacaccaaaaaagatttggattacagcttttatattcgctttttttacacttttatgtgacggggccgacttaggttttttggcattaagtctcactagtcttaaagcagagtttcatttaactggtgtgcaagccggaacattaggaagcttgacactatttggttcggccgtgggtggtcttattggtggttgggcttgcgaccgttttggtcgggttcgcattattgttttctttattgctttttcttcgatattaacctgcgcactcggctttacacattcttatatgcaatttgcagttttaagaacaataggcgccatgggcttaggtgcattatatattgcctgtaacattcttatgtctgaaatggtgccaaccaaacaccgttctaccgttttagcaacgctgatgacaggttatacactaggttctttattagcgaccttattagctggacatattattcctgaacatggctggcgtttcctatactggattgcaattacgcctgtggttttgtcagttttgatgcacttttgcgtacctgaacctgagtcatggaaaaaagcccgtcaactaaaagcgctagaagtcgctcaaagtaaccaacctaaaaaacgccaaaatccatatcttgagattttaagagataagaaacatggcaccatgtttgttctttggattattagtacgggtgcattgcagtttggttattacggcgtaagtaactggttacctgcttatttagagtctgaccttggcatcaagtttaaagaaatggcgatgtatatggtcggtacattcctaattatgatgtttgccaaagtaattgcaggtattgttgccgataaattaggacgccgcgctgtatttgctttcggaaccattggtacagccttatttattccggtcattgtctacttaaatacaccaaccaacattttatggatgatgctgtttttcggtttcctttacggtatgccttatgcaattaatgccacatatatgacagaaagcttcccgacttctattcgaggctcggcagtgggtggtgcttataacattggcaaagtactttctattttctctccattaacaattggttatctatcgcaaaacggttctattggtttagggctcttggtgatggctgcagcttattttatctgcggtgtaattccattgttatttattaaagaccgactatttaacccgcaaaaggcagagtga

SEQ ID NO: 57748 - DNA, 1155 bp, Acinetobacter baumannii
atgatccgtgatgaagggatgttggagcagttactttcaacaattcgagattttgtaaaaaatgaattgatccctcgtgaaaacgaagtggtagagaaagacaaaattccggatgacattgtgcagcaaatgcgtgagcttggtttgttcggtcttacaattcccgaagaatatggtggcttaggcatcactatggaagaggaagtcagagttgcatttgaacttggacaaacttcaccagctttccgttctttaattggtactaataacggtattggctcaagtgcaattttgattgatggcacagaagagcaaaagcagaaatatttaccacgttacgcaagtggcgaaattattggttcattttgtttaaccgagcctgaatctggctctgacgctgcctctttaaaaaccagtgccgtaaaagatggcgatttttatgtgttaaatggcaccaaacgttttattaccaatgcaccccatgctgcaactttcactgtaatggctcggacaaatcctgaaattaaagggtcgggtggcatttcagcttttttagttgaggccaatacgccaggcattacgttgggcaaaattgaccaaaaaatggggcaaaagggttcacatacctgtgatgtgatttttgaaaattgccgtgtgcctgcttctgcactgattggtggggtagaaggtgtcggttttaaaacggccatgaaagtgcttgataaagggcgtttgcatattggtgcctatagcgtaggtgttgccgaacgcatgttaaacgacgcactgcactatgcgattgagcgtaagcagtttggtcaacctattgcaaacttccagcttattcaagccatgcttgccgactcaaaagccgagatttatgcagctaaatgtatggtcctagatgcagctcgccgccgtgataatggtgaaaacattagcacggaagcttcttgcgcaaaaatgtttgcgaccgaaatgtgtggtcgtgttgctgaccgctgtgtacagattcacggtggtgcgggctatatcagtgaatatgccatcgagcgtttttatcgagatgtgcgtttgttccgtttatatgaaggaaccacgcaagttcaacaacttattattgccaaaaacatgattagggaagctacagcctaa

SEQ ID NO: 57749 - DNA, 843 bp, Acinetobacter baumannii
atgtctcaaaacacggaaactgaaaaaccaataaattttgatgagatacgtttagatcctatttcgcatatacatcgggaaaataacccgcaatttattgcttctttagcgcgcggtttagaacttttaagatgtttttctgcaaataatcaggtgcttggtaaccaagaattagcaaaaatgacaggtttacctaaaccgaccattgcacgtattaccaatacccttgtttcattaggttatttaaaacaattgcctaactcgaccaaatacacactagatattggtgtcttatctttaggatatgcagcattatctaacatctcgattcgcaatattgctcatcaatatatggaagagatgagccagtatgttcaagcgcctgtggcgatggcaacgcgtgaccgcttaaatatggtgtatatcgatgttgtgcaaattgaaactgcattgaatatgcgccgtccaattggttctactttaccactgcatagtagttcaatgggacgagcatgcttggctgcgactcctgaacgtgagcgcaactttctacttgatgcattgaaacaaaaaaatccagaaaactggccagccataaaacgttctttagaacgagctttccgtgattaccaagattatggatattgtttgtctttaggcgagtggcataaagaagtgaactcggtggctgtacctttggttagttctaaacatggtctttatgtttttaactgtggtgcgccaagttttcatttaaatccggaaaaacttgaaggtgaaattgggccacgtttaattcatatggtgcacaatattcaagatgctttgaatgaaacacattaa

SEQ ID NO: 57750 - DNA, 1206 bp, Acinetobacter baumannii
atgttaaatgcatatatctatgatggtttgcgtagtccatttggccgtcatgcgggtgaacttgcctcaattcgtcctgatgatttagcagcaacggtcattcaaaaactactagaaaaaactggtgtgccgggtgcggatattgaagatgttattttaggcgacaccaatcaagcgggtgaagatagccgtaatgtggcacgaaatgcattattacttgccggtttacctgttactgtaccgggccagacagtaaaccgcctatgtgctagtggtttaggcgctgtgattgactcagcacgtgccattacttgtggtgaaggcgaactgtatattgcaggtggtgtagaaagtatgtcacgtgctcccttcgtgatgggtaaagcggaaagtgcttatagccgtgatgcaaaaatttatgacaccacgattggctctcgttttccaaataaaaaaattattgcgcagtacggtggtcattcaatgcctgaaacgggcgataacgttgcagccgagtttgggattagccgtgaacaagccgacttatttgcagctcaatcacaagccaaatatcaaaaagccaaagaagaaggtttctttgtcgatgaaattacgccgattgaggttttccaaggcaaaaaattgccccctaaactcgtttcagaagatgaacaccctcgcccaagctcaactgttgaagcactcacaaagttaaaaccactctttgaaggtggcgtggttacagctggtaatgcctcagggattaatgacggtgcagcagcacttttgattggttcagaagctgcgggtcaaaaatatggcctaaaaccaatggcaaaaatcttatccgctgcagcagctggtatcgagccacgcattatgggtgcaggtccgatcgaagccattaaaaaagcggttgcacgtgctggccttactttagatgacatggatattattgaaattaatgaagcctttgcttcacaggttttatcttgtttaaaaggcttaaatgttgattttaatgatccacgtgtgaacccgaacggtggcgcaattgcagttggtcatccacttggtgcttctggcgcccgtcttgcgttaacagtagcgcgcgagttaattcgccgtaagaagaaatatgccgtggtgagcctatgtattggtgtaggtcaaggtcttgcaatggtgattgaaaacgtttcataa

SEQ ID NO: 57751 - DNA, 252 bp, Acinetobacter baumannii
atgaaagtatcacgtgtgttggattatattgctctagctgaattagctgaagtaaccgagagagtttttaaaagtactttttctcgtttgtccgcatacatatatacatctatagaactgagcctaaattttatacctctatttttatccaactatcctcaacatacccaatatttgatttgcatgtcagaaccaaatcaaactagcgctcagatgtgggcttccctagttcactttaaatcccgatattaa

SEQ ID NO: 57752 - DNA, 219 bp, Acinetobacter baumannii
ttggctgccctatcttttatttcaacatttataattgtttggttgggttttttattactactttattttaaaggaagatatgtccaattttttgtggatggaaggatatctttgaattggcgagcagtagatttattttttgtggcaggtatgtcttcaaccttattaacattactacttgttattgtagtgtggagtattcgtaataaagttttctaa

SEQ ID NO: 57753 - DNA, 312 bp, Acinetobacter baumannii
gtgtcaatagttattatgatacttactttttttgtagggttacttgttggccgatatactatatttttaattcaaaagtctttatctatttttatatctgctgttgataaatttttaaataaatactttgtcttttttcttttagctgttttgttctttattttattctctctaattttaacgggagggtttatattatggggcatactttttgctggaataacagaactaggtaagcttatatatctatcaggatgggtagttggagcaagattttttggatttcatccgaagagtaatagttttaaatga

SEQ ID NO: 57754 - DNA, 945 bp, Acinetobacter baumannii
ttggcatgtcggattatctttataaattgcagtaatgatgaagactatcaatatttggccagtctactaaagaataaagaaatatattgtgaaaatgttattggtttagcttggctaaaagcaaataatcaaattagcgaaaaacaatttgaaattatcttagatgtcttaatagacctaaatcttcataaaatagtccaatttgagttatttcaagagtgtagctttcaaaaaaaggtctctacaaaatataaaaaaattttaattaaacatttgagctattttataagtatggaaaacacatatacaactaaagatatattaaattatctattaacaagcgaccaaaccactataaataagacctttaaaattattattaaccactaccaacaacaagaatacattaatatcagcaataatgacaaaaacttcaatacattaaaagaattaattacacaccaaacattaaagtttattaaagaattttgcaatgaagaaatatttagaaaattctattttaatggtttatttaatattcttccttatgcaaaagaagaagaagttttacagtggataaaacacgatcaagaaaaattaatattttgggttgaaaactccagttttatagttgaagaaaattggatagatttgattattcaaattttggatattagtgaaaatccaactttaattttagaaaaaattattaaaaataatgtattctatacaaaaacaatagaagttcgttcaggaaatatttcagataatatgcgatataaattaccgtatctagcctctttaaaattgaaattaaaaaataaaaatactgaaattttatctttaattgataagaaagagcaagaatggataaggcttatagagattcagtctcaaaaagatgagcaatcaaaaagattagaatctgaaatatttccttggtag

SEQ ID NO: 57755 - DNA, 231 bp, Acinetobacter baumannii
atgagtgagtcaagacatttagtgctaaagcgtcaccctactttgaaaggttatctggttatttgtgatgaagaaactggacaacctctagctggacaaagagcagtacagatgaattctgatgccttaaatggacccgcaacaattactgtaacttttgaagcatatggtgctcatggtgttcgcttagtgagtgatgcaccaaggccaaatcaaacaaaggaaatgtag

SEQ ID NO: 57756 - DNA, 744 bp, Acinetobacter baumannii
atgcataccgtttataagatgacagaattttcacaactccccactcttggaattttgggtggcatgggaccgggcgctgctgttgattttcaacagcgtctgctcgatacaagccctgccactaaagatcaggaacatattccaacaatcgtttggaatcacggcggtattcctgaccgacaacttgcacttaaaaacctaggtgaaagtcctttaaatgccatgttacatggactaaaaattttagagcgtagcggtgtttctaaaatcgcaattccgtgtaataccgcacacttttggcattctgacttacagcaacacacccatattcaaatcttaaatatggttgaaattacggtgcaacagattttaaagaattatcaatctggtgataaagtcggaatattggcaaccaaaggtgccctttctactcagttgtatcaaattgagttaagcaaacatagcatcccttttattattaattcagatgaagaaattgaacaggaatttatgcccgctgtttatgctgtaaaacgcaacgaaacggcaaaagcgggtatcgtttttcaagagttaagccaaagactcatagataaaggtgcgggttcgattattttagcctgcacagaaattcccattgggttacatgcaatccagtctccaattttagatgtgagctttgataccacacaaattttggcagatgcttgtgtaaattggttttatcgagatacacagctctaa

SEQ ID NO: 57757 - DNA, 1023 bp, Acinetobacter baumannii
atgttattaagtcatttgccgcgcgttcaactggttcatgcgcctactcctctagagtttttacctcacttaactaaagcgttaaatggtccgcagatttacatcaaacgagacgatgctacagggttagctacaggtggcaataaaacccgaaaattagaatttttaattggtgatgcacttgcaaaaggtgccacacatgtactcactcaaggtgcaactcaatctaaccatgttcgccaaacgattgcagcagccaataaatttggcctaaaggcatctgttttactcgaacaacgcgttagtgatggtacagaggaatattacaataacggcaacttattgctcgatgagattctaggcgcaacatcaattgaagttgttccgggtggcacagacatggcggcggctttagaagccaaagcaaaagaattagaactacaaggtgagcgtccgtacattatcccgggcggtggctcaaacgctattggtgctttaggttatgtctcaacagcaattgaattaattaaccaacttaaccagattcaactcgcgccaactcatcttgtacatgcaacaggtagtacgggtactcaagctggccttttagcaggtattgcggcaactcactcaaacttaccagtcttgggtattagtgttcgtgctgaaaaatctaaacaagaagaaaatatttataaacttactcgcgcaacattagaacatcttggtttaaacgcagatcttattgctcgtgaaaaagtgattgcaaatagtgactatgttggcgatggctacggtattccaactgatagcatggttgaagcagttgaacttctggctcgaactgaaggtattttgcttgatcctgtttactcaggtaaaggttttgcgggcttagttgatctcattcgtcagggccatttcactaaagatgacaaagtgattttccttcatacaggcggtgccgtaggcttattcggttatcgtaaaaccttctctagcaaagatgcataccgtttataa

SEQ ID NO: 57758 - DNA, 792 bp, Acinetobacter baumannii
atgactcaaccatttattgagctaaataatgttcagaaaatatttaaacagaacaaaacagaaaatacggtcttagaagatattaatctgaaaattcctgaaggtcagtttgtttgcttacttgggccttctggctgtggtaaatcaactattttgaacttacttgctggttttgaaaaaccaacttcaggtgacatttatgtagatggtcaaaccatctcagctccgggcattgaccgagctgttgtattccaacaggctcagttatttccttggctcacagtaaaagaaaatattcaatttccacttaagcaatcaaaagctgagcctaaatatattactgagcaaactgaatattatttagaaaaaacgggtttaaagaagtttgaaaaccatcgcatttggcaaatctcaggcggtatgaagcaacgtgttgcgcttgcccgtgcttgggttatgaagccaaagattttattgatggacgaacctttcggagctttagatgcccaaacacgtattttgatgcaggaaacactgactcagctttggcaagacaataaaactaccgttttatttgttactcacgatattgatgaatctctacttttagcagatcgcattatcttaatggcaggtcaccctggccgcatcgccgaagatattcaagtgaatttacctcgtgaccgcaccattgaaaatattgcgccacagcaggaatttattgaaaccaaaaaacatattttagaaattatgcgtaaagaagtaagtcgcatgattgattacatacactaa

SEQ ID NO: 57759 - DNA, 780 bp, Acinetobacter baumannii
atgattcagttgaacccgtttaaagtaaaagtgattagtacattatcgctaatcacttttgtgattatttggcagcttgtgtgtacatttaaacttgtctcaccaattttgttgccctctcctctacaaattttagatacagttttagatttatttaaaaacggttaccgagatgctcctttttatcaacacattttagtcagcacggcgcgtgccttctttgcattcttcgttgcaatcgttattggtgtgcctttgggattattaatgggccgtcgtcctgtacttaatgccgttttagatccatttgtacaattcttacgccctgttcccaaaattgccttaatccccttagttgtagtgtggctagggattggcgaggaatctaaatttttccttatttttattgcaacttttcttagcgtcattgtgggtgcaaccgcagcaagccaaaacgttccatatggtttgattcaagcagcacaaacgatgggcttaggaaaaacagcaatcttattccgtgtcattttaccctcttcacttcctgaaattttcaccactattcgtttatctattggtatcggctggacatcattaattgcagcagaaatggttgcagcgacttctggtttagggtggatgattattaatgcaggttcttatttacgtacagatgttgtcattgtcgggattattttacttggaacaattggctttattttagattggctcattgtgaaagcacagcaaaaatgggccccttggacaggaaaagcataa

SEQ ID NO: 57760 - DNA, 1080 bp, Acinetobacter baumannii
atgttgtttggaacacattttcacttaaaaaatgctgtcttatcagtaggggttctcagctttgcacttttaactggttgtggaaataattcacagcagaataatgaaactaaggcagaagcttctcaaactgcgcctgctgctgaactacctaaagaagtacgttttgcttggggtggcggtccccgagtttgggttcttggtaaagctgatggagattttgaaaaagctttaggtacaaaaattaagtgggttgaatttgcttcaggtgcagatgtaattaattacttcgccgcaaatgaaattgacattgcacgttttggctcaagcccagctgttgcaggtattactcgcggattacccattgaaatcattggtttggaaggtctaatttctggtgcagaacgtttaattgttcgtcctgatattaaaaatctgcaagacctagttggtaaaaaagttgccttccctgctaactccactgcacaatatgctttagaacaagcccttgcattaaataaaattgataaatcaaaaatcaaattaattccacttaagcctgctgaaattgtttctgcatggacacgtggtgatattgatgcagcctatgtttggggaccatttactcaacagctagagaaagaaggcggtaaagaaatttatcgtacaacaacgctgaatgaaaaaggtattttggtttataacaacttcgctgtccgtaaagagtttgcagaaaaacaccctgaccttgttattaaatttttgaaagcttaccaagatcaagttgatgaatataaacgtgatcctaaagctgcttctgaaaaaatctctaaatacttaagtcttccctatgaccaagtcgaaaccacacttgctggtatcgaatatattcccctaaaagatcaagcctctgaaaaatatttaggtgcgacatcaaatgatgaaaactcaggcttggctaaagccacccaagatattgctaaatttttagtcagtattggcgagctaaaacaatctgatgttccaaagagttatgcgcctaatatcgacagtaaataccttattgaagcgacaaaataa

SEQ ID NO: 57761 - DNA, 471 bp, Acinetobacter baumannii
atgaaaatagtaccttcaattcgtcgttcactcactgttctttgtatctctgttgccactttgactggatgccaaagctactactacgttccaagccctaaatttgatgttgaatcgcctttaggtattttgagtcaagctgctcaagatgctgtagccgaacaacaaacttatgccctagataaaaaagcctttaacgaagatttagctttacgccaacgtagctttagaactgacgttattcgtgttgactatgtcggggaacctcagaccctccttcaaagtgcagcttatcacttcggatatcgctttattgaagctggtaacattcatcagctcccaatcgtaaacttcagcaaacgcaaattaactggatttgatctcattaaagatgttggcttgcaacttggtaactctgcaactgttgatgtagatgaaaatgataaaacaatcacattgatccatcgttaa

SEQ ID NO: 57762 - DNA, 819 bp, Acinetobacter baumannii
atggcagatttacctaattaccaatattacttgcagcaatcaccaatcatcatttctcaagatgactctgcaaaacaagctgaaagctcagcccgacttgaatcaatcaaaacactagtacatgaagcagctacacgaaatgcattacgtgctcgactgactgaaattgataaagtcgtttacaacccaaacaatgtacgcaagcttgattctatttacgactttcagcgtttaatgattaatactgttgttgttccccctgtcattgttcaggcaaacaatattagtgatgttcaaaaccctcgtacactttcagtgcttggtgtccgttatgaaattaaagaaaatgctcgtttctcacataccccaccaaactggcgtgactttttacagtttaatgtgaagagctatgaaatcggtgtggacgccttacctaacgagttaaaacctaaaaatagtgccgaagaacgtgcttttaaagaagcaatgaataaaggaattgaagatggtgttcgtgaagcagacgctattttcaagcatcaattaaaccgtctcaaccaaacatataaaggaatgattgcattccatcgttttgtcatggacgggaaaattacgatgccagcaattgctcgtcgggatatcgcccttactggtaacggcaatacacttatgttgaaccagaccaactttgagattacttctttacctcaatttgtgaacaacactaaattgtggaatagccgaattttaagcatcaaagaacgttcagtcgttaaggatccggttgaaacacctgttgcgattgaaactcaacaataa

SEQ ID NO: 57763 - DNA, 1290 bp, Acinetobacter baumannii
atgaatgtttatgctagagataccgtcgctgaagagcccaaagctgaacacccctatcaaatgttgcgacatgaaacaattgatttggataacatcagcataaattctgaagaagatgtgcgtaaaatcttaactgttgctaatgcttttaacgcgagtgacgtattgatcaactccggtagaccaatactcattcgtcgttacaataagctttatgcattaactctgaagaaccttaaagatgttgagcttaatatgtttttaaccattattaatggtaatgaagcactaagctcaattaaaaaagggaaaggtttaaatttcgcgtataactgtagcgcatttcaagatcgcaattcgaaaagtggtaaagggtatataactacacagaatgatgaaagctggttacatgtgaatgcagtggaaaaagagaaaatcattttccgctgtaatgtgagtgcctgtaatgatagaactggcaactcttcctttcaaattgttcaacgtattattccatctgatccacctacctatgatcaaatcggcctaactgaagagttcgttctaaaagccattccgagactaggcatcacttatgttgttggtgaaactggtcacggaaaatcaacaacattagcttcaatggttcgttacgtatatgaagaagatacacatattcagggcaatattattactcttgaagaacctatcgaattcagatacgacggcattaaaagtaagcattcaatcattgttcaaagtcagatacctgaacatttcatgacttttggcctagctgtaagagaagcaatgagacgtaaaccagcactactactagttgctgaattacgtgaccaagaatctttctctgctgcaattgagctctcaaagacgggacaccccgttatgtcaacaatccatagtaacgatgttgcaaacgtactacctcgtatcatggatttggttccaccagaccaacaacatcgtaaattaaccgaaactatctctacagcacatgcatttattgctcagcgcctcgttgagacgccagaggggaaattaataggtgtacgagaacacctctttttctctaaatccattcgtaatgaccttttggatctggctattcaggccggtgggtatggacttgttatccaatacattcgaaagatgatgaatgacaatccacaaggtacagaaaactcatcaccaaattttgaaaatcaggctaaagatttattgaataagggactcatcagcaaaaaaggctttgatgcccttatagcctag

SEQ ID NO: 57764 - DNA, 255 bp, Acinetobacter baumannii
atggaagacaacaataatttcatagattggggtaaagcttcaaataaccctagtttaaaaggcattaaccctatagccctatttcttatcgctttcggatgtttgttttggaatatttcaaaaattccgataatcgtcggtatctttgctgtcccgatatgctggctaatcgagaactatttaaaaatgccatacaagtattttttccagctcattatcggctttttcttcggaaaaattaaatctcccaaataa

SEQ ID NO: 57765 - DNA, 1059 bp, Acinetobacter baumannii
atgaaaggttataaaactttgacagttggcgtcgatgatggccatgacggaatcaagatttattgtggtgaagtgggtaaatcatttcgtctaccaagtcgagtagccaatggacgcaccattattggtgataccgatgaagtaaacaaacaaatcattcacgttaatggcaagtattttactgtcgatgaatttacaaaagagcatattgatacacgtactgaagattatccgctaagtgatgcgaatgtcgcacttgtgcaccatgctcttcaccaagcttttgatggccaataccgtaaatttaaaattgcaactggcttaccattaaatcggtactacggtggtaaagacaaagctaaaaatgagaagttgattgctgacaaaactcaaaatctattgattaataaggattttaacaaccctactgtttacaatctttatgagcacgacaaaaaaaatgatcctttgcaaattttaaaccatatcgttctttctgaaggtcaatgtgcttattttgatgctctcatggatgataatggcaaacgctcaagtatgtatgaagatttatgggaaggtggttgtgcaattatcgatattggtggtcgcactaccgatattgcaatgatcaatccccgtggcggcaccatgcaagcttctcgctgcgacactctagatgtagggataattactttaaaaaataaggtaagtcaaaatcttaaggagtttttcgggctttcttcaaatattacagattggcgactctctaaagccttgaagaccggcatttataatcatggcgggaaagatcacgatatttcaaaaatcttaaatgctgcaaaggttgaaatcactgatcagattgaaaactctatcaaagtgaatgtgcaagacggtcaagatctaggagcagtgttgctcgttggtggaggttcaatcacgcttggtgacgagctacttaaacgattcaactatgataactggcaccttgtaaaacagcctgaatttgcgaatgcacgtggcatgtataaatgtgcaaagtatatttcgaagctttga

SEQ ID NO: 57766 - DNA, 750 bp, Acinetobacter baumannii
atgcctcaaaaacaccggttaagaatctctgttagtttagccaagctacctaagcgccaacgtgattttttggacaagtttaagaatataaaagagattgatgtgcatagcttctatgcacatctcatttcatatttcttttttcatcctactaaatcacttcagttaattggagccgttggaaaaaatgagagcaaaattgcccttaactttcatcatgaggcgcttgttaaaacacttactggtaaaactcaatatcaaagagagctttattgcctaaccgctttatatgaaatgtccaatatgttggcatacaaactttttatgtattacacgtatgttactaataggaatttcaacgaactggcagctcttgagaatcaattttttgaattgggaatctctgcattccttgatgattttattgagcttacgaatgaaacgaagtttttccagaatattcaaatcatggcatccagcttcaatactgaaagcaccagagcctttgcacttttagaaagttatgttcatagcgaaactatgattacagcaactagtcatccagatcctctacagaaacctatcttagacgatctaactaccaatgctctttcacccacccctgaatacactttagcttcaccaaaacaagaaacgattgatcaaatccaaaatcccgttgatcaagagtccttcgatgaacaatcaagttcaactattgaagactggagtcagattcaggtcggataa

SEQ ID NO: 57767 - DNA, 1371 bp, Acinetobacter baumannii
atgtcaaataatcataatgcaagtcatggatctactgatgacacactcattttgattggtgttttatgtgtaggcatccctctattagtttttgggggatggaaaattggtaaagtggcaattatcacaattactcgaaacgtgtacgggttaattgaacttccattttattaccttcaattatttattcaaaagataactggttctaacgctggttatctggatttcacaactaatgctattacaaagctatgttatccggatccaaatcacgcaatgaatccgttaatgcattgtacagcgaatttaaaagtagttcctttttccttttattctgaaaactgcatttttccaacgattcttattggagctctcttagtcggctggatctggtataaacatgcaattaatttgaaatacttaccggacacacgctatgttcaagaacatgatcttgaatcattaattggagagctgggatcttatcagccacatttacgctatatacaacgttttattcaatccaactatgcgaccgacaaagggttttatagacttcttttatcgccaagagaatttatcaaaatacataatcttgtttatggattcagaaaatacgaaattgaaaatgccgaagattttgatgatttcaaaggctcaaattctccaaaagatgatgcttatccactgctagaccaaagcaaatttgaaaaattgatgatgcatcaacttggtcaaatgctagataaaccatccaatctaagcgatggcgaaattattctttatgcactttttttaccaatggcttgtgctacagatgaacgcatgtctgataaagagttcaaaaaaattaaagctcaaaaagatatgttacttcactacttttgggacaaagccattgagcacttaacttcagaaaaagcttttattaatcctaaaaattatgagccacgtgaatttaagtattttgaaagaaaaagattacagaaaattgtcgagagatactggaatcaccctgtagctaaagaagtcttttcaaagcatgcatatgtacgtactgcccttattgcactgatctataaaaccagaacgttaggggtacttgctccatgtgagcttcgctggttgagaaattatgaccgcacgctttgggctcttgttcagaatgttggtagacctagtgtttatgtagaacaactagcggcattttcacactacacctcagaagcttattaccaccggagaaagatttctccagatttcagctatggatggaatgggcttttagaaagccttaaacaatatcgctacgccgatcctcatgtttatttaccagcgcctccgaaagctaatgagatcaccgtcaactag

SEQ ID NO: 57768 - DNA, 192 bp, Acinetobacter baumannii
atgtactatgatcatcttcagcaatatattccagcattcaaaaatgcatatatcggtaagattggaccttctccggctggtattaataaatggaatatttctgagttcagtaatcttcctatacctgttcgaccacaattgactccaattaatcgtcaacacgctttatccaacaaaacttcattcctttaa

SEQ ID NO: 57769 - DNA, 639 bp, Acinetobacter baumannii
atgcagctttctctagaattacttgaacgagtattccgttcaaatcagaatgatcctaataaatttatgagtagactcaagcaatcacctaatccgaaacatgttttagatgttgtggcagcctcagaaatgttgcagaaagctaacttgctgatacatgatttaatgtcgaatggtcaaaagcaatcacatatttttaaagaaaaaaaggaatatgagagtaaggatcaaatcttcactttaagatctgatgacgatccaaataaattttatgtatacgttttccacttaattcctgaaaactctcttactgtaaagttctcctactgcttaggtacgctaaatgcaccaaatgtttttggtcctgagtctgccttaaaactaaaaggtgttttactaaatatttttgagcttcacctcaagcaagaatttattttcccatcttggtgtaatgtgttttatatcaacaacttaacctcaagagcaatgccaaatattgccctctcttctattgaagatcagttaagtaacccattggatttttttcctgatgcgatagaaacattaaaaatgtattcaataaatataaaaaacattgatctagatattatggatatgtttgttctgctattctattaa

SEQ ID NO: 57770 - DNA, 996 bp, Acinetobacter baumannii
atgagcgattttatttctacccccagactaagcacatatcaaaatattttgaagctaacagatccgaatcagatactaagggcatattattggaacattgctttagctggagcaatttatccgttaatgcagactttggaaattactttaagaaatgctatagatgtctcagtaaaaaacaatcatcaacctaaaagtgcaaatggatctaactttgtttcttataaaaataatgatctatggtttgaacaactggttacagcagtacaagatagaaagataactaaaatgcgaccgcaccaagctttgaaatgggtgagaggtggaaaacgtataaaattcagtaccacggaaagtcatgtgaaaaaagcacgtgatgatgcatcaactgtaaaaagctgggttaaaggggaggatatactaagccggttaccttttggattctggacaactttgcttagcaaggattatgaagatgttacgaacaaacatttactatggccaaatcttttgcatcacgtttttccaaacgcaccttcacatattaagaggaaagacattgaagaccattttaacttaattagagaattcaggaaccgattatcccaccatgaacctatctggaagttctattatagaaatcctgcgaataatgcattagattatacaacaccaatattcggcttgaacgcttctttaaatctattaaataatcaatatgatgatatgttgatgcttcttcagtggatgtcagcaagtgcttacgataattttaattattcacgtataggcaatgagttcaagaaattatgttctattgatggcttctacgcttatgtggacagggaaaaagttgccaattgttatccagcttcaagagccaagagagagttctttaaactcgcagaaacattacagaatgtgaatgttgtttatatgaaaactaacggaaaacgtgggtatattctaggattaaatgaaccatctttaccctaa

SEQ ID NO: 57771 - DNA, 504 bp, Acinetobacter baumannii
atgaatagagtaattaattcagaattggagcatgccaagttgttgctcggtctcggtcaggtttgtacggatgtcctttccatgcatgaggtagttggatcttcaataaaagaaatacctttcgtaagtgaaaggatatcagcaggatttccatcaccggcacaagattatgttgataaattgatggatatgaatgagcatttaatccggaacgaagctgcgacatttattgtgaaagtgtgctcattatcaatgataaatgctggaatcgatatcaacgatgaattggttgttgatcgaagtttagaagcgaagaataacgatattgttgtagcgcttatagagaatgaattcactgttaaacgtttaaagattgaaggttcgaagatttggttaaaggctgaaaatccagattaccaagatatatattttaatgaaggtcaaaaactaatcgtatggggagtcgtcacgttcatactaaaaaatgttagaaaaagatcatga

SEQ ID NO: 57772 - DNA, 360 bp, Acinetobacter baumannii
atgtcaaatatgcgctattcaaatgacggcattgataatggcttatttgctccacatgttttagacagaaatgcccgtgattttgatcaatatatgaaagatcatactccggctgccgttgcacgtattcgtaatttcacaagaaatattaatacacctgttcatcaaaatgcttattctcaagaatatgtaaatcgtcttttgaattacataagtcaattagaaaactcaaattctaattatgagactcgattaggtaatgcattcaaaagcatcaacaatgcaaacgcgactatagacagactagacgatttggtaactgatttgaaaaaacggttatctaaatatgaaaatgtctaa

SEQ ID NO: 57773 - DNA, 528 bp, Acinetobacter baumannii
atggtaatcagtgatgaaaaaacttttttaaattatctaaatttaaatcaaagttcgggtttgtcatcaaatgaatataaacagcttcttgaaattaaatcagtaattgataagaaaaatgataaaataaactatgtttatacttccattttgaaagacaatttcgttaaaattttaacccctttaaatgataatatatttcaggatgtaaaaaagcagaaaagtgtgaaaaaacatattagtctcttttttaattctgaggtgatgaacacattatttatcaataaccttatagatgagttgttaaaatttaaatttgtagatctgacatttatgagtaaagtattagattctacaaatacgtccggaataagattaaagatcgaatttagttatgagggggaagagtataatttttaccttataacaatattacaaacacttaattacctcatcgaagaccagaaagatgtttcttctcttaagaaaatgattcttctacctgaattcaagctcataacatattaa

SEQ ID NO: 57774 - DNA, 654 bp, Acinetobacter baumannii
atgaatgcatcacaaactatccagactgtacaatttggtttggatcaatactctaaattagtaaaagatctcaaagtcttatccggcattgatgcattctatacagctaaatgcttgatagaatcatttcccaatgtagttaatgatgaattttatggctatgatttttatgctgatgaaaagatcttagatatttcaagctacatacatattgatgaaaataagtggtttaatttaaattgtctaattgatttagaagaaaagattgtctcaataaatttagcttcagaaatggaaaatggtgagatttttctctttcgaacagataaaaattatcaggtggctgtaaattataattattcattcgaaaatttcttctcactccaaagtaacttcgaatatagtctatttgatttagttctttcatcgatgggtttatctttattaccgaaaaaaatatttaacaactttgagctgaaggatatattcttattctcaatgtcgatagttactggcagatataaaaactatattccagatcagctattttttaactcaatacacaaaaatattgttctagatttaaaaagtgatgaattagaattaccatcacgattaattaattacagagatgagatagatcttaaatggtaa

SEQ ID NO: 57775 - DNA, 234 bp, Acinetobacter baumannii
atgtacttatctgatttaaacgcacaacaaagggctatcgtaacgaaagttcaagcttctttaatcttatcaaatcgtctagaaacattaggttttattccacaagcagaagttcgtgtcattactaaaggaatctttggtggtgaccctattctcgttcaaattggatttactcgttttgctttaagaaagtcagaagctaaatgtatttatgttgaaggacttaattcatga

SEQ ID NO: 57776 - DNA, 1848 bp, Acinetobacter baumannii
atgacaaccgacctgagaattgccttagttggtaatccaaattgtggtaaaacttcattatttaaccatttaactggtacacgtcaaaaagttgcaaattatgctggtgtaacagttgagaaaaaagttgggcattttacacttccctcatccaataaagtacgaatacttgatcttcctggtacatatagtttatctgcaacaagcccagatgaagcaattactcgtgatgtttgcaacggtcttacagaagaggcacaacaagatgctttcatttgtgtcgtagatgctacaaatctaaaacttcatttaggattagttttagaagtactggctctaggccgtcccgtattagttgttttaaacatgatggatgaagctcgtcgtcgaggcattcagattaatatcgaaaaattatctcagcatttgggtgttcctgtggttgaaacagttgctgtcaaaagctcaggtttaacccaattgatagatgccctagataaggaagtctttcacacccctcatactgatttcactgccaagattgattccccacaaaaacatattgaatatgtcctagcaaccacgattacagatcaaggtaaagttgatacccgaacagagtttctagataagattttacttcatcctattgctggacttcttattctagcaatcactatgtttatcgtattccaagccgtatttgcttgggcaaatccattcattgagatgcttgagaatctatttagttttattggtgaatttctcggaagtatcatcacccaaccccttttaaatagtcttgtcgttgatggcattatcggaggagtgggaagtattattgtttatttaccccagattctgattttgttcttctttatctttgtactagaagagtcaggctatcttccccgtgcctcctttttattagataagcttatggtaagtgcaggtttaagtggtcgagcatttattcctcttctttccagttttgcctgtgcaatccctggcattatggcaacaagaactatcactgatcgtaccgaccgtattgcgacgatcatggttgctcccctcatgacgtgctcagcacgactacctgtttatgccttattgatcgcagcgttcatcccaaatcaaactgttgcaggtatttttaacttgcagggagttgtactatttggactctatattgcaggaattgtcagtgcattggttgtgtcactggtgatgaaactgtttagaaagaataaggaaaatagcttattcctaatggaactacctgcttatcgaatgcctaactggcgtagtgttttccttggggtttatgaacgtgcctggatattcatcagacgtgtgggcggaatcatctttgcactaaccattcttctttggtttctgtgtacatttccaacacctccagaaaacgccacgttaccagcgatagattatagttttgcaggcatgcttggacatcttctacaaccaatattcgcaccaatcggtttcaactggcaaattactattgcgctgatacctggacttgctgcccgtgaagtggttgttgctgccctaggtacagtttatgcgctctctggcagtgaagatgctcaggcagaaacactggtcaacttgatcacagccgatggtacaggctggtcactagcgacaggcttatctttactggtgtggtttatctatgcacccaactgtttggcaactttagccaccatacgaagagaaactggctctatgcgaacggtgacaattatggtggtctatatgtttgcccttgcatacttaatggcctttttcacttatcaactagcttcctattactggggctaa

SEQ ID NO: 57777 - DNA, 372 bp, Acinetobacter baumannii
atgttagaaaaaaacgccttaagtgcctttgcggctttatctcaagaaacacgcttacgaattgtgcgtttacttgtggtcgctggtgctgaaggcatggcttcaggacaaattgctgaggcactagatggcgcagcaccatcaagaatttcttttcatttaagtcatttggaaaatgcagggctgatctacagtcgccgagagggtcggcaaattatctattgtgcaatttggtctactctagcagatctcgttgcattcctgatgcatgactgttgccaagggcattgtgaatattgcgacaaagcaattgagttgtttgctaaatgtacaggtgaaccgaccgagggttatatcaaaataggagaatag

SEQ ID NO: 57778 - DNA, 963 bp, Acinetobacter baumannii
atggaaaatctacgcagcttacttgaagaccatcaagtcaagatctactttattacgatatttattggaaccatttttgggctaactataagtggggtaagtagtttagaaagtgcaattaatccagcattggcattaatgttatttgccacttttttacaggtacccattgctgaaataggtaaagcatttaagaacctaaaattcatttctgctttattaattaccaactttattgccttacctgctatcaccgcaggcctaatccagtttctacctgaaaatccattgattcggctggctgttttatttgtactcttagctccttgcattgattatgtgattacctttacacatgtgggaaaaggtaatgcgaggttactgcttgcaatgacaccaatattattacttattcaaatgattctgcttccagtctaccttggaacattattaggtgatgaggtatcacagcttgtcgaaatggaaccatttttacatgctttcatttggtttattattgtacccctgacacttgcaggcattgttcagtttattagcaataaaagtgaatcattggctacgctttccgcacctttaaatttactgcctgtacccgctacagcacttgttctgtttattgtgcttgcatcagtgacgcctcaaattggactcgctcagagtgctgctcttcaggctttaccaatttacatcgcctttgccattattgctccctttataggctgggctatcgcatccttgttcaaactggagtctagttctgcaagagctgtatctttttcagcatcatatcgaaattctttggttatcctaccattagctctagtagtacctggaagtatgcctattatccctgctgtaattctaacgcaaacaattgttgaactttgttttctaccaatttatacacgattgattcccagaatgtttccatctaaagattag

SEQ ID NO: 57779 - DNA, 930 bp, Acinetobacter baumannii
atgtcatgtcatcgtatgattgcagcaggttgtgctgatctctgtgctgattgctattggcataaaagcttatggaataaatttgatcaaaatcagaatgcatttgagtttacttacttaaaacagcagtatgagagctatatagactggttagaaaagaaagtcggatcgcataaagctacgttatatataaataaacatacccatttctttttgaaaacagaagtgaattggaaccaatccgtacctacaccaatgcagttgttagcagtattacgaagcagtgggcttagaaaatttgaattggtgatgcaatggcttgaagagatgcatggcattcaagtagatacggataacaaaaaaggttgttcagaacgagatcagatggaaaagcttgtgcaaagtattttacaaccatctttggcgtatgatgttgtatttggatacaagaataaattagaagaaaaaatcaaacgaggcgatacctcaatacgttcagctcggttggcagtaaagcctgctgttgcgttgatgctgtcaatcgggtcagaaagtacccaattaccaaatttggaacatatcaaggcgtatttggctgactattcgggacaagctgctgcgcttacgggattcattaattttctaaatgagaattatggcacttccattgattatttaaagttgaaaaagtctgattttttaaggattaagcagaaacaaaaattagaaaaggcgattgttgcattagctcaaactgatctaagtaaccgtgaagaattgatcggatgggttagaaatggtcttaggtatttccatcaactttcttacattgattctttaaaagttaaagttgaaatgattacagaggtaaataatggttttgctgtaagatttaatgagcaatcatattggctgccaaacaaccaataa

SEQ ID NO: 57780 - DNA, 1011 bp, Acinetobacter baumannii
atggttctcgttgaggccttatgggggaaatggagagctttaacgattgatttagacaaaggagtagatgcagaaaagtttgatgctctgttatctcatagtattgagacaaggcagaatatacagcaatcgatgttgagtagctttgtttctgagatacagccaaattatgatccaaagcaaactatcccttgggttttgtccttgggcacacgaaaccgttcaaatacctcaggtcggcaagtgtgtgttgaatgcttaaaaagtcgtgaaaatccgccttattttcgtttaatgtggcgcatgggatggcattgtagttgtgatcggcatcaggtaagtttaatcgatcattgccctgaatgcggtgtgacgctccaagcatttaaaactgatttggaacatggttgcttggcgatctgtacagcatgtggttttgacttaaggcattgtaagcaaagccaaaatatcaatttaaactctttaaacttccaaaataaagcggatcaggttttaaaacaaaaagttggcttttataatcaatcaattattacctctcaagaatggtttgaaattgctcgtgtatggctcagtgagattagatttttgatcaatacatccaataaaaatgtgattcaattgtttgaaagttttgatgtaaatttacatctttcacatccagttaccccattagcatttgaatatctgaatactcaggagcgaatagttttgctttcaatattggatcagattatggatattccatgcgacttattggtacagcgttcaaatgagtacggaatcagtcatgcaaacttttgggataagcgtaagaagttgcctgttcagcttcaacagatgaaagatttaatgattaagcctacaagacgttatcccgtctctcgtgcagcaataactgttaccaagccgaaatccaaagccagtgtacaacgtcaatggttaaatttattaaggagaagcaataatagtggagctaggcttattgactga

SEQ ID NO: 57781 - DNA, 2886 bp, Acinetobacter baumannii; identical to SEQ ID NO: 25667

SEQ ID NO: 57782 - DNA, 354 bp, Acinetobacter baumannii
atgtatagcgcatcaaaagcagataaagaatcggatctattaattaagaagaattttccgaactattttaatgtttacggacatcatgatttgctggatgaagagtcattaaaatatctgctttcaacagaggttactttagatgaatataaaattataaaatcactggctgaaattagtccagaattcaatataaagcttaaagaaattatgaagtttagaaacggagtttttacaatttacgactatcgggtacttaactgcaaacgacttctaagtatatctgagaaagaaaacaaccgttctaaagaacaagcagaaatagacgaatttaaaaaggaaataattaaatga

SEQ ID NO: 57783 - DNA, 294 bp, Acinetobacter baumannii
atgactaaaaagccaacacgatatttctacgctcttttaacaagcaaagatcttaattccacagtaaaaggtgaagcatctatatttgcttttaaatgccctatacaccgaactaactggattgatgaaatgaatcgtcgatcacatgaatatcaggctcaaccaattgtaagtaataaagcttatcgttatttatctggtaaaacttcagatctagagtttcatgaaatttttgacggaagttttaaggtttatggtgttaaagcttatcaaccaaccacaccaaagatctaa

SEQ ID NO: 57784 - DNA, 402 bp, Acinetobacter baumannii
atgaatagaagtaatcaactgagtttagatcttccggaatacgaagtaaaaaaagaagaaagttatgcaaattacaaggggaaatatactgtcgatatttctcaaatatacaggttttatattgctgtaaattcaataggaacactcattaaaacaaaagaaaaaattaaaggttttgattttattcttgagtgtgatgatgaaaaaattgcagatgaaatattagactgtgtacctaaagcaaaatcaagaaagtactttaaagtaccaaactttaaacctttactttattctggtatcgataaatcttcagtacaactatggatatcagccgtagaaagaaagatgggtttcaagaaaagcatatacttaagagttgtaaatagtagatgggattattaa

SEQ ID NO: 57785 - DNA, 225 bp, Acinetobacter baumannii
atgacttttgaagaaataacaaataagattgccgcaagcgttgttttactttcattaatttcgagttttccctacatgggatataaattttatcttgttgcaatggatgactcacgtcattttgtaattaaatacgtcgtattagtatttctctcaatcctttttttactagcagtaagaatatctctgaagttttttaaggttttatggaataaaaaggattaa

SEQ ID NO: 57786 - DNA, 228 bp, Acinetobacter baumannii
atgaatataaaaaatctccctctatattttgcatcatttgtatcaatcttaccccttatgggtattacatttattgtctataaaatgcatgtaattctagagaatcctagtttcaatctacttcctaaaattttggttatatttgtcttagttcttccattttcattttgtttatatatcatctttagtatttatatatttgtaattaaaaaaagggtaaatttatga

SEQ ID NO: 57787 - DNA, 309 bp, Acinetobacter baumannii
atgaaaaaaacaaatgtccatatcttcatttggaaatttgtaattggattattcttttttagttttcttatgacttatgttcactcaaatgctgaaattacaaatttatcaatgttgttttatgggtttaaggtaggtctgtggtttgcaactattgctaccactttgatttgtgtattgctcggtttagcaaagctcttaaacaataaacctgagaaaaatgagcttatttactcatggttttatacatcgacaaaatatacgctagtgtttgtttgcacattagctgttgctatttttgtcgcatag

SEQ ID NO: 57788 - DNA, 396 bp, Acinetobacter baumannii
atgttaaatgaggttactatgagtgcgtaccaaattaagcataattatgatattggtgatcgagggatttttattaaatttcttgatcaacctaaaagtgatgaagttaaaaacttagctatttatttgcaatttaaagcagaactaatacttgatgaaagtatcacactggacaatatgacaattgctcaatttctttggcttcaaggtgcaaaaatattagataataagccagatacatattgtgtaattgatatgtattttgaccgatatgaaagatgtggtgaatggtatcggcatagttttagcgcgtatgatgaaaaatatggtgaacaagcatcaaaatttttaattaataaagcaagaggtaaaattcttgaaggcaatgtaatttag

SEQ ID NO: 57789 - DNA, 2739 bp, Acinetobacter baumannii
atgatggctacaccacgttttaaaggtgcatcggatagatttaaaccgaaggaccagcgtgttgatacacgggatatcatcactaaaatacacgtagctcttcaaacgtcagaagggtcgatgtattttgccataacgatcacaattgtagtttttgtaagtttcttttttcctttattactcataattgcaacgccaattgcaatattgatcacacgtaaatatttaataccccagcttcgctatatcaatatgccttatcgggtgccgaagcatgcaaatatgccagatggatcattcgatggtgtagcgcggaaagtaaatttaaggaaaaaccctgaaaaagcttatgggcagggggtttattattacggtattgaccgtcaaaatcatcagcaaatctggaaaagtgatagtgatgaacgtgtacatgacttgctaattggtacgactggtgctggtaaaactgaaaccattaagatggtcttgacgaatccattacttcagaattctggttttatcttatcggatgcgaaaggtacgactgaacttgtagccgaacttatgtatttactgacgcgattcatgcgtcaagacgattatctagtcacaaacttcattactgctggccgtgatttgctggtacgccaagaagataaaatgacaaacacatttaatcttatgtcgtacacttctgctgcaatgttgagtgaacaactcgtctaccttctcgcggactctgagggttctggcggtgacatgtggaaggatcgtaccattacctatttaacggccacaacacacttattaacttttttaagggatagaggattattattacttgagccaaaaacatatgttgaataccaagagctcaatcaattaatacgagcagcttacggggaagattttgatgataattataaaaattttggtgagatttatattacggccgtttcacctctgcgtgcctaccttaaatcattagcagggtttgatgaaggtaaactttacaaacaaccggaaaaatgtgttgagcagcatggttatgtaatcatgcaatttactcgtgctatttcagatcttagttttaacttcggtcatatctatggaaccaaatctggcgaaattgatatgttcgacgtagttctaaaccgtcgttgcttgatcaatgttttaccggcattgcagaatgcgcccccaacaatccggatgcttggtaaactttttgtaggctctattaagcagatgatggcaggagcgctggggaaccgtatcgatggcatggtacgtaatgtcattgaagcgaaaattacggcttcagcgacatgttttaagattgttctagatgagctggcatatcaaatcgtaaaaggcctgtctgtgatcccagctcaagcacgtggtttgacattcagcttaacgttttcagcgcaagagcttaaagatatcttcgttgccgatgaagctgaaggtgaagcgattgtagctaacaccggtactaaaacttttggacgtatcaactccggtacggaaggtttatcgatgcagcgtttacgtagtctggtggaccaagtgacacagtcagtagtaaacggctacaacattgcttcttcagcaatgggaataaattatcaatcttctacaaacgttaatatcgaaaagcaggaccggattagttatcaggatattgcatctcaacaagaaggtcagttcacgatcgtagttgctaaaaagatcgatggtggtaaagagggtggtgtattcgctattcatgctcaaactatgtttgtacaaccaccgaaactagcaaagatccggttaaatgattttgtttcgattgaaaaagagctgacctattttgatagtaagaaatatgataatgagcttaaaaactttgcttatcagttagcagagaacaagatcctccaaagttgtccaaattataaaaaacatgccattggcgttctaaatcaggtcgatactcaccttgaaagtatcagtaaaatggcgaaattatacgagactgatgttaagtccggtttcttcgcaattatgcgtacaatgcaaaatatgctggattcagttcaaatatcaggctttagtgctcctttttatgaagttgttgattcaacttttgcaaatgagatcgatggagctctagattcaatatttactgaaattaaacttgatactgaagaagtcgatgttgttttaaataaaacaattgatcacattcaggatgaacgttctcaggatctattaacaaaaactagcgaaacaattatcgatgagatcgtcgatcaatacctaaatttagattcaagcgaaatagagacaatagaagctgttaatgcatatatcgaagcacttccaaacgtttacgatgaccaactttatagtgaagagtttgcaacaacggttagagagcatttaaagcagcatgatatctatattcaatcgttagatattccatcattcgaagacttattagaacttgatcaatgtgcggccgaagctcaaaagagtatcttcagtgatgattttgaagaagatgatttattttcagatgctcaagagcgatacaactatgtaaccgacttcattaaatgcaaaaacttagtttttgaagaaaaggaaaaggaaatcgaatctgaagatcaggagatcttgagcaagctggaaaagtatcacgaaattgtatatcgcatgatcagtgcgaagctcaaagataagtaa

SEQ ID NO: 57790 - DNA, 411 bp, Acinetobacter baumannii
atgaattttcacggtaattcactaagtcagattcaagataagatccagatcttaatttttgaaagtgataaagaagagtcctttttaggtgaaacgattcatttttatcagttctggattgaactcttgttttttctgaatcaaaagaaagaggttgagattgatatgagcaaaatacaatcatcagaagaccttcaggatttggcagaattggcctacggtcacttatatacaagcttcatggaaaagtatggcaatgattactaccagacagtaaagccgctgcgtgaatatcttgattcgctgccagcttttaatccggaggatcctaattcttatgaatctactgccactaaagaacaacatgcaaagatcatttgtaaattttcaaataccggtttaaagcaatag

SEQ ID NO: 57791 - DNA, 3273 bp, Acinetobacter baumannii
atggtaagcactgcgactccaaaaagagcagatactagaagtactgcgaataattctaaagcgaacaccaagccaactaaagtgaaaagacgctcttctttagtgtcttcacttgagctgatactcgtatcgcttgcgaaaatgtttaaagcttcagcaaatgactattgtgaaatagaaacggttgatggtcgtttcaatttggtcatgcaagacggtacgatggttacgatcttgaagtatgaaggtattcgttcaacaattgattatcaccaaacatttatgggtgaaattgaccgcttaaataactatctgaagaataatttaaatgcagtaaacagccataagattatggtgttatttagacgtgatgatgcagtaaattcagaattaaatcgtattgttgatatccagaaaaatacagcacgtaaagtcaatattcgtctggattctttcattgatgaaatgcgtgatgtttatgcaccgtatatttacgatgaagagatctattttgctttaatgaccaatccgaaaattttggataaatccgaaattgccggtgattatagacgaactgctgatattgttaagaaatacaatattccaccgatgtcagatgcacagaaccttttacatggcttgtcttcgttaaaatcaattcatgatacattcgtatctggtgtgattagtgaacttgaacatcaagactttaaaggggttgtagataagctagatgtaagtgctgctattacggcaactggccgtatgatgaatccacgctactttgatccaaactttaaagcatttttgccgaatagtggaatgcctattcctttacgttggaaaaaccgtactgatcctcaagatctgtctcacgttttatatcctcgtatttctgatcaattaatgactcagacgattactccattaaacagtaaagataaagccggagacatcactgttccaaaaagtgctgttcaatgcggtgatatggtctatgttccaattcctttaaaaacacctccatcaccaagtttctcaggcacatcttctgtaatgcctacatttattgatttcttcgaccgaatgaatcaacaaacaactgaaacatcagatggttcaagtcgtgcaattccttatgccgtctcatttatgttatctggcgatgggatggcatctatcggtatcaaacgagccgtaacggcggtagtaggctggcaaggagctgcaaaccagcaaattaaggccgctggtgattcattgcagcgttataaagattatggtggttgtgtagtcggtttacaggtttcgctcatgacttgggatgaagctactccaagaggtattgagcgtttacagattcgccgatctaaactttggcgtgctgctcaaaactggggacatgccgttccactagagcgtacaggagatgctgttaaagcttatttaactcattttcctttatctactatgcatcatgcgccactttgcccagcacctttacctgatgcattgcatttacttcctcttgaccggccagcttccccatttaaaaagggtacaatggtacaacgtacaccttgcggaaaattaattcgtatcgagcacttctctgaagagctggcatataactacaccattatttccggtacgatgggttccggtaaatcgatgcgtatgaacgatgagctgtttgaagcttgtttggcggccggtctagaacgtttaccttatatctttatttcagacgttggtgtgtcatcttcaggtctggtttatggcatccagaatgctttagatccttcacgcaaacattggtgcgtgtataagcgaatctcgaagagtgctaaggacgcaattaacccgatggaaactgcggttggtcttcagtatccattatcaaacgagtttgatcagatccgcgcattccttgtaacgcttgttactccagcggaaaacgaacatcctgaacctgagatgagcgcggtaatctctttgattattcgtgaagcatttaaattctttgctactgataatgatcaaagtcagccaaagatctatcaaacaggtcagtcacatgaattagatctacttttacgtgaattaagaatttcattatctgaaacacttccgttgcatgatctggctttattgtgtcatcaacttgctgaacaaattgtttctaatgaagaaatacaacaagttagaaagaataagcttttacgtgcacgtaatttggcacaccgttatgcaatgccaattttgagtgacttaattacggttgccaagaaagaagaaattcagcgtatttatggtgattataaaacctcacacggcgaaaatattcttgatgcagtaacccgttctctttctcaagcagcaaacgattaccctaactttagtacgtttactcaatttgatatttctgacgcgcgtattgcttctgtggatctgcaagacgtaattgttaaaaacaaccgtaaaaataactcattattcttccagatcgtgcgtatgttctataaaaaacgtatcgcatacagtgaggaagacttaacccgtggtgagatacctaaagattatcttgactattacagcaatttagttgcagagctgaaaatcgataaaaaatatatggttttcgatgagatgcacaacattaaatctgacaactttatgattgctgaacttgagcgtgacagtcgtgagatccgtaaatggggtattgcttactacttaagttcacaatatatcagtgactttggcattcttaccaaagctgccagtcgttttgttgtatgttctcaaggttcacctgaagaacgtaaagacattgtgaaatacttacaacttactccagctcaagaaaaacgtttaacttccattgtgggtttacgttcatctggtatgacgtacctttctaaagtgattaatgagcgtaatgatcaatatattcaattcttcacctctatgattgggcctaagcgcctttggttattaacgacgaatccggaagatcaggccgttcgaagcatcatgcgtaaaaaacatgatctggagacatgtattgatatcttggctacagtgcatccacgtggtgtgaaaaccattgtaaataccctgaaagagcaacgtgctcttgaaatcacttcttcagcagctttaagtctggaagaggaagagaatattaagctgggtatttataccgaactggtggatgaggcgattaaaacttataacttcattcaaagccaaaaactcagagtcgcataa

SEQ ID NO: 57792 - DNA, 1008 bp, Acinetobacter baumannii
atgattgaaagtaacctaaatccatttctgtttagagctctgccaaatatagagcatgcttgtattggtaacgcttacgatttaatggccaatcaattcgaacaagcgcctataaatgttcaagaatggtttcacttgcataccggctttatagataccggcttagagcttactgacgatgttgagacggcttttgtaacgatactatcgaaccaagtagtacgtttactggagcaaacacgattgcctttattcagtactccggatcctgaattagaaccatttattgccgatagtatggatgatgagctctgtctggtatctatttcactagaaaatttgacggcgcaacaaatcaagattcgtactttattaggttttggtcctcaactagttatattgaagtcaaatagtgatttttttgacatgcatgggttcgagttggtagtaactgattctttcccttgtacttcatttcgattgtttattgagtcaagtaagcggaatttactatctacattcaacaaaacttttatgcttcagcaaaacactattgcaaatgaacttttaaatggtccagcaatctatagtgatttatttaagcaagcattacgtcaacaaatctgttcaaagctatgtgctgaagatgatttggaaatatcagtacatgacaaggaactttgtgatgatgctggaaatttatattttcatattggctttaatcagacatttaagcatcagttttttcatttagtttctaaaaatattcttatttctccttttcatatcgaacgtctaattggcgaaggaaacgaacttcttgaaacaccggctgctgctcaatcgaatttagaaagtttagttacattcatgttggtgtacatggccatatatgaaaaagaggctctagattcaatcaattcaacaaatattaatgatgatgatgttctaaatatgattatgtctaaattggaacaacattctaataattacccaagttttagttaa

SEQ ID NO: 57793 - DNA, 759 bp, Acinetobacter baumannii
atgataaacaaaagcattcaactcgataccataggtgatactgagaagtttttacatgctttaaaaattgattcttcttcctttttcaaaaagcatgaccatcgttgctatttttgtgattttcgggatcttcgttttcttgaggtccaccatctagatggaaatcacaacaataataatgagtcgaatcttgtgccggcttgtactttatgtcatcgagcgcatcatttagcttgggtgctaacagatcgttcggggttgttaggtatatgtcatgagttggaccagatcagaattaatcatctacaacgttttgttctggttttagctaaccatccggatcctaagctgaaggcattttttatcaagggtgggatgttccagaccgtacttgataatattgcaatggagtattaccgtccggatgttgatgagaagacgattcgtgaaagtatcgattctgaattccctcaagcaacgattgatttaaaagaatcactctttactgaccgtattaatgcaatttatgtgagacagtctctatcatcaaatgatgggttagaacgcctcatttatgcaattaatgaggttaagcagagtaataagacgatagcgccgaatgcgtttttcccgtttgttctgttatataaccaaaatatcttttctaaagagcaaattgattattacctttcattagatgagtttaatccggagaagtggactcagctttttgaagaacaacttcttaaagccggttaa

SEQ ID NO: 57794 - DNA, 420 bp, Acinetobacter baumannii
atgagcaaaatcaataacttacagaaagtaaaaaacgttggtcaagatatctatgcacaacttggcgttgctttcactatgggttcattaggtattactaatgcgattgcggctccagatactaccaatctaactggtggtaatcgtcagggacaagcaacaggtggtgactctgtgggtgacatccgtgatcgtggtattaacgcaatggatgcattcatgtcattccttcaatatgcgggaatgttagttggtttcatcgttttcgtaatgggtgttatcgacttcttaaatatcggtaagccgggtaaagatgccactgctggtaaagctggattgaagctcttgattggtgctgttttagcgggtgctggttacttctactggtctgctgcgaactctgcctctggcaacgtctaa

SEQ ID NO: 57795 - DNA, 579 bp, Acinetobacter baumannii
atggaaactatagatattttgcaaaatatgggtttcttcttcgtagcagctaccgaattgcttcgatacttctttgtagtgtctggtttttacatatttcttcatgcgctggttgattttgttcaaatttcacaaccagctttagcaggacgatttatgactcaaatacgccgaccaagcgcatttggggcatcgatgaaacttattatcgcagcgtttctttgtacgttgggtttaagacttcagttgctagacatcgttgggtcactcattagtgacacaacaccagcaggggtaacttattacgattacacacagtacacaggcagctcttatacagacgagctcaacttagcagtattggtaatcatcggggttttacaattttttggattattagccattggtcgtggtctatggatctggcgcgataatgctgacggcattgccaaattatctgtaggtcaaggaacaatgttcatgataggaggaatgttagcttataaagttgaagttgtgcacgcatttttagcgtcgtggtttggcttagactttttcaaaatcataggcttaacctag

SEQ ID NO: 57796 - DNA, 855 bp, Acinetobacter baumannii
atgtcaaacgaaccacaacaacctaattatgatgacgattttgactatcagacacagacacaacaaccagttgattcgactgatagacgtaataagttcattttaattggcgcagttatcttcgctatttgtgttcttacgttcatgtttatttcaacaaaaatgaaaaaagcaccaccgaaagatcaaactattgaagctccagctccagatcaaacggcatatcaaccaccgccacaaccagtgcaaatgcagccacaacaaccggttggatattcgcaaaattcaatggtggccgtgccagaaacgatgccaaagtctactgatccagtgaacggtacagtgatggttaaagatatgactggtaaagacgttgatgcttattccgtggacggacaaaacgccattattcaattcaacaatgctaatggtttacagccgatcccattgaatatgccagctccagtagcgccaaatatcaataatcaggcgaataattttaatgagcaacgtgtgattacgttagagcaagaaaattcacagctcaaggctcaaaacaattcactacgtacattggcccaagatcagcaacttaaaattggacagtatcaagcattgattaaaaatgcacgcgcaaacaacggcgcaaatattgtgcaattacgtgaaactaaaaaaggtgttgctttgaataaagcattaccacgtggacaagaagtagtagcgactgtaggcaatcgtgtttggttatctgacggtaagcaatataactcatatggagtaggccaacgtctaccaacgggttatcgcgttcttgatgtaaatgaaatggctggcgaagcttcatttaagtaa

SEQ ID NO: 57797 - DNA, 1632 bp, Acinetobacter baumannii
atgagtgctgaaaataatacaaataaaccagatgacatccagtcttcgcaagagcaattcactggtcaaaatgaagcgactcactcgactcataattccgatcctgaacgcagggatcctttgacgcctgaatatgagacgtttgaagaaaatcagacagcaacttggataccaagaaatgatgcagataatcgcatcaatatgaaatttggtgataagttcaagctctactggcgtgaaaacggtgtgttccgttttatcatcttaactgttggtgcagtaattcttcttatcctatttttcctcatgaagttcatcttcagacaggatgcgccggaacaaattaatccggcaaatattaagatggatgctccgcaaagcaatactaagcaagcggaatatgtatcacaagagcaatatacagctatacgtaaacaagaagaaattctagcaagacaggcggcggctaaaggcgaaagctatacaccacgtaatcttgttattgctccaacagatgctcaaggtcaagtggtattaccttcaacatctaatgctcaatacggcgctatgaacccgcaacaagctggtttaatgaatagtactggccaattaacttatgcaaatccagcagtggcaggacaacaaggtcagatgcaacagcagggaatgcagcaaggccaaccgcaacctcaatacataccagttcaaacacaagattacgtaagtgatgttgctgcgaattatgagcaaaataacaatcaatttgcgaactggtttgatgaagaaagtcaacgccaaatcactgcaaataaagagcaagaacaaacaattaacagttttgttcttaaacagattggtcagatcacgggtgctgagtttgacgctaacggaaatatgattccgaagagcaaagacaaaaaaactaaagccggttcatacgcacaaaaaacctattacacggcgccagcaagcgcagacaattccggaaacggaagtaatacaggtaacggtgcaaacaatgctcaggatgcttcgccgttttccgctaacggaaataatccagtaaacggtaaaaagtccggaaccggaaaagtgttgattccagccggaactcgttcaattgctcgtttattgggtgaagtgaatacagatgacggcaaccaagtctttgcacaagttaccaatggcccattaaaaggccgcaaagtgtttggaacagtttctaagtcaaatgacaatattcaattcaaaattgatcgtgtcttgagtgatggtaagaacaaagaattttctatcgacgccgtgggtcaaacgttgcaaggctcatatggaatggcgacatatatcaaacgtcatactttacagcgttatggtgcattaatcgcaagtggtattgcacaaggttacggtcaggcatatagccaagcttatggccaacaaacttatacaagtggtgcaacagtgattgagactaaggatccatctggtgagcgtattgccggaaacatcattggtcaagttggccaaaatgcaagtcaggaaattcagcaaatcgggcgtaaacaagtgacatatatcactccagtcggcaccgttttctacattttctttaaccaagatgtgactgaataa

SEQ ID NO: 57798 - DNA, 1131 bp, Acinetobacter baumannii
atgcagctaaagtttaaaaatcttgcactgagtatggcgctagtcgttgctggtagttcttatgctgaaccaagccaacaacaatcaggccagcaacagcaagctacggcgcagcaaactgtgccttcttctcaaccacagggtaataaccaatctcaagggaataaccagcaacaaggtcaacagcaagccaataatcaacaggctcaagctgaagcgccttcgtatattggaacacctccaccaaatacgattaatttaggtaatgttcaaacttttggtaattcgttcccaccaccagtacgtgtagcgaaaactaaagatgagattgttgctgaaattttaagtatggaacttaccccgcaacaggttaaaaacatcaaggatctgctcttacgtcaagagcgggatgcttctacaccatatacgacaacggcgcgaccaattgtacgctctgttccaattgatttgagcccagcagctcaaccgccagtcttacggctttctatgggaatgttaaccagtattgtttttagcgatctgagtggtaatccgtgggaaattgaaaaagttacgttcaacaaagaactgtttgcagacgacagaccagaacaagggcagggtcaaggtgaaaaatctgatatttcatctaaaaacacgaacatattttcaattgaacctcttaccgctaccgcttacggaaacgtgacagtacgtttaaaaggtttatcaacaccagtaattttcattttagccactggtcaaaatgaagtggatatgcgtattgatgcgcgactagctgggcgtagtccaacatctgtcaactcttcgttacgcgcaaatatgaatgccactggcgttatgtcgagtattgatagtcagacactactatttctagatggtacgcctccagtagaagcagaacgcattagaacttcagatacaagtgttgaagcttggaattttaacggtcaatacattgttcgtagtaacgatacagtgctttacccaagttataaatcaacagcacgttcaacaggcggcacaagtatttatgtctatccggatcctattaatcaggtaacgattagtagaaacggacaaccgactacagtgtattttaataattaa

SEQ ID NO: 57799 - DNA, 717 bp, Acinetobacter baumannii
atgtctgaacaaaagcagaatcagaacccgaaaactaaacctcgttttccaactacaccagaacaggttaatagtgggttggtcgaaatggccaaaaagaatgatgaacttgaagacaagattaaaagtcaacgtcgtcaattattaggctgcattatcggtattggtgtgttgggtacagcggttgcagtacttggtggcattattggattgatgccaaaagtcgaatactttcagaccgtcaataatgaagtaatttgtaaaatcaatccgaatgacaatcctgcatttactgacgtaaatgttgctgaatttgcttcggaaggtttgctaaatgcctattcacttgattatcagaatgccgacgctgatatcaataacactttacgccgttacttcacagatcgtgggcgtgaaagcttcattactacgctacgtcaatcaggtttgattgaccagatccgtaacaatttcttagtccttagaacttctaagctgcaaacacctgaagtcgctaaaaataatggcattgatagtcgtggcaatcgattctggattgttatgcaaccagttcgcatggactacttcaacggtaaatctcaaccggctgatactcgacaatatatggctgaaattcgtgttgaagttacgccacgtgatgtctataacccgaaaggtttaggtatcgccagtatcgttttacgtgcaaaaaattaa

SEQ ID NO: 57800 - DNA, 294 bp, Acinetobacter baumannii
atgaaagagtcacaacaacaagacattgaactgtcttcttcttcagatgaatacagtacgtgggggaatcctcgcaattctctgaatgtagatgttagaactaaagagttctattcaaatctgcttacgcgcattatcaacttcaagattattgttcttgttgctttgacattagttgtacttgcacaagttgcctatatcgctgttaaaagaaattttgaacagcttgtttttgatgatggttcaagtactccttgtatttataaccctctaactaaaacctttcggcaataa

SEQ ID NO: 57801 - DNA, 192 bp, Acinetobacter baumannii
atgaaatcagtaatgcaattaggcaaaccgaaagctgaaaaaagtatttttctatcccagctactttgtgaatatgaaaatgatcccaccaaatttaagattatatcagctccagtagatacctctcagctaaaccaagtttatagaagtacatgcaacgtcgaggttaagtgtattaagaaatcaaagtag

SEQ ID NO: 57802 - DNA, 327 bp, Acinetobacter baumannii
atgaatatgtcaaacgaatataaaccaatgcttatcaagcacaataagtcacagccacgtattaaaagtatcgaggacagggtatttcaagtctttggcatttttgcgctaattgcttttgggttaacaacgtgggacctctttgcctctggggagctctcagttctaagttttaatatgacttctgaggaaatacatcagttatctgaagcttttatggaagcgctcttttcccgtgtatttatgttggtcatttttattttcttcggtggttttgccctacttaatttaatcaaacttattcaattgtttgattctggcaaataa

SEQ ID NO: 57803 - DNA, 303 bp, Acinetobacter baumannii
atgaaaacagatgatgttattgaacacatcgaaaaacaaaatgtgacagcagtagaattactcgatgagtttgatccgaacttgcaattcaaattcgctaaagcaatgacggcgttaaaacaggttattgatgatgttcggattctttatccagatgcctcttactacattcaagatgatgctttttatctaatgctaggagatagccattctggtgatcataaacagaatgcaaatacaaatttaattgcattgactgataatcataaattggcagggtgtatctctggtggaggattctaa

SEQ ID NO: 57804 - DNA, 327 bp, Acinetobacter baumannii
atgaaaaaactatttatagggctcgtaataatagtaattgcactgatcatcgttactcagtacttcaaagctaggagttacaaagttgaggttgatgataagggttactacatactcaatgaaatgtatgagcatgttaaaaatagtaaggctggagatgagcttgaaatacggcttcacacggcgttggatgatgggattatcactcaggctgaatatacatacctcacggactctgaattgccatcgatgacagttcaagccagtgataaagaatataaagaagccaagctaaaaattttaaaagagtttaaaaaagtttcataa

SEQ ID NO: 57805 - DNA, 333 bp, Acinetobacter baumannii
atgaagatacccctaatcataattgtggttttatgtactttgtattttttaaatctttcattgaaatcaaatatgaaagacattcacaaaaaagagatcagcgataaagcttattttcgtctgagtagcgaatatggctttgttaaggcaagtcatgctggagatgagatgcggtcaaaaatcatcaaagcattatctgatggcataatagatggcaatgaatatgtatctataaccggagaagagcctgactatgatcttagtactgatgctgaaaaagcaacatacaaagaggcaaaacaaaaatttattgatgaatttaaaccttcataa

SEQ ID NO: 57806 - DNA, 1905 bp, Acinetobacter baumannii
atgaaagctggctcggaattagaattcaatgcaaaaaaatatccaaaaagtattaaaggcttggagacacgtgtatttgattattctgagaaaacaataatcagatataccaatgtttggaaaaaactattaaaacaatatgggttagaagatcaagttttggttaatcccgaatatacgttggaaacagtagtaaataatcttatttctgaatatggaaataatgaattgcgaaactctacttttagacactatcgatctgcacttattcatcgtatgggagtgatcttgagtgaacaaaagagggatggtgagaagcttgtagctttgcctaagctggcaaggctttttgaaagtttgaaagctgttgaggcgacagatgataagaaacagccgaaccgttctagtagttcgaagctcaagtactttccaaaagatctttatgaatttgtgttaggcagcagttttaatttgaacaggtctaatttgggattgatgttaaagctgtttatagaagcaaatactatgattggattgaggccagtggagtggcaaagcttaaggttggcatgtgatgttgaagagagatgcttatctcttgtggtcgataatgcaaaaaatactcagggtagagcgaacggcgacataaggattcttaatatgattgagcctgattcaatcaagcttaagaatcaattaagggcaatacttgggtttaagagattgctcgatttagaactggaggcaagagctagaaagttcttaactgaaagaagtagagagactaatgaaacttataaaatctacatcgcaagtaaagagccagacagttttgaatttgagttcattcattggaaaggttcccaaaccgttaactgtatagaagccgtaaactgtataaaacctgtgaatggaactggagaaaccgtaaactggatttctactgaaaacgaacttgagcaaaatattgaagatagaacaaacggcgcattaccttccataaacggaccagataccgtaaacagaatatcgtccggacatggccaggatacgactgacgacaataaagctggaggtggtgaatttaattatgagcgagtgattgaagacggcgctcattcttccgtaaacgggataaataccgtagacagaataaagaccgtagacggaataaataaagttgatggaagtgatcacggcgcattaccttccgcgaacggaccagataccgtaaacggaataaaggccatagacggaaataatacagttgatggaattaacgccgttgccggaataaaggggggtgggacaaatcaagccatttctactgcttctactgcgccagctccagagttgaccgacttcggatttaattcagttgccggtgaaatacagcaaacgggtagaaataccgatcacggaaaaatggctgccttattgggtgcttataacgccgtggtaattgagagttatgttgatcgttatggcacgattcaatatgcactatgtcaaagtgtgatggattcattgcaacgtaaattaaaagatatgagcaatgaattttatgaaaagaaaaagtttggtttacctgaagagttagcttcaaataaagcaaatgctacgatttacagtacacgccatcaagcggtagccaatcggaaaaaatataagtggaaagaagaagaggtcgcaggttggtttgggcatgcaagtgttcaaacggcgtcaagacactatggtgtggctggtaagggttggggtgataaacctatgtttagaacttcaaaatttagtctggaaaaagtcagaatgagagagcaacaacttaatcaaaccaaacagctcactgaagaagatgtattaaattcggttttatcagataaagatttagatgatctgttgtaa

SEQ ID NO: 57807 - DNA, 348 bp, Acinetobacter baumannii
gtggtattgtcaaataatacacaagaaataaatataccagtaatgtcagaaaaccaaaaaaaattattagagaaacaaggatatgatttctcaggaaaacttgaagaaggaaagtggagcttagttagttttgcgtgtattaaaaataatcaagattcttttcttttattaaatcaagctacctctaacaatataaatatgatggatcatagtaaaggatcattgtgggataatccagtattattagatcttaaaggtaatataattaaaaatggaaataaagaaatattaaaaaatagtaaaaaaggaaaagcaatttcagctaatgcagtttatgggaatgagtga

SEQ ID NO: 57808 - DNA, 168 bp, Acinetobacter baumannii
atgaaatgggatgacatcggtgatcagccttgttctgttgcccgtatgctatcagtgattggtgatcgatggacgatgctaatattacgtaatgcttttatgggaattcgtcgttttgatgactttgaaccgtaccgggtttgtcggagacatttttatttaagttag

SEQ ID NO: 57809 - DNA, 450 bp, Acinetobacter baumannii
gtgcaacaaagccatttagcagcggtaaaagacctttacacgaagcaagtggttggctatagcttaaatgagcgcatgagaacacagcttgtttgtaatgcgctaaatatggctattcacaatcaaaaaccaaccaaagaactgattgtgcattcagacagaggaagtcaatattgcagccatgaatatcgaaatatacttgagcaatatggttttcaaggttcaatgagcaagcgcggagactgttacgataatgcaccgattgaaagcttttggggaatactgaaaaatgagttagtgcatcattacaactatcaaaccagagaagaagccaaagcagatattataaaatacattgagttattttataatcatcgaagaattcaaaagggtttgggttttaagacaccaaatcaaatggccgaagacttttataagttggctgcctag

SEQ ID NO: 57810 - DNA, 3147 bp, Acinetobacter baumannii
atgattgcccgtgttattcgtttttcaattgcgaatcgtgtatttgtcctgttagccgctttaattctggctgcttggggaacttgggccgtaaagaatactccggtcgatgcattaccagatttgtctgatgtacaagtaattattcgaactaatttttctggtcaggcaccacaaattgttgaaaatcaggtgacctaccctttaacaacaaccatgttatcggtaccgggtgttaaaactgttcgcggttattctttttttggtgactcatttgtttatgtcatctttgatgaacatactgacctttactgggcccgttctcgtgtattggagtatctaaatcaaattcaagggaaaatgcctgcaaatgcgaaatcttcattgggaccagatgccactggcgttggttgggtttatgaatatgcattagtagacccaacaggacagcatgatctttcggagctgagaagcatacaagactggtttttaaagtatgaactgaagacattacctaacgtggctgaagttgccacaattgggggaatggttaagcaatatcaggttgtcttagacccaagcaagatggctactttaggtgtcacacaaaacaatgtcattgaggcgattcaaaaagctaatcaggaaactggtggttcagttctggaaatggctgaaacggaatatatggtgcgggcttctggttatttaaaaactttagatgattttcgccaaattcctttacgaacaaatagtttcggtgttcctgtttctttaggtgatgttgcaactattcaacttggtccagaaatgcgtcgtggcatcagtgaattgaatgggcaaggtgaaacggttgggggtgtcgtgattttacgagcaggtaaaaatgcacgtgaaacgattactgctgtgaaagcgaagctagctgaattacaacaaagtctaccgaaaggtgtacaagttgttcctgtatatgatcgcagtcaattgattgatagagcagtagaaaatctcagccataaattaattgaagagttcattgtggtggctttagtctgtggactcttcctctggcatttacgttcagcaatggtggctattgtttctttgccgcttgggattttatctgctttcttggtgatgcattatcaagggctaaatgccaatatcatgtcgttgggtggtattgctatcgcgattggcgctatggtcgatgccgcaattgtaatggttgaaaatgcacataagcatatcgaaacttggcaacacgaacatcctgagcaagtcttggaagcacaagtccgttggaacatcattacacgttctgccagtgaggtcgggccaactttatttttctgtctactcatcattaccttatccttcattcctatttttactttacaggcacaagaaggtcgcttgttctcaccactggcatttactaaaacctatgcaatggcagcagcagcaggtttatccattaccttgattcccgttttaatgggttattggattcgagggaaattaccttctgaacagcgtaatccactgaaccgttttctgatcaaaatatacagccctatgttggataaggttttagctcatccaaagacaattttacttggtgcattgctaattttccttattagtcttttccctttaacacggttaggtggggagtttctacccaatatggatgaaggtgatttactgtatatgccttcagctttaccgggattgtccgcagcaaaagcttctgagctactccaacagactgatcgaatgattaaaaccgttcctgaagttgcaacagtattcggtaaagctggtcgcgctgagtcagccacagattctgcaccattagaaatgtttgaaaccacgattcagttcaaaccacggtctgaatggcgttcaggtatgacacctgacaaattgataaaagaactagataaggcagtccaagtaccgggtttaacaaacatttgggtgccacctatccgtaaccggattgatatgttggcaactggggtgaaaagtccaatcgggattaaggtttcagcaaatgatctgcaagatattgatcgggtagcacagcaaattgaacaagtggctaaacagatgcccggtgttagttcagctttagctgaacggctcacaggtggtcgatatgttgatgttgatattaaccgtatgcaggctgcgcgatatggtctcaatattaaagatgtacagcaaatcgtctcatcagcgattggcggggaaaatattggtgaaactgttgaaggcttggcacggtatcccattaatgtacgttacccacgagagattcgagattcactggaagccttaagaaatttaccgattctaactgaatctggtcaacaaatagtcttgagtagtgttgcgaatattcaaattacagatgggccgccaatgcttaaaagtgagaatgcccgtccaagtggttgggtctatgtcgatgtacaaggacgtgacttagcttcggttgtacaagatttgaagcaggccatagaccaaaaagtaaaacgttcttctgccatgagcattagctattcaggacagtttgagttcatggagcgtgcgaatgctcgcttaaaagttgttattccaattactttgatgatcatttttctattgctctatttgatttttaggcaagtacaagatgctgttctgattatggcaacactaccttttgccttgattggtggtatttgggctatgtacttgagtgattatcacttttcggttgcgattgctgttggttttattgcacttgctggtgttgccgcagagtttggtgtagtcatgttgttctatttaaagcaagcaattgagcatgcacagcaaagcctatcttcttcaacggcatccttaacagagcaacaactcaatgaggcaattcatacaggggccgtgctacgtgttcgccctaaagcaatgacagtcgctgtcattttggcggggttaatccctattctgttggggactggaacaggttctgaattaatgagtcgtattgctttacctatggttgggggcatgatttcagcccctctcttatctatgttttttatccctgcggcatatcagcttttaatcaaaagaaaactatcaaagaattga

SEQ ID NO: 57811 - DNA, 768 bp, Acinetobacter baumannii
atgaatcaaaaatatcaaattaaactttcacaacttataaaaggctgttttatatatgcaattgcgaattatgctttagcacagcctatagttgtagaaggtgtagtgccaaatgaagcaagtaaacaggctattttaatgaaaatgcagtctgtttatggtgcagatcaagttgttgataaaatacaagttcgaccagttgccgctccaaatggatggagtgactctgtcacacgagtgattacacctgatcttaaaaaagtttctcagggtaagttaagtgttaatggaacccgatttgaactgaccgggaaaatgctaaatccgacagaaatacagccaaccattcagtcttttcagagtttggtacagcctccatatcaattattttcccagctttctgtaaatcaggctgagcagaagattattgatgatgctttaaaaaatcgaattattgaatttgaatctggtagtgcagtattaactgaagctggacaaaaaattcttgatgaaatggctgttgctttaaataaagtgggcgggaaaaaagtcaaaattgtggggcataccgatagttctggtgatgcgaccaaaaacttaaaactcagccaagatcgagctttagcagttaaaaattatttaattagtaagaatattcctgctgatcatttatctaccgaaggtttaggttcatctaagcctgtagcggacaatacttctgcggaaggtagaaagaaaaaccgccgaattgagttcaccgttttatag

SEQ ID NO: 57812 - DNA, 609 bp, Acinetobacter baumannii
ttgggacagaatgcggccatttattgccgagtatcaacgaacgatcagtcctgcgaacgacaggaatatgacctacgtgcctacgccaatcgttgcggctacgatgttgtcggtgtttggaaagaaactgcatcaggcagtaaggatgagagattgcaaagaaaatacttgatgaccatggcgcaatctcgtgaaatcgatgccatcttggtgacggaattgacacgctggggcagaagcaccgtggatctcgtacagtcattacaagatcttgggcatttcggggtatctctggtggcacaaacaggtttgcagtttgacctttccacatctcagggaaagctcatggcttctgtgatgtctgcattagcagagtttgagggagatttactacgtgaacgtgtgcgctctggtgtagcagcggcacaagcgcggggcgttgtgtttggtcgtcgtcctggtcaacgtaccaagtcagatcgtctggcacctaaagtgttggagttggtgtctgctggacactcttatcgacaagtcggtcggctggtcaatctaagcaaaaataccgtgttggatatcgttaaaagaagtcggagtgaaaatccttag

SEQ ID NO: 57813 - DNA, 1692 bp, Acinetobacter baumannii
atgcgtacaacaacaaaagccctacaagggcttaatccaaccgttactattgtttctaaagtattgctctttatctttatcgctttttgtatttttaaagaaaagcaagcaggcgaatatttccagctaatttcagacgtacttttacagaatgcaaaatggtatctcctactcctagctactgcgttactagcttttcttatttatttatgtatgagtcgttatggtcatatacgcttaggaaaagataacgagaagcccgaatatagcaatatcgcatggatctgtatgctcttctcttgcggaatgggtatcggtcttatgttttggtctgtagcagagccaattagtcattatgcaagtaatccttttacaaaaggactttcagatgaatctgctagaatggcaatgcaattgactttcttccactggggattacacccatggggattattttgtttatcagctgtagcattaggatatttcgcttatcgtaaagatttaccattagcttgccgctctatcttacatccatttatcggcgataagatttatgggcccattggcaattttgtagacatcatcactattgtaattactgcttttggagtctcacaagcagtaagtatgggaattttagaacttaatgtgggtttaaatcatagttttggaattaatatcgacgttaagatccaattagttttagtgcttgttttaggtgtcttagcaactctttcgttattatctgcaattagtaaaggatttaaatttattgctgaaggcaatatggttttatcttatttcttagtcattgctgttatctttatcggctcatctagatatatctttaatacattctttgaaggtctaggtgattatttccaaaatattgtaggtatgagtttatggagtgatgcacaaaaagattcaggttggcaaagtgggtggacagcttactactggccatggtggatgacatggggtccttttgtaggtttatttattgcccgtatttctcgtggccgtactatacgcgaagtgattctaggttctcttgctgctccaacattacttacctttatctggattgctgcatttggtggcgctgcactcaaaattgaaaaagccaatcatcaacctgttgctcaagaattagttgttactaccacacagtcgaatactcctgtagagaaaacgactaaacatgagatgacgattgctgaagcaactaaagaagatcctgcacgtgcggtattcgtgttctttgaccatatctcaaccaatcatacaactacactgtttcttagcgcgttactgtgtttattgttatctatccacattattactattgccaactctggagctttagttttatgtttcctagatacaaatggttcaaccaatccctccgtaactattcgcttaatttgggccactattattcccttagtaagcggtggattgctcttagctggtgggctatcagcaattaaaactgcctgtgtaatagctggtttcccaatctcaatcttacttggaataatgtgtgtttctcttatgaagagtttacggcgtgatcctcaggcttgggtcatgatgccagaacatgttcgtcctgaattctgtaaaactgaaacgcagaataaggatgaaaaagcagaacagaaagttccactgattattgaaaattaa

SEQ ID NO: 57814 - DNA, 534 bp, Acinetobacter baumannii
gtgcaacatcaactcgctgtaacaggcaaaaaggcagcacatatttgtgtgctgatctgtggtcatgaaactcgtatctataaagtgatacgttcggaatcggtgattgagcatatcgtcaatgcagagcgttacttttgggagtgtgtggaaaaagacacaccacctgatgtggatgccagtgagtcggcagccaaagctatacagcagctctatccgcaacatattccattaactgttgaagacttgagtcataacgaacaagccaatcaattgtttgctcaactgattcaagaaaagcatcacattgagcagcatcaaaataactttgatgaaattaagcatcaaatccagatgttgatgaaggatgctgaacgagcaacctttgccaatggttcggtgacgtggaagaaatccaaagattcaatcagtttagacagcaaagccttactcaaacttcacccagaaatgcttgagcagtttccgcaaaacaaagcagggacacgacgttttcagatctataccgatgactga

SEQ ID NO: 57815 - DNA, 711 bp, Acinetobacter baumannii
atgaaaaaatataaagatgatccaaactcaaatcttcatgagcagatcgaacttgcttttaagcgtggctctgatattgcaggtgtcttgcacggcatcaggaaaattcatcaaggtagcgttggcaaacgtacctcgttatttcctagtaagaaaaatgttggaatgatacctgttgaaagtaatttggaattagcatatgcaattgaattagagagagatctttctgttgtttcctatcggacacaagcattaaaaatccaattaagtcaatgtgaatcaaattatcctgactttctagttaaatactctgatggccgcgttgaagtccatgaagtaaaggcagataaacttaatttgacagaaaaaaaagccaagaaacatcatcgaattaaaaaaataataaattaccataacatagaatataagatagtcgataaaaatgatgttgtgctgggatttaaccaaagtgcattattatatttttatcaacgcttaggaatgcaatcgtggacagatcagctactagataaagcaataaaagtcattcctactcatggtcgattattatttatagaaatacaaaaaatacttgaaaacaatagtttgcctattgatatagcatactacttaatattttatagatatattcctatgccagtttacctcccagccctagtagaggcagtcagatctcgggggctactatga

SEQ ID NO: 57816 - DNA, 951 bp, Acinetobacter baumannii
atgaatagtgatcaagttattttagataaaattaataaaatcatgcaactagttatagtttcatctgaatttaatgcagcttataaagggattttactttgtgcagaaaaaaataaaacatacgctcaaccatttggttgcttgttattagcaaaaggtggattaggaaaaacaacgctctgccaaactattgtgaaaaagcacccccctatttatcggactgaggagggatttaagaagtccatagtccctgtgttttatatagaagtaccctcaccagctactgtgaaatctgttgcaagttgtatgctaaatgctttgcatgatcctgctcctttttcagggagcacagcgcagatgaattacaaacttgtagcactgttaaaagtatgtgaaacaaggttgatatttatggatgagtttcatcatttgtttgatcttcaaacttcgaccaaacgaatgaatacagtggtatgcaattggataaaaaccttggtgaatgaaactggtatttgcttttgcctagtaggtctacctgagtttgagtcgttattgaagattgacagtcagcttgcacgaagattctcacaaacctttaagctgaatcagcttaaagttacaaaaatagatgaaccaggaacattacatgcattccttcatcaaatttcattaaatatcgaaaaatatttacatattaaatttgaaccttctttaacaagtcaactattagctttacagatttatatagcaacaaatggtcaccatgcctacctaatgcttcttttagaaaattgtcttttccaagttatgaaagaagataaatatacaataacgattgaagagtttattaaagcatgggatgacggtattacttcttatataagtaaaactaaatcaaatccatttcgtctagatatgactagtatttcatcaaaaataagaaacacttag

SEQ ID NO: 57817 - DNA, 846 bp, Acinetobacter baumannii
atgaataatatgaatcaccctttaatccgctaccacggtgggaagtttcggctagcaccttgggtattaagccatttcccaaaccatacttgttatacagaagcatttggtggggcagcaggggtattactccaaaaaccacgagcttatgctgaagtctataacgaccttgatggtgaaatcgtcaatttatttcgagtgctcagaaacgaagagcaccgaaatatattaattgaacaattggtttttactccttattcaagggatgactttcaagaagcatgggaaacatgtgacgatcctattgaaaaagcacgccgtttaattatccgagcacaaatgggtttcggttctgcaggtgctactaaaggaattactggatttaggattgatacaaaaagggcatatggcaccgcccaatcattatggatgacctatccaaatcatttggcaattgttggagagagattatctggtgttcttattgagaatcgtccagcgattcaagtgcttcaagatcatgataattcggaaactcttcactatgtagatccaccctatgttcatgaaacacgttattcaggtgctaagaatggacgtgtttatcgtcatgaaatgtctgaccaagaccatgaagaactcttaaaagttttactcgagctagaaggcaaagtgattgtttctggctatccgagtgaactttacaacgactatttagccaagtggaaacgtgttgaaacaagtgcacgtatctcatcagggcgtgggactgatgtccgcacagaatgcctttggatttctccaaatgcgcaacaccaagatttatttggaggcatccatgtataa

SEQ ID NO: 57818 - DNA, 222 bp, Acinetobacter baumannii
atgcttactcttcatagctactggcggggattaagtgagagtgaacgtatcaagttctgcaaagaagcagaagttacttatggatatatggaaactcacctaatccatggccgtaaaaaaccaagaatggaaaccattcaaaaaatggtagacgcaagcgatcaaaaactaactcacaaaagcttatttgaattctttttaggaacatcaaaaacagcttag

SEQ ID NO: 57819 - DNA, 732 bp, Acinetobacter baumannii
atgaaggaatcggggctatctcgttctgaattcgccgataaaatcgaaatggcttatgggttattgagtcaatatattggcaagaatccaactaagaatattggtgatgaaactgccttaaaaattgaagaagcatttaataaaccgcgtggatatttagaccaatcagctattcaaaatgaatctaaccctcaaaaagactcacttggattcaagcaattcgatatagatgaatttaagaaaaaatataatattcctgatagtgaagatgctgttatcttctctaatttcattgaaaaacctttatttatttcaaaaagatgggttccagttaaggcatatagcaaaatgggaatggacggttattttacagacatgggttatgagggaaatgctggggatggttatgtccctactcatactgcgggggatcgtgcgtatgcaataaaaggtactggagactctatgtacccagctataagaaatggttggtatgtagtttgtgatccagatgcagagttgactccaagcgaatttgttcaggtttgtttaaaagatggaagatgtacaatcaaagagtttattggaatacataacggagttttaaatcttttagctgtaaatggcggagaaagactaacttttgatatggaagaggttgaaagtatcactgctattacagatattgttcctcctagtcagcataaacagcatcatccaaaagcaatttag

SEQ ID NO: 57820 - DNA, 324 bp, Acinetobacter baumannii
atgactaatttcaaaaaacaccctgacggctacaagtcttatttgggtcgtgatgataagggcctctactctgttcgcattggctggcaagtgtacgcatctaatgctaatggctcagttctttacaaagttaaagacggagttaagacgcctttaaatgtggccaagttccaagctgactatccaaaagcttggaatgaacttactcaagaaattgattttcaacgcagaaagcagctcgcgataaagctacttgaaacaaatatccctttccgtgaccgcaagacatataagcagaagcgtggcttcaccggctcaagatga

SEQ ID NO: 57821 - DNA, 861 bp, Acinetobacter baumannii
atgaaaagtctggcttttattcatcgtaacgatactcgctttgcggtcggtgatttttatccagttctttctgttttttcctaccatgagttaggcaataccctctcacccttcttactacttgaccatttaggtcccggcaaaattgcaccttctatgaaacgtagaggagttaatgatcatccccatcgtggattcgaaacggtaacacttgtttatgcaggtgaactggaacataaagattcatctggtggaggtggatttataagtgctggcgatgtgcaatggatgaccgcagcctctggtgtgattcatcgggaattgtttagtgaagagtattctcgatctggtggtccctttgaaatgattcaactttgggtcaatttaccagcagcaaataaaatgaactctccgcgctatcaaagtttaaagaaagctgaaataccgatggtgaaactggaaaatgaagctggatttgtacatattattgcagggcagtttaaccatgttataggtcctgcacttactcacactcctattaccgtactagatgtagagcttcaggctggtcagcaagccgccttccctgctcaatctggtgaaacagctttagtttatttacgttcaggtcgggcacaatttcaaaaagatgaagacgttttagaggaacaaggcctagcagtcatgtcaaaccaaggagagcatttctctattactgccctgcaaagttgtaaattacttattttgacaggacaacccatcacagaaccgattaatggtcatggtccatttgtaatgaatacttatgatgagattttacaagcctatgatgatattaaaaatggaagatttgccaagtaa

SEQ ID NO: 57822 - DNA, 453 bp, Acinetobacter baumannii; identical to SEQ ID NO: 42634

SEQ ID NO: 57823 - DNA, 1230 bp, Acinetobacter baumannii
atgaaacgtgttgtaatcactggtatgggtattaactcatgtatcggtaactctttagaagaagttactcattcacttaaaaatggaatctccgggacacgttttaacccaacttatgctgaactcaattttaaaagtcatgtcagcgctgcggcagaacaagattttgacaatattgatcgtaaattaaaacggttcatgggcgtatgtgcaatgtacgcttataactctgctgttgcagctgttgaacatgctggcttaaaagcagaagatttagcagataatccacgttatggtattgccggtggttcaggcggtggttcaactgcttctgttgtagaaatgactgaacttttagaaactaaaggtgctcgtaaagttggtcctttctttgttccacgtaacatgacaaatacaatcactgcaaacgtgggtgtagcatttaaacttcaaggtattgctcactcaattgcaagtgcttgtgcaacttctgcagatgcaattggttatgcatataaccttatcgctctaggcaaacaagaccttatgcttgctggtggtggtgaagaagatcactggtctcaaagcctattgtttgatgcaatgggtgctttgtgttctaaatacaacgacacacctgaaacagcgtctcgtccatattctaaagaccgtgacggtttcgttattgctggcggtggcggtttcgttgttcttgaatctcttgaacatgctcaagcacgtggtgcaaatattcttgctgaagttgttgcttatgctgcaaacagtgacggtgctgacatggtcgctccaagtggtgaaggtgcaactcgctgtatcttgatggctcttgaagaagcgaaacaacacggcgtagataaaattgactatgtaaatacacatggtacttctacaccagcaggtgacgtgactgagcttaaagcaatggaacgtgcttttggtgaaggtaaagttccacctcttagctcgactaaatctatgactggtcacagcttaggtgctgctggtgttcatgaagcaatttactctgtattaatgcttcaaaatgactttatcgcgccaaacatcaacgtgactgagcttgatgaaggtactgaaggctttgatattgtgcttgaaaaacgtgatacaaaattgaatactgtaatgagtaacagttttggctttggcggtgttaacgcttgcctaattttcaagaagtgggatgcataa

SEQ ID NO: 57824 - DNA, 1326 bp, Acinetobacter baumannii
atgacaaaatttaataataatcaatctgacaatttgttttctcaggtcttcggagtggctaaaaagctcagttctactggtttaaacatcttgcagcaaagtcaaattggtgaggtaagtaaattggttgagccactttcaaatggcaaaacagtagaaggtagtgccagaaataaaagtccgtttgaagtggagcagtatgaaagcccacaacaaatgttacgtgaacatttacctaaagttactcgtcaggtatttggacgccattttagaaaggtcaatggtatcgctacatttatttcacctgactggaatgaaaaaatatcaagctatttatttgattggttgaatgactttagttcgaaaagtacgttaactgaaaaaattttagaagaagcgggggctaaagacttatttgagcttacaaaagatacctcacgctcccaacgtttaagtcaggcacttattgaacaaaataaattgattgccagtattcaaggtgcaattacgggcgtatctggaatggttggagccgccgtagatattccagtttcattagtcctagttttgagaacaatttaccaaacaggtagatcacacggctttgatttaaccgaagcaactgaccaagacgttgttgaatttatttttaaagaagttgatatcagcttaattgcggaaaagcagactttactcttggcactgaaagccttacgaaatatgttggagactcaagacattcaacagttccagcaagtacttggctcttcaaatgatattgaaaccttaaaaagctggttagttgatgaaaatggtgaatttaaatggaactggttaaataaagttccgcaacttgctgtggtaggcaagtttactccagtagctggtgcagtgcttagtgctgtttatagttggaagttacaagaagatgtaggccataaggcacaagctattttcggtgcagcaagacattatttaaatgaacatccaaatgagcatttatcaccattacaggcgtactatgcggcggtaactctaattcaaaaagcgagtccacgtcttttaaatgtgggtgaaaatggtagtgtccatgctacgcagcatcataaaattgaaaatcatgatgtaatttcaaaagtatctgttgtggtcaaatcaaatacttctgaaaaaagcgaagaaaaagttcaagaaaatgttcaccaaggaattgagcatcttgcagagaaacatgtagttgaacatgaacatagtgaacaaaagccagcattagagcctgaaagtgaagaaaatgatgatgttatagaggggcaaaagtactcttaa

SEQ ID NO: 57825 - DNA, 471 bp, Acinetobacter baumannii; identical to SEQ ID NO: 42638

SEQ ID NO: 57826 - DNA, 2139 bp, Acinetobacter baumannii
atggctcgccaaaccccaattactcgttaccgtaacatcggtatctctgcgcacatcgacgcaggtaaaacaactacaactgaacgtattttgttctacacaggtgtatctcacaaaattggtgaagtacacgatggtgcagcaacaatggactggatggaacaagagcaagagcgtggtattacaattacctctgctgcaacaacttgtttctggtctggtatgggtaaccaattcccacaacaccgtatcaacgtaattgatacaccgggacacgttgacttcacaatcgaagttgagcgttctatgcgtgttcttgacggtgcttgcatggtttactgtgcagttggtggtgtacagcctcagtctgaaactgtatggcgtcaggctaacaaatataaagtgcctcgtttagcattcgtgaacaagatggaccgtactggtgcaaacttcttccgtgttgttgaacaaatgaaaacacgtcttggtgcgaatcctgtgccaatcgttgtgccaatcggtgctgaagacacattcactggtgtagttgaccttatcgaaatgaaggcaattatctgggatgaagcttctcaaggtatgaagtttgaatacggcgagattccagctgacctagttgatactgctcaagaatggcgtacaaacatggttgaagctgctgctgaagcttctgaagagttaatggacaagtaccttgaagagggtgatctttctaaagaagacatcatcgcaggtttacgtgctcgtacattagcttctgaaatccaagtaatgctttgtggttctgcattcaagaacaaaggtgttcaacgtatgttggacgctgtaattgaattcttaccatcacctacagaagttaaagcgatcgaaggtatccttgacgataaagacgaaactaaagcgtctcgtgaagcatctgacgaagctccgttctctgcgcttgcgttcaaaatcatgaacgacaaattcgtaggtaacttaacattcgtacgtgtttactctggtgttcttaaacaaggtgatgctgtttataacccagttaaatctaagcgtgaacgtatcggtcgtatcgtgcaaatgcacgcaaacgaacgtcaagatattgatgaaatccgtgcaggtgatatcgcagcgtgtgtaggtcttaaagacgttactactggtgatacattatgtgatgagaaaaacatcattacacttgaacgtatggaattcccagatccagtaattcagttagcggttgaaccaaaaactaaagctgaccaagaaaaaatgtctatcgctttaggccgtttggctaaagaagacccttcattccgtgttcacactgatgaagaatctggtcagacaattattgctggtatgggtgagcttcaccttgacatcatcgttgaccgtatgaagcgtgaattcggtgttgaagcgaatatcggtaaaccaatggttgcttatcgtgaaacgattaagaaaactgttgagcaagaaggtaaattcgtacgtcaaacaggtggtaaaggtaaattcggtcacgtatatgttcgtttagaaccgcttgacgttgaagctgctggtaaagaatacgaattcgctgaagaagttgttggtggtgtagtacctaaagaattcttcggtgcagttgacaaaggtattcaagaacgtatgaagaatggtgtcttggctggttacccagttgtaggcgttaaagctgttctttttgacggttcttaccacgatgtcgactctgacgaattgtcgttcaaaatggctggttcttatgcattccgtgatggtttcatgaaagcagatcctgttcttcttgaacctatcatgaaagttgaagttgagactccagaagactacatgggcgatatcatgggtgacttaaaccgtcgtcgtggtatggttcaaggtatggacgatcttcctggtggaacaaaagcaattaaagcagaagttccacttgctgagatgtttggttacgcgactcaaatgcgttctatgtctcaaggtcgtgcgacatactcaatggaatttgctaaatatgctgaaactccacgtaacgtggctgaaggcatcatcgctaaattccaagctggcggtaaaaaaggtgacgacgagtaa

SEQ ID NO: 57827 - DNA, 150 bp, Acinetobacter baumannii
atgcaagatcaatacgaccgaaccgcattccttcaatcattggcggtgggccacataaatacatatcaaaagcctgctcggccagttgatctttatttaagtgctcgtgaatatagcccgctttaccttgccaagtttccgttgccttag

SEQ ID NO: 57828 - DNA, 1503 bp, Acinetobacter baumannii
atgggtaattttttcttattacaagcatttacggttgtatttgccttatcaattgcgaccaccatatttaataagcgtattttgggctttcctcaagctatcggcgtacctcttgtttctgcgatttttgtcttcattttgcaatggggagccagtcttttaaatggtaatcaattcattactatcaatattcataatattgaggaagcagtacgtcacatcgatttctatgattttttaattaatggcgttatttgctttattctgacatcttcagcacttaaatttaaaatttcagatctaagaagctattggaaacagattagtattttggccactattgccttggtaatctgcgctgtattgtttggtagcttactttacggtttccaattgttagttgggcatcatgtaccaattttggttcttctattattaggtgcagcattaggtgcaacagacccgatcggtattaaaggtgttttaagttcaattcgtgctcctcatcatctcattgttaaattagaaggagaatctttatttaacgatgcgatgtgtattgccttatttatgacattactgaatgttttacagggtgaacatttttcattggttgcgacattagaagctttgctttatgaaattgtggttgctgttggtattgggtgggcatttgggataggtactttacgcttattgcgtggtaaacacgaaatggaatccctgattttaacaactgcattacttgcaagtggagcatatttggtggctctattcgcccatgcatccgcaccgattgcctgcgtaattggtggtttaatcgtcggcaataaatggaaagaaattcgcgaagagcgtgagatcagagaggttaaccatttttggcatacagtagaagggattatcaattcattcttatttaccttaattggccttgagttatttattcttgacttaaactttagcctgattttaggtggaatagttgctttctttattctccatatttctcgttttgccgccaactttatgtcttttgctttcttcccaacaatgcgtaagaccaaaagttacaatggtagtttaactattttatcttggggtggtgttcgaggagggatttcactcgctttaattttggcggtcgcgaatattccggcgctgagtccttatagtagtattctgattggatatacctttattagcgtattgttatctggtgtagtatgtggacttggccttcctgcggtaatgaatgcgttttattacaatcctaatgaagaaacggaagggcttaaaggcttttatcaaaagctatgccataaaatgaatcgccgtggctttcaatatatagttggagaagatgcattaggaagagaaacaattactatctttaacccagatgttattgttgatcaaaaaacagaagacgggatcgcaaccatgcatgatccaaataagttacaagaagtaaaacgtttcgaaagtcccgataatttctaa

SEQ ID NO: 57829 - DNA, 564 bp, Acinetobacter baumannii
atgacctctacaacaaaaaaatttaagctgcatcccaagttcatcgtaaatgccattgagcagcaagccaacggtttacctaaagcgatagtagagttgataatgaactctattgatgcaaatgccacgcaaataaatataaaattatggttaaatgccaaaaaacatcttcagtttgaaattattgatgatggaaaaggttttaccaaaaaatctattgatgaatactttgcaatgtttggtgcacctcatgaagagggtgatgctacatacggaaaatttcgtattggtcgcggacaggtctttaattacgctataaccacatggacaagtaacaactaccaactcaaagtagatatctataagccgctaagagaaaagtcagacgaagaacttgggtttactattactagactcgccaaaaagttcaatggatgcaaaatatccggttatatttatacaaacattacagattcgatgggttctattactgaaataatagaagaaatccaatcaattattaaatactgtctcttatacacatctgacgctgccgacgaatag

SEQ ID NO: 57830 - DNA, 213 bp, Acinetobacter baumannii
atgccaattactagaaaaatttaccgtaagggtgagcagcctatgccattgaccgctgaacagttggcagaaatcaatgcgctcaagggtttgaatgacgcggacattgaccacagtgatgatcaggcgaccaaagcaggttggatacaggcgagtcttgagaagattaagagtacgccttttgcgctagagcctaagcacctgacacactag

SEQ ID NO: 57831 - DNA, 858 bp, Acinetobacter baumannii
ttgatcaatcttgaacgcgtagttacttttctggctgtcgtgaatcggggtggctttcgtgaagcagccaagcacacagggctctcacagtcagctgtgactcagcatgttaggcgcctagaagagtcgctgggtgtcaatctgattgtgcgaaacaacgcaggtagtacgctcacagaggaaggcaaagtgtttttgccttatgcggaaaacctagtgcgcaccggatccagagcgtgcgcattattcgacacaaatcgtcttgtaataggcgcgagctcgaatatcggcatctatgtattgccaccgcacttgaggcggttcaaggaaacagcaacttgcaattttgatgtagtcattggcgataatcttaccattgtgaaaaaactggaaaactttgaagtcgatgtggccattatggaatggtgggatcaacgagagggatttgatgcatgcgtttggcgaagtgaagcactagctgtgattgtgccggtggagcatccgtgggccaaattggcgagtattccattagattggctgaagggagagaaattgctggggggagaaacaagtagcggcacagggcgtctgttacagcattttttcggaagcgtggcagattctattggtgtatctatgcagcttggaagcacagaggcggttaaacgggcagtacaggcaggcttgggtatttcattggtgatctcttcgtctgtggtcgatgagtgcgagagtggtcgactaagaagcgttaaaattgaagggatcaccccctacaaaaatctttacgttatttgtcgtggcaatatgcttgaaaatacaccatcggcacatttcaaaaaatttctacttcagtag

SEQ ID NO: 57832 - DNA, 1008 bp, Acinetobacter baumannii
atgaaacaaaaaatagttcttacccactgggttcatcctgaaattatcgattatttacaatctgttgcggatgtcgttcccaacatgacccgcgatactatgtcgcgcgcagaattgctggagagagcaaaggatgctgacgcactgatggtattcatgcctgacagtatcgatgatgattttcttgcgtcctgccctaaattgaagattgtaagtgcagcactcaaaggctatgacaactttgatgtcgatgcttgtacccgccgtggtatttggttcagcatcgtgccggaccttctgaccatcccaacggcggagctgacaattggattgcttcttggcctgactcgccatctggccgagggggatcgccgtatccgaactcacggatttaacgggtggagaccggaactatacggaacgggtttaacaggacgcacactcggaatcatcggtatgggtgcggtcgggcgagcgattgcgaagcgcttatcgagttttgatatgcgggtgctttattgcgatgacatcgccttgaatcaagagcaggaaaaggcctggaatgcacgacaggtgagtctcgatgaattattaagtagcagtgactttgttgtacctatgctgccaatgacgccgcaaactttgcacttattgaatgcagaaacaattggcacaatgcgcacaggaagctacttgatcaatgcgtgtcgtggttcagttgtcgatgaattagctgttgccgaagcacttgaatctggaaaattggcgggttatgcggcagatgttttcgaattggaagagtggatccgtgttgataggccaacagctattccgcaggagttactgaccaatacagcgcaaacatttttcaccccacatttggggtctgcggtcgacgacgtgcgtttcgaaatcgagcaactagcagccaataatatcttacaggcactgaccggccaaaggccatccgatgctatcaataatccaattttggaaggcgttaattga

SEQ ID NO: 57833 - DNA, 798 bp, Acinetobacter baumannii
atgaatacgaacttcgaagccatattgtcagagcagcgccaaagctggaatcgagtagttaggtatgtgatattgattttagctattgtcgtcggatgttggtattacgttggtctatttgatggtgagcgtttaggcgaaggcgtgccaagtcttgttagtctcattggtgagatgttccctcccaactttagtgagtggagagcatgggtcaagccagtgctcgataccttagccatgagtattgctggaaccgccatcgctgtgcttttgtccgtgcccttgggtattttggctgcacgcaataccagtccacatccagcggtctatcaggctgcgcgtgctctgttaaatgtgttgagatctgttcctgagcttattatgggtatagttttcgtggcagctgtcggctttggtgcactgccgggtgtgttggcattaggcctgcactcaatcggcatgatcgctaagttttttgcggaagcgattgagcatacagatcaagcaccagttgaagctgcgcaggccgcaggttgcagcccgctacaagtgatatttcatggcatttttccgcaagtattaccgcaaatggccgacaccgcgatttatcggtgggaatacaattttcgcgcctcaacggtgatgggaatggtcggtgccggcggtataggtttcgagttgataggatcgctgcgtcttatgcaataccaagaagtatccgcgatattgctggtcattcttgggatggtgacgctagttgatacattcagttcattcttgcgtcgcaagttcaagtag

SEQ ID NO: 57834 - DNA, 873 bp, Acinetobacter baumannii
atgaaaaagctattcgaaaagctattcgctgtactggctctaatatcgtttagcctcttaggtagtgtcacatatgccgcacctaatcctgaccccggcacattaaaagttgctctcttgcctgatgaaaatgcatcaaccgtcattaaaaataataagcctctagagatgtatcttgaaaaagctctgggcaaaaagattgagcttattgttaccactgactattcatcaatgattgaaggaatgcggttcggtcgtattgatcttgcatattttgggcccttgtcttatgtattggccaaacagaaaagtaagattgaaccatttgcagcaatgcaacaaaaaggcacaacaacttatcagtcagtgctaattgtgaataaggcggcgggcatcaacaacatcacagatatcaagaaaaaagccgttgcctggggtgacaaggcctctacatccagccacctgatccccaaatcaatgcttgctgataaaggattatttgccggaaaggattacaaggagcatttcgtaggcgctcacgatgcagtggcgatggcagttcagaatggacacgcgcaggccggtggtctgagcaagcccattttcaaatcgctcgttcagagcggcttgatcgatctaaacaaagtgaaggtcttagtggagtcaaaaccgtttcctcagtacccatggactatgcgctctaacttaaaaccagagctaaaagtaaaaattcgtgctgccttcctcgatttgaaagatccgaacgtgttgaaaccattcaaggctgatggattcgggcctgtaacagataaggattacgatgtcgtgcgtgatttaggtagtttgctaaagctagatttttccaagttctaa

SEQ ID NO: 57835 - DNA, 732 bp, Acinetobacter baumannii
atgattcaacttcaaaatattaccgtccagtacggacaaatgattgcgttgcatccaacttcactcacgtttcaagagggacagttttcagtgttgctcggtgcctctggtgcaggcaaatcaacaatgctccgttgtcttaacctgatgcaaaaacccactagcggcaatataaacattacaatgttaggttcattgttggacaaaaaaatattgcaagagcatcgtcggcgtactggcatgatattccagcagcatcaattaattggtcgactttctgttttgcaaaatgtgctaatgggtagactaggttatcactcgacgcttcgtactctttttcctctatcgaaggaggatcaatctattggattacacagccttgaccgcgttgggctacttcacaaagcactctcacgagtggatgagttaagtggcggtcagcaacaacgcgtgggtatagctcgggcattagcgcagcgaccggcacttgttttggcagacgagcctgtggcaagccttgatccagcaaccgccaacaaagtcttggcgctcttacaccagatatgcaaagaagacggcataaccgctgtagtcagcctacatcaagtcgatctcgctaaacgctatgctgaccgaatcgtcggtctggctcatggcaaggttgtgttcgatgcaataccagcggctctgacacaaacgcatgtaactgaactctatgaacaaaaagcgtaa

SEQ ID NO: 57836 - DNA, 231 bp, Acinetobacter baumannii; identical to SEQ ID NO: 47478

SEQ ID NO: 57837 - DNA, 1458 bp, Acinetobacter baumannii
atgaataaacatttattagcaaaaatcactcttttaggtgctgcacaactatttacgtttcatacggcatttgcagatatacctctgacacctgctcaattcgcaaaagcgaaaacagaaaattttgataaaaaagtgattctgtccaacttaaataaaccacatgctttgttatggggaccagataatcaaatttggttaaccgaacgtgcaactggcaaaattttaagagtaaatcctgaatctggtagcgcaaaaacagtatttcaggttcctgaaattgtgagtgatgctgatgggcaaaatggtttgttaggctttgcttttcattctgactttaaacataacccttatatctatatttcaggcacttttaaaaatccaaaatctacagataaagagttacctaatcagacgattattcgtagatatacctataacaaaactacagatacatttgaaaagcctattgatttgattgcaggtttaccgtcatcgaaagaccatcagtctggtcgtctcgtcattggttcagaccaaaaaatctactatacgattggtgaccaaggccgtaatcagttagcttatctgttcttaccaaatcaggcacagcatactccgactcagcaagagctcaatagtaaagactaccatacatatatgggtaaagtattacgcttaaatctggacggcagtattcctaaagacaacccaagctttaacggagtagtgagtcatatctacactttagggcaccgtaatccacaaggtttagcatttgctccaaatggaaagcttttacaatctgagcaagggccaaattctgatgatgaaattaaccttatattaaaaggtggtaactatggctggccaaatgtagctggttataaagatgacagtggttatgcctatgcaaactattcggcagcaaccaataaatcacaaattaaagatttagctcaaaatgggataaaagtagcaacaggtgttcctgtgactaaagagtctgaatggactggtaaaaactttgtgccgcctttgaaaactttatatacggtacaagatacctataactataatgaccctacttgtggtgagatggcatatatttgctggccaacggttgctccgtcatcggcatatgtatatacgggaggcaaaaaagcgattccagggtgggaaaatacattattggtcccatctttaaaacgtggggtgattttccgtattaaattggatccgacatatagcacgactttggatgatgctatcccaatgtttaaaagtaataaccgttatcgtgatgtcatcgctagtccagaaggtaataccttatatgtgctgactgatacagcggggaatgtacaaaaagatgatggttcagtcactcatactttagagaatcctggttctctcattaaatgtaagcgtccgctgaatcccatacctattttttaa

SEQ ID NO: 57838 - DNA, 804 bp, Acinetobacter baumannii; identical to SEQ ID NO: 19906

SEQ ID NO: 57839 - DNA, 1107 bp, Acinetobacter baumannii
atgaaaatttctgagatacatctctatcaatatgatttacctgttgctaatgccccttacaaaatgggacatgctgaactctatagcttatctacaatactagtgaaagtcgttgctgataatggattatatggatggggggagacttgcccgttgggttcaacttatgctgagtcttatccggaaggagctttagctgctttaagttttatcgcaaaagggcttattggcacagagatattacccattaatcttcatcatcgtatggatagtttacttaatgggcataattatgcaaaagcagcatttgatatcgcagcccatgatcttttaggtaaacatctcaatttaagtgtatcggatcttttaggtggtgctcttacagatcgggtaccttcctattatgctcttgtaatacgcaaaccagaggagactgctcaacaagctgcagaaaaatgtgctgaaggctatcctcgactacaaattaaagtaggaggccgaacagttgaagaggatgttgagacaattcaacaagtttggcaggctatacgtggtaaaaatgttcggcttgcagttgatggcaatcgctgtttaacaagtcgtgatgctattcacttaagtcaggcgtgtgccaatgtaccatttattttagagcaaccttgtaacacagtggaggagttacaaaggattcgctctcaaatcaaccacgctttgtatatggatgaaaacagcaccagtttaaatattgccgtaaatgcagttagttctaatttagtagatggctttggaatgaaagttactagaattggcgggttacatcgaatgcgaacattcagagatatatgcgaagcttatagcctcccccacacttgtgatgatgcatggggtggcgacattcttgcagctgcatgtacacatattggagcaactgttagtcctaaattacttgaaggtgtatggattgctgacccctatattgcccagcactatgatgaagaaaatggtccacgtgttcaaaacggctatattcaagttcccaaaggtcctggcctaggtattgatccagacgtaactctctttggccatccagtaaattcattttcatga

SEQ ID NO: 57840 - DNA, 1659 bp, Acinetobacter baumannii
ttggttgattctaatccaattaaacttactgaaaatcagaaaatttcagtaaaagtaaaatcctcaaaaggtgattttttcaatacagatatttctttggaatatggtagaccccctagtattcaaataatgcttgagggcgaaaaagaactcacagctcacccctatagagatgaccatagaggtgattattatatgtctgatttttatgatcattcttttactaaccatgctctatttaaatatttattttttggaaaagctaataaagatcaaattaaaaaagtatattttacttttccagagctatcatcgtactttcatcaagaactagactatgccattgataatgaagtaaatatttcagggaacttgaaaattgagccattagaagtaaggataaataacttaggtttatctgtaaaaattcatcaaggatataaactaaaatcgaatgatgaccacactggtttttcatttaagaatatcatgtacttctcatttgaatctgatacagctttatcattccaagatattgaaaatttaatgtatgagtcgataagtttactaacttgggtaactggttatcctatttctccagactctatagaggtgtctgacggagataaatatgcttatctttatttacctgtagtcaaaaaattaaaaaaatatgatgtaagtttccctaaaagcttcatgaataaaaatttctttcgagaatattttagtactatttgtattaactacttcgaaaaaaaagaaatttttaagggcatttggtcaagaacgcttcctttatttgatttcactggtgtacttgaatatgaagttatgctttatgcaagtattttagataaatatttttcttatcaagttgataaatttcataaagttacatctgaaaattatagtaaatacatatcaaaagtagatcaatttttcaaagaaaatgatgcttttaaagaaatacttgctggtactgatttagcagataaattagaagctaaagcattattcccaaagaaaaaaagattaacattcaaagaaaaaaaggaaatttattttaatcatattggagaagaacggctcaaaatttttattaacagtgatgatttcaaaaatattaaagatattagagatagagctgctcatggggcaccagagaaattagatacagatatagtttataaatacctatggaaagttaaaattttaacgatgtactttatatatatggacttaggtattaaagaaaatgatttttttaagatgatctctataacatttcatccaattgctttgaactgtgaaatagataagcactttttagatatagcaacggataagactattcttattgaattagaacaggctgaaaaagaaaaattaaaaaatctgagtacaaaggtaaatgttttttataaaaaggagaatagctattttttcaatccagaattcagtgaaatggcgagtaattatttttcagaagatgtgattaccgaaattgacccatcaagaatttacagtcatgaaaaatatattcaatctttactcacccaaagagagattgatttaaaaacccgatattaccccgtgatatatttacaagaagatgactctaaaattatgattaataatgttattattattttttag

SEQ ID NO: 57841 - DNA, 696 bp, Acinetobacter baumannii
atgaaaaataaagaatcatttatagttacattaattgtaatttacctagctttagtttttctcattggtatagctgtatatgctttgataatatatttcaaattagagattacattagctactaatattcttatatggacagcaactctttttgcaactatagcgttgttgtatacatttaatacttggagagatcagaaaggtagtgaagttttatcaaaattatcagaaaatatgttttttgatatgactaatatatttgaaataaataaaaatattatagatgaacatagagaaataatactatccaaactattaaaaaatatagatatatcaataaatgatattgatacaatacaaacaaaaaaattagatgatatgataaaaaatttgcttcataatggttatttaatctacaaatacacccaagatgaaaaatttaaaaaaaatatgattgagttccacgatgcttatatagagtaccaagtttttagaaaagaaatatatttaggtatgaaaactattgaacgaacagaatacagctctaaatcaattgcaatagataaagacaacaaagatgaatacttagaccatcaaaataaactaacagatttaggagcaaatttaaataaaacaggttctaaattatcagaaaatttattaatatatatatttcataataataaaaaaatataa

SEQ ID NO: 57842 - DNA, 183 bp, Acinetobacter baumannii
atgcaaaagcaaaacttacagcatgctttagttgttactcatggcggtgtgattaagctattggcttgtttagccagacaacagcctctagatgacttacttaaaatgccagcagagcttggaaaattatattcactcgaattttctgaaacagatggtcaagtaacttttaagttaagatag

SEQ ID NO: 57843 - DNA, 1104 bp, Acinetobacter baumannii
atgaatgttaaaccactcgattatttagcaacaattgaacatatatttgagcatgttaaacgaacgttttatcaaacagttgcagacacaaaatcaataaataaaggccgcctgaatgcaccaataacagaatataagtggcatccatgtgtatttttaccaacaaacttatggcaagaagtcttaagaccaaccatcatggccaaactatatgaacaagtgcaaataaataaaactaaagatccatttgtaatcgatgcatatttcgcaaattttgttgcagcatttacatggagatacactaaaagtatttatcgttttgatgaatacacgtttgaatgtttgattaaacattcagcaggaaaatatcttgatcatcaacttttgactaatttaccagaaggttgtatctacattgatctagcaacacctttaaatattgcagatcataaggtttatggtgtgtatgcaatcctcgatctatcttcgaacagcatagatactttaaagaatactctacctgaccaactcattattacattagacactcataacccatttgaagaaaataattttgctctgctcaagcctctccctactatcgtttttgacataaaacgttctggcaaggtgagtcaacaaatcaagttcaaatggggtattaatctggaaagtccagaagaactcaatgaacatattgctccagtaatttcgctaatttcttcaatatgtacagatgaaatagctattgataattttactaagaactctactcgacagaatgtaactaaaaaaccctcatttaaggatctagaggccgcttattggcagaaaggtgaatatagagtaaatgcaccagctaatcataaaatgtggcgaattggcgtcaaatacggagtagattatcgagctttcgtagcacgtcagcaaaaatatgaatccaaaactgaatatagaataacaggtgttcactggacagcttatattcaagattatgaaattcgccttaaatttatgcccccacgcatgaactcaccggtcgaaatcgacgaacaaattaataatttctttgatgagctcaatgcctctaattcattaaaataa

SEQ ID NO: 57844 - DNA, 993 bp, Acinetobacter baumannii
atgaatgcacaggtgagtgttaccgatctatttagcagagaagaaatacaagagcttacagaaccttcagatgcatatggcgcttgggccgttgctagcacatgggctgttattggaggaacatttgccagcttaattatgatgtgggattacttaccgagttgggggaaattattagcatgtatgcttgctttagctgttttagctggccgtcagttatgcctcgcaattttaatgcacgatgcatcccataaaagtttattcaaaaataagaaaataaatgatttcgttggagagtggctatgtgcccgcccaatctggaacgacctacaaaaatatcgtgtacaccatgttcgtcatcacgcaaaaacatctacaccggatgacccagatctttctttagttgcaggctttcctgtcagtaaaaaatctcttactcgtaaattcttacgcgacttaaccggtataacaggattaaagtttagcttaggccgtgtgttgatggaccttgatgtcatgaaatggactgtagccaatgatcaaatctggttagaccgtagtgataaaaatttcgttgactatgcaaagagtattgcaaaaaacagtacaggcgctattgcaaccaacctattactttatggtgttttaaaagcatgtggtcaacaacgtttttattggttatggcctttggcttatttgactccatttccattatttttaagaatccgttcaatggcagaacatgcaggtatgcaaaccagcaatactgctttaactaacactcgtaccacacgtgcaagttggattgcgagaagctttgtggcccctattcatgtcaattaccacatggaacatcatttaatggcgtctgttccatattttaaattaccgcgtatgcacaaaatattaagagaacgtgggcatgtgcccactccaccgagctattttgaagtaattcatacactttcatcaaaacaagagttaacaaattaa

SEQ ID NO: 57845 - DNA, 321 bp, Acinetobacter baumannii
atgacaacacttgtttataacgaaacaaaaagaaataactatgatcattttttagatttattagatcaaactcatatcaatcgttatctagatttcaacattagctttgaatataaaaaactggcagaacaaatgctgtcagattgtgaatttatggactcatgttcgcttgaagaaaagcagaagttattcaatgaaattaagataaagcatctttatcaaggacaagtgctatattcaatgctggggttccgagtttgggcttgcatccattcttatatttttataaggaccagcgttttcagattacttcctttctag

SEQ ID NO: 57846 - DNA, 621 bp, Acinetobacter baumannii
atgcagattcatcatcgaacgattagtttcaaggacttcacccgggtacgccgtagtattgagttcttgatcgccaatttccccgtggcgaccaccgaaacggtcggcaagttcggcagtggtatcaagggctatgatcggctacaaattgtctataaagcctttatttccttaagcttggaaatggaggttgattttgatgatgaggaatgcctgaatacatttattctgtccatgtctaaggccttcaagtacataaactttaatgagttttatgttgaaagatttttggggaattatgatgatacggtcgtgaagcatgtggtgggatatgtggagtcgattagtccaatctcgcgctcaaagcccaaatccttttcagcattaaccaaaagtttacttaagcacaattttctggtgggtaatcataacttttgcctcatttgtgatggattaatctatcttgattctattgaatcggatcataaaattgccaaagccgttggtaggcaaggggtgctagagaatggtctgctggttcatccaatctgtaatagaatgaaatcagatctcagcttagaagagatcagagcggatttgtttggtgagttattgtattaa

SEQ ID NO: 57847 - DNA, 186 bp, Acinetobacter baumannii
atgaaaaaagttattggtatgagaaatagccgtactgaagcctttaaaatcgtaaaagcttcatttgccgtagataatttggttgtagataataaaggcttacaagcaattaatgactatgtgacgggttctaagacatttgaacaagccagaaatacactcgttgaaatgtaccgtgtacgataa

SEQ ID NO: 57848 - DNA, 648 bp, Acinetobacter baumannii
atgttttttgatgatgcactacattattatctgacggaagaagatttttatgatgatccattctgtgatgaaaatggtgttttgatcaacaatcttggtatttctaataccaaagacctgaatgaggcagagaaagcgctaagtgccttacaaaatacaaggttacaggaaaatatctctgtttttctaggcaattttgatttacagcacctacaaaatatacatcatcaattatttatggatgtctacccatgggctggccaattaagacgcgtgaatacctataaaggtgaatgtatctttctccgttacaatagcatagctcctttatcagatctgctgttttcatgcctcaataataactttaaccatttgattaataataaagaaaatatagatttggtctgtagttttttagccagattttttgttgttttaaattatattcatccatttcgagagggtaatggtcgctcacaacgtttcatgctaggccagatactatttaagttaggttatacgatcgattggaccactgtgagttcagatgctatgaatcaagcagtgatcgcaggatggaaagaaggtaactttaagctcactgaaaaaatgattaaacttaatattcaaagattagaagtaagttga

SEQ ID NO: 57849 - DNA, 3072 bp, Acinetobacter baumannii
ttggataagaaaaaaacagctgagttagtggaaaaccaactagattcttcaattgtgtttgcaaatgtaaaagatcagtatgaacttggacgagataatgaaaattattatcaaaaaatagatattaccaagccaaataatattaatgcaaaaaatgtgaatttaattgctaatgatcaaagtgggttaaatttaattctacaagggactgacattaaagcagctgatacagttaatattgttggaagtggaaatatagatttccgccataatgtggataatatctatacaaaaacacaacaaactacgacaaaagaatctttatttgggttgaaaaaatctagtacaacagaaaccagaatattagagggggttattggtaaaagtgatgtacttaaagcaaataaaataaatattgagtctctgggtgggagtatatcattatatggtacgcagattcaggcacctaaagatcaggtgaaattaaaagcagctaaagatatttatatggtcactttccaagatcaaataaatgaagtaaatactataaaaaaagatgctggttttttagggctcgaatatagagattcaaattcagttggttcaaagattgttaataatcaaatacctactgtaataacaggacgttatattgcttcttcatctggtggaagtacctatttagaaggtacacagtttaactttactgagggagtttcaattaaagtaggtgatggtcctaatccttctgaagatgcaaaattggttattaattcggccaaaggtttgtattcaaatagtcaagataataataaaaagaacactttctggcaaagtatggaaagtaggggtacagttgaagaacttgctaatttacctaaatttaatggtccggttaataatattaaaattgatggtaatttatcggtacaagttcctattaaacaaggggaaaattcagaagttatcgatattattaataacttatcgaaagaaaaaggatatgagtacttaaagactttaattgataataaagataaaaatgtaaactggactgcccttgagttaactaaaaaaaattgggactataagcagcaaggcttaacgccagcaggcgctgcaatattaactattattgttacagctttaacagctggtgcagggtcttctgccgcaggagcacttggtttctcaaccactggagtggcttcctcaatggctcaagctgcaattacatctctttcaactcaagcaagtattagtttaatcaataatggaggtaacgttgctgccacattaagagaattgggaagtgaccaatcaatacgtaatttagttgcttctattgctacagcgggcgcgttaaaaagtatatctgtacaatttaatttaccggaaactagtaccgcatttaatgaccgtttatatgtagcatttgttaatagtactagctcatctattattaattccgcaatcaatggtggtagcctgagtgataatcttgaagcatcacttttagccggtcttagtaatagtttacaggctgaatttgctcagaatattggcttaagtttagatataaaagatcctacggttatagattctctattacataagattgctcatattgcatcaggttgcgtaacgggagctattcaaaaacaatgtgaagctggagcaattggtgctggtgttggtgagattgttgcaggaatgatagagcaacctaataaagatgctactgtagaagacataagtaaatatcaagaaaaagtcattaatacttctaaattaatatcaggcagtttagctagtttagctggttatgatgctggttatgcagcatcatcagcttctttagcagttagtaataattacttaacttcaaaaaattatagagatttaaaaacaaattatgatacctgtattaaaggaggaggaagtgtagggaaatgtagtggtgcaatgatagctgctgcagaaactataagtaaaacaaatgatacgcgcctgagagctgattgtgtgaatgctacaagtaatgcatgtattaatggtataaaagacctttttgaaggtgaacgaactcgaaatgaattaaataaagtaaataaaattttttataattctgagtatagtaaatttaatagttggccaaaatttaatagcctttcaaaagcagatactaatattagagatctgggtagtttatattctacttttgaaaaaatagatttttggcaaaaaacaaattgtaatggtatttcaaccgcagcctgtcaaactaaatataaacaatatttagatgcgaatgaggctacacgtgttcaaatagcgggaggcttggatagagtcaaatctatgccagtgattggaaatacagtgaccgtgggtgatgcggtcattactttaatcacaggcacaagcttgagtacgaatgatccgagccgtttagttgctctggctgaaatagcttctgttggcattacacgttatattccgcaagttggacctgttgttcatgttgcacaacctaaatatgctgggcagcgttatactacagccagtttaacgagcaacaaagatgccacaatcaatccagatactatccgtgcagctttggtaaataatagaagttggctaaaagcgagttatgttcctgaaaaggtatcaattgctgtagcaaaagttgaaacaaagtctggtacagacaatatacttgctgtgagtggacctgcctggaatggaaatgctccaactgatgtggttattaatggcgtcaagtataaggtggttaccacggactctcatagtgttcagccaattacatatacggtagataaaaatggtaaacctataactaataataaccatgctgaagcaaagctatttagttatatcaaagattcttactcatctactccatcaaaagttacaatgtcaattcaaaatacggcaagtgagcctgctggcatgtgtaatggatgtttatttagcagtggaaaatattttactaatgaagttccttttatgaggttatcaatatttcatggcactacaggtaaaaattaa

SEQ ID NO: 57850 - DNA, 192 bp, Acinetobacter baumannii
atgaaaaaattttgtttggtacttataccagcacttatcgctggttgttcctccccagcaactgaagctgaaattcgtgccgccgtgcaagaatgtgaagctgttatgcatgatattgaaaatcagattcaaccggctttgttgcacaaacctatctgtaaaggctttttcagcgatataattttcaaatga

SEQ ID NO: 57851 - DNA, 750 bp, Acinetobacter baumannii
atgcagcagaatgatttttcagtaaatgaggaaagaatttcttttgctgaaatgatgggggctgatttgaatattcccttcaaaccatctcagctcgctgagcttttaatacaacttaatacattaagggttgaagtaaataacttgcctgccaaaatttttcaaaggcaatattcagatattttaattgcttctgtgcaaatgcttggtggattggagtttattcagaaccctacacttgcgaaaagtgcaaaggctatcattgcagtcaaagctcgttacgacaagcatttatacccaagacgtgaaattatatatcgtattttacgggaacaagtggcacgtcatggtaaatggaagactttaaatcaagcagttaactctgtgcttgttgatctggacaaagcttttgaggaatacgatattcagtggattaagtctgaactcgtgcttaagcaagaaatgcttgataaactagggtggcataagcagtcagcgaagcaagccattgtcgagctagagggtataactagaaaaataactactgcttcagcagctaaaaaaatagaaaaattacagatggagctaaaaaaattgaatcaggtactcaaggcaaaatacccgtctaaagagatggaaaaatttgggtataaaatgccttacagtggtggatacattgctgaaaccatcatccatgagttaaggaatcaacctgaaatattgaaggaaattttattgaatacaggttga

SEQ ID NO: 57852 - DNA, 636 bp, Acinetobacter baumannii
ttgaccccttggcttccagatttaccccatcaacttctaagttatggatggtttatatctacaactatactactgagtgctttgctgctagatgcaacaccatatatgaatagattagagcaaagtgcatttattaatatcgataaatggataattaatatcggtttaatctctcttagtatttttcttatttctgtcttttttattattggtgaacctaatcatatctggttcataatttatagtctgatcccgatctgtttcttattttacccagaatctttccgccctctcttctatatttttggatacaataaagaagataccaacttaacagataaacaaataatgtatagaagtattggtattatcttctttaggctattctgggtttttggctttagctatttatttataaaatcttcctcacaaccttttatgtatgctgcaggcttgattctaggaagtatattaataaccggatttagtgccaagaatctctcttctacaattaaatatttaacctacatcgccttatgtatagcaacgttatacaccatactcttccctttgatattaatttattatttatatcaaagctatcaagcaaaaaaaatcattttatctagctgctaa

SEQ ID NO: 57853 - DNA, 801 bp, Acinetobacter baumannii
atgattttatataaatactataattttaatgctggtaaatctgctttagaaagtgaaagagttggtttcaggactcctacttactttaatgatccatttgaggcgagtgttatagaaggaaagtcttttacgaaagatcgcattcaaaatacgttgaataatgtagctattctaagtctaacaagaaatccattaaattctttaatgtgggctcattatggagatgaacataaaggttttgtaattggttatgaagtagagacccctttttttaaatgtaaggaaagcaatttaatcccagtacataaagggagtgttatatatacgaaaacaaagccttttcttaaaacctctactagaaaaactactaatttatgtaatgcaatagatggtatttatgacgaggaagatcatcagactaaagagttgatagatcacctatttttaaataaagatacaatatggagctatgaagaggaagtccgtattgttaagcgtatttcttctgtaattatggagacacatgaatattgggaaaatccctataatagatattcaacactttccagagagatcagaccgggtcatagcaaagaaataataccgggcttaaaaatttatgatcatcaaattaaaattaaagaagtatatttaggtgctagaaatcctcattttgaggatagagatgaacatattttggaacttttgagtaaaattcaaaaaaaaggggcaaagatctattctgtttctgttgatagtaagtcatggaacttaactaaaaaactgcttaatacgccataa

SEQ ID NO: 57854 - DNA, 996 bp, Acinetobacter baumannii
atgaatacaccaataaaccaattaagtttgatgacatcccatgatcaaatacatttttgcgtaaatgtatataacctttctattatgcacaaaatttcagcaataatcacaaacccaagttatagtgcattcaaacaaaaaacgactaaacatggtaagcattatgtctgtaaatctccacaaacctacgaagtatatgaacttttacaaaattttcctggcataagccaagtgtttctcaagcataaattttacaaacttagtcaaagtgtaaaagcattacataaagcttattcagatttaggacctaaattaggtagaccaatcaatcctttatttttacctaatgagcaatatatacaagacatcttacctattgtagattcttttgaaaaagaactaaaaaaagactcaacgactcggatagcaatggaggatcgacttcaacgcttagagcttattaatgagtcaaaaaaagaaaatgctcgagtgatgaaaaagcttttcaaaacccagcaacgatttaaccttaatatttttacatatgtattcgatatgaataaatgtgagttccgcgataaatcatttattgagcaagggcttacaaaacagatttcacaaatgattgataaattttatgataattatcaaactgaaattttagatttatttttccgtgttcaacgtgatttatcaaataactatgtacttactgtatatagtgctactgaacgtgaatgcaaaccactctcgatgaaagagttcatcccactaagaaatggcagttatctcatcgtttcaccgcatacaaatattatattaactgcccatgaagttgattatccgatggatattcaagatgtcgagggtacaaatgaaaaaacatggaaagcaatcttcggagaaatccttttcaaataccactatttctattatgaatcagaatatgtttcaccaaaattcatttacaaaaattgtggcacaaactctaaatag

SEQ ID NO: 57855 - DNA, 885 bp, Acinetobacter baumannii
atgaatccccttagtcccccccctaacattcaaaatgaaagtttaacaaaaagagttggttctcaagaaacttatgagcttaaagtatttaacgaaaatgaagcatatcgtcaacttgaaatcattctgctcattttgtatttagaaaaaaatggaacaaaaccgatctacttaccgcatcaaaaaaagcaaaatacttatactattgttgataaaaatatacatgagtcacttagaagaattgatcctcattaccttgaagataaaacttgcacaagtcctgaagtggacttatttcgcaaggtactgaaagaaaatataacgcttcatcatttaacagttagtcagagtgatttttggattcgaagtcataatgatgctattgccctagcacccaaccaatttattttaaaagctgaaattttaaatgaattttgccatcagatttcctgttcaattgcaagcgatacaagctatcaaaaagcatcccaattacgccaagaaaaaagtattaatcagaataagaagatcaaacgacttgttcgaaaattatttaatacattcagaaaattacttgtcattaaaatggattttttcatccatcctgatcatacagtcccacttgaattactaaaaatttacttgcgggcgttcatcaaaaaacttcacgcaccaaatgataaagtcccaccgattgttggttttgtttggaaattagaatactcagacttgaagagataccactatcacttcctattttttatggatgcaaatgagtttacagaaaatcataactttgccgataaacttggtgaattatggcaaagcataaccttaaaaaaaggggtttatcaaaacttcaagcatgacaagcctgttgtttaa

SEQ ID NO: 57856 - DNA, 1437 bp, Acinetobacter baumannii
atgaacattcttattctagttaatccagcgaaaaattataaatattttttctataatgttgctaaatcattggtagatttaggtcatagtgtatattatgcgtatgacactgaaaaaaataaaattttatttcctatccctgaaatagatgagtcatctaagagctatttttttgatgttttttttaaaattaatcaagaagaaaatttgcagtctaatgatgaatttctttttgattgtacttggggggaatatttctattcggattttgatcgatttttaactcatggttataatttagaaaaagatgctgaagagtgggtaaaaatccgtaaaaagatggatagttttttctataaaattataacagaaaaaaatattgatctcgtgttgtatgaaaatatttccaatagttttgagtactcagcatatagagtggctcaaacattagggaaaaagtattttggtttaattgcatcacgcatacctgggcgctatgaaattcaaacttctatcattgatgatttattggtggatttagaattggtgaaggaaaagccgcttacagaagaagaaataaattggtatgaagattataaatctaatattaataaaattgaacctgactatatgaaacaaaatggtttagataatgtttctttattgaataaggtgagttctaatattttttataaaattattaggtctataaaagctgatattaaatatggagcaaaatcagattatgctagtgggcttctatttttgaggattttgtcggctgttaaagttgctgtaaatagacgattaaatcataaaaaaacaaaaaaatactttctaaaaatggatgaggttaatgagattaaacagcaacataagttctatgtttatcctatgcactatcatcctgaatcatcaacgtcggtattggctccacaatatacaaatgaatatcacaatatattaaatatttctaataatttgccatttgggcaatatttgtatgtaaaagatcatagaagtgcaatcggcttaaactcagatgagttttatagaaaaatttcagcattacctgcagttaggttaattcccgcagagtataatattaaagatttaataaaatactctgctggcgtgataacggttaatagtactgctggttatgaggctcttattttgggtaagccagtatatttgctgggtaatgttttttatcagaacttttctaatgttgtccgtctagaaaattttaatagccttaaatcttgtttagaaaagcctactgagtttattgaaaatgcagcagatattgttgcttacagacgggtaacttatgaagggattctgaactttaatatgattgaatatgattctaataaagttttttttgacaagcttgctatgaatatccaggaaaatatgttgggtaaaacctaa

SEQ ID NO: 57857 - DNA, 129 bp, Acinetobacter baumannii
atgcaaaaggaattaaaaaatggacgctacgttgtgaaagttttaccaaaaaaattatttcgattaaacattcatctgctactcccgatgagtggaaaaatagatttaaaaatttattttcaacattaa

SEQ ID NO: 57858 - DNA, 618 bp, Acinetobacter baumannii
atgtcagtagataatgcagaaaaggttgcacaagcctactcatggttacgtgcaatgtcaggcggcaaactaactcaagaacaagtagctgcaggcgattcaattattgctatgaatggccttaaaacatttgctcaagttattgggtataaattagataatgctgttactggcttccgtgatatttcagaaaatggctacaagctcattaaatcgtttgagggatttgaaccaaaggcatatcaggatactggcggtgtttggacgatcggatacggaacaattaaatacccgaacggtacacgtgttaagaaaggtgatatatgcacgatggctgaagctgaagagtggttgaaaaatgattgcgcttgggtcgatgcttgtttagataaatacttaaagtttcaaccaacacaaaaccaatttgatgcattagcttcactggtctacaacattggtgaaactgctttttctaaaagcacaatgttaaaacaccttaatacaggggatacaaaaggcgcggccaaccaatttgataaatgggtttatgacaacagcaaagtcataaatggtttagtgaatcgtcgtgcagctgaaaagaagttgtttctgacatga

SEQ ID NO: 57859 - DNA, 195 bp, Acinetobacter baumannii
atgacgcaagtgatgatcaaagcctttgaccatgcaaatacaaaagtaattgactttttggctgaagtgggtaagggcggcaatattcttaaagtttttgactataacggtaatgaactatctataaatttggatggtaccgtaatttataatcggactcgatggcacttacccattaaagtagatttaaaataa

SEQ ID NO: 57860 - DNA, 2076 bp, Acinetobacter baumannii
ttggaaaaatctaatgaaattgtaaatgatataaaagtgttttacgaaacgtataacaattgcttactaagtaaagaagaattttcaaatgatgatgatttaacaaatcaccgtattcagttgttgaaaaaccaaattataaagctcgataaatttggtgtgattaatgaaaatttattaccaaagcttgataacatctatgactcttcaattgaagatactgtactagaacctgaaaaggaaaataagtcccttaatgaaagaattgaggactatggagaatatgttttcggagctagaaaacatttttatcagaaatctaaaaatgcacttttcgaagaattgaataattcaaaagacctatctttagatgttctcatagataaattccaaaaacgaaatttatggtcattcaaaaatgaaaccatgagccagattgaagacaacaatgtgatctttttcttagctcaatcagtctacaacatgattccttctaaaatctctttctccaaagatgagagaaaagactctgaagaatgcattgataagttaaaaagctatatgtattcagttaaccattttaaagaaatggtccatacggctatagaattagacaaaaatgaaagaatgcctatagctaattttgtcaatcaaatggttaactatagaaacgtcttaagaggttatgctcaggatcctcagcaattcttatttgatgaattagatgaggaccgtttattagcagataggatatataaggttgtaaaaggtacgactcttagaggaagtcctttatttcaaattatgaataatttggatactgtcaaaacacagtattgcaaaatgatgtttaatgaagtctatccagaaactaaagaagtctcatatgatcaatttcaagactatgttgagtccggcggtcacatatatgatggtagcgcaataaaacaatttatagacgcagctaatggtaagttagattacacatatctttcgcgccaatttgagcgtttagaagatagcttgggtcaggaattattcctaaacatgattgttacaggaaataagccattttcagatgctttatttaaaaatgttgaaaagattttagaaagcgataaaagcattaaaacacctttagatttcgaaaaagatgattctaaacttaattatctactttctttatatcgttttaaattcgattcaaagtattcaattcctgatatctatatcaaagatgaaaaccaacatactcaagttatcactgacttgagttcaactgataaatttgatggcttagttagaaagatattaaaagaccaagagcctaatcgacttgatttacgctatccatcaattgtatctggtcttgcacatgagacatcaaaaaattttcggcatggtgaaaatgtaaatccagaacaatttagtaatgtatttggttttcgagcaatacagtttggaaactgggtgacacaacaagaaagacagcatttattgaatatcacatttgatggtctaagtgagctaagagacgctctcggatttgattcaaagaatatttctttaaatggaactttagctatcgctttcggtgcgcgggggcaagctggacgaaatgcagcatcagctcactatgaatatgctagcaaaatttttaacctaaccaaacaaaatggagcaggttgtttagcacatgagtggttccacgggcttgatgcatatatggcacaactagtaagaaaagatgtagagaaattgatttataaaagtggaaattttgaatctgtagaaaacaactattttttaacacatttaatgtcagacgttgactataaaacatgtaaaacagttatagataacaatccattattgaaaagtgtttatgagcttcaattaaaactgaatggaaagatgcatagagatgaaatttttagtgaaaatggaaaagagttaatagtaaatcgtatacatgagctagttgatagcaatttaataaaagtaaatgtattaaaagatgcaatttcaaagtctgaaccgtaccgggtttgtcggagacatttttatttaagttag

SEQ ID NO: 57861 - DNA, 666 bp, Acinetobacter baumannii
gtgattcaggttataattaagacctggctagattcacttgaccctgatatagtcttagcagattcagaaaataatggatactcatcatttccagaaatctcatgggcacatgaggaatggaaagtaattatagaagcaattcctttagctgttaaacatcgtggaacacataaacaacttatcggaatccaaaattacgatgcaagttggattaatagctggatacctattcgtgatgcaattcaaaaaaagacaaatagatatgggcaacttgatttaccactaattgttgcagtcaacattaatagtttcaaactcaacccaattgatgaaatgcaggcactctttggtgaggaacaatttagctttaatttggctagtttagataatccacatttttccagagtttcaaatggtgcttggtttggtccagctggaccaaagggaaaaagatgtagtgctgcttggctgtttggaaatctttccatatattcattaacaaatatagaccatacgctttatataaatccttggtcaactttaccaataccttcatcagcattaataatgccaaatgcaaaagtagaaggtcatcaacttaaattaatggaaggcaaatcatttaaagatattttcaacctcagtaagggttggccagatgaataa

SEQ ID NO: 57862 - DNA, 1149 bp, Acinetobacter baumannii; identical to SEQ ID NO: 56902

SEQ ID NO: 57863 - DNA, 1056 bp, Acinetobacter baumannii
atgaatgcaataccagttctcaatttattcactcagccacaatgtagtcaatttgacccaaatgactggaatattctagcgcagcattggtatccggtagttcaaatccaggatgtaacgactcaaccgcaacaagttcagcttcttgatgtcaaaatggctatttataaaactgaaagtggagaaattcatctggtcagagatatctgtccacatcgaggagtgccattaagtaaaggatgggtagaaggtgaaaatattgtttgtccctatcatgggctcaactataacgcacaaggtaagtgcgtaaaaatccctgctcaaccagaacttacccaaatttcagatcggttcaccttaactaaattccctgtagttgagaaatatggactagtttggaccagcttatttagccgtgatgaaagtgaagctaattttccagttcttgaaacttgggattcggatgaacatcaatcaatactcccaccatttgttgatatagcaggttctagtggtcgtcagcttgaaggttttatcgatgtggcacattttgcctgggtgcataacaaggcattcgctgatcgtgataatccagtagtgccaaaatatgaaactgaaagaacagattatggacttaaaacgatttatatctctacagtaagtaactttcctcatagtttgagacatttagagccagagaatttcttatggaaacgagaatttgatgtatatcctccattctcggcaacacttactgtctattttcctaacaatgggattttaaaaattttgaatgcttgttgtcctgtttcgcataatcaaaccaggctatttgttccgttgacacgtaattttgatacgacgggtgacctacaggctgtatatgacttcaatgcacaaatttttgcagaggatcaggatattgttgagagtcaaaaaccggaagaacttccattagatgtttcaatggaggcgcactttgcagcagacaaatcttcaacgacatatagacggatattggcagaatggggattaagtaaaagatatgtggtctag

SEQ ID NO: 57864 - DNA, 336 bp, Acinetobacter baumannii
atgagtaaaaaattgaaatttaatttcaaaaatattattaacttaaaaccttttgatgaaaatgaagataatagtcgggatgattttacgggaagtaaaactagatctttctttatttatttggcctttttttgcagtatagctggaatttctgcggtatttatctatcctatgactaaagcaccaataattttaatatcattaggttgtgcttcttcagctattttaagtggtatcgagtggcatttaggatataagtcaaaagcattgaataagttatttgaagcaacagttcttttagtgcttttgattcttgtaaggttatttacttggtaa

SEQ ID NO: 57865 - DNA, 912 bp, Acinetobacter baumannii
atgctgtttaataacaatttcggaatagatcctttagttggttaccataagccgcgaatcattgcttgcttgaacataaaaaagttttctcaggttgagtctcacatcccttctattcttcacttctgcgaacaacatctacaaaagatgtatggtgagtgtatagcaaccgttttagtcgctactccagaagagatttcgattcctgatgatgacaatttaatcttaaatatctcgttgtataacatcttcaatctacagaattcacatcactataatgagaaacaaattggcattgaaattcagcactgtataaaaaatttcactccggcgcatacagacctttctgcatcttcaagagatcttattaacgagcaactgtcaaaaatgttagtgattgccaatgccgtacaaaaaactgttgaagaaaaggaactgtttaaagatggtgagcaatttattgcactggatctaaaaggcaatcctatagtgttcaattctacaaatgcaattaataatcgtattagtttaggttatggaattgttgatgcacatgatcatcttttaactaccttcagtggtcatttaaaaactgaaaatatagttcgttttttggagtgcttagcacaatcacaaagcaatattgaaaactattacaacaacttcttatcaaacagaattttatccttcttggatggcacgctaaacttcttagattgttcagatccggagtttgcattagagaaatgtcgtaaactttatgaagagtctaaatcggctttattagacataattgatgaaatatgtatttctgatttaaataagtttctttttaaccagtttgaaaaatctataaattatgtatgtctagattttaaagataaccttcaggattattgccgcttaagataa

SEQ ID NO: 57866 - DNA, 513 bp, Acinetobacter baumannii
atgctgcaatgggcatgtgatgcagctgaaggatcaaaaaaacacctgttagaactttattgtggtaatggtaatttcacacttccactctctttaaaatttgaaagagtgcttgcaactgaacttgcaaaatcatcagtttatgcagctcaatggaacattgaacaaaaccaaatcaataatattcaagtagctcgcctatcggctgaagagttcactcaagcctatcaaggtgaacgtgaattccgccgtctacaagaagcagatattgatattcaaagctacgacttcgatacggtattcgttgatcctccacgcgcaggaattgacgatgaaactttaaaactattgcagggctttgaacgtattatctacatttcatgcaatcccgacactttatatgaaaatttaaaaacgctcactcaaactcatcgcgttactaagtttgctttatttgatcagttcccttatacgcatcatgtagagtctggtgtcttacttgagaagatttaa

SEQ ID NO: 57867 - DNA, 246 bp, Acinetobacter baumannii
atgaatgtttggtacgataaagattattataaacactcacctagtaataacccaataggacccaaaataggtactgaaaaggttttacgaggtactgtagcaatgggagccgataacttaatgatggctgatggttttaatatagctagaagtaaagctttacctattccaaatgatgaaaataagtcaaaataccgcttatattccgttcgttgtgttgccaatatccagcaaccgattaaataa

SEQ ID NO: 57868 - DNA, 288 bp, Acinetobacter baumannii
atggcgtggcaacaagccaaagattattgccaatggcttggacaacaagtgggcacacccatggacttaccccctgaggtgcaatgggaatacgtagcccgaaataaaggacaatatactttattcgcaacagatacaggtaaagtagaactaaagaaaaatctatggaaattagatcaatatgataaccacaggcattcacatgacttacaaacagtcgcgaatattccagttataggtcaaacaccaccaaatcctttaggttttttacgatcttgttaccaataa

SEQ ID NO: 57869 - DNA, 366 bp, Acinetobacter baumannii
atgatgaaacaaaatatagctattatcttattttcaagcattgctttaagtgcttgtgcaacatctactgaatcaaatcaaaaacaaacaaagccctcacctgaactggagcaaaaaattcaaaagttggttgagaaaactaataagaatatgatttttgtcgaaggcggtagctatctcatgggtgattttgggctagtaactcctgaattagaaaaaactgtacctgatagcatggcggtaaaaaatcctaaaggtaatactgaaaaacctagtaaccaaccattttccccaggcggtgataataaaacacttcataaagtttcccttagcagttttaatatgagtgcttataagactacctaa

SEQ ID NO: 57870 - DNA, 945 bp, Acinetobacter baumannii
atgtaccagaatattcaatatgatcagctttaccatgaagcagaagtattggcagcagtagaccatttcattcaagaagtttgcttaggtagttatgatctatatcatcaaaacctgatgatagacctacaaaaattagttcagtcatttaagccaatctataaagctaatttatactattgtaatgctgtgctgatattcattgaggtggtgaagaccgttgattacacactgagccaaatgccacaggcaaattatgaatctattaaagattttgatgaaatgactgtatggcatattttgacttatatccagtcattatcaggctgtgttcaacagcaactaattgaacatcaacaacgtgaattaaagaatcaacagagcctttttgaatatgcatccacactcattcatcattatgcgagaacattagttgttcgagtagatctatctatcaagaaagaatatcaagccttatacaacattcaggtatttaaccaagccttagaggtcttgcttcggcgtatcgcagatcaggatacttgctttagtggtttacatggttatgcatgggctttagagcatggcataagcaagggctaccattgccatctcttgcttatgtacgatggaaatatacataaagaaggttttatgatggggcagtgggtcggtgagtgctggaagcagattactcatggatatggttatatttttaactgtaaccatcctgactatatggcgatctatgaagagatggggattttaggcattggaatgattcatcgtcatgatgaaaataaacttaataattttctgtattacgttgtcccttatttggtgaatgaagaaaaagaacaacaacatcctcgagtgaaggattcagcctacatgcgtagtttcggtaaaggtgtgatcgattcgaaaaaccgtagaggtttataa

SEQ ID NO: 57871 - DNA, 621 bp, Acinetobacter baumannii
atgctcttggcaacagcatgtgacggaacccttgccaccaccgcacaatttacctcgatccgagtagtgtgcaacaatactttagcgattgccttaaaaggacagaacagcagtgcaggtgtggtcaaagttccacacagtactaaatttgatgctgatagggtcaaacagcaattcggtatttcagtacgtgcatgggatgaacacatgtatgaaatgaagcaactgacacaacgtaaagtgagtcagatggaagcatccgcttactttgatgccgtgttcaataacagcacaatgaacaacgtggtggatcaggaggacaacatcatccagttctaccgtgatgtagccttacaagcccaagccaatggcaaggacaaagctgaaccaaatgccaaatcgatgagtcgagctatggaaatgtttaatggtcaaggacgaggtgcggagctaagttcagccaaaggaacagcctatggattactgtgttcaatcacagaatttatagaccacgaacgtcgtgccatgagtaccgatcaccggcttgattcagcttggtttggtgctggcgcatcgatcaaacaacgaggattggaacaggcacttaacatgcttgcatag

SEQ ID NO: 57872 - DNA, 294 bp, Acinetobacter baumannii
ttgaatgactcaaacgattgggataagaattatctcattacttcaggttttcataaagttaaaattatttcagacgcccaaaaagtattttcttatggaatactaacttttgaagcaaaaaaccaacaggtttatcagattaaaaataatcaagcagagaagaaaaaaggtgatgatctcgtcttctggatagaaaatataaatacaggtgaaattgttacatctaaagaatcttttaatacttataccaatcaaactcagccaatctacactcctgttatacttaataaataa

SEQ ID NO: 57873 - DNA, 570 bp, Acinetobacter baumannii
ttgtttaattcaaataaaattatttctattagtatattttcattactattaacaggttgtataagtgcaacaccaaatctcacttcaatcgaatactatgttccaccagagacttcgatgcatacagctacaattattggcaatttatacgatcgcaaatatgtagcagacacagtcgcttttgtatttgctgtagataaaaagaaagtaacggatggctaccataaattaaaagaacctttaatgcttcaaactggcaagcatgatttacaaatttggtgtggtcgtggagcttttaactatactaacttgataaaagtgaatattgaagctaataaggcctatcaggtcgactatgaattaaacccaaacaatagaaaaggctgcgcattttggattattgatttagaaacaaaaaaagcagttacagagttagttgatggagtagagttatggcgagcgaatcctattacttataggccaattcagatttttttagaaccaagacctagtatgagtaatagctatactgttcctattacagtaatcaataaaattgggcataattaa

SEQ ID NO: 57874 - DNA, 879 bp, Acinetobacter baumannii
atggcaactgcacaagcaataacctggcgtgagcgtcttggcgcctattattatctttgtcgttttgataacccgattggtactgaactggtcttttggccaaccttgtgggcgttatggattgcggctcaggggatgccacgcattgaaattttaattcccatgattttgggtgtgatttttatgcgggcggcgggttgtgccatcaatgattttgctgaccgtaaagtcgatgcgcatgtggagcgtactaaaaaccgaccactagcgaccggagtcatcagcgccaaagaagcggtgatggtatttctggttttggtggctgccagcgcctgtctgctatttttcttgccgatcgaaactttttactggtcatttggggctttgctgttagcgtttatttatccttttatgaagcgctatacccatttacctcaagtctttttgggtgcagcattttcctggtcgattccgatggcttataccgcagttggacaaacgccggatttaacctgctggcttctatattttggtaatctggcctggaccgtagcctatgatacccaatatgcaattgcagatcgtgaatatgatttaaagataggggtgaagtcgactgcaatcttgtttggccagcatgatatttcaattattagcaccctgcaggcgagcagtattttattgataggtgctgcactttggctggaaaatttattgattccatttggcttgttagcacttttgctggttgctgctgattttatttaccaatggtttaaaactcgcgataaaaatccacagctatgtttttgggcattccgtcataaccgttggattggcctcattatttttgtgggaatattgtttgctctaagataa

SEQ ID NO: 57875 - DNA, 318 bp, Acinetobacter baumannii
atgaccaaattaaaatatacccctgaaatcagagaaagagcggttcaattattgattgaatctgaaaaagactatccatctaattgggctgcgatcacagctattgcgcctaagattggttgtactcctgaaacacttcgtgcttggcatcaaaagcatttagatgagcaaaatcctatcaaagtacaacagatctctgatcaagaaaaaatgaagcaaatggaacgtgaaatcaaagaattaaagcgtgccaatgaaattctgcgtaaagcagccgcttttttcgcccaggcggagctcgaccgcccacacaaataa

SEQ ID NO: 57876 - DNA, 450 bp, Acinetobacter baumannii
ttgaaaaagggtgaaatttatcttgatgcttattcaactcaaaatatcttttttggtagagatacacttaagacatatcaagcaaaagcaaatagaaatagcagtccattaaaaatctatactgttactgatatgcacaatgaacaaccagtttatcaaaaaggttatatacattctttagttggcattgatagacattcagacactttagctccttttgtcacatttagttctactactgatccaatggcagtatcaaagaaaattcaagatttaaatattaatgaggaaaatttaaagcgaaccatttatctaaaagaagaattccaaaagcatccattacctaatagtgctgctccagttgtggataaagaaagagcaaatatcaatagaattcgggaagaaatgcaaaatcaatctaataactcaataaattttaataatatttaa

SEQ ID NO: 57877 - DNA, 720 bp, Acinetobacter baumannii
atggaaagacgttcgttaaatcttcactttatgacatgctctaaaacagcattggcttcatctattgcactcataacatctgtcgtctatgcaaatgaagcggaggtttcgcagctcccaaccattactgtgaacgctacacaaaatagtgatgcactatacacatcaaaaaaagtgagtttatctggttttcaaactggtgatttaaagaaagtacctgcatctattacaaccattacatctgaacgtatagcagatcaacacgcaaaaatactgaccgatgtgattaaaaatgattcatccttaggcgatggttatgccgctattggttactatccaaactttgtagcacgtggtttcgcactcgatttaggctcaagctatctcattaatggccataccatacgtggcgaacaaaatgtagctttagaaaataaagaacaagttgaaatcttaaaaggcatttctgcaattcaaagtggaatgtcgacaccaggtggtgtggttaactatgtaaccaaaagaccagccgatgttaaaaacattactgtagatgcaaattcagaaggcggctatacactggcaacagatgttggcggctttgttaatgatagttttggttatcgaatcaatttagcccatgaaagcatccatccaaatgttcatcatgcaaatggtaagcgtgagaggtggatcaggaaatttgaacaacacttataa

SEQ ID NO: 57878 - DNA, 480 bp, Acinetobacter baumannii
atgatgaagcacgaaaagaatttctactattcagatgatgcaaaaagccgtgctttatggatgtggcatatgcttgaagaatctgagcataaagatattgcttatgacgtctatcaggttttaaacggtaattatccgttacgggcaacgggctttttaatggctttcattaccattttagggcttattccaacagcaactttatttgtacctctactgcgtaagccaaaagaactgttgaccagaaaattttggaaagatgcacgtcgtggcgtcaacttaatttttagtccaaaagatggcgtatttggtagcaccattggtcagatttttgattacttacgtccagacttccatccaaatgaccatgatacgactgaatatctggagtactacaaaaagaaattacttaacgagggcggtgcaattgcgccttactttgtgaaggaatttacaccaccagttcgtgcagtttcataa

SEQ ID NO: 57879 - DNA, 579 bp, Acinetobacter baumannii
ttgagaacaccggtaagtgcggaagctgtaaagcctaaaaaacaaactaaacctgttatagaacaaaataaaacacaatcaaacgggaataataagactgtaaaagtagatgtaacagatggcatggctgttatttatacatttcaagatactgaatatggaccacatgatgcaccaaaggtcggttatacagttttttatgatcacttaggtaataaattatacagttttaaaactggtagtagagtatcaagtaaatctaaaaaaaatgcagatggcccttttagtggtttctatacatatattgctggaggaaagcgaaatagtaagttgggagctgcctatggaactacaaaaattatgaccacagatagccgtgcaagatgggtacatggcgggggaagcggtttaagtgatccatatgctgagaaacaaggttggagagtcactatgggatgcacaagagcacaaaatatagatgttgaaaatttggcaaaaaaaattacagaatttaaaaagcaatatcctaaaataaagatcaaatatattcgagatagtaaaggaacttatcctaaatga

SEQ ID NO: 57880 - DNA, 408 bp, Acinetobacter baumannii
atgcttgaagaatctgagcataaagatattgcttatgacgtctatcaggttttaaacggtaattatccgttacgggcaacgggctttttaatggctttcattaccattttagggcttattccaacagcaactttatttgtacctctactgcgtaagccaaaagaactgttgaccagaaaattttggaaagatgcacgtcgtggcgtcaacttaatttttagtccaaaagatggcgtatttggtagcaccattggtcagattttcgattatttacgtcctgacttccatccaaatgaccatgacacgaccgaatatctggagtactacaaagacaaattactcaaagaaggcggcgcgattgcaccttactttgtgaaggaatttaccccacctgtacgcttgtcataa

SEQ ID NO: 57881 - DNA, 705 bp, Acinetobacter baumannii
atgaatcccttccatggtcggcactttcaaggtgaaatcattctttgggctgttcgttggtattgtaaatatggcatcagctatcgtgaacttcaagaaatgctcgctgaacgaggtgtgaatgttgaccacaccacaatttatcgttgggttcagcgttatgctccagaaatggaaaaacgcttacgctggtattggcgtaatcctacagatttacattcatggcatatggatgagacttatatcaaagtgaaggggcgatggacttacctgtatcgtgcagttgatcaacgtggtcatacgattgacttttacctttccgctagacggaacagtaaatcagcctattgttttttaggaaagatcttcaatacggtgaaaaaatggcaaattccacgggtcatcaatacagataaagcagcgacctatggccatgctttatcacggttaaagcgagaaggaaaatgtccagtagatattgagcacaggcagattaagtataaaaataatgtcattgaatgtgatcatggtaagttaaagcggatcatcagggccacattaggattcaaatctatgaagacggcttatgccacaattaaaggtattgaagtcatgcgtgcactacgtaaaggacaagcatcgtcattttattatggtcagcctcaaggtgaagtgtgtctaatcaacagggttttcggtctctaa

SEQ ID NO: 57882 - DNA, 294 bp, Acinetobacter baumannii
atgttgaataatgctgatcgtattattgtttttagtactttattgatctatcaacatgaagcctatatgcgtgcttatcatctgaaccaatggatcttacataagttgcaaaaaggtaatgaaatggaaaaagttcaagctggttgggtggctattggtgaatcaagtaattttatatcagttgatctacagtcaaaaattaatgagattaatcgtcaattagagatttatagggaacttgccaaacctgattcagcacagcctaatctttctcatcagcttaaacctgcttga

SEQ ID NO: 57883 - DNA, 453 bp, Acinetobacter baumannii
atgccaaatttagttctcccaacacgtaccttatatgttgtaaataaagcaattgatctgtttcatcaccgtgggttccatcttattggcgtcgacagaatagtgaaagaatcagaaattaccaaagcgactttttataattactttcactctaaagaacgcctcattgaaatctgcctgatggtgcaaaaagaaaagctccaagagcaagtagtcgcaatggtcgagtacgacttaagtacccccgcaatagataaacttaaaaagctgtattatttacataccgatctagaagggccgtattacttattatttaaagctatttttgagattaaaaatagttatccaaaagcctatcagaccgcaatgcgctatagaacatggctaaaaaatgaaatttatagtcagcttagagtgctaaacgcggatgcttcttttaccgatgccaagtga

SEQ ID NO: 57884 - DNA, 306 bp, Acinetobacter baumannii
atgacacgtagaccaagaagaaatcattcaaatgactttaaagctaaggtagcacttgctgcgattaaagcagaaaaaacacttgctgaattgagtgctgaatttgatgttcatcaaaaccaaattattgactggaaaaatcaactgatttcagcttcctcgcaagctttcgatcaatcaaaagctccaacagaaccacccatcgatctaaaaaaactacatgcaaaaatcggtgagcaggcattagaaattgattttttagaaggtgtgttgaagaaactgggtcgcttcaaccacaaaagttaa

SEQ ID NO: 57885 - DNA, 306 bp, Acinetobacter baumannii
atggcacgtagaccaagaagaaatcattcaaatgattttaaagctaaggtagcacttgctgcgattaaagcagaaaaaacacttgctgaattgagtgctgaatttgatgttcatcaaaaccaaattattgactggaaaaatcaactgatttcagcttcctcgcaagctttcgatcaatcaaaagctccaacagaaccacccatcgatctaaaaaaactacatgcaaaaatcggtgagcaggcattagaaattgattttttagaaggtgtgttgaagaaactgggccgcttcaaccacaaaagttaa

SEQ ID NO: 57886 - DNA, 306 bp, Acinetobacter baumannii
atggcacgtagaccaagaagaaatcattcaaatgattttaaagctaaggtagcacttgctgcgattaaagcagaaaaaacacttgctgaattgagtgctgaatttgatgttcatcaaaaccaaattatcgactggaaaaatcaactgatttcagcttcctcgcaagctttcgatcaatcaaaagctccaacagaaccacccatcgatctaaaaaaactacatgcaaaaatcggtgagcaggcattagaaattgattttttagaaggtgtgttgaagaaactgggccgcttcaaccacaaaagttaa

SEQ ID NO: 57887 - DNA, 354 bp, Acinetobacter baumannii
gtgcctgctgtgctatctacagttgcagtatacgtctggccattgatcacaacagtgaccactgtatttgctgcatctgccggaacgtttttcaatacacctgtaacagtaacgttgcctgatgcttctgatgcattaatcacattgtcagctgttactgaatcaaccgtgaagttaacaccatcggtatttggaccaactgcatcaacagtagctgtacctggtaatgatgggttacctgctggatctgtagcaattgctgtaactttatcgccatcatttaaacctggatttggtactgtccaagtaccatccggtcctgcaacaactgttgttgtactgccgtcaggataa

SEQ ID NO: 57888 - DNA, 183 bp, Acinetobacter baumannii
gtggttgattcagctttgattgaatcgtggttaagcgaagaaggtcaatctaactttaaagaaatttcagaaaataatttattttccttttttgagattctttttagcgttaaaaaggaagctctatctaaagatataaatttatttgatttaagttatatttttgaagatatcagaaactaa

SEQ ID NO: 57889 - DNA, 240 bp, Acinetobacter baumannii
gtgcttgagtatccgatcaaggctgactttgccctgattaaagcttacaagggcgaccgctgggggaatctggtttaccgtaaatctgcacgtaactttggcccaatcatggccatggctgctgatgtcaccattgcccaggtttctgaagtggttgaactgggtggattagacccggaacacattattaccccaggtatctttgtacagcatgttgtacaagtacagcccacacagtaa

SEQ ID NO: 57890 - DNA, 276 bp, Acinetobacter baumannii
atgtctctttataatttttcagtttttttgggtggattgttatttgtatctgttgccttcgcgggtcaaaaaaacagtcctcatcgtgatttctatttgaaatgtattgcggctggtcatagccgtgcaagctgtacatgcatttatcatcgtttagagcgccaatattccccaaaactcatgcataagcttggaaagttaagtctacaaagccctgaagtgccgcgtgattttgtaaaaaccatgcttcgtacgatgcaacagtgccagtcataa

SEQ ID NO: 57891 - DNA, 1482 bp, Acinetobacter baumannii
atgcttgaagaaatgacatctgattttccacagataggggagttttatacaccttcagctatatctaagataatagctaatatgctaagtctagagaaagaaggtaagatctatgatcctagctgtggctcttcaggctttttattagagacgagtaatcatatacatcagaataactccaattttaattatgagttaataggttctgatatttcacctatcgcaattatagtttcatttgttagtttactactaaatggagaaaagaaattttatttaaatttgggaaatagccttaatgaaaaaaattacaataaatatgaatatattgtaacaaatcctccatttggtaaaataaaatataatgatgataataatggtaaaattcagtatacagattatatatttttggaatatataatggatagtttaaaggttggtggtcaagctgttgtgattttgcctgaaagatttattaatgataataataaatatgctttgcaactaagaactaaattaataaataattttaatattgaaaatataatatcaattccacctggatctatgcttccttctactgcagtgaaagttgtaatccttagttttaccaaaaaagaacctagcagtgaattttgggtatatgttttagatggtattgaaaagttttcacgtaaaaaacctattcagtattatcattttgatgatcttttatttaagatgaagggtcgtattgaatctaataattcgtggcaagtgccttgtgaaatttttctaaaaggagataatatatttgaacgcgtaaataataaaaattctattgatgagttaaaatctccacttgaagacatttctcatatatatgaaaatcgaaaatatttactaaatagcttaaaaataattgaaagtaaaattgatgaaattaataaaaaaattaaaaataaagaaattaattgtgatttcgtgaaatataaacttgaggatctagtgaaatctaaactaactaagcccttagctaaagataaattattaaaggagggtaattatccagtttatggaggtaatggtattgttggttattataatgactatatgcattttggaaggtttgttattgttggaagggtaggcgcatattgtggtaatgtcagatatattgatgaaaaattttgggctactaataatgctattgttttagaatgttctagtttaaaattggtacacttatcttatttggcaagaatattagaaagaaaagatttaagaaaacttgcaaccggtactgcccagccccacttgactgttagtaaaattaataatatagagatttatttaccgccaatagaagttcaaattgaaattgatagttggttaaatgagctagaaaaagaaatatcattgcagaaaaaatttattgaagaaatttcgagtagtaatgataaattgacagactcactttaccttagcttgttacgtatatga

SEQ ID NO: 57892 - DNA, 363 bp, Acinetobacter baumannii
atggcacatacacaacaagttgacttaatctttcgatataaagtcaaagatggtatggatgatatttttcaaaattatttagatatcgtattagctttagttcaagaaaaagaaccatatgttttggagtattctattttcaagcaagctgatggtagttatctacagcatgagcgatatattaatgaagatgcggttgttcaacatttaaatgtaactgcggaaggtcaaaaatatttccacctagcggcagatatccttgatgttatggctgttggtgaaactaatgcggaattctggaagcaatttgagggaccacatttcgttcgttatagtcgtttgcatcaacttcaacgtgcttaa

SEQ ID NO: 57893 - DNA, 549 bp, Acinetobacter baumannii
atgagcaaacaagcggtcattgttgtcgatttacaaaatgaatatctaccgacaggaaaacttccattagtaaatattgaagcagctttagataatgcggcgaaagttattgaatatgcacgcacacattcaatccctgtcatccatattcgtcatgagtttcttgatcctaatgcttctttcttcgtgaaaaatacaactggcgtagaaatcattgataccgtttctccgcttgatgatgaatgtgtaataaccaaaaactatccaaactcattttttcaaacagaattagatcaaaaacttaaagctgaaggagttgatcaattaactattattggtgcaatgagccatatgtgtattgatgccacgacacgtgctgcttcagatctaggttatcaatgtactgttgtagaggacgcctgtacgaccatggatctcgaatttaatggtcgagttgtggaagctgctcaagttcacgcagcgttaatggcagctttagcatttgcttatgcaagtattacgtcaaccacagattatcttaatagttaa

SEQ ID NO: 57894 - DNA, 951 bp, Acinetobacter baumannii
atgaagaacatgatagaaatagcaatccttcactatccagaagcccattcagcctcaatttggggtttgacggatctactacaatatgccaatcaacaagtattaagcacggataaagcatccattaaagttactcattggcgtgagtcgcatgggaatatgatcaaaacttgggacagtcatgaagctgtaagctgttcgatcaattttattattgtcccgcccagttttgaagctcctgtgtctcaagagggcgctcaaaattattcacagtggattgaacaacattataaaaatggtgctgtgctttgctcaatttgttcagggattttcacactattagaaacgaaattattttcaggtcgaacagtcactacacattggttgaataatgaaattgttaatgcgcgttttccagacgtagttgttgatagtaataaaattatcgttgatgaccctgatttaattacaacagcggggatcatgtcttggatggatttagggctaaagttagtagagagaatttacagtacaccattcatgatcgaattttctaaattgctattaatagatccaccttcaagagagcagtcttattataaaaatttcacgccaaattttagtcacggcgatactgccatcattaagattcaacattggctacaaaataattatgagaagaaaattacagttgatgatttagcagaaatggccaatctagaaaaacgaacattgttacgacgtttcaaaaaagcgactgggctggctccaattgaatattgtcaaaatctacggattcataaagcacaagatctgttactcacaacaaacatgagttttgactcaatctcttggcaagtaggttataaagatagctcttcattcaataaaatatttgtgaaaacaataggtctgacatcaacagggtatcgtaaacggtttaaatcctga

SEQ ID NO: 57895 - DNA, 885 bp, Acinetobacter baumannii
atggaactcattcgtttacctaacaccgcaacaagtgaagaagttgcaaaagctctaaaagaacatggtcactgtattattgaaaacctagtcgcgccagaagtcatggaccgtattgcagaagagatgtctgaatttattacgacaagtccttatggcgaagacaaatttttaggctatttgacccaacgtacaggttcattggttgctcgttctaaaacagcacgtgaccttattacacatccattagttttagattcagcaaagaaacatctttcaaagtcttcaactatgcaattgcaattaactcaaatcattactgtaaatcctggtgcaccatcacaaactcttcaccaagatcagttggcttgggatttttttgattttccagatgattttgaaactcaatgcaacaccttatgggcaatgactgaatatactgaagaaaatggagcaactcgcgttgtcccaaacagtatgtatgctggagctcgtcaaaaatttacacaagatcaaacagttgttgctgaaatgcctaaaggttcggtaatgatctataccggaaaaatttatcatggtgctggtgcaaataccaccgataaaatccgtcaagcaattaatattaactattgcgctggttggctaagacaagaggagaatcaatatttagcaactcctccagaaattgcccaaactttagatgacgacatgttgaaactgatgggataccaatgtgcatgttttgccatggggtatgttcgtgatttcgaagatcctcttgatgtttttagaggtaaaaaagagcgtcgttcagctggcttaaatgtcgtaactgataatggcaatgacgtgactaaaaattatgctgatgaattagggggataa

SEQ ID NO: 57896 - DNA, 405 bp, Acinetobacter baumannii
atgaaatgttttactcctcaaatcgactattttgagcaagatgtttttgactccttatcttttagtcaaatcgtggaagttggcaacaccttttatctttcaggaattgcacccttaaaaggcagtttagaaaatactttagtcatggggcaatgtattgaagagcaattggaatttattctgactactgcggggaagtgtctggagtgtgttggattgggtttttcaaatattgcaaattggacgatttacactacggatattgatgcttttgcaaataagtcaggagagattttgaaaaaatatcttggacagcataagcctgtatgtactttggttcagattagcaaattgattcatcctgaacagatgattgagataactattacggctgtcaaagagtaa

SEQ ID NO: 57897 - DNA, 636 bp, Acinetobacter baumannii
atgtttaagaagaattccactttaaaaattgttgttgtttctggtggtttaggaggactgtctaaaacagaagcattagtcagtactattgcggaagaaatttctaagcatactgctgtcgatatacatttagtgaaatttagtgaaatagggatgttagttggacaagctttatatagaaatgaattaccagaactggttcaaaatagtttgcaagctattgaaaatgccgatgcattgattataggtactccagtctatagagcatctttttcaggattatttaaacatttctttgattttgttgaacaatattccttaattaataagcctgtattattggctgcgacaggtggaagcgaaaaacatgcgttagtaatcgagcatcaacttagaccactatttagcttttttcagacacataccttacctttagggatttatgcaactgataaggatttcgacagtaactatagtattcaaagcgttgaattattagagcgaatttcacttgcagtatctcgtgcaatgccaattctacaaaacttatcacagccagttagagaaataagtgtcgaaaacattcagaaaaatctagctccctcgagtatttcttcctttagttttcaaaagtaa

SEQ ID NO: 57898 - DNA, 447 bp, Acinetobacter baumannii
gtgaaattatttttagattgtgaattcaatggatttggtggatcattaatctctttggctctagtcgatgaaaatggcaaagctttttacgaagcacttcactgtcgaactccagtatcatgggtaaaacaatatgtaatgcctcgactgaataaaatacctatatcactagacgagtttcaaaagagacttgcaaaatttcttatgaattataatgaaatacatgttattgctgattggcccgaagatatttcattactgcttaatgtgctgattataaggcctggttaccatttgcctatcccacctttaacattagaactttggaagcttcctgctattggagcattcactgaatctgagctgcctcataatgcattgtatgatgcgatttctctatcaatcaattactacgaatgggagcgtggagttcaggaggggatttga

SEQ ID NO: 57899 - DNA, 723 bp, Acinetobacter baumannii
atgaatattgtatctaatgcagtgtgtatctgcatggatattgttgaaatggctatcaatcaaaacgcaattattgaaaactcattaattcttgctaagaattacttagatgcccaaggtgcgatgttttattggattaatgaagataagagagatgcatttattgatttaaatataaatgtctctaaagaatttatttataaataccataacttactacaagattacgatccgctaaatgtagcatatttcttaaagtctcatgaaaatataaatttgctaagcacttgtaatagtgaaaaccaaaaagttagtgtgtataaacgttttgccaatgattgtggtattgacgagattttagagattgttttttggaggaataatcatgcctatgcaggaatcgcagtaaccaatccaaatgattataaaaaaagggatgaaagctctattcaagtacttcatcaaattcttggtacgagtatttttgagttgggcaatattaaagataacattgtaaagaattaccttaaagatcttaagcttactacccgagaaatagaggtctgtaactttattacaaaagggtatgcgaaccaagatatagcagaagctatggaaatttctttaggtaccgtaaagattaatgccaatcgcatatttgacaagcttcaggtggatggccgtttacagttaagtattttgttgagtaaggtgatcaaatag

SEQ ID NO: 57900 - DNA, 1035 bp, Acinetobacter baumannii
atggctcgatcattagcaactattagccccaatactcaaattggagtttattcatgtgtcacactcagcttatttagaatagttgaatcattaggtgtagacccaaaacttttagaaacatgctttcaagatagagaaaacctatccaaaccttacgcaaaaatttcattgaatgagttcataagtgctgtagaaaaaactgtagaaattacgggctatgataacttttcaattatgtatggctctaaatgcgatatcgagtcacttggattactaggctatattttcattaactcgaaaaatttaaaacatgctttagaatcaacatgtaaatacttcttattttttcaagaatatacaaccataaaattagaaaaacacggtgagtattatgttgtttcttacaaagttgatgattcttatctaaaaaatcaacgttatgatgcagaaattacattagcaattatttgtaacttaattagaaaagttacttatagtaattggcaaccagcattaattgaattcgagaactctgaaccagcgtttataggtgatcatttagcattttttaagtgcacaattaatttcaatgcacaaaaaaacagcatatacattccaaagaaggatattgatactaaaattttaggtgctgaccccaatctatttgaaatattgacctatactttagagaatattgggtacaaatataacgacaatgaaaagtttatcgattttatcgtaatgcatataaaactatgtatggaaactaagtttccccatattgaagatatcgcaaaattaacgggtattccgacatggaccttaaaaagaaggctctcctcctacaatacttcgttcagtgttcttttagaaaaaacacaaaaagaactttcccctccttatctacttgatgccaatttatccatttcagaagtagcatataaactaggttattcagatatcagtagtttttctaaagcatttcaaagatggtacggcatctcaccaaagcaatggataagccagcaaccttga

SEQ ID NO: 57901 - DNA, 1422 bp, Acinetobacter baumannii
atggatcatcctaaaaaacaagagtccctatcaggctctcttggtgttctctcaattgtgtttatggttatagcaactgctgcacctttaacagtgatggttgcagtaaccccgttaattattactttgggtaatggtggaggggttgtatttgatattttgacagcaacaataatcatgttgctgttctctattggtttcgtttctatggcgaaatatatagataatgctggtgcattctatgcttttattcagaaagggttgggtcgagctattggattgggctcagcgagtctggcatggatttcatacttttttttattgattgctttagaagcatatattggcgtggctttagctgatctcttgaaaagttttcttggcgtggaaattccttggtggatactctcattaagcattattagtattgttgcatatctgggttatcgccatattgaattgagttctaaatttttaggagttgcacttgtcgctgaaatcggtgttgtactcattattgatttcttgttttttcaaagaaatggtgtaactgctttaactccatctgctttttctatagatgtaatttcaagtggttcaataggtttaggcattatgtttgccattttgggatttattggatttgaatcgactgttatttttagagaagaggcaaaagatccgcagaaaacaattccacgtgctacatatttagcagtaattcttgtagggcttttctattgcatatcaacttggtgtcttgtttccatcgttgggactgacaaaataatggcttttacatcggaacatggggaaagttcatatttattagttgcagagcaatatttaggtaaagtgtttactgatgtaattttggttttacttgtgacgagtttatttgcttgtattctttctcttcataacgtagtggttcgctatcaatacgtattaggtaagtatggtgttttaccgacagtattgtcgaaggttcatgttaagcacaactcaccgtatatgtcatcagcaattcaatctgctagttcatttattctcttgaccatcttaattcttttaagttgggatccagttgccaatatttacacatggggagctagtgcaggaactttaggttatatgtttatcctgtcgttaacttgtatctctgtaattgtattttttataaaaaacaaagaaggcaatttttggaagacatttgttgctccagtattggggctccttgggttgctcttttgcctaggtatggcaattatcaatttgcctaccttagttggtgattcgattgcagttgcgaaagtcgtagggtttgtgctgatagggacattcctttttgggatgcttattgcgaacttgatgaaggctaagtcaccacagaaatttgaacgcttgaaagaactcgcataa

SEQ ID NO: 57902 - DNA, 1335 bp, Acinetobacter baumannii
atgaataaattaatacctcaaaaggttggggtggcaatacttttgcctatggttttaacgtgtatgcatttaaaggcgcaagaagtctatgacaatgatgggcttaaggttaatttaaatttagaaatggtgggtgctgtgttacatagtgaccagaattatgcggtgatggggaataaggtagaaggtaattcctcatggagtgaggggtacgcaaaatatggtacaagcctgacccagcaactagtcggtgatagtcagctctatggggcatttgatttggtcagttcagctacttggggggatggtgacgccgcaggggttacgctaggtaatgaacataaaacaaatgttgaaaatgcctatgtaggttggaagtctggtaatttattaccgaaaatgggaacagatggtgtcgatatttctattgggaagcgatcacttcaaatcggagaggggttcttgatactgggtgatatgtttaattatggcaatgtcgaccttggcgaaaatatttcgagaggtggtgcttactaccttgctgccagaaaatcatttgcacagactgcaaaaatttcattaggtggaagtgagggggtaagaagcgatttaatctggcttaagtccaataacaaagcacaagctaagacagagttagcagcaatgactttggaaaaggtgagtgatagtagtgtttggggattaacttggattcatgggctagatcaagatgaacatttaacggaactcttaggcctaaaagatcgtcgtgatatggatacagtaagtattcgttttatgaatactttggggtatgaaaatctaaaaatctctggtgaatatgcataccaagattctaaacaaaataaagaagaaaatgcttggtatgtacagggaagttggaagtttagtgatgtggttactaaaccaagtttaacttacagatatagccagttctcagagcaatatgatccactgttttatggatcaaacggtggttatgggacttggtttcaaggtgaagttgctgcaaattatggtgggccgttcagcagcaatacgaaagtacattacttaagtggtagcatctttcctcgagaggatctggaacttggaacagcctattataatttcaaaaccatagataaatcagcttacgattatagcggtagtgaagtggatatctacgcaagatggatgattaaagaacattactttatcagcccattagttggattatttaatccgaagaagagttcatctgaaggtggtttacagttaggtaaagcagatactaatgtttattcacagctgatccttggagttttcttttaa

SEQ ID NO: 57903 - DNA, 900 bp, Acinetobacter baumannii
atgattaaaggtctagcaatcacaccaccaatactcgggcgaatcagtataggtaaaatggtggaaaagaatggcaagcgcatccctgaaaaggatgaccaattcaccattaccagccaaatccaaaataaggatagtggttgggtgaaacatccacttgatgaacaacttcgagctaaagcacccaatcaaaaactccgttcaatcccagtccgtatgatcttcaatgatcctgaactgaatctacgagcggaatacagtttatttgatcgtcagacaggacgtcccgtttgtgtgggtaatggtgaaacctgccaacgactgactaatcaaggggtagaacaacatccatgcccatcccctgatttatgcccattagcacaaggcggaaactgtaaaccttatgggcgtctgcatgtcaatttagatgagtccgatgaactgggcacattcatctttagaaccacaggttttaacagcattcggactttggcggcacgactcagttattaccatgcagcatcgaatggcttgctttcatgcctacctttacaactcacgctgagaggcaaatctactgcgcaaagctatcgtacacctgtgtattacgtggatttgactttacgggatgaagttcatttacaagaggcgattcaaacagctaaagaaattgatcagaaaagtaagttgtgtggttttaatcaggctgctttagatcaaatggcacggcagggttatggtaatgcacgatttgaggtgaatgctgaggagggattagatttgctggaggagttttatgcagaggacaaccagcaacaagaccagataccagtgcatgacctaagccatgttcaggatattaagaaagggttgcagcagtcagtgcaggctttgaactag

SEQ ID NO: 57904 - DNA, 588 bp, Acinetobacter baumannii
atgaaactagataatgtattgagtgtgaaagttggtgtggctcaatttgaaaccactgatgagggtgtaaataatcttgcacaagtaggtttggttaatggtgctaatatttctgaattaggtgatttagattttgttgatgcggagttgaagtatgtgtatgtttctgctgaaaaattacatgataatgttctgaaagttggtgacattgttttgatgtctagagggtcaaatatgcgagctgcaattgtaaatcagcaagatgctgacaaaggcttaattgcttcaccgaactgtttggttttaacggctaacctgaactatgtattaccagaagttattgttgcatttctcaatagcgagcttggtcaaaaaacactagattctttaagtacaggtgcaacaataaaaaatgttcctgctcgaaaaattaaagatattgatttaagagttcctgatttagcagtacaaaacaaaattgcacaaatctttaaacagaatatcgagaccttaaaaagccttaaggtattgcagatgcagcaaaaaattactgcaaatgctgcaattcaaaaattaatggcagagtag

SEQ ID NO: 57905 - DNA, 1281 bp, Acinetobacter baumannii
atgaatcttaatgcggaagtaaaaaaacagttatttaaaacgtttgagatacttaaaacaactttatcagtggatcaaatccctgaaattctgagtttaacgagttatagcgtatatgcagagtttgatgcagtgaaaactgtatcgagtacaggtgaaaatgaaatattgaaatattttcaagattttgttcaaagacataatttaatttgggtgaatgttccagttttaaaagctgctgcacattcattttcagacatacttcggtctcttattactttttatggtgaatgtacttcaactgatgaatttgggcggcagattgtaggtcttttacaagaatgggttggtcttaatccatcttctttagggtctttttacagcagttcagaatcggtgattgcattattccagtccttaataggtgattgttctgatgctgtactttatgatggcgcatgtgggattggaatgattgcgaataggttgaaccctaagaaagcgattttaagggatatcaatcaaacggttgtgggcattactgcattattgtttaaaatgtccaacatagatgtggatttacaggttgcagataccttaacgcacaatgaaacttcttataatgttgatattgtagcgagtacaccaccatttggtttaagaatacagtctcagttggtagaaaatactgcatacattagagatattcatttgggaaaatctataccatcgagtgcctcagaaagtctatggattcagcaagccttatatcagctaaatgacactgggcgagcatttttgcaaattatacctggttggttgtttcgtggtggctatgatgctgctttaagagagaaattaattgaaaaaggttgggttgaagccgtaatacaattgcctgaaaagttgcttagtaataccaatattgaaacagtgcttttagttttaaataaagccaaagacactaatggagtggtgcgttttgtagatgcacgaactctaggtcagcgtactcgttcgcagacgacattgatgttagaagacatcactttaattcgtaatttggttatggggattgagactgattcacagcttagtcaaaccatctcattacagcagattaaggaaaataaatacaatttacactgtaatgagtattttgcctctgagattgaagaaacaaagctagacttaaaagctgagagtgacaagcttattcaggcgcagcttgaatatgagaaagctcaacaaatttttaatcagattttgagtgaagtttga

SEQ ID NO: 57906 - DNA, 267 bp, Acinetobacter baumannii
atgatgcaagtaacccaccatgcacaaaaaagaatgaccaaacgtggaattaccaaagatatgattgactttactttggattttggcgagacaaaaggtgatagatgggtgcttaatcgtaaaatgattgagcaatccattggtgatttagagcgtaaactgagaacggctaaaaaactgagagataaaggtggcatagtagttgtcgcagagggtgaatctttattgacagcttatgattttgatagccgcaaaatggcatattga

SEQ ID NO: 57907 - DNA, 2421 bp, Acinetobacter baumannii
atggcgattaagaaaacagaactttattcttccttatgggcaagttgtgatgagttacgtggtggtatggatgccagccagtacaaagattatgtgttgaccttgctttttatgaaatatgtgtctgataaatataaaagtaatccgtatagcatgattgtcgtaccagagggtgcgagttttgacgatatgcttaaacttaaaggtgataaagaaattggcgataagatcaataaaatcattgcattattggcagaagaaaatgatctgaaaggcgtgattgatgttgcagattttaatgatgaagacaagcttggtaaaggcaaggagatgcaagaccgtttgtctaagctgattgggatttttgaggggctggatttatcatcaaatcgagctgagggcgatgacctactcggtgacgcttatgaatatttaatgcgtcactttgcaaccgagtcgggtaagtcaaaaggacaattttatacgcctgctgaagtttctcgtattttagcaaaagttattgggattcgtcatgataccccacaagatgctagtgtttatgatccgacctgtggttcaggttcattgttattaaaagccagtgatgaagctccacgaggtttgtctatttatggtcaggaaatggacaatgcgaccagcgcgttggctcgtatgaacatgattttgcatgacaatgcgaccgctaaaatttggcaaggtaatacaattgccgatccacaatggaaagatggcaacgggcaacttaaaacctttgattttgctgtagccaatccgccattttccagtaaaaactggacgagtgggattaatcctgaacacgataaatttgagcgttttgtgtggggcgtacctcctgagaaaaatggtgactatgcgtttttattgcatattcttaaaagtttaaaaagtacaggtaaaggtgcggttattttaccgcatggtgtgctgttccgtggtaatgcagaagctcgtattcgtgaaaacctgattaagcaaggctatattaaaggcattattggtttgcctgccaacttattctacggtacgggaatccctgcttgtattatcgtgatggataaagaaaatgcccaagcacgaacaggcattttcatgattgatgccagcaagggctttatcaaggatggcaataaaaaccgtttacgtagtcaagatattcacaaagtggtggatgtattcagcaagcagcttgaattaccacgttatagccgtatggtgactttagctgaaattgctgataatgaatataacctgaatattcctcgttatattgattccagtgaagctgaagacattcaagatttaacggctcatttacaaggtgggattccacagcgtgatatcgaagccttaaatgcgtattggaaagtatttccaacgattcgcacaacgctttttgtcgatggtcgagagggttatgtaaagccattggttgaggcggcgcaagtcaaaagcacaattttaaatcaccctgaatttaaatcttttgctgagcagagtttgcagccatttaccgcttggtgtgaacgtgcagcacttggaaatattcaagtgggcgaacaacccaaagccattattcatcgtatcagtgaggatttactcgacagttatgccgatatgcaattgttaagtaaatacgatatttatcagatcttgatggattattgggatagcgtcatgcaggacgatgtatttattttgagtcaagatggttggaactctgccaaagtattaaaaaaactgcttgtcatcaaaggtgaaaaactcaaagaaagtcctgatctggtgatcaataaagataaatacaaagctgaaattattgcaccgtctttgatcgtggcacgttattttgcagcagaacaaaataagattgatacacaacaagccgaacttgacagcattagccaagagttggagagctttattgaagagcatagtggtgatgagggtttattggttgatgcgctgaatgataaaaataaagtcacggctgccacggtcaaaactcgtttaaaagtgagtaaagatgctgaagaaatcagtgtgttaaagcaggtgcaaaaactatttgagcaagaaagtaccttgaaaaaagcagtcaaagacttacaggatgctttagatttggcagtttttaaaaaatatccgcagcttgatgagcaagtgattaaaactttagtggtcgaggataaatggcttgcgacattgaaagctaatattgaagcggaaattgagcgagtcacacaacaacttgctaatcgagtgaaagagttggatgagcgttatgcagaacctttgccacaaattagcaaaaatgttgatggtttaagcgataaagtagctcagcatttaaaagcgatgggtttggagtggtcgctatga

SEQ ID NO: 57908 - DNA, 1329 bp, Acinetobacter baumannii
atgagtgagcagaagataccacaaggttataaacaaactgagattggagttattccagaggattggcagtgtaaaactctcggagagataggtgatgttgtgagaggggggtctccacgaccagcaggagatcctaaatactttaacggaaattttattccatggttgactgttgcatccttaacaaacattccttcttctaaaatttacgtaacggaaacgttaactaaattaaccgagcttggatcattgcaaagtagggtattgaaaaaaggcactttaattatttcaaatagtggtgcaacgcttggtgtggcaaaggttcttgatatcaagtgttgtgctaacgatggcgtggctgcaattataaatcaaagaataggaagtaaagagttttttgtccactatataaatacccaaaccaagaagcttcaggatcaaatagcaactggtaatggtcaaccgaatctaaatacagatttgataaagggtattttcactccttatccacctttagaagaacaaaccgccattgctaccgcattatctgatgtcgatactttagtcagcgaacttgaaaaactgattactaaaaaacaggcaattaaaactgcaactatgcaacaacttttaacaggtaaaatccgtttaccgcaatttgctttgcatgcagatggttcgaaaaaaggatttaaacaaagtgagttgggagaaatcccagaggattgggagattgtttatctaggtgatattgctttattttttaaaggcgtaggtttaccaaaaagtgagttagttgaagatggcttatttccatgcgttcactatggtcagttgttcactaaatataatgagcaaataggcaatgtagaatccacaacgaatagtagcggaagttttttctcgcaagaaaatgatgttttaatgccaacctctgatgtaactccaaatgggttagctactgcaagctgtctaatgcaatcagatgttgttttgggtggtgatattttagttattcggtttaatgctaataaagttaatggagtatttttttcttacttaattaatatattaaggaataacgtgatgcagttagttactggcacaactgtttatcatctttatggtagtgatatggctaagtttatattttataagccaagccttagtgaacaaaccgctattaccactatcctatccgatatggacagcgaaattcaggcattagaaaaacgtctgaataaaactcgtcaaattaaacaaggtatgatgcaggaattgctgacggggaaaactcgattggtgcaacctgaagcaagaggagtgtga

SEQ ID NO: 57909 - DNA, 2658 bp, Acinetobacter baumannii
atgcttgaacaacagaattataaaaaagcacgtttttttaagtgtgccttgcaggtcaatccagtgggttatattcagtatcgtggacaagagcaaagtttgtctgaagctgaatataatcaacagttgcttaatgctgctttagaagctgagattgaagtgattggtttagcagatcatggctcagtggatcagatagaagaactcagaactctgtttaatcaaaatggaattgtggtttttccaggttttgaaattgcttctagcgaaaaaattcattttgtgtgtttgtttgatgagagtaccacagcagatttaataaaaatgcatttaggtgctttgtgcgtggatataaatcatccagcagcccctgtgcaaaaatcagcaatagatattattaattacataaacgaaaaaaaaggctttatttacgcagcccattgtaccaatgatgatggtgtattaaaacgaagaatgaatcatgtttggcagcataaaggtttattggcagcccagattccaagctctattgaagatttaagtggtattgaaaatgacttctatcgtaaagtttttttgaataaagatcccaattattgtcgagagcgggagatggcagccattaatgcggctgatgtggcaaaaccgagtgatattaaaaaagatgttgcatcttgcttaattaaaatgactaaaccatgttttgcatcctttaagcaagcatttttagatgcaggatcaagagttcgcttaaactctgacaagcctgaaagctatgcctctgcaatagaacggattcgatttgttggtggctatcttgatgggctggacattgaattgtcagatcacttgaatgcggttattggtggccgtggtacgggtaagtcaactctgctcgaatgcattcgttatgcttttgatttagaacccaaaactcaaaatgccataaaacagcataaaagtgtcattgaaagcaatttaggcaaagaacggggtatggttgaaattacgcttcgttcagcaactatgcatggtcgtagattcacgatcagccgtaaatatggaaatcagcctgttgtggttgatgagcagggtaatatttcaccttatcatccagcagatttgttgcctgatcttgagttgtacggacaaaatgaaatttacgagatgacacgagatgaggcaagccgtaaccaactgattgagcgttttttggaaggtgaacatcagcattttgatgtagatataacgaaagtgttcgcaaagctcaaagaaaatcgagaatctataagccgtgcattgagtcaaaaagatgatattgaagcagaggtagagcgtctgcccaaattacttgaacaagctaaacagtttcagactttaggaattgaggaaaaacttagaattatccctaaattggaaaaagaaaaacagttaaatgaacgagtgagcgaggaagtaagtcgtgtaaaaatagcgattgaaacccttaacgatagtttgcctgataccatttttatcaatgataccaatttggaagatttgcctcatgcggatttgttaaagcaacaacgtagcattttagagacgttaaaaactggtttgactcaacaattgggacagttggaacagcttgttcagactacaagcatacagttattaccaattcaacaaacattaattgaaaagcagaaagttgaagaaggacatttagaaaatgctttcaaggaaatacctgctagtcaagggaaaacaggacgacaaatcggtgctgagtatcagacattattgaagcaaattgaacagattcgtccgaagcaagtaatattacaaaatagacagatgcagattgatgggttgtataatcagcgcaagctactattattagaactcgaccagcatactactgctcgtgcaagtagtatgcaaaagtcagtgaaacgattaaatcgaaaactcgatcaaaaagttaaacttactttacaacccgaagggaatcgtcagccattggttgattttctaaacacatgtagtttagaaggtgttggacttaaacgacttgcttgggtattagaacaagaattttcaccagcgaaccttgccgccaccattcgagatggtgaaacggagttagaaagaaaattcagtatacctaattcagttgtacgggctctaatacatttgccagagcaaaaattattagaaatagaagagttactgttgccagataccatgaccattgaacttaatgtaactcatggtgaacgtgatgctatttttcgaccgattgatgaactttctacaggacagcaatgtacagcagtcttacatttattgcttttagataatcaagacccgttgattcttgatcagcctgaagataatttggataacgcatttattgccgaacgcattgttgcagagcttcgtagagctaaacttagtcgtcaatttctctttgctacacataatgcgaatattcctgtatttggtgacgcagaatggattggtgtgttaagtgttcaagacaacaaagggatgattctgccagatcaacaaggtgcgattgatgtaccaaaagttcaagagttggcagccgatatattagaaggcggaaaaagtgcatttaatcaacgtcgtgaaaaatatggttttaattaa

SEQ ID NO: 57910 - DNA, 1221 bp, Acinetobacter baumannii
atgttaaaaactgagttgttggaactaattgccaacggtgaaaattcaggtgttgagtttaaacgcgatgatattcgtcctgagcaactggcgaaagaagtggttgccatggcgaactttcaaggtggacgcgtactgctaggagtggaagatgatggcacggtgagtagtatacaaagaccagacttagaagaatgggtgatgaatatatttcaaaataaaattcatccaatgattttacctttttacgaagaggttaaacttgatgatggtaaaacggttgcggtagtaagttttccaataggtatttctaagccttacgtgctgcgtcatagtgggaaagaggaaatctatattcgtgttggtacaacctcacgcttagcaactcgagaacagcaaatgcgtttgtttgagttgggtggcatgttacatacagaagtgatgcccgtaccccgtactgatatgagttgtttagatgatgctcgattgatgaattatattcgagatattttgcgtgaccctgatgtcccacaatcaacagaggcttggcaagcgagattacttggattgggttttctgaccgaagctgctggcaatatttgctgtacgattgcaggcttgattttatttggtaaaaatccacgacgctatttaaaacaagctggtttaagagtgatggcttttcagggtgatgataaggaatatcaagctgcacttgatgaaattattgatggtccaatggttggtcgttgggatattgatcagggggataaacgtttagttgatggtggtgtaattgaacgttttatggaggcaatgactccatttatttctcaagaatctgctcatgtgaatgaggagttaagacgagaaatgcactggttttatgctcttgaagctgtgcgtgaagcattgattaatgctttggctcaccgtgattggacacgttttgtagaaattgaggtttctgcttattcaaatcggcttgaaattattagtccaggcacattacccaattcaatgactgtagaaaaaatgaaagcaggtcagcgttcgcctcgtaataccattgtgatggaggtcctacgtgattatggttatgttgattatcgtggtatgggcgtaagaacaaaaattgtacctttgactaaagccttaacaggtaaagaacctgaatttgaacttacagaagattatttaaaaacagttttgtatcgctag

SEQ ID NO: 57911 - DNA, 3093 bp, Acinetobacter baumannii
atgagccaagtcggtcagcgtgaacgcattacccaaaatcgagtggtgcatttttttcagcaacaattaggctatcgttatttaggcgattggcaagatagaaatgacaataaaaatattgaacacgacattttaattgcttggcttaaaaaacgtggtatcagtgatgctttgattaacagaaccatgcgccaactcgatactgcaactgcattgggtgaaggcaaaaaactttattatgccaataaagatgtatatcgcttattgcgttacggagttaaagataaagaaggtgctggtgaactaaatcaaaccgtttggctcattgattggcatcatcctgaagcaaatgattttgcaattgctgaagaagtttatattaaaggtgaaaataaaaaacgcccagatattgtgctatatatcaatgggattgctttgggtgtattagagctgaaacgttcattggttgatgtatctgagggcattcgacaaaatttagataatcaaaaaaaagattttatccgtaatttttttagcacaatacaactggtgatggcaggtaatgacacacaaggattgcgctatggcatgattgaaacacctgaaaaatattatctggaatggaaagaagagcttaatcacgtagagggacataaactcgattatcatttaggtagaatgtgtaataaacaacggtttttgcaaatcattcatgattttatagtctttgatgcgggtgtgaaaaaaacttgccgacataatcagtttttcggtattgaagctgcaaagcaacgtattgccaaacgagagggtggtattatttggcatacccaagggtcaggtaagagtctgacaatggtgtggttagctaaatggatacgagaaaatgtcagtgatagccgtgtacttattgtcacagatcgaactgagttggatgagcaaattgagaaagtctttactggtgtagaagaagaaatttatcgtacaaaaagtggtgcggatttggttgcaacactgaatcagccaaccccttggcttatgtgttcattggtgcataaatttggtcgttcttcagacgcagacgatgatgctgcaacgaatgaatttattgaacagctcaaacaatccatgcctaaagactttaaagctaaaggtaatgtatttgtttttgttgatgaatgccatcgtacccaatcaggtaaattacacgaggcaatgaaagcgattttacccgaagccatgttcattggttttacgggtacacctttgatgaaaaaggataaacagaaatcaatagaagtatttggttcctatattcatacctataaatttgatgaagcggttgctgatggtgttgttcttgatttgcgttatgaagcacgagatattgaccaaaatattagttcacagaaaaaaattgatgaatggtttgaagcaaagactcgtgggctgtcacgcctagcaaaaacccaacttaaacagaaatggggaacaatgcaaaaggtcttatcaagtaaatctcgtttacagcaaatcgtaaatgatattttactggatatggaaactaagccacgtttgatggatgggcatggtaatgccatattggtttgttccagtgtctatcaggcatgtaaggcttacgaaatgtttagccagactgatttggctggtaaagttgctattgtgaccagttttcagccgacccctgccagtatcaaaggtgaagaaacaggcgaaggactcaccgaaaaactatttaaatatgatatttaccgcaaaatgctagcggattattttgagaaaacggaagaagcagcagcaagccttgtcgaagagtttgagacatctgttaaaaaacgttttattgacgaaccttcacagatgaaattattgattgtagtggataaacttttaacaggttttgatgcgccatcagcaagctatttgtatattgataaacacatggcagatcacaatttattccaagcgatttgtcgggtcaatcgcttggacggtgatgataaagaatatggttatattgtcgattataaagacttatttaaatctatagaccaagctatttctgattatactcaggaggcttttgatggttatgataaggacgacgttgaaggattattaaaagaccgtttacagcaggctaaattagatttagatactgctttagaaatggtcaaggcattgtgtgagcctgttaaagcacctcgaaacactcaggactatattcattatttttgcggggaatcagggcataatcaagatgaactcattgaaaaggaagctctccgtttagcgctttatcaaaatgtggtgaagctcatccgtgcttttgcaaatattgccaatgaaatgcaagaggctggctataatgaacagcagattgtaactattcgagccgaagtcatacattttgaaaaagtgcgtgatgaagtcaaaattgctagcggcgatttgcttgacatgaaacgttttgagcctgctatgcgtcatctactcgatatgtatattcgtgctgaagacagcgaagtatcgatggactttgaagagttaggcttgatagagttgattgtggaaaaaggtgcagatgcgttggatgcattgcctaaagatattcgcaatgacgaacaagcgatggctgaaactatcgaaaataatgttcgtaaaacaattattgatgaaaaccccgtgaatccaaaatactacgaacaaatgtcagttttgttagatgaattgatagaattacgtcgtcaaaaagccattgaatatcaagaatatttaaaacatatccgtgatttatctagtaaaattattcgccctgaaaaaagcacatcacattatcctagctctatggatagtagtgctaaacgagcgttatatgataattttggaaaggatgagttactagccacaaagattgatagtgttattcgctatactaaaaaggcagattgggtgggcgataaatttaaagaacgtgaaattgcatttgcaatacagcaagacacaaaaggctatgatattgatattcaaagtgtcatggagcttgctaaagcgcaacgagaatattggtga

SEQ ID NO: 57912 - DNA, 702 bp, Acinetobacter baumannii
atgcaatggctacatattggtgagcttgaggtagagctgcaccataaggcaatcaagaacttacatttgagtgtgttgccaccagatggaaaagtcagggtatctgctcctattactatgtctgatacggctatacgcatggcggtaattagtcgtattccatggataaagaaacagcaatcggcttttcttaatcaatctcgtcaatcaatccgagaaatggtcagtggggaatgccattatgtttgggggaaaaaatatcgcttaaatattgtggcaacatctggacagcatcgcattgaattttcccatgctaatcggcttgatatgtatgttcatgcaactacctcaacccaaaataaacagaaattactagaagcattttatcgaatgcaactacaggaaaaacttaatttacgctgttcatctttacttactagaattggtgtagaaccaagttttattggtattcgtaaaatgaaaacccgttgggggagtgctaatccattgtcgaaaagaatatggctgaatttagaattggcgaaaaaaccagttgaatgtttggagtttattcttgtgcatgaactggtgcatttaattgagcgtcatcataatgatcgttttgtaatgtatatggatcggtttcttccccaatggcgtgagcgaaaggctttgttgaatagtttacctttaacctcctaa

SEQ ID NO: 57913 - DNA, 1065 bp, Acinetobacter baumannii
atgattagattacagcctgatgaatcctatacatctctactcagtactcaccatatcactcaagcgtatatccagccttttattggctatatacccaataatcgccctcctgttggcttggatgattatctgaagttgtatctcatgattactgaaaataagacttttaagattatctccaaacaaccaacttacgactatctggtgcctcatgtttatctaacgcccaagggtgttaatttactcaagattattcaggatattccgactaatcctttcctgacaggtaaattttcagatgtgatcatcagacctgaaataaagctgatggttgatttactgtacaagcacagactcattgactttccacttggattgtatcaacagtttgaagcagttgttgatgggttctgtcaggatctaaaagtgagatctaaaacacgagattttatgagcttgaaaaatcactgggattcttcatttggcaattctagaaaggcttataatcgttttgaagaagctgtcttatgtaacaattcaatgtttcaggttcattcattgcttgtttctgctgagtttatgaatgttgatgatttttcaatggatcagagaacatttagtcctgtgactgttgaggatatgctgcgggccacgtcgagtaaaattatcgaagcagtctgggctaacaatgctgaaaatcacactctaggtattttgtcgaaacaggaaacgactattcgaggttttaggagtattcggctcatattttttgtagcacgcgaagataccgactttaccccttttgctgaatctcagctctatacagatgttgaaccttttgtattccgagaaggtaaaaccagtattgggtggagtgatattacctgcatgaactcaggggtagagcctttggtttatggtatagaatccaatttttacgatacaaatcagaactacattgggatgcgacttaccactttaaaatacagtttgattggtcctgaatactgggttcggtttaagtacaccaacacaacgtttaaagtcgaaaaaagttcatattaa

SEQ ID NO: 57914 - DNA, 1182 bp, Acinetobacter baumannii
atgcgcattataaatgtaaatgctggtcgacatatgggaacacatgaccaatggctccagcaatttgaaaccgaactgcaaattactccagtcaacgatggttataaaaccacctttttagtaaattcacaggataacatcctagctcctgctatagggaaagctaaactggtcaaacagttcaaaaaacgtaacttccctgaagtcacaactgaaacgaaaagactatcgaatggtcgctatggctttgccgtcaaacaccctgctcaaatgagtaatttaccttctgatattgcagaacttataaactattctacgctttcagacattataaagggtcttgacattcaagcatttgattatgcactaagccagatgtcagaggatgaattagatcttctacgtaatggcacacctttaccttccagtctaaaggagaatttgctcccgtacattaatgcaataaataagtttattcgattaattcgtgccttttttcgtcgcccgaacatcagacgcaaagtttacgatgagcggaagaatctgaaaaaaaataagtctcgaatgatcgaaatgttcaactctttaattgaacggtattcacgtgtggtcgttgttcgacttgatttatatctcaaacataaacctgaaacattactgcaaacctgtttcaaagctgaagattgtttatctaaaaatgattttgatgcatttaaaaagtgtgttgaacaactattagaaaacaagcggcataatcctgtgttgaaacaagccatcggttatatttttcgttttgaatatacgccaagacgtggattccatctgcatacattctggtttttcaatgggaataaaaatcaggaagacattagcctcgcacaaggtattgagaaactatggaaaaaagtgaccaatgatcaaggttatgcctatatctgtaatatgcgtaagcatacttacgaaaactgttttttaggcacgattgaatacaaccaaacgcagaaaagaaagtggcttgaagagggttttgaatatcactgtaaaaccagtcagttattcattttcagcaatatgaaaaaaggacgacgtttccagattagtcaacctttgaaatcacagactcgtggtcgtccgagaaaaaaccaccttgatgtcaatacgtttacgggagatgaagtatga

SEQ ID NO: 57915 - DNA, 234 bp, Acinetobacter baumannii
ttgaataccagctacgatgcagttcaaatgctcaagcttcctcagctgatcaaactcataggtttatctcggtcatccgtttatgaccgactaaacccacgctcgaaacgttacgacccagacttccctaaacctgtgaagttaaaccgggcatcacgctggttactcagcgaggttgaagagtggattgaaagtaaaatttcaacacgtaatcaagggaatactgagagctaa

SEQ ID NO: 57916 - DNA, 1350 bp, Acinetobacter baumannii
atgccaagttctcagctacaagaacaaatactgatagtgaatgcactagaaaaatttatatttgaaaaaatccgctcgactccatttttgggttcccataaatctatcctcatggcatctaatgaagaagatttgaggaaggcaatatataccttacacgatgaaggtttgttccgagaatcggaagaagataaaattaaaaggctttgtaaagatctagtgaaagcttattttccagataaaaatggcaattatgaagttgaaaagcttgattgtgaatatttaccaaaacattatgatgaaatcattcaagctataagaagctttcattgcactgttgaagctagaaatcatgacgaaatagaacgcctttatcgcacattacttagggattattcaacacatcgtgattgttataatttaaaagatatacctgaaagtcttcagcagacgattcatcaaatacagaacagcttcctttcgcaggaagcagacaagatcaaagaaaaggcttatattgactttgtaaaaggatttatcaataaataccaagatagccatgaacatctttgggatgaattaaaattttcaaaacaagacaaaaaaactctacgagagttagctctgcttttaaataaacttaaaggtccgttcaaaaataaatttgaagaacgccaacttaaatcacagatccgcccaaaagtaaaaacccaacaaatcctgcttgagcgtctaactgagtatttaaacatcagagcagaactctatgttcgaacaacgatcaaaaaaatgtattcgcgtaaagaaaaaatgtacaaaaaacagaatgtcaatattgatattctattacgtactcaactcaataaataccaaacacaaatcttaaacagaagccaaagagttaaggtcattgcaaagattggaacaaaatttacaccagcattaaaatcaaaattagaaaccaaaatgaaagctaaaaagaaagaacataaaaaatgtctaagggaagaaaagaaaaaaactattcaacagcttaaatttaaaaaacagctgcacaaacatattgtgaaaaatctaacaaatccattaagtaagactgaaaccacttatgacttaagcttatttacgcccactacatctattcatgatactgctccactcaatgagctaaaaacaaaaatcggtaggaataaatccgctaaaaaacagagaggttttaaatctcaaatatatccagtatccccagttaaaagaaattttattggcgatacaaatagaattctaaaagaaaataaagaactatatgagtctttacgtgatttattaaactacaccattcacactaaatag

SEQ ID NO: 57917 - DNA, 177 bp, Acinetobacter baumannii
atggcacggcaaggctatgacaatgcacattttgaaactgacattgaggagggtatggatgtggtggaggagttttatgcaaatgaaaattcagaaactgaccaagtacaggctgaactgaaagctaagtccaaggtgaagcttcatcaggctgagaactttgtacagggtatttaa

SEQ ID NO: 57918 - DNA, 903 bp, Acinetobacter baumannii
atgaatagcacacaaagcaatactcaatttcttttcgatttatatgcgaactggtcaagacggatgcaggaaaatccgaatatgaccattgaagactttcgcagtatgtttgatgaatggcatcaacctacattggaaccggaagaagtgtcttataaattcgatgttgtggcaggtgtagaaggtctttggatttatccgaaagatgctgacttatccaaagtcatcatttatacccatggcggtggatttgcggtcggttcttcggccagtcaccgtaagctggtggggcatttggccaagtatttaggggtatccgcatttgtggttgattaccgacgttcaccagaacatgtcttcccggcacaaattcaggacgtgacagcagtatataaagaactactccagcgtggctttactgcaaaaaatatgctgaccgcaggggattctgcgggggggaatctggcgatatcaaccgtactcaatctacgaaatgaagggattgagttgccaggagcagtgattgcattctctccttggctggatatggagcacaaaggtgaaaccctgatcagcaacgatgccactgatgccttgattacagtggatctgcttaaaggcatgtcacaaatgttcttgggtgaacatggtgatccggcaaatccattggcgaatccgttaaaagccaattatcaggttttcccacgtttgtatatcaatgccggatcagttgaatcacttgtagacaatgcaacacgtcttgctgatattgcaaaaaaagagggtgttgatgtgactttatctgtggtggacaacatgcagcacgtttttcctttcctagctgggcgtgcaagtgaagctgatcaagaattagcgaaaattgcgcagtggtttaaagcataa

SEQ ID NO: 57919 - DNA, 1059 bp, Acinetobacter baumannii
atgcactgttactgcgtgacgcatcatggacaaccactcgaagacgttgagaaagaaattccgcaaccgaaaggtactgaagttttactccatgtaaaagccgcaggtctatgccatacggatttacacttatgggaaggttattatgatctaggtgggggcaagcgtttatcccttgcagatcgtgggctgaagccacccttaaccttaagtcatgaaattacaggtcaggtggttgctgtcggtccagatgcggaatcagtcaaggtcggcatggtcagcttggttcatccatggattggttgcggtgaatgcaactactgtaaacgtggcgaagaaaacctgtgtgccaaaccgcaacagttaggcatcgccaagccgggtggttttgccgaatatatcatcgtgccgcatccacgatatctggtggatattgcaggtctggatctggctgaagctgcacctttggcatgtgcaggcgtgacaacatacagtgcactgaaaaaattcggtgatttgattcaaagcgagccggtggtgatcattggtgccggtggtttagggctgatggcactcgagttgctcaaagctatgcaagccaaaggcgcaatcgtagttgatattgatgacagcaaactggaagcagcacgtgctgccggtgcattatcggtcatcaatagccgaagtgaggatgctgctcaacagctgattcaggcaactgacggtggtgcacgtctgatccttgatctggttggcagtaatccaacattgagccttgccttggcgagtgctgcacgtggtgggcatattgtgatctgcggattgatggggggagaaattaagctttccattccggtgattccaatgagaccactcacaatccagggcagttatgtagggacggtagaggaattaagagagctggtggagctggtgaaagaaacccacatgtcagccattcccgtgaaaaaactgccaatttcgcagatcaattccgcatttggagacttgaaagatggcaacgtcatcgggcgtattgtgcttatgcacgaaaactga

SEQ ID NO: 57920 - DNA, 873 bp, Acinetobacter baumannii
atgaaacaaatgaaaaactatttctatcatcgttcaaatcaaaaaatagctgctttggtctttgctttaactgccgctttggacctgcaagccgcaggggtgagttctgatgccggggattatcaagcacttccagggggaaccaacttagcggttgcctattaccagcatacggaagcggataaggcgtatgcaaatggtgataaagtcgctgatgatctcgatttaagcattgatttgggaatattgcgttacgttcgttttattgaagtaggggattggattgtagatcctcaattcctcttgccttttgccaagcaaaagatgaatggcgctgatgatatctcgggtgtcggtgatttaattgtgggtggtatcgcctggccattgcatgatgctgaaaaagggcgctattttggtttcggtggttttttgaccgtacctaccggcagtaatgaaacgaagggttttgccatcagtaatgatcgctatcaatataatgttcaggccggttattaccatgctttaactgataaatttgcgcttgagggggtggggcagtttgaactttatagcgagcaaaaatataccaacattgagaaagaggtttttttccagacagatttctccgcactctataaagtgaccgataaatccaatttggctgtcacctggaggcataccgatggcggtaaagaaaaggtgaatggtgtcactgaacgtggcagtgatagaaaagatacctttgtcgtttctgcttctaccaatatcaagccgaatctgcagctattattacaatggcgacaagatgtgaatgttgaaaatggcttggaaatttctggacttcagtcacgtttactgtatgccttctaa

SEQ ID NO: 57921 - DNA, 744 bp, Acinetobacter baumannii
atgtcaaataaattcaacaataaagtcgctttaattactggcgctggttcaggtattggtaaaagcaccgcactgcttttggctcaacagggtgtaagtgtagtggtttcagatattaacctggaagcagcacagaaagttgtggacgaaattgtcgctttaggcgggaaagcggctgcgaataaggccaatactgctgagcctgaagacatgaaagctgcagtcgagtttgcggtcagcacttttggtgcactgcatttggccttcaataatgcgggaattctgggtgaagttaactccaccgaagaattgagcattgaaggatggcgtcgtgtgattgatgtgaacttgaatgcggttttctacagcatgcattatgaagttcctgcaatcttggccgcagggggcggagcgattgtcaataccgcttctattgcaggcttgatcgggattcaaaatatttcaggctatgtcgctgcaaaacatggcgtaacgggtctaacgaaagcggcggcattggaatatgcagataaagggattcgcattaattcagtacatcctggctatatcaaaacgcctttgattgcagaatttgaagaagcagaaatggtaaaactacatccgattggtcgtttgggacagccggaagaagttgctcaggttgttgccttcctactttctgatgatgcttcatttgtgaccggtagtcagtatgtggtcgatggtgcatatacctcgaaataa

SEQ ID NO: 57922 - DNA, 660 bp, Acinetobacter baumannii
gtgcgctctatctggcttagacacaatcttgagaatttcaaaaagcgattaaaggcacttgaaattaaagttgctcaagaaggcattcagttgaatgatcagcagattgccgcattagaacgtaaacatgaagatgatgttgcttgtggtgaaattgaaacacatcatccaggttaccttggagcacaagatactttttatgtcggaaatctaaaaggtgttgggcatatttatcagcaaacttttattgatacttatagcaaagtggttcactgcaagctgtacacaaccaagacaccaatcacagccgcagatttattgaatgaccgcgtgttaccattctatgagtcacaaggattgccaatgcttcgcattttgaccgacagaggcaccgaatattgcggtaaagttgaacatcacgattatgagctttatttggctctgaatgatattgatcacactaaaactaaagcagcatcaccacaaacaaatgggatctgtgagcgcttccataagacgatcttgcaggagttttatcagattacttttcgaaagaaactctatagctcattagaagagttacagcttgatctagacggttggctgaaattctataatactgaacgaacccatcagggtaaggtgtgtaatggcagatga

SEQ ID NO: 57923 - DNA, 942 bp, Acinetobacter baumannii
atgagcacagacaaagcaaatacgctgatcaaacccgaagatgtcgtgttatggattccgggtaatgtcacaattgacagcatgaatgccggttgggaaaacattgcaatcagagggtacgaatataccaacctcgatgtgcatattcctgccatgcgtgactacatgatcgtcaactataaaaaaagtgcggcggaaatgcgtagaaaaggcgatgcctcttgggatacccaagtggttaagccgggttatgtctccttgttgacctgtggtgaagattcccgctgggcgtggaatgaccatattgccgtcacccatgtctacatttcgcatgactccatcacctcaatggcgaataaggtgtttgattatgatatcgcttcgatccgaatcagagacgaagtcggtgtggaagatcatgttttacctgctctgacttcacttttagaactagaattaaagcaaggtggtttaggtggaaacctgtatttagagagcattaaaaaccagatcgccctgcatttactccgtcagtatgccaaattagattttaaggaaggacagtgccgttctggttttactcccctacaacgcagactgttattagaatttatcaatgaaaacatgagcattaaaattaccctcgaagatttagcgggattagtcaagatgagcgtgcctcatttaatgagaaaatttaaagtcgattttggtaattcccctgctgcctacatcatgaatctcagggtgcaatttgctaaacgtttgctcacttcaaaaaaagaaattccactgaaagtgattgccagtgaagccggtttttgcgatcagagccatatgacccgagtatttcaaaatttttttgggaaaacacccatcgaaatcagacaggaacacaccaatctcgtgtctgaaaattcagtctcctctattgttttttga

SEQ ID NO: 57924 - DNA, 1434 bp, Acinetobacter baumannii
atgaactatccaaatatacctttatatatcaacggtgagtttctagatcataccaatagagacgtcaaagaagtttttaatccagtgaaccatgaatgtattggactcatggcctgtgcatcacaagcagacctggactacgcacttgaaagttcacaacaggcttttctaaggtggaaaaaaacttctcctatcacccgtagtgaaatcctcagaacctttgcgaaactagcgcgtgaaaaagcagcagaaatcgggcgcaatattacccttgatcaaggtaagcccctgaaagaagccattgcagaagtcactgtctgtgcagaacatgcagaatggcatgcagaagaatgccgacgcatttatggccgtgttattccaccgcgtaacccaaatgtacagcaactagtagtcagagaaccgctgggcgtatgtctggcattttcaccgtggaatttcccgtttaatcaggcaattcgtaaaatttctgctgcaattgctgccggctgcaccatcattgtgaaaggttctggcgacacaccaagcgcggtatatgcgattgcccagctatttcatgaggcgggtttgccgaatggtgtgctgaatgtgatttggggtgactcaaacttcatttctgattacatgatcaaatcgccgatcatccaaaagatttcattcacaggctcaaccccggtgggtaaaaaattagcctcgcaagcgagtctgtatatgaagccttgcaccatggaattgggtggtcatgcaccggtcatcgtctgtgatgatgctgatattgatgccgctgttgaacatctggtcggttataaattccgtaatgcaggacaggtctgtgtatcaccaacccgtttttatgtgcaggaaggtatttataaggaattttctgagaaagtggtgttaagagccaaacagatcaaagtgggttgtggcttagacgcatcctcagatatgggaccattggctcaagctcgccgcatgcatgcaatgcaacaaattgttgaagatgcggttcataaaggctcaaaattactgcttggcggaaataaaatttctgacaaaggcaatttttttgaaccaacggtactcggtgacttgtgcaatgacacccagtttatgaatgacgagccatttggtccgatcattggtttgataccttttgacacaatagaccatgtcctggaagaagcaaatcgattaccatttggattagcctcttacgcttttaccacatccagcaaaaatgcgcatcaaatctcatacggactggaggctggcatggtttcgattaaccacatgggattggcgctcgctgaaacaccttttggtggtattaaggatagcggttttggtagtgaagggggtatcgaaacctttgacggttacctcagaaccaaatttattacgcaactcaattag

SEQ ID NO: 57925 - DNA, 1632 bp, Acinetobacter baumannii
atgtcacaaaaaatggattttgatgctatcgtgattggtggtggttttggcggactttatgcagtcaaaaaattaagagacgagctcgaacttaaggttcaggcttttgataaagccacggatgtcgcaggtacttggtactggaaccgttacccaggtgcattgtcggatacagaaacccacctctactgctattcttgggataaagaattactacaatcgctagaaatcaagaaaaaatatgtgcaaggccctgatgtacgcaagtatttacagcaagtggctgaaaagcatgatttaaagaagagctatcaattcaataccgcggttcaatcggctcattacaacgaagcagatgccttgtgggaagtcaccactgaatatggtgataagtacacggcgcgtttcctcatcactgctttaggcttattgtctgcgcctaacttgccaaacatcaaaggcattaatcagtttaaaggtgagctgcatcataccagccgctggccagatgacgtaagttttgaaggtaaacgtgtcggcgtgattggtacgggttccaccggtgttcaggttattacggctgtggcacctctggctaaacacctcactgtcttccagcgttctgcacaatacagcgttccaattggcaatgatccactgtctgaagaagatgttaaaaagatcaaagacaattatgacaaaatttgggatggtgtatggaattcagcccttgcctttggcctgaatgaaagcacagtgccagcaatgagcgtatcagctgaagaacgcaaggcagtttttgaaaaggcatggcaaacaggtggcggtttccgtttcatgtttgaaactttcggtgatattgccaccaatatggaagccaatatcgaagcgcaaaatttcattaagggtaaaattgctgaaatcgtcaaagatccagccattgcacagaagcttatgccacaggatttgtatgcaaaacgtccgttgtgtgacagtggttactacaacacctttaaccgtgacaatgtccgtttagaagatgtgaaagccaatccgattgttgaaattaccgaaaacggtgtgaaactcgaaaatggcgatttcgttgaattagacatgctgatatgtgccacaggttttgatgccgtcgatggcaactatgtgcgcatggacattcaaggtaaaaacggcttggccatgaaagactactggaaagaaggtccgtcgagctatatgggtgtcaccgtaaataactatccaaacatgttcatggtgcttggaccgaatggcccgtttaccaacctgccgccatcaattgaatcacaggtggaatggatcagtgataccattcaatacacggttgaaaacaatgttgaatccattgaagcgacaaaagaagcggaagaacaatggactcaaacttgcgccaatattgcggaaatgaccttattccctaaagcgcaatcctggatttttggtgcgaatatcccgggcaagaaaaacacggtttacttctatctcggtggtttaaaagaatatcgcagtgcgctagccaactgcaaaaaccatgcctatgaaggttttgatattcaattacaacgttcagatatcaagcaacctgccaatgcctaa

SEQ ID NO: 57926 - DNA, 1719 bp, Acinetobacter baumannii
atgcaagaacaagaaatcgaacgcgaatcaatggagtttgacgtcgtgattgtcggcgcaggaccggccggtctttctgcagcgatcaagatccgtcaacttgcaattgaaaacaacctgaacgatctgtcggtttgtgtggtggaaaaaggctctgaagtcggtgcgcacatcttgtccggtgcggtactggaaccacgtgccatgaatgagctgttcccgaactggaaggaagaaggtgcacctttaaatgttccagtgaccgaagacaagacctatttcctgctctcggatgaaaaatcacaagaagcgccacactggatggtgcctaaaaccatgcataacgatggcaactatgttatctcgctcggcaacgtagtgcgctggttgggtcaaaaagcggaagagctggaagtatctattttcccgggctttgccgctgctgaaattctgtaccatgcagatggttcggtgaaaggcattcaaaccggtgacatgggcattggcaaggatggcgaaccgacccataactttactccgggctatgaactgcatgccaaatacaccctgtttgctgaaggctgccgtggccacctcggcaagcgtttaattgccaaatacaacctcgataaagattcagatccacaacattacggtatcggtatcaaagagctgtgggaaatcgacccggcgaaacacaagccaggtctggtgatgcacggtgccggctggccattgtctgaaaccggttcttcaggcggctggtggttgtatcatgcggaaaacaatcaggtgactttgggcatgatcgtcgatctgtcttacaccaacccgcatatgtatccgtttatggaaatgcagcgctggaaaacccatccgctgatcaagcagtatctggaaggtggcaaacgtatttcttatggcgcgcgtgcggtaaccaaaggcggctttaactcgctaccgaaatttaccttcccgggcggatcgctgattggtgacgatgccggcttcctgaactttgccaaaatcaagggctcacataccgcgatgaaatccggcatgctctgcggtgaagcagtgtttgaagccattgctgccggtgtggaaaaaggtggtgaccttgcggttgcgcgtgtgacggaaggcgaagacttgtttgccaaaaaactgacttcttacaccgacaagttcaataatagctggctgaaagaagagctgtacaactcgcgtaactttggcccggccatgcacaagtttggtcagtggctcggtggtgcgtttaactttatcgaccagaacgtgtttaaggtgccgtttaccctgcatgacctggtgacggatttcggtgcgctgaaaaccgtcgatgcggtgaacttcaagccgaattatccaaaaccggatggcaaactgacctttgaccgtctgtcttcggtgtttgtatccaacacggtgcatgaagaaaaccagccagcgcatttaaaactgactgacacttcgattccggtgaatgtcaacctgccaaaatgggatgaaccggcgcagcgctactgccccgcgggtgtatacgaaatcatggaaaatgatgacggttcgaaacgcttccagatcaatgcagccaactgtgtgcactgcaagacctgtgacatcaaggatccttcacagaacatcacctgggtaacaccggaaggtggtggtggtccaaactatccgaatatgtaa

SEQ ID NO: 57927 - DNA, 1155 bp, Acinetobacter baumannii
atgattcgcgatcaagacacattaaatcagctggttgacatgatccgtcagtttgtcgatggcgttcttattcccaatgaagaaattgttgcggaaaccgatgaaattccagctgaaatcgtgcagcaaatgaaagaactgggtctttttggtctcaccattcctgaggaatatgagggtcttggcctgaccatggaggaagaggtttacattgcatttgaactgggacgtacctctcctgctttccgttcactgatcggcactaacaatgggatcggttcatcaggcttaattattgatggctccgaagagcagaaacagtattttttgccacgtctggcaagtggtgaaattattggttcattctgtttaactgaacctgattccggttcagatgctgcctctttaaaaaccacagcggtgaaagatggtgatcattacattttaaatggcactaagcgttacatcaccaatgcaccgcatgcgggtgtctttactgtcatggcacgtaccagtaccgaaattaaaggtacaggtggaatttcagcctttatcgtggacagtaaaactcctggtatttccttgggtaaacgtgataagaagatgggccaaaaaggtgcacatacctgtgatgtgatttttgaaaactgtcgtattcctgcatctgcactcattggtggtgttgaaggtgtaggttttaaaactgcaatgaaggtacttgataaaggccgtattcatattgctgcattaagtgtaggtgctgctacgcgtatgctggaagattccctacaatatgccgttgagcgcaaacagtttggtcaagcgattgcgaacttccagttgattcaaggtatgttagccgattctaaagctgaaatttacgcagcaaaatgtatggtattagatgctgcccgacttcgtgatgctggacagaatgtcagcacggaagcatcttgtgccaagatgtttgccactgaaatgtgtggccgtgtcgcagatcgtggcgtacagatccatggtggtgcgggttatatcagtgaatatgctattgagcgtttttaccgtgatgtacgtttattccgtttgtatgaaggtacaacgcaaatccaacaggtcattattgcccgcaatatgatccgtgaagcgactcaataa

SEQ ID NO: 57928 - DNA, 777 bp, Acinetobacter baumannii
atggaaaatgaaatattgaatttagatattcaaagtaatggtgtggccattgttgaactacatcgtccagatactagaaatgcattgaatctggaactgcgccaacagctcgcagcaatgtttgagcagctcgctgcatctgatacagtccgcgcaattgtcattactggtggtgaaaaagtatttgcagcaggtgcggatatccgggacttcaccactgcaaaaaccgtagacatgtatttacgccatacggaacagtactggcgggccattattgattgccctaaaccgattgtggctgctgtgaatggatatgcattgggtggtgggtgtgaacttgcaatgcatgcagacatcattattgccggaaaatcagcccagtttggtcagcctgaagtcaaattggggctgatgccaggtgctggtggtacccaacgcttactgcgtgcggtagggaagtttaaagccatgcaaatagtgttaacaggaaagatcttttctgcagaagaagctgacaaaatggggttggtttccgaagtggttgaggatgatcaaacccttgctaaagcggttgaaattgcgacacagattgcccaactctcaccgattgccgttgaacagatcaaagaagtcacaacactaggtgccaatatgccactcgatggtgctttggcattagagcgtaaagccttccaaattttatttgatacacaagatcaaaaagaaggcgtcaatgcctttttcgaaaagcgaagccctcaatatcaaggaaaataa

SEQ ID NO: 57929 - DNA, 1518 bp, Acinetobacter baumannii
atgacgattcaaaaaatggccttgattggcacaggcgtaatgggaatgggtattgcgcaaattgcagcacaggcgggtgttgaggtccgtttatttgatgctaaacccggcgctgctgagcaaggcttggaaaaattaaaagtaaccttgcacaaactagctgctaaaggaaagttaaccgaacagcagcttgtggataccttagcccgattgattatcttggaaagcattgaagaggttgctggcgttgatctggtcgtagaagcaattattgaaaatctggaaatcaagcaaactttgtttaaacagcttgaaaggattgtggctgaagaaactattctggtttcaaatacatcctcactatctgtgacctcaattgcatctgcgtgtcagcatcagggccgtatcgcaggtttccatttcttcaatccggttccactgatgaaaattgtggaagtgattgcggggttggctacagatgagcaagtcgtagtcgacttactggatctggcgaaccgcatgggacatttgggtgtccggactaaagatacaccaggattcatcgttaatcatgctggtcgtgcttatagtactgaagcgctgaaaatactgggcgaatgtgtgacttcacccagtgaaattgaccggattttacgcgaaggagctggtttccgcatgggaccactcgaactgttcgatttgacggcactggatgtttctcatccggtgatggagtccattttcaatcagttttatcaggaagcgcgttaccgcccgagcgctttaactcgtcagatgctggcaggtaaaaaagtcggccgtaaggtcggtgagggtttctacaaatacgttgatggcgtaaaaatcaatgaagagcctcgtcagactgtacctcaggtttcaacatttaatgcggtctggatcaaaacagatttagagcaggatgcagccatcctaacaaattatctgcaagcgcaaggattaacattagatacagccacgcaaccgggtgcagatagtttaattttactggctacttacggtgaagacacgacatctgcagctttgcgttttggtgtcgatgcaacacgagcagttagtatcgatatgctcaccgattttgcgaaccaccgaaccttgatgccatcgattgcaaccaaaaaagtttatattgatcagtcacatacaattttttcggccaataaccatggtgtcagtgtgattgatgaaagcatgggatttgtcgcgcagcgtgtattagccatggtaatcaatctggcctgcgatatcgcacaacaaggtattgcaactgcagcagatattgataaggcagtgaaacttggtttgggctacccacatggtccgatctcatggggggacgtactgggtgcatcacgtattctgcagattctggaacgtattacgaagaacacaggtgatccacgttaccgtccaagtccatggttgcagcgtcgcgcccgattaaacttgtctttgcttcatacctcaacaatttaa

SEQ ID NO: 57930 - DNA, 1203 bp, Acinetobacter baumannii
atgttaaatgcctatatttacgatggcctgcgtactccatttggccgtcatgcaggtgcgttatcctctatccgtccagacaatctggcagcgcatgtgatcaaggcactggtagaaaaaaatcaccttccagccaatatctttgatgatgtgattctgggtaataccaatcaggccggtgaagacagccgtaacattgcgcgtcatgcgaccttattggcaggtctggatgtaaaaactccggcacaaactgttaaccgtttatgtgcttccggccttgctgcgttgatagatgctgcacgtgcaattagctgtggggagggtgaggtcatcctggccggaggcgtggaatccatgtctcgagctccttttgtatttgccaaatcagaaacatcgttcagccgtgatcttaaagtctttgattcaactatcggtgcacgtttcccgaacccggcaatcgaaaagcagttcggtgatgacacgatgcctaaaacgggcgataacgtggcggttgaatatggtgtaacgcgtgaagatgcagaccgtttcgcagccgcttcccaagcgagatatgaggctgccaaacaagcaagttttttcgctggtgaaatcgtaggtgttgaggtgtctcaagggcgtaaattgtctccaaaactggtggaaatcgatgagcatccacgtccaagttcagattttgttgccttgcaaaagctcaagcctttatttgaaggtggcgtggtgacagcgggtaatgcatccggcgtcaatgatggtgcagctgccctgattattggttctactgcggctgaacaaaaactgggaatcaaaccgatggccaaaatcctgtcttctggtgctgcaggaattgaaccgcgtattatgggtgctggtcctgtagatgccattaaactcgcgctgaaacgtgccaatctcactttagatgacatggatattattgaaatcaatgaagcctttgcatctcaggtattggcgtgtctaaaaggtttggatatcgattttgatgacccacgtgttaatccaaatggtggagcaatcgcagtcagacatccattaggagcctctggagcgcgtcttgccttaacgacagcacgtgaattacaacgtagcggcaaaaaatatgctgtaatcagtttgtgtattggtgtgggacaaggtctcgccatggtgattgagcgcacataa

SEQ ID NO: 57931 - DNA, 1218 bp, Acinetobacter baumannii
atgggtgcattggaaggtattcgcgtattggatttaagccgcgtactggcaggtccttggtgtggtcagattctggcggatttgggtgctgaagtgattaaagttgaacgtcccaaaacaggtgatgatacccgcttgtggggaccaccatggatgaaggatgatcagggtgaagatacgcaggaagctgcctattaccagtctgctaaccgcaataaactttctatcgcaattgatattgccacactggaaggtcagaaattagttcgtacactggcagcaggttcggatgttttaattgaaaactacaaagcgggctcactgaaaaagtacggtctggattatgacagcttaaaagcgattaatccgaaattagtgtattgctcgattaccggatttggccaaaccggtccacgtgcgccagaaccgggttatgattttatcattcaaggtatgggcggtttgatgtctgtgaccggagagaaagatgaccttccgggcggtgggccgcaaaaagtgggtgtggcttttgccgacctgacgactgggctttatgccaccattgcgattcaagcagcacttttgaaccgcaccatgacaggtctgggtcagtatattgatatggcgttattagatgtacaggttgcaacgttagccaatcaaggcatgaattatctatcttcgggtaaagtacctggacgttatggcaatgcacatgcgaatattgtgccttatcaagtgtttaaagcagccgatcaggactttattattgcctgtggaaatgacaagcaattcgttgcgctgtgtcaggccattggtttgccggagctgcagaatgatccgcgtttcttaagcaatgcgttacgaatccagcatcgtcaagagatggataaattactcggcacccattttaaaaccaattctgcacggcactgggtagatgcgattcacacgataaaagttccggtgggtttaatcaacaatttacagcaagcatttgaggagcctcaggtgattgcgcgcaatatgttggttgatatgaagcatccgttgaaggagaagttaacggtgattggttcacccattaaactgtcacgcaccccggtggaatataagaaagcaccgccaatgctgggtgaacatactgatgaaatcttaagtggcattctggatgcagaaaagattgctgaacttaggcagagaggtatcatcgggtaa

SEQ ID NO: 57932 - DNA, 849 bp, Acinetobacter baumannii
atgacgaatgacgtgattgattcagaacagacagaaaatcttttggcgccattacgtcatgaattattgaatccgattgaagatatgcaggatgaaaatgaccgtcaatatgtgaccgcattagctagaggattagaattattacgttgctttacacccaaatatcaacatttaggtaatcaggaattgtcccagatgacaggattacctaaagcgaccattacccgcttaacccataccctttcacgtttaggatatattaagcaagtaccgaactcgaataaatttcaattgtcatcaggggtactgtcttttggctattcaatgcttgccaatgtttcgattcgttcgatagcccatcctcatatgcaggagctagcagattatgctggtgcagcggttgccatggccacacgtgatcggctgaatatgatttatttagatgtggtgcagggtaaaggtaatgtaacaatgcgccgtccagtcggtacttatttgccgatccatttaagtgccatgggcagggcttgtctcgctgcgatgcctgcggatgagcgcgattttctgttaaatgccattcgggaaaagaataaagatgactggattaaaattaatcgagagttagacaaagcatttaaagatttccaagattatggctgttgtttttcgattggagaatggcagaaagatgtaaattcagttgctgtccccttattgcatgaacaacacggacttttagtattcaattgtggtgggccaagttttgtattaagccgtgagaaactggaagaagatattgcaccaagattaattctgatggtgaataatattaaagcggaaattggctga

SEQ ID NO: 57933 - DNA, 519 bp, Acinetobacter baumannii
atgaaaaaagaatctagcctatttacaaaagttaattttatcgaggtaatacgaaccataccatggaaaaatataaccgcattatctgttttattttatattgccgccatttgggattttttttattcagtctttaccggtaaacctaataagtttagtgaagtaaatggagtctttaatacattaattaatcaaaatgagtttttgatatggattttttttatagcttttattatatatttctttataagtatgtgggctaattatagaatttttaagaaaaaaaagataagtgctttttatagaaatttgattgaagtatttaattatacaggtttttttattatcgaaattttttatctaatagctattttctgttttcatacaattatcttaactcttttaacttttgaatttagatcaacattaattttctttatgttttttatatatttcatagtattagcattgttcatacattgggggtattcaagcgtaaaagttaaaaacttagattaa

SEQ ID NO: 57934 - DNA, 342 bp, Acinetobacter baumannii
atgagcaaccttaaattcactttcgaatgcgacttagacggaaatagtaatactcagcgctttaatacgttatcaagcaaatttggcgatggatatgaacaaaacatcgccataggtatcaataaccgatctggtgaatggacatatcaaagaacggcttataaagctgaaattatgcaaatcaaagcattctttgatgatcacaaaggtgctgactcgttcctttgggattcgcctttagatggtgaggttcgagttaaaacaggtgaatatcaaccccgctgtttgggcggtgatgtttggcaaatctctacgacattcacccaagtcttttatccttaa

SEQ ID NO: 57935 - DNA, 2712 bp, Acinetobacter baumannii
atgcctgaatctgtaagccgcttggttattgtggtcgatgccaaagatggcaaaaaagaagtcgatgctttagataagtctctaggtaatgctgagaaacaaggcgataagactgcaaaatcaattaaaaatgtaggtcaagagacaggtaaaactactgatttattctccaaatttaaggaacaaattaattcatctcttggcaatacacgcattgggtctgttattggtgatgtcactgaaaaagttgcagctttgcgtggtggcgctttgatggcaggtgcagcacttacaggaatggcggtgggtggtgcagcagtagcatttgctggactttctgcaatggcaattcaagccgctaaagcggatgctgagatgattgttttagcaaatagagcaaacactagcacacagaactttcaaattctttcacatgctgctgaacagcttggtatgtcacaagatggtctggcacagtcattagctgatgcacaagagaagctcggtgaattcactgctagtggtggtggaggtgaggcagcagacttctttgacgcattaaaaaataacactaaaatgactgatgcagagattcaaaagtttgcgaagactttgcagggtaaagatggtgttgaagctcttcagttaatgaaagataaacttgatagcgttggagcatctgcacaagagcagagatttgtatttgaaagtctaggtaatgatttgggtaatttacttccattgtttgaaaatggaggggctttattagatcgatatggagaggcattaacagaagctggaatcataaaaagcaaagaagctattgaacagtctcgactgctggctgctcaaacaaagtcggtgcaaacccgttttgagggatttaaaacccaattagcatctcagatgatgcctgttttgaactcacttttaagtagtttcttacaaggggctgaagatggtggccaatttggttccgtaattcaatctgtaggtgtaattgccaagggtgtggcagtaggtattattgggctagcaagtgcaattcaggtcgttatacgactaattcaaggctttgtagagcaagcagcaaacgttggcgctacttatgcaaatgtcatgacggctgatggagttgttgctaaagggcaagctctagtaaatggttttaaaaatggttggtctatcgccagtgatactgtaaacgattcagtagcgaccattaaaggctcaatgaagtccatgaatgatgtgcttgatgcatcagttcctaaacttgataagcttggtcagttgtactacgacaccagtggtgcaatagataaaaccaacaagggccttaaaacaaacgcaaaagaagctaaagacgcagaaaatgctgcaaagaaagctgctcaagagtcgaaaaagcatgctcaagaattagagaagatcaatgaagagcgtctcaagattcagtatgaatattctgataaatccaaacaaattgagatggatttgcagaaggaaattgagcgcttgcaaaaatatggcatgactcaatatgtctctgtagcgatacagaaagcgaatgatgcaaaactcattagtgaagctcaacttgcttatgatctttactccttcaagatgaatgagcaagagaagcttaacgcaaaaaccaagattgaaggactcaaaatccagaagagtcgtgaatacaacgtagaggaaaaaaagtctcgtttaaaagctctaaaggaacaatacgattatgaaaccaacctaatcaatcttgctgccgaacaaaggaaacgagcttatgagcagacttatagtaattcactaagagatattcaacaggctagagcgctcttagcagcacccaaaggtgaacgtgaagggttatcaacgcagttcggagaaagtaatgcaatgtctgataatgacaatgcattattgaatgaacaagacagcctaaaagcaaaactcgctcagggtgaaatcctaactcttgaatacaacaagcgtattgaggatgctgtaaggctccatgaggagaataagcgcaagatccgagaggagtatgccgaaaaatataaggatctacaaaaggggcaatatgaatcacaactaaatctttacaatagtcttttatctcaagcctcaactgtttgggggggtattacacaaattgtcaaggatagtgcaggagagcaatccggtgcatataaagcaatgtttcttgtgcaacaagctattgcaatgagcacagctacaattcaggcctatcaagcttatgggaatgtacttgctaatgcgccttatccattaaatatgactatggctcctattgctcttgggcttggtatggctaatgtcggcttaattgcagcacaaacaatcgctggtttctcatctggcggctacacaggcaacatgggccgaggtgatgtagctggtgtggttcatggtcaggaatatgtattgaatgccgcagctactaagcgagtcggtgttgatacattgaacgccattaactctggtgggagttttgagagaacagtttcatcctctgaacagcctgtcactattcaagtctatgtaactgattcaggtgtaaataccaatggtgctaatactcaggaccagaagcagcttgggcaaatgatcggcaatgctgttagaacgattatccggcaagagcaacgacaaggcggtttattatcaaagtaa

SEQ ID NO: 57936 - DNA, 507 bp, Acinetobacter baumannii
atgaaaaagattatttttactctagctgtactaggaattattacaagtcaagggtgtattactattccttctccagaagaagtccaaagaaatgcttacaaaggatattctgaggtggtagaactgaatagtattcctaaagatcaaatatttgaactttcaaaaatctggattgctaaatcttttaactctgcaaacaatgttattcagtatgcggataaaaatactggaataattatagggaaaggtaacttttcccttaagtgtcctgacaatgtgaaaggtatgaattgtttagcttatacatcaacaaaagctgaatttactttgaaaatagagataaaagatggcaaatctagattaacatttagtgatgtacaccaagctgtaaataactacccattttatgacaatatttctaaacctattattgattcccagattaaagggatagttaagaactatggtcttgacatcataaatcaaaagaatgattcaaattggtag

SEQ ID NO: 57937 - DNA, 546 bp, Acinetobacter baumannii
ttgtccacagagattaatatttctgaggtcgagttacgaaatttagattcagtagaaaagcatctttatcaagatttttgttgtgagcgtgaagagctcaatacgttcttgattgaagatgcttttgattatcataattatggtttaacccgaactactttggtatttcataacgatgtactgattggctattttagcttgtcagctgataaaattgtgctcactcaaacagaaattgatgaattatctttaaatggggaatttaaagtaacttatttccctgcagtaaagattacaaaacttgctattcagaaagcttttgctggcaaggggtatggtaggcttattttggaattaattgaaggcctagtgtatggtcaacatatggctataagatttttgactttagatgctgtaaatgaggaaaaagttcttaagttttatgagcgaaatggatttaatgaaagtctccatgaagctagacagcaaagacaaaagcaaaataggcaaacgatattaatgcataaagatatctttagtgaataa

SEQ ID NO: 57938 - DNA, 150 bp, Acinetobacter baumannii
atgaaagctccagcaatgttggtaacaccaacttttggtgttgattcatctcaaaaaattcttcaagaagctcagaaaaaaattacgccagctcgtaaatcacgccttgagcagcttgctcaaatagcaaaaaacgcatttaaaaattaa

SEQ ID NO: 57939 - DNA, 201 bp, Acinetobacter baumannii
atgatcacaagaatatttgaaactactgaaggtcatagcgtttctattgatgttatggaagatggcaaatgtagtcatgatgaagttgagtacttaaagattgaaagtttgggtgggccgcctgtttggttgtgttcgaaatgtggaaagaaacttaatgaaaaagagttcttagaattgcaacaaaaacacctgaattaa

SEQ ID NO: 57940 - DNA, 267 bp, Acinetobacter baumannii
atggaaatcgcatacattgttgctgaatgccgtccatccactgacgaagataattatgccgatattaatattggtgatgatagctacattttctgctcaattgagcctgttatggatacaggtaattggcagaaaaacattcaggctgcaattctaattggtatcgatattgagcgaactaggccagagcacaaacatataacccttcatgcagaaagcattttgaaactttgcaagggtattcaaggtaagcccttaaatgcctga

SEQ ID NO: 57941 - DNA, 528 bp, Acinetobacter baumannii
atgaacatgatgacaacattgaatttacgagcattggttaccaataataacggtgagccaagaacaacaagttatgcagttgctcaagcatttggaaagaggcattcagacgttctccgctccattaaaaatatgaagtgctccacaaagtttcgtgagcgcaattttgcgtttaccttagaaaacaagaagatagggaatacaaagcgacaaacaggtttttatcagatgactgagcgaggcttcatgttccttgtaatgggattcaacggtgaaaaagcagatgccattaaagagcaatttattgatgcatttgagtggatggctaatcaactcagtcaagttttccaatcaaaatgggctagatataactctctaacgaattatcaccaaggcagaaaagcacaaatcagtggatgtgcgagcgcaatgggccagtggcgatgggaaaaagaaccactagaaactgaaataaaggagttggaatatcaacttcaaccacagcttgactttaaggatgccaaataa

SEQ ID NO: 57942 - DNA, 714 bp, Acinetobacter baumannii
atgaaaagtaaaactttaaaaaataagattaatgatatcgtttttgtgatctgtgcaggtggagtgctatatctaatagttggctttctgatgaagacaaattggttaaactgtcctaaacctttaccagatttgtatgaagttgtccgcgatacgttaactttaatggcttacttcctggcaccagcgattgcacttgttctatttagcgattggcgacaagagcatgttgagaaaagcagagaacagcagggtgaagaattatataaattaattaagaaagctgatagtgagttgcatgcattctatatggatgcttatgacgaagaaaatcataatgatttgcaagctgattatattattagtttgtatagagctcttctcgataaaacaaataaagttgaaatgcttttaggtgagtttgattttaatgatgagcaagcaattgcttttaaaaatcaggttaaacaaattattgatttacaaaaagaaagcataagctatgttaatttaatgtattcagcaaaactcaaggtcaataacccagagcaatacaattatcaatacgaaggtgaaagtgatgatgtttttgtagaaagtgaagaagagaagttcttggagttttatgcgcaatatgaaggtatttttaggataaaacataagcttatgaaaagtttaaaaccacttaaagactctatcaaaatccaagtatga

SEQ ID NO: 57943 - DNA, 1284 bp, Acinetobacter baumannii
atgccgaacatcaatccaacactgaatgtgcctcaggctaactttctccaattgccaaataaatttagagcttttgttgcagggtttggttcaggtaaaacttgggtaggttgttcaagtctttgtgataaatcttggtcatttccaaaggtgccgttgggttacttcgctccaacgtatccgcagatccgtgacatcttctttcccactattgatgaagttgcatttgattggggattaaagacaaagatctatgaatctaacaaagaagttgatctttactatggccgccaatatcgaagcacaattatctgccgttcaatggaaaagcccaacactattgtaggttttaagattggtcatgctctgattgatgagcttgatgtgatgacaaaggtcaaggctcaacaagcttggcgtaagatcattgctcgtatgcgatataaacaagctggtttgttgaatggtattgatgttgcaacaacgccagagggctttaagttcactcatgaacagtttgttaaggaagcaaacctaagtgatgctaaacgtgctctatatggaatgattcaggcatctacttatgacaatgaagccaatcttcctgatgactacattgcatcattgtttgagtcttacccacctcaattgatttcagcctacttaaaagggcagtttgttaatttaacgagcggagcagtttatccagacttcgaccggaccttaaaccatacagatgaagaaattagacctaatgaggctttgctcattggtatggactttaacgtcttaaagatggctgctgtggtttatgtcattcgagatggcaagccaagagctttagatgagttggtcggtgtgcgtgatacgccaacaatggctgaccttttgattgaaaagttcccaaaccatgagatgacaattatccctgatgcggcaggccaagctacttcatcgaaaaagagtagcgaatctgatcatgcaatattgagacagaagggcttaagggtggaagtcaattcaacaaacccgaacattaaagaccgaattaatgcagtaaatgctttgatcttaaatggcaatggtgagcgaacactcttagtcaacacaaataaatgcccaagactcacagagacctttgagcagcaagtttatgacgattttggaatgccagataagaaatcaggcttggaccatgttggagatgctggcggatatcctctcgctaaacgcttcccgattattcgtcctgcaagatcactagatataggaatggtttactaa

SEQ ID NO: 57944 - DNA, 510 bp, Acinetobacter baumannii
atggcggagttaaaactaactccgaagcaagagaacttttgccaattgtttatcgaattggggaacgcttcggaggcgtatcgacaagcctacgatgcggattcaatgaatgaaaacacggtcaaccgtgaggctaaaagattacttgagaacaccaagattaccacaaggcttgagctaattagaaaggaacatcaaacccgccataatttgactgtagacgacttgcttcaagaattagaagaagcacgcaaagcagcatttgaaggagagcgggttcaggtgtctgcggcagttgcagcaacaatgggtaaagccaagttacttggattggataagataagcgaacttcaagtgaagaaacaagagcttgaaatagcgaaactccaaaaagaacttaatccagaagaagatgaagatgtaaccccagtgcaggtgactattcatgttgtagatgcgagtaaaaaagatgccgaacatcaatccaacactgaatgtgcctcaggctaa

SEQ ID NO: 57945 - DNA, 483 bp, Acinetobacter baumannii
atggaaccacgattcgtcatcaaaaaccattctgacatcaactatgtaattgggtatctcaataccaatcatgcaaaggcagcgagtgaagggaagcctttagtcgtattgattgcacctcaagaaaaagatcgttcaaaagctcaaaaccgtttgtactggatgtggcttaatcaatgggctaagaagcagggaacagataaagattacgaacatctgttcttcaagaagaacttcctaacaaaaatctatgatcgtgatgacgttggccaatacaagaaaacattcaaagctgttagagaattaaaggattctaagcatccactctaccaagatgtggcaaacggcctatgtgagctaatgagcactacagatgcaagtacagcacagttcactgaatacctgaacgacattcacgccttctgcaacaaacaagggtgttatttggaaacgcctgatgatcttaagtatgtgcttgaataa

SEQ ID NO: 57946 - DNA, 321 bp, Acinetobacter baumannii
atgagtaacgaacaaaagattgaacaagaaattcaagcgaaaggccttaatgctccgcgcttaacacctcaacacattgatagtgtgattgtaggtgagacttataccaatctccctgatgggcgaacagtgatctgccaattaactttgaagaatggcttcactgtagatggtaaatctgcatgcgtaagtaaagacaactttaatcaagaaattggtaataagattgcgcgcgacaatgcgcgtgaaaagatttgggaactcgaaggctatttgttaaaagaaaagctataccaagccgaactagataagaacttttaa

SEQ ID NO: 57947 - DNA, 213 bp, Acinetobacter baumannii
atgtatatgcctgaaatggatctaatgaaacatatccaacttaaggaagccctgcgacaagaagtattaaaaactatggatcaaatgatagaagctcagcatttagatagtactaacaagactttcgagccatttgctcaaagagatgatgttaaaccaacaacatccaagacaatgaaaaatcgtcaaaagagacttcgaaaaaagaagtaa

SEQ ID NO: 57948 - DNA, 378 bp, Acinetobacter baumannii
atgaaaccagaacagtttattcgtgagtttggtgtggagaaggcgagagaggttgttgctgcttctgccaatgctttagtgcaatgcagtgatggcacaacgtttcatgtgaatgatctaaagcgtctagtggagtcagcagaccttattgaatcacttgggggctatgaagctgctgttaatgagttgtaccaccagaaagatcaacatgcgtgggaacacaaattaggtcatggagaggttttcgctcatccatgttgggagtgggatgacgtgatgcgtttggatcaagcaattaaggatgatgaagcaatttatgcattaggcatcgaaagcaaagaccacgaatcaatatacggaggcggggatgaatcttaa

SEQ ID NO: 57949 - DNA, 750 bp, Acinetobacter baumannii
atgtctttacactctcgaattaggcaaaaacttgaagaaaaaaaattaagagccgctgatttagcaagagcaacaaaaaaatctcctgttgctgtaaagaaatggctagatggcactagcgttcctacagcgggaaacttgaaagtcattgcgaaatttttaggtgtgagtgacgattggttgctttatggtggaccggttgaacaggaatcgaacaatttacctcaattaaatgttcttgatattgaagcctttaagcagaagtacaatattccagatagtgaagatgccgttaagtttgttcaagcgccagctaagcctttccctatacaaaaaagatatgttccagttaaagcctattcaaaaatgggaatggatgggtatttcacagatatgggatacgatggaaatgctggggatggctatgttccaactcatacagcaggtccacgagcctatggcattaaaggcactggcgactccatgtttccagcaattcgtaatggctggtatgtagtttgcgatccagatgctgaaccggttccaactgaatttgtacaagtgtgcttaaaggatggacgctgcacaattaaggaatttgttggaataaatggtggggttttgagtttgttggctgttaatggtggcgaacgcctatcttttgacatggatgaagttgaaagtattaccgctattacagatatcgtgccgccaagtcagcacagacaagaacatccttattcgcattaa

SEQ ID NO: 57950 - DNA, 270 bp, Acinetobacter baumannii
atggctgtatattctgtaacttatgatcttattaaatcaaaagattactccagaattattgagggaataaaaaaagtttctggtgataattgggcgaaaccaactcgatcacaatggatcatcacatcaaccaaaacatctgaacaagttagggattttcttaaaaactatattgattctgatgatgttttatttgtgatcgaggttaagccagaaaattgggcttcatggaatattcctagagaaacccttaattggttgcattcttga

SEQ ID NO: 57951 - DNA, 192 bp, Acinetobacter baumannii
atgagcaagaacattgctgttataccaaaaggtactaaaattcaaattatgggttgttcgtacatcttacaagaagatgctcttgttgatggagatcaggctattcttgaagccaccctcaaagcgcaagaaaacttcgataatggtgttggtgtagtaggcgggcatggactcaagaatgcaaccaattaa

SEQ ID NO: 57952 - DNA, 786 bp, Acinetobacter baumannii
atggataactacaaaatcaaagttaacgatgaagctgagagcaaagaggctcaggagttgttaaagcagcttggattccaggaagaaggttttacaggtataggcctgccatgctacttggcgacatgggatggtggatatgctgattactattttggttatttaagtgaaggtagaaaacgagaagaactcaccctccctcaactacgcgaccttgttgttttgaagcgtaatgatgtgaaggatgcgactcatgaagatcaatatggtgataagtggctttatttggatgaaagacactatgtctatctaaatgatcagtgggatttgcctattggtgagttcttagaaagatatgaactaaaaccaatattgccagtaaaaaaacaagacccagccttgattagcggtgacgttgctttagcaaatgttcacaagtgcattgttcagtacttacatgatgatgagccatacggtcgctggacaacaattactgaccacctttggtcacaataccacttgggcatgttcttagatccagacacaaagttcaagtttagatttaaaccccaaaccatcaagcttgaacttgagctgccgaagccttttgagcctaaagaagatggatatgtctacatcattgatgactatcaagtttctggatatagaaaatattactttgaagttgaagataataaagaacttagcttcattggtgtatggcacaccgaagacgagatcaaacaagtcgtagcgcaactcagaaagatacgaggtgcctcatga

SEQ ID NO: 57953 - DNA, 393 bp, Acinetobacter baumannii
atgaatatgttagccaatatctcgtttgatgctgcggtattcacaagccttgaagtgatgaatgtaggtgttgaggatggcgtggttcagttctctttatccgttcaaaacgcagagcacatctacatcgtagcaagtgtcaagggaattgagaaaaacgacactttcgaatatggcgaaggcttggactatcaagactggaaagatgtggattacacaatgatgaccgtcaattcagcgagccgaccgcttgtcgatgaatacaactatgtcgatgcagtcgaaggtatgccctttgctcttacttctactcaaattcaaaaactgaatgagtatttagaagaactggcaagagaagaaaaaattactgaattaaagaaggatgcagcttaa

SEQ ID NO: 57954 - DNA, 966 bp, Acinetobacter baumannii
atggcaagaccctacgagcaccttaatatctggattcaaaatgatcgagagcttaaagaagaattcatactacaaaataagaatgagtggcttaaaaattatccgaatgaatttcatgtttcagtgactcggcacaataatttaggtccatatgctgaagtagctgtactaagcacaaaggaagtaatgaccatttcaaaacggttatatgaaatcattcgaaaaaaattcagagagtttaaatactggaaaaatcacaaatcaaaggggcatttgcaagcaagaataagtaagaacaccaaattaaagttagagaacatcaaaagaaagttggaacacggaaatgcctctacaacacttgagcatatgattaaaaattttgatgaagacaaatttaaactaaaattgcaggttgaagatttacaagaactacttaaagtggcaaaaagtaatgaagcattacttacaaagcggtcagaaaataccttaaaaatgcagcaagcttatgacaaccaaattcaagagtatttattcaaccaatgtgtggctattacactaaaactgaaaatgcttgatcaatacatttcctctaaagaagatattgatagcatctacgagtcttttgataaaattgaaaaagaagcagcacaagctgaaattattactaaactaaaatctagacttgaagatgaaatgctcaacatcaaagcttctttgaaaccagcctctgatgaagtagtcccacttcatgtaagtactagtccaatctttcaggaaaatgccatcatgcccattaaaccttcaggttatacaaaaggtttttcaactccgcatgaacgccctgtctctgagaatccacccgaagaacactctgatactgagcaccccaccataaaaagtaatgctggatcttcacatttacgtgaagatctatttaatccactcaaaaaaaatactaagaattga

SEQ ID NO: 57955 - DNA, 1692 bp, Acinetobacter baumannii
atgaattcatctgaatctaagattgcattttttttgctgattcatgactattcaccgattgctttaagtcctcaagcaaggtggctattacttaaactcatagctgaactgaaattgggagaagctgttccatccataaaaaaaatggcaacgacctttcatatcaatgaaaaaaaaattaaggaatgtattactgagttggaagcccacagaattttaatccaaggaaaagatgggctaacttctgaaaaaaagagttatatcgattacagcctattcttagcttgtatgaatgcaaaaaaaattaatccactgaaattagaacagtggtttcgtcaaacagcaagagcagataatttccctcttatagggctttttcaaaatcttgttgaaaacagactagatgatttttatatgcaccatttgcaacatacgtcatctagattgtgggggatcttggattttaagtccgctttagtgcttatggtattggttagaaatagtaatcaatatggaattaccaataagtgtggaatacacgaattaaagcacaaaacaggtatgtctaaagatgcaatttttagatgcatcaagatattagagattcagggagtgatcagagtaagagttgatggtgtgctatccagtaaaattttaagagtatctaatccattttatatgctgaatttatctcatgaaatctggcaggaagaagcaacctatggacggtattttataattcaatatccagaaccacactcctttgaggtgcagcaggttgcaagtttattgcaatttttagagagcaaaaaagctacattaacaaatattttaacgattaacgatgcttatcaggtttttgtaaaccttttcacaaggatgccagacttgatcgctgctacaaagggattgacgattgagatggttaaggaggattcttcaatacctgaacatgaacggtttgaatatcgatttataatacatctgttgtcactttttcttgagatgccaaatgctcatgatagcagtcaatggcttagagatttaattgagtttttcccacaaaaaaattcaaagacacatttgaatggggtagtttctttacttggatatcttcagtgccatttagaacaatggtgtgcccagatttacaataatctgtctagagctcaggcattatctagatgtggagattacgtagatttacatgatttgaaaaaaatgtcaggtcgcttacaattgaatgctttgttgaaatttgctgaagataattcatttgaaacgtctgatcgtattgctcggagtagcagtactcttttatcaatgttaggtctgatgatgaccttgatcgcgaagaatcagctttatccatttttaacgcatttaggctttaaagaacaattcagtcaattttgtattgttccacgtcatgcgaagcaaacacaatatatttgtatttttatgccatttccaagtcaaatctcgaatcaatttaccaaaattactttagatgaaaaccttgcatttgtatctgagcaagaaattttgaaagatgaaaggcgtaatcatttttttagtgaatccatgcaaccgagcctcaaagaactacaagattttggcttactgtctgagagttgtgttgctgttgatcgctttaatatttctaaaaataaaatcaaggttatggcgtaa

SEQ ID NO: 57956 - DNA, 942 bp, Acinetobacter baumannii
atgtcccagaataatccattagtcaatgaatcctctattcttatttcaatcgaagattttttaatcagtacctgtcatgagcaattcattgatgatcatgatgagttcaaacgagaattattagaagcggtagtactgtttaagcagatttatagatttgatcttagctattccaaaatcatacaggtttttaaaagggtgattaaccttgtggattacatcatggaaagactagattttcatatttatgcagacattctacggtttgaactaaatcatatattttatatacaaggcatgattcagcatgaaatgaaaagtgctgttcaagatattcataaatttaaatatcaagaacgaaaaaatcaaattgaattagaaggttacttgaacaaaatactcaatcattattctaggttgctttttgtacgagtagatgtagggatccttcaagaacatcaagagaattggggtgttaaagactttcatagggctttggaagtactacgaaatagaatgtcgaacaaagatgcccactttcgtggtttacaagggtgtgtttgggcattcgagcaaggtgcaaagaagggctatcactgccatttattacttatttatgatggcaatatgcgtgacggcgatgaatggttaggagaggaagtagggaagtactggcaacaatacattaccaataaccaagggtgctatttcaactgtaaccgaaaagagaataaagaaaagtttgaggtcaatgatttacttggtgtaggaatgattcatcgaaatcagccaaaacaagtcgagaatgctattcgtgcaggtctatatttggtgaatccgaataaagtagaccaacgcttacgtgctaagacatctcctaatatgaggacatttgggatcagtcagtatgatgtggataggcgtagaaatattataaaatga

SEQ ID NO: 57957 - DNA, 384 bp, Acinetobacter baumannii
atgattgatttgttatataaaatcagtacgataaaaaaaatacaaaatggttttaaaattatgacacacattcgaattgcagatttttgtgcaaagtatggctatacgaagcatcaaatccaacatgcaacacgtacaggaaaattagataaagttgccaaaggtattgtggacgagcaacatgcgattcaagcaatgtcttacacaaaaccgttaaagtccccaaagcaaacaaaggtcacaactgatgctatcactcagccagatcaatttgtatcatcaaatccaacctcagaaaaacctaaatttttatcccaggaatgggtaaaatctatgcttgcccctgcaagtaaagggggaaaagttctacctccagaagaataa

SEQ ID NO: 57958 - DNA, 288 bp, Acinetobacter baumannii
atgagcttgaattgtcccttttgtcattcaaccgacatcatgattgttgaagcgaatgcgcaacaagcaaattcaacattatcaaatcttgcatcacccgcagctttaggggccttaggtacaaccgttgcgaagtctttgaatttgcctcccatcgttggaggaattgcaggaaatgtacttggtggtttgtttaattcttttacagaacaaagtacacctccgcagcaaagtttgtgcttctgccataactgctaccaaaagttccccattcaatatctgaattaa

SEQ ID NO: 57959 - DNA, 1044 bp, Acinetobacter baumannii
atggcacatcaacttgaacaaatggcttatgtcggtgaaaccccttggcatgggctagggaatcaactaactcaaaaccaaccgattgaggtctgggcacaacaggcaggcatggactggcgtatcgagtcatccaatgtcagttatatggcacagaatgaacgtgggcaaagcatcatcatgccgtatgaagaacagcgtgtactttaccgttctgataaccatgcacctttgtcagtggtcagtcaacgttttcaggaagtccaacctcgtgagatcttagagttctatcgtgatctaactgagcaatcaggctttgaattggaaaccgcaggcgtgcttaaaggtggcaagaaattctgggcgctggcacggacaggacaaagttcagcactaaaaggaaaggatgtcagtaatggctatattcttcttgcaactgcatgtgatggaacactggcgacaacagcacaatttacttccatccgtgttgtctgcaacaacaccttggcgattgctttacgtggtcagaacagtagtgcaggtgtagtgaaggttccgcatagcaccaagtttgatgcagataaggtcaaacagcaattgggcatttcagtacgtgcatgggatgaacacatgtacgaaatgaagcagctcagtcagcgtaaagtcacccagtctgaagccgcagcctattttgatgcggtatttaataacaccacaatgagtattgcagatcaggaagaaaatattattcagttctaccgtgatgttgcaactcaggcagcacaggcaaatgccaaggagaaagctgagccaaatgccaaggcgatgacaaaagcaatggacatgtttaatggtcagggacgtggtgcagagttgagttctgctaaaggaacagcctatggattactgtgttcaattacagaatttattgatcatgaacgacgtgccatgagtacagatcatcgactcgattcagcttggtttggtgcaggagcagcgatcaagcaacgtggactcgaacaggctttgcgtatggtgtcatag

SEQ ID NO: 57960 - DNA, 1041 bp, Acinetobacter baumannii
atgaatacagcaatattaaacccatccattcaacaaaccagtaaaccctttaacgccccaaaactgtttacagcaaaacgcttggtgaataccaaaaatatgactcaatctgactggcttgaagtcagacgacaaggtattggcagtagtgattgtgcagcagcctgtggattgaatccctatatgtcgatgctcgaactttggatgatcaagacaggacgagtcaaacaatcgattgaagatgaaagttcaggtatcgctccactctattggggtaagcagctagaaccattggtggctgagtactacagcatgcataccaataacaaggtacgcagaatcaatgcagtgcttcagcatccagatcctgataagcattttatgctggctaatctggattactccgttgtgtgtagtgatgaagttcaaattctggaatgcaaaacagcaggagagtacggtgcaaaactttggcgagatggtgtgcctttatatgtcttgtgtcaggtacaacatcaattggcagtgacaggcaaacgcgcagcacatgtttgtgtgttgatctgtggtcatgaaaccaaaatcttcaaagtgacgcgctccgaatctgtgatccagcatatcatcaatgcagaacgttacttctgggagtgtgtggaaaaagacacaccacctgatgtagatgccagtgaatcggcagccaaagccatacagcagctttatccacaacatattccgttgactgttgaagacttgagtcataacgaacaagccaatcaattgtttgctcaactgattcaagaaaagcatcacattgagctgcatcaaaataactttgatgaaactaagaatcaaatccagatgttgatgagggatgctgaacgagcaacctttgccactggttcagtgacgtggaagaaatccaaagactcaatcggtttagacagcaaagccttactcaaacttcacccagaaatgcttgagcagtttccgcaaaacaaagcaggaacacgacgctttcagatctataccaatgactga

SEQ ID NO: 57961 - DNA, 888 bp, Acinetobacter baumannii
atgattaaaggtttagcaatcacaccaccgatccttggacgtatcagtattggtaaagttgttgaaaagaacggtaaacgactgcctgaaaaggacgaccaatttaccattaccagtcaaattcaaagcaaggaagggtggattaagcatccgcttgatgagcaattacgcagtaaagcaccgaatcaaaaactccgtaccattccagtacggatgatcttcaatgatcctgatttgaatcttagagctgagtacaccttatttgaccgacagactgggcgacctatctgtgtcggtaatggtgaaacttgccaacgtttaactaatcaaggcgtagagcaacatccttgtccatcccctgatttatgctcattggcacaaggaggaaactgcaagccctatggacgtttacatgtcaatttggatgaaagtgatgaactcggtacattcatttttagaaccacaggttttaacagcatacgcactttggctgcacggctgagttattaccatgcagcatcaaatggcttactttcgtgtctaccattgcaactgacattacgaggtaagagtacaactcaaagttatcgtcagcctgtgtattacgtggatttaaccttaagagatggcgtggatttgcagtctgcgattcacactgcacgtgagattgatcagcaaagtaagcaggctggatttaatcaagaggcactcgatcagatggcacgacagggctttgctaatgcgaagtttgaaatggatatagaggagggatttgatgtcgtggaggagttttatcagacagatgagcaacagcggtcagttgttgttcaaaatgagtcttttaatattcaacagagtttaaaaggctcagtgactgcgttgaattaa

SEQ ID NO: 57962 - DNA, 1557 bp, Acinetobacter baumannii
atgactagtacacaacaacgtgcagcacttcagagacaaatttgggcgattgctaatgatgtacgtggtgcagttgatggctgggatttcaagcaatatgtcttgggtacgctattctatcgtttcatcagtgagaacttcgctagttacatcgaaggcggagatgacagcatcaactatgcggagctccctgataatgtcatcaccccagacataagagacgacgccattaaaaccaagggttactttatctatccaagccagttgttcgtgaatattgccgaaaatgcgaataacaacgaaagtttgaatactgatctagctaccatctttggggcaattgaagcgtctgctaatggctatccatcagagcaggatatcaaaggtctgtttgctgattttgatactaccagcaaccgattaggtaatactgttaaagataaaaacatccgtttggcggctgtactcaagggcgtagcaggtctagattttggtgactttaatgccagccatatcgatttgtttggtgatgcttacgagtttctgatctccaattacgctgcgaatgccggaaaatccggtggcgaatttttcaccccgcagcatgtctccaagctgattgcacagttggctatgcacaaacaaaccagtgtaaataaaatttatgaccctgcttgtggttcgggttctttgctattgcaagccaaaaaacactttgatgcacacattatcgaagatggtttttttgggcaggagctcaatcacaccacttacaacttggcacgtatgaatatgtttttacacaatattaactacgacaaattcaatatccaactcggcgatacgctaagagagcctcactttagcgatgacaaaccctttgatgcgattgtttccaacccaccttactccgttaaatggataggcagcgatgatccaactctgattaatgatgatcgcttttccccagcgggggtactcgcgcctaaatcaaaagccgactttgcttttgtattacatgctttaagttatctatctgctaaaggtcgagcagcaatcgtttgcttccctggtattttctatcgtggtggtgctgagcagaaaattcgtaaatatttggtcgataataactatgttgaaacagtaatttcacttgcacccaacctgttttatggtacgaccatcgctgtaaatattttggtgttgtcaaaacataaggctgatatgtctacccagtttatagatgccagtgcattattcaagaaggaaaccaataacaatgttttgactaatgcacatatcgagcagatcatgcaggtgttcgacagtaaggtgaatgtggagcattttgcccaatcgataccttttgagaaaattgctgccaacgaatacaacctgtcggtcagcagctacgtggaagctaaggacaatcgcgaagatgtaaacatcgttcagcttaatactgaactaaaaactaccgcggctagaatcgaccaattacgggcggagattgatgccattgtagccaaaattgaaggcgcggggatggggatataa

SEQ ID NO: 57963 - DNA, 1164 bp, Acinetobacter baumannii
atgagctttatggacaaattgttgggtggcgttgacgtgaagtggaagctgttgggagatttagctatattacgacgtggccgtgtaatgtcgaaaggatacttagttgataatgcggggaactatcccgtatatagctcacaaacagcaaataatggcgaaattggaaagatcagtacattcgactttgatggtgaatttattagttggacaacggatggagctaatgcgggaacggttttttatcgcactggggagttctcaattactaatgtttgtggactgataaaaattaaagatgaatcgaaactgaactacaagtttttattttattggctgtcaattgaagcacaaaagcatgtttactctggtatgggaaatcccaaactaatgagccaccaggttgaaaaaataccagtccctcttccctgtccagaaaaccctaaaaaatcgctggaaatccaagctgaaatcgtccgtattttggatgcatttaaagcgcttaccactgagcttaccactgagcttaccactgagcttaccgcacgtaaaaaacaatacaactattatcgcgatcaattgttgagttttgaagagggtgaagtggagtggaaaactttgggggagttggcagaaaatcttgactctaagagaaaaccaatcactagtggtttaagggatgctggcgaaattccttattacggcgcctctgggattgttgattacgtgaaagactatattttcgatggagattttttactggtttctgaagatggtgcaaatttattagctcgcaatacacctattgcattcagcattagtggtaagacgtgggtgaacaaccatgcgcatgtgctgaaattcaatacttatgcagagcgaagatatgttgagtactatctaaatagcattgacctaacaccatatatatcaggtgcagctcaacctaagctgaataaaaagaatctagaaagcattcttattccaaacccttcactcctagaaaaagagcggatagtttcaattctagataagtttgatgcattaacaagttctatcactgaaggcttgccaagagaaattgaattacggcaaaagcagtatgaatattatcgtgatctgttactgagctttccaaagccattttcagaggtggtagtctaa

SEQ ID NO: 57964 - DNA, 1296 bp, Acinetobacter baumannii
atgagcaagtcgattgaagacatcgctaaagatctaaaagctgccaataaaaaagtacagttaatctatgcttttaatggtacggggaaaacacgtctttcgtgcgcttttaaagaattgattgctcctaaaagtgcagatgacgatgaaaatgagctttcacgtaataaaattttgtactacaacgcctttactgaagacttattctattgggataacgatttggaagctgttaccgaacctgagccaaagttgaaaattcaaccaaactcgtttaccgattggttgattacattactcaaagatttgggagaagatggcaatattgttacgaattttcagcgatacaatagtggcaaggtcacacctgaatttaatgaagagtataaatataaagataaagatcatagcggaaaattaatagaagtcactgttcctgcgtattctgagattttttttaaagtagctgctaaacccaaagaaataaatgccgttgctttagataatgagcatgctgtagttgaaggacaatacgaaagaataaaaatctctaaaggtgaggagagcaactttgtttggagtgttatgtacactcttttagaacaagttgtatctacccttaatgagagagatcccgcaaataggatgactgataaatttaatcagttggaatatgtatttattgatgatccagtgagttctctagatgactctcacctgattgaactggctgttgatttagcaaagttaataaaaaatagtgcttataccgaaggtaatggactaaaatttatcgttacgacacatagcccacttttttataatgttttacataatgagttaaataacgatcttaaaaatccaaacccaaatggcactccaatgtggctttataagcgtgaccaatcaaaaaagtataggctaaataaaaaggctgatgagacttttgagcttgaactgtctaacgatcgtcctttttcttatcacttattcttattggatgaactcagaaagtctataaatgaccaacaaatcaaaaaatatcactttaattttttaagaaacattttagagaaaacggcaacatttttgggatataaacactgggaagatcttcttgagaaaacagatggcggcaatcctgatccatttgcaaacagaattctaaatctatccagccattctgcccatgcaggtgaagagatctctgatatagaggaaaaagataaagaaaagcttatcgagttggttaagtttttgactttaaagtatggttttctggatgagaaaaaataa

SEQ ID NO: 57965 - DNA, 3102 bp, Acinetobacter baumannii
atgttagagcaaactaaaaccatagcagaatcgaatagctttattgttttagaaaaatactgcaaagaatggcaagcaagcgagagctaccaaagcgaaggtgacctagaacgggagtttattcaggacttggtcaatcaaggctatgaatacctgcctgctttaaataaccctcaagccatgctggcaaatgttcgtgtgcagttgcaagtactgaacaatatgcagtttgctgatggggaatggctacgttttgtggagacctggctggatagacccagcgatagcatcatcgataaaacccgcaagattcacgatgactatatccatgattttgtatttgacgatgggcatatccaaaacatttatctgttagataaaaagaacattgcccgcaataaagttcaggtcatcaaacagtttgaacagacaggcagccatgccaatcgctacgatgtcacaattttagtgaatggcttgcctatggtgcaggtagagttaaagaaacgtggtgtagctattcgtgaagcttttaaccaggtgcaccgctatagcaaagaaagttttaatagcgaaaattccctgtataaatatttacagttatttgtgatatccaacggcacaaacagccgttattttgccaataccacccagcgcaacaaaaacagtttcgacttcaccatgaactgggcgaaggcggataatagtctgattaaagatctgaaagactttaccgccaccttcttccagaagaacaccttgctcaacgtgttgatacattattcggtatttgatgtcagcgacacgctgctagtgatgcgtccataccagattgcagccaccgagcgcatcttgtggaaaatcaacagcgcctatcaagccaaaaactggagcaatactgaaagtggtgggtttatttggcataccacaggttcaggcaaaaccttaaccagttttaaagcggcgcgtttagccactgagttggattttattgagaaagttttttttgtggtggatcgtaaagacctcgattatcagaccatgaaagagtaccagcgcttttcgccagatagtgttaatggttcagatagcaccgcaggcttaaaacgtaatttagataaagatgacaacaaaattattgtcaccaccatccagaagcttaacaacctaatgaaaagtgaaggtgacttgtccatttataacaagcaagtagtatttatttttgatgaatgtcatcgcagccagtttggtgaagctcagaaaaacctgaagaagaagtttaaaaagtactatcagtttggctttacgggtacgcctatttttccacaaaacgcccttagtgctgaaactacagccagcgtatttggccgtgagttgcattcttatgtcatcaccgatgcgattcgtgatgagaaagtcctgaaatttaaagtggactacaatgatgtacgtccacagtttaaaatcatcgaaaccgaacaggatgagaaaaaactcagtgctgcggaaaacaaacaagccttattgcatcccgaccgcatccgtgaaattagccagtacatcctgaataatttccgccagaaaactcaccgcttacaagcgggtagcaagggctttaatgccatgtttgccgtcagtagtgtagaagctgccaagctgtattatgagtcactcaacaacctgcaaaaaaacagtgacaagcctttaaagattgccactattttttcctttgcagccaatgaggagcaagatgccgtaggtgatattcaggatgaaagttttgatatttcagccatgaacagtagtgcaaaagagtttttaaacgccgcaattgcggactacaataaattgtttaaaaccaattttagtgttgatagtaagggttttcaaaattattaccgtgatcttgccaagcaagtcaaagccaaagaaatagatttgctgattgtggtagggatgttcctgacaggattcgatgcccctacgctgaacaccttgtttgtagataaaaacctacgctatcacggtttgatgcaggcctattcgcgtaccaatcgtatttatgatgctaccaaaacattcggcaatattgttactttccgtgatttagagcaagcgaccatcgatgcgattaccttatttggtgataataacaccaagaatgtggtgctggaaaaaagctacaaagagtatatggaaggcttcaccgatgtggagactggtgatgcacggcgcggttttgtggaaattgtgaatgaattggaacagcgctttcctaaccccgatgaaattttcaaagaatcagataaaaaagcctttagtaaattatttggcgaatacttgcgggtagaaaatgtgttgcaaaactatgatgaatacaccagcctaaaagccttgcaaagtgtggatatgaatgaccttgcagcagtcgaagcattcaagacccaacattacttaagcgatgaagatctgtcagctctgcaaatcattcagatgcccgctgaacggaaaatccaagattatcgttccacctataatgatattcgtgactggttacgtcgggaaaaatcggctgagcaaaaagaaaaatcgacgattgattgggatgatgtagtctttgaagtagatctgcttaaatcacaagagatcaacttggactatattctggaattgatctttgataacaataaaaaggtcaaaaacaaggcttcactgatcgaagatgtacgccgggtgattcgtgcgagtctcggcaatcgtgccaaagaaagcctattggttgattttatcaaccaaactgatcttgaccagattgatgataaagctagtgtaattgatgccttctttacctttgctcaagcagaacaacagcgtgaagtacaagagctgattggctccgagaacctgaatgaggatgcagcgagacgttatattgcaacctcgctgaaacgggaatttgccagtgataatggaactgaactcaatgctattctgcctaaaatgagtccattaaacccacaatacttaaccaaaaagcagagcatttttcaaaaaattgcagcgttcgttgaaaagtttaaaggggtagggggaaaaatttag

SEQ ID NO: 57966 - DNA, 279 bp, Acinetobacter baumannii
atgcaacgtttagtttggatcgagcaacagccaattactttaactcgaaaagagtttcaacttttgacgttattaatgcgctatcaagggcagcttttaacacagcctcagctcttaaaagagctatggggacccacccatcaggaagatacgcactatttacgtgttttggtgggtaaattgcgcagtaagttgggagataacgcgattcagccacgttatattgctactgaaccaggtgttgggttacgttttttagctaaacagaaaaatcattaa

SEQ ID NO: 57967 - DNA, 450 bp, Acinetobacter baumannii
atgtctgctattttgccatttagatttgattttgatgtatgtgtcgaatttaattttggtcaggaaattattgatttaaatgatttatatattattatacggtgtgtggaaaaagtaaaagaagaaattaataatggaattgatcttttatctgatgatattagggcattaatagatgaagttttaattcaagatttaaatttaagtagtaatcaagaatataagtataaaaaattactaaatcatatgtttttccaagaagatggttatttaagatttgattatgatgaagaaaactcaaatgggcatttgcatccattaaatcatcttgatattaattatagtaactcatcaactttcaagttagggctgaaagctagagtagattttcatactttttgggatattctgcgttctgatactaattgtttttatttagaaaaaagttag

SEQ ID NO: 57968 - DNA, 144 bp, Acinetobacter baumannii
atgctttgcgtacttaacaataccttctttgatggcgaaatagtgatagcggatgatactgacctaaaagcaaaccgtttacgtttattggctcagttacgtgacttgtttactactgctgatgtaagtgtgttacagggctaa

SEQ ID NO: 57969 - DNA, 198 bp, Acinetobacter baumannii
atgaatcgatctctatttattatctttgcaactattgctttagatgctattggtatcggtcttatttttccgattcttcctttattattacaagatatgacgcatagcactcatatttctatatatatggggtatattggccagtctctatgcggccatgcaatttatcttctctcctttattaggtgcgttaagtga

SEQ ID NO: 57970 - DNA, 429 bp, Acinetobacter baumannii
atgcaatttatcttctctcctttattaggtgcgttaagtgacagatgggggcgtagaccggtcttgcttatttcactggctgggtcagcagttaattatctctttctaactttttcacatagcctaattttattgctagtaggtcgcattattgctggaatcaccagtgccaacatggctgttgcaagtgcttatattgtcgatgttttgcacgaaaataaccgcgcaaaatattttggtttaatcaatgctatgtttggtgcaggcttcattattggccctgtattgggcggattcttgagtgaatatggattaagacttcctttctttgcggcagctatattgacagggcttaatcttttatctgcctattttgttttgcctgaatcccgaaaagtgactttggagaacaaacaattatctacataa

SEQ ID NO: 57971 - DNA, 561 bp, Acinetobacter baumannii
atgatggaaaagatctatggagtttttaacagtgatggcagcttagatgtgttggtcaaaggggaacgtgataatgtttatgcaacaccgcttcagcatatcaaagaaatgcaggtagatatgcatgataaaaatgttttgcattatctagatgagaatctaaatgtagtcactattccagtagtaccagaaaaaaaatttgattatgtctcaaaaacttggattgactcacgaactattaatgaggctaaactacagaaatgggaacaaatcaaacagattcgggatcagtatgagtttggcggttttgagtttgaaaacaatatttttgactcagatagcaattctcaactaagaatcgctactgcagctttgctcggcgtatcagttgagtggactttaaaagacaattcagttgttaatcttagtcctgatcaattgattgagttaaaaacagcacttgcagtgcacattaataacattcatgaaagagggcgtattgcacgacagaaaattgaaactgctttgacatatgaagaaattgaagcagtaaatttttaa

SEQ ID NO: 57972 - DNA, 417 bp, Acinetobacter baumannii
atggttagcataccccctcatttctctatctcaacagatggttttattcgaatgaacgaaaaccaactcatgagttatcctctccaacatatcatctctaccgttgaatctagacatactgaagcgtctcaaattttctattatggttttactgaatgggcaacttcacaaactccagctttaagtaccggatgggattgggaactcattgagaataatggcatcactaccgtaaaacgagtagggttacctcgaagcaatatcatgattgttgacgtatctggtatggatatcggatttgatattaatgaaacattactcgagaaaaaaatagatactttgttctgggaaccgtttatttatgcccaaatcaatacgtcattaaccgagtcttcattaagtcaaaccttctcttag

SEQ ID NO: 57973 - DNA, 552 bp, Acinetobacter baumannii
atgaatattattgctggatttcaaaacaatttttcagaaggcctatataccaaatttaaaagttaccgctacagggtatttgttgaatatttgggttgggagttgaactgtccaaacaatgaagaactagatcaatttgataaagtcgatacagcttatgtcgtggctcaagacagagaatctaatatcattggttgtgccagactactacccaccacacaaccttatttactcggggaaatatttccccaacttctcaatggaatgcctattccctgctcaccagaaatttgggaattatcaaggttttcagccgtagatttttcaaatccgccttcctctaccagtcaggctgtgtcatcacctgtctcaattgcaattctgcaagaagcaatcaactttgcaagagaacaaggcgcaaaacaactcattacgacttctcctcttggagtagaacgtttattacgtgctgcgggttttcgtgcccatcgtgcaggtccaccaatgacgattgatggatattcgatgtttgcatgcttgattgatatctaa

SEQ ID NO: 57974 - DNA, 1353 bp, Acinetobacter baumannii
atgcaaacaatacatggaaacggttcacatcctaaaaagtcgtcacatcgattagcaggcatctctagcatggtcggcaccacgattgagtggtatgacttttttgtttatggtgcagcagcagccctcatttttaacaaactatttttcccaaatctggacccacttacaggtgtgcttgcagcatttgcaacctatgctgttgggtttattggccgtccactcggtggtttagtctttggccattttggtgacaagattggccgtaagtcaatgttgttgctaacgctgatgctcatgggaattccaaccgtactgattggcctcttaccgacttacgagtcaataggttattgggctgcaattggcttggtgatcttgcgatttattcaaggtatggccatgggcggtgagtggggcggtgccgtgcttatggcagtagaacatgcacccgaaggtggtaaagggttttggggaagtttgcctcaagccagtaccggtgggggcttaatgctcgcctcaatcgcactaggactggtgtcgttattacctgagcaagcattgtttagctggggctggcgattaccatttcttgccagcattattttactggcagtgggttggtatattcgtgtaaaagtgcctgagtcaccagactttgaaaaagtaaaacaacagtccgaagaagtcaaagttccggcttttcaggtttttaaaaatcatccaaagcaactcatcaccattattttggcgagagctgctgaaaatgcatggttctatattgcttcaacttttacgctagcttacaccaccacacaattaggtattccacgacaagacattttgtttgctaccatttgcggtgcagccgtgattttatttatgacgccgttatgcggacatttgtccgataaagtcggtcaacgcaatatgtttatgtttggactatgtgtattggcactttattcttatccattttttagcatgctcaataccaaagatccggtactggtctggacggcaattgttttggcaattggtgtagtgttcccgattatgtatgcgccacaagctcagctttttgcgcgtcaatttcctgctgaaattcgttatagcggtatttcgatttcggtacagttggcaggtgttttgggtggtggtttagcccctatgattgccactaaactgctcagtattgggcaaggcaatccatatttaattatgttttatatcggaagtatggctgtagttgcgattatatcgacatcatttatgccgcgcgattggagctataaaaaggatgagacttattataagaaagcaaacttaaatctaaaaaccaagattgattga

SEQ ID NO: 57975 - DNA, 1026 bp, Acinetobacter baumannii
atgaatacagaaaatcacttaatgattgagcgacaaggtaagcttggcgtgatcaccttagatcgtgtgactcatctcaatgcattgtcgctagatatgattgaaggaattggcgcccaattggagttgtggcgaaatgatgctgctgttcaggcgatcttaatcaaatcaaatagcccaaaagccttctgtgcaggtggcgatattcgctatctctacgacagttataaaaatggcacagccgattacaaaggctactttagtgccgaatataaaatgctcaatacactgcgcgaatatgaaaagccaatcatcgttgtgcttgatggctatgtattaggtggtggttttggcttggctcaggcgtgtcacattgtggtaagcagtgaaaagtccagatttgccatgcctgaaacagcgattggttttttcccggacgttggcgcaactcatttcctgtctcgtcttgatgatattggcgtttatatggcaattacgggtgagcagatcagcagtagcgatgcgctctatctcgacttaattgactaccatgtgccaagcgagcagttacaagctttacaagacgctctcgttgaagcgccaagcttaagcaaagagggaattgaacacatcattacccgatttattactcgtcctgctgaaagtgaactcaaacagttggctgaaggcatccgtaaacatttcggatttcagcatttagatgagatcgaacaaagccttgaaaatgaacaggatgaaagcttaaagacttgggcgagtaaaatgcttagtattttgcagcagcgttcatttattgccaaacaaaccagcttgaaactgcaacatttaggccgtggactttcactacagcagtgtatgcagcttgagcgtgatttacaggatatctggtttgagcatggtgactttattgaaggcgttcgtgcgctcattgttgataaagataaacaaccacggtggcaagaacgtaatcctgagctggaacaaattttagaaaaactaagctaa

SEQ ID NO: 57976 - DNA, 774 bp, Acinetobacter baumannii
atgcagtggcaaagtattttattagaaaagcgtaatggggttggattgattacattaaatcgccctcaagcgctcaatgccttaaatagtgaattaattagcgaaattaatcaggcattagatcaactcgagaaagaccgcgaaattggctgtatcgtattggcaggctctgaaaaagcttttgccgcaggggccgacattaaagaaatggccgatttggcattccctgatatttatttagatgacttttttcatcttgcagaccgtattgcacagcgccgtaaacctttaattgctgcggtgagtggctatgcattgggtggtggctgtgaattagcactcatgtgtgactttatttattgtgctgataacgccaagtttggtttacccgaagtcactttaggggtaattccgggtattggtgggacacagcgtttaacccatgccattggtaaagctaaagcaatggaaatgtgccttaccgctcgtcaaatgggtgcagtagaggcagaacaaagtggtttggttgcacgtgtgtttagtaaagaagaattacttgaacaaaccttgcaagccgctgaaaaaatcgcagcacggtctttaactgcaaacatgatgctcaaagaaaccattaatcgagcttttgaggtgaatctcaccgaaggtttacgttttgaacgccgcatgttccactccatttttgcaactgcggaccaaaaagaaggcatgcaggcatttgttgaaaaacggcaggcaaattttaaaaatcagtaa

SEQ ID NO: 57977 - DNA, 243 bp, Acinetobacter baumannii
ttggttcactacgccgcacgtttaaaagaagcaggtcaaccatgtctcaatgaagcttcaatggccaaactatttgcttcagaaatgacggaacgtgtgtgctcaagtgccttacaagtgtttggtggctatggttatctcagagacttcccaattgaacgtatttaccgtgatgcgcgtatttgtcaaatttacgaaggcacaagtgatatccaacgtttagtgattgcacgtagtctataa

SEQ ID NO: 57978 - DNA, 285 bp, Acinetobacter baumannii
atgaaagatgaaatcatgagtaaagcagaggtaagcgcatttacctcaattttcttaggtttggcgggttactctatttttatattttatctacttgctaaacgaagcaaaggaataaattactttgatgatttatcttctttaaatgataacgttttatatttaatttgttttctcatttttatatttagtaaggtttttaaggaaaataagtatatagttaattttacaccacttttaatagggattcttttatctgtgatgttctttattgttgttttatag

SEQ ID NO: 57979 - DNA, 564 bp, Acinetobacter baumannii
atgacttttgagagaaggaaaatttggggcgagcaactagaacagcttgctggatcggttgagcctttattggaagagcttgatctggatttaccaattaaacaggaatctacattgctagttgatgaagagcgaagtatttattatttatcattttttgtaggaagtggttatttgtcacctgctgaaaaaatcatattagaaaaagagggaccgtattattttgacggttatgaaaataaccctgtaaccccctttcattggccagcagtagaggcaattgtgaccccaacacaagtgatattatttacgtcatttgagttttcagttgcaaaagttgaggagtgtaaagctaatagagaattttatatatcttcactgagtattaaatctttagataatccaaatattatccatatttattcagaagatcaggttcctcaagaagtacacagtattattgctgaagcattttatatatatcaacaaagaaaagagtgggaaattaccacacagctttattataactttggtgtagatatgctcaagggcttaagaaactaa

SEQ ID NO: 57980 - DNA, 4143 bp, Acinetobacter baumannii
atggcaagatcgttagaaacccaaaatattattaatcaacttgctgctattgagcagacaaatgggcaagttactattcaagacttacggcaggcatttcttaatcttgtgcctgatgttactcaagatttagaaaataaaacaactttgttttatgcagggaacaacccaacagatcctctatatatagcagcaaaagcaatttcgaaggatactagtaaccctttaactattatgggtaataccaagctttcagaattaatgcactcagatgaagtgataggttatttaaaagaaattgctgaaaaaaataagattgcaaaatatacggacattatgaacgatgaaaccacgattgatggggtgaaaagtcgtgcattgtgggatgatgcttcagaagcccttgcaaaagcttcatcgggagatgttcgtaccctgactccatttggtaccgaagataaagtttttgctcgtgtggagctgccagctttacttgaaaacccaaatgtaaaaaccattgatgggataccacgtgaagtactaaaaacaatgtacgatgctgatattgccagtggactctcgcatacggaggcaattgataacgcacgtgcagcagtacaggcaaaatcactcatctatacttcgctcattgatgaaattaccaatgcaaatggcaaggtgacctatgaggttagccgatttatagatgggccaaataacctttctgactataatacgaagggtgcttcagttatccctcatgcagatacatcaataattcattcgacattacatggagatacaccgaataccagtctattaaaccaatcccaaatagagtttttgaatagggggaagactcaattagagcgggtggagttagttacccagcaattggctcagaacgtatctatatttgaaagtacacatctttcgaacttggcaaaaggggtaggtttagcaagtttaacgattgggttatttactgtgactgaaaaagtcgaagctgctgaaaccccagaacaaaaacaacaaattatagatgattgggtcggtcataccacggcagagtggattgcaggatcaattggtagtgcgttggtggtaggaggtgtagcagcatttacagcagtatctgcacctgtgactttagctttagcgattgtgggtggaatagtcggttcgattgtgggtggtgacacggtctatgagcttatcaaagagggtgttaataaagttttaagtgacattaagtctagtttgcattcaatagttggtgagtttttagatcagtttgatttgaatgatgttatggggttatatgaacaggcagaacacgtagctagcccactaatactcgatttaaataaagatggtgtggttggaacaggtgcattgagtgaaaatatttattttgatcatgatggtagtgggtttaaagaaaaaacaggttgggtaagtccacaagatggtttgctagttttagataaaaataataatgcggatattgaaataggtaatgaattatttggaaatcagactagtttaaataatggccaactggcgaagaatggatttgaggctttagcagactatgacctgaataatgatggagtaattgatgcagaagatgaaatttatcagcagttacaagtttggcaagacatcaatcaaaacgcacatgtagatcagggtgaattgactggtttacaaacaataggtatccaacaaattgatttagcctatacatcagctaaggacattgatgacaatggtaatcatcataaacagcaggggcagtttatctgggcggatggaactgttggaaaaatagatgatgtatggtttcaagcagatactttacattcccaaattaatcaagaccaaatcgttgagattgatcattccattgcagtattacctgatattcaccaatttggtaatgttgatagcttacatcaggctatggcaaaagatacaaatggaatattacaacaattagttgaacaatttgctcagacagattctttgctgattaggcagcaacttgtgactgatattatttatcaatggacaggtgtgactgatttaccgagttatgaaagaggaatgtattgggatgatcgacatttattggctttagaaaaaataatgggacgtcaataccactcatttgcagatgatcctgagtggactttagcagtaggaaataatcaggcatttgctttagaagaagcatggagactcttgcgacagaaaatctatgatcaactctacttacaacaaaaagtacctgaattttttgaaaagattcaaataacagaatcaaatcaactcgatgtcactcaactttatagttatatcaaacaatctagtctagttgaagtggctgaactctatgatgttttaagccgtggtccacaattgtttaaggatgtacaaaatagcttgaaagaacttgcgttgaatgtccctacaccagatttgattgatcaaattttaggtcaaactttgcaagttcatatctcatcagtaaatgatagtttatatgtaggaagtgatggagatgatttactgatcagtaatattgggacagacatatttgtaggtggtgagggtgtaaatatatatgtttttagttctaatagtgggcaagatactattcaggcaagctatttatcggaaaactcgcctttgacagaaactcatattgttttagatgccttgccgcaggatatagtggttgaggttggttcaagcgacattattttaaaaatcagtggaactgaggaccaattaaaaatagaaaatgcaatttcagagagttcaatattcaaaacgataacctttgcagatcaaactgtctggaccattactgatattttagcccagcccttgttaggcactgaaggcgatgactatttagttgggattgatgctcgtgataacaagatttacggttttgcaggaaatgattatctctatggtgcgattggtaatgactatctagatggtggtgctggtgatgactatttaattggtggtgaaggaatcaatacttattattttgatcgaggttatgcaaatgacatcattatggcaccttatttgacacctgaatcggcatctacagaaacccatattcaattaggtgtattgcctgatgacgttagcgttgagctctttgatcaaagcatccgaattacaattaaagatagtggggatacattagagattcgtgatgcatttgtagaaaactcagtgtttaaaaccataacctttgcagatcaaactgtctggaccattactgatattttagctcagcccttgttaggcactgaaggcgatgactatttagttgggattgatgctcgtgataacaagatttatggttttgaaggaaatgataatctctatggtgcaattggtaatgactatttaaatggcggtacgggtgatgactatttagatggtagctatggagtaaatacgtatgtttttaaccgtggctatggttatgattcgatcaatactccttatttagatgaaaattcacctcaaatagaaacacatattttaatggatgtattgtcaagcgatgtttcggttgaaatttcatatcatgatgtctttattagtcttaacaatactgacgatctcttggaaattagaggcgtatttacagagttttcagcttttaaaacgattacttttgccgatcaaactgtctggactatccaagatttacagaatttcgcttcaatagacagtaatcaggatgaatcattaacagatttgttgaatggtttagctgataattctaactacgaagagtacggttatttatttgatgaattgccagataatcaatcattagttggacaactcgaaggaaataatacgcaagtgttgacagactctttgatattagaagaaagctctaacattgatgttgataaattattgataattaccaatgcaaatattgaaagtgaagatattcaaaatgttaaaaatattttgactcaaaaatatcagtttgatgaagttgatgatcagatcgtatttgataacacttcattttcaatggtaaataacattagtttatggaatacgtcatttaatcaacagtttatagcctaa

SEQ ID NO: 57981 - DNA, 177 bp, Acinetobacter baumannii
atgattttaataaactatgaaacgaatgatgagctggaattgatacgagagaaatttagtggttttgaaattattgaattaaatagcagtgatactaatttattgattactaatccagatgttgaaaactttactttacctgctgctatagaaagtaatatacaagtaagtatttaa

SEQ ID NO: 57982 - DNA, 375 bp, Acinetobacter baumannii
atgagaaataattgttataaaattgacgaaagtgaaaaaggtcatgaaatgaacagtataggcgaacgtatagaaaaaaaatgtaaggaactgaatatcagcattcctgaactagcaaatatcgctggagtaaattacaagaccctaaaaagaaacatgaccgccgaagacccaaaccctacattgcagcacttaaagagattaagcatagctttaggtatgagtatcgataatcttgcatttggcgaagaaggaagcacagatgaagaaatcgctatcattcttaacgacctaaaaaatatagaaaaagaagataaaaaaagaatcttatatatggttcgaatgatgattgccgaaagcaaaaataggaaatga

SEQ ID NO: 57983 - DNA, 1224 bp, Acinetobacter baumannii
atgcttgattttctgcggttagcgattccgatcattcctacgtatgtacgtagtcttgataatcatcattggtttaatggtgatattcgtgattatggtattcctgctgctactcgccatgtttctaagaccgatgatggtcaaacgataacaggggagctttatcatccgtatgagtcacttccatctgactatacagatatggctgttaaattttatacaaatacaatgaatacaccgccttatgttgagattaaggcatctccattgaagttgttacaaggtcacaatgtgtatggttttgagtctatcgaattaggctccgatcatatgcttggcatgttactcgaagcctttccccagttagccccaatcttagatttggcaaatactgaggttttacatctagataccacatatttatttagattgcctcatcagaatatggttcagccaactttggactatatggctaacttggcttcgggtcaccgtaaagcccgtgaagttaaatatgataattacattacttggggtaatgattcagcaagtgtacgtcctaaggcatatggcaaatttgaagaagttaaaagccaactaaataagattcagaagaaagcagataagggttgtatgcgctctaaatcgcttgttattgctatgaatggtgctttgcaatttgctaatgctgttttacgtctagaagctcgtatttgtaagacttatttaaccaagaatggttatccatcgaatttatttcagctaattaagctgcaacatgaacagccagaattattgctacgcctctggcacgtagcgtttgacccaatccttaagactatggagggtgaatatatgaatttcgcaagtgatgatgaattagaagctttacttaaatctaaattggttacctataccaagaaaggtaatcctagttataccaaggcttataacgcctttgatttctatcgatcattgcgtattgatggttataaaaaagtaaagtccagacatttggaatcacgtttctataaacgtgaaagagagcttattagctgcggtattagccgttctcatctacagaatttacataaaaatccaaacggtaaagtcatcccatttgtacgtttattcgaacttaagatggctgatcaattaccaccagattacgttcaaccagtttcacaatacacacccaaacgtgggttacatctagttgcctga

SEQ ID NO: 57984 - DNA, 297 bp, Acinetobacter baumannii
atgcaagtttcatttaataaacgcacaatttttccaaccgtttaccgtactgagaaaaacggtgaatctaaggcttatttatctacgaccgtattgtcaccagtgaaatataacttgagtgcaatgccgggaatgatgccagttgaacaaattcaggcaatccttgaggaatgtgctgacaacgctcaagaagtagaaatcgaattcacagagatacaaactaagtttggagcacaaatgcaggtatttagtgttaagccagttcctaagaaaaacccaatggaatcaaaggcttaa

SEQ ID NO: 57985 - DNA, 375 bp, Acinetobacter baumannii; identical to SEQ ID NO: 44589

SEQ ID NO: 57986 - DNA, 375 bp, Acinetobacter baumannii; identical to SEQ ID NO: 57982

SEQ ID NO: 57987 - DNA, 1224 bp, Acinetobacter baumannii; identical to SEQ ID NO: 57983

SEQ ID NO: 57988 - DNA, 297 bp, Acinetobacter baumannii; identical to SEQ ID NO: 57984

SEQ ID NO: 57989 - DNA, 837 bp, Acinetobacter baumannii
atgaaaaaggtagttgatttatttgtagaacatggacaagaaatttttaaaaaaagaccatggtatagtagatggtttggttataaacgttcaaattatactaacgaaggtcttaaacaacttttaaattcgccagaactatttggtgataaaatactagctgatttgaaacatccaactattataccttctattaattacacagaaggaaaacctgttgtttttaaaacaccccaccatatcgattttagacgcgactggagattaaaattagttgatgttgccttagcaacctctgctgctcctatgtatttccctagatatatgatcgacaaccaacagtatgttgacggtgggttatgtgcgaataatcctaatctattgggattacatgaggcagactatttttttaatattgatattaataatatcgcattactttcaattggtaccctatcttcgaaaagaacagttaacgcttcaaataataaagatggtggtctgatagattgggcagaatcaaaatataaattaggtgatagtgcaagaaacattattgatttaacactagcaaatcaacaaatgttaatgcaacaaattgcagatcatagacttaaaagacacaatggtatttcttttaaaattgatgaaaatcttgtagccaaaagtaccgaatatgttggtttagatttagtaagtaaatggtctcaagaaactctcattggtaatgcacgcgcaagttcgaaaattgcaatttcaaaaaccgaacttattcaaataatggagcatattagtgcttcaccagaatggcatcatggcccatacaaaaatatttaa

SEQ ID NO: 57990 - DNA, 1251 bp, Acinetobacter baumannii
atgcagaatacagctacggccaacttacatttaatttatcaagatgataaagatgggtatgcaaccaagttgctgcctcctcctagccttattgataagctaaaagaatgccaaataaaagttcgtaaaaaattagagcaagttttagaacaagaatatggtacaaaaccaaaattccgtgttcaaggttcttttgcttacggtacttgtaatattccagcccaaccctcaaagggtcaagagcttgacctagattatggtgcctatcttccagctagagtatttactttaaatgatacaggcatacctaattccgcagaagaagctaaaacatatattcaaattgtttatgatgctttagttgatctttctaaagaaaattctggttggactattgaacaaaagcctagttgtataagaataagtggagtggctccccttgctcatatggacataccactctacgcagttccaaacgatatgtttgaagacatacaaaatcagcatcagctagttatggattcaattcaaaaaacatataaatcgctacaagagcgctttgagagttcaagtttttcgatggaatcttatgattctgcgttaaataatgagatctatgaaaatgaatctttaattgatttagagtcaattgaaatgattcacatggctaaagaagatggaagctggtttccttcagactgtgaaaaagtacgtgaatggttcagacgacaatgttcaaagtaccctaatagtggtcgacaattacgtttcattgcgcgttatttaaaaggttggagagatcaacaatgggaagaaaaaggccctacttctattgtattgatgattgcaacagttaaaaattatcaatatatccaaggccgtgatgacttagctttagcacatgttactgcgaatttggataacatcttagccaataatatttatgttgaagatatggaggatcatgagaacgaagactttaaccgagctaatccgcatcaaagaatagaaaatgcacaggcagcaaaaagacttcatcaagatgttacacaggctataaaacaaggaataatagcacctagtacttctattgcattgttaacaagaagttttggttatcgcattccagaagatcctacattaattagattcgaacagcaaagccctcaagatatagttgaaagtgtatttcagcaacctgtgactacacgagaaaactctgtaaagctaaagcctcaatcaagtggataa

SEQ ID NO: 57991 - DNA, 144 bp, Acinetobacter baumannii
atggcatgggtaaaaagtgagccagtccaattaactgttgtaattgtttatgaagtggaccttttatatatacctcaggaagagataaaaaattccaatcttttatttgaattattaaatctacttctatatcagaaccattag

SEQ ID NO: 57992 - DNA, 1998 bp, Acinetobacter baumannii
atgcttgaaatgatagtaggaattttcttaagacatataaaaacatataaaggtattaactttattccattgagcgatggtgaaaaattttgtgggttggttggtaataatggtataggtaaaagtactgttttagaggctttagataaaatatttcttcaaaataaagattggaatattaatctagctcataataaatcgcagggtgatgctaatattccttatattgtacccattttcttaattgaaaaagctaaaattcaatttaatgaaaaagagctagaactaataaacgttatagataaagctataaaaaaagttagtacgcaaaatttacctccacgttttagtggggcaaaggaaacagtcaatcatataaaaagaatagttgaatccattgataatattgatgagttttttttagtacctttaggcattacttatagtggtaaaaaaacttttagcgtgttcactaattattttacagaagaattaaaagactttattgaagatataaatgctcctaataatggagaagaaattgagttggatctggcgatattagatgatatttttttaaaagtacttgatatatatagatatatttatattcctagagagcttagtgcagaagaatttagtaaattgcataataagcagtttgagtttttaatggggaaaagcctacatcagacactaaatgaaactatttcacctgatgctgtaagaagaattaatgaagctctcgatggcattgttaattcgatagctactgatttgaaaacttatgaatatagaactaagagtgatgttagacaaagaaaattacagaaagatgatattaataacttaattattgaagcttatttcaatattcgttctatgcatgtaaaagtaaaagataactcatctatagcaattacaaaattaagttcaggtgaaaaacaaaaagcaattttggatatagctaataatttgttgaagaaaaatagcgaaaataattcagaaaaatatattatttttggtttcgatgaacctgaatgctcacttcatatttcagcttgctttgacatgtttcaagatctctatgaaaccaccaaatattgctctcaagttttgtttactacacactggtatggctatataccctcagtcttagaaggtaatactgtaattttatctcgtgatcaaagtgatgtacatgcttttgattttattaatatttcaaaatacagggaagatacaaaaattttaaaagaaagttccagaaatcaattaccaataagcattcagttaaaaagtattaatgacttggtacaagcgattatttatggaagtatgagtgaaaatcccttttgttggctaatttgtgagggttcttctgaaaaaatttatctgtcacattttttagatgaacttgttcaagataagagactacgaatattaccagttggtggatatagtgaggtaaaaaaactatataatcatctttcaattgcttttgaagacttcaagaatgaaatgaaggggaaagtatttctcttgtgtgatactgatgataaattagaatccgatacaagccacataaagcaagattcacaacatccaaagctaaaatatcgccgtctaattgttgatgataatacagagtcagttcaattggtagaagttaattccactattgcagcaaaatctacagttttagaagatgctctaaatggttcaacatttataaagactttagatttttttaaagatgataatcctgagctaaattcgataatttatgaaactaatagagttgacgttcaaggaaaggcattctacccatcagctctatcattaaagctatctgtcgccgaatccaaggaacttaaaaattttttcaaaaagtataacaatgacatgaaagtaatttttgctaaaaaaaatattgattatattgaggatataaatgagattccttggattaatcaaattaaagaattctttagttaa

SEQ ID NO: 57993 - DNA, 1293 bp, Acinetobacter baumannii
atgacaaatatgatcaataaagcccaagggttgggtttatcgctgatcacaaaactagctggaagcgatgtacttgatcaactcaaactacgtaaatttcttgaaaggtctctttaccaaggttcaaaagctggttttagagcattaagtcagactcagaaagcatttaaacctaagcaaattccccaacaacggctgcctcaacagaagaaaaacctatttgatttaagcctaactgaagaacaacagatgacttcagaggcaatgtctcaatttgctcaagaagttttattgggattagctcatgatgctgatcagacagctcaatttccagaaagcctttggcaatatgtagaagatttaggattaaactattacgctcttccagaagcactaggtggtgtcgccgctgaacaaaatattgtaagtaacttattgattgctgaaaaactagctgaaggtgattttagtcttacagcagggctcttaagtacgtttagtgttattaatgccattacacgttggggttctactgaagttcagtcaatgtatttaccttgctttgcagaagactccgacattaccgccactttcgctgtacaagaagctactccagcatttaacccttatgttttaaaaacaaaagcttctcttgaaaatgatcaatattttatagagggcgaaaaaaccttagtcattttaggagatttggctgatgtgttcttggtaagtgcagactttaatggcaagccggatgtatttgtagtacaagctggcgataccatttctattaaaagtactcctgctatgggtctcaaagcagcagagacagctactttaaaattcagtcatacacctgctctacgactaggtgcaacagattttgattacaccgcctttttagatttaggcaacttaatgtggtgtgcaatggctgtaggaacctgtgaagcagtaaaagcctactgtattaaatatgccaatgagcgaactgctttcggagaaccaatttcacatcgtcaaagtgtcgcattcatgattgcagatatggcaattgaaattgatgctatgcgcatgctaattctaaatgccgcaagtcttgccgaagcaggtcaacctttccatcgtgaagcatatttagctcgcattctttgcgcagaaaaatccatgaaaataggaacagatggcgtacaaattttaggtggtcatgggtttacaaaagaacaccctgttgaacgttggtatcgtgatttacgtgcaaccgcaattttacattctggcctacatgcttaa

SEQ ID NO: 57994 - DNA, 201 bp, Acinetobacter baumannii
atggcatatgtttgtaaagaattacagcttatcaatgatgtacaaacatgtgtcttgtgggttgaacaagtcacattaaatgacatgtttggcatcacacctgccaatgctttcagtattggttttgcttgctgtcttgtaattattacaggtgcagtatttaacaaacttggtcgattaggggaaaaatctcatgactaa

SEQ ID NO: 57995 - DNA, 249 bp, Acinetobacter baumannii
atgactaaaaatgaaatcgctattaaacgtgctgaaaaacaatcacgtttacaaacttacttaaaccgagctgctgtagttgcaactcttgcaactggtacgtctatggctcgtgcagattatgacgtaactgccattgtgactaatttggggcttgctgttactgctgctgcgacaattggtgtgacttggcttggttttactgcgggtattgcgatttggcgtaacctccgcgctgctgctaaataa

SEQ ID NO: 57996 - DNA, 1227 bp, Acinetobacter baumannii
atgaaaagaatattagttctattaatgtgctttaacattgttctagcacctacttatgtctttgctactacagtagctgctgatggttggtctgtaactaagcgtattgtgcaaggtgcaacaacattctatgacggtactaaaaatatcgttttgaacggtaaaaattatgcagctactggggctgctgcgattacaccaactgctactcaagttagcaaaatgattgtcagaactggtgctgttttagctgtagatcttgcaattaaagcattaatcggtgcagtagattacacgatggatcctgcaaacaatcgtgttaaatattttcttgttagtgaccctactgatcccaatgatccgtcttcacaatattattattacaatgcatatgacggtattaattatgcgactgctagccaggcttgtcagggcatgcttacacatcctgactacaagacatttaaagcatctcttgtttctcaatctcgttgtgaactttaccgtcctgatggtacttatttcacttattacacaatgtataaagcagctaatcctgcatatgatccgaatgctgaaccaaatagacaagaaaaatatttaccttatgatgctgtagcttctcaagttatcagtgatgcagttgcagaaaaatcagatgctaaagcttatgtttcatctgttgctgatactgctttagatagtgacgaatcacgtcaaattgttggtgctgatcaagttgtacagcaattaaatgcatctcagtctatcccaactagcaatactgcgactggtcaagctgccgttcaacctactactgatcctgcaactggtgaaccaactgctacaccaccgccttatgacataactattaatttccctgaagcatgtagctggatgccgtctatttgttcgggtcttcaatctgtagttaattatttaaatggttttaatacttggctaaatgaattcggcaaagacaccagtttacctgataacgaaaagcctgaatttgagacacaatcaatttcaccaactgaaaactatatttcttgggcagcttcctgccctccagacgcccatgtcccagtagagctttatggtacacattcaaccattactttctcttgggcaccatggtgcgaattactttcaatcattaaaccagccattgtttttagtgcatatatgggtgctgcctttattgtcttagggcttagaacatga

SEQ ID NO: 57997 - DNA, 282 bp, Acinetobacter baumannii
atgaaagcaattctatttagtcttacaagctggctcttatctaactttgcaaaaaaagtcctattgggtgcaggtgtttctttagtcactggtgccgttattgaaaccattttgaatgcgtatatcagtaaagctatggctatgtcatctcaacttaacccctcttatttagggcttttaagtatatcgggcttagacaaagccatatcaatcattattggtgccttggttgctagatcagcaattatggctgcccaagtttctttcgttaaatctaaataa

SEQ ID NO: 57998 - DNA, 1101 bp, Acinetobacter baumannii
atgttatatcttattacggggaagccaggttcatttaaaactgcaaaaacagcaactttggctattaaatacttaaaagaaggtcgttctgtttatacaaatattgatgaatttgattatgaaggtgttcaaaaactacctgaaaataatgactggcgaaatacgcctgatggttctgttgtcatctatgatgaggcacaacaatttgacttcttacaatataaaggtcgtgaaaaactaagctcggatgaacgagtaaaggctcttgaagttcatcgtcatactgggcatgacattattctaattacacaaagcccaagcttcctgcataaccatattttaagtttagtcggctctcactaccatttacatcgtgcttatggtcgtggctttgcagatgtctttttatggcgctatgctatttctatgcctgattcaactggagctaaaaacaaagctgaatcacacgaaaaatttaaacctgattcaaaaatctttgatcaatataaatccactacgatggatacacataaactcaagattccgcctatttactttaagctaggtggctttttagtagcagtggttttccttgtaggctatatggtttttgggtcaaataacccttacctatctgcttctaaaatcaaagaaaatgcagatattgcatcaggtaaaaaacaacaaacgactgttgtcagttcacaagctgcatctgtttcaacagatgcagttaagaatctcgatgttgagtgtcgtaaaggtgcaaatgttgaaaaacctgaatgtgtagaatggtttaataacctaactaaaaatggcggctctgttggtgtcaataacgtccaatctattccatacaatccaagtaagccctatgccgacctttcagactccattacttatgaagctacatctaagccagtttttgcaggttgtataaagaaaaatggtcgttatgttgcttacacccaacaaggaaccattcttcaagatgtaacacaatcggactgcaaacgcttgattaatcaggctggtgatagaccttttaattactttgctgaagctcggattgaaactgtgagtacagaatctttgtaa

SEQ ID NO: 57999 - DNA, 237 bp, Acinetobacter baumannii
atgtcagtcacagatattgctgttttgaataatctactttttcaagtttttgtagttggagctgtattaggtttaattgtttctggcttttttaaaaatctactcaatgtgtgggcttaccgttttaaaagacccaaaagaattaaaatccaagacggttttttgtatttctttaaaggtaaatattatcagctagaacaaaggaataagctcattgaagaacatcgaaaaaattaa

SEQ ID NO: 58000 - DNA, 978 bp, Acinetobacter baumannii
atgaattatttaggtatcgatgtatctaaagataaaatagactgttgcttattaattaatgacatttcaaaaaaagggaaagctaaaatatttcctaataatgaaagtggttttaataaactggtaacatggcttaatcaaaaaaacattcaatatagtgatttacttgtgacacttgaagcaacagggatttatcatgaaaatctttgttattttctcaacgatttaaagattaaaattgccatatctaatccaatgcgtacacgacgctttgcgcaaggcatgtctattctaaataaaaccgacaaagttgacagtgaagttcttgctaaatatggggctttagcacctattaaattttggcaaccagactctataaactttagagaattgcgtgacttgatgactaggcgtgatgctttatcaactgacttggtgcgtgaaaacaatagacttgaaaaatcaatgtttacaactacatccaagcaagttgtttcaatgattaaagataatatgcaatatatacaagactgtattgaccaaatagataatttgatcgatcagttagttgaaagcgactctgaattatctcaaaaaatgaaattattaacatccatccctgcaattggtcagcgtacagcgttacagatgcttaatctgttccatggcaaagactttgaaaatgcgggttctgctgctgcctatgttggtcttgtaccagtacaaaaacaatcgggtacttctgttcgcggtgcaacaagaatatctaaagcaggatcatcccgaattagatcagcactctatatggcgggtattgttgctatacgattcaatcctcacaccaaaattttatatgacagactccttaaaaatggtaagtctaaaatgtctgcgctctgtgctgtgatgagaaagcttgtatatctctgctatggcgttttaaagcataagacaccttatcaagctgactatatttaa

SEQ ID NO: 58001 - DNA, 408 bp, Acinetobacter baumannii
atgcatataagttcaataaaagtaaaaaactttagagcaattaaagatgctgaattaaaactagatcctaatcagaaacaggatttaactttaattgtgggaaagaataatagtggaaaaacctcatttattatggtttttgataaattctttaagaaggaggataattttaattttcacgacttttcaacgcatcttagagaaaaaatttataaaattgatagcgagactattgaagaggctataattggtctatttttggaaatatcatattctaaagatgataatcttgaatatttgtctgaatttattatagatctaaattctaaaaataatactgtaaagttatattttgaatgtttaattgatgaggagaggtggatcaggaaatttgaacaacacttataa

SEQ ID NO: 58002 - DNA, 3258 bp, Acinetobacter baumannii
atgagagcagatgtaactttagaaaccatctttcagcaatacatcattacgcaaatgcaaagccatggctggcagcttggttcagcacaaggctataaccgtgaaaaagcactttatgaacaagatgttttagactttgtacaaaagacacaagataaagaatggcaaaagttcaaaagcattttccccaatgatacagaacgtcattttttagataccgtcgaagcacagcttaaaaaagccgacattaatgccacagatattgaatctcgcagttatgggactttgggtgtgttacgtcatgggcttaaaactcgtggtacgcgcttttcattttgccaatttaaacctgaacatggtttaaacccacatttaactgaaatttacaaacagaatatttgccgtgttgtgcctgagttggtctatagcccatacgctaacaaagctgaactagaagcgacaggcaaacaagcaaaaaaatggcgtatcgatttagtcctgtttattaatggttttccagtcgcaacgctagaacttaagtcagaatttaaacaagccgtgcaaaatgcgatggcgcagtacaaaaaaacgcgcctgcccaaagaccctgaaaccaataagccagagccattattgacctttaaacggggcgcattggtacattttgcggtgagccagtatgaagtctatatggcaacccatctgaatggtgacaatacttatttcttgccatttaacaaaggcaccaaagaacaaggtgctggcaatgatgtacctgacgataaaaatgaatatgcaacaggttatttatggaatgaagttctaacacctgatagcttgctcaatattattggtaactttattcatttacagattgaagaaaaagaagattgggaagggcgtaaatataaaaaagaaagcctgattttcccacgttatcaccaatggaaagtcgtgaccaaattagtcgaagactccttggcagaaggcacaggacaaaaatatctgatccagcacagtgcaggttcaggtaaatctaattcaattgcatggaccgcacatcaactgtctagcctatacgatgctaacaataaaaagatgttcgattcagtgattgtagtgactgaccgaacgattctcgatgcacagctacaagatacgatttatcagtttgaacatgctgacggtgtggtcggacgaattaataataaagaaggtgatggttctaaatctgagaaattggcaaaagctttagagatggcgcagccaattattattgtgaccattcaaactttcccatttgtactgcgtgctattgaaaatagtaccagcttaaaagaacgtaaatatgccgtaattgccgatgaagcacattcttcgcaaagtggttcaactgcacgccagctaaaagaaactttgatgcttgaggagcgtgatgaggatgatcaactctcttcagaagatgtgctcgatgcggtaatggcatcacgtaaaggtagccagaatttaagtttctatgcctttactgcaacaccaaaagataaaacgctccagctatttggacgtttgccaaatcctgaactaccgccatccaaaaccaataagcctgaagcctaccatgtctattcaatgcgccaagcgattgaagaaggttttatactggatgttctaaagaactataccaactataaagtcatttataagcttaagcaaaagattgaagaaaaagacgatcaggttgatgccaagaaagctaagatcaaactcaatcaatgggtacgtctgcatgaccataatatctcgcaaaaagtacgagtgattattgaacattttaaaaagaatgtaatgggcttattgggtgggcaagctaaagccatggtcgttaccagttcacgaaaagaagcggtacgctataagcaggcttttgataaatacgtggcagaacaaaattatgccaatattcaagcgatggtggcattttcaggtgaagtagaatttgctgagaatgatgcagatagtagtcatttaattgggaaaaaatttactgaaagtaatatgaacctaaacttgaaaggacgtgaaatgcgtaaggcatttgatagtgatgactttcaagtaatgattgtggcaaataagttccaaacaggttttgatcaaccaaaactttgtgcgatgtacgtcgataaaaaattaggtggtgtggaatgcgtacaaaccttatcacgcttaaatcgtatctatcctggtaaggcagagtcaggcacatttgtactggatttctttaacgatccgcaggatattttggatgcgttccaaccctactaccaaacagctgaactggcagatgtctcaaaccctgatattgtgtatgacttagctgaaaagcttaaagcagcacgtattttcctcatgactgaagttgagcaatttgttgatgctttctatagcaaaaataaatcaaatgctgcactcgccaatatctgtaaacctgcaatgcaacgttggcagcaaagttatacgaaagcaatcaatgattatgatgtgacaaaaaatcgtttggaaattactaagcgaacaggcgaacccgttttaattgctaatgctgaaaatgaatttgccgaagcgaaaaaagcgcgtgatgcactcgaaatctttaaaaaggatttaggtagttttacgcgcttttatgagtttatgtcacagattgtagaatataatgataaagaactcgaaaaaatcagtttatttgctcgtaacttacgaccgttattgcgtgagcaagcggctgatgaagatgtgattgacttaagtaatgttgctatgagccattatcgactctctaagattcggcaacaggatatccaacttaaagccaatagtactgaacataaattagaaccagcgaatgatttgggtacggcaaagccaaaaaataagaatgaagaatttttatcagtcatcttgcagcgtgtaaatgaaatatttattaccgataagctgacagatcaggacatgattaattatgtatatacggtagcagacaagatgtctgaaaacactaaaatgatgaaacaaattcaaaataatactcgtgaacaagcaatgttgggtgagtttgatagtgctttagatgatgctgttttagatagtaatactgcacataatgaacaaactatgcagttgatgagcgatccctctaagatgcgccagtttgcgaatattatttatgatgttttggtaaaaaaaaatcatatttag

SEQ ID NO: 58003 - DNA, 918 bp, Acinetobacter baumannii
atgaaagcatttaataaatcccccaaaacattttccgagcaactggagattttaaaatctcgtggtatggtcgtttccgatgaacaaaaagccatttttcatttagctcaagtcaattactatcgcttgggggcttactggctgccctttgaacaaactcattcaccacattgttttaaagaaaacactcattttgaacaggtgtgggaaatctatgtttttgaccgtgaacttagattattggtactcgatgcaatcgaacgagttgaagtagccattcgtacccaatttgcctatgaacttgcacatcggcatggtgcacatgcatttatggatcagcaatattttaaaaacgaatatagatggacaaagttactcgaagggttacagggcgaaatagaccgtgcagatgaggtctttatcgaccactataagcggaattatgatacgcctaacatgccaccgatatgggcaacttgtgaagtgatgagttttgggcaactctctaaatggtatcagttgcttgcaccaagacatacccgaaaagcgatatcaggtcactttgattgtgcagagacacaatttgaaggtttattacaccatctcgtgtatttgcgtaatacttgcgctcatcactcacggctatggaatcgtaaatttaccaaaaccattgcgaaacctagaaataaacctttgggcttagcacagcaatgtaattttgatgaaaccacatcggcaaatcgtaaactgtataatagcttggtttttttactgtattttatggataaaattaccttacaacacacatggcgtcagcgtttgcttgacctcttattatcacatagcaacatatcaaaagcatttatgggctttcctgaagattggcaaacttatccaatttggcagataaaaaaatag

SEQ ID NO: 58004 - DNA, 1383 bp, Acinetobacter baumannii
atggcaaagtatcaaaaatatactgaatataaagattcaggtgttgagtggttagaaaaaattccgagtcattggaaagcaagttatgttggcgttgtatcagatgttattgatccgcaaccagatcatcgtgcaccagcaatatctgaaaatggggatggatttccgtatattggaattcgagatgtaaataaagatggaacattaaattttgaaactgcacgaccagtagaagaaagtgcagtaataaagcaagaacaaagttttactatcgaacctcataatattattttctgtaaggttggcactctaggcttaccaagaaaaatcattcctcatggacgatgtgctctatcggctactttagttttgattaaagctagaaaaattgaaagtcagtttttactatatgctttagatagtgattgcataatctcacaaaccaactttgttgcaacaggctcgactcgtgcagcattaggtattcagcaaatacgtaaatttaggatacctttgccaccaaattcagaacaagttgcaatagcatgttttcttgaccacgaaaccgcacaaattgataccctcattgccaaacaagaaaaactgattgaactgctaaaagaaaagcgtcaagcagtgattagccatgccgtgactaaaggtttaaatccaaatgtacaaatgaaggattcaggtgtggagtggttaggagaagtgcctgagcattggaaattagtccctttaaaatatttatgttcatttagtggcggtgggacaccaacaaaagataatttgacctattggactaatgggaatattccttgggtttctccaaaagatatgaaaacttttttgattaaagaaacacaggattacattactgaaaaggcagttaaagaatcttctacaaatatggttgaaccgaatagcttacttatagttgttcgatcagggattctgcaaagaaccattcctattgcgattaatattgttcctgtaacaatgaatcaggatatgaaagcacttaaatttggtcaaagaattttagtagagtatgtggctaatttgattcatggaaatacgcagcaattacttttagagtggtctaaagaaggtgcaactgtagaaagtattgagcatgaatatttagctaatagtattactcctgttccaccaattgaagagcaagaagaaataatccaacatattgataatgagttgaaattatttaagcaacttgaaaataatgcaaataaagcaattcaactcatgcaagaacgccgtacagcccttatttcagcagccgtaactggcaaaattgacgttcggcatcatgcctcacgtattatgggcaacgataaaatgcaaactgaggttgtttaa

SEQ ID NO: 58005 - DNA, 777 bp, Acinetobacter baumannii
atgtttttagtcaaaagttgcacaaggaaatataacgtttgtaattctaaaactcttaaaataggcacactccatgaatatagagaaactgaaagtgagcagatagcggataaagaggaaggtttttttaatattttttttgatattaaggacaaattcattgatgtggatttattcaatcatttaaataatgtccataatagtgacctaagagcatatgttgaaaatttgcatataaagtatcaacaggataaatacataagaattgactatcgagcaaaatacaactgggtcaataataatcgatttattttttgtatatctaaacttaatgatcatgaagattcaaaaactattttccccgattacgatgattattggtatgtaagttacttcaaaagagagcgttttatagaagcaatggagaaagctttacttgatgagattattaaaaaattaaaaagcggtgatcaaatatttcaaaagcctattgatgatccaaataatttaactgtaaaaagccattatcaagacattctctacagcgatagagatttatatttagataaccacaatatagactcaatgcaaagcgacttaatagatatatttaaaaatatcaaatacttaaaaccagaaagatataacaaagaatatgaatttaggatagtttttgacttttacgaagaaggtgttttattacatccaattgttaagagtattattattcctgataatatttcacatctaataaaacaacccgattttgggaagtaa

SEQ ID NO: 58006 - DNA, 201 bp, Acinetobacter baumannii
atgatgacggcgtgcacaaaatcaacagccttattaaagccaaacattccagctaatttaatgcaaccatgtgaacactttaataagcttgaagatagcaccggtaaatttgttactctatgggcagtggatacaattgcaaaaggaaatgaatgtgctgctaaagttgatgcatggatagaaattggaaaagccctctaa

SEQ ID NO: 58007 - DNA, 546 bp, Acinetobacter baumannii
atgaacattgaacaatatcttgacgaactcattaagcgtgaaggcgggtatgtaaataacccagctgatcgaggaggggcaactaagtatggaattactgaagcagttgctcgagcgaatggattcaaaggtaatatgcgagatttacctctggatgtagccaaagcaatttaccgcaaaaactattggacagctccacgatttgaccaagtaaatgcagtttcttctgcagtagctgaagagcttctagacactggtgtgaattgcgggactggctttgcaaaaccacttttacaacgcgctttgaacttactaaacaaccaaggaaaagctggatatgcagatttagaggttgatggtgtttatggatctgaaactcttagagctctaaaaacctatctggccaaacgcgggaaagaaggcgagaaagtgcttgtgcgagttcttaatatcatgcaaggccagcgttacattgaaatctgtgagcgcaatccaagtcaagaacagtttttctatggctggatcagcaatcgagtggtgatctaa

SEQ ID NO: 58008 - DNA, 387 bp, Acinetobacter baumannii
atggataataagcttttagaatattgtaatgaaatagcatctgctgaaacctcatacccagatttacaattaagaaatgttatcggtagagcttattacttcacatttcatgaagcaaaatatcatcttgaagatagattgaggtggaagccaacttcagaaaaaggtggggttcatgcaaggttatatagcagtcttctcagttatgattcaaatgctaatgaacaaactaaaataaatgcagagctagtttatgcaaagatcaattctttaaaaaaattaagaactagggctgactataaaatggaaataaagattacgcgcgaacttgcaaattttagtattgaagaagctaaaagaatttctgagttatttgaactaatttaa

SEQ ID NO: 58009 - DNA, 759 bp, Acinetobacter baumannii
atgaaaacaccaattccaaaaaccaaaatggatgagttaggttcgctgataaacggcttcaagccttttgaagtccttagtgagtttaattatgtaaggtgtatgcggttacttgatagtagtaaacagactgcacctaaggatctttggcatgttatgaaagggcttatagagttaaatgctaataatttaagtgaagcaaatgaggcagcattatatgttttaaaacattccaataattttagttgtttaaggaatgcaatttatatttttaatcatacttttgattttgataatgtatgtaaaacaacagataaaattgtaaagctaattgaattacaaaaaatggattccaaaggaatcttaccaagagatcttggacttattttcttacttaatggtgagttatgggctaaggactcatcattttatagtgaagctgtgtttaataacagttttgatcatcacactgtactggctgatatcaatgatcgactagatataagtgaaaatgatttcaaaaagatctcttctattatcaagaataccgttttaaagaataatgcgagagtactcaaccatgactatagctttattgatgaagaatttttattacttatatatataaataaacctgtaaaagagatcatgaaaattaacgaggaaattattgaattatgttttaaagaaggtcttttgactgcatttaacaagatctcatatacattcgttccttatagtgaggttctgaatggataa

SEQ ID NO: 58010 - DNA, 918 bp, Acinetobacter baumannii
atgagttcaggcgcaaaaattcgattatatgcttgtgaagaagcagttttaggaacaactccagcaaacccgatctggtacacagttcgccgtgtaagtgatggtttatctgaaaatgtttctactgaagaaagcagtgaagtggttgattcacgttttcgccaaggtggggtagttactgaagcagaagtagcaggtcagttagagtttgaattatcacttggtacctttgatttgttcttaagtgctttagcattcaataactgggcgacaaacagcttaacaattggcggtgctgttcgaaaatcattaacgttagttaaagtttttgaagatattgggcaggtgtttatttaccgtggagttcaggtcaattctggtgaaattactatccagactacaggaaagatcactggtaactttggtcttgtaggtagctcatttactagacagcaagtcaaccctgttgtaaatccgattgcagcttcaacacgtccactggtcagtatgccaaacgtggaaaacttgcttgtaaacggccagtcaattcaaggcaaagcatgtctacagtctttgaccatttctattaacaataaccttgaagcaatccgttgtatcggatctggtaaatacactccagagttttatttagagaagatgatggatatcgaagcgaatgcttcattcatgttctcggccacagctgctggttggattgatgcaatcaaaacccgtgatgtgtttacactgaccttcgacatcagagacagcaaaggaagtaaatattcgttcaacttcccgcaattggaagtcatggaagccaatcacccggatggtggtggtgatgacatcattactgtagatatcaactttgcccaagttcgtacagcgccaacaattgtacgtgctcttgtgtaa

SEQ ID NO: 58011 - DNA, 342 bp, Acinetobacter baumannii
atgaactttttaaacggagaggaaggttatccaaaagattataatcaagctaaaagatggtttgagatagcttctaagcaaggagatgcatcagcccaaaatgctttaggaattatttatttaagagggttggggggagataaagatttaagcaaagcagaatattactataggctagctgcaaataaaaatcatgaaaatgctcagttgcaattagctcttattttattaaatagtaaaaaaagtaataacttgaaagaggctaaagagtggttggaaaaagctagccttaatggaaatatagaagctaaggataagcttagagaaatagaaaataaataa

SEQ ID NO: 58012 - DNA, 702 bp, Acinetobacter baumannii
ttggtaggatgtgattcatctaatataaaagttaaaagttctaatagtgagttaagcaaatatcaaaaagatgcagaaaatggtgaccctgttgtccaatacaatatgggcgtaatatatcaacagggtttaaatggtgagaaagtcgatttagataaggctgtttattggtttgaaaaagctgctaagcaaggtgaagaagatgctaaatataatttgggtgtaatttatattagcaataattcaaaatatagaaatgttaaaaaagcaatggaaatttttttagaaggtatggataaaaatgacgcagaatcaattaatcaattaggaattatatataaagatggtattgatacttctgtagattatacaaaagcgttatctttatttaaacaagcagctaatttaggatcgaatagtgcacagtttaatctagggataatgtattttaaaggacaaggtgttaaacaagattttactgaagctagaaaatggtttgaaagagcatatcaaacaggtgaaaatattgacgcagcttatacccttgctggaatgtattatgaagggagaggaggaagtaaagatattgaaaaagcactaaatttatatcagttcgcagctgatcatggagaccaagaagctgctaaaaatatagaaattataaaaaaaaatgttggtgttgataaaaatttattaaattga

SEQ ID NO: 58013 - DNA, 762 bp, Acinetobacter baumannii
ttgagtaatgaccatactaactgcagtgagctttgtactttatttttagatcctgactatcgcttaaataaaaatggcaaatttttatctaaagtccgtttcttgtttctctctgcctttcgccaatattttgaagaaacgattgttgccgaaatgcgtggatactctgatgcaaatgggcagtcaccattttggaatgcggtaggccataagttttttaatattgaatttaccaaagccgattacttaagtggtgtcgggcaaaaggcttttattgctgagttgatgccgagacatccactctatgttgatatgctgcctgatgatgctaaagccgcgattggtattgttcatcccaatactcgaccagcctacaatctcttgcttgaagaaggactgcgctacaaaggctatatagatatttttgatggtggtgcaacgctgcaagcagatattgaaaatttacgagcaattaaagaaagccagattttaactgtacaagttgtagagtctattcctcttagttcaggtgatgaaccctatattgtggccaacgataactatgaaaattatagagccattcttgtattcggcacaccttataaggagtcattacaaataacaaaagcacaagcaaaacaattaaatgttgaaaatggtggtttagtccgtgtgttaagcgtccatgttaaacaggactcgaacccacagatagtgaacaaacttaaagaaacagaacatttgcgaatggctgttaattaa

SEQ ID NO: 58014 - DNA, 633 bp, Acinetobacter baumannii
atgaaaagtatatatatattaactttgagttcatttttactgacaggttgtcaaactacatcctcaatgaaaaatagtattacctttgtagtaggtccatcacagcatggtctcagctttgtttttaaaaataattggcccttatgtagaaattactatgatcataatggaaatatgcctgcaaaaagacaaaccaaatatttaactcatgataatacttgtaaaattgaaccagagggttatgtacctgaaaaaattattattgagtatgctccttggttgacttatgaagaacaagtaaaagctggtatgggtaatagccgtacagcatttaatctcgacaatatacctttaggaaaacaacctcctttagaaactcttttagcttatgacaaaaaaattgaaaaaaaaatacaattagcaattgataagcttccaacttcatcttggaaacaaatagttctttacccaccacaagaagttgcaaaatataaaaatcaactccctgaaggtaaaggagatccaaaacgagggaaggaaattcactacactatttcccttaaaccagatggtacctacaccattacaaccaagctttactggaaagttccttatcaaaaatactggaactag

SEQ ID NO: 58015 - DNA, 399 bp, Acinetobacter baumannii
atggcaatgactttagagcagacaaggcaagctattatcgatcgtatgcaagcttttaccggtattacgcaagacagaatccagtatccaaatttaccaggctttaatgtacctaaagatggtgtttggtgctgcttaacgattgcaggtggtcccagttttacttctggcattgcagataagccatgtactcgccgtaccggtaatatcatgattcaatgctttgcacgtccgaattcaggaataattgaaatcacaaaattgagtgatgcattacttgcccattttgaatatttcacaatcgaacacttagaatgtttgaatggtcaatccatctatgcgggtaaagatgctgatttcattcagtataatgtgagcattgggtacaaggtgaattga

SEQ ID NO: 58016 - DNA, 834 bp, Acinetobacter baumannii
atgattcgagtaccttctccagctaagctcaacctgtttttgcatatcacaggacgtcgtgaaaatggttaccatgaactacaaaccattttccaacttattgatttatatgactggatgacatttacgcctttatctgaagatgagattcagattgaaggtttaggtgaagttcaacttgagcaaaatctgatttatcgggcggcacagatattacgccctcacgctcaaaatccttgtggactccatataaaaattgaaaaaaatattccgatgggtgccggtttaggtggcggttcttccaatgcagcaacgacgcttattgtcttaaatcaattatggcaatgtggtctaactgaagaacaattagctcagttcggtgtcaagcttggtgccgatgttccaatttttatttatgggttaaatgcatgggctgaagggattggtgaacatttatcattcatagacttagatcaaaaacaattcattgttttaaaacctgattgttttatcagcactcaactgcttttttcacaaaaaacattgacaagagattctaagcccactacattttgcgcctatcagttagaaccttctaatttcggaaataactttgagcctctggctagagagttataccctgaagttgaagaagcaatgcaatatctcgaccagtttggtcatgcaaagcttacaggtacaggtgcttgtgtttttgctgaggtaaccgatgaaatgaatgttgatgacattcttaaacatgcaccatgtaaagcttacttggtacatagtttaaaagaatctcctttacgtcattttaaagttgcaagttag

SEQ ID NO: 58017 - DNA, 870 bp, Acinetobacter baumannii
atgtactatcacattattttagaacataaatctgattctaaaaaagataaaattgatcatgagatcaaaacagatttgacagatacaagagaggtagtttctaaatttgttgatccatatgaattaggtctcccaattgtactaaatggtcggacttatcctataggagatattagtcgaattagtatttataaaagtgaacaaccatcaactattttagtaaatcaagaaagaattagacatgaacaacggcaagctcgtaatgccgcatcaggtgtgtttgctgtatatattccggaccatctgtactcagcaattgtaaatcttgaaaatattacagatcagttcataacaatggcaaaaggtagtagaacagtccaaaaacctattgaatctagtaaagatagtactgatttaacaaaagtttttatagttcatgggcatgatgatcatttgctatctgatgtaaaaacttttttatataccctaggaatagaacctttagtattgcgtgaacaacatgatggaagtctaacgataattgaaaagttagaaaaacatatcaatgataaaaatattggatttggtattattttatatactcccgatgatgaaggtaaagcggtaaaagagtcagaccttaagtaccgtgcaagacaaaatgttgttttcgaacatggttttttaacgggattatatggtcgagaaagagttgtatgtttagttaaaaaagatgaaaacatagaactaccaggcgatgtaagtggcgttgtatatactgatgcaaatgtacagaattggcggataggtattgcacactctttaaagcaagcaggttataacatcgatttttctaagatacgatattaa

SEQ ID NO: 58018 - DNA, 261 bp, Acinetobacter baumannii
atgagcgttactgttactcagcaaaaggatattgataaggttttgaagaaataccctgattgctgttcaatctgtaaagatcattttgatgatgaagatttgacatatacagtttttggatatgacaaaaatcaacgtatgcaagtcgtttcaggttgttgtattgatgctatatccgacatagttcttctaggcttatgtggttgttatgacccaaatgacatacagaatttaatgaaagagcatcctctagtagattaa

SEQ ID NO: 58019 - DNA, 564 bp, Acinetobacter baumannii
atgattcagtcaggctgtggtacagctcagtctgcaatgggtcccttttattgcccggcagatcagaaggtttatatcgatacagaattcttcaaagatatgcgtgagcagatgggaatatctggcgaacaaaatcagacagaattatcgagacaagatcaggcaggggactttgcccaagcttatgtggttgcccacgaagtaggacatcatgttcaaactttgcttggtatttcatctcaagtgcaacaggctcgtgcacaagtcagtcaaagagaaggtaatcagttatctgtacgtcaagaattacaagctgactgtttagcgggtatctgggccaatcataatcaacaacgtactcagtttttagagcagggggacgttgaggaagcaatggatgccgcgcaaaaaattggagatgactacttacaaaaacgagcaacagggcaagtcgttccggatagctttactcatggtagtagtgaacagcgaatgcactggttccaagttggtttaaaaactggtgatattagccaatgcgatacttttaataattctatctaa

SEQ ID NO: 58020 - DNA, 1350 bp, Acinetobacter baumannii
atggttaatcgtcttagttttcgtaatttgcgtattgataattttaagttaatcacctggctacagatcttcattatagccattacgcctaacttcattttttttcaatcagctaatgctacgaccgtatctgctgaaggttggtctgttactaaacgacttgtacaaggtgctacaacgttttatgacggggcaaaaaacgtagttttaaatggtaagaactatgcagctacgggaactgctgcaattacaccaacagctactcaagttagcaaaatgattgttagaactggtgctgttttggcagttgatttagctatcaaagctttgattggttctgttgattacgtaatggatcctgcaaacaatagggttaaatattttgttgtaggtgatccatctgatcctaaggatccatcagttcaatactattatcaaactggtgcttttggtgtaactaagtacttttcttctaattctgctgcagctacagatcagtgtactcgcaatgcacaaggttacggttggatcctggtttcagcgactccatactcttgggcaactagtgaggttggtactagagatgctaaatgtgttattaagcgctcaccgactgatgctaatgagactttcaactggggctatcaacgtgttttaaaccctgcatacaatccttctgcacctaatccaaatacccaagaaaaatatttaccttatgatgcggtagcatctcaaataattagtgatgctgttgcaaataaagcagatggtaaagcatacgtgtcatctgttgctgatacagcacttgaagatgaacaaagacagattgttcctgcaactgacgtaactcaacaacttaacaattctcaagctattccaacttcgaatacagctcaagggcaagctgtgcctcaaacgaatccagatgacccgactgctcctaaagctccgccgactgacattacattaaatttccctgtgttttgcgagtgggcaccgactgtctgtcaagctgctcaggctgctatcgatttccctaaaactgttgctgactactggaagaaaacagataaatggatgaatgaatccgcatctgatacatcagaaacaaaaccagaagttaaagaactagaactaaattttgatgatggtagtcgaattaatttcgaccaaacttgcccacaacctcagcctattcaggtcacttttatgggtgttacccaggatgcaagtttttcttttgaacccttatgtaacttcatgatcatgattcgaccttttgtcattggatccgcctatttaattggggcttacatagttatgggcttatcacgggggaatagtgagtaa

SEQ ID NO: 58021 - DNA, 2535 bp, Acinetobacter baumannii
ttggaagaaaaatacttagaagttaaaaatgaaaaggataaagaaaagaaaaaagtactttcagtccaaaatacagttaaattgaaggaaatagatccttttacttttatctcattgatacttaaaaactcaaaatttgaaaaattaattaagttgttatcgaacttgaaagagttgattcctgaattatacataccattagattttaaaggggttccaacaccaaatccacaaggctcatggttttttgcatataaatttgatagaaaaccacatgatattgccattttatggagtttatttaaagcaattcataaagaagaaaatatcagccaaaaatttgataatgctttagatattaagtacacagctttggcgtccttatcccaaatgttatttgtattctttccaaccaaatttttccctgtagatggtcaaacacaggattggcttgtttctcgaaacttactatataagaaaaaaactagatggaaagaatactcagatttaataaatacactcaagaataattatcgtgtgaattttgcatgtttatcatatacatgttggtttattaatcagggcgagtttaataagataaaagcagaggaattactttcagtaagattaaatagaattacagaaggtgttgaatatattaaaggttttgtaacggatgaaggaaaacaaattgctttagaggtaactaataaatctaattattttaatattattattgaagaaaagattccgaatgactttgatttaaagttcgagtttaaaaaggttggtaatgcaaatttagaaagacatgctccaaagttagcaaacagggaagtatgcgttattagaacgcatgaaaaatttagttggtatgattttttattagttcttgattggtatgagggctcaagcatcaactctgtatcacacggaaatttaataaataacagtgaagaagctaaaaatatgattgtgttagatgaacctctaaatcaaattctttctggtccaccaggtacaggaaaaacttatgcaacaactgaattggccgttaaaattgcagttccagaatggtatgcattagtagaagataacaatgagtctgaccgtcattcaaaaattaaagaaaaatatgatgaactaattcaaaagaatcaaatagcatttactacatttcatcaaagctttgcctatgaagactttattgaaggcttaaaagcttatattccggaagatcaagataagattgcttatcaagttgaagacggtgtgtttaagcgtatggcaattgctgccacgaaatcacaaggtataagtgatgaattagatattggattaaaccaagagcctacaatctggaagatatcattaggtgagcgttgggaaacagaacgtagacagaagtactttgagaacgatcaagcgcgaattggctggagtaaagttggagatttaagggaagatcgtacagaaaaagagcaaacctattacgattctcttaaatctaatacccactctaccttatatgatttcagttctagaataaaaataggtgatgttgttttgtgtttaaaagaccaaaaaaccatccaggctattgggattgtaaaatctgattattattttgatccccaggaagacgatgattattcacatgtaagagatataaattggattgcgaaaaatataaatttcaatatttttggcttaaatgatcagactaatttgaccttaaagactgtttatgaattatatagggtgaattggtctaaaattacagaagaattgaaaaatcaaggtattgtgattgaaaatgtaacaacagtaggtgagaaaataaagtcaaatcataattatgttttaattatagatgaaattaaccgaggtaatatttctagaatttttggtgaacttattacgttaattgaagatgataaacggagtggtaaatcagatgcacgtgaattgacattaccatactctaaagagccatttactgtgccttcaaatctttacttaattggtacgatgaatacggctgataagtctttaacacaactagatttagcattgcgccgtcgttttgagtttaaggaaatggtaccggacattgatgtactggaatcagcaaatcaatatgatttcgatatagtccagatgcttcataaaattaatcaacgaattcaatgtctaaaaggtaaggattttcaaattgggcatgcctattttatgcctttgtgcaaaaaaatctatgacgagaaaacttatattgaaacattgcaaagaatattgtcgaataaaattttgccattattgcaagaatatttctttagtgctttagatcatattggtttggtattaaatgataatagcttagatgaaccgggtaagcgaatcgtagtgcaagagaatttggaaggagagctttttccattcgctgaaaagctacctaaatttaacccactatattcaataagattaaataaaaattgttttaagtctgttgagcgtattaagcagatatacatgtaa

SEQ ID NO: 58022 - DNA, 738 bp, Acinetobacter baumannii
atggaatttgttcaaggtttacctcaaggcgtattcgtagggcagacacgagttcaacaccctttggcattgccaacagagcaaacagagctaaccggttttaatcttgctttgcacgttaaagacgaagctcagcgtgtccagcagcatcggatgatgctgttagatgaatttgctcagtttggggttaaaaaaatgacatggatgacccaaacacatagcacgatttgccatacagtaaatgaacaaattccctttacagctttaattggcgacggcttgattacgcaaaccaaaggtcatgcgttaatgatgatgacagctgattgtttacctgtcgtgcttggtaatgctgaaggtacagaaattgctaacttacatgcaggatggcgaggtttagcgggaggtattattgaaaatacagttgctgcaatgcagagccctccaacatgggcatggttgggtgccgcgattagtcaaccttgctttgaaattggagcagaggtaaaaactgctttttgtagtaaatatcctgaattggaaactacatttattgatggggtagctccaaataaatttcatgctgatttgtatgcaattgctcgttttatcttacagagcctaggagttgaaaaagttttagggggagatcagtgttcataccaacagcaagatgaatatttttcttaccgccgtgacgctaaaactggccgtatggcaacttttgtttttatgtag

SEQ ID NO: 58023 - DNA, 1053 bp, Acinetobacter baumannii
atgacttcagcacaatcttcaaacacaaacttctctgaaacagacttcaatttactagaagattctgaggatgcagataaccatacttctgatacaactgcaacacgtttatcgttgcaagttcagttagatgaaagctacttagggcaacgtatcgatcaagtggcagccatggtgtggagtgagttttcacgcgaaaaacttaaacaatggatgaaagaaggtcatctgttggtaaatggtaacattgtcaaacctaaatatcgctgcgaaggcaatgaaacgctaactttaaatgttgagcttgaagcacagaccaacagtcaaccagaaaatattccactcgatattgtttacgaagatgaagatattttagtcattaataaaccggtaggtatggtggttcatcctggcgcaggtaatacctcgggtactttggtcaatgctttgctttaccattcacctaagtcagccgagctttcacgtgctggtctagtacatcgtattgataaagataccagtggtttactagttgttgctaaaaatctcgaagcacaattttctttgagtaaacaattgggagataaatctgtttatcgtatttatgacttagtcacttatggcaatattattgcaggtggcacaatcgatgagccgattaaaagacatccggttgaccgtgtaaaaatggcaattttgccgggtgggcgtgatgctgtaacgcactataacgtgaaagagcgttttagagactttactcgtgtacaagcgcaacttgagactggccgtacccaccagattcgcgttcactttagttatattggacatggtttggtcggtgaccaagtttatatgaaccgtgtacgtattccggcaggggcatctgagttactcatcgaaactttacgcggttttaaacgccaagcacttcatgcagctaaattgggcttaaaacatcctcgtactggtgaagaaatgttattcgaagcaccatggcctgaagattttacgcagttggttaatgttttacgtacagaaaacgctgcatattaa

SEQ ID NO: 58024 - DNA, 1158 bp, Acinetobacter baumannii
atgtcgctaccacgttataaaattacgatgcttgccttatctttaggtgtagcgtctgcatttgtgggctgtagcagcaatccaagtaaaaaagaagtggtcgatactggccctcaatctagtgaacaagcatattttgacaaggctcaaaaagctcttgatcgtggtcaatatcttgacgctaccaaatctttagaagcgattgatacttattatccaactggacaatacgcacaacaagcacaacttgaacttctctattcaaaatttaagcaaaaagattatgaaggtgcgattgcactcgcagaacgttttattcgtttaaatcctcagcatccaaatgtagattatgcttactacgtacgtggcgtatctaatatggagatgaactacgatagcttgttgcgttacacctctttgcaacaatctcaccgtgatgtgagttatttaaaagttgcatatcaaaactttgttgatcttatccgtcgcttcccaagtagccagtattctgtcgatgcagcacagcgtatgaagtttattggacaagagcttgctgaaagtgaaatgaatgcagcgcgttttaacgttaaacgtaaagcgtggattgccgcggctgaacgttcacaatgggtgattgaacactacccgcaaacacctcaagtaccagaagctttagcaactttggcatatagctatgaccaattaggtgataaggcaacttcgcaacaatacatcgaagttttaaaacttaattatccgagccttgtcaataaaaacggcactgtcaacatgcgtgctgcacgtaaagaaggtaactggatcaaccgtgcaaccttaggtattcttggtcgtgaatctaagtctgtaacaccagatacgactacttcttctgaagctgaaccaaaacgtagtctactaaaccgcgtaagctttggtttaattggtaactcgggtaaagaagaaactgaagaaacaactaacacacctgttgaagcaccaaaaagtgaacgtagttggactaatcgcttaagcttcggtttactagataaacctgagccaaaagcagcagaaggcgcaacaattgcaccagtaacgtcttcgagtgaagcaccgagtgcctcaccagcagataacgaagcagatgacgctgctcaataa

SEQ ID NO: 58025 - DNA, 1167 bp, Acinetobacter baumannii
ttgttcccaccatttacaatccaaaccagattaggcggattctacttcttttattattccattgttggcacatttatgccgtattggaatttatatctccaagatcaggggtttaattatcaagagataggtattttatcttctattgctattgtgacgcgcttctttgcccctttggtttggggctggatcgccgataaatccggtaaaagaatgctattagtgcggattgccacatggatggaggcatgtatatggttggctatttttataattcctaatacctttcagtccgtcgctttactgatgcttatttttagttttttccaaaatgctattttagctcaatttgaaggagtaactttattttggttaggagaccaaagggcgaaactttatggcaagattcgaaaatggggatcagttgggtttattgtaggtgtatttacaataggggcaattttagaaatcattccgatttcaatgttgcctatattattgcttatcattgcctccttagcatttatttgggcatttacgatacgtgaaccagaaggggccccaacttcacaaaagcatttagaacctttattgcctgtgctgaaacgtcctgaagttgctgcttttttcacaattgagtttattcttcttttttcacatgcacctttttatagcttctatagcaattttctgaaatcgttaaattttagtacaacggaaattggttttttatgggctatgggcgtggtttctgaaattgtgatgtttgcatatgcaactacgttttttaaatatttttcttggcgtagccttgtagcagtatgtttgattttgacaagtatacgctggttattagttgctattttctctcactatttcataggtcagttatttgcacagtgcctacacgcttttagttttggcttatttcatctcatcgcaatgcggcttatctttcaaaacttttcaatagggcaacaaggtcgaggtcaggctttttatagcaccatgtgggggcttggagtggcgtttgggagcattttggctggtcattactggaaaattcttacgggcgagcatatttttatgatcgctgctttagtggttctatttggtttgtgctttgtctattggttgcctaaacgaatcgaaaagtcagtttcttag

SEQ ID NO: 58026 - DNA, 390 bp, Acinetobacter baumannii
atgcaagaccaagctttgccatcattccctcaagatttaaatgaggatcaaagtattacacgtccaccaatttcacactcaggtattcatcattttaaatttcacggtaatgcctcagaatattttggaatttggatcgttaatattcttttaactattattactttaagcttatatgcgccttgggctaaagttcgtcgtttacgttatttctatggaaatacagagttttttgaacgtcgttttgattttactggtattccaaccaagattttgattgggcgtttaattgcattaggaatttacgtagcattttcaatttcatcacagtattcaatgattgcaactatagttggaatagttgtgttatatatggctgtgccaggctaa

SEQ ID NO: 58027 - DNA, 477 bp, Acinetobacter baumannii
atgaaagcactatctgttattgagttatcaaaactttacgggatgaatcgacaaagtatttataagcgcataaataaaggagatttatcaaaaactagtgatggaaaaatagatttatctgaagccatacgagtatttggcgaaccatctaataaaaataataatgtaactacattacagtctactgaggtacaaaaagaaactgaagtagacatgctaaaacaacaggtagacatactaaaaaaacagctagaacttgcacatgagcgagaagttttccaacgagaacaactagaagcaaaagacaatcaaatagaagcaatacaacgactgctagaagccccaaaaactaatatgactacgtttaccgatcagaaacctgcctcggatatagcaacaaatcctcagccggaacatgctgaaccggagcagccgaaaaaagggtggttaagccgctttttcttgccgaatggctaa

SEQ ID NO: 58028 - DNA, 1056 bp, Acinetobacter baumannii
  misc_feature (1029)..(1038): n is a, c, g, or t
atgttaaatataactaaatatataatagctttagcttcaatattcatggtaacaactagttatgctgctagtgctttggatgtatcgccaatttgtaaaaaagttggtaaagatctagatagctatataaatagaggggcgcattgtttagagtccgaaccatttgaaattccattgaccgatgcaaaaggattgaatgtaggtactgcgaaagtagtagcatatgtttattctgataatcctaaaaatgcattaacttggacttttaaatatagactgcgtacaaaaattatagggcaacctggagattctctaaaagtacgacctgaattatactgttataactgtacagcaaagactgtttacggtaatccaattaacttagtaaatggtctctctctagaatctacaaccactttcacgccgtctagtactgagttagcttcctcaaatcccttgtttttatctccaagcgtatcttttcaagttgttaaagcaaacgcttcatttaatgatgctgcaagttatgacccaggtatttatagccctggtgtacgctgtgatataggtaaagctaaggcaaatacgaaaggatgtgtatatccagatgtacccccagttcttagtacgattaaagttactgacccagatgtcgacgagtctgcaaagcatattaaagaagcgttcgccgctggacaaccaggtaaatttatagcaggttcacctaactctgtttttcctagttcaagtgcaacagcgttaactcgcttacgagatgctcaaacacgtaaagataaccgtgccgaatctgtaaaaatgtgcaaagttaaatatgggccaacggttggctcaaaatgcttctttactggggattcagatgaagtcgcgacagattgtgattgcgatgagtttccttttgcagctactcaccaaggtggttctggagcctcagtgaaaaaaattgatgcatccgacaatcgtagagctggtagtcgcttagggtctttctttaatactgaacgtgttttnnnnnnnnnngttctttataaatgttga

SEQ ID NO: 58029 - DNA, 1299 bp, Acinetobacter baumannii
atggatttcaatacccttgaccaagaaacggtacagaaaaaacaaaagtttcatcaaattttgtatgtacaggtcatctttgcaattattttgggcattttaattggtcatttttacccagaacttggcgagagcttaaaaccgcttggtgatgcattcatcaaaatcgtcaaaatgattattgctcccgtaatctttttgacagtggttaccggtattgccagcatgacgaacatgagtcgagttgggcgagtgacaggtaaggcaatgctatatttccttactttctctagccttgcgcttgtggttggtatgattgtggctaatatcattcaacctggtaaaggcttaaatattgacccggcaaccttagtcaacgataaagtaaatagttacgttgaaaaggctcatgctacaaatatcactgactttttcatgaatattattccgcaaacattagtgagtccgcttgctggtggtgaaattttgcaggttctatttgtggcagtcctatttggtatttccttagctgcattgggtgaccgtgcacgtccaattactgattttttaaataacctcacggctccggttttctatttggttggcatgttaatgaaacttgcaccaattggagcttttggtgctatggcatttactatcggtgcgtatggaatcgaatcaatcggtaatttattactattgattatgactttctatatcacggcagtgctgttcgtattaatcattttaggggctgtagcacgctacaatggcttttcaattattgatttaattcgttacatcaaagacgaactctggttagttttaggtacaagctcttctgaagctgctttaccatctttaatggataaaatgcaaaaagcaggttgtgaaaaatctgtagtaggtcttgtcattccgacaggttactcatttaaccttgatggaactaacatctatatgactatggcggctttatttattgcacaagcatgtaatgttgatttatcaattggtgagcaggttgcattgcttttagtggcaatggtgagttctaaaggtgcggcaggggtaacgggcgcaggctttattacactcgcagctactttatcggtagtacctgctgtaccagtggcaggtatggcgcttattttaggtattgatcgttttatgtcggagtgtcgtgcattaaccaatttaattggtaatgcatgtgcaaccattgtggttgcccgttgggacaaagctctggacaaggacgttctagataaagctttacgcaaatcgaaaacgaattaa

SEQ ID NO: 58030 - DNA, 387 bp, Acinetobacter baumannii
atgtggcttaaatttatcttgtatcctcttggtatgtttgtactatggcaaactattttcctaattgaacaggtttccttagaaagcttaaatgcaccaaaattacttttgactataattacactcattataaattggggaatgcaaattttgattggatataaaattcctcaattagccccaaaacataaatttatagcgagtactacatatattctctttttcacattcatgatcaccatctattctataactatactattagaaggttttaaggttgctccccaaaaaatatggatgggctgcctattttttcatgtaattggcatgttcatatattttgcaaataatagagatgacttttgttgggacaacttactaaagtag

SEQ ID NO: 58031 - DNA, 621 bp, Acinetobacter baumannii
atgaaaactttaagaccaaatgagtggggagattttttagctggcttctttgcacctttagtatttatgtggctaatttatggttatcaccaacaaggaaaggaattaagccttcaacttgaagaagtcaaaaatagcgttatacaacaaactaaaatggtaactcttcaacaacaagaagtagaagctaaatattttgctgcaaaaccctttctagacatttctaatcctctatataaatttgatatagagggtggtaatactttgataattgacgggaaagaagaatttcaagaacctgaagaggtgcttagattaatgtttcagcttaaaaatatgggggaagttgcaaagcatataactattacggatagcaataatgcagttctgttagattctaactatgaaattaaaaaagatagtaatacctttatagtttgttatgtggatgatgattatatttcggaattacttgaaaagcgtgaactagagttttatctggatattaattactccgatatatatgggaaaaaatatacagatcttgcgattgtaaatttttttgaattttatgggaatgaggatttccaattaaatgtaagaatagcaaaaagagggtaa

SEQ ID NO: 58032 - DNA, 786 bp, Acinetobacter baumannii
atgaaacaagagaacttatcatcaaggtcaattgtaattattggttgtggggcaataggtggttacttagctcataatttggcaagacttggagcgggttctgaaatgggtgagttaatattgatagatccagagaatttttcagaagataatattggtagacacattttaggaaaaaacaatattggtaagtctaaggtagaagcacttaaacaacaacttttaaatgatttgcccgatataaatattaagaccttttgtcgccccattgaggattttataggaaaaaaagtacaaggtttcaacttacaagatgctgatgttctaattgatgctacagctaaatcgggagttgctgatctattaaatgaatggcggattgaattagattatccacaaccttgctttattcacctttggattagagataatggagaatgtgtacaaggtttgctaaaagaaccatctacagatgatgtatcaaataattatgcttgccgtagctgtctgcaaaatgctgggagttcatttttagatcaatatgatgccttaaaaggtaatgtatcgttacaagcatatgctgcttgtagtgattttaccccttattctgtttcagcaagtatgtcagcagcagctctagggacagatattattcttgattatgttaatgacattatatcaccacgatacagaaccagatattcagaaagatggcaaggtagtaaaattgagtcagttaatgcattaaaagcaaatgactgtccttattgtggtagttctaaataa

SEQ ID NO: 58033 - DNA, 1176 bp, Acinetobacter baumannii
atgggggtaacgaattctcgcatggcatctgaagagttcactttccctagaaatctcgataatcagaaattaattaaaactgaagatggcgtattgccagtattacattcagttccatgcgatattcatggcatagctgctgttgattgggtgacttttagttttggtcaagaaacctttggcgaaaaatatgcattccttgaaccagaggaagttgacgaatcgcttactgaagcgattgaaacatggctggatcagattctttttgaaattttcggctttggacttgccgttaaacgtgacaaaggtatgcatttccatacttgctcatacgaattacaagataatttgggcatggtcttatatggtcatgctaacaaaaagatttctgtacaaatcaacggtactggttgtgccttagctcgtaaaggttgggaatcacaactttataaattcttaatgcgtggatgtaaacgtcctaagcttaatagaattgaccttgctcatgatgatttcgaaggtaatcacttaacagttgatttagctgattcatgggacaatattgatggtttctggtgtggtggtcgtgaacctaatgtagagcataaaggtgcttggaagcgtccaaatggtaaaggtagaacccttaatattggcaaccgtgatagcggtaaattctgccgtatctatgaacgtggcaaaaaggaaggtgatgtactaagcctttggacacgtgcagaggttgaatttaaaggttctgaccgcttcatcccttttgatgttttactcaatccaagctcatatttcattggggcttacccatgttttgaatggcttgctaaagagcttactcaagaaatgatttcaccagaaaaacccgaaatcgttaaaaagcaatccgtgattaattttgataaatcaatcgaaattatgaaacatcagttcggcaaatatatccgtcaattctcaaaaattattgccagtgatgaactggtagcaatgctttcatcttcaaaagatgaagtgccaaaacgccttaagttttctcatgctgctgtgatgcagtcgttacgtatcaatcaacctattcaatcactaaatgaagactactcgctattcgtgggtgtccctttagttaatcaaactcaatataaggattttattcatgcaatttaa

SEQ ID NO: 58034 - DNA, 291 bp, Acinetobacter baumannii
atgatggcttcagcacatggaaagcttatagcagataaaaatggatgtatcagactgggcgatgaaacaggtccgttgattatttggccttatggtagtaaattagtaaatttaggccatggtaaatttaaagttaccaatggttttacaaatcaatctactttaattggtgaagagatatcaataagtggtggcttatatgaagtaaaatctgcacaagtcactccttctattccccatacttgcgtaaatcatggttactggctatctgggcctataaatataaattaa

SEQ ID NO: 58035 - DNA, 429 bp, Acinetobacter baumannii
atgaataaaagaaatattttgttcactcttcaaactggattgatcatcctacttaatggatgtaccgatacttctctggctcaaaataaggttattgttccaaaaattggttactttggtaatgctgataatgcaagctatagtgaggcacaaatcaagattgaaggctcttgtgtttatttaatgaatacaaatgatcgagtaattcctatttttgcaactaaagatgctcattgggatagcaataaatatcttttaattattgactcaaaagaatataaagatggtgaaacgattgcttatggcagtggagaagcttatcccattaatttgaacaactacaaatggataattaaacctgatactacatgtgatctaagtaaaggcgttattatcaatcaatttatagaacctcttactaaaaaataa

SEQ ID NO: 58036 - DNA, 444 bp, Acinetobacter baumannii
atgacggcatttattttcttattcattggattggggatagggttttggtttggtcgtaaaacgacactaaaaccccaagagcgtgaagtaaaaaaaattgtacgaacgtattcatatacccaacgacaggtactaaaagtaatgtatgcatccgatgcagatcggataagagaactcaatttgctatctgcaaatgacagtatttttttaagattactgaagcaggaatttttagataaagaaattgtagtaaaacaaaaacgcttctttattgtggatagtgacaagtatccagtagctatatttgaatatcgagatggatttaaaccattgcgtaattcagatatagaagatgggttgccagtgtttttgcataaagggcttttatctagtgatgcgatcaaagaagatgcacagcgaatagctgaaatgtctaagcgataa

SEQ ID NO: 58037 - DNA, 951 bp, Acinetobacter baumannii
ttgtctcgtgggctcggagatgtgtataagagacagggtatctatagtgacttttttgaaattacgccatattcaattaagaataatgagattttctttgcaaagtcacataatcagccattagaaactgaacttttaactgagcagaaagttttaaataaagggaccttacaaacgaatatcgtgaaaaggttaactcctagcagttggtcttatgagagaatccctaatctaaaacaaaatttaaaatttgagattgtaaaattagatggagaaaacatctttgatcgtgtattgccaggctataaagaatataataatttagaaacgagccttaataatcaacttgataaaaatttaattgacttctatcaaaactataagaatgttaggttcccaaaaaatagttactgttatcgtctaaaagagtctcaatggaatcaatcttatatttcatatatttctagttttaatacaaatccttcatttagtgagagaaaaaagtcaattatcgaaagatataataacctaggcctagataaaaagtattttaggcttataaattcgcagtggtatggttataacttagttgttttagaaaacctagaaaatggtgatgtccaaagcacattaggaaataataatgatcagtctgctactattgattttgtatcaagcagcttatggaatgctgataaaagtttggcttttgagaagtcacatctttattcgacagatgacaacccgcttaatagcgtacactcattaattgctttaaaacagaagttaaaaattgcagatcttgaaaaaggttgctttgcttttaacactcaagcagctcaagctattcaaaagttaaatttggttaattggaaaccgggtgatagttcagttattgccccattctttggtctaagaacttttattgataatagaagtcaaaaacaataa

SEQ ID NO: 58038 - DNA, 321 bp, Acinetobacter baumannii
ttgaattggcagggttttgattttcattatgtatttttttcggatggtgaaaaagcatctagaaaaatttttgaccaaagaatggaaaaacaggttgatatctttaaagctcgccatgaaccaagaattaaatttgcaaagagtttacaagataagcttcaggcagaatgtgattatcttgcagatgctcaaaaacttctggcagtatatatgcagtactatccaaagcttttacaacagaaagatgcaaaaccaattttctttcaatatcgggaatatttagatcatttcaaaaccaataattcaaagtgtgaaacttaa

SEQ ID NO: 58039 - DNA, 348 bp, Acinetobacter baumannii
atgaaaaagattatttttttagggttagtttcaagttttacttttattaatggttgccaatctatagaacagcaaacggaaaataaacctgatgtagtactaacaactcaaaagtctacagctgaatataaaaattgtgttcttgaaaaaacatctgtgcttttgcctttaactgcgactgagactaaaaatggttttaggcttgctaaaggagaaatgggatatgctggagtgactatatatatagcaaatgaaaatggtatcacaatggtaaaaggatatattccatcatcctcatgggcagttattccgaagaaaatgaagcaagcgcttaatgattgcgcttaa

SEQ ID NO: 58040 - DNA, 354 bp, Acinetobacter baumannii
atgagtgtctacaatgtaacgaaagcgggggttttggcattatcagaaaccctttcagccgagcttcgcaaattcaatattaaagtcaatgtactttgcccgactttggtgccaaccaatatcattaaaaatggtcgtattccggggcgttattccaagcttgcagaccatgcactcatgaactatgccatgacgaccagcgatgcagttgcaactttaacattgaatcgattagatcgtgggcagctctacaccacgccacagatcgacgccaaattattctggcttatgaaaaggacatctccaacgctatatgcaaagttccttgggctttcgtatcagttatttaaataa

SEQ ID NO: 58041 - DNA, 291 bp, Acinetobacter baumannii
gtgaactcaatacgtaaagcagaagttcaaatttcttcttttagatttgaaaaagatcctaataaattgaaaaaagtaatcaaccaattagaagaagatgggtgggtgttaaaaggcaaaggacaaggagttgatacttattgtttagggagaaataatagaattaatgttgttataccaacttctggtggactttatgattttaaaggtggaaaattaaaacgaacagattactctgtgaatgctgttttatattcctatgataaatggggagatgatatgtgtgaatga

SEQ ID NO: 58042 - DNA, 132 bp, Acinetobacter baumannii
atggccatggctgctgatgtcaccattgcccaggtttctgaagtagttgagttaggtggattagatccggaacatatcattaccccaggtatctttgtacagcacgttgtacaagtacagcccgcacagtaa

SEQ ID NO: 58043 - DNA, 255 bp, Acinetobacter baumannii
atggatttggcagttggtgccaagaaagtatttatcactacagaccacatcaccaaacaaggtgaaccgaagattgtcgctgagctgacttatccggtaacgggtaaacgctgtgttgaccgtatttacactgacctgtgtgtgattgatgtgaccaaagatggtttaaaggtgattgagaaagttgaaggtcttagctttgatgagttacaggctttaacaggtgcaactttgattgatgcgactcaagggtaa

SEQ ID NO: 58044 - DNA, 1335 bp, Acinetobacter baumannii; identical to SEQ ID NO: 52065

SEQ ID NO: 58045 - DNA, 315 bp, Acinetobacter baumannii; identical to SEQ ID NO: 51824

SEQ ID NO: 58046 - DNA, 132 bp, Acinetobacter baumannii
atgccgacaaaatgtgcaaagttcaaaatggtcaattgggtaatttcacatatttcttttaaacaaatttgtaaaaaagtacaaatgatctctacattcatcttattcaatgcaatcaaagttgcttattga

SEQ ID NO: 58047 - DNA, 1344 bp, Acinetobacter baumannii; identical to SEQ ID NO: 51930

SEQ ID NO: 58048 - DNA, 816 bp, Acinetobacter baumannii; identical to SEQ ID NO: 51855

SEQ ID NO: 58049 - DNA, 1374 bp, Acinetobacter baumannii
atgtcaaatcagaacgataagcttaagagtttaaaaacttcttccatggatcgacgcttatcaatcgcgaaagcttctttactggcaggaacacgttgggctactgcaagtgcctcttccctcttttctagtgaagaagaaaaagagaagaagcgtaagaaagcaatgagtgagcaagctaattatcttgtttctgaaattggcaaacttaaaggttctattgtcaagattggccaaatgatggcgctttatggtgaacattttttaccagaagaaattactcaagctttaaataccctaaataaccaaactgttgctttagactggccagcaattaaacctcatttacaagaacaactaggttctaagttaaatgatttaacaattgatcatgagcctatcggtacggcttctctggcacaagttcatcgcgcaacacgtaaatcagacggtttagaattagttttaaaaattcaataccctggtgttgcgaatgcaattgactcggatatgagcctgtttaaaaacatgcttaagcttacacgtatggttcctcaaactcgtgagtttgatcagtggtttgatgaagtacgtgaaatgatgcatcgtgaagtcaattatcacgtagaggcagccacaacacgtcgctttgctgaacgtttaaaagatgatgagcgctatattgtccctacaattgtagatgaatactgtaccgatcaagtcttatgcatgacctttgaacgtggcgtgccaattaatagtccagtcatgctttcccttcctcaagaacgacgtaatcagctcggtgaagcttcactagagattgcagttcgtgagatttttgaatggggcgaaatgcaaactgaccctaactttggtaattaccttgttcgtttaggtaatggccaagatattcaggataaaattgtactattagactttggcgcgatccgtcagttcgatgagcatttactctcagttgctcgtaatcttatacaagcgggttatcagcatgataaacatgcgatggttcaagcaatgactggatatgagttcttcgatgcaatgcctgaaagtattaaacccggcatggccgatgtctttttacttgcgacagaagcattcagcacccctgcaaataatccagatatgccagtgggcctgatggatgaacatgaacgttatgactggaaaaagagccagttacatagtcgtgttatgcagcaagcaagcaaatcaatggcgtctcgatatttctcggttcctccaaaagaatttatgtttattagccgtaagtttattggcgcatatacatttatgactgttattgatgccaaaacaaatgtacgacgtatgattcgtaactttgcttaa

SEQ ID NO: 58050 - DNA, 255 bp, Acinetobacter baumannii; identical to SEQ ID NO: 44740

SEQ ID NO: 58051 - DNA, 903 bp, Acinetobacter baumannii
atggaaaataaaaaacgaatgatttctgaatcgaaagggtggaaaagttcttttaaagctttcttggatcgccgtgcaatcattatgttgtttttgggtttttcatcgggaattccaatttttctaattttttcaactctatcattttggttgactgaggctggaattaaccgaagtactattacaatgttctcttgggcagctttggcttattcatttaagtttatttgggcgccgctaatagacaagttacccttgccatatctaaccagaagaatgggcctaagacgtagttggttgttggtatcacaacttttggtaatttgtgcaatttgtatgatggcatttacaaatccattacccaacacatctgatttcggttcattctcaaatttaacgattatggcaggagctgctatttttcttggcttctcttcagcaacacaagatattattgtggatgcttaccgtatcgaattaactgaagacccaaatatacaaactgttttagcttcaacctataatgcagggtatcgcactgctacaattattactcaattaggtgcactattatttgctgcctctttgggaacagcagttggtaattatatttatgaagcatggcgaaccacctatttattaatggctggtttgatgattataggaattattacaactttactcatccatgaacctgtagttaagcgcctacaacatcattatcatgcaaaagattatgtccagttatttgcggtttttgttatttcaaccatagtttttggaattagtttttatcaaatcggtttaatttttgattcattttctatcgaagatgcttttttaacttttatacttttagttattaagtttttaattagtatcctgtctcttatacacatctga

SEQ ID NO: 58052 - DNA, 2148 bp, Acinetobacter baumannii; identical to SEQ ID NO: 51739

SEQ ID NO: 58053 - DNA, 288 bp, Acinetobacter baumannii; identical to SEQ ID NO: 52090

SEQ ID NO: 58054 - DNA, 663 bp, Acinetobacter baumannii
atgcaaactaaattcgtagatccatcaacttatgctgttagcaatcaaccttatccatcttttagttatggtgtacagcatattagtaatgaaaatgggcaacctattaatggttttaacttttcagagtacgaaattcctgtcagaaaaatactaagaaaggattcatctccagttattggtaactttagaagctggccaactcctagtgctgacaaatttattaacgcagtagtaatgactcgtttatttgttttatgtaaggataaacaaaaatttcttgttgaaaaaatggggtttcgtgaaacaggaaatatttttaatgaagacaagttgtttatttattctttttgtacagagaattctcaacttgaagtttatatagatgataatggaatgatctcagaaattaatagatttaaccagaatctaaattataaagctaaaattccactaaacattttaggtcttaactatttgatgacacaggttttctatgatctttgccggttaaatcttagtaatgtccagttaaattctgatcatcaactactaattggtaagatacttaacataagctctccatttaaggagttagactctttaacttatgatgatctaccaagttttaatatgttaaataacataagcttgttggaataa

SEQ ID NO: 58055 - DNA, 363 bp, Acinetobacter baumannii
atgataaagcaacgacctttgtaccaaagtacacaacaacttgcactttggtataaggggccatttgacagccgaccaaatgattcaattggttttggtattgccaattatgtcgttaatgaccgtgctaaagataagcagatcgcgacaaatgaaagccgtggatattatagctatgatccgatcgcatctaactatattccaattcaggacgacgaactaaacgttgaattgaactatacctatcaatggtctccggccgtcatgctgcgaccaaatattcaatatatccatcaacctgctggtgtaaaagaagttgatgatgcttgggtggcgggtttgagtgtaaaagttaatttttaa

SEQ ID NO: 58056 - DNA, 372 bp, Acinetobacter baumannii
atgtcacaactaatttttttaccaatcaatacagaatttggaatactttcatctcgtacagatttttggttaaatgagttgaaatttaatcctcatgttaataacttagagcttaacttgacatatagccaaattaaaataaatgaaaaaggtaaaaattttaaaacctctagattattttcaataatgctaactaatgtaaataattttaagatgtttcaatatgatgaattcgaacacttatattctgataaatctaactcgaattttgattatgcaaactatgataaaaatgggttaaatgtatacttgttatggacttatgatcattgttttgaaatatatgctaaaggtcatacttttttaaaataa

SEQ ID NO: 58057 - DNA, 366 bp, Acinetobacter baumannii
atggagtttaatattcttgataaattaaagagtcttaaggaaaattctttaaatacaggatctttgtttgaggagttaggtgggatttcagatttattttctccttatttgactgaaaaaatatttgaaaatgaaattttaactaatatttggaatattttaatatatatatatattcacaacccaaataaagaaaatagattagaagcattatctgttatgtatgatttttatatctatactgtaaatattggtttttctgtagataaaaaagaattaaatgaacagtatcttaaattgcatggcaaccatgagttagatcaagaatctaaggaaattttagaagaaattttatttgatatttaa

SEQ ID NO: 58058 - DNA, 561 bp, Acinetobacter baumannii
atgaataaagatatttcaatttggatgccactctatattggcgacctacaggcgaaatttgcacgaatgacagcagaacaaattggtgcggcactgctgttaatgatggatttctggaaaaatggtgccattcctcacgacctagcgactgtatgtagcatcacgaaattaccgcagcacaccaaggctaaaactttgttaaatacgctgatggccctagaattgtttgaagtcgagtctgagcagattcattcaaatttcttaagcagtttaaaaagccaagcattgcaaaatcagcaaatgaaatctgataaagctaaaaatgcagctcaagcacgttgggggaaatccgctagtaatgctcaagcatcaaccaagcaacgaaaagtaaatgctcaagcaactcctgagaagagctcgagtcttactcaagccatgcttgaatcatgcccttcatcttcatcttcatcttcatcttcatcttcatcttcatcttcatcttcatcttcaaattttgaagaaaaaaatgagagttttttagaaaattcaaagtggatttag

SEQ ID NO: 58059 - DNA, 252 bp, Acinetobacter baumannii
atgaatagtaaagctttctttggtggtgtggtcgtcagccctgaagcagatatggtcgctcgtgaattaatccatgagctacacattcccaaactgcacaatctggcctttttgctggaaatcaatacatgcttcgatgatcaccaagcattaagactctggctacagcgaatgctggatgaagggcaagctcattacgatgacttggctcaacaggcccatctccgcttaatgagtctcgctcactcataa

SEQ ID NO: 58060 - DNA, 1182 bp, Acinetobacter baumannii
atggctaccatccgggaacgaagtggcaaactgattgccgattttcgctacatgggcattcgttgcagagaaacaaccaatcttgaagacaatgcctataatcgtcgtattttgaaaaaacgtctcgagcagctggaggcggaaattactttgggcacttttgaatacgaaaagtactttccaaaaagtaaacgtgtcgatgattttaaggaaaaaagaagtcagcaaatcgctgtacaaactagggttcctctttttaaagagtttactgaagtgtggtttaagcaaaaacaagttgaatggagaacttcttatcaacaaaaggtttcaattgtgatcaaaaactatttgattcctgcttttggtaatcaagttctctcgaaaatcaagaagtcagacttgctgaacttccgtgcttccctcgccaaagtgacacacggaaaagatcagacaagtctgaaagcatcgagaatcaatcaaatcatgacgcctttacgtatgatactcaatgatgcggctgaacgatacgagtttgagtcgccttataaaaatattaacaatctgaaggaaagcaagattgaagtcgcacctttttctctggaagaggtgcataaaattcttaccacagtgcgtgaagacttccgcccctattacaccattcgcttttttacgggtatgcgtaccagtgaaatcgatggtctgcaatggaaaaatatcgacttacagcgtcgtgaaatccatatcagagaagcgttagtgaatggtgtgcttggcggaaccaaaacgtatggttctgaccgcacgatccagatgaatgaccgcgtttatcaagcctttatgcaacagaaaagcttaaataatggtaaatcagagtttgttttctgcaatcgtgatggtggacctctcgattaccgtctggtgaataaacgtgtctggcatccgatcttgcgctttctaggattgaagtctagaagagcctaccaaacacgtcatacagcagcaactctatggctgtcagcaggagaaaatccagaatggatcgcacgtcaattgggacattcaacgactgaaatgctattccgggtctatagccgttacatccccaatgttacgcgccgcgatggcagtgcatttgaagccatgctggaaaaactaaatacagaggagcttgcacatgaatag

SEQ ID NO: 58061 - DNA, 1413 bp, Acinetobacter baumannii
atggcagactttaaagcaaaagaaattctactaaatgcctttgacatgaactgtgttggtcatatcaatcatggcttatggacacatccacgtgatgaatcacatcgttttaacgaattgagctactggacagaacaagccaaaaccttagaaagtggtttatttgacggtttgtttattgcggacattacaggtgtgtatgacgtctatcaaaatggtatagatctgactttaaaagagtccattcagcttccgagccatgacccgtctacacttatttcagctatggcagcagttacacaaaacttaagttttggtgtcactgtgaatttgagctatgagcatccatatcagtttgcacgccgctttgcgagtctcgaccatttaactcaaggtcgtattggctggaatattgtgacaggttatctagatagtgcagaacgtctaattgggcaaaaaggtttaaaagaccacgatgctcgctatgaacaagccgaagaatttttagagctttgctataaatattgggaaggttcatgggaaaacgacgcagttaaaaaagataaagtacagcgtgtttttacagatccatctaaagttcacactattcaccaccacggaaaatattaccagagtgaaggtgtgtttcaggtgtctccttccgtacaacgcaccccaacactgtttcaagcaggtgcttcaccaaaaggcatgcagtttgcgactcgtcatgctgagtgtgtatttattggcggcgacaaaccggaaaaaatacgcgaacaagtgaaaaagattcgtgctcttgccgaacagcaaggacgtgcagcagatgacattaaagtctttgtcggtataaccgttgttgtggccgacacacatgatctggctgtacaaaaacttaatgaatatcgtcagtatgccagccctgaggcaggcttagcgcattatgcgagttcaacaggcattgacttaagtaaatttgctgacgatgaagcgattccttaccaaaaaagtaacagcattgtttcgattaccgaaaaatttaaagaacagcaaatcacaaaaaatgacttaaaagctcaacatgttttaggcggccgttatcccctcatagtgggtagtggtgaagaagttgctgaatacttaattcatcttttagatgagaccgatattgatggctttaatttgacacgtacagttgcgcctgagtctcaccacgactttattcgcttggtcattcctgagctacaacagcgtggtcgctataaaactgcatataaaacgggttcattacggaacaaaatttttaatcggggtgatcaattaccagaacaccaccctgttcaagcgttccgatgtagtccctataacaacagcaaaaacttaacaacaattgaagaaataactgcttaa

SEQ ID NO: 58062 - DNA, 315 bp, Acinetobacter baumannii; identical to SEQ ID NO: 52100

SEQ ID NO: 58063 - DNA, 282 bp, Acinetobacter baumannii; identical to SEQ ID NO: 52141

SEQ ID NO: 58064 - DNA, 432 bp, Acinetobacter baumannii; identical to SEQ ID NO: 52148

SEQ ID NO: 58065 - DNA, 534 bp, Acinetobacter baumannii
atgtactttgaaacgggtcaagggagtgccctatctagcaatgcacatcacggcgttgaccagcaaaccttagaaactcgggcctacgcagtggctcgtaaatataacccacttttggtaaatacagtcgtcggctttattggccccgagtacctatttaacggtaaacaaattatacgtgcaggtttagaagatcacttctgcggtaagttgcttggcgtaccaatgggctgcgacatttgttataccaaccatgccgatgccgaccaaaatgatatggatgtgcttcttactctatttggcgccgcaggcattaacttcattatgggaattccgggttcagacgatgtcatgctcaactatcaaaccacttcattccatgatgctctctatttaagacaactcctcggtttaaaacccgctcctgagttctccgcttggcttgaacaacaagggatttttaaacagcaaaactctcaaatttgttgggcagaccacatgcctgaccaattctctcgtctgctcatgaactag

SEQ ID NO: 58066 - DNA, 723 bp, Acinetobacter baumannii
atgagtactacaaacgcctttcctaaaactatttatgccattcagcatcttgctttcgaagacttaggttcattagaagatgtcttttatcaacttggttttcgcgtccgttattttgaagctggtgtagatgatttaactcctgctttcgcccatgacggtttaactattattttaggtggtccaattggagtttatgaaactgaagattatccatttttaaaagatgaaatcgctttactcaaacaacgtttggcagcagataaaccaacacttggcatttgcttaggtgcacagcttatagctcatgcacttggtgccaaagtatatgcaggccatcaaaaagaaattggctggggagctttaagcttaagtttacgccctaatcaggtattatcgcctttgcttaataatatccatgttttacattggcatggtgatactttcgaccttcctgaaaatgcagcccttttggcgagttcagatatttatactaaccaagcctttgaagtgggtaataatattcttgctttacagttccacattgagacgactcaagaaaactttgaaaaatggcttattggtcacacatgtgaacttcgtaatgctggaatttccattcctaaattgcgtgagcaaaatatcgaatatgcccctgcacttgaacacgctgcatttgaattaattcaaaaattcttgaaaagaattggttatagtgcataa

SEQ ID NO: 58067 - DNA, 654 bp, Acinetobacter baumannii; identical to SEQ ID NO: 51672

SEQ ID NO: 58068 - DNA, 228 bp, Acinetobacter baumannii
atgctcgatcttcggcgactcgccgcgcgcccagatcgccagcaaggccaacaggggcacgctggccaggtcctgaaagaccagcacggcgatggcactgcggccgtggcgggtggtgagctcgccttggtcggccagttgtcggctgaccagcgccgtggacgacatggccgccgcagtgccgagcagcacggcgctctggccgggctgccccagccacatcaatag

SEQ ID NO: 58069 - DNA, 2343 bp, Acinetobacter baumannii; identical to SEQ ID NO: 52096

SEQ ID NO: 58070 - DNA, 1098 bp, Acinetobacter baumannii; identical to SEQ ID NO: 52195

SEQ ID NO: 58071 - DNA, 741 bp, Acinetobacter baumannii
gtgagcaaattgtttgccttaacgcccaattaccaatcagtcgatgatcttgtcactgaagaacagcaactcgaatttattaaagctttccgtgaagtgatgcgctataacgcgcaattacaaacttttattgaatacgatcaagaccaaacacaactcgataaacagcactttgcgaattttgcctctaagtatgctgacctatgtcgtgccgttagaaagaccaccaagagagacaaagtatcggtactggatgatgtcgattttcaactggatttactgcatagtgatcgcattaatgttggttatatcatcaacctcctacaactagtcgtggatacagactcagaggacaagcgtcagaagtaccaagcgcaaatttacgatttaatcagtagcgatattagtttgcacgataagcaagacctcattcaaaaattcattgaagaaaacataccgaagatgatcaatggacagagcgttcaagatgcctttgcacatttttgggatatcgaaaaagaacgggcttaccagcagctttgtgaacaggaaaatctaaagcctgaagtgatgaaagaagttcttgaacactatgaatatacgaaccgttttccacgtaaagaagaattgaaagacttgccaaactataaagtaaaactttttgaacgggataatgtcttcactaacttgctggtcaagacacggcagttgattgaaagattttatactggttttaattaa

SEQ ID NO: 58072 - DNA, 219 bp, Acinetobacter baumannii
atgaaaagattaaaagtaattatcaaggaccagtttgataaagaatcaatcgctttggcaaaagttagaccaatgaatgaccatgcacttgaacttcataaaagtgttgaacatattgaaattaatgacgatatcattttaccaaacatggatttgttatatgaaaatcctaaagacggcaaaatttatcaattaattggtccattcagtgaggaataa

SEQ ID NO: 58073 - DNA, 669 bp, Acinetobacter baumannii
atgatggcctgtgccactgtcggctcgggcaccgtcaccggctggaagcgccgctccagcgcggcatccttctcgatgtatttctggtactcgttgagcgtggtggcgccgatcaggttcagctcgccgcgcgccatcatcggcttgaagacgttggccacgtccagcccgccttcgccaccgccctggccggcaccgacgatggtgtgcacctcgtcgatgaacagaatcagctcgccctggtgctcggagatctccttcagcaccttttgcacgcgctcctcgaactcgccgcgatacttggcgccggccaccatggcgttgatattgagttccaccaggcgcttgtcgcgcaaggtctcgggcacttcaccggccaccatgcgctgcgccagcccctcgacgatggcggtcttgcccacgcccggctcgccgatcagcaccgggttgttcttcttgcgccgggccagcacctcgatggtggtctcgatctcctgcgcacggccgatcaccgggtcgagcttgccgtcatgcgccatcttggtcaggtcacgtgagtacttgtcgagttccggcgtgttggtcggcgtctcggcgcggccatcctcggcgcccttgccgaccaccttgctgacctgttggcgcagcgcctgcggcgtcaggccgtaa

SEQ ID NO: 58074 - DNA, 1182 bp, Acinetobacter baumannii; identical to SEQ ID NO: 52192

SEQ ID NO: 58075 - DNA, 876 bp, Acinetobacter baumannii
atgatcaaaaaagcagttttaccagttgctggtttaggtacacggtttttacccgcaagcaagtctattcctaaggaaatggttactgtagttgaccgtcctgctattgaatacgtagtacgtgaagcggtggaagctggaattgaacaaattatttttgtaactcattcggcgaaggttgctattgaagattattttgaccatgattttgagttggaaacaatactaaaacaaaagcaaaaatttgatttaattaaagagattactgatattttaccctccagcgtgagcattgtaagtgtacgtcagcctcagccattaggactaggtcatgcggtattatgcgctaaaagtgtaataggaaatgatgattttgctgtattattacccgatgttttggttaaagataattcagaaaaaaatgatctgtcccaaatggttgcgcgttatacggagcataaagccgctcagattatggtagaagcagtacctgatcatctggttgatcaatatggtattgttgatgtttcgaaaataccatatatcggcgaaagtgtagctatacaaggaattattgaaaagcccgcgatagggactgccccttcaagtctcgctgttgttggtcgttacatattgcctgcaaaaattatgcagatcttagagaatattcctacaggtgcaagtagcgagattcaattaacagatgcgattgcgatgttacaacaatctgatagggttgaagcttatcgtatgcgaggagaaacctttgattgtggtagtaaacttggttatttaaaagctgtacttcactatggcatagagcatcctaagttaggtcatgattttaagaagttaattcaagaacttaaattataa

SEQ ID NO: 58076 - DNA, 999 bp, Acinetobacter baumannii
atgttcctcacgggctttgactctaagccgttaaataccttgtatgtcgataaaaatctaaaatatcatggcttgattcaagcattctcacgtaccaaccgtgtctacaacgataaaaaaccatttggcaatatcatctgtttccgcaacctaaaacgtgcaacggatgaagcgctggcactattttccaataaagaaacgaccaagatcgtccttgttcccagctatgcggaaatcgaacaggattaccaagcagcggtgagcaaattgtttgccttaacgcccaattaccaatcagtcgatgatcttgtcactgaagaacagcaactcgaatttattaaagctttccgtgaagtgatgcgctataacgcgcaattacaaacttttattgagtacgatcaagaccaaacacaactggataaacagcactttgcgaatttcgcctctaagtatgctgacctatgccgtgctgttagaaagaccaccaagaaagaaaaagtgtcggtactggatgatgtcgattttcagctggatttactgcacagtgaccgtatcaatgttggctatattatcaatctactacagctcgtaatcgatacagactcagaggacaagcgtcagaagtaccaagcgcaaatttacgatttaatcagtagtgatattagcttgcacgataagcaagacctgattcaaaaattcattgaagaaaacatacctaagatgatcaatggacagagcgttcaaacggcttttgctgaattctgggatgctgaaaaagaacaggcctatcagcatctctgtgccgaggaaaacctgaaaccagaagcgatgaagcaggttctggaacattatgagttcaccaaacgcctaccacgtaaagaagagttgaaggacttaccaaactataaggttaagctgtttgagcgggagaacgtgtttagcaatttgctggtcaagacacggcagttgattgaaagattttatactggttttaattaa

SEQ ID NO: 58077 - DNA, 162 bp, Acinetobacter baumannii
atgttggctttaataaatttacttcaattaattgaaataatgggtgatgcccaatatccattaaaactgttttttgcgagttgtcatagtaaacttggaaacaatgaaattgttaatctttatcaatgttatatatttaattttagggagaaatatttatga

SEQ ID NO: 58078 - DNA, 447 bp, Acinetobacter baumannii
gtgcacctggtgctgtcgtatctacagttaccacagcattgcctgtacccacattacctgccgggtcagtcgctgtcacagtcacggtatgcggaccgtcagccaacactggaagtgtattgtctgcaagggtccaggtaccatcaccattgttcaccgctggataatccacaccatctacagtcaccacaactttcgctgtcgggtcgttcactgtaccggttaatgcaggtgtactgtcattggttaatgctgttgtcactgcaactgttggggcaactgcatctactacacctgtgccaggtaatgacgggttacccgctgggtcagtcgctgtcgctgtcactgtttgaccatcagtcaggtcacctgggtttggtactgtccacttaccatccgggcctgcaactacagtcgctgttgtgccatccgggaagctcacggtaa

SEQ ID NO: 58079 - DNA, 447 bp, Acinetobacter baumannii
gtgcacttggtgctgccgtatctacagttaccacggcattgcctgtacccacattacctgccgggtcggttgctgtcacagtcacagtatgtggaccatctgccaacactggaagtgtattgtctgcaagggtccaggtgccatcaccattgttcaccgctggataatccacaccatctacagtcaccacaactttcgctgtcggatcgttcactgtaccggttaatgcaggtgtactgtcattggttaatgctgttgttactgcaactgttggggcaactgcatctactacacctgtgccaggtaatgacgggttacccgctgggtcaatcgctgtcgctgttactgtttgaccatcagtcaggtcacctgggtttggtactgtccacttaccatccgggcctgcaactacagtcgctgttgtaccatccgggaagctcacggtaa

SEQ ID NO: 58080 - DNA, 969 bp, Acinetobacter baumannii
atgaaaaatttaacccttcccacttatgaagatgtcgcagccactgctgaacgtataaaaggttttgcaaataagactcctgttttaacttcacgtactgtgaacaatgaattaaaagcagaagtattctttaaatgtgagaattttcagcgagttggtgctttcaaatttcgtggtgcaataaatgcgcttttgcaatttaatgaagctcagaagaaagctggcgtggtcgctttctcttcgggaaatcatgcacaagcgattgcgctcgcatcaaaaattcttggtattccagcaacaatcatcatgcctaaagatgcccctgctgcaaaaatggcagcgacccgagagtacggcggcaatattgttgaatttgaccgttataccgaagatcgggaaaaaattggtaaagagattgccgaaaaaaatggcctgacactcattccatcttatgaccatccgcatgtgattgcgggtcaaggaactgctgcaaaagagttatttgaagaagtcggcgaattagattacctgtttgtatgtttaggtggtggcggtttattggcaggttctgccctctctgctcgccagctttctccgaactgtaaaatatatggcgttgaacctgctttaggaaatgatgggcaaatgtcttttagaaagggagaaattgttcatattgatacaccacaaaccattgccgatggtgctcaaacgcaatatttaggcaaattaacattccctattattcaacaaaaagttgatgatattttgacagtcacagacgaggaccttgttagctgtatgaagttttttgctgaaagaatgaaaatagtcgttgaaccaacaggatgtcttggttttgctgctgcgcgtaatttaaagcatgagttaaaaggcaaacgtataggcatcattattagtggtggcaacgttgatatttctaaatatgtagagtttttatctgcttaa

SEQ ID NO: 58081 - DNA, 429 bp, Acinetobacter baumannii
atgacgttttataattattttcactctaaagaacgcttcatcgaaatctgtttaatcgtacaaaaagaacgcctccaaggccaagtggttgcactggtcgagtatgaccatgacacaagcacaatcgataaactcaagaagttgtatgttctacataccgacttagaaggcccgtactacttattatttaaggctatttttgaaactaaaaatagttatccaaaagcttataaaaccgcggtgagatacagaacatggctgaccaatgaaatttatagtcagcttagattacttaaaaccgatgcttcttttaccgatgccaaactctttttatatatgattgagggcgccattattcagcttttaagttcagataagacaactcaaaaagagaagatgcttgagtattttctgcgaggactgatttaa

SEQ ID NO: 58082 - DNA, 177 bp, Acinetobacter baumannii
atgaactacgcactcaccacaagtgacgatgtcgccaaactcacacttaaccgtcttgatcaggatgagctttataccattcctcaaatcgacgcgaagttgttctggctcatgaaacgtgcatctccaagcttgtataccaaattccttggtacatcgtacaaattatttaaataa

SEQ ID NO: 58083 - DNA, 768 bp, Acinetobacter baumannii
atgggtgatatttatcaattactaaagccaaaaaagggatatgcatatactaaggagcaaataattgacgcctcattagtaaatttacctatacctacagggaaaaagttaaaaggtaattctagaatcattggtgatgtagatgaggaaaccttcaaaattatcgttgatacaattatttctttatgttctagattcaatttagaataccaagaaatagcttatacactattaatttgtttagctgaatctggtttcaatccagatgcggccgctggaaccacaagtgcatcaggtcttgctcaatatacaagatcaacagcagatgcttttaaatcaagatcaaaatcaatactaggttttgaaatagacatgagcggaacaaatgtctttgatgcaaatataggttgtcatggtgttttagtcgcttttttatttaataaaaatttagccctaaaatggggttttaaacctgatgatgataaatattggcaattgatttatatgcttcatcatgatggtcctggttattatgaagatgaccgaggaaaagaacgagcattgagatttaaatggcgaaaagatgctgtagatacttatgagagagtttttaagaaaaatttacttttattaacgactttattaaaacaaaaagttgaaacaaagttaaaacttactgatcatgagggtaaagcaattgaaaataaaaattatgttatagctacagttaaaagctctgatagaaaaaacctacgcatttgtcaatga

SEQ ID NO: 58084 - DNA, 678 bp, Acinetobacter baumannii
atgcgtgaagtaatgctcacttcaggttttaataatatgggcttagctattgtttttcatgaagtcgaacatggtgttagatcattatatcgaaccattgagcatagtgaagatattactttaattaaagatcatgcatatgaacttgtgaaaattttagatagtttctccgacttattgagaaagggtgataataagccagcaagtcttaaaaatttaattcgtcgtgccagagatattgcttcgatccgctttagagcccacaaggttcaattcgtttgtccattcctagaagataatattcctgatattgaacaaaaatatatctttaaaatattaattggttgtttaaacaatatctttgataattcaatatattggcttcaagcacgttggcctgaagatactcttggtcaaagaaaaatttatatagatgtacgcagagatttttatggaaaaacagcaattattattgctgataatggtcctggtttccaagatgagcaagaacagttagtaaaacccttctttacgagacgacctaatggtatgggaattggcttgtattatgtaaatcttgcaatggaagtaaataaaggacgactagttattcttgatgatcaggatgatgtgccaagtgagtttgatggtgcagctatggctttagtttttgattga

SEQ ID NO: 58085 - DNA, 483 bp, Acinetobacter baumannii
gtgatcatattttttattaaaaagtttgagctaactcttgagttttttggtgtggttaatactgttttaccgctacttgctgttgtattttgtggttatgcttggggacggatgagtagtaaatttccagcaaattatataatgttgttttctttgttactgaaatcattaaccttgttgttctttatctatgtaagtttttataatgaaattaataaagtttatttacttgtcttgttctcactcaatattgtttcatctagctttgttacttattctttttccaattatttaatgcaagctgttaatagtgctaggtcatcatttaaattttctattttgacatctttgtctatgcttttaattttggtatctgtaccagttggatcttatttagttgataattataactggatttcattttttacctttatatttgctcttcaagtattaagttatatatctgtttttaaaataaaataa

SEQ ID NO: 58086 - DNA, 549 bp, Acinetobacter baumannii
atgaataatttaaatttagcatttttcgggtttttgtctggttatatatattgctttttaacagttacacttcaagcagctttcactcatttgggctatccagtttcttttatctctacgatggtatttgccttactgccttattcttttaaatttttatggagtggctttgccgattcagttgataaatcatctatcaaatttttaatatccatatttataattttaataagctttagcttctttttattaatcctcttttcggatttatatagtattgtttttattataatgttaatcaatttagcattcttgggagcatgttttgatatcttgacagatgcaaacttaattaaaaattttacagatgaagagcgtagctctttattgtcttattacatttttgggtggagaatttcttctatttttgcaggtggggcagttctatttatttttaataaaaccttccaaggaagtttaagccacttatttgtattttcctctttgatttttctgattttttttatagtttttactgttaataagtaa

SEQ ID NO: 58087 - DNA, 456 bp, Acinetobacter baumannii
atgtggttcggtgaaatatctttaattgaccatgaaccacgttcgcacgatgcgattgctttgaaaaaaagtacagttctacatattcctgcaaaaccattaaatgacttactcaaagacaatccctattattggtactattttgcacgcttaaccagccaaaaactcaggtacgtttttttagaacagattgccatacaaacacgcagtctttctcaaagacttgctcaacgtcttttatttattttagagggttacggcaatcatcttattgtccaagaaagacaaattcatatttctcaagaccaattagctaatatgctaaccgtctcaagacaaaccattaatcatgaattaaaccttttagaaaaacaaaatattattaaaatttcgtttagaaaaattgagattttagatatggaaaaattaaatttaattgcaaaatcgcatacttaa

SEQ ID NO: 58088 - DNA, 453 bp, Acinetobacter baumannii; identical to SEQ ID NO: 52095

SEQ ID NO: 58089 - DNA, 330 bp, Acinetobacter baumannii
atgcttatatatattgaattagatttaatcgataaatttgatgaaaagagcttagcaaatttcttttataattcgcatttagaagcattaaaggaaagctataataaagctaattccagttatggcagaggctcactttcttttatacaatttctaatgcgaatttataggagctatggtttaaggtattttgttgaatacacagcctatttaaaagtaccccaagatataaatgcagatcaagatggaaaaggacattacgttttaccaaatagaacaaagatagactttgttcagcaatggtatgactatattcatttagttgagtaa

SEQ ID NO: 58090 - DNA, 330 bp, Acinetobacter baumannii
atgatgatcgctttagcagtaagcttagtcgtagcggtggttttaatcatgcgtttcccacgttcgcctcaagaatgggtagtaggtttgatttgtactattgtctcaagcttgactggtggttcattcattatcatgaaatgggacttacatgaatgggtgaccgatatatggggcatgatcactttaggtggattcttctttatttgtggcttacctggttgggcaattgtgaggtggatatttaacttcattaataaacaagaaggaaaaactattgttgaagtaatgaaagacttaaaaaaagcaaaagatgatattcaaagttaa

SEQ ID NO: 58091 - DNA, 654 bp, Acinetobacter baumannii; identical to SEQ ID NO: 52020

SEQ ID NO: 58092 - DNA, 777 bp, Acinetobacter baumannii
ttgtctttagctttaattggaggtttggttttaaaaggatttcaaaaagaaaaaattaatcttatagaggaaggaaagtttgataatgaaatcattctaaagcaaaagcagcatgaggtaaaaaaggctgatatcgttgttctattagtagacccaaaaaatctaaaagtcatcttagcaccattaaaaaaatggttagctgataaaactattgtatcgatgatggctggaattaatatcaaacaactcatgaatattacgggttcaaaaaaggttataagaatcatatctaacccaccggtattaacttatacaggtactcatgtgttgattggttcagaatatctagaacctttagataaagagttagttgagacaatttattcagccacagggcagacctattgggcaaattcagaatcagaaagtgatgccattattgcgttatcgggttcaggcccagcgtacttcttttatatcctcgacagtatggtaaaaactggtgtttctatggggctagataagcagtttgctttagatctggcacttcaagcagcatcaggtgctgtagacatggtgcgtaaaagtaatgttcagccaagtgagttatgtggcaaggtcacattagctaatggcattactgaatctgcattacgaatgtttgagctaggcaatctttccgatgatattcgactggctttaaaagcagcttatcatcgcagtaaagaaataagtctagagattaatgctgaaattgccagacatagcgttaactga

SEQ ID NO: 58093 - DNA, 579 bp, Acinetobacter baumannii
ttgagaacaccggtaagtgctgaagctgtaaagccaaaaaaacaaactaaacctgttatagaacaaaataaaacgcaatcaaacgggaataataagactgtaaaagtagatgtaacagatggcatggctgttatttatacatttcaagatactgaatatggaccacatgatgcaccaaaggtcggttatacagttttttatgatcacttaggtaataaattatacagttttaaaactggtagtagagtatcaagtaaatctaaaaaaaatgcagatggcccttttagtggtttctatacatatattgctggaggaaagcgaaatagtaagttgggagctgcctatggaactacaaaaattatgaccacagatagccgtgcaagatgggtacatggcgggggaagcggtttaagtgatccatatgctgagaaacaaggttggagagtcactatgggttgcacaagagcacaaaatatagatgttgaaaatttggcaaaaaaaattacagaatttaaaaagcaatatcctaaaataaagatcaaatatattcgagatagtaaaggaacttatcctaaatga

SEQ ID NO: 58094 - DNA, 177 bp, Acinetobacter baumannii; identical to SEQ ID NO: 58082

SEQ ID NO: 58095 - DNA, 444 bp, Acinetobacter baumannii
gtgaaaaaagatatcagtattggaagtgaatttattgaagagttattaaatattcaatacgaagaagcccaatccttttctatattggctttattattcccacatttagattataaaaataattctttccataaagatcacttacatcctaaagatgagttcaaaaacttatctaatgaagataaaaccaaatacagttggagagagtacaactctatagttaacttacaaatgcttgattcaaatgaaaatatgtcaaaaaataatttacctttagataaatggattgagaatgaaactattgataaagagtctcttaaagacaatttcttagtaaatcatttactaccattagaatgtgattttgcaattactgagtttgataaattctttattgcaagaaaaaatatcttatttaataaactctatgaaattttaaaataa

SEQ ID NO: 58096 - DNA, 177 bp, Acinetobacter baumannii; identical to SEQ ID NO: 58082

SEQ ID NO: 58097 - DNA, 228 bp, Acinetobacter baumannii; identical to SEQ ID NO: 58068

SEQ ID NO: 58098 - DNA, 708 bp, Acinetobacter baumannii
atgaatattaaagaatattttgaaaatttaaaaaatgagtcaaatctaatctttgatcaatcaatccttttagaagaacatctaggaaaatcacatttctatgtaacatgtatctatgattttactcaaaatattacagatattaaagagaaaaaaaactggattaatatttgcagtcaattagaagcatctattttaagtgtaacattagggttatatagacaggctttttcaacattacggctaggatttgaattaggtctgggatcaattcttttttcaatagataaaattcatttttatgaatggttaaaaggctgttctgatattaaatggtcaaaaattattgatgaagaaacgggtatattttcacaaaaatatattaatgcatttttccctagtttaaatgaaaacattaagcaagtaaggacaaaagcgatagacaattatagaaaactttcagaatacgttcatggtaaccatcagacttgggtgaaaaatggaataaaattaactttcaacaatgaattattattagaattctttactcattttgatgaaataactgaaattttattattctgtttatttgcaagatactctaatgactttacaaaagagacattagaagtttgtgagtttttaaatgaaaggttaggaaacaatgatagaattcgtgaatatttagggggagcaaaaaacaaatga

SEQ ID NO: 58099 - DNA, 357 bp, Acinetobacter baumannii
  misc_feature (332)..(341): n is a, c, g, or t
atgagtaactttttcttaagaacggaaagtataaagccagaagaactactaaacttaagtgttactaatcctacggacagagtaattattaatgcattaaaatcacctgagccttgtttactagaaggagcaagaggaacaggtaaatcctttttaatgaaagttgctgaacaagaaatagaacaagaaaatcatcaatgccttacagtttttatttcttttagtcaaagctccttaataaattctgccgacccacttcaattttatcattggatgttggctaaaatgctaaaaagtctaatgaataaactccgtaaaaagggattacttgnnnnnnnnnntaaactccgtaaatag

SEQ ID NO: 58100 - DNA, 903 bp, Acinetobacter baumannii
atggatattaaatttgattttaatttagtacgaattttttgtactttatatgaaactggtagtctgacaaaaacagctgaaatcttagaaattagccagccggctattagtcattctctgaaaaaattaagaaatttatacaatgatcaactttttattcgtacagatggtagaatgctacctactagtctagctgaaaaaatatcaaacaacttactcagctccagagagttaattctttctacattaccggatacaaatataataactatcaaaaaaaactttatattttctatgtcagatatgtgccaatcttatttcatgccttccatttgtttattaatggaagaacataataataaagtaaatattgatgttattcaggcccaacaaagctacttagcccatgcaatgcgagatggagaaatcgactttgctataggacatttacctgtactaaaaaattgtaaggacaatataatatatgaaaaactatttgatgatgaatttgttttaatgattagagaagaccatccatattacaacaaagaaattgatattattttaaaaaatattgaattaatcggagtaaaatctttaaccactggccatactgatttagttaaaaatattaataatgaatttgaaaatagaactgtattaaatattcccaactattctgtagctccagagatagtaagtaaaacagattatggcgttattatccctaaatcatttgctaaaagatttaattatgacaatcaatttgttattatagatattaatataccaggaaatactattgatattgggctttattatcatagattatttaaaaataatcattcgataaaatggatgagtgaaattattttaaataattttaaagccccctctctttaa

SEQ ID NO: 58101 - DNA, 1203 bp, Acinetobacter baumannii
atgcaagatattcaattacagcagagtacccaatactcattaagctggattctctttttatctttgctcatggctttaggccctttatcagtagatatgtatctaccagccttgaatcatatggccaaagatttttcagtgagtgtgcaagttgtttcaaatactttgccagcatattttttaggtttggcagttggacagctaatttatggaccaattagtgatgctgtcgggcgtaaaaaaccactctattttggtttagcactctatattttagccagtattttgtgtgcatatagccaaaatatttatcagctgatatttctaagagtaatacaagctttaggtgggtgtgtaggcgttgtgattgtacgagctgttgtaagagataagctcactttacaagcttcagcacaagcttttacaactttaatgatgattttagctattgctccggtaattgctccaagtattggagcattgattttggaatattatgagtggcatataatctttatattaatggcattaataggcattgcatgcctattaggtgtttatttcttttttcaagaatctttatcgaaatcagaacgaactaaatttcaaataaagtatagttttaaatcgtatattgatttactgaaagaccgaacattttaccttcccatgagtattggagggttatgtggtggtgtaatgtttacatttttaaattcagcgtcagctttaatgataggggagtttaatctgagtgaaaaagtttttagtttaatttttggattaaatggaattggtattatattattttctcttttaagtaagtttttaataaaaacgagaagtataaaatttattttattttggggtttactcattcaattattcggaattttattactgggtataggttatttttctatttctaagaatttaatatttatttcaatatttttaatagtctctacaatgggcttaataggaccaagttccttggccttggcaatgaaaaatcaaaataaacgtgcaggagctgcaagtgcgctgatgggaagtatgcatttttcttgcggtttaataagtggagttcttttaaattttattttttttaatattgtacttaatatgttttttgtgatgagtatttttgccttgatagcattattcttgtatctttatagtctaaataaaatgtatttttga

SEQ ID NO: 58102 - DNA, 435 bp, Acinetobacter baumannii
ttggttaatgtggttgttacagttactgctggtgcaaccgcatctactgtgccagttgatggtgctgacgggttacccgctgggtcagttgcaacaactgtaactttgtctccatctttaagatcacctgggtttggtactgtccacttaccatccgggcctgcaactactgtcgctgttgtaccatccgggaaagtgactttaactgttgaaccagcttctgctgtacctgttacaggattagttgcattgattggatcaattactggtgcatttggcgcagtggtatctacagtcaccacagcattagttgtacctacattacctgccgggtcagtcgctgtcacagtcacagtatgtggaccgtctgccaatactggaagtatattgtctgcaagggtccaggtgccatcaccattattggttgccgggtag

SEQ ID NO: 58103 - DNA, 594 bp, Acinetobacter baumannii
atgaaaataaagctaattacttttttcttgagcttaaatttgattggttgtgtagatgtaaatactgatttagaaaaaaatgttgtaaatcttgcgtatgatagttgtaaagaatacttatcaaattcattagtctctccatctatgactttaaatagtgttagcgtacatggaacgaatgcttcaataaaagaagtttatgacgctttcggaagtacaataattagtaatggtaagatagatgactatgagttggaggaaaaaattagattcagggtattagcagtaaatatcatttatagttctgaaaatagttttggtgtaaatagaaaaggatctgttacttgccgtttcacatataagataggagaaagtagccctaatcccagttctttgactcttacaatgtttaggacaggtatggaagcgatttatcctaacatcttaatcaatgattttgataaagtttcaaatatttttttaaatagtgaaattgattcaattagtagcaatacaaagtataactacaataaagaagaccaaattttcttaaatgatttaattaaatatcataaagcatcaaatatttattaa

SEQ ID NO: 58104 - DNA, 294 bp, Acinetobacter baumannii
atgtacctactaaacgagctggcatattacgatgagcctggacaaatcgaaaactactatttaatgttaaacttttgtgaagaagttctgccacacgaatattattatgaaaaatccattcgaattgatattgtacgttttcgaaaaatagagggtttggtaattctatttctgataatgaacaactttcatcctgaactaaagacttattttcgcattcaacatttatcgcctttaacattggatagaaataaatatatgaaatatttttttgtaatccaccctcgccattaa

SEQ ID NO: 58105 - DNA, 1032 bp, Acinetobacter baumannii
atgaataatgaacaaattgactttctaattaaacaaaatttagaacctgattttaagggtagattacttgatcgaggtttatctagatctatgatttggaaggatggtatcttgccagaaaatgctcctcatttttctgaagatctatcttatgatttactaacatatggatatgcacttttatctcttgctataaaaagtacagagaaaaatggcgatgttgaattgagattacaggcttttgaaaaagctgctattgcattaatggtagtagttaataatggggaagaaaactatactcagcgatcatttcatatacttctctctgcatcagcatatcatttagcacactattcagctaaagcttatagtctattaaaaaaatataatgatttatatacacataatattttagaaaaagcacttagctttcttattacaagagatttaaaacaattaacacaaaatattccaatttggaaacaagagaatcaaaaagatttagatagattaacaaatcctgaagtggattcaataaaatcagaaatggatagtatttctgcaaatttgaattttattaatcttagtctaattaatatatatttagaatctatatatgagtttttagatgctttagaagtagggtcagaaaaagccattgaaaatattgaaaaaaatcttagcttaaatatttcaattagtcaggaatataattttctagaagaatggtggatttttagaataactaagtacctattgagagatttatggtttcaaacatatcatcatattctacctattaaggatagtgacacaaattggtcaaaattaagatataaatttattaaaaacttacttaaaaagaagaatgcagagatagatttatggccttcacaaattgaaggagcaaaaagtgcaataaatgattcagaaaatttaattgtatctttgccaacaagttccggaaaaactaggattgcagagttatgtattttaagagccttatggctttgttgcacaacgatttcataa

SEQ ID NO: 58106 - DNA, 759 bp, Acinetobacter baumannii
atgattgaaagtttatgtgaaaagactgaaacgactatcgatcaacatatatttagagtccttgttttacaagaccctcattttaatacgttgagagatttattaatttctaaattaccagaatattatttatcatcacaatcattccaaagaactctgaaccttttagggcaagcagcagcttatgaaaagctcaaattgaaatttccttcttcacgtaaaatccgatcaggagatgtaggagaggttatttcaagtatatatatagaagaacatttaaattattttttacctattagaaagctccaatggcgcgaccataaagatatggcaatgagaggggatgatgtaattgctcttaaattcgaagaagataacattcaatttattaaatgcgaatccaaatctgcaaaaagtttaagcacagctactttagaggaagcgcgtaaagaactagattcatttgagggaagaccatcccctcactccatagattttataatagaacgttcatatgaaataggaaatgatgatatagctcagcaacttgaaacgtttatctataaaaaatctataaaaaatagtgatgttaagcatttattgtttgtcttaactaaatctaatccaaatcttcttcaaaaggcagcatttgataattataagggaaattatcctcaaatttctattgggtttaaagtagataaacatgctgagttaataaatgaaatattttttggtttaaataaaaactatgaataa

SEQ ID NO: 58107 - DNA, 948 bp, Acinetobacter baumannii
atgtcaggattacgttcagaacatatcagtaatcgactatttttctttatgttggtcattattctgtccttactgtttatggcggtacctcttattgtcagcagttatcaagaatatttaaaaactaaacaagcgttggttgaaatcaaaagcttaaggtcgattgctgaagttgcaaataaagtatctaaagaacgtgcgccagcaaataaattaatgtcgagtaacgctgccgactttttaaaaaatcagaagaagttattagagtatcggcttactgtcgatcagcaaattaatgaaactattcgtattttagaagaagaaggttattccgatttagcacgtattttagatactaaatttaaagatgatttgaaacaggcgcgggctgtagtcgactattatgccgcaacacctgaacaagcaagaacctctttgcaatttgataatgccattttgggtatgtttggtgcttgggatagttgtcgggaaattttgcaaaagcttatgttgcagctaaaaagtaaagatagccaaattaataactattttactttgattgtggttttaactgacatgcgtgatcaggccggtcgtaccgcatctaatgttattgcgccagtgacgtttaaagaaaccatacccaatgataatcgggcgcgctctttgcagactcaacagcaagcccgttacttatgggcacttgtagatacgctacagtctgagcaggccaaaactcctgaatatcatcgcctttatgcaagagttaaaactgaatttttagataaaggtgtgcctattgttggtcaacttttagaagaaagccagaagcatgaggcttaccatttaaatggaactgaacttacagaccaaatcgttgataaatttacaacagttattgatttacaaaattttctacttaataaaagtgtcttgattgcatcttaa

SEQ ID NO: 58108 - DNA, 369 bp, Acinetobacter baumannii
atgaatattgaagaagttaaaaatttacagaatagtctcggtcaaatagattttataaatgagcctagaaagccttccaagaacggttttctggaaatattattgataaaactaaaaagtttaaaaataaaaatgtatcaagaacgctctcataatatgccacatattcatattgactataataacagaaatcatatcgcgagctatgcaatccataatggaaagaaaatagaaggttctttagaaaaaaaatatgataaaacaatttcagattggatattaaaaaatcaaaatgatttaatggaaatttggacgaggcttcaagatggtaaaaatcctgaagtaattattggaaatttaactgaataa

SEQ ID NO: 58109 - DNA, 4932 bp, Acinetobacter baumannii; identical to SEQ ID NO: 56826

SEQ ID NO: 58110 - DNA, 486 bp, Acinetobacter baumannii; identical to SEQ ID NO: 56803

SEQ ID NO: 58111 - DNA, 1053 bp, Acinetobacter baumannii
atgacaacacttcaaactcaaccattaaatacactttggtatacacgctgcccggtaccaactggtctaggcatttcaattcaaaaaggttggctcaaagaaaagtttaatgagcagcaaattgaaataaaatcaattcgagaatcaaactctaaagatattcgtaactctcattttaaccatacccttgccaactcagttcgacatggcggcagtattcctgcaatctgggcatatgcatcgggtcaaaaaaccaaagtaattggcttatcatgggcggatgaagttcaattgttattaacacgctacgattcaaacatcaaaactgttgctgacttaaaaggcaaacgtttcggtattccactgaatcaagatgcaattattgatttctcgcgtgcacaggcaattcgtggtttagaaaatgctttaaaaacagtaaatttgacggtaagcgatcttgagttggtcgattgtttacgagcagatattctagccgcacagcaacaacaacctgaagaaaatgattctagtttttatggtaatcgcaacaaaattaatgcaagtgcagagatcgtggcattaattaaaggtgatgttgatgctatttttctaaaaggtgcacacgctgcgcaaattgctcatgattttgccctgcataccattattgatattggctcacatccagaccctattctacgctctaataatggaacaccaagaacgctgactgtcgatgaagattttctaacacaatatccagagcaagcccaatcaattgtcgatgctgttttacaagcagaacaatgggcacatgcccatgccgatgaaacccatcgttatttggcaaaagaatgcaatagtagtgagcaatgggttcatgctgcttacggtgcagatgcacatctgaaactgaacactaactttgatgaaatctctattattgctttacaagacttgagtgactttctctatcgctggaactttattcctgcagaaattaatgttcgtgaatggctggcgcaggatatttttattcaagctcaagtggcttaa

SEQ ID NO: 58112 - DNA, 477 bp, Acinetobacter baumannii; identical to SEQ ID NO: 56811

SEQ ID NO: 58113 - DNA, 651 bp, Acinetobacter baumannii
ttgaatatagtcgaaaaaccctctaaaattaagcctactgataatgcaaatacccctgcggggatttgggataataaaatggaaagtttagttgaaagaagtgccaaacaagatttggatactttcttacgttttatatgcacatatgccttaaatgatacatatgtgtctaaagatcttataacggaaagtcttaaagacttaccgcaatccgttgtgacgtttgtatacttacttgagttttctccaaacgatcagatcagttctatcacttctatctcagatagtgttttaaaaacattgtcagagcttattcataattttagaaatgaaagaattaattcaaacggttactcaataatttttgattttttttccgcaaatcctttcagttatttcatttattttttacgtaatgtgattacagcaaatattgatgagttaccacttgttgttaatttgaatatcacagatttctttcagtttttactagatcgtaaaagttcagtatttcactcaagaattttttattttatacgggcttggcaaactgtttctgtatataacgaagcaaatatcagagagctaaaagaaacaatgctgtatgccagtcaaaataaagtctttccaaacatttcagtttcatcttga

SEQ ID NO: 58114 - DNA, 834 bp, Acinetobacter baumannii
atggcgattcagttcaaacagcataagccttggttactcggaattacgattttaatcgtagttctgggcctcgtcggttaccgttatattaaaaataaacaagtcgacgatgttttaacgattggcattagcccgccttatgctgagctattacaaagcgttgccaatgaagtagaaaagcaaggcgttcatgtcaagcttgttgaattttctgattggcgggcaccaaacgttgccgtacaaaacggtgatattgatgcaaactttttccagcaaagcgtatttctacgtaatgctgttaaagaaacgggctatgacttacatgcatttggtgtgggctcaggaagtcatgtcggtttatattcaaaaaaatataagtcacttgaagaattaccttcaaaagcacgtgtggctattccaaatgatcccgtcaatttagctcgtgctttaattttattgcaccgtgcaggtttaattcagcttaaagatataaataatgagctctcaacaacccaagacattattgctaatcctaaacagctgagctttgttgaagttgaaggtcctcaaaccgcacatgcatataatgatgtcgatttaattttcggcttccctcactacttaaaaatggcaaaggtaaccgacccacatagcgcattatttttagatccaatcgataaaaaatatgcaattttgtttgtgacccgtcgcgattaccaagacaaaaaccaaaaacttgcaacctttgttaaagcattccagagctcaaaacaagcacaagacattctggataaagactttggtaaaggtatgtggtttcaaggctggaaataa

SEQ ID NO: 58115 - DNA, 543 bp, Acinetobacter baumannii
atgcaagatgatgtttatattgaaccgtttaaacaatctgatttatcaaagaaaattgataaatacttaaattttgtattagcacttggtttacttgcttttctgatttgcataatactaaccatagtagatgcatttattgttaaagcaggttttagtaataaattttttgagataaaaaataccggatatgcaattgttattgtagttattgttggcttaataggattcttgaatggaacttttggtagaactcaaatcaaacaagagtttatttacaaacttgttaatgaagcacaaacgcaaaaattaaaaaataatatcttcgtaatattgaaacataacgagatattaacaaaaggtgagctagagttaattaaagataagatggtaaacgaattagatcaaatgcaaaaatctggttatagagaaatgattgatactaacaattcgctttctgaggacaagttagattatattaatggtataaaaattgatattgaactcattaaacttattatttctaagaatgaaattatttag

SEQ ID NO: 58116 - DNA, 459 bp, Acinetobacter baumannii
atgattgactggttactgataagacgggcagtatcagttcggacttatcataatatcattacttatttttttctgattattatccttctctgccttgtaaatattggtatgcaacatttacatggattcgaaccaagatcttataaatacaatttatctttaatttcaacgttatcggttttacttgggttttatcttgtaagaagtcattttaaagatgttcagagatcgttacctcgatttactaaagaggaagtgcacattctaagaaagtataaggaaataacatgggttctatcggaagattcaaaaaaactttgggctgaaggatatcttgcatattcaaaatttcatataactgaaaatccttatcaggttgatactcaagagtacatttcttggcaggctggtaatgctaaagcaattaaatatgatgataagccatcaaacactaattaa

SEQ ID NO: 58117 - DNA, 303 bp, Acinetobacter baumannii
atggttcaaaatcgtatttctcaaaattacatctttaagaaacttgttcacttaacaaaccttaatgatgatattgaaactttgataacattgtttaaagagaaagatatcgtggttgattcaactttgattgaatcgtggttaagcgaagagggtcaacctaactttaaagaaatttcagaaacaaatttattttccttttttgaaattctatttagcattaaaaaggaagctttatataaagatataaacttatttgatttaagttatatttttgaagatattagaaatagtgaggcataa

SEQ ID NO: 58118 - DNA, 612 bp, Acinetobacter baumannii
atgcaccgagaggctattattaatctcatgtgcaaagaagtgacggcttttgttaaagatgaaattgaagaaattcgatttagttatttgattcgtaatatgaatcctttaattacaaatatcaatcatagctaccaaagctatgtagaggattacacctttgataaggtgagaaaagaatataatgaaaagaaaacagagtatattaaaaagctaaatgatacctttgattctgtagcaacaaaaatgtttgccattccagcagggatttggtttgcaacagctcaaatgaaggtgataggtgaacctagcaactatctttttactaagaattttattgtattaatgactgtactttgtatggtgttaattatgattctaaatatttgggggcaacgtagcacggtcactcaaatgaattttgaatacaccaaggtttttgaagcattagaagaaaagtttgaagaagaaaagaataagattcaaggtgttaaggtggatgtagataaacgatataacaaaattatatcgaatattagtatttcaattattgtttgtgttgccctagcaatatatacactgattctttttttccaaagcataatattatag

SEQ ID NO: 58119 - DNA, 447 bp, Acinetobacter baumannii
gtgcacttggtgctgtcgtatcgacagttaccacggcattgcctgtacccacattacctgccgggtcagtcgctgtcacagtcacggtatgcgggccgtcagtcaacactggaagtgtattgtctgcaagggtccaggtgccatcaccattgttcaccgctggataatccacaccatctacagtcaccacaactttcgctgtcggatcgttcactgtaccggttaatgcaggtgtactgtcattggttaatgctgttgtcactgcaactgttggggcaactgcatctactacacctgtgccaggtaatgacgggttacccgctgggtcagtcgctgtcgctgttactgtttgaccatcagtcaggtcacctgggtttggtactgtccacttaccatccgggcctgcaactacagtcgctgttgtaccatccgggaagctcacggtaa

SEQ ID NO: 58120 - DNA, 444 bp, Acinetobacter baumannii
atgaattatcaacatattattgtacctgtggatggttccgagatttctttggcagcagcccgacaagctgcccatattgctaaagcttttggtagtaaacttacagcaattagtcttgttgcagtagatccatttagtggtgttgatttttattacatctctcctgttgtaaaagattattttgttgaagcgcgtgcgaatgctgaaaaaacgcttgccaaggtaaaagccttatgtgctgaagaaggcgttgatattgatacacaaattattcaaggtgaaatctcatctgatggcattttaaaagctgtagaagacttaaaatcagacctgatcgttattggttctcatggtcgcaaaggtttccaaaaacttattttaggtagttttgcacaagatgttctaaacagcactaaaatccaagttttggtggtaaaagaataa

SEQ ID NO: 58121 - DNA, 447 bp, Acinetobacter baumannii
gtgcacttggtgctgtcgtatcgacagttaccacggcattgcctgtacccacattacctgccgggtcagtcgctgtcacagtcacggtatgcggaccgtcagtcaacactggaagtgtattgtctgcaagggtccaggtgccatcaccattgttcaccgctggataatccacaccatctacagtcaccacaactttcgctgtcggatcgttcactgtaccggttaatgcaggtgtactgtcattggttaatgctgttgtcactgcaactgttggggcaactgcatctactacacctgtgccaggtaatgacgggttacccgctgggtcagtcgctgtcgctgttactgtttgaccatcagtcaggtcacctgggtttggtactgtccacttaccatccgggcctgcaactacagtcgctgttgtaccatccgggaagctcacggtaa

SEQ ID NO: 58122 - DNA, 447 bp, Acinetobacter baumannii
gtgcacttggtgctgtcgtatcgacagttaccacagcattgcctgtacccacattacctgccgggtcagtcgctgtcacagtcacggtatgcggaccgtcagtcaacactggaagtgtattgtctgcaagggtccaggtgccatcaccattgttcaccgctggataatccacaccatctacagtcaccacaactttcgctgtcggatcgttcactgtaccggttaatgcaggtgtactgtcattggttaatgctgttgttactgcaactgttggggcaactgcatctactacacctgtgccaggtaatgacgggttacccgctgggtcagtcgctgtcgctgttactgtttgaccatcagtcaggtcacctgggtttggtactgtccacttaccatccgggcctgcaactacagttgctgttgtaccatccgggaagctcacggtaa

SEQ ID NO: 58123 - DNA, 447 bp, Acinetobacter baumannii; identical to SEQ ID NO: 56889

SEQ ID NO: 58124 - DNA, 441 bp, Acinetobacter baumannii; identical to SEQ ID NO: 56859

SEQ ID NO: 58125 - DNA, 294 bp, Acinetobacter baumannii
ttgattcttcttcaaacaaagcaatcagcagaagatggagttaatagacctcatccgttagagtttgatagatcgaaagaaattgataacttttctcttgatatacaagaagtcatcacatacttactcctttcaaaagaaaacaacaaatctattgataggctcactcaaattggtaaaaagcttattgagtcaaataaagtaaatgaaaactttgatgtaaaacttagtgaagttgcactagattatattgaaaaagagtatgaatctttattactcaacaatgtttcataa

SEQ ID NO: 58126 - DNA, 321 bp, Acinetobacter baumannii
atgaacacgagtctagatcaccagactgctgctgagtatatctatccgttaatttgtcacttgtgtgagtctgagtttatttattatttccatagagaaaagctggaggatttagaagccctttttatgtatagtaagaatactacagggtcaatttttcaaccttataaggtagaacctacaagtttactttcaaccatttcatttagccttatttctccttttttcttcttttggatgaagaacttaattgaaaattatgcgtcacaacttgagctaatgtatatacattttccagactcatttatttttaaaaattga

SEQ ID NO: 58127 - DNA, 375 bp, Acinetobacter baumannii
atgactaataatgtttttttaaagaaattgtattctggtgatataacttcctctatcttaatagggagatttagtattgacttgtcagggtactgtgatatcgactttcatgtgaataaaaaaccagatatttctgttgaaaaatatggggtttggggggtcgactataatactgttgttattaagactaaaggtaaaatatctggagatgttttgataactgagtggttgcttaatggttataaagaattaaatgttaaaaagactgataatggaattattataaagtcaaaaaatgggaaatttaatttttctgtagaattgagtggattgatatttcagggtatttctgtttattatgatggagagggttag

SEQ ID NO: 58128 - DNA, 174 bp, Acinetobacter baumannii
atgttccataagcaagccttggttttggtgaattatgctaatgcatctcttgcggatgtaaagaaaacttatcaagctgtacaacatgatgttgaacagcgtttccaaattatgttagaaccagagcctgtgctttataacaatttaggtttaattgaaaatcatacggaatag

SEQ ID NO: 58129 - DNA, 258 bp, Acinetobacter baumannii; identical to SEQ ID NO: 46547

SEQ ID NO: 58130 - DNA, 822 bp, Acinetobacter baumannii; identical to SEQ ID NO: 57057

SEQ ID NO: 58131 - DNA, 519 bp, Acinetobacter baumannii
atgccatcttttcaatctgccgatgcacaaattaactatcaaacttttggcgaaccgtcgtcccctgctctggtgttttccaattctttgggcaccaattatggtatgtggcaaaaacagtttaatgagttaaaagatcaattttttgtgatctgctatgacaatcgtggtcatggttcatcatctacgcctgacggtccatatactgtagagcaattaggtgaagatgttgtccgtttactggatcatctgaatattagcaaagctgctttttgtggaatttctatgggtggtttaacaggtcaatggcttgcgattcactaccctaaccgttttagtcatgtggttgtggcaaatactgccgctaaaattggacaagaacaagcatggcttgaccgtgcaaaattagtacgtgagcaaggtttacaaccaatcgcagctacagcagcttcgagatggtttacagatccctttatccaagtcatccttcaattgtcaacaacctgtgtaacgacttaa

SEQ ID NO: 58132 - DNA, 543 bp, Acinetobacter baumannii
atgaacatcgaacaatatcttgatgagttaattaagcgtgaaggtgggtatgtgaataatccagctgatcgcggtggcgcaacaaaatacggaattactgaagctgtagcacggggaaatggctacaaaggcaatatgaaagatttgccgattgatgtggccaaagcaatttatcggaaacagtactggattgaaccacgttttgatcaagtaaattctattagcttagcagtagcagaagaacttttagacactggtgtgaactgtggtatcaacttcgcaaaaccacttttacaacgtgctctaaacttgctgaataaccaaggtaaagccgggtatgcagatttgaaagttgatggcgtttatggctcaaatactttgggtgctctaaaaacctatttggccaagcgcgggaaagaaggcgagaaagtcctggtgcgagtcctcaacattatgcaaggccagcgctatatcgaaatctgtgaacgcaatcccaagcaagagcaattcttttatggctggatcaataaccggatcgcataa

SEQ ID NO: 58133 - DNA, 1029 bp, Acinetobacter baumannii; identical to SEQ ID NO: 53035

SEQ ID NO: 58134 - DNA, 363 bp, Acinetobacter baumannii
atgaaaagtcatgatcatttgcttgataagcaatacgatgacgaacactacaactgtgttcactttgttcatgaagctgcaatggacctatacggcatagatcgggcggaagcacttgaactctttatgcagcctaagggcaaaattacttttttatcttcacggttaaaacttttaaatccgctacccatgcccaaggaaggctgcatagtcgccttccatccgagacaaagaaataagcccccgcatgtggggctttttcgtgggcaaaagattcttcacctcatggaaagcggagtcacttatttgcctgaagaggttgtgatgggaatggggtttaatcgggtcagttattatgattaa

SEQ ID NO: 58135 - DNA, 507 bp, Acinetobacter baumannii; identical to SEQ ID NO: 46629

SEQ ID NO: 58136 - DNA, 399 bp, Acinetobacter baumannii; identical to SEQ ID NO: 49486

SEQ ID NO: 58137 - DNA, 708 bp, Acinetobacter baumannii; identical to SEQ ID NO: 46630

SEQ ID NO: 58138 - DNA, 645 bp, Acinetobacter baumannii; identical to SEQ ID NO: 49275

SEQ ID NO: 58139 - DNA, 732 bp, Acinetobacter baumannii; identical to SEQ ID NO: 46632

SEQ ID NO: 58140 - DNA, 4308 bp, Acinetobacter baumannii
atggcacaagaatcccgtttggtcattgttattgattcgcaaaatgctgaacgtaatgcgcgtaatctaggcaatgaacttgttagcattgaacgtaaaggtgaatttgcatctaagtctatggacagcttgtctgtagccaccagagctttagctggacacatggctggtttattaacagtaggttcagccatttcaaagatggatacatatactggattacaaaatcgccttaagttagtcactaacaatcaagttgaactaaataaagcaacggaagacactttccgaattgctcaaaaaacctattcagcttgggattctgtgttacaggtttaccagcgttttagtgataatgccaaaactttaaacctcacaatggatgacacagcacgtttaactgaaacagtttctaaagctgtagcaattagtggtgcaagcgcagaagctgctgatgcagctttagttcagttcgggcaggccttggctagtggaacgttgcgtggagaagaacttaattctgtaatggagcaaaccccagcactagcaaaggctattgctaaaggtatgggtattactgtaggtgaattacgttcagtagcagctgaaggaaaaattacttcacaagaaattgtaaaagcgcttagaaatgtagaatctgatgttgatgctctttttgctaaaacagatatcacaatcgggcagtctctcacactcctaaacaacgagatcacaaaatttgttggcgaagcaggtaagggaagtggtgcggcacaggtattagctggatcagttcaaactcttgcaagtaatttagatttaattgctgatggggctttagtagttggtattggatatatcactcgtgcaattttgatgaagagcgctgctattaaagagggaatggcttcaactttagcgagccgccaagcatctgtattaaatgctcaagcagaatatgcagaagctaccgctgctttgaatgcagcaaaagctcatctcgcgaatgtgcgagcaacaaatgcagaaacccaagctaaatttggcgcaacagcggcagcaactcgatacgcacaagcacaggcagcagtaactgctgctacaaatgcacaaacagcagctcaaattaagctaaatactgcaacttcaattgcagggagactagctaaaggggcgtttggattaattggtgggtgggctggagttgcaacattaggagtaatgggattagcggcagcctattcttattttaataataaggcagaggaggcaaagcaaaagcttgctgaacaagctaaagttgctgagaaagctgatgaggagttaaaaaaattaactggcaatgataaggctaaagcagttaatgatttaactactgcttttaatgcacaaaataaagcattagagaaatcatcgcgtgctgtagggtctgcattaattgatatcgagaactatgcacgaggaaatagggaggttgaaaaaatttcccaagaagcgagaactggaactatcagctatacagaagccattgaacgtctaaataaaattaagttgcctacagatctatatgaaaatctgaaaaaacaggctgcgcagtatgatgacaatgcatctaaagcaagtttatcagctgagaaacttaaattattaagagttgaagtgaaacttggaggtaatgaagcacaaaatgcggcaattcagcatcaaaaacaagcggatgctttaggaaatactgctactgaagcagaaaaggcaactaaggctttgcaagattatcaagccaagcaaaaagatagcgttattgattcaatctataaatcaggttggcttgataaaggttacactgttgctcaagctaatgccattttagaactgcaaaaagctaaaggaatgagtgcaattttgtctaaagatgaaattgatagcgcacttagaaatctcaagatcatcgaagaacaacaggagcgagaagataaattaactgaagctaaaagaaagcagacgcaggaaattgaaaaacaagcaaaacttactaaacgcttggtcggtatttccggtcaatccggtattggtactggtccacatcttgacgtccgatatggtggctcattgtcaggtcagaaagtttctaatgaacatctggctcgattacaggcgggaggaaaacctttaacttcctacaagatcagttctaattatggtccacgaaaagccccaactaaaggggcttcttcatttcataaaggtattgatttttcaatgcctgaaggaacaccaatcacgaccaatgttgctgtgaaagatatcaagacatggtatgacagcaagggaggtggttatgtcagtgaagtgatctttgaggatggagtgtctcttaagcttctacatcaatctcccaagatgcagagcaaggtgaaaggtggtgcaagtaaaggaagtgataaagcagctggtgatattcaatctcaacttgaacgtcaacaggatttgcaacggtcacttgaaaatgaggtggctagtgaagtcggacggattaacaataatagaaaggcaagactggaggatgttgataaagcaaactttagcccggaacgtactgcagaaataaaggcggaaataaatcgtcgtgcagataatgatattgctatagccaaacaagcccttagaacgaaattggaagactataaggagttccagaaaaccgaggaacagttactagaagagtcctttaaccgtaaaaagttcaatgcagctcatgaccttgaattaagtaagtttgagcagaagcaagctgttgaattgctggaacagcaaaaacagcaagagttagggttattaaaactagctcaggaacagcggttgtttcaagcccgtttatctctgctttctgaaacgcaagccatgcaggaacgttacagactcgaacgggaggaaattcttaagaataccaagctttctatagaagagcggcaaaagctaatcgcattatctaaagccaatcaggataaagagacacgcgataaagtgaataatgctgctcaaaactggggtggtatccaagcggatatgaatggtaccggagaatttttcagacaggatcaggaacgatttagccgtttaaatgctgcaaatgatttagcagatagtcaatttgctgctaccgacctgaatgagcaaaactctttagatggtttgaatgctcaattcgaagctggactaattaagcagcaggatttcgaaaaccagaaaacagcaatcattcaagctgctcaggaccaacgcaatcagattgctgccgaatatgctcagaatgctcaggatattgaagataaatatcagcaagatcgtttgaacacccaaattgcatttggtggccaaatgatgggttctcttacatctatgtttggttcaatgtttggagagcaatctaaagcttacaaaatcatgttcgctgcagataaagcttatgcgattgcagctgctggtattgcgattcagcaaaatattgcagcagcttcaaaagctggttttcctcttaacttaccgttgattgctggggcagttgctcaaggggctagcattattgcaaacatccgggcaatcaaagatcaaggctttgctgaaggtggttacacgggtcgaggtgggaaatatgaagttgctggagctgtgcacaaaggcgagattgtatggtctcaagaagacattaaaagatgggggggagttggtttagttgagaaaatgcgtaagagtacaaaccctgaagcttttctcaataacaatgcttcagctgatagtgtcatgcgccgtgcaatgatgagctctagtgcctttatagaaagccaaaagcaagctgatatctttaatcaaccggttcaagattctcagattatttataagggtaatagaagcgtacctatcgcttcttcttcggccagttctgatctataccacgatggcaaggtctacttctcatccaatggtttagttctggatcgctcaaatctggatgatgttcaggactttacttcaggacgtgcttcacgccctcaagctgagattaagccttcaattgagccagcttcatcgataatcaatttcaaaattgaagtgattaatcaggtgagtggggcgacagttgaagccgaacaactggatgagcaaacagtccggatcattgttaaagatgaaatggataagcagcttccaagaacggtaccgaagcttgtaagtgatcaaattggtaatccaaactcaactattagtcgatctttgactgagaataccactgtaaggcgtaaccgttaa

SEQ ID NO: 58141 - DNA, 648 bp, Acinetobacter baumannii; identical to SEQ ID NO: 45147

SEQ ID NO: 58142 - DNA, 612 bp, Acinetobacter baumannii
atgagcaaggctttagagctactggcgaatatagacaagaagtacaacaacgaattgaagaatacagaggaacaacttctgagcggtatcgaacaaacgtcacagactatcagagacagcttgaacataagagccaatatcactgcgaccgctatccaacagtcggacgagaaaatagcccagagcattcaaaacaacgcccagacggtcgagaagcagttaagcctgtatcaaaccttgctgcaatcgaaattgagccatttaacgcaattaaacgagcaaatacagagccaagaacaacaagcccagaatcaagcggtacagaaaaaacttaccactttgaatatgggactgatttcagtagcagttattttgcttatagcaattttctcgcttggtctcgtcaccaaaaacaagtacagcgagatgcagacgctaaataccgtgatcaacgagaagcaaatgagggtcgaccatttgaaccgatcgggaggcagtttgacgatcagcacatgcaagcgaccagacagcaaagcacagcgcctatgtattcagatcaacaagaacgcaggcgaatggcagaacggctacatgattccaatggggtattaa

SEQ ID NO: 58143 - DNA, 669 bp, Acinetobacter baumannii; identical to SEQ ID NO: 55377

SEQ ID NO: 58144 - DNA, 612 bp, Acinetobacter baumannii; identical to SEQ ID NO: 58142

SEQ ID NO: 58145 - DNA, 408 bp, Acinetobacter baumannii
atgtcaggacaggaacaagaaaacaaacagagcaaagcagttcgagaacgaacctttaaagtcagactttcagaatcagaatatcaattgctcgattccaataatccttatggttcgattgcaaagttgcttagacaagcagcagtagagaaagcgactaaaattcataattccaaagcagaagatgaccaaaaaattaaagcaacaaaggttgttgaatcttcgtatagcaagacagagcgagcattaattttagagcttggtcggattggcaacaatgtgaatcagattgctaaagcagtgaataccgatattgcaggggtaggtacttttgacaaagtgaagttacttcatttgttgatttccatagatcagcagcttcgggagttacgtccagatgatcgttga

SEQ ID NO: 58146 - DNA, 687 bp, Acinetobacter baumannii; identical to SEQ ID NO: 55381

SEQ ID NO: 58147 - DNA, 513 bp, Acinetobacter baumannii
atgtccatttttggcaaacatctgtcaccgtacgctctgttgtccatatcgggcctgctggcagcgtctgatcaggccataaaatggctggtgcaacaatcaatggcatatggcgagtctatttcagtgacctcattctttaactgggtacacgtatggaataccggtgccgcattcagtctttttgcgaatggtggaggctggcagcgctacttttttatcggaatcgcggtagtggtctcgatttttctgatcaagctgatccttgaaaatcgtcataaaggagaagccatcgcttacagtcttatcctcggtggcgccatgggcaacctgattgaccgggtctttcgcggctatgttgtggattcctttgatttctattggcgagactggcattggccggccttcaacctggctgatattgcaattgtcctcggtgccttacttttcgtttccagcagcttgttgggtaaaaaagcaaacaccaatgccgagtcggatggatctgactga

SEQ ID NO: 58148 - DNA, 804 bp, Acinetobacter baumannii
atgattcctgcgggttatgttcctgctccaattaatcattacgttaactctcctgtttcagaaggtttcgtaaatggttatctcaccatggatactttaggtgccctagtatttggtatcgtcattattcaagcgatctattcgcgtggtgttactgataacaaactagtgaccaagtatgcaattattgccagccttatttctggtgtaggactcactttagtttacttaagcttgtttaaattaggtttgggtagccatgaagtcgctcctaatgcagcaaatggtgctgtaatcctacatgcatatgttcaacatgcttttggaaatatgggttcactcttcttaacaggtctcattttcttagcatgtatggttactgcaattggtttaacttgtgcatgtgctgaatatttcgctcaacttactaagttgccatataagcttttagttttcatcttagttggtttttctttcattatttccaaccttggattgactaagctaattgccgtatcagtaccagttttaagtgcaatttatccacctgcaattgtagttattatgctcagtttcttctggaaattttggcataaaccatcttttattgtcggttcagtaacaagcattgctttaattttcggaattattgacgggcttaaggttgcaggttttggtgattacctccctaatttccttcaacacttaccgttaaatgaacaaaacttggcatggttgatcccatctttagttgttcttgtagtgactactcttatcgacaaagttaaacataaaagcatttaa

SEQ ID NO: 58149 - DNA, 285 bp, Acinetobacter baumannii
atgcaacagcttcgtaccggagatattattgccttaggttttatgacctttgccctctttattggggctggtaatattatctttcctcccattgtcgctcaacaagctggtgatcatgtatggctagctgccataggttttttgattactgccgttggcttacctgtaattaccattatggccctctctcgtatgcagggttccatcgaaattattagttcaccgctaggtcgtatcgcaagtctgatccatcttattttggaacgtctagcagtagccttttaa

SEQ ID NO: 58150 - DNA, 360 bp, Acinetobacter baumannii
atgcaacaacaagtgcaattgcagaagcaacagcaagctttagacacaatgcaaaccaaaattatccaagccttgtcagcacaatcaaagacaatcaagagcgatcagcaaagcttacagcaagcacagaaatcattagcgacaatgcagaagcaatttcacgagctagaacgaagtacagcaagctataccgagcagatcaatggcaaagtccgagagatgagccttatcacagccaacaacgaagaaattctggagagaatctcaaccacacagcattctgtctcgtcagaagtagccaaagcgcagcagaatttgctcgaaacatccgagatattgaaaaaaatctcgtccagatga

SEQ ID NO: 58151 - DNA, 219 bp, Acinetobacter baumannii; identical to SEQ ID NO: 53012

SEQ ID NO: 58152 - DNA, 399 bp, Acinetobacter baumannii; identical to SEQ ID NO: 57092

SEQ ID NO: 58153 - DNA, 174 bp, Acinetobacter baumannii; identical to SEQ ID NO: 53421

SEQ ID NO: 58154 - DNA, 549 bp, Acinetobacter baumannii
atggctgcagcaacacaaaacactgacgaaactttagcttcaactgacgatcaaactactatcaagcaaaaagcaacccgtagtaaaactaataaaactactgaagcacaaaatacccaaactggtgatgacaaatcttcagatcaaggtgatttgttaaatagccaaggtcctgaaaacagcgcaactcaaaaagaagttgagcaacttacagatttgaaaaatggtgattcagataatgaagattccagtactaaagatgatggaaattcaactgaatcatcaaataagacacaacaaactgatattcccaaggccgaacatcaaattgtggaaaatctagctggttcaagcattagtagtctggattctctagttattcatgtgactaataacggattttcaactgttttagaaccgttatctcgtgttgctattgaggcaggtaaaacagcaagtattacgtgtcataaccaaacatttaaacatcaagtactggaaaacatacgtcagttgaaggggcttggtaagaatctaactgttgagtaa

SEQ ID NO: 58155 - DNA, 225 bp, Acinetobacter baumannii
ttgcttaaagaggctaaaaaacaacagttaatcagttttgaagatgaaattttatttagtactttatatcacaaatttggcgagttccttcttgccgaagggccttttaaaaaagctttaaacaaaactcaaatgacagcaatgagttttcaaaaaacgacagatgaaattgatttagaagagctggacgattggtataagagatatcaagaagttcaagtctaa

SEQ ID NO: 58156 - DNA, 354 bp, Acinetobacter baumannii
atgagcaattttgtttttaagcgtggtgacactttcaacttgaacttgcagctagttgatatggatgaaactttgcaatatccacccgatgatgttcgccgtgcaattgatctaaccggttacacctttacttcacaggttaaagctctggctgatggtgcagctgtagcaactttgacttgtgcggcactaaaccagagcacacagaaagggtggctgaatattaaatctagtgcaagcactgcaacttggcccttaggtctgtgtcagatggatattaaggccgttgttagtggtactacacagcacactgaaactttgactttccaagtgattgacggggtaacagcataa

SEQ ID NO: 58157 - DNA, 318 bp, Acinetobacter baumannii
atgaggaagatacgattagaaggtggttatgtgaaacctccttacccaatcactatgggtttggatggccgtgattgtatttattcaaatatgacacctgaaatagcaaaagctttaggctttaaccgaacttcggatttagaaaaaatgaatactccaaaacaaattaatgttgtgatcagcacaaaagtatcagatgacagaagcgtaaagcagaaagtcgatgaagctttggcaagtctatacagcatcacttatgacgaattgacggatgatatctggcaagcaatcaagttgcttcagaaatcccaaaagtaa

SEQ ID NO: 58158 - DNA, 543 bp, Acinetobacter baumannii
atggataagtgtagagaagagtttgaaaagcaaaggtactgggttggattattcagaacaggtgttgattttgatgtgactcttggtgaattcggaagatacatttcaaatggaacaaaaagtactgatgcaatggatttggagtcatttaacgaaaaatgggaagcatgggcaaactgctggcagcaccagcaagcgaaagtggaggagcttaaagcatctcatcacggtgaagtgattggtcatgaagttcactttaaaaagatcaagcaagagcgaaacgaactgcaaaccttatacacccaacaaggcataaacatgctgaagatgcaaaagcgggtgcaattccttgagcaagaattaggtgcatggaaagggaaatctattgcagcgatgataaatggcatgtgtaaacaatgtggcaaagagccatggcaggcaatagtttctgataaagagggctatgcacttctacattgctttgggtgtggcgcaaacaagtatgaattggttggagagcaagcgctcaagggggaaggatga

SEQ ID NO: 58159 - DNA, 561 bp, Acinetobacter baumannii
atgacagatttgaataaggaaagagaagaattcgaaagtgacttagcagaccacttaatcgagcgtgatgccagcggactttatattaataacacgactcaaatttattgggagaagcatcttttaaaagtgcagataaaggaacttaaggcagagctagaaaaagccaaagctcaggcggtgcaacaatcttttgagattggtcgtcttcaagatcgaatcactgaattgcttgatgaaagacaagatttgtatgcacagattaataatgatcaggcggtgccagatactcaacaaaagcttactgatacatattatttggaaggctcagattatgtagttgattgccctttcgaatatgacattgaaatagataagggagaagtgcttgagttgcaaaaatggcaacgtactgagtcaacaaaagtatattttgcaaatatctataaagatgaagataactttgaaattcttcaattcgcttcaaaagccgaagctgaaaatgcagttgcagaaaacttgaagtttttagaagcaagcgaatcgggagctgaacaatga

SEQ ID NO: 58160 - DNA, 1521 bp, Acinetobacter baumannii
  misc_feature (1487)..(1496): n is a, c, g, or t
atgctcagtcgtcaattagaagtatcattacgtttggctgttagcatggctcgtcaaaagagacatgagtttcttacagttgaacatttactattagccttactcgataacgattcggctgtgaatgcattaaaagcatgcggagctgatattgtttctttacgtaaagaattagaagaatatgtagaacaacatactcctaagcttggcgaaaatagcgagcaagctccacatccaacagaaagttttgaccgcattttgcaacgtgcaattttccacgttcaatcgagtggtggtgatcgtactgttgaaggtgcggatgttttggtcgcaatgtattcagagcgtgattcttttgctgtttatctgcttaaacgtcatcaaattaatcgattgactttaactcaatacttgtctcatgggacacgtaaagacgaagttcaggttgaagaagaagttgaagacattgagggtgaaagcaattcaggcaatgccggaccattagaactttatacgctcaatttaaatgttgaagcgcaaaaaggtaaaactgatccactcattggtcgtgagaaagaaattgagcgtacagcacaaattctttgccgtcgtcgtaaaaacaatccattgttggtaggcgacccgggtgtaggtaaaacttcaattgcagaaggccttgcatggctcattgtaaatggtaaagcaccaaaaccgctaagccatgcagaaatttacagccttgatattggtgcattggttgcgggtacaaaatatcgtggtgactttgaaaaacgtttaaaacaattgttaaacgctttgaagaaaaatccgaatgcgattttattcattgatgaaattcatatgatcattggtgcaggctcaagtatgggcagtacgatggatgcttcgaatctcatcaaaccagctttagcaaatggtactttacgctgcattggatcaacaacgttccaagaatatcgtcaggtatttgaaaaggatcatgcgttatctcgtcgtttccaaaaaattgacgtaaatgaaccgagcatttctgaaactattgatattttacgtggcttgaaaacgaagtttgaagatttccaccatgtacagtatgacgacaaagctttggtttctgcggttgagctttctgcgaaatttattaatgatcgtttcttgccagataaagcgattgatgtcattgatgaagcaggtgcacagcgccgtctaaaagcagaaagtgaagacagcttaattactgtagaaaatatcgaagatatcgtttctaagattgcgcgtattccgcctaaaactgtatctaaagatgataaatctgtacttgaaaatcttgaacgtgacctaaaacgtgttgtatttggtcaagatgaagcaattactgcactagcttctgcaatcaagttgtcacgtgctggtttgaaatcaccagataaacctgttggtagctttgtgtttgctggtcctacccnnnnnnnnnngtgtttgctggtcctaccggtgtag

SEQ ID NO: 58161 - DNA, 471 bp, Acinetobacter baumannii
atggaacatggcttaattgatcaacatgagaaatttaaaaaacgagtcgcaagttctgatatttctgggtataaaaaggtttttaaaaatgaacttgtaatggggttccctatagatgaaggtgttctaggatttcaaaaatattacgatgctgctgccgtaagcccagcatacaaaatctttagattaaaacgagaagttaatgtagaatatttggatttgattttgagatctaattctctaagaaaaatatacaaaagtaaaatgcaaggcagtgtagagagacgacgcagtattcctgatgaaatgtttttgaatattgagatcccgaatcctcctgaagaggttaaagatcaaatagtaaaacaacataaactaataaaggaaattgagaatagtctcaaggaaaatcaaaaaaaattgcgtctaaagacagaagcattatgggaacttcctcaaaattacaactaa

SEQ ID NO: 58162 - DNA, 975 bp, Acinetobacter baumannii
atgaaaagaataggtatagttgcagttagtgcagtgacattatgttgggcaatgtatgaggtatcttctgataataccaatacagcaccgcgtagcgaatctaatcaaaaagtagcatctaaaaacatttcatcaactacaaggaatgaaaaattagcgcctcaaatgcttttggcccaaacaaattctcttaattcttctaccccagtctgtaaatataattttaacgcgactcaggaagattttgatctctggaataatgaatatcctgattttcctataaaaatattcccatcgataattggtcaaaaatttggttttaaagtggaacctaggccagaaagtgagtatggctacgtagattatgttgctacaagtaaaataaatagtccgaattcgattaatgaaattggtgatttaacaatacctcacacaggtattattgcatttgaaatggaacttaaaattccaacatcaactcttgggagttcatcacttggaaattctacttattactcctctagcattggatttagtggcgtaacaaataatggttatacgattagatccaactattggtttgatatgggggggtatgatccagattttggcgagaatcctgctagattaaactattatgtagcttatcgacttagtgataatagtgggcctaacaatccatattataaaggtcaaaacatgacaaataactcaaatgaataccaaagattagggatgtatattaatcagaataccaagcaggttggctttattgtaaatggtgttgatcaggggtatcaatctactttacctgctccactagagaatatacgtttttctgtctcaagtagtataggaatatattctaatcaattatttggacaagagttgtcgaacgaactcattactgaccgtaatgcgctacagtttaactaccctcagggcacaacagacatgtgtggtaatgccatctaa

SEQ ID NO: 58163 - DNA, 438 bp, Acinetobacter baumannii
atgaataaattagtatttttagcacttttatcgttgggtacaaattctcttgctgcaacatgggaaaaggttggggataatgatgcatctgtattttattttgattcagatagtattacacctataaattataatggtaaaagtattattaaggcttgggaaaaagttatagttaagaaaccaattgccaaaaccaaagttaatgatgaaatactatcgctaacttattttgattgcgaaaacagactttctggtgctaaacagatagtcactagacgaaatggtaaagtattcgatgagttaacaacttcaataaattatccaaaactagaagatcttgtacctgaaagtgcctcagaagtaatgttaaattctatatgcgcaacttatcaaatcaatacaggcacacgtagctatatgaagatgaatggagaataa

SEQ ID NO: 58164 - DNA, 762 bp, Acinetobacter baumannii
atgcttaaagactatcttggccctgctgccgagcataaactcaaagccgatgaggctattaaagaaaaaaggtttgatgatgcttggcgacatcttaacgagcagaaaataaattatttcaagcacgcaaaacaatgtaactttactgaaaagcaaactttggggcttgatgctattgtgcatatcacaatgggaaatttacttagaatagaaggaaaacatttacaagctttgtatcacattgcttatgtttataaagtgggtaagctagagaaccctttgaatgatagtaatgatgatcgattaagagtttactataaaagagcaaagaaggatgatggattcgagaactttaaacaaggactagatctatttcctagttatgattatcagtcagtacaacatttttcaagcagccttttgagttctgaaaatggaacaaaagagattgttacttctcctcaaattgaggaaaagcctattataaaaattccagaaaacaataaagatgttataaacaataggtttttggctgaacgaaagaataaaaaaaaggaagagcatattgggattcctcctccattaaaaaagccagagaagaagcaaattagggagtttgaaaagactaataatctaataaaatccacacctactgaaagtaagtcaaataatgaaaaaaggacagggataagctcaggattcgctataacagtgatttgtgttgtgatgggtttaattctattgctgtggttgctatcttaa

SEQ ID NO: 58165 - DNA, 402 bp, Acinetobacter baumannii
atgcaaaagataattttattaggccttgcgatctcattaagtggctgtgttactccagtaactcaaatgataaataataaattcagtgatattgttccaacaaagccgcaggctacaggtatttggacaacttcggttggtccagggctttctacgattaagttgaatgaagatggcaacgggattctttgtgaagacacaagtggcaacataactctgaataagattaagtattcaaatggtcaactttattctcaaaatggaatggtcttaaaagttatagcccttaaccaagaagttttagaagcaaaaacaacattatctgcatttaatatagatatggtttacaagaaagataatgccttaaaagctgcatcacttaaatgcgctaaagaaatatag

SEQ ID NO: 58166 - DNA, 336 bp, Acinetobacter baumannii
atgagtatgttatttaaagcattagctgaatttgcagagaaacaggctttagatagtagtaatgtaggcttgtttggtgaacctgaaccagtaagtgtaaaagatgctatccaatatgcacaacaagtgcttggtgatgatttcattagtgtgcaaatgtacgattccttggtagattccagcagttcaagtagccctaaaataattcgattaacgaaagagggggctgaacgtttccacagtgctttgaaagttaaaattgatcaaagtaatgacaaggaaaatcaagaagggaacaaaattaatgacattctttttgaagaattagaagtttag

SEQ ID NO: 58167 - DNA, 1278 bp, Acinetobacter baumannii
atggataagcaaattatttttgaagacgaacacattagagccatttttttacaaggcgattctaatacattagttctctcttttggcgatttgattacgcgggcgagtggcttatctatcaatgctgaaaagtctctaataaagtaccaatacaatgttattggggtgatgccaaaacaaaaatcatggtttccaaaggccagtatggttgagctggcaaaagtcattttgcctattattcagcgttttaaaaatattgtaggttatggcggctcaatgggtggctatgcagcaattaaatattcgaatttattaaatatgaatcgaatcattgcatttgtacctcagtattcaattgaccctgaacaagttgaagaccgacgctatgctgagttcttcgatgctgtcgcgaataaagacatgcaaattcagccgcaagatgtgaatgcaagtcgtgaatacattattgtttatgatccttacttttcaattgatcgcgaacattacttaaaaataaaagagatcttaccaagtttacatacaattcatttgccttttacaggacatgaagctttatctgtattggcaagctcaagccttttacatgattttattgagcatgaatttgatgaaacgtatttctatcaacaagttcgtaaaatcaaaaaacaaagcaagttctattatcgtaatgttcttgcaaatgtgctgacataccatgacagcatgttattgaaaatattgcgtcaaaatgactttcagttagatgaacgttatttagacaatccacttaagcaagcagtcactcgtagtcttattaaaacaaagcaagctacagagcaagatttccagaagcttggaattaaaattcagtatagccagcaagctgaaaaccataaaaagggtttgaaaaatcaatttgaggcaatactggtatttaatttgattaatctaaagcttgaaacctatgctgtagatgtagtattagcgaacccatcatatttgattccgattgtggcagaacacactggggttgttcagattgagttaaataatgaactttatttgttagggatgaatgaccgaaaaattattaaattgtttaaacagggtgatgcactcacttctgatatgagtccgtttgttattaagcaatattctgatttcttcgcgttaagctataagcaattaaatttaaattgtgatgaacaaggtgtatgtgattacgttgaaagttccattcagccatctcaacagtttgtattgaccagttactaa

SEQ ID NO: 58168 - DNA, 342 bp, Acinetobacter baumannii
atggtaaaagatgaagatgccaagctttatcacgagttgttaatggatgcatgtgctgcccacttaattgaagactggaaaggtgtggtatttgccgaaatcgtagatggtaaaactgttgagtccgaaaaaccttatacgcctgagaatgcatcaaagcttctaaatctaggtgacattggcatttcgatctggttattcatcaaagagcaggcacagaagattcaagaagaagcagatcaagacaaggctttaattctgggaaagtcatcgagctctacaaatatcaaaaaacgtatgcgtcgaaaacgccgcacgaaatcgaacaaatcaagttcttag

SEQ ID NO: 58169 - DNA, 768 bp, Acinetobacter baumannii; identical to SEQ ID NO: 51336

SEQ ID NO: 58170 - DNA, 186 bp, Acinetobacter baumannii
atggctcaagatgatttaaaagtaaaaataagaaggatttggaaatggactttaattggcataattattttcttagttgtttcattctttcttaagagttcatatccaatcacacatcataaatttaactttgctgatgcatatgatgttttaaaggatactttactgtctcttatacacatctga

SEQ ID NO: 58171 - DNA, 741 bp, Acinetobacter baumannii
  misc_feature (693)..(702): n is a, c, g, or t
atgctgaagtggtttgaaaaacttgtagatccttatccaaccaaaggtttggatgagcccttaccaacacgctttttcccatttgtttggcaagctactgaaggtgtgcgtccatatttattgctacttattatatgtacagctggtgcagctagctttgaagccctgctcttttcaaaaattgggcaacttgtagattggcttagtaatagtcagcctgaaagtttcttgagccaacatgcttcgaacattcttattctcattagcgtgttatttgctaatattttatttgttaatattcaatctattataaaacatcaaattttatatagtacttttccaatgcgcttacgttggcgcttccataaccttttattaaaacaaagcctagactttttccataatgattttgctggtcgactttctgcaaaggtcatgcaaacagctttagcagtccgtgaattctggattattttaggcgacatgttggcttacgtcagcatttactttattactgtaagtattgttcttggtgcaatctcacccacattacttattccacttatggtttggttagggttatttttattaagcgcatggttctttattccacgtttaagcaaagtatcacaacaacaagccgatgcacgtgctgtaatgactggccgtgtaactgatgcctacactaatatnnnnnnnnnncacagtctatgcgcaaatgcgtctaggcactctttttga

SEQ ID NO: 58172 - DNA, 345 bp, Acinetobacter baumannii
atggataatatttctcgtattatgccagtatttattaatttaattaataatgctcaatactggacacagttcagtgaacaagaaagaaaaatactattagatgttagaaatggagaagtaattattgctgatagtgggccaggtgtagaaccagatgatataaatagtttattttcattattttttactcgtaaacaaagaggtggtcgaggtgtgggcctatatttgtgtaaacaaaatcttcaagcaagtggtcatcaaattagatatgaaactatagacaataaaaagttgttatcaggcgcaaattttgtaattcaatttaagggaatggggaaccattaa

SEQ ID NO: 58173 - DNA, 468 bp, Acinetobacter baumannii
atggttggttgtagccatgcagataattcaagcgtaaaggaacgagaagctgaaattagtaaggcgcttgcttcaagaactatggccattggagatgatatagctcaatctcgaagattatatataacagcctataacaccattaataccaaatctgagatgactaacgagcttcttatctatacggttcgtaaagttgactcattaattggtaattatgaaacagataaagatagcttcgaaaatgatattaatgccaataaaaaaatttcgttagaagcagtagatgggctttgtattatgaataagtttcttcagaaatactcaacacttattgatttaaagaaagctccgcctagcatccaagaaagtacaagacgtgctttatcttatcaaccactttacctaaaaaaacttagttcagataaggactatttaggtcaattacagtgcatcaatttaaagtag

SEQ ID NO: 58174 - DNA, 1230 bp, Acinetobacter baumannii
gtggacgtacgtctttctgatcgtgtcaatgctatcaaaccgtcccctacacttgctgtaactaacaaagctgctgagcttaaagctgctggcaagaacgtgattggtttgggtgctggcgagccagattttgatacccctcaacacatcaaagatgctgcaattgaagcgattaataatggtttcaccaaatatacggctgtagatggtactcctgggttaaaaaaagcaattattgctaaattaaagcgtgataataatcttgattaccaacctaaccagattttggtttcttgtggcggtaagcaaagcttctttaacttggcactagcattattaaacaagggtgatgaagtgatcatccctgcgccattctgggtaagctatccagatatggtcattattgctgaaggtacgcctgttatcgtgaaatgtggcgaagagcaacgtttcaaaattacacctgaacaattagaagcagcaattactcctaacactcgtttagtggtattaaacagcccatctaacccaacaggtatgatttatagcaaagctgaattagaagctttagctgaagttttacgtcgtcatccgcaagtatttgttgcatctgacgacatgtatgaaccaattcgttgggaagatgagttctacaatattgcaactgttgcacctgatttatatgaccgcacgattgttttaaatggtgtttctaaagcatatgcaatgacaggttggcgtattggctatgcagccggcccagcaaaaatcattggtgcaatgaaaaaaatccagtctcaatcaacttctaacccaacttcaatttcgcaagttgctgctgaagctgcgttgaatggtccacaagatgttttaaaaccaatgattgaagcgtttaaacgtcgtcatgacttagtagttaatggcttaaacgacatcaaagggatctcttgcttacctgctgatggcgctttctacgcgtatgcaaatattcgccctcttattcgtgcaaaaggcttaaagtcttgcacagaattctctgagtggttacttgaagaaactggcgtagcagtcgttcctggtgatgcatttggtttaggtggtttcatgcgtatttcatatgcaacagctgacgaagtacttgttgatgcgttagcacgtatcaaaaaagctgctgaatcaatcgaaggcgttgatgctgcaattgcatctatcgaagctgagaaagcataa

SEQ ID NO: 58175 - DNA, 816 bp, Acinetobacter baumannii
atgttgaatatagtacagcctaatatttgcttcattggtagcagcaatttgtctttagctttaattggaggtttagttttaaaaggctttcaaagagaaaaaattaatctaatagaggaagtcaaatttgaaaatcaaatcattctaaagcaaaagcaacatgaggtgaaaaaggcagatatagttgttctattactagacccgaaagacttaaaggccatactagcgccattaaaaaaatggttagctgataaaactattgtatcgatgatggccggagttaatattcaacaattaacgagtattacgggttcaaaaaaaattataagagtcatttctaatccccctgtattaacctatacaggtactcatgtgttaattggttcagactatttagagcctctagataaagaagtgatagaaacaatttactcagcaacagggcgaacctattgggcaaattcagaatcccaaagtgacgcgattattgctttatcgggttcagggccagcttacttcttctatattctggacagtatggtgaaaacaggggtgtctatggggctagataagcaatttgctttagatctaatacttcaagctgcatcaggcgctgtagaaatggttcgtaaaagtaatgttcagcctagtgagttatgtggcaaggtcacattagcgaatggcattacagagtctgcattacgaatgtttgaattaggcaacctctctgatgatattcggctggctttaaaagcagcttaccatcgtagtaaagaaataagcttagaaattagtgcagaaattacgagacactag

SEQ ID NO: 58176 - DNA, 216 bp, Acinetobacter baumannii; identical to SEQ ID NO: 42270

SEQ ID NO: 58177 - DNA, 438 bp, Acinetobacter baumannii
gtgagcggtcttttaatttttataaccattgcttttcttactttatcaagcccaggcccaggcgttttatttacagtaacaaattcaataaattatggtgtgagaacagctttatttggcattagtggtttaattattggtatgtttattatcgctgtgatttctgcaagcggtgtcggacttattattactagcaaccctactatcttcactgctttaaaatttattggggccttttacttaatgtacttaggctataaaaattttattaaaaaatccccaactcaagacttattagaaactgaacataatcaaaaaagtataaagaaatcaaagcttttctatcaagggttgtttgcctcactacttaatcccaaaacaattgtcttttttattgcccttttcccacagtttattctgtctcttatacacatctga

SEQ ID NO: 58178 - DNA, 444 bp, Acinetobacter baumannii
atgaattaccgacatattattgtacctgtagatggttctgagatttctttggcagcagcacgacaagcggcccatatcgctaaagcttttggtagtaaacttacagcaattagtctggttgcagtggacccgtttagtggtgtcgatttctattacatctctcctgttgtaaaagattattttgttgaagcgcgtgctaatgcagaaaaaacacttgcgaaagtaaaagtcctatgcgctgaagaaggtgttgatattgaaacacaaattattcaaggtgaaatctcatctgatggcattcttaaagctgtagaagagttgggttcagacctgattgttattggttcacatggtcgtaaaggtttccaaaaacttattttgggtagttttgcgcaagatgttctaaacagcactaaaatccaagttttggtggtaaaagaataa

SEQ ID NO: 58179 - DNA, 507 bp, Acinetobacter baumannii
atggataacgaatatgccaagttctttttcaatcggaaagttgatgtctgtcaactggagtgtattgagctttctcatccttcttttatgaatacataccgaatagtccgtaatgatgaccgaggtgtttatgttcaacataaggagggatccggtcaggtctattatgaatttttgccagcatctattcaaagatccggaatgctgggtgatctggaccagacattaacagtctctatatctggtttaggtgatgtaatgccggatgagtttgaacgggtaatcgaagggcaatatccagatgtaaagccgaccgtaaattaccggatttacagttcagacaatctgaactctccaatgttttatttacttggactgcaactctcaagtgtcgccatgaaccataaagctgtgacattcaaggctgaatcaccacgattaaataccactaaaactggggacatttttgcactggatcgctttagtggtttgaagggggctatatga

SEQ ID NO: 58180 - DNA, 363 bp, Acinetobacter baumannii
atgaaaagtcacgatcatttgctcgataggcaatatgacgatgaacactacaattgtgttcactttgttcatgaagctgcaatggacctatatggtatagatcgggcggaagcgcttgaactctttatgcagcctaagggcaaaattacttttttatcttcacggttaaaacttttaaatccgctacccatgcccaaggaaggctgcatagtcgccttccatccgagacaaagaaataaacccccgcatgtggggctttttcgtgggcaaaagattcttcacctcatggaaagcggagtcacttatttgcctgaagaggttgtgatggaaatggggtttaatcgggtcagttattatgattaa

SEQ ID NO: 58181 - DNA, 951 bp, Acinetobacter baumannii
atggaaattgtgttagctaatccgcgtggtttttgtgccggtgttgatcgagccatagcaatcgtcaatcgggctttggaatgttttaatcctcctatctatgtacgtcatgaagttgtacacaataaatttgtggtagatgacttacgccaaagaggggcagttttcgttgatgagctggatcaagtgccagatgattctattgtaattttcagtgcgcacggtgtttcaaaagcagttcagcaagaagcagagcgtcgaggcttaaaagtttttgatgcaacttgtccattggtgactaaagtacatattgaagtaactaaatatgctcgcgaagggacagaagctattttaattggtcatgaagggcacccagaagttgaaggtacaatgggacaatatgacaaattaaaaggtggcgatatttatctggttgaagatgaggctgatgtggcagcactcgaggttagacatccggaaaaattagcatttgttacgcaaacgaccttatctattgatgatacagcaaaagtgattgatgctttgcgtgcaaaattcccgaatattcaaggtccgcgtaaagatgacatttgttatgcaactcaaaatagacaagatgcagtacgtgacttagctgaaaaatgtgatgttgtgctggttgttggctcgcctaactcttcaaattcgaatcgtttacgtgagcttgctgagcgtatggggaaagctgcttatctagtagataatgcagatcaacttgaacaatcatggttcaatgatacttgtaaaattggtgttacagcaggagcttcagccccagaaattttaattaagcaagtgattcaacgtttacaagattggggagctcaggcgcctaaagaattagaaggacgtgaggaaaatattacttttagtcttcctaaagaattacgtattcatgtgacccaagcataa

SEQ ID NO: 58182 - DNA, 132 bp, Acinetobacter baumannii
gtgccactcggtgagattagccgccgttttgtcgatgaagcaggaaggctacatcaggctttaggacaaattgcagataaagttgtgttttgtgtggctggttttccaatgattttaaaaggtgataagtaa

SEQ ID NO: 58183 - DNA, 324 bp, Acinetobacter baumannii
atgactaatttcaaaaagcaccctgatggctatatgtcatttttaggccgtgatgataagggcctctactctgttcgcattggctggcaagtgtacgcatctaatgctaatggctcagttctttacaaggtgaaggactcagttaagacacctttggacgttgaaaagttccaaactgactatccaaaagtttggaatgaactcacccaagaaatcgattttcagcgcagaaagcagctcgctataaaactgcgtgaaacaaacatccctacctatgaccgcaaagcttataaaactaagcgcggcttcactggctcaagatga

SEQ ID NO: 58184 - DNA, 189 bp, Acinetobacter baumannii
atgccacctcttccaaactctcacatatttaaaatgtctcatttaaagaaaaaaatctctttagaaagctattactccgctgccgatattttaaaaaaattagaagagttaactggacttgtatatcttcaagatgataacaatcctattactgtctcttatacacatctccgagcccacgagacgtag

SEQ ID NO: 58185 - DNA, 1149 bp, Acinetobacter baumannii
atgagccttgatgggaaagtgattgaagaaacaggtctgggaaaatatattggtgaaccagatagactttgcctgcccattttaggcagcttgcaacccagtgccttatccccagaattaaatgctcagctttacctatccatgcaagaagaagatggttctggctgtcgctatgaaccacgtaatatattaaaaaaactattaaatcagttacatgctaataattatttccctgtcatggctgccgagctagagttttatcttttctcacctcagcatcaatccgagatatgttcagaaaaccaatgttttgatatagatgcgccaaataattatcagcaagttctggatgaagttgaaaaagcagccctactacaatcaattgaaattaccgctattgttgcagagtcatcccctggacaatatgaattaaaccttcaacacagccatgacattttaaaactctgcgatcaaattaatgccttaaaaagaattgttaaacaagttgcaagaaagcatgacttaaccgcttgtttcatggcgaaaccaaacttggcaaaggctggtagtggtatgcattttcatatgagtatgctgaatcaataccatcaaaatatatttagctcagaagaagaaaaaggtgagcttgcagccaaattattgagcgcgattagcggactcattgagttaatgtctgcatctatggcgattttagcgcctaatattaattcttatagacgttttaaaattggtcatcacgtgccattagaagctaattgggatactaacaaccgaaatgttgcaatccgaattccatgctcagacgtacaaaatcaacgcttagagtatcgtgttgctggagcggactgtaatccctatttggtaacagcgactattttagcgggcgcgtcttatggcttatctcataagttaccactgccaaaacctgcacatcttttaaaatttccagacgagcacattttattagctaacaaccaaccagaggccttaaaaatatttaaaggaagtcttattttaaaagggtatttaggggcagactttgtagaacattggtacacggttaaacaggctgaatatcaaaatatttacagtcaaatgactgaagcagaacaacaatgggatatataa

SEQ ID NO: 58186 - DNA, 306 bp, Acinetobacter baumannii
atggataagtgtagagaagagtttgaaaagtggtttgaagagacgcacgatgtgatcatcacaactcagtttaaaaaagagggtgaaaggtatcttgatagaaacgtgcgcagatcatttgaaacatggcagcaccagcaagcgaaagtgggggagctgcaaaagcgtttagatggggcattaaaagagactcaatatgctttgcagtatgttgaagaagacatgcgcggcaatcatgaatttctacaaatggcaatgattcgaacccttaaagctatagagcaagtgctcaaaggtggtgcttga

SEQ ID NO: 58187 - DNA, 177 bp, Acinetobacter baumannii
atgatcgaatttgtagattacaacgcaatgatgaagctccgcagagattacaacctcggcactcgtaatgaagaaacaagagcagcagcgaacctctatgagaaattaagaaagctgaaaatgctagacaagcttaagcaggaagccattactaaacatgacggagaacaacaatga

SEQ ID NO: 58188 - DNA, 948 bp, Acinetobacter baumannii
atggatgcactaagtaaattttttgatgatatccacttaaataagtctgaatatatttatataaaagcacaaggtgaatgggcttttaaaacacaagatcaatctgctttactggcttatattattttaacgggttctgtatatatccaattaaacgtgtcagagaaaataacagcaagagctggagatattattttaattccttctggaaaagcgcatcatgctacagactcaaaagctactgcaagtaaacttgtagatccggtcgatattactccattatttaatggacatcgccacgatccaattgagttaggctcatcaacatctgaaaataccctattactctgcttgcgctgtcaagtcgatacttatatggcagggccacttattaatgcattaccctctattatgcatattcaacatgagaaccaggccactcctcctgaatggttgcaaataggtctctactttttagcggtcgaaacacaaaaaatccaaccaggtcatgacaaaattattgatcacttagtcagtattcttttaattgaatgtattcgtgatcatattcaacaaatgtcagatcaacaaaattggttaggcgccctcacacatcctgaattaagtaatgctttatccgcaattcatagtcaacctgaaataagctggactgttgaatcattagctgagcaatgctgcatgtcacgatctaagtttgccaatctttttaatagtattattggtgaaccacctcttacttatttacagcattatcgcttccgcttagctagccaatatctacgcacaagtaatttatcaatacaacaaatttcaaataaagtgggctattcttccgaaacagcatttagtcaggcatttaaaagagtatttgatttatcgcctaaacagtatagacaaaattatattggtactaatctcgatgaataa

SEQ ID NO: 58189 - DNA, 267 bp, Acinetobacter baumannii
atgcgacaagcaatgttaatgagagctaaagcattgaattgcacgtttgataagcaacgtggcacttggattagtccaccagaatttaacggtatctcagatcaacaaagagatgaacttcaaaactttattgctgaacgtggcctcgatgtaaaaacagtttgtgagcatttaggtatcgatgcccttattcaaattgaagctgcaaagctaccagcagtgaaacaagacattgaaacattagctaaaacggggatgacagcatga

SEQ ID NO: 58190 - DNA, 267 bp, Acinetobacter baumannii
atgcgacaagcaatgttaatgagagctaaagcattgaattgcacgtttgataaacaacgtggcacttggattagtccccctgaatttaacggcatctcagatcaacaaagagacgaacttcaaaactttattgctgaacgtggcctagacgtaaaaacagtatgtgagcacttaggtatcgatgcccttattcaaattgaagcagcaaaacttaaggcagttaaacaagacattgaaacattagctaaaacggggatgacagcatga

SEQ ID NO: 58191 - DNA, 324 bp, Acinetobacter baumannii
atgttgggcttaagtctatttagctggatgtcttgggcaagtggttcattattaggcgggttatttgcagatcaagtcgcacaccttccaaagtttttacaagcagctttagatttcttattacctgctttatttttaagtttcttattagcggcatttgaacgaaagcatagccttgtagttgctgtatcgttagtggtttcagctttagcgtgttattggattaacttatcagcggctatctttattggcattctttcaggcattttagcaggtctatttaaacattatgtgctgaaacaatttgatgaggttgaaatttaa

SEQ ID NO: 58192 - DNA, 279 bp, Acinetobacter baumannii
atggcacgcgtcaccgttgaagattgtttagatcatgtagacaaccgttttgagcttgtgctcgttgcaagtaaacgtgctcgtcaattggcacgtcaaggcatggagccaactgtagaatgggataacgacaaaccaacagttgttgctttacgtgaaattgctgtaggtcacgtaacgaaagaaattcttaaacaacgtgagcaagattatcaaacttctagtcttgatcttgccctttctacaaacagcttaaatttagaaggtttttctttctaa

SEQ ID NO: 58193 - DNA, 162 bp, Acinetobacter baumannii
atgtctgctgaaactgtgcctgtacctggcaatgaagtgttgcctgcagggtcagtcgctgttgcagtcactgtatcgccatccaccaggttacccgggtttggtactgaccagctgccatctgtgcctgctaccactgttgcagtggtgccatcaggataa

SEQ ID NO: 58194 - DNA, 399 bp, Acinetobacter baumannii
atgtacaagttaaagctaaatcctcagaccagcggctatggcgtaacaccgggtgatgatgttaagcgtcagcagatggagggaggacgaggacgctattacatcgatgtaaaacgtaatagccacattgttgatgtgaactggaatttaagtaaaaccgatttcaataaaatgatggcgttctggcgggtctaccagaataaaccagcctcattttatgcggatctggtgattgatcagggggaacgtcagcaatatctatgcaatttcattccaaactcgttcaagaccaatgaagtgaatggcaacctttaccgggtaaatgcacagctcgaagttgttcaaaaccagcctaacctgaatgctgatcaggcacttatcaaagattgggaggtctaa

SEQ ID NO: 58195 - DNA, 261 bp, Acinetobacter baumannii
atggtcttaatcgaagcacaatcctttggcctaccaacagtggcatttgattgtccatatggtccttctgaaataataactaaagagagtggtattttagttgataatcaaaatatagaggaattagcttcagcaattgaaaaacttattaattctcctgaaatgcgtactgtaatgtctagtaaggctttagtagcctcacaaagatttaaatcttctcaaatatttctacagtggaaagaggtcttggatacattatga

SEQ ID NO: 58196 - DNA, 891 bp, Acinetobacter baumannii
atgcatattgtctatgtctctgatggtaaagcagggcatcgctcacaagctttaggcttgtttcaggcgatgcaaagacagcaggcaaatgtaacttttgaagaagtctctattaatgacttgcctgttatgtccttaatcaaagcgcttttttcttcaaaaaaatctctatttcaacaggcgcccgattttatatttggtgttggaagtcatacgcattttcgtgtctggttgctcggtaaaattttcaaaaaggctaagaccattattttaatgaagccaaatttaccgacggtttggtttaattatgctgtgattccagagcacgacggtattcctgcgaataatcgagtgattgttacgcgtggggcattaaatcccattcgtaatgaaaaacgccatcaagcttctagaattttaattgcattaggtggttcatcaaaacggcatcaatggaatcaagaaaaagtattattaagcgtgcaaaagattgttgagaataatccggatgccgaaatcattctaacgacttcacgtcgaacaccagcagagtttattgatattttaagacaacaaagttttgcccagcatttacaaatatttccggttgagcaaacacctcaaggctggatttttgaagagatgcaaaaagcagaagctgtatgggtaacagaagatagcgtttctatggtttttgaagcacttactgcgggttgtcgcgtaggggtcatagcaatcgatcggttgaaagacgatagaattacgcactcgattgatcaaatgatagaatcacaactaatttcacagaatacttgtgtcgtacagttgccacaaccttatgcttttaaagaagcagaccgtgtggcaacatatcttttagcgaaaaattaa

SEQ ID NO: 58197 - DNA, 285 bp, Acinetobacter baumannii; identical to SEQ ID NO: 57978

SEQ ID NO: 58198 - DNA, 195 bp, Acinetobacter baumannii
atggcagttaccgtaagacttagagacgaagaagaagaaatggttaaagagacaacattagaaatgatgttcgagaccaaaattcggataaaagaatcggacgtacttcacactttaattagaaagtacttaaaagagatcaaaacagaagacgtgatgaaatacagatcagatgtgctgaagaaggacgattaa

SEQ ID NO: 58199 - DNA, 282 bp, Acinetobacter baumannii; identical to SEQ ID NO: 53026

SEQ ID NO: 58200 - DNA, 297 bp, Acinetobacter baumannii; identical to SEQ ID NO: 57036

SEQ ID NO: 58201 - DNA, 654 bp, Acinetobacter baumannii; identical to SEQ ID NO: 57056

SEQ ID NO: 58202 - DNA, 2238 bp, Acinetobacter baumannii
atggctggtgaaaagtcaaccatcatttacacactgactgacgaggcgccattattggcgacttattcgctactgccgatcattgagacctttactaagccagctggtatcgagattgttaaaagtgacatctctgtagctgcacgtgtgctcgcagaattcgctgactacctaagtgaagagcaaaaggtatccgacaaccttgctgagctaggtcgtcttacacaagatccagatactaacattatcaaactcccaaatattagtgcctctgttgcgcaattgacagcatgtattaaagaacttcaatctaaaggttatgcaattcctgactatccggaaaacccagcgactgaagaagaaaaaacaatcaaagctcgttatggcaaatgcctaggttcagcagtaaaccctgttcttcgtgaaggtaactctgaccgtcgtgctcctgctgccgttaaaaattacgctaagaaacaccctcactcaatgagcgagtggaaacaatggtcgcaaactcacgtttcacacatggaagaaggtgacttctaccacggtgaaaagtcaatgacacttgaccgtccacgcaatgtaaaaatggaacttatcacaaacagtggtaagagcattgttcttaagccaaaagttgcgcttcaagaaggcgaaatcattgactcaatgtttatgagcaaaaaagcgctttgcgacttctacgagaaacaacttgatgactgccgcgaagcaggaattttattctcattacacgtaaaagcgacaatgatgaaagtttcacacccgatcgttttcggtcattgtgtgaaaatctactataaagaagctttcgaaaaacacggtaagttgtttgacgaattaggtattaacgtaaataacggtatggctgggttatacgagaaaatcgaaactcttccaacctcattacgtgaagaaatcattgaagatttacatgcttgccaagaacaccgtcctgcacttgcgatggttgattcagcaaaaggtatcactaacttccattcacctaatgacatcatcgtagatgcttctatgcctgcaatgatccgtgctggtggtaaaatgtggggtgctgatggtaagcaatacgatgctaaggcagtaatgccagaatcaacatttgcccgtatttaccaagaaatgatcaatttctgtaaatggcatggtaactttgatccaaaaacaatgggtacagtaccaaacgttggtttgatggctcaaaaagctgaagaatacggttctcacgacaagacttttgaaattcctgaagcaggtattgcaaacattactgattttgacactggtgaagtgttattgactcaaaatgttgaagaaggcgatatctggcgtatgtgtcaggtgaaagacgctccgattcgtgactgggtaaaacttgcagtaactcgtgcacgtaactcaggcatgcctgcgatcttctggcttgacccataccgtccacacgaaaatgaattaatcaagaaagtacagaagtacttaaaagatcacgatacgactggtcttgatatccagattatgtctcaagtacgtgcaatgcgttacacacttgagcgtgtagttcgtggcctcgatacaatttctgtaaccggtaacatcttacgcgactacttaactgacttgttcccaattatggaacttggtacttctgcaaaaatgttgtctatcgttccgcttatggcgggtggtggcatgtacgaaactggtgcgggtggttcagcacctaaacacgtacaacaacttgttgaagaaaaccacttacgttgggattcgcttggtgagttccttgcgcttgcagtttctctagaagaaatgggtattaaagaaaataatgctcgtgcgaagttacttgcgaagacacttgatgaagcgactggtaaattgcttgacaatgacaagtctccatcacgtcgtacaggcgaacttgacaatcgtggcagccacttctacttgtcactttactgggcagaagcacttgctgcacagaacgaagatgctgagttgaaagctaaatttgctccacttgcaaaagcattagctgaaaacgaacagaagatcgttgctgagcttgctcaagtacaaggtaaaccagctgatatcggtggttactatgcagttgacccagcgaaagtaagcgctgtaatgcgtccaagtgctacatttaatgcagcgctttcaactgttcaggcttaa

SEQ ID NO: 58203 - DNA, 507 bp, Acinetobacter baumannii; identical to SEQ ID NO: 57035

SEQ ID NO: 58204 - DNA, 159 bp, Acinetobacter baumannii
atgtctgcagagactgtgcctgtacctggcaatgatgtattgccagcagggtctgttgctacagctgtaacttcatcgccatcattcaaacctgggtttggcacagtccaagtaccatccggtcctgctacaacagttttcgtactaccgtccggataa

SEQ ID NO: 58205 - DNA, 288 bp, Acinetobacter baumannii
gtgttagtcgcatctgctggaatgtttttcagaacaccagtaatcgtgacattacctgctgcttctgatgcattaatcacattgtcagctgttactgagtcaatcgtaaaggtaacgccagctgtatttggagcagctgtatcaactgtcacaacacctgtatctgtacctacgttacctgctgcatctgttgcagtcacggtaatggtgtgtggaccgtctgcgagtgttggaagtgtattgtctgcaagcgtccaggtgccgtcgccattgttcactgccggatag

SEQ ID NO: 58206 - DNA, 162 bp, Acinetobacter baumannii; identical to SEQ ID NO: 46834

SEQ ID NO: 58207 - DNA, 630 bp, Acinetobacter baumannii
atgatgaaaattgctgttctagtctctgggaacggcagcaacttacaagccttgatagatgcaaatctatcagggcaaattgtaggtgtactgtctaataaagccgatgcttatgccctagagcgtgctcaaaatgccaatatcgcgacagccgtaatctctcacaaagactttcctagtcgtgaagattttgatgaagctatgcatcagcaacttatcgcatggcaagctgacgtggttattttagctggctttatgcgtattttaactgctgactttgtcaacaaatggcaaggtaaaatgcttaatatccatccttcattattacctgcctataaaggcattaatacacatcaacgtgtattaaatacgggggatcgattacatggctgtaccgttcactttgtgacttctgaacttgatgctggtcaagcaattgctcaatctgccattgaagtaaaagaacatgacaatgttgcatccttggccgaacgtgtacataaacttgagcattttatttatcctcaagttgcagagtggttatgtaatggccagctcacatggaaaaatggacaagcctatttccgcaatcaaattcttgaacaccctatccgttttgcatcttggtaa

SEQ ID NO: 58208 - DNA, 183 bp, Acinetobacter baumannii
atgtgtataagagacaggctctatggtttaaataaacaagtcattaaagcaaatgaagcttttattcttaatgatatgaataataaaaagaatatcgatatttttggtcaagcagcccatgatggtagtcgtatatctaagggtgaatataaagatatagtaccaattacgattgagttttaa

SEQ ID NO: 58209 - DNA, 459 bp, Acinetobacter baumannii; identical to SEQ ID NO: 46717

SEQ ID NO: 58210 - DNA, 300 bp, Acinetobacter baumannii; identical to SEQ ID NO: 45476

SEQ ID NO: 58211 - DNA, 918 bp, Acinetobacter baumannii; identical to SEQ ID NO: 53014

SEQ ID NO: 58212 - DNA, 1020 bp, Acinetobacter baumannii; identical to SEQ ID NO: 57055

SEQ ID NO: 58213 - DNA, 612 bp, Acinetobacter baumannii
atgcaccgagaggctattattaatctgatgtgcaaagaattgacgtcttttgttaaagacgaaattgaagatgttagatttagctatcttattcgtaacttgaatcccttgattacgaatatcaatcatagttatcaaagctatgtagaggattacacctttgataaggtgagaaaagagtataaagaaaagaaaactgaatacatcaaaaaattgaatgatactttcgattctgtcgctacaaaaatgtttgcaataccagcaggtatttggttcgctacagcccaaatgactaccatgaaaactgttagtagttttatatataccaaaaacttcattgtattaatgaccgttttatcaatgatatttattatgattcttaatgtatatgggcaacgtaatacacttaatcaagtgaaagaagagtatttagatatttttgatgaattagaaaaaaaatttgaagatgtagatgcagaaattagaaaaataaaaggtgaagtaaatgataagttcgatagagtaatgtcttacatttatgtggcgattattatttgtgttgcattaggtgtgtatacggcataccttttttatcaaagtagtattgtctag

SEQ ID NO: 58214 - DNA, 483 bp, Acinetobacter baumannii
atgaataagacaatggcaccaatagcaatcgagagcgtactggttaataaaatacggaaatttgtcgacttcctaagcgttaatatacctaccgcaccggaaagggcgagcgccataaacataatcccgtttagccatgccgatgatgtgtggaaaatttttgccagtaaagatggcataagcgatagaaagaaaccactgaccatccaaagtgcaatgttaatcgggctaatactcaataaagcgctttttgtctgtgggggaatggccatattgggttttaatgaagcaagtgcaccggatcttctttgtgcggtctctggagtaagaaaacttaaaatgagttcacaaataagaagaaaacataagaactcaaaaacaagctgtaaggggtgggaagagaattgcaaaatagaacaagtcagaaatataccaacagccatacctatcattggtgcaatactattaatcagtgagccatga

SEQ ID NO: 58215 - DNA, 1026 bp, Acinetobacter baumannii; identical to SEQ ID NO: 57075

SEQ ID NO: 58216 - DNA, 462 bp, Acinetobacter baumannii; identical to SEQ ID NO: 57076

SEQ ID NO: 58217 - DNA, 207 bp, Acinetobacter baumannii
atgagtgagataagtatgaatcaaagaattgaaaagtacaagtttagccaagcctttagggatggctcgaaagcattcgtagctttctgggtaatgacattcatcattgtttccttcttacgtggctgtgccgacgaacaagcagcaaacgaactcaaagcaaaacagaacatgtatgtgcgtgttcaggttgagggggtgaagtga

SEQ ID NO: 58218 - DNA, 162 bp, Acinetobacter baumannii
atgtctgctgaaactgtgcctgtacctggcaatgaagtgttgcctgcagggtcagtcgctgttgcagttactgtatcaccatctaccaggttacctgggtttggtactgaccatgtgccgtctgtgcctgctaccacggttgcagtggtgccatcaggataa

SEQ ID NO: 58219 - DNA, 162 bp, Acinetobacter baumannii
atgtctgcagagactgtgcctgtacctggcaatgaagtgttgcctgcagggtcagtcgctgttgcagtcactgtatcgccatccaccaggttacccgggtttggtactgaccagctgccatctgtgcctgctaccacggttgcagttgtgccatcaggataa

SEQ ID NO: 58220 - DNA, 228 bp, Acinetobacter baumannii
atgtctaaacgcgccctactccacaagtcaagactagaagcattcaagtcttggcttattgaaaaccaaattcagtatcgagacggcaaaggagattttcaggttctacaagttgaagtgaaaggtaggttttacccaatttatgacaggtttcagggtgaccacttaacgactcaaagagaactcatccctttagttaaaagatacatagcaagtgaaaagaactag

SEQ ID NO: 58221 - DNA, 393 bp, Acinetobacter baumannii
atgaatatgttagccaatatctcgtttgatgctgctgtattcacaagccttgaagtgatgaatgtaggtgttgaggatggcgttgttcagttttccttgtcggttcaaaacgctgagcatatttacatcgttgcaagtgtcaaaggaattgagaaaaacgacactttcgaatatggcgaaggcttggactatcaagactggaaagatgtggactacacaagaatgacagtcgattcaagtagccgaccacatgtcgatgactttgattatgtcgatgcagtcgaaggtatgccctttgcccttacttctactcaaattcaaaagctgaatgagtatttagaagaactggcaagaggagaaaaaatcaatgagttgagagggggtgatgtctaa

SEQ ID NO: 58222 - DNA, 291 bp, Acinetobacter baumannii
atggatgaagcactgcaatatccagccaatgatgtacgtcgagcgattgatctaacgggttatacctttacttctcaggtcaaaactttagatggtactgcagttgcgactttcacttgtactgctttaaaccagagtacacaaaaggggtggctaaatgttaagtctggagcaagtactgcaacgtggccattgggtttgtgtcagatggatattaaggccgttgttggtggtgttgttcaacatactgaaactttgactttccaagtcattgagggagtaacagcataa

SEQ ID NO: 58223 - DNA, 291 bp, Acinetobacter baumannii
atggatgacgcgctgcaatatccagccaatgatgtgcgtcgagcgattgatttaacgggatatacctttacttctcaagttaaaactttggatggaaccgctgtagcaaccttgacttgtgcagtattaaatcagagtactcaaaaggggtggctgaatgtgaaatcagaggcaagtactgcagcgtggcctttgggtctgtgtcagatggatatcaaagctgtggtgagcggtactactcagcatacagaaactttgacttttcaggtaattgacggggtgactgcataa

SEQ ID NO: 58224 - DNA, 969 bp, Acinetobacter baumannii
atgatgacgaaaatcaaaaaaatgcctggtcgaccaagaagagatcatatagatggcataagggtgtcactgtggtatgagtatctgaagcttaatttgtcgactactaagtcttgtcaactcgaaagaattattgaaccagaggcttttggccaaagtgtttatggtgttccttatcaccacaataaatgggtggtttatcggtcaggcatacatacaccaaagccaaatttaattgctgctgctgagtttcatgtttctggtagctctactattattaatagtgttttatgggaggccataagaggaaagaaaaagttagattggatgcttaaagagggtattaggcaattatcatgggatgttcagaatgttctatataaaacaaataaatctaagaactctcgtgagttagtatcaactttaaccagaaaaaatatttctcgattgatacgcttagcaagcttagattctttggcagcacaaataatttttcttcgaatcgctgataatagaaatgaaaggactctagcactagaaatagggcaatcgatttatcaaacgcttttaattatgtgtacatatcttccattctgttcatctattttttgtgctgagttgataaaattgatgcaagagcatgtctttccactttcacatgatgggaaaaagggaattcatattcagtgtgaaaatcaattctttcatgaggtgagacaactgtgtaattttcggcttgccatggaagatcaaggttgggtaggaatgagtgaaaacgatggggttcaagcaatcgctgattggttgaatggtaagttaggatttcatttacaatttgccttttccgctccgatcttttctaaagatgggcgaatacttagcgagcaacgactaaaacaatggggacaagagcaactattaacaggatgttctgaaaaattcccaccttttgaacttttctctgattaa

SEQ ID NO: 58225 - DNA, 279 bp, Acinetobacter baumannii
atgacaggaatgaaatacattaccccagttagtgtagaaaccattgaacgtgagctttttgaacgccatggcccgatgattgcagatgatgcattaagagtggccctaggctatcgatccactgatgccttcagaaaagcacttacaaggaaaactgtaccaatcccagtcttttcagttgaaaaccgtcgcggaaaatatgcactagtcaaggatgtagcagagtggttagtcacacagcgtaatgctgctattacgcaacaagagcttcagaaataa

SEQ ID NO: 58226 - DNA, 708 bp, Acinetobacter baumannii
atgtacgctttttcttttgatgataaacacaatcctcatcaatctattcttgatcaaattaataacgcttttaaagcagagccgaatcttgcctctacaatccatggtcaaaggaaaatctatcaaggctgttatggccgaagaactgcacttttccccagcgcaaaatctggaggctctattcctactgaaagtcgtcttgaattggcacatgctatttgtcttgagaaaaacccacaggttaaatgttttagatctcaagctctcaaaatcgctcttggagaaaaggaattctgctacccagatttcttagtcaaaacaatcaataaccaatatgaagttcatgaaattaaacctaatatctccagtctatctgtaaatgatctagacaaatttcttaggttagcaaacttactacatcctttagacattacatttcgactaattgatcagaaaagcttgccatcgaataaagacctacaacaattacaacattggtatcaacgaggccatacatgctcttggacgaaatatgaaattgagctcgcaacagaagccttaaaacctcataaattcaaatattccgagcaagtatataaaaccctacaagaagaagatctagatccccgattaggtgactacttactttttcatgaagtaatcaaattgatcagccgcaaaaattattattcaggtgaggaggtttaa

SEQ ID NO: 58227 - DNA, 1878 bp, Acinetobacter baumannii
atggaaaagccgttactcatcccccaacctggacttcgatttactattgctgatcatgaacatgtattcgaaatcacttcatccaattatggtgtaatccgctatgcagcaattgcaggaggaaaaccatgttctattcccactagtacatttgaaacacgatataaaaatggagagattcaatgtgtattcgctccagaaaaactattcatcaatccagacagttgttcaaccattcgtcgcaaagaacgctatgtactcactgccctagcaaaattgacagcccccacttctattgaaccactacgagaactcattcaagagattgcagcagagattaaagatccctctccaccatcagcaagaactgttgcgcgctggatattccaatatcgattgagtagtaatagcgctctcagcctaagtgaacaaggcaaaggcaacaggacactaagatatccaccggaagtctatcaaatcatcaatcaaggaatttcagaggtctatctacaaccagaacatcgcacaagcaaagatgtgagggcattcgtgttaggcaagtttatagaacaaaatatttctcttaaatatttacctagccgtagagctatacagcgggctattgcaagattagatccatatattgaaatgcgtgttaagaaagggagtcgaatcgctcgtaaatattttcaagctgctggcataagtacgccaagcccatttgctctatacaccgtagaaatagacacccattatttagatatcattgtcattgatcctgaaactgggcaaacactcggacgaccgttcctcgcttgtgccattgatacatattcacgtgcaattgtcgggacttacatcagtatgtttccacctagtgcattgacaactttagccttaatcaaagacatgattacacgccctaatctagatctaccaggtggcattccttctattatcattccagataatggagttgaatttaaaaataattcactagcgcgcgtatgtgaacaactcaaaattactatcacaccatcgcaaatcggaacaccaaacaacaaacctcatatcgaacgtttttttggcacattgacagaaggtattctgcaaaagcttcttggtacaacgttctcaaaccctactgcacgaggagaatatgactcatctggtaaagccagccttactttagacaaagttaaagaatacgtcgactcttggataaacatggtctatcagcaaacaatacacggcactactgatagagcacctattcttgcttggaatgatgctaccgagcagtttaagccctcctcattaactaaaactgatgctgatattatttgtagaagaccagttaaacgaaatatcaatcatggacaagtgattattgatgggcttagctacttttctcatgcactcacgacattgaaagctgatggcatcaaaaaagttactgtacttgttgatgatttagacctgagcaaagtttatatcatacacccagataaaaaggatctggtcattcaagcagactctactcaacctgaatacacatataacttatctcacagtgttcatctggaagttcagaagcgtaaaaaacagatgtcggagtccgatagacaaagactagggaaatacgcggatctttataatttgtatctgctaatgaaagatatacaaaatgatcttatccgtaaaaaaccaaaactgaagcaacttaaaattgagctacctaaacagcttacgcaactggagtctgagttaacttctcaccctagtaacgaagaactcacaactattcacccgcaacagaatgctcaacaactagctgtaagttttggttcacttaaggtgaaaagaaatgataagtaa

SEQ ID NO: 58228 - DNA, 954 bp, Acinetobacter baumannii
atgataagtaatcaatctatttatgaacacataagtcagcttaatgaaatcgtaataacttctgatgagttcatgcaggcttttaatggaattcaacaatgtgcggagcgcagtgtcgcgtacaaagaacctattggaagtatgcttctggcaaaaggtggtcttgggaaaacaacactatgtaatacaattgtgagccaaatgccccgatccatcaaagtagaaaaagatcgtaaaaaagcgattattccagcattctatgttgaagttccttcaccagctaccgtgaagtctttagcaataacaatgttacataagctaggggatcagtcacatcacacaggcacaacctcctacctgacagatagattaggctatttactgcaacagtgtgaaaccaagcttgtttttcttgatgagtttcatcatttatttgagcgtaaagcaacatctacacgtttaaacattacagtgggcaattggcttaagaccttagtcaatgaaacaggtataagcttttgtctcgttggtttacctgaatttgccgaactcattcaagttgatagtcaaatcgcacgacgattcccctttcattatcaattaaatcctctgactttaggtactcaaacttctccaggaacactttacccttttctcaaagaagtcagtcatagggcatcggaaattcaaatttcgttttcgcctgattttgataactttcaattgagagtacaaatatatacagcaacgaaaggctatcatgcttatgtcatgagcatgatacgtgaaagcatggcaattgccttggctgaaaatagaaataccataactattaatgactttagtcaggcttggaacttagggattacgtcatttatcagtaaacaaataaccaatccttttgaaatgtctttatcaagcctagctagtactataaaaaaggagtactcatga

SEQ ID NO: 58229 - DNA, 1968 bp, Acinetobacter baumannii
atgacatcagttagcaaccttcttattcatcccattccttatgatggcgaatcggcagtgagcttcttagctagagttgctgagcttaataggcattcatctatcgagagattaattaataaagagcagcgccatttcttagcaaaaagcgcaccgaattgtagattagcagatcttccgcgttttaaatatgtcttacaactacttaatattgacccaaaccatcaaagtcttgcctttgcaaaagctggccccacgagccgatcagcgagaaaatggagcaatatagaactacatgaagatttattaaaatactatccttgttcctattgcccacaatgcttagaagaacagccattttttaaaaaaatttggcttttacaacccttatatgcatgtccaatacactctattttccttgtcgataaatgttatcaatgtggatccccaatatcgcttagctcaggagtgacaaagtgccgtcattgctatgcgctattgcaagatgcacctaagattgaatgtagttcaatacgagtcatcaattggtttgttgaaatgcttaatcatgattcgaacgatttctttcaatatttcactgccttttggctagcaatacgaggtttttttgagcttgataacgttatagataatgaaactacattagaactgatatacgaatattttaataatcataatcaatccatcattagattaagtactttgattaatcaaagaattaatctagctcatccaagaatccaattgctcccatttttgaaacattctagattttttaaaaattatgcagctttagtcgaggcaaaatgccatacatataccccaagtgataaaagtcatatcgttggggtaaaaaaacgtgagttacaacttgttttaggagttactcataacacactcgaagattggattgagcaagattttctaaaactaggtgatattaatcattactatgatgttatccctagccaatcgattgaaaaatttttaatattaaacagacataaaaatttattacggaaaccacgtaccaaggaaatccatcttcatcccaagcaattagatttaaaggaaatttcaactattctcgacataaattatgaaactgcacgtaaattagcaaatacgggatggtttgatttggacagattatctaatgatgctaaagcagcagaaggatattcttttacaaaactcgaaagttttaagagtaaatatattctagcctcaacaattgcgaagaaattagacattaatccaacaaatcttgttgaaaaactagcaagtataggaattgttcctattcgaggcccacatatcgatgcttccctagtaaatatatatcttataagctctgttaatcacctaagaaaatctgatcttgaaaaaataatacagtatcctactcttacaggtaggcctaaaaaaagcgttactccacttaaaacaaagcaagattttttttcgttaaatgaagcagcagaacacttaaacattagtcccaataaagtttctgttttgattaaaaaaggaattctcgttaaagataccagttatcctttgtccattaaaattcccaaagtatccgtccttcgactaaagcataaattgctgagtgaaaactcaatatccactaagcaagcagcaaagctactcaattgctcagtgaattggttaggagaatattggtgcaaatctggttttttaacggtagaaaatctggtgtattggaaactcgttcagcaaaaagatgtcgatgaagtacttaagttgaaagaaacctatatgacgggagctgaagccagtaaattactaggtatgcctcactcacatattaccaatttacaaactcaggggttaatccaacctatttatcttggaacaggaactccaatacgtctttttaagagatcagatgtgcaatgtatgaagaacagaaacccataa

SEQ ID NO: 58230 - DNA, 453 bp, Acinetobacter baumannii
atgcatctttttttagactgtgagtttaatggctggcatgatcaaggtactggtgaactgatttcactaggtttggtatctgctgatggtaaatatgagttttatgaggcggttggatgcaaaaatccaagcccctttgttttacaacatgtcatgccaattttagggcaatccaccattcccatgtgggagttggttgataagctgagtagtttcttatgggaagtgcataatcaagaggagggccgcatcacgatcgtggctgattatccttcagatatagagttgtttaaccgtattctgctattgggacaggggcaatgtatcaacgtgccagtactaggctttttgctcgatttatcacttagtacaaaaaattccacaatccctcataatgcgttagcagatgctagagctttgagcgaagattatgcattaaagtatcctcactag

SEQ ID NO: 58231 - DNA, 747 bp, Acinetobacter baumannii
atggtgggtaaagatgctatcagaactcgaccatctagctttatttatggggatgaaacaatcccctatgaaagagtattgcgttctgcaaaagtgaataaaattttaataaaagtacatccagattgtagagtggtcgtccatgctcctgaagtcgcgtctgattatgatgtgttaaaagcgatacagaaacgtagtcgatgggtttatcaacaactacgtgcctttcgtcaacagaaagagtttattactccacgtcgatatatcagtggtgaaagccattattacctgggtaaacagtatttattaaaagttatagaaaataatgacgttccgagtgtaaaactattgcgtggcaaatttgaagtttatgtaagccgaaaggatgctgggcatattaaagatgtgctagataattggtataaggcaaaggcgaagagtgtatttttaaaacgtttagagcacgtcttggatagagccctatgggttactgaaaaaccaaattttcgtgttattaagatgcagacacagtggggaagctgttcacctcaaggaatacttgttttaaatccttatctggttaaagcacctactcaatgtattgattatgtgattttgcacgaactttgtcatttagctgaacataaccatagtgagaggttttatcagcttatgagccaagtgatgccagattgggaatcaagaaaggaactgttagataatatggctgctaggctatttagctaa

SEQ ID NO: 58232 - DNA, 609 bp, Acinetobacter baumannii
atgaaacgagatgatttacttaaatgtattgctgatacgggatacagcgttggattcggagcaaagaagcattttgctacttatgatcttgttgaaaaatcaccagggtggattagtttcctatcaatcgcctttggtatttattctctagcttttaaggagctatcaacaagttttctctccgcttcattcacaatactcggtgtagttagtctctatgtcagtatgtatgatgcaaaaaaaagtgaatatgagaaagcaggtattaagctgacgaaaatctataatcaactcagagttttgtattattcagctaaagggaaaaatgattcagatgatttaacccaattgattaacaagtatcgtcaattagagagccaatattgttcagttggtttaagtaagcagatattgtttagtgattggtatgcacactataaattcttttggcagcatcaaattgaatgggttgatgagcagaaagaatttaatttttttcgagataaagtacctctgagcttttatgtattcttggttgcagtaatcgttgtggctatttgctttatttataaagcaaaacttagtgcatgtttcgcagttttattttaa

SEQ ID NO: 58233 - DNA, 1308 bp, Acinetobacter baumannii
atgtcaatttcccaaatgtttcaagactttttaagcaatatcaaggttgctaatgaagaacaaatcacgttgcgttatcaagagataacaggtgcattaaacaaaaaatttcgtgataccgaatcaaaaacatcaaatcaattacaagttggttcgtatggtagatggactgcgattaaaggtatttcagatttggacatgttgtatatcatgccaccttcaaaatgggatgattataaaaatggcggtcaatcaaagttattaaaggatacaaaagatgcaattcttgcacgttatcctcgaacaactgtgtttgtagatcgattagttgtatgtgtccaatacacaaattttcatgtcgaggtacagcctgtttttgagcaagaggatggttcgtataagtatccagatacaaagaatggtggcagttggaaaattactaagcctcaagccgaaattgatgaaatgaaaagcatgaatgaggcaaaaaataaaaacttgcgtcgtttatgtaagatggctagagcttggaaaaataagcatggagtgggcataggaggcctattaatagacacactcgcctacaattttatgaaatcgactacgaattatgatgacaagagttatagttcatatgattgtttaagtagagacttttttaagtatttatccgaacaacccgatcaagatcactatcaagctttaggtagtaatcaggatgtcaaagttaaaagtaaatttcaaagaaaagctaaaaaagcatatgagaattcgcttaaagctattgaaaatgcaggaaagagttcggctaatgattattggcgaaaagtatatggaaattctttccctaaagcagcaactactatcgttaaatcaatgacattaggtgagttacgctatagacatactgaagagtttattgagaataaatacccaatagatatacgttatccgttaaaaatagaatgtgaaattactaaacatggtgcattcatagatttcttaagacattttaaaagaaatcgtaaaaaattaaatagcggaagaagtcttagattctatatcgataaaaatgggacgccctccagtttgccagagcaaaaatattctgttttatggaaagttttgaatcgtggagaggctgcaaaaagtcgagattgtattagagggcaaattgatgcggatctagggcagaatcaaaaaactgaaaccgctgattttaatggtgaacatatagtggaatgttacatcgttcaaaacggtgtagttgtagctcgtgatcgcatttatgtaccaattgaggaataa

SEQ ID NO: 58234 - DNA, 939 bp, Acinetobacter baumannii
atgatgcaaatgatgcctagctattaccgcattatggcgggtgcgaagtctgtatttgctcaagagtttctagagggcggctttattgccgccaactggaacattgaccaagacttaacccatgacttacctgatgactggcgtgagtttaatcatcgttttatccctgtttaccttaatgctttgcctgacaaaaccaaaatttcggcaggcttagcctgtggcatgttacacaccatctgcaaagggattaaacagggtgacattattcttacacctcgtggggatggtcattatctcgtgggtaaagtcatttcagactactactacgtgccttctggtgaattaagccatcgcagaaaagttgaatggtttgaacagactttacctagagaactgatgtctcaagagctcaaaaactcatcgggatcagtcggtacagtttgtaatctgaccaagtatgcagaagagcttaaaggacttattcaaggcaaagaaatggttgagcatctcgagcctgatgaagccctcgaagacccaacagcttttgcattagaaaagcatttagaacatttcttggtagagaactggtctaaaactgagttgggtgcaacatacgacatctataccgaagagggacaattggttggtcagcagtatccatcggatacaggtcctatcgatatcttggcaatcagtaaggataaaaagacgttgcttgttgttgagctaaaacgtggtcgtgcaagtgatcgtgttgtagggcaaattcagcgctatatgggctatgtcaaagatgagttggctgaggcagaccagcaagtgaaaggggtcatcattgcactagaagatgacttaagaattcgtcgtgctttgagtgtggctcagaatattgagttttatcgttatcagttgagttttaagctaaataaaagctaa

SEQ ID NO: 58235 - DNA, 1179 bp, Acinetobacter baumannii
atggagagtaatactattctttataaaccactaggtgatgtcattgagcttctaacggactatcatgctaatggtgcttatgaaaagttaaaagaaaatgtgacattattggataaagagaatcatgctgtcatgattcgaaccaccaattttgaagcaaaggattttacaaataatcttatctatatagatgagcatgcttatgagttcctcaaaaaatcaaaagtttatgcttctgatttaatcatgaacaaaattgctaatcctggcacagtctactttatgcctgaaattagcaagcctgtatcattaggaatgaatctatttttaattcggattaatcctaaaaaggctaatccatattttatctatgcctatttaagaaaaaatgagcattacgttaaatcttttgctagtggttcgacaaccaagactattacaaaagatgatgttagacgtttaaaaatttatacaccacctttggcagagcagaataaaatcgcccaaatcctttccacttgggatcaagcgatttcagtgactgaaaagctacttgaaaatagccaacagcagaaaaaagcattgatgcaactgttgctgacagggaagaagcgtttgctcgatgagaatggggttgagtttagtgatgaatggcaacgatttagtttgggaagcattgcaaaagtttatcagcccaagacaatctctcagtctgaattaagctctgatggctatcctgtatatggagctaatggcattattggatattactctgattttaatcatgaattagagcaaattgccgtaacttgtcgaggtagtacctgtggtgtggtcaatttgactctacctaagtcatggattacaggtaatgccatggtaattaatgttgatggaagtgttttagtagataagaaatttcttttttatgtactaggtttctctgatttaaaatatttaattactggctcaggtcagcctcagattactggggatattaaaaatcatgttgtcagtttagcgcctatcgaagagcaaaaaaacatagctgaagtcctttctctagcggatcaagaaattgagattttgcagaaaaaattggattgcttaaagcaagagaaaaaggcattgatgcaacaacttttgacaggtaaaaaacgtgtcaaggtggctgcctaa

SEQ ID NO: 58236 - DNA, 1524 bp, Acinetobacter baumannii
atggttactcaaattaatcaatataccgtcaataaagccctttggtcggcatgtgatgtattccgtggcacggtgagtgcagatacctataaagactatattttgacaatgctgtttttaaagtacatctctgatgtatggcaagaccactacgacaattataaaaacgaatatggtgatgaacctgaactgattgaagaaatgatgaaaaacgagcgttttgtactgcctcgtgaatctaatttctataccttgcttgagcgtcgttttgagcccggcaatggtgaacgtattgatatggctttacatgcacttgaagaagccaatggaacaaagctgaaagatgtaggcaaaagtgttttccaagatatctcgtttaatacagataaattgggcgaagaaaagcaaaaaaatacgattctaaaagatcttttagaagtgtttgctgtgcctgaattgaatttaaaaccaagtcgtgtcggttcacttgatgtgattggtaacggttatgagtttttgatcaaaaactttgctgcaagtggtggtcaaaaggcaggtgaattttatacaccacctgaagtatcggacttaattgcggagttacttgatccacaaaaaggcgacagtatttgtgaccctgcctgtggttctggctcactgttaatgaagtgtggtcgtaaagttgtatcaaatcataacagcaaagaatacgcactctacgggcaagaagcgattggttcgacttggtcgttagcgaagatgaacatgttcttgcatggtgaagataaccacaaaattgagtggggcgatacgattcgtaatccaaaattattggataaaaatggcgacttgatgttgtttgatattgtgacagcaaacccgccattctcattagataaatggggttatgagcaagctgagaatgataagtttgatcgtttccgtcgtggtttaccaccaaagaccaaaggtgattatgcctttatctctcacatgattgagacgctaaaacctgttacgggtcgtatgggtgttgttgtaccacatggggtgttattccgtggttcttctgaaggtaagattcgtgagaaattgattaacgaaaatttattagatgcggtgatcggcttacctgaaaagctgttctacggtacgggtattcctgctgcgattttaattttcaaaaagcaaaaatctgatgattctgttttgtttatcgatgcaagccgtgagtttaagtcaggtaaaaaccaaaacaacttaacagaagagaatattgccaagattgttgaaacctatcgtgctcgtgaaagtgttgataagtatgcgtctttgacaactttgcaagaagtcaaagacaacgattacaacctaaatattcctcgttatgtggatacctttgaagaggaagccgagattgatttggttgctgtacgtgcagagcgtgagcagttaaagactcaacttgctgagcttgaagttcagatggcgaagtatttagaggagttgggttatggagagtaa

SEQ ID NO: 58237 - DNA, 621 bp, Acinetobacter baumannii
atggcaaagttaaaaagattcctaaaactgagcgatcttgcagagatccgcacaggttttacattccgtgaaaaggttgaagaagtcgagtcaggcaatgcccacgtattgcagatcaaggatattcgttgcatcgcaacggatacatgtggctatacgctgtttgcggattcgttacctcaaattgattggcagggtaaggataatgcaatcgtattacctgaaagtgtcttgttgccctgtcgtggagaatatctcaaagcacattattttgtaggccatcaagatcaatcaaaagcattaccactcattgtgagtagtcaatttttgattttgatgccaaatcaaaatgtactacctgaatacttatgctggtacttaaaccaacctcatgtgcaatacgagttacgcaaagaaagtcagggttctaagatgccaatgctgagcgtatcaacagttagccagttcgaagttgaagtccctagcttggacattcagcaacgcataatcgaattaaaccgtctttgggagcaagagcagatcttgacccaacaattacttaaaaatcgtgaacaaatgatgatgggcatgtttaaacaactgctccaaggaaacaaataa

SEQ ID NO: 58238 - DNA, 291 bp, Acinetobacter baumannii
atgaaagtatatcagatcaattatgacctgcgtaaacaacgtaactatgaagagctttataaaaaaattaaagcttatggcacttggtgccgaccattaaaatcttgttggattattgcttctgaaaagactgctatgcagattctagatgatcttagacaggctttagatagtgatgatggcctcttagtgacaagactgaatccagaagccgcttggatcaatttagatgatgacaaagataattctacaacggattggcttaagcaagttgttggtaaagcaacctaa

SEQ ID NO: 58239 - DNA, 3741 bp, Acinetobacter baumannii
atgtctaaaaaaagaaaaaataataataaaaatgcaaagaaatttgcatttaacttattaaatgacaaaattttcgaatttgcaaaaccacaatctttaacgacaaagaaaattaatcaggaacacgaacatatagatatttcaaaacaaataaatgatttaaaaaaaatattaaccgagtatcatccactggatatatttaaaactcttttaatagctgagacatggctgggaaatcttaatgaatatataaaatttagtctactatttaatatttatttttcaataaaattaaatgattttggtgataaaaaaattaatacctatgatgaattccatcatgtactacaaaaaatttataagaaagtaccacataatccagctgttgaagacttcagtccaattgcagattggggagaagtaaaatatcaatataaagaaaacgtatacaatatattctttggctcttgcttaacggattcatacagttatatcaaagcttttgaaaacttatattcaaataatggtaaggctttagaagacttagaaaatataattaaaatacaaaataatttaataaaaaaagtaaataaagtagaaaatattgaaacaaaaatttcaataccagatgaaaattttagaaagaatatgcttaattggattgagaatattgatataaaaaatcataataaatcattagttataaaaaatggtgaaaacccaccccctaatattgacttctattcaaaatatatgaatgcagaagtaaacccttatctttattttgaatttgaaaataaactatatcctttttcaataagaaatcacatacctgtattaattgagaagtataatgaaaataaaaaacctgatttaaaaaacaccgcaaaaaatatctctttatttttaaacaaaaacttcaaaagaatattatgtgataattttataattagaaccgatgaaaatgttttaaacttaacatttagttcaatttttcaaagtcgagataaagtatatttcgttctagctttagataatgaaaatctacaaaacataaattcaatattaaggaaaattaagactattatgtctgatttggattggggacttcaaaagccgtattctttaaagaagattcaaccaatagataacaatgggaatctattaacatatgataaaattggaattattattattttaccagaattaacaacgagaaatcatttagttccatttataaaggataataatgttgaaataacatcactcaatgagtttacagccgtagttgattgtatagattcagatgatgaaattgatgaatttattgaatattataaaaaaaatcagataaagacaatatttatgggatttaatttagatggtttttcatcctttaaaaatagttatggtttacttgaagatggggctacctccttttcgatgattatgattaatacccatgacgctccaacatatagatatgaacaaatagttaaaaagtataataatttaccatcaacacttccaaatgcagattttcaatggtatgtcgaacattcttatgatgggaactatcatcttatcactcaaaaccatgaattaatgtcatggagtacaatattaaataatacatgtatacattttttatttgactttaatattattgatataaacaaatctgaattaaatccacgagtattagaattattttctcatgctgccgccgatgcattttcaagacgtacatcttatttaaaagatattaatctacctgaaaatattaccattaatttactcattggaagtgagataaaaaatatagatgataatttcaagccaaacaataatgacaagttatttataaaaaaagaaattattacgcacaaagataaaaatctaataattaatatatatttaaatttagattattgtctttatcatttcagatcaagtaccaatgcatctttccaaactgaaatttgtattaaatttttagaaatattcaatcaagttaaaaaaattaaaaatattgaagacttatatcattcattagaaaaaacaagcgactggcctttgagaatgacaatgggcaatataagtccaaaatttgatgttattgatagaaaacctcccacgataaaagaagtatattacaaaaaaggtagacagatattggctcaaatattcaaatctaataatattgaacctggcttatattcagatgtaaatattgctaaatcgattatgaatgatgcttctgaaaaatttagaacacatatccatagtattataaaaaaacatagcatcagctcaataattgagcttgctctacatgattactctcttttagtttcatcaaattatttagatatgtctaaacaggaaatgagtttaaaacatgaagtcagttataatagagcacagaaattagctgaatcagatacagttttcaaaaaaacctcacaaatatatagatatttaattgagtgtacattgatgcttcatagcacaagtatcactcctattaatgatgagaattattttactctattaggttcgatcaattggcttctaaatatgtatcactccagtgatgggttacattataatgtgggtgttgatggtatagaaatcgatttaacatatattccagaaataatcatttctgaatccagcttactttctcaggataaatacaatgaagaactaagtgcgtataaacttggaattggattaaatagtgctgatgaattatcttcagtaattcctgataacaactacagtttgttagattctgcattttatgaagacttagggtttggatttaaaaatttatttactatcttatatttactttcaaactgggggaatctgaatagttttagaattcaaactttctacaaactatcattttatgaattagtaaagggactttctaatctaattaccaatcctgatgttagaattgatgaaatagaaaaaatactaagttttttaattttagataattcaaaaattaatttacttgaaggtagtgatatccaacaatttgatgtacctgttggtgaccacagtaagcgtactaatcgactcaatataaagcctttaatttctctgaataatgaaattgtatggtctccggcttgcactcaccgtgcattaggtatttggacaacccacacaacagatggatatttacctgccgattttgatttcccaactatcaataaactagttgatgattctaaaacaattttagaaaaacgattagaaaataaagcttttgatattctatatagacgcacacaatatattgaaaaaggtgttgatttaaagaaaaaatttaagaaagaaaattatcccgatattggtgattatgatgtactagctttcttcccagaagctaattgttggataatggttgaatgtaaatacaatcaacctgcatattgtttaaaggatatgagtcgtttaagacaaagaatttttggtaaagatcaaaatgataaatcacaaatttcaaaaattaaaagacgttatgattttctatacaatgaacatgagaaaattagaaattcattacaatggccgcattcagattcatcttcagaattaaagattattaatctttatgtttcaaaaaatacttattggtggtttagatgtccaccctatcctgtcgaactttcctttgttcaagttgatcaccttgatgaatggctaaatcataatttttaa

SEQ ID NO: 58240 - DNA, 210 bp, Acinetobacter baumannii
atgtctgaaatcgacacaatgatagaagaaatgaatacttttttggttcaaaggggctatccaccttgtactgatataaatcaattcacatctgagcaatggtttgatttttcacaaattgctttaaaccagtatcgaaacttagcactatgggatcttttcaagaagtttggtatagacacagctagcagatctactattatgaggtaa

SEQ ID NO: 58241 - DNA, 1971 bp, Acinetobacter baumannii
atgaactatgctcattcagtacaattaacaatacaaaatgatcttattagcaagcttgataaaacgagtcttgtagatgcactaattgagctaatttggaatgcattagatgccgatgctttaaatgttcgagtaatttttgaaggtaatggtttagattcattgaattctataaaaataattgatgatggtgttggcattcacttttcagaagcaaaaaatatctttaaaaatttaggcggatctaaaaagaaaaataaacttaaaagtgatatgtatggccgttttttacatggaaaagagggcaagggtcgccttaaagctttttctttaggtgctacagtaaattggaaaattacatatcaagatgaaaatttagataaattatttacttataaagtagcaatgcatttaagtaacccatctgatgtgaaaatttcagatccaatagagtcggacaaaaattcgaagacaggtgttatattagaggcttatgatgtacctaagcaaataaaaaacttgaatgagacagctaaaaataaaattttagaaacttttgcattttatctttatgattataaaaatattaatttagaaattaatggtgaaaagttagatcctaaaaaaataatattagatgtagtcgtttttaatcttgattttattaattatgaaggaaaaaactatccatctaatttaaaaattacggaatggataagttcaaaacatgcgacttcaacatatttaagctgtaatcatggtattccttatctaaagttagatatgggatggagttatccaaataaaaaatatactgcttatattgaaagtgaagctattatagaaatggtcaatatgcatggtttagattttgctcctttaaatccatcagtacaaaataatttaggtttggctaaagaaaaaataaaaaaatactttagagaccaagaagctgaaaaagcagctaccttagttgagcaatggaaagaggaaaatatatacccatattcctctgaaaccacaaatattgtcgaacaagtagaaagacaagtatttaacattgttgcttcaactgtatctcacaacattgataaatttgaaaaaacaagtaaagaaaatagaaaatttcagtttagattattgaaacaggcattggaaacaaatcctaacagccttcaaacgattattaatgaggttctaaatcttaaaccagaggaacaagatgatttagctgaattgcttagggatgtatctctctcatcaattattagtgcatcgaaggttgtaacagatcgattgaaatttattaatggtcttgaaaatataattaattcaaaagaaggaaaaaagaatttaaaggaaagaacgcaattacatcgtatattagcggaaaactgttgggtttttggagaggagttttttatttctgtagatgatcaatcacttacagagtgtttaaaacaacattcgaaattgttgagtgaagatgttgatatattagaggcggttgagcatccaacaaaagaaagaggaatagttgatctgatgctttctaaaacaacacgaaataataagccaaatactgctcaccacttaattatcgagttaaagcgtccaaatgtaaaaattggtcgagatgaaattgctcaaattcaagattatgctgatgctataaggttagattcaagatttagtaaaacaaaagctaaatggacgtttattgctattagtttagatagagatatgaaattagattctcgttatattgatattgagaatggtattattgctcagaaagataattatattattttagtcaaaacatgggctgaaatttttgatgaatgtaaggctaaacttcaatttttccaagagagcctcaaatataaagcaaaggctatagatggtatggagcatttacaaaaacattttccaaaatatatagagggcgttactagtacgattcagtga

SEQ ID NO: 58242 - DNA, 474 bp, Acinetobacter baumannii
gtgcaacaaagccctgcggaacataaacatgcacaagcattatatgaaaaaggacgttattacattgaggatgatccagagcttgctaggcaatattttcagcaagccagcgaattaggctgtctggacgcggttgaatggatggttgctttaactgagcagtgtgaacaggcgcagtgggcagaactggcttttaaatatggtagcattgacaataaagttgcagaggtcttaattgtggaattgagaggtggttttggaattcaggaaaatcatcggctggcagatgaactgaaattacgtttggaggcgaccagttattgggatcaggtcttttcgtttgctttacctgctgctcaacaacactatgagaaacagatacaaccgcaaatggaagggctttttgatgaaattgcagaacagcctggttttagaagcaggatagcatcacatataaaaaactggtttaaatag

SEQ ID NO: 58243 - DNA, 396 bp, Acinetobacter baumannii
atggaatttaaaatacagttccaaacacaacttgcaacaagaacaagctgtattcatgttgacgttattaaaatttattgttttgtcggaaacacatcgttttgccgaaataaagaaagtgctttatctttaactaagcaacagaagccatcattcttacataataaaaatagcttcaatttgattttagtacttttcattgattctgaatggaatttaaaatacagttccaaacacaacttgcaacaagaacaagctgtattcatgttgacgttattaaaatttattgttttgtcggaaacacatcgttttgccgaaataaagaacaaagaactcttcatgaacatacaaatgattaatatcaattgcttgtttccctgtttaatgcacttttaa

SEQ ID NO: 58244 - DNA, 1845 bp, Acinetobacter baumannii
atggcagtttttggatattcatcagcaacttccgtcttacctggaagttcaatcagtttttatctcagtactgatgtacctggggtaatgaatttaaccatagagcgtataggaacaacctcagtatcatcaacaattactacaactctttttacccgatcacttccgactaccaacccatgggaaggatttggttggccagtttcaacaacatttaatatcccttcaaattggccttctgggttatacagacttgcctatatgtctcaagatgtgcttacttttgtgattcggccagtcattccggcggccgtttctaaggtgcttttacaagtctcttttctgacaccgaccgcctataatgcggcaggtggcaaaagtttatatgattttaatagtgtgggaggagctcgtgcgaataaagtttcatttaatcgatctggtggtacaccagcaagtaatgggcctgagtctattctcattcactggcttgaaactgaaggaatagcaattgaatattgctcaagtgtggacctccatagtatttcaaatctactcacgaactatgagtgtttgatcattgcaggacatgatgagtactggacaagagcaatgcgagaccaaacggagcagtttattgctaacggtggtaacctgatcatactttctggtaacacatgctaccgagctgtaaggttagaacaagggaaccgcatggttgttttttataaatttgctggtagtgacccgaatcaaaatgcttatgatacgactgtagcatgggcagagccaccattgaaccgaccccagaattcatttcttgggactggtttgactgaaggtgcttatggtggaacagcgacagcatatacaatccggtttccagaacattgggtgttcaacggagttttatccacaactacaacatcagcttttatgacctatgagactgatgctgcagcttatgtagatgaggaggagggttacccacgtgttactggagatgaaaatacaccactgactatgactgtgcttgcctcagcagagcttggttcatggactggtaaaccagggcgcgcgacaatgggtatattttctcataacggtacagtttttaatgctgcaacaacggactggatatatgttttgggtagtgatgccgttgtgactactatcacacgtaatgtattttcccgtcttaaacagcgtataacatgggattgggagaatattggatatgcaaatgattgctgtgcgctcaccgcattgcaaggcaaaattttcatggcaacaacacaaaatagacttttacagcggtaccctattggtgcagatgtagcttggcgtgatgttagtcatgcgtataatgtcgttgcaatgacagctcttggagatacactttattgtgttacatccgataatcaactttggtggaagcctgcttcagagggggggcagccttgggcttcaatggggactggcccgactggtggaaccaaggcgttagctgctacgggcggaatgctttatgcagttgatagtctgggagcattatggagggcgccagcaacgagaacaactccgtcatgggtagcaatgacgacattcacgcaggatgctactgttaatgcaatggctgcttatggagatattctcttcgcttcaactacagataatcgcttgttacgttcaaacaatgactttatttgtgaaagtagtgcatgggcctatatccatcactgtaactattctgctggtctggcagtagttgaatcaatcctctttgttgctacaacccaaaatcttctttggaaaattgacctttatggactccgtcagccttaa

SEQ ID NO: 58245 - DNA, 834 bp, Acinetobacter baumannii
atgatccaccattatacttcgattaatacattagcattaattttagaaacaaaaaaaattagattcactagacttgattgttttgatgacatgcttgaagctaagtccattcaaggtattgattttgggaaccggctatttgcaagttgttggacaaaagcagaggaatctattccacaatggtatatgtatggtgcccaattatcaggtgttagattatctttctttccagatgatttatttacttggcatgaattaaaaggtggaagaaaggttgaaaagaatggaagagaaattggattaaatatcattgaacctcttgatgctccttattctctcgaagatatttatggttacggatattcgcttgtaccagaaataaatatgaggaaaaattttttaagagatattgaatatgtagataacttagaagaaactttagaagaacttaagaaaaagattacgggcgataatgaaattaaaaatattgaaggaaatttcagtgattttggttttcataaatcttctgtatggagttttcaaaatgaatgtagatttatattaaatgttgtaaaattcctaccagatttaaaagtcagtgatgatgagtttgtaaatttttacgaacgaaatggtcatttggaacctttagaaataagaaatattgatttgccatataatccaaatgtattagataatttattggtcacacttggtccatctgcaacaaaagcagatgaaatacttgttagatctttacttgaaaaatatgctccgcattctagattagaattcagtagtttatctggtaaaattagaaatgtttatagataa

SEQ ID NO: 58246 - DNA, 318 bp, Acinetobacter baumannii
atgaacgacttggaaataaacggatataagattttcacaaatcctgatgaagctgtttatgcagctaaatcaaaagaagatgtctacaactatttcgtcgaaaactatggctcaactgaagaatgccaagatgaaacaaaagagcaatttattaataacttgaatgaggttgagcttgatagtgactgtgctcagagaaaccgagagtggattaatgaggatacggggatgatctcaacatcatcctactatcaggaatataaacatgttgcttctaaagatgaaggaacagaagtaatcgcatttttagtttggtga

SEQ ID NO: 58247 - DNA, 291 bp, Acinetobacter baumannii
atggtgaatgtcatgaatgcacatcctgaaattatcgaagtatcaagacttcaagctcttattaaagattctgtaaatgccctgctcccactttctagtgagaaagacacagtcatcactgatggcggcaattggattcacttgcgctatgtgggccgtggcactgaacaaatccaattagagctaggtgatcagttttctattaagacgaagattgcttacctaagtgaaactttaaaacggttggctgaaattagaaaagaactaggggcttccaatgcaagtacatga

SEQ ID NO: 58248 - DNA, 378 bp, Acinetobacter baumannii
atgaatataaaagccaacatagtcaaatccatgggattcgtaggagtagttagtgctctaactgctgtttatgctttcacccctgctaataacgaacctgtaacggttgcagctcctttcaaagttgaatcaatcgatccggagaatgaacaagcagtacttcaaactgcaaatgaaaagttcactttagaagttgattttgatgctcagtactcaattgatggcaacggctatcaagcttggcgtgaagttgaaattaacgagattaaagacatccgtgtttatgacgaagatggcgaggtcttagcttacgttgatcgtttggacgtagttgagattaaagaccttatcgaatcagggattagagagcgcatttaa

SEQ ID NO: 58249 - DNA, 957 bp, Acinetobacter baumannii
atgggtaccagtaaaaaaacaagcgataacaactatctaagcgtaaatacatccaactcgggtaccaataaaattggagaccaacaacacctatttagagttgactgtcagatagagatagacgatgtagagatgggtgtactagagagtggggttccctacttgacaggcaggggtcttgagaggatgtgtggtcttggacgagggccttttgttaggttaacgaataattggtctgaagagaaattaaaacctcgcggcatacaaataaatgagattctagaacaaaatggttactttgaagatgagctttatttaaaagctgaatataaaggtcgtgaaatcaacgcctttactgagccagtttgtcttgcaatgcttgagtattacgcttttgttgttgaggatccaaggcctcaagcaattcaggcatttagaaaccttgctagactaaaatttagagatttcgtataccaagccacaggatattcaccgaatcaaaaacagcttgatagttggaaattcttccatgatcgagtggacttaacaatttccgcagtacctgatggttattttggtgtttttaatgaggcggcatcgttaattgtaccaatgattagaagtggaattattgttagcgataaagtcattcctgatatttctgttggtatggcgtggagtaaacattggaaggaatgtgatttagagaagctacatgggaaaaggatcaattatcaacataattatcctgaatattatcctcaagctcagtcaaatcctcaggcgccctatgcttatccgttatcttgtattggggagtttagaagatggctgaaggatcagtatataaatactcaattgccaaagtatcttcttggacaagctaaaaaaggatctattcaagctcctttagcaaatcaggttctagaggcactctcacctaagcaactcaaatag

SEQ ID NO: 58250 - DNA, 144 bp, Acinetobacter baumannii; identical to SEQ ID NO: 48941

SEQ ID NO: 58251 - DNA, 249 bp, Acinetobacter baumannii
atgttattcaaaaaattcgctgttgctgctgctgttgctgctactttagctttcgttggttgttctaagaaagaagaagctccagctgctgctgctgcttctgaagcagtagctgctgcttctgaagctactgaagctgcatctgaagctgctgtagctgttgacgctgctgctgctgaaactgctgctgctgcttctgacgttgctgctgctgcttctgacgttgctgctgcttctgctgcacaataa

SEQ ID NO: 58252 - DNA, 990 bp, Acinetobacter baumannii
atgaagaaaatttttatttcaattgtatttggtactcgtccagagctcataaagttggctccagtaattttattagcaaaacaagatgcacgatttcaggtagaagttatttttacaggacaacatgatgaattagttcgagatgcgatagatttctttggggttgaaattgatcatcgtcttaaaattatgaatgctggacaaagcctgaatcagcttttaattcatggcttaacgcaacttgaaaatatctatacagatggtcaaaaaagagatgcaattgttattcaaggtgatactacaaccgtgttagctgctgggctagttgcattttcaatgaagattcctgttgcccatgtcgaagcgggtttacgttcttatgatttagatcatccatttcctgaagaaggcaaccgccagttagtttctcgtattaccaaatggcattttgcccctacagaacaatcaaagcgtaacttgttaaatgagcagattccaccttcattgattacagtgacagggaatacggtagtcgatgctgtgtatttaggaaggaaactcatagctgaaaagacgggtttgaaaaatcaacttgagccttacggaattgaattaaaacaaaatgataaagttgtacttataactgctcaccgccgtgagaattttggcgaaggaattcagaatatttgtaatgctgttgagtatttagcaaaacatcatcctgatttacattttatttggcctgtacatttaaatcctgctgtacataatgtagtgcacgataagtttaaaaatcatgctcaaattcatcttgtgaagccactcgattatccgagtttattggccattatcgaccgctccacctttattttaacggactctggtggtttacaagaagaaagcccatcatttaataagcctgtcttaattttaagagacacgactgaacgcccggaagtggtagaggtgggagcaggggtattggtttga

SEQ ID NO: 58253 - DNA, 1221 bp, Acinetobacter baumannii
atgaaaaatatcaaaacaataaactctataacacattcaatattactgatgggagcagtgatctcttctttgggaatgatcggtataagctcagtttatgcacaagagcaagtcgaccctgcatataagcccggtaaccctatttatgataaatgggatagattttataaaattgaacagtctcaaccgcaagaagcagaaaaaatattagttgagcttagtaaactgacaccaaccgatattaaagtctggaaaagtcttacttatttacagattcggcttgaaaaaaggaaagaagctttacaaagcttaaggcaagcaagaaatttagctcctcaagatgacaccttaaaattacaagaagcttatttgctgaatcagcagaaaaaagatcgtgaagcattggttttatttaaagagttaagttcctcttcagaccctgaaattgctgctaaagcatctcaggcagttaaaaatttaagtgggggagaagttaaaccatattttagagatatttattttgcaccgtcttatgagtcacgttatgacgatgttatttttcctttaaaaatgaggtatggcaaaaacatcgataacgggcgagcccaagtatatgcctttcttaatttaaaccgcgatactcaatcacaaggtggggtccgacctgaaattattgatgaaaatgcagccactttagggttaggggcaaattatcaaccgtggacttccattcctgtgcgagcctatgtcgaagttggtggaagttatgacttgattgatagaaatagaaagcgatttcgtgagagtgttgtgggcggtgtaacgggttatcaagaatggtattcacaatcaaactgcgatcattcactttgtttagataattattttactgacttatacggcaatgtcgcgacttattcgagagaggactataacgttattggggacttacgcttacgcacaggtttaaatctctataagggtgagagtgggactgtgcaggcttatgtgaaattgcatggcttagcggatagcgaagatgaatattacaataatttatttgaatatggtccaggcatttcatggcagccttttaattatcaaccgataaaactacgggttgaacgtctatatggcaattattttaaagacgtaccggttaatacaaaagatcattacaacaatactcgtgtagaacttgttttttataaggatttctaa

SEQ ID NO: 58254 - DNA, 1479 bp, Acinetobacter baumannii
atgaagccaattcagtctcctaaaatttttatatcttatagttggacaagtcctgaacatgagcaatgggtaatagatctggctgaaaatttaatgcaggatggtattgatatcgcattagataaatgggaactacgcgaaggagatgatccgattgcttttatggaaagtatggtcaatgattcatctataacaaaaattattatgatcattgatagcaagtatactgatcgtgcaaatggccgccatggtggggtggggacagaatcaacgattttatcttatgagctctacaataaacgtgataaaaataaaatagttgctgtaattgcggaaccaggagcacctaagccaaccttttatgcaggaagattgcatgtagatttatcgagttctgataaatatgcagaagaatatgagaaattagtgcgatgggcgtttgataaatataaatatgaaaagccaaaaactcttggaactgcgccaagttttattgtggcagaggatgatggggttgtcttatttacaaatactcaatttaaaatggcattagatgctgttgagaagggtaaaagtaatgccagtagtttgataaaacaatatttagataaactttacttagagttacctaaatttgctctttctacaagtgaagaaagtgcacttgaggatgcctttaaattgaaaatagaacatttccaaccccatttatatgagtttaaaaaaattgttgaagcggtttgtattcactctaatgactcgaaaatttttaagcatttccgtagttttcttgaaaatattctaaatttactaacagttgatccaagccaaccggggcgtttaatagcagatatagagttatttggttttattaattatcaacttttcctctcactcgtaacaattttaattaaaaatgagcaatttaatgaacttaaagaaattctggatgagctatatatggtgccagaaaatttttatcatcgttattcatcagaaaaaaaatatacaacgtttaaaatttttaaccctttagaataccaatttattaaaaatcatttaaagcaaagacattactctcctttaggggatttattaaaggattatactgataataaaattattaactttgaagaaatttgtgaggctgatgtacttctgtatattaaaacattggcacaatccactcatgataatgatttttataaaaaagtatggtggcctcatgcttcttattatatttcaatggatagatattatcctttaagagtttttgttaaatctgaaagagcttcttattttgaagaaataaagaatgtattaaatgttaaagatttacaatttatagtaaacatactaaatattgatcagcaggcagggtatggttactctaatccatatattccgaaatggaatggggcttttgcaacgtttgatctaaaaaccttttctaatttggaaaagttacaacctttgtaa

SEQ ID NO: 58255 - DNA, 306 bp, Acinetobacter baumannii
atgcctaatcaaatcaattctaaaaatacacctaaaacttatgatgctagtgacatgcacaacctagcttcattagctgaatcagatatgaactggatgagtgtagcaatcacagacattaaaaaacgtataaaagaaattaaaagtgaattaggtgataacaatgtgcttggtttgtattatttagagtatgtcgtagatatgtaccagtatatcgctgagaatcgcttacatcattattccgaggaagccgaagcctatcaagctgaacgggagaaaatgaaagggggtagccacaatgcttga

SEQ ID NO: 58256 - DNA, 723 bp, Acinetobacter baumannii
gtggcgacattaagagaattgcatgatttaaggggaaaccctgatttttcacactggaacactgtcaaattattttcggttgctgaggccagtctattaacggcagggttagagccttgtgagtataaccatttagttgattatgagttgcgtcaaaaactacttagtgaaaagcctataaattggcaacatgctttaatgttgattagatcaattattgaagctatatgtactcatgaaataaagtccccatttataaaaattgaccgcagcgactacaacaaccaatgggatgacgttattgagcaggccaaactaagtattgatgatacaagctcaattatagcaagtgaaacaaaaatccatagggatgagttgcataaatggctaacgagaaatggatatttttcacaaccacgccaagccaatattgaagtagtacaaaagaatcagccccaacaggcaaatgaaaaagaaatcctattattacctgaaccaacatacacaacgccagcacttgaagcgattaacggtgttattcgtgagttttggattagttacgaccctgataaaaatcaaccaccacctaagcaaaatgtcgtaaaagcatggattgcagaaaatcaccctgaactggatagcgattatattcaaacagcaatagacaaaatttgccgtcaccccagtgcaaaaaatggaggaaatagaaaaattaacccataa

SEQ ID NO: 58257 - DNA, 900 bp, Acinetobacter baumannii
atgactgcaaaaaaaacacaagacaccactgaagtaaaagaagcagtagaaaacaatgattgtttcatcattatgcctattgcggatcacccagactataagcaaggtcatttcaaacgtgtttatgaagatattattaaacctgcttgtcaagcagctggataccgtgcagtaagagcagatgatgtagctcagacaaacttaattcatctagatattcttcaaaaattacttgaatcaccaatggcaatttgtgatctgagtacacgtaatcctaatgtattgtttgagctaggattaagacaagcttttgataaaccgactatcctaatacaagaagtaggtactcctcagatttttgatattaatttattccgctatactcaatatcgaaatgggttagattatcgagatgtaatagcagatcaaaaagctattcaaaaggttatagaagaaactaaacaagcaattgcagatggaaaaagtgtcaattcaattattaaactactttcaataactaatcctgcaaacttaaaagatactgctagttttggagaaaaagactatttcgatatattacttaatgaaatttctagtattaaaaatcaaataagtttgtctaaagataaggctgctagtaataaaataaatccatttcctgatacttacgcaattgatttttcattaggtacggaagaatcaaaaatatcagaatattttgattatttaaaaagtttagggttaataggtgatattcgtaatcagtttataaataaagtgacgaatagagtaatgagctatgagtgtgatgctaggtcaaatttcaaagaaaatgattttcgtactattgctcctttatttgaagtaaagattcaagacattcttctattacctttttaa

SEQ ID NO: 58258 - DNA, 1203 bp, Acinetobacter baumannii
atggcagataaaaaagcagaggcattaaaaattgttgaagagggtttgaaagaattagagtcaccaaaaggtagtgttactgttggcgttcaaaaattatcacgagctgcaaacctactaaatgaagatgagataattgcctggacacaattacacttgggcaatcaagtatatacaacagcattagataatttttttaaaaaggttgaaattgaagcaaaaaagttaaaaaataataatcagccagttaaagttaatgctactgatgaactatttaagaaagaactaaaaaaaataattgacctccatctgccattaacggaacttgatgaatcttataattttaaaacagacccgaaagctggaggatttaactcagtagacttcattgaaagtaaattaaacacattaattagagaaaaaattggtaatgatggctaccattataaaaatccattacaagcccatataacgtatatcaaaaagtatgcttttaaatacttaacagatttacatgaaaaacttaaattttctggaactattacatccagttttgatattttaaaaaatgcagtagatgaccgtttactcgacctaaatcctgaaattgctgaacaactcatgttagcttttaaatcagtttcctctagtaataaagaagaatggtcacatgccctcactacatgcagacgccttttggaaagtcttgcagataaattatacccagcaagtgatttagtgataggcaaacgtacttttaaacaaagtcaatttataaatcgtttatggcaatttatgaacgattcaatcgaatctgaaagcaatcgtgaattagcacaagcacatgtgaattttttaggctcgtggctcgaaaaaactaataaattgacaaataaaggggtacatgatgatgtatctcaacttgaagcaactaaggcacttttccatctttatttaatgcttgctgatcttttggactacttagatccttctgtcctatcaaaaacgtcaaaacacaattttaataatgcaactttagatgaaatcgaagccttcttagatattaaaagagaagttgccaaagaaattatcaaagctcgctctaataacaagggaattttaactcttgaacaacttgcagaagttaaaggtgtggggccgaagacattaaccacagcaaaagaagtttttgaatttaactaa

SEQ ID NO: 58259 - DNA, 687 bp, Acinetobacter baumannii
atgaaaaatatagaaagtctcattccatttattaaaacttatttgggtgaaaccgtaggtggtttcttaattattgttttaattttatcagctgtttataaatcaatttttgattcgggtttatttcaacatttaattcttttagtgaaatttaaacgttggaaaatcgataaagagattaaggagctaatagaattaattgatcatgcacatcttaaggaaaatgttaaaaacaaatataaagctaaactgagatctttatatcttcaaagacaactgcttactaaagaaaaaaaagtcgaaatccttgatattcttagtagctatgtagatgaagtaaaagctgtaagactctataacacctgtaaaaaagttctaagatataaatctcactccaataaacttgattttaaactcggtcatcaaattaccgaattacaagccaaaaaacataaaaacatggctctaattgcctattgggtactggccacacctgctgccgtttgggtaatgtatgaacattatcatttaatttataagccaccgatcagtgctggttctaatatctcatttttaattatatttggcatttacgttatttggattttttcattagcatatatattacgtcgttttttaaggcgttcaaatgcttgggaactattgaatatgcctagaatacaatag

SEQ ID NO: 58260 - DNA, 1557 bp, Acinetobacter baumannii
atgattgaaggagacttagcacttagtaagcgtattgatacaacagcagttgagctaaataacttacaggcttatgcacagcaagaggttcaagctcgaattgatggtgatagggtaactgttcaaaaaatagataactatatcgcaagtaatgatagtgctcttgcaactgtacgtgaatctgcacaggtagcagttgagcagtcatctgcaaatgctgaagcgattgatttaattaatcttgagcttgacgataaagcttcaacgggacaattgacgcaagttaagtctgatattaagaatgtagatgacaaagttattgcccaaactacaaggattgacggtgtttacgcgcaaatcaatccaccattgatcgggtcagaatctgacttaatcggaaatgaaggaggttatgcaggcgtatggtcagagcaatctgcacgtattgaaggcgatttggctcaatctaaacgtacagatcaagtgtctgcacaattgaatgacagcaatgctttgtttcagcaacaaatcaatgcaaatgctagtgctatttcttcaacgataaaagtaacggaaacgttgcaaactaaagtcggtgagaatagtgcgtctattcaaaatgtcagtgaaagtgtggatggcatctatgctcagcagtttactaagttcgatgtaaatggccatgtttctggtcatggatcaatgaatgatggtacgacttcaactttcatattcaattatgatgcaattcagtttggtacgcctgtgggtattgatggtattgagccaaaacccttaatgacattgcaaaatacgcctgtgactttgcctaacggtactgtcattcctcgtggtttgttcattgataatgcgtcaattggttacatcactgctgacaaaatctacgctacaagcctaagtgctattagtgcagatttgggaacaattaaagtcaaaactgcgaatattgaagatggcgcaattgatactctaaagatcaaggatgaggctgtaactgtaccgataggagttaaagcaattgatatcaaaactatcaataatttttcaggaggatcaactggtgggttgcctaataatgattttaacaaccacctatcagcgtgggaaaatcatataggtacacttttacaagtaacgttaaatagaagtggtggaaaagttagaattgatgcttcagtaaatatttgcacacctacttttggcgcttttagtgtaagtgacggacgaggtaatccaattgcagcaaatgacagagccatggcttctttttatatttctatatatcggaatggaaatttaattggacggggttcactaggcgcaaaccttgagacaggaaatattaatgtcaatttcaatggtactgcagttatcgtctctgctattgatgatgttggtacagtgggcaatgttacatatacacttagagcaggttttgctcgacaggagggtgttaatatcccattaaatatcagttccaacaatacctttataatcacttcaagaacattaagtgtaattgaaatgaagaaataa

SEQ ID NO: 58261 - DNA, 1005 bp, Acinetobacter baumannii
atggcaagtgcagaacaattgaaagcattattaaagtcacacatggatggtgatgatgctcatttctattcagttgcaatgcaagtcgctgctcgtgaagcaaaaatggggcatggaaaattagcgcttgaactgaaaaaaattatcgataatgcgaagaaaaaaagttcaatagacaatacgatagaaaaaaataaagctgttattcatattgctcagcctagaggagaagttgcaaacttattagaggtttcctttcctatacttaaaattaatgacatgattttaacgcctccagtggctagacaattagatagaataattttagaacaaagaaatgtgcataaaattaaaaaccatggtcttcatcctcgtcggaaattgcttttagtaggacctcctggcgcagggaaaactatgacagcatcaatgctagctggggaactaggtcttcctttgttcatcgtccgtttagatgctcttattacaagatttatgggtgaaacctcagcaaaactacgtcaaatttttgatgctattagagatactagaggggtgtatttttttgatgaatttgatgccataggctctcaaagaaactctacaaatgatgttggagaaatgcgtcgtattctaaatagcttcttaatgatgatcgagcaggacaactctaatagtttaattatttcagcgacaaatcatcctgaaattttagactatgcattatttagacgttttgatgatattattgagtatgaattacccgatactgatcaaatcgctgatgttttaaaaattagactaaataactatatgaataatcgtattaattggaaaaaattagcagtgcatggtattggtttgagctatgctgatataactcgcgcatctcaagactctattaaagatgccgtaatccgtgatcttaataaagtatcaattgatgatgtaatctttcatttaaatgaaagaaaaggcgccaatttcaataattttgtaaaataa

SEQ ID NO: 58262 - DNA, 339 bp, Acinetobacter baumannii
atgcaaattaatgctgataatcttcaatcaaaatcaattataaagtttgtaaggaaagaatattataaggaaaatcaaaaagattttgcaataagggttgggagtaggcaatcactaatatcaaaatatgaaaatggagttgtatctccaccaagtgagcttttaattcaatgtatgaatatttatatgcgaaaaaaagttattcaagaagagggtttgaataaagaagtaagtacgaatattttagttggtcttgtagaatccctactcggaggagatgatcaagagcaacaaaggcgaatagttgcgaatttaatcaagattatatccaatacttag

SEQ ID NO: 58263 - DNA, 789 bp, Acinetobacter baumannii
atggcacaacaggcagttgcccagcatgccattagtattcgtttggcttgtaaagcatttggcattagtgaaacctgctaccgctatcaagccaaactcagcgatgacaatgcactcattgctgaacagctcattgaactcactgaggaaaattccgattggggctttggtttgtgcttctcgtatttacggcatgttgagagttgctgctggaatcacaagcgggtttaccgcatttactgtgagttggcactgaatctgcgtattaaaccgagaagaagactaaaacggcatgcgcctgaaccattgaaagaacgaatccgagaaaatcaggtttggtcattagattttatgcatgatcagctttccgatggtcgcaagtttcgattattgaatgtgattgatgattaccgccgcgaaggcctagccattgaagcagggttctcattgcccacaatcagggttattcgtacgttgaatcaattgctggagtggagagaaaaaccgttagtgatccgatgcgataatggtcccgaatttatcagtcacgaatttgtgcgctgggctactgagcacggtattcgtattgaatatattcaaccgggtaagccacagcagaatgcgtatattgaacgctataatcggaccatacgttatagttggctgagcaagcatttatttaatactttggatgaagtacaagattatgcaacaaactggttgtggcattacaaccatgaaagaccacatcaagctaacaaaggaaagccacctctaatggctgcttaa

SEQ ID NO: 58264 - DNA, 267 bp, Acinetobacter baumannii
atgaaaacatctaaatttactgacagtcagatcatgtccatcttgaaacaggcagaatctggcacacctgtagcgaccctttgccgtgaacacggcatgagtaatgcgactttttacaaatggcgtgccaaatatggtggtatggatacatcattaatggctcgactgaaagagctagaagccgaaaataccagacttaaaaagatgtatgcggaagagcgattaaaggccgaaatcatccaggaagcgatggcaaaaaagtggtaa

SEQ ID NO: 58265 - DNA, 2838 bp, Acinetobacter baumannii
atgactaaaagcacaaaaaccaaagtcaaagatacattgtcgcagttcttgtttaatcaaattgaatcaaatcctgaatatcaggaatgggctagagattatcaactcccgacttacatcaccgataatctttcaaagtcattacgagattatcaggaagttgccatcaagcactttatttggctatttgagcaagatccaaatcaagccaagcatttgttgtttaatatggcgacaggtacgggtaaaacgctcacaatggctgctgctatcctgtatctatatcaaaaaggctaccgcaattttgtattcttggtacaccagttgcaaattaaaaatcaggcggtaaaaaacttcacagattataagtttgcaaaatatctatttaatcctaacggggttaaattaaatggtaaaaccattaatattcgtgcgattgatcggtttcaagatgcccaaaaagatgcgattaacttcatgtttttcagcacagctcttttatataatcgcctgacagaagacaaggaaaatagcttaacttcccaagactttgtggacaatgctgttgttgttattgccgatgaagcacaccgtttaaacgtggatacacgtaaaaaactcaagaaaactgaagaagaagatattcgcaattgggaaacggctgttcaatcagcaatttatgctcgtcccgataatttactgctagagtttaccgctaccgtagatttagaaaatccactcattcataagaaataccgtgataagttgattcatcgttacgattttctgcaattcaataaggatggatacagcaaagaagtcggcttcctctataacgaagaaacacagattgaagatcaaaagcgtttattggtcatcaatgcagtcgtgatgagtgaataccgtagattactggctgaacgagaaatgaatgttcaggttaaccctattattttgattaaatcaaccaaaattgccaagagtgaggaagatcgggagtttttccataaagtaattagttcactcaaaataagtgacttagatcatttaaaaaacttaagttcaggcacacagcaatcactcatagaagaagatcgaaaccgatttatctctcaaatgtttagttggcttggttcacgaaaatcagggctggtatcctctcaagaccctaatggcttaaatgcgtttattgctgaaattaaaatgcgttttcgtgaagataacagcatgacgtataacagccagaaaaaagagaaagctgatttacttcctctactcgatagtccaagaaatgtgattcgagcaattttttctgttaatgcgctcaacgagggatgggatgtactcagcctatttgacattatacattttgatatttcagaatctaaaaaagtatcgctacaagatattcagttgattggtcgtggtgcaagattgtgtccctacaaactgccaagagcttataagatctcccaaagtggagggctattcgatgaagaacatagttatgagttcgacccattcaaacgtaaatttgataatgcaccgcatgagcatgggcgtattttagaaactttcttctatcactttgttaaaacaggtacgttcttagataacctgcaatatgccttactcgatgagggaattgtcaataaaagtatggaaaaacggactattaagctcaaatccgaatttctcaatagtgaaacctataaaaaaggttttgtattagtgaatcagcaactataccgcagtaaaacaacggatacagaaattgatgctacttttaaaagggaaatcaaagccagtacctaccgacttcacacaagaagtttaacggacaaagagcaaaataaaattcaggcagggattcagtataaaaccattcatttaaccgatgaatacttttcaccgttgattatccgtaaggcattaatgtcatcagaaaacaatttctttcgatttaataatctaaaaaatcacattgttggaattaaaagtattgatgaattgattaatcagtacctacccttgtatgagatcaaatattcatattcagagggtaaagacatctatcaactggaggcacacgaaaaactacaactattagtcggtgtgattttacccgaagtgcgtaaagctatagatcggcacatgccaaaggtcacgggaagtcatatttttagaccaaaatcactatcgtccatctttcagcaagagaaaaatatttatttggtttcttatccagctggaaatgaaaatggagaaaaaacatccattgcaccagatgaacgtgcacaagcgcagtcaagccatgataatcctgatctacagtttgatgttgaagctgccgattggtacgcctacagtgagaactacggcacaagtgaagaaaaacgttttgtaaaatttatcgcaacccaaattgatgaacttaaatcacactacaagggtgctgaaatttatctcattcgtaatgaactggattattggctatttagccccaaagatggtcgtcgattcagcccagattacatgctcatcatcaatgacgctcaaaatggagaaatgtactatcaatgcttaattgagcccaaaggcggtcatttacttgaaaaagatgaatggaaagaagacgtcttaattagtttagatgctgaaagccaaattatttttgatacagaacaagatgattctcaaaactatgttgagttcttaaatgaagtcaaatcgcatggatataaagaggttaaatgtttaggatttaaattctacaatactgatcctagagatgaatctgattttgctattgatttccgtacaagaatgccgagttaa

SEQ ID NO: 58266 - DNA, 1371 bp, Acinetobacter baumannii
atgaaaaatcgccttgaagtggcaagagatttactaaaagaagaaggcgtaatttttgttcaatgtgatgacaatgaacaagcttatttaaaagtgttaatggatgagatttttggacgtagtaatttcttaaaccagatttcagtaaaaatgaaacaaacctcaggtgcatcaggtggtggtgaggacaaaaagttaaaaaaaaatattgagtatattattatctatacaaaaaacatggatggtgattcaggttttaagaaatttaatgaagtgtatgatgaagaagacctctttaccgtaattaagcaaatgcgtgatgaaggtaagagttggaaatataccagagtaataaagagcttaggaactagaaaactcttaaagactatctatgatggctcaggacaacctattgatttatatacacatgaaaatgttgttattgaaccaatatctaaaataagtaaagaagaaaatatttcagaagaggaatgttatttgaaatattttgatttcatattccgtgatacaaatgctcaaagctctattagaacaagagtaatggatgctattaatagtgaatatgatttcgtaagtattgactacactccaatatcagggaaaagtaaaggaaaaaaaacaaccctatattataaaggaaataattgtgacctcattgcatggcttaaagatgtagctgttaagaaaaatgggcaacttattaaattagaaaaattaggaacttattgggatgggtttccactaaataacctaacaaaagaaggtgacgttcttttccctaatggaaagaaaccagagcaattactgaagaaaataatagaactagcaactgatgaaggtgatatcgttcttgactaccatttaggttcaggaacaacgtgtgctgtcgcccacaaaatgaatcgtcgctggattggcattgaacaaatgaactatatcgaagacattacattaaagcgattaacaaaagtcattgacggtgaacaaagcggtatttctaaggccgtgaattggcaaggtggtggttcatttgtttattttgaactaaaaaaatataaccaagactttttagataaaatcatagcagccaatagtaaaggtgagctagatgacgtttacactgaaatggctaaaaatgccttcttgaggttttggttcgacaaaaacgaatttgaaaaagatgaaaacttccgttcattggatttagatcagcgtaaagaattactgatcggtattttagatgagaaccaactttatctgaatcatgcagatatgcatgatagtcgttaccatgtcacagatgaagaaatggctttaaccgatctattctatggggcgaacaatgactaa

SEQ ID NO: 58267 - DNA, 333 bp, Acinetobacter baumannii
atgtctgataattcactcaagaaaggtagatatactcgctatagcaataaaattggactttattcaacaagccaagaccaaattggtttcttgaataacaataatgatgtagtcctaagtttcccatttaaagataccattcttgaagctggtatgagcaaagaagatgtaggccgtgaagagcgctttttacaccaagaagtcgatagttctgatattgatacattatttgaaccaaaagtattgacaaatgtcaaatattcaggaattcaggaattcaggaattcaggaattcaggaattcaggaattcaggaattcaggaaaggctatag

SEQ ID NO: 58268 - DNA, 354 bp, Acinetobacter baumannii
atgtcattttggcaagtctgggagatacaagatcaagaaaaaaatctacatgcgattgaaaaagataatagcaaagctgctcgtagagagttggatcaatttattcgagacaccattgctgatgcaaaaaaaatggcgaccaactctggtgtgtcaaatcgccagcgtttatctgaaattaaatcgaataaaaagtctgttcgtgaaaatgagaaattatcaaatacttccttaaaacctgataaacaccctaaagatcagggaactattatttcatttaagtcaaaacaagatgaatcaagctatccgcagttcgttccaggtctttttgatgatgaggatgatcagtcatga

SEQ ID NO: 58269 - DNA, 414 bp, Acinetobacter baumannii
atgtctctaaatcagaaaaattctcaattgtatgggaagaaaaataatttgtttaaaaatttgaaacttaaattaataactttgggtgtttcattgttagttatgacagggtgtagtcacgaatatacaattgagcctggtagtcttcccgtagcctatgtaggaaagacgtataatcagcaattgaaaataacaggtggtaaagtctcagaacaacattttgaattaacttctaatatttcggaaaatcagggagttaaaattactcctgtagatgatatagacggatacaatcacataaaaatagaaggtattcctaaatataaaggaaaatacaaaattgtaattaatacatatttttatgggcgaggcgatgataagctaactaaaacctatgaatttgtagttaaataa

SEQ ID NO: 58270 - DNA, 156 bp, Acinetobacter baumannii
atgtataaatattttttaattgtgctcagcctttatggatgtacaggaagagattatcatattgagcctaaccaaattcctgtgggtacagtagctaagttatataatcaaaaagtagatataagtggaggtgtagttatgccttatactgtataa

SEQ ID NO: 58271 - DNA, 219 bp, Acinetobacter baumannii
ttgtatcatcctagccctactagttatacaacagatgatgcaattgctgatgctggagggcaatgggatagttatccaaaagaacacagcaatacatttcatgaaactaaatttagtcacgcttggtttagcaaaatgatgcgtgaaacaatacctagtatatctaaatcaccagagcaaatattgcaagccgaattaaaaaaggttcaagtaaaatga

SEQ ID NO: 58272 - DNA, 927 bp, Acinetobacter baumannii
atgtcacaatttgaaattcgcccacaagaaatatatttattagaacgttatagttctcctgcctattttgaagagttagttattgcttttaaaaatatgttagatgcagcggagaatgcattagagctatttatgcaggatttaccttatgactatcgggataggcatatttcagaacaacctgatgtcgtttggggagagcatgtattacctaactttagatcgacaatgcaatcgttacattatggctataagcagttattagatggagatttatcagctttacaatttgcaggtaatgttgttacagattttagaaatcaaagagtagattattttccagattggatggatgaagctaacttagcagtatttgatgaagaacaaatgaaggcaagtagacttgcatccaatattaaagctactgtcatgggtaattgggtaactggaaatctcagccacagatacaattctcaatctagaggcgagctaaatttacctctatctttaccaatatatcgtttaaatttaaatgttacggtaaaaacaggtgaaactgtaccagaagatggtatttatattcctagtattcaagatgctagtgcccaattgttattaaaagggcatgatgctatcgaggcgctagtagggttaagccgtagtggtttgcaatatgctagagaagaaagtacaacgtggttgttggttaaacgcattgcagatgaaggtggttcagtagaaacaattcaagctgaaaacttaaaaggatatgcaggtcagagttgtcaacaatcaggtcattggtggagtcctgcaaatcaatcgcaaactcgctattttgaaaagggcgaaatcttccctgaaattccaaataatgcttggggtgaaacgatttggtatttggaagtgacaaataaagcagaataa

SEQ ID NO: 58273 - DNA, 1509 bp, Acinetobacter baumannii
gtgactgattttttaccttcaaaacaagacttattaaacgctctagctacaatttcttctcctataaacaaagcgataaaaaaggggcaagaaacggctagggatgtagcagattggttatgggtagttatacaaggagattttgccgaagaacaaactaccgcacaaacagtaacaggaacagttatttcaatgattccttttgtggatcagatttgtgatgttcgtgatatttgtgcaaattgtataaaaattaaagaggacagtaataatccctggccatggattggtttaattctaacgttgattggtttattcccagtattaggatctctatttaaaggtatttttaaagttattttagctcctgtacgacgttttatgctgaggccagctacaaaagctttaaaatttactgggggtaatatttataaactggcagaacctgcgattgaaagcgggattacggagatgaataagtttcttgcgcgacctgctgtaaaaagaacaataaaaaattcaaatattacaaatatctataaagctatcgcaaagaagattagagaagttaaggcaggaactaataagcaagctttattatccgtatttgatatattgatagaccacttaaaagagagcgtcaagtttattgagaagtatggtagtaaagcgattggtgttaaagcaaaacaaatgctgcaatccgtgcttgatattcgtaatttagcaaatcaaaagttgggtgaattcttaaaaccagtacaagattttttagaaaaattggctgttagaattgaaaaagaaggtgatcagacatttaaggcgactacgaatgttaagaatatccataattttcaaagaataggccaaaatgctgaactaaaaagtgttttaaataataaacctgtatgggtagatatcgtagcaaaagagaaatttaaagctttgtcagagagccctttgattcctaaaaactatcctgatatttcagaaatgtctaaaaatcgtgctttacgagatgcttttaaaacttttcatgatttagaaccaatccacctttcagaaggggagattttatatcgagtgcttgatcctaaaagtgctgataatagtatttgttggatgagagcatctgaatataaaaagcttaaaagtaaggcagattggcggcgttattttgcggtgtttgcttcttggaataataatggggaggttgtgaaataccgagttcctaaaggggggatgaatgtctgggaaggccctgccgcaagtcagacttttaaaaatagcgcgggtaaagttgagaaagtaaatagtaaaggggagatatttgtacttgaaggtggtgggatacaaatcgtacttgatccaaatgatctcgtccgaagtaatgtaagtaaaagggaagccacaccttgggggtatgacagtggtttaattggtgaagcaaaaaccagcatggtgggtgtacctcgtttagagcaaaattggtatggagataaaaagtaa

SEQ ID NO: 58274 - DNA, 2838 bp, Acinetobacter baumannii
atgcagatgagtgtgtcgagtatattggagcgtttaggccttgtttcacaaaatcgcgctgttcatatccaattctcaaatcagtctttaaatcagcaagtcttcttacagcgtattgaaggcgagcatacgctcaaccaaggtagcgttgctgaattactgtgtctgtcgacaaacgcgcatattgcattaaaacaatttattggctgtcaggttgccgtcgatcaggtgacggatgcaggccaattttttagaacaacaggcattattactgaagcgagccaagggcaaagcgacggttcactcaccatttataaccttaccttaaaagacccaactgcactctggcataaacgccgtaatagccgcgtgtttatgaataaaagcgtgcgcgatattagtgaaattctatttaaagaatggcaaggcaaaagcccgttatttgcctcaagcttaatccttgatacatctggtttaagcaaagactacgatgtgcgtccatttgtgatgcagtcaaacgaaagcgattatgactttttaacccgtttgtggcgtagtgaaggcattaactggctggtcgatgaatcacagcttttggtcgctgacccgaatgcgtccattcagccgcaagtcttacgtttaattgacgataaccaaaactatcaggcacttgaacgtcgtagcctacgttaccaacgcagcagtgcgaccgagcagttcgataccattacccaagtcaaagctgagcgtcgtttacaaccaacctcggttcatgtgcaacgctggcaagccgatgctttgcaacaagaagaaggtagcggcagcgtacaaggcacccaaaagcacagcgaacactatgacaatgcaagcctgaaccttgaagatgcatggcatgttagcccagcgtggatgcaggatttaaacggggaagatcaagccacagcttcaggcaatagccagattgaacaacttaaccagcacatcaatgcttaccatcacttgagttctaaacagttttccgttgcaggcaacgtccgcgatgctcaggtaggttactggtttgaactcaatgaccatccggaacttgaccaacatgacagtgctgataaagagttcttaatcttaagcaaacactactataaccagaataatttaccgaaagaattacaacagcaacttgagcgcttattaccacaaggcaaactcaaggcagcccaactcgacagtcgaaaccctgagcagcgccactttgctgagctgaatgtcgttcgtcgtaacatcaaagctgtgcctgaatataacccgctagagcaccgaccagccgctcacccacagcgcgctagagtggtgggtttagagggtgaaagcattcatgtcgaccagtggggacgcattaaagtccgtttcctgtttacccgggctgatgaccacagccatgatggtggagcaggaagtaacgacaatgacactgactccgcttgggtcgatgtgctgaccccatgggcaggggcaggttatggcgcacgtttcttgccacgtgttggtgaaattgtggtcatcgacttctttgacggtaatattgaccgtccgtttgtggtggggcgtattcatgaagctgaacgtcacccgacccagtttgaccagaaaggtcagctacctgacactaaaaaactcagtggcatccgctctgaggaagtcgacggtaagggctttaaccagctccgttttgacgacacgacagggcaaatcagtgcccagctacaaagtagccatgcggcaagccagctaaacttgggtaacttaagccatccaaaagacaaggcggaaagtgatggtcgtggggaaggttttgaactcagaactgaccagtggggcgcggttagagctggtagcggtttactcgttagtacccacaaacaggatcaagcccaaggcgtacaccttgatgcaagcgaggccaagcaacaaatcgaaggcggtctcaacaatgccaaggcactcagtgaagttgctaaaaatcagcaaactgatccattggaaatgcttgagaacttaaaaacgttcatagagcaaattgaagagaaagatcaagacaaagctgctgcttttaagcaagctttgatgatattaactgcgcctaacagtattactctaaccagtaacgaagacattcacttaagtgcagatggtcagctcaaccaaactgccggagatagcatcaatctgtctactcaaaagaacttgattgcacatgcccaaaataagattagcctttttgcagcgcaacaaggggcgagactgtatgcaggcaaaggtaaagtcgaaatacaggcgcaaggcgatggcgctgatttaattgcccgtaaagctgttcaggtgatttcgactgaagacaaaatcgaagcgaccgcagccaaagaaattgttctcaccgcaggcggctctcaagtcaaaattactgggtcgggtatttttatgaccacgagcggcaagtttgaggtgaaggctgggcagcatttatttatggggggagggagtgcgaatgctaatgttcctgcgttgccagaatttaataagactaactggattgcgttagaacatttggatgtagacaatcagccatttgctaatttgggttataaaatcttttttgaaaataatcaggtcatagaaggtaaattagatgagcaaggtaaagctcatcatgaaaacgtgccagataaagcaattcgagtagagtatcaagaattaccagccaaaccagatactccttgggatacatacgatgctgttctaaaagaattaaatagttttgaagaaggtgatatacgtgactga

SEQ ID NO: 58275 - DNA, 381 bp, Acinetobacter baumannii
atgaagtttaaacgccctattcatagtaaaatttttactccaaatatgttgagagagccccaagatttttttaaaagagtacataattactgtaactttttcccagaaatgcttccagagaagtgtggtttttgggaaccattaaaaaccccattttcacctgagataatagaaaaattagttcctaatgacaaagggggagccgctgatcgattattgtgccaacgtttaaaaaagcctcgttatcaaggaagtttttggccttcattgcatggagagacgcatagtgaggaatatcttacctcagagtttactcaaattgatcagcataaattgataaattatctgaaaactactacctacaatttaatgcggacttag

SEQ ID NO: 58276 - DNA, 753 bp, Acinetobacter baumannii
atggattatagtgactatattgtctatgttgatgaaagtggcgacccaactttaaaaggtattaatgcaaaataccctgtctttgttttagcattttgcatttttcataaaaaacattacacaaaaaatgtgatagagaaattagaacaacttaagtttaagcatttcggacacgatattattgttttgcatgagcgagagattttaaaaagcactggtgattttgctaattacggatcgagagagcaaaaagaatcattgtttgcagatcttaaccagctcatctctgagtctaattttgttttagtctcatgtgtaattaaaaaaaatgaattaataaaaaaatacactacccctaataacccttattacattgcgcttgaatttgggcttgaaaggatttatagatatttaaaagagcgaaatcaacatgataaaaaaacgtttattgtttttgagcaacgtggaataaaagaggataaggatttagaattagagtttcggagggtttgtgatggaaacaactacctaaaacgtaacctgccatttgaaatcaaaatggcatcaaaaaagattaattcaacaggtttacaaattgcggatcttgttgcacgccctattggtaaccatgtattacaaccacagcagaagaatagagcctttgatattcttgaacacaagctttattgcgctggtggtagaaaagcaactggtttgaactactatggatggggaataaaaatctttccataa

SEQ ID NO: 58277 - DNA, 858 bp, Acinetobacter baumannii
atgacgattcaaacagtaaatctaggtacggcaccgactggcgcaggcggtgatactttccgttcaactggcgcaaaaataaatgaaaactttactaacccgagccatgctgcaagtcgttatgttgggactgctgctgggaatgtgatggaggttggcgcttttggagttggaaagtcaattctattaggtagtcaaaaattatcaacattgaggggaaatggtaatgccttttattggcaaaataatggtaataatatttcaagtgctggagattatcctgacaacaattctcaggcaattattagtttagatattaacgactcaactgatgcttgtgcgcaattaagcataacgcataactccgatatttatgtcaggtctgtaaactggaatgtaaatacgtttcagccgtggcgtaaaatcttgtcatcaaaaaatacaactgtggatgcaaatggtttcattaagtcagcatcaccggttgttaaattgtttgcagataaaattgaactcaatgatgaagctgctgagcagaacattacttttgaaaagctcgatgtagggcactacttgctaaaaggaacgtcaggttttgcaacggaaggttggtatatcgaaacgccaaaagatgctaacgggaacattctttttgctgtgatttatcagcaattagaaaataaagatattgaaatcaaaacttttaaaaagaagtttgatgttgagtctgcttcaattattgctgatttggataatccagttgatatttcaacgggccgctggatcgatattcgcttgcaagaaattcctaaaccagtacccgaaatgccagtggtgacagaaaatgacactgaatag

SEQ ID NO: 58278 - DNA, 1740 bp, Acinetobacter baumannii; identical to SEQ ID NO: 50300

SEQ ID NO: 58279 - DNA, 555 bp, Acinetobacter baumannii
atgaccattaaaaacttcttcgacgctgctcgagtgattgcaggcggcaaacttacacaagcacaagtagatgatctaaataaggtggtcgataaacttgcaccaagtgaaaaaactacaagtgatgttggtattgatttaatctcaggttttgaaggcacacgattcacagcttatgacgatggtgtaggagtctggaccattggcacaggcaccacaatttatccaaatggcgtgaaggtaaaaaaaggggatacttgtacacctgagcaagctaaagcctacttcaaacacgacttagccaaatttgaaaagactgtaaatgaatcggttactgtgcctttaactcaaaaccaatttgatgctttggtatcgctgacttacaacattggctcaggtgcatttaataattcaaccttattaaaaaaactgaataaaggtgactatcaaggcgctgctgatcaattccttgtgtggaacaaagcaggtggcaaggttatgaagggcctagttcgtcgccgagaagcagaacgagcactctttttaaagaagtaa

SEQ ID NO: 58280 - DNA, 1062 bp, Acinetobacter baumannii
atgaatgagaacaatgccgtattcaagcgccagctcgaggcaaattcaagtgctatttcttcaacgataaaagtaacggaaacgttgcaaactaaagtcggtaagaatagttcgtctattcaaaatgtcagtgaaagtgtagatggcatctatgctcagcagtttatcaagttcgatgtaaatggtcatgtttcaggccatggatcaatgaatgatggaactacttcaactttcatttttaactatgaccgtattcaatttggtactccagtgggtatagatggtattgagccaaaacccttaatgacattgcaaaataagcctgtgactttgccaaacggtactgttattccgcgtggtttgtatgtcgataatggtagttttggatatatcaatgccaatcgaatctgggctgaaaacttaagcgttattagtgcagacttggggacaattaaagtcaaaactgcgaatattgaagatggcgcaattgatactttaaaaattaaagatgaagcagtaacggtaccaataggtgtaaaagcaattgatatcaaaactatcaatactttttctggtggctcaaccggtggtttacctaataacgatttcagtaatcacttatcagcatgggaggagcatataggaacacttcttcaagtaacgcttaatagaagtgggggtaaagttagacttgatgcttcagtaaatatttgcacaccatcttttggagcttttagtgttggtgatgggagaggcaagccaattgctgcgaatgacagagctatggcatctttttatatttcaatatatagaaacgggtccttaattggcagaggttcgttaggtgcaaacatcgagacaggtaatattaatgtcaattttaatggtacagcagttatcgtttctgcgatcgatgatattagtacagttggtaatgtcacatacacacttaaagcaggttttgcacgacaggagggagtaaacattccactgaatgttagttccaataatacttttatgatcacttcaagaacattaagtgtaattgaaatgaagaaataa

SEQ ID NO: 58281 - DNA, 615 bp, Acinetobacter baumannii
atgactgaagataaaaaagaaactaatgagaaatattccgaactcaaagctgtatacaaactagcaattgatacaagaaattttgaaatccatcagctaattaatagaaataatttttttatgttatttcaaggtgtattacttgctgcggtttttagtaatcaagctagcaaaccctttgttgaatttgtaatttgtttcgctggaatatttatttcgtggcatcaaattggggtagcagcaggcgctaaatattggcaagaatggtgggaactgaaaactagtgaaattgaagatcaattaaaaagtgccattggagctgataattttatttctctcttcgaccttgatcatgaaggaaatcataaggagcaaagtaataaagtaatagccaagattaataaacattcgggttttatcgactcaataatcaatatgctgatactaagaaaatactctgttagtcgagtacctatcagaagcgggcttgttttaatgataacttggattgttttatttcttaatacgatagattggagtgttattagtacttcaatagatttaagtcaacttatagatggtcatttttttgaaaagactcctagccaaagataa

SEQ ID NO: 58282 - DNA, 207 bp, Acinetobacter baumannii
atgaccttaagtggtgttatcaaaatgagcaatgattcaaatttgcaagatgtagtgcttaaactgatagagcaaaacaataagctgattgaacagaatagcttgatcgtccaaatcaatgctgaacagtctgcacaactatcagaagtcttggcaatgtttgaagatgatgaaccagcgccaaagtctaaatcattggatgggtga

SEQ ID NO: 58283 - DNA, 291 bp, Acinetobacter baumannii
atgaagtgttggcaagaagttgaaacaggcgaggttatgcagtcctttgcgagatttagtgattcgtgggatgaacagaaaactgtaattgatggtagtgcagaatcttctaaaaacattgaagccttcaacatgaccgcagatggcatacctttctcatttagacgtgtaggtaacaagcactctattatctttggtggtaattcagaggtaattaaaaagagtacctttaatttctttaaagaactttgtattaaattttttgaagaaacaaaaccaaaactttcctag

SEQ ID NO: 58284 - DNA, 297 bp, Acinetobacter baumannii
atggctgattacttagaaaaaatagacgagattattcacaatcaggtaaaagttgcactcaataactttgagccccaactctcaattttagagagcaaagaagatcttttagccttcgcatataacaatgattatgacgcatgtgttggccataagaagttatcagagttaattgtagaagaacttggtgttgtggatgaccatattgaaggcattaacaactttgaaagtttgtggttaaagctgaaaaatgaggttgagcaggcaatagctgctgcaaagaaaaacttagagtaa

SEQ ID NO: 58285 - DNA, 594 bp, Acinetobacter baumannii
atgactgctctgcacaaatcattcggctcgttcgaaatcaaagccgttgatgaagaaaagcgaacatttacaggggtggctagtacacctaatcaggatcgttcaaaagacatcatgatccctaaaggcgcgaagtttcaactgccaatgccgttgctatttcaccacgacatgcgtcagccaattggacatgtaaccgaagcaaaggtcacagaaaaagggattgaggtaacgctacatattcctgaaatcaaagaagatgggcgcttaaaagagcgtgtaaatgaagcttatcaatcactgaagtatgacctggtaaaaggtttatcagttggttttatcccaaattgggatcaagccaaaatgattaaaggtggcggcattcagtttgacgagtgggaatggtacgaactctcccttgtaacaatccctgataaccgtgatagcggaacagattttagaaaagcatttgaggaacacaaagccgcgttgggcaatacacctcagaaacccgcagcagatggcgattcatctgagcaaaaacacgtaattgtaaaacttaatagcccaacaaagggtggagtatctctatga

SEQ ID NO: 58286 - DNA, 1335 bp, Acinetobacter baumannii
atgaataaatatttaaaacaacttcttgatgctttagcacagaaaaatgcagaaaagcagggtattgtgaccaaggcacttgatgcaggtcaaacgcctaatgaagaagaagagaagcaaattgaaggcattgatgctgaaattgcaactcttgaaaagaacattgctcgtgtaaaagaaatgattgcacagggtgaaaaagctgcaactactgcaacgccagttgcagggcaaaacccacaagaagcacagaatgcagcaaatggaaatcctaatcctacagagcagattgttgttaaatcgaatctcccgaaaggtatgccatttgctcagtttgcacgtgcaaaaatgcttgcatgtcatgagcagaagcagggtaatttaatgtcagtagctgatgctgcaaaagctcttggttatgatgaagcagtaatccaatatgtagaaaaagccactttaggtacaactacagatccaggctttgcagctcctttagtgcaaacagacacatataaaggcgacttcctagaattgctgcgtaatgcaacaatctttgacaagctgcaaggctatcgttcagtgccgttcaatgtaaaaattaatggacagttgactggtggtactgctggatgggttggagaaggcgctaaaaaaccattaacaaacccaaccttcaataacatcgaaatcaaagaacataaacttgctgcaattactgtctacacacaagaattattgcgtcgtgctgacccagcaattgaccaacttgtgttaaatgacttaattgaagcgacaaaagctctcattgatacaactttcttgggttcccaagcgcaaagtgatactacccctgctggtatcttaaatggcgttactgctattaccccatcaggaaccacagcagcacaaattgaagctgacctgctgaaattaattcagacattcattgctgcaaacttaaccactgataatgcttatttcctaatgagcgaaacacgtgcaatgcaatacgctttgctacgtgacgcacttggtaatacctatttcaatggcatgagctttgcaggtgcggctcgcacactattgggaatcccagtagttacatctcagtcagtaggcgacaaagtaatccttgtgaaaatgagtgaattacttgttgcacaagatggtggagttgacgttgcatacagcgaccaagcgaccttagtcgatggctctacaacacacaacttatggcaagaaaacaaatttgccattcgtgttgagaaattcatcacttgggcaaaacgtcgtgcaattgcagcagcatacatcgattacaccatgacaccttaa

SEQ ID NO: 58287 - DNA, 1374 bp, Acinetobacter baumannii
atgtcaaatcagaacgataagcttaagagtttaaaaacttcttccatggatcgacgcttatcaatcgcgaaagcttctttactggcaggaacacgttgggctactgcaagtgcctcttccctcttttctagcgaagaagaaaaagagaagaagcgtaaaaaggcaatgagcgaacaagctaattatcttgtttctgaaattggcaaactaaaaggttctattgtcaagattggccaaatgatggcgctttatggtgaacattttttaccagaagaaattactcaagctttaaataccttaaataaccaaactgttgctttagactggccagcaattaaacctcacttacaagaacaactaggttctaagttaaatgatctaacaattgatcatgagcctattggtacggcctctctggcacaagttcatcgcgcaacacgtaagtcagacggtttagagttagttttaaaaattcaataccctggtgttgcgaatgcaattgactccgatatgagtctgtttaaaaacatgcttaagcttacacgtatggttcctcaaactcgtgagtttgatcagtggtttgatgaagtacgtgaaatgatgcatcgtgaagtcaattatcacgtagaggcagccacaacacgtcgctttgctgagcgtttaaaagatgatgagcgctatatcgtccctacaattgtagatgaatactgtaccgatcaagtcttatgtatgacctttgaacgtggcgtgcctatcaatagtccagtcatgctttcccttcctcaagaacgacgtaatcagctcggtgaagcttcactagagattgcagttcgtgagatttttgaatggggcgaaatgcaaactgaccctaactttggtaactaccttgttcgtttaggtaatggccaagatattcaggataaaattgtactattagactttggtgcgatccgtcagttcgatgaacatttactctcagttgcgcgtaatcttatacaagcgggttatcagcatgataaacatgcgatggttcaagcaatgactggatatgagtttttcgatgcaatgcctgaaagtattaaacccggcatggccgatgtctttttacttgcgacagaagcattcagtacccctgcaaataatccagatatgccagctgggctgatggatgaacatgaacgttatgactggaaaaagagccagttacatagtcgtgttatgcagcaagcaagcaaatcaatggcgtctcgatatttctcggttcctccaaaagaatttatgtttattagccgtaagtttattggcgcatatacatttatgactgttattgatgccaaaacaaatgtacgacgtatgattcgtaactttgcttaa

SEQ ID NO: 58288 - DNA, 399 bp, Acinetobacter baumannii
atgagtattgatttatacgagcattattttgatcaatgggaaaaatcatgtgttgagattgaacgattgaatatggttaatcagaatttgcgtgatgagttgtctagattaaaaacaaagtatcaagctaccaaaagacttcaatgtagtacgtctgagcataactcaaagttggctgcatatattgaatgcttagagggtgatattaatcgccttactgacaatggcgagtatgtcttggttccaaaagaaccaactcaaaggatgcttaatgcagctcattgttatatgaatcgtatcaaagggagtgatgttcacccagaaacaaacagaaagcgcaaagagatgtacaaagaaatgataaatgcgtgtttaagcgaaaagttaaaagaagattga

SEQ ID NO: 58289 - DNA, 2268 bp, Acinetobacter baumannii
atgggaaataagataaaaagtaataaactttttactaggaagtctgaagcaaaaaatatcattccacttctatcacttggtggagccatctttctctcaaactcggcctttgcagcctcgccttctgagacaacagatgctgaaaaaaaacctgaagcactccctacaattacaatcaccgcttcacgtgcagatgaactttctacatctgccaaacaagtgaccaagctagatgaaaaacaaattgaacttttaagaaatggttcatctggaaatattgcaactgttttagctaaagccgtaccgggcctttccgactcaagccgaaccattaccgattatggtcaaactttacggggccgtaatgccctcatcttggtcgatggcgttccaatgaacctgacacgcgacacatcaagaggtctttcagctatcgaccctgaaagtattgctaacattgaagtcattcgcggtagtaacgcaatttatggtggtggcgcttctggcggtattatttcaattaccacgaaagctgctggcggtgaacctaccgccaaaacagtcgttgggcttcaaacacctttaacaaatttccgttctaatgctttaagtggtgacattcatcaatatttcacaggcagctttaacgcttttgactatgcactcgactttggttaccaacgtattggtagtccgtacgatgcaagtggcgaccgtgttgcccctgaaccaagtcaaggagatttatatgatgccgatgcttacagcgtaggcggtaagcttggttatcatattgatgacaaccaatatgtccagtttgctgcaaactactataatgccgagcaagactcagattatgcatctgacccaagtgttaaaaaagctccagctggtacagtgccagcaaaagccattaaaggcttaaagcttaaagaccagactaaaaacgaaaatcagatttacaatttaacctataaccataaagacttttttggcaataaagttgaagctcaaatttattaccgcgacttctttacccgtttttcaccatttgatgcacgtgtttctgaaaatgaagtcagcccacgtggtggacaagtggatcaggtatctcaagaaaataatgtactcggtagccgtttaactgtaaccacccccctcgagtttttaggtgatacctcattggtttggggtggcgactttaaccgtgaaaaaagcgaaatgcctttagatattttcgattctgatatttatgaccaatctggtggtctagaatttgtaaaaactggcaagctcatttacttacccgaactcaccacgcaaagtgttggtggttttgtacagttaaaacaccgctttaatgaccaatggtcggctgaagctggtacgcgttatgaagacagctacgcgcaaattgatagctttattccactatcacaacttgatcctgacacacaatcatataagcccaacccttacaccgttgagggcggaaaagtgaaagctgatgcatggttgtataatgctaatgtgactttctctccaaatgatcaacactcgatttatgcatcttttaaccaaggtttccagttgcctgatgtcggtgtagttattcgcaatgccagcacaggttttaatcttggttcgtcattcttagagcctgtaaaagttgataactatgagttaggctggaaaagaaacttcaataacttctcttcaagtttagctatattccactctacttctgatcttggcgctgttcaaccagtgagtaatagtttggttatgcttagaaccaaagagaaaatcactggtgttgaagcaacttttgactatctggacgatgccaatgtttggggaaccggtggtagcgttacgtggatgaaaggtcgtgaaaaacctcaagatggtgctgaacgagacatgacgggtttccgtattccaccattaaaacttacagcttacgtttcttatagcccaactgaaacttggaccaaccgcctacaagcgacttacttcggttcagaagattaccgcttaaatggcgtaaatagttttggtcgttacgatgtaaaaacgtatacaacagcagatttaatcagtagctttgcgcttaacaaaaaagacactgtgacgattggtttagagaacatgtttaaccgcaaatactatcctctctatagccaattattaagatcgggtaataacactagccatttaatggcaaatggtgcaacgctgaaagtttcttatagccataagtggtaa

SEQ ID NO: 58290 - DNA, 936 bp, Acinetobacter baumannii
atgaaaaaaattgttttattgggtttgatttgcctacctgttttaacaattgcaaatacgactccatccattaaaacttcggaagattgcaagttaagaggatttaatttacttgcttatgatgcgaatttcaaaggggcatttgatttcaagctaatggaatttggaggcatgaagtcaacagattttgatgttgatagctgtattggtaagaataatgtcgcaaatggtattttaactgccgaatatgctcaaaataaaaataaaattgttgggcagcatttgaagagtttcgttgcatttgatcctaaaaacaaagagattcttgtggctttaatagatgaagaatcgaagagttatataattggcaataaaacacccaatctaatttctgcattaaaatcatcatttagctcaaatgatatttttaaaaaaatagatttaacatcaacattaactttttcaaattttaatgaaattaatgaaacagataaaagtaatgttgaagagtctcaagccattgaaaagagaattgaagaaaataaaagactttttagcattgcttctgcaaatcttaaaaaatcaaacccaaaggatttgatttataaaaattctacctatcaaggtttactcaaagatggagaaagtaagaactcaaaaattacaattactgcgattttagataaaaatataaatgttccactttctaaaaaggatatctcacacaatttatatttcatttctgacttagctaaaattggattaaagaatccatactcttttcgtccgagaagcgcatttgtaaaacaagaaggtgctttacttaagattagtattgagtacactgcacaaaattcatatggagcagatgtggtaggtaatgagtacaaaattttatttttaggaaaagatgggaattaccataccgaaagatga

SEQ ID NO: 58291 - DNA, 909 bp, Acinetobacter baumannii
atggccgagttagttgtaaaagataatgctctgattcaagcaagttatacattagatactgttgagcaacgtcttattcttttggcaatagctgaagcaagagaaacgggacaaggcatcacggaaaatagcttgttggaagttcacgctagtagctacataaatacttttaatgttgaaaaacatactgcatataccgttcttagggatgcctctagaagcttatttgatcgctatgttacttatcacgatataaatccaaaaacaggtaaagacagaagtttccactgtagatgggtggataaaattggttatgaacatcaatcaggagttgtattcttacgtttcactcaagatattgtccctctaattactagattagaagaaaattttactaaatatgaaatacaacaagtttccaaattaacaagtacatacgccattcgcttatatgagctactaatccaatggcgatctagtggccaaacaccagtttttaatctatcaacattcagacaacaactaggcgttgaggctactcaatacaagactatgagtaattttaaaacctatgtcctagattttgccttgaaacaagttaatgaactaacagatataacggctaactatcaacaacataaaactggcagaacaatttctggtttctctttcacattcaaacaaaaacaggaacgtaaaaaagttaagcctaaaaaagctagcctaacggagaaacaattagatttatttgcaaataagttggcttatgactctgctttttctagccaatttagtgaggctggtgaaagctatgaaaactttgccaaaaggattaaacaactgttaaaagaccctgtaaatttagacaaatattcagattatttagacaatttagatttaaaagtttag

SEQ ID NO: 58292 - DNA, 522 bp, Acinetobacter baumannii
atgaaaagtctttctgttgttgagttatctaagctatatagcataaatagacaaactatttacaaccatataaataaaggaatattaagcaaaaattcagataataaaattgatttatctgaagcaatccgtgtgttcggtgaaccatctaaaaaacaaagtgtaaaagaacctgtaaaagtagacagtcaaaattcgacagaaaatttactgcttagacaacaaatagacatgttaaaaaatcaacttgaagatgctaaagaacgtgaatctttttatcagaatcaaattgagacgatgcaacgtctactagaagccccaaaagctaatatgactacgtttatcgatcaaaaacgtgagcagaatatagcaacagatcctcagaaagaacctgagctgaaagctgatgaattgactactccagttgaaactgaaaataagcgcattcctgtgcctgaacacattgaaccagagcctgagaaaagagggttttggagtcgtttttttagaccctatgattaa

SEQ ID NO: 58293 - DNA, 432 bp, Acinetobacter baumannii
atgtccaagaatcagctttgcttagatgagcaactatgttttcctatttatgctgcatctaatttaatcgtaaaagcttatcgcccttttcttacacctctcggactcacttatcctcaatatttagtgatgttggttttgtgggaaaaagaatgtgtaagtgtgggtgatcttggacaaattttacatcttgatagtggaacattaaccccactattaaaaagaatggagacatctggtctaattaatcgatcacgtgatcctaatgatgaaagacgagtttttatttcattaaaagataaagggcgagacttatctgctgaagcagaaaagattcctaaagagcttaccaagaacattgagtttgataacttaaatcaattacgagatgaattaaaagtattagttaatctattatcagaaagaatttga

SEQ ID NO: 58294 - DNA, 429 bp, Acinetobacter baumannii
atgagtaatctttattctacccaggttaaagcaatcggtggacgttcaggaaatattcgtagtgaagatggtatcttagaactaaaattggctttgccaaaagaattaggtggtaaaggtgatgcaacgaatcctgaacaattatttgcagctggctatgctgcatgctttggaaatgcagtgatccatgtaactcgtagcaataaagaatataaaatccgtgataacgatgtagaggtcctgagtactgttggaatggttgctaatggcaatggtggatttgccttgacagtacacttagatgtcacgctttcaggtatttcacaagctgatgcagagaaaatcgtggaacaaacgcatcaagtatgtccttattccaatgctattcgaggtaatatacaggtgtctaccactgtctataccaaataa

SEQ ID NO: 58295 - DNA, 222 bp, Acinetobacter baumannii
atgggtgcgaactttccaagtttgatccctaaaccgagcgtagcgagaaaaaaagctcatgagcgaagcgaattccgagctgcttttgctttttctaaaagtcacgaaaatattaaccaaaaattgccccaacgaatcgagcgaaagcgagattcaatagagtttgagcgtagcgaaaaccaagggcaatttttcatgaaatatgcttttaattatttttaa

SEQ ID NO: 58296 - DNA, 807 bp, Acinetobacter baumannii
atgaccctgaatagtgatttccagaagctttatgtagatggattaatccatttgtatgaactagatgccagctcacttggagctggcattttacgtttccacgggcatatagcttttcaagattgggagaaaatctactcttcaattggttccgaaggtttaattggtgccgactctggcagcattggaaagatttttgatactggtgatcagaaggtatggaaccgaaatattatctggcaaggtcaagtttttgagcccatggcactagaggtaaatggtctagaaatgcgaagtgatggtaaagcttcagcacccactttaagcatggcgaacaatattaacggcatccagaatgcagtatctgcttactgtttgcagtttaaagactttgctggtgcaaaacttaaagtgattaccacacttgctaaatacttagatgctgaaaacttcacagaaggcaatccaactgcatcgaatgaatcaaaagagcaaatctggtacatcgagcaaaagacatctgaaaatgcacaacaagtgactttcgagctgtctaatccaattgattttgaaggtttgaaaattccagttcgtcaaattacttcactttgtcattggtgcatggtcgggaagtatcggggcgaagaatgtggttacacaggtgtagcaatgttcactgataaagatgagccaactgataatccggcacttgatcgatgcggtggacttctgcggtcttgccgtatgcgcttcggtgaaaataaaccgctgccatttggtggtttcccggcttcaagtttattgtga

SEQ ID NO: 58297 - DNA, 1176 bp, Acinetobacter baumannii
atgaccattcaaacagtaaatttaggcactgccccaacgggtgcgggtggcgacacattccgctctactggcgcaaaaatgaatgaaaactttacgaataacacccatgcagctagtcgttatgtaggtaccgctgccgggaatgtaatggaagtaggtgcttttggagttggaaagtcaattctattaggtagtcaaaaattatcaacattgagaggaggtggtaatgccttttattggcaaaataatggtaataatatttcaagtgctggagactatccaggcaacgattctcaggcaattattaatttagatattaacgattcaactgatgcttgtgcacaattaagcataacacataactccgaaatgtatgtcaggtctataaactggaatgtaaatacgtttcagccgtggcgtaaaattttgtcgtcaaaaaatacaacagtggatgcaaatggtttcatcaagtcagcatctccgattgttaagctatttgcagataaaattgaacctaacgatgaagccgctgaacaacctcttgcttttgagaagttgggtattggtcattatttagttaaaggttcttctggattcgctaaagaaggctggtggattgaaattcctacagacactcatggcaataagatttgtgcagttgaatatcagacattggaaaatggtgatcttgaaattaagacattcaagaaaaagctaaatgatgagggcgatattgttgcgaatctcgatgcaccaattgatatcccaaataacgcaaacggtgagccgcgctggattgatattcgtttaaacagtatcaagaagacaatcgtcagaaaaattccacgtactgaaaaacaaccgcgtatggtccagcaagtaaaatatgcaccgcaattgacctatatcactaaatacgaagatttatttgatgatgaaggaaaagctgtaattgtggatggcaagaattataaaaagccagtaactcacattcaaacagatcaaaatggcaccccaatcttaacgaatcaacccgtcattaatgaaaatggtgaaccagtattcgaatgggttcaagcagttgatagtgaaggaaatcctgtttttgatgatgtgccagtcttagacaaagatggaaatccaatctatgacgaggtgacttatgaccctgaatag

SEQ ID NO: 58298 - DNA, 342 bp, Acinetobacter baumannii
atgagtaatcgtaaattcacttggtgccaagacttagaaggtaactcaggttcgcagagctttaatactttgtcatctaagtttggtgatgggtatgagcaaaatgtctcaataggaatcaataaccgatctggcacatggcaatattcgcgaacagcaaaaaaagctgaaatcatgcaaatcaaagcattctttgatgatcacaaaggagctgactcgtttctttgggattcaccactagacggtgaagtccgagttaaaacaggcgaatatcaaccccgttgtttaggtggtgatatttggcaaatctctacgacattcacccaagtcttttatccttaa

SEQ ID NO: 58299 - DNA, 192 bp, Acinetobacter baumannii
atgaacactcatattgccactacgacaaatacaattatgtttccgaaggcctgtactctttgtctatcaagaaaaaatgtacagctttttgcaggagtgttggtatgcgatcagtgccaggaaaacatcaggctcacgaatccaagtatttttccggccaatgatgaaactgaacaaaaagctcaggactga

SEQ ID NO: 58300 - DNA, 189 bp, Acinetobacter baumannii
atgaaatttctgatagcgttgctctttccttggctgcctttctttatgataggtcgaccttttgcagcaatgatatgtttgtttcttcaagttacccttttaggctggctcccagctgcgatctgggctgtgcatgctttattgcaagatcatgcagaccaagaagcgaaagcagctttatatcactaa

SEQ ID NO: 58301 - DNA, 228 bp, Acinetobacter baumannii
ttgttaaaaataaattatttaattgcaaaagctaaaaatggtactgaaattattgtttcattaactcctcttaataaaatgcaaagtacacgtcaggggttaaaaacaattgaagtgggtaaaagagttcttctctcatctgggatggaggtcgatttaaatttagatggccgtacattttatacttctttaaatcagctatttaaattaagtcataaagttgcttag

SEQ ID NO: 58302 - DNA, 198 bp, Acinetobacter baumannii
atgattaaacagaatctcagcgtaaaagaccagtttggggttaaacacgctattcaagcaacagtagatcatcagtttgccgatacgcaatctcactcgaatataaaacatatcactgttgatggagaagatattcgacctagtttcgaaatgtttttccaaagtactttaagtggaaaaatttttaaaattttataa

SEQ ID NO: 58303 - DNA, 2019 bp, Acinetobacter baumannii
ttgtggaacgatgattttagggttttaccaaataatgtcgatgagaaaatatggtgggaggtgtggcttcctgtagaaaatgatcgactttatgccgtagatcaattcctaagaatatctgaattattagatatacgaatttcaagtccacttgaatttcctgaaaggacagtatttcatatttattgcagtagaaatgaacttgagactacccccaacttattaaatatcattgccgaaattcgcagaccaaaagaaacaactcactttttttctaaaatgtcttcaatagagcaaaatgaatggatcaaagatctatcaaaccgtttaaataagtcagcggataaccctgagacgccctacatatgcttagtagatggtggtgtaaatttacatccttttcttgagccttttcttaatgaaagtgatctacacacagtgaatgaagcatggggatataatgacgaatatggtcatgcgactggtttagcaggtctagcattgatcggtgatttcacagaccatcttattcacaataaccctgtgcgaattaatcatagaattgaatcagttaaaattatttctcaaaaagaaagtaatgattccaagctatatggtaacttagttagagaagctatagcaatcccagaagtaaccaatccatacagaaaaagattatacagtatggctgtagcggcaatggatggacgtgatagaggacgcccctcgtcctggtctgctgctttagataatgctatatgcgacaatttaaataacttcaagaatcctaaactttttatcgtttgcgcaggaaatattgaacctactcaggaaaactattcgaactatccaaatagtaatcaagtgaatgagattcatgatcctgcccaagcatggaatgccttaacagttggagcttgtactcataaaattacaattaatgaagctggtacagagtattgtgttcctgttgcaaaatctggatcgttaagcccacatagctcaacctcacttgtttggatgaacactcaatggccttataagccagatgttgtctttgaagggggtaatatctctcatgatactaaattcggagatttctttgatacagaaagtttaagcctccttactcttaatcatgaacctcatattggaaaaaatttcaccattacgtctcagacaagcgcagcttcagccctatgtgcaaagatggctgctgaaattatgggacagtatcctaattattggcccgaaacaattcgggcactgattgtccattcagccgaatggactgaaaatatgaaaaaagattttttaggcagtgatggaaagaaatcagattacgttaagctagtacatcattgtggatatggagaacctaacttaaataaagctctttggagtgcttcaaattcattaagcctagtttgccaagaaagccttaaccctctcaaaaagaatggaagtaaaatagattttaatcaaattaatatccatgatttaccttggccaaaagatgaacttttacagttaggccacactccagtaaaaatgagagtaacactttctcatttcatagaaggaaatcctggagcatgtgatgcctctttttctggaagtagataccaatatgaatctttaggtttaagattcgaaataagacgtcctgctgaatcaacaccagactttttaaaacgtattaataaaaatgagagagaaaaaggtgttaagtttgaaagtacatcaactgatagtgactggttaataggaccgaaaaaccgagtacgtggatcaattcactcagatatatggattggaactgcagcagatttagcgaaccgtggaatgttagctgttttccctgtaacaggttggtggaaaaattctattaatagagaacgctacaatatacctattcgatattcactcattatcaccatcactactcctgactctgaaattgatctatacacagttgttcaaaatcagattttaaatgagagttctattaaggtctaa

SEQ ID NO: 58304 - DNA, 711 bp, Acinetobacter baumannii
atgcaaaacttagttttcccatcaggactatctgttcaaagagcaaagaaacgtgccaaagaacttgttaaaagtgaacaagcaaaaacacaaactgatgcacttgatgtaatttctttcaaagaagtgaataaaccatgggctttggcaatggctcaacttcaacaaaattcagactcttcaaattatttaattacattttctgatattgaaagaattgtggagcaagaacctctactagactataacggctttggtcattctgactcataccatgaatctttttataagcggtatacgtttcaggactctaaagctgaatatcttcaaaattttaagaaaaatagagaaagcctaaaaaaagcacttgatgaatgccagagatgctgtatgtatctacagcatctgaaaaaaataaaagctattcgctacaatctgggtagttacacattgaaacatagcgttgaatactaccaccgtcagttgaaccactttgatgatgcatatgtgtcaaatggagcttttatttgtgcagcactacatatgggctttaaagtaattcgaaaaaatgatattggccctaatgcttggatctgtgccagtatacaatcagatatcgttatgtggggtagattgcttgataaacaaacttccttacagcctaaagaactaaagctgttagcagagttaaaaaagaagattggtctctga

SEQ ID NO: 58305 - DNA, 504 bp, Acinetobacter baumannii
atgacttatatcgttatcgggattgctttaatactaattattatttttataaacaagttttattcatataaaaatagtatgcaacttactctaagacctatgaaagaatgggttattttgtgcaaaggagtatcctcatcagagcgagaggctatgtgccatgctcttttagaagaaacctcaagcatgctagaacaatcaggagtaattagtaaaagtgatttcaaaaaactatatacaaaaccagaaatatacttctcaaattatgtacaaataacattactgattactcatgataaatatttcagccaaattcagtctagagcctcatattcagatcaacaagcccgtttatatttagcacattgttttattgttttatatgaaaatggattaggtacaggtcatggaggtgagttctactatggtaaagatgtttttaatcttttaggtaaagtaagttcttcagttccgtcaaacacttgggattttcaattaaattaa

SEQ ID NO: 58306 - DNA, 222 bp, Acinetobacter baumannii
atgaaaaagaatgtagatgcagagcgtattcgagctgcttttaaggcaacgcaagggattgtggagcattcatttgagcagcatgtaattgatgccagtcaagcttatgtcaatgcgatgattgagcggattgcgtctggggagtcgacctttgaggaggaagatgaggtgttaatgatgaagtggcgagctatgaatgccttacaggataaggattcatag

SEQ ID NO: 58307 - DNA, 357 bp, Acinetobacter baumannii
atgaagactggaaaaaaaattcttgagggtttatttgacgatcaacgtgctgctgcacatgatccccatcatccagtgaatgatcagcttcgggctagtctactgtggaagaaacatttacttgaattgattcagatcccacgtcatcaactgaaatcagatgatagctatgttttggtgtctgatattcctgagtattttaaggctcagtttgagcagttttttttaggtcagaacctattgcagcatgtggatcatcctgaagaatcacgattggatagcaaacgtttggacagttttattgcctatctgaaagatcatccaagttatcaatcagagcagcgtggccaagcatga

SEQ ID NO: 58308 - DNA, 891 bp, Acinetobacter baumannii
atgttttacatgaatattcggcacaatgtgaagaaggattccagttccaagaataccttccattatctgactcgaaccgcgcattttgccgagcaaaaggccgatgaggaattggagtttgtgcgttctggaaatatgcctgcttgggctgtcgatgcacctgcgactttttggcatagtgcggatcgttatgagattgctcgaggtcgaaccagttcaacgttgactgtggctttaccaaaagaattgtcgaaacagcagcgtaaagaattggtcgaggcctttattcaggaatttgctgatcagtatcagtttccttataccgcagcggtgcataatcatccgagtgagctgacaggtgaagatcaaccgcatttgcatctgatgtattctgaacggagtctgtccgatgggattgaacgaccaccagagcagttttttaagcagtatcgtccaaagaatcccaccaagggtggcgcacagaaattaacggctgatgcgttgggctttggccgtgatcaggtcaaagcctttcgagaaaaaactgagcagctaattaatcaggttttggaaaggcatgcaccgatgaaaaccgtgattctggagggtatggagattgttgttccaaatcgagtgagtcatctgtctaatcaggaatttaaccagaagtatggaacgcaattgcaggatgttccacagatctaccgatggaagttgaaaagtgctgatccaattattcagcttgaagttgaggcacagaagcaaaccattcaacagattcgacaatttaacaagctccagatctatcaaaaggagtataaccaagccttagagcagcgtaaaaatcaagacttggatcgtgatgatggttatacgccatcatggttctag

SEQ ID NO: 58309 - DNA, 210 bp, Acinetobacter baumannii
atgacaggagttgaccctagtaccaaatacgaaaaaccccgacaggatgtcggggtttttttattgtcttatgattttaattgctctttgactctacaagatttaatgctatggtatatatcaatgatacatatcttggtttcgggaggtaattatggaaattgcgaaagtatttcaaactggtcgcagtcaggctgttcgcttgcctaa

SEQ ID NO: 58310 - DNA, 999 bp, Acinetobacter baumannii
atgatgaacggaattttttatgaaaatacgaaaactacaatacctcgctgggtaaacactcttcacgaaagccagccattagggtatgcatatgaaacagatactcattttgtgcacttatatgggagaaatacaggcctaaatattatatcggtaggtttaaccgcgattgagaaaaagcaagggactttagaagactgggctattagaacttttggagctaccaatatacagcctcttaaattaccaattggacaaagtatcgatggggtttggagaccatccttgttatcttctgaagatatccaagatgcgcttaaaattgatatgtacgaacagcgttcagcagaacaagcgttaagaattctacttgataagttagatgatatttttttatatgttgaacctgatcagaatggtactcaatcctttggtcataaatcccgtgagttactgattttagcttgcaccgaagttgaaaatatgtgggtatcattattgaataaagcgggtgcaacggctactaatggtcgaatgtttacaactcaagattatgtaaagctgctacctaaattatgcctaggcgaatttcaagttagtttcaaaaactataatgtacgaaaatttcagccttttattaactgggatgtttcacgtccgacacaatctttgatttggtatgatgcgtacaataaaactaagcatgaccgtaaaaattctttttcatgtgctacgctagagaatgtgatggacgcgattactgctaatatcgttatgttttgtgctaaatatggcccattttacttgttgaataacaacactacgttgtcctcactaattaatcagcactttgaaatagatttggtgaatagtgatttatcaacatactatatccctaaatttagtttccctgcgaatataagagaagacctttttatttttaatcctcatcaaaatgggcatatggtcccttgggatgtacaaccgctaacaatttga

SEQ ID NO: 58311 - DNA, 942 bp, Acinetobacter baumannii
atgacttttgagcagcctttaataagtgttttgattccagtttacaatgttgaagcttttgttaaagaagcagtcttttcaatttgtaatcaaacatataaaaatattgaaataatagtagttgatgactgctctactgataatacatacaatatagttgctgaattagctatgattgatccaagaattagactttataaaaatgataaaaacttaaaaatagtaaaaactttaaatttcgcattagaacaggcaaaaggagaattcattgcaagaatggatggcgatgacataagtacgccagaaagactagaaaaacagttagaatttttgttaaaaaatcctcaatattatttagtgggttgtcatgttaatactatagaccctaataatagaataattggtaagcaagaaatgccaatcaatgataatattattaataaaacaataaagtatagttcgccagttctacatatttggttagctaagcgagaagtctatactaaacttaaaggatatagagaaattcctggtgctgaagactatgattttttattaagaatgcattcattaggtttactctttactaatctaaatagttatgaatattcagttcgtattcgtgacgggaatactacctctacaattggttttaatcagagattgatgtcaaattatgtgcttgatctatatgagatgaggctaaaaactggaaaagatgattttagtgaattgaatgtttcacaatatttagaaaaatattctaaatataaagcggattttgatcagtcaaatatttttttaaaatctgcatttatggcaaaggctgataaaaagtttttgaaaatgttattttttataggcttatgcgtcatgaaatccagatttcaattgaaatatcttttaaagcgattggttattaaaataattacgataggctaa

SEQ ID NO: 58312 - DNA, 411 bp, Acinetobacter baumannii
atgcacgatgcactagatgagatcctcaaaacgcaacgccaccagaccgcagcgaaaaacctgaatcagaaaatagaaaaagccctgaatccagaacaacaaaaggaaaaacaaagccagaaacaacagaaaaaacgagaagaccagatcaaatactttataggatcgctttatatcgaatctttgagaaaggcatcgattagtttttcacaggataatagcgacttagataaactggccgacatgattcatgcatatctcagttttagacagctcaaaaagaatcttggaacaattgaagaaatcgaagctttcgttcaacgtatgccaaccacaaaaaatatgaatcgacttattgaaacagcaaaaacagatccaagaaatccattcaacaaaacaccagagcaatga

SEQ ID NO: 58313 - DNA, 432 bp, Acinetobacter baumannii
gtgccaaagttcaaaaaactaggttacggtgcaatcattaatgtggcttctgccgcgtcgtataccgcagcaccagaaatgaccgcttataacgtgactaaagctggtgttcgtgcgttgtctgaaacactttcggctgagcttcgtaaattcaacattaaagtcaatgtgctctgcccgactttggtgcctaccaatatcattaaaaatggtcgtattccgggtcgttattcaaaacttgcagaccatgcgctcatgaactacgcactcaccacaagtgatgatgtagccaaactcacacttaaccgccttgatcaggatgagctttataccattcctcaaatcgatgcaaagttattctggctgatgaaacgtgcatcaccaagtttgtataccaagttccttggtacctcttacaaattatttaaataa

SEQ ID NO: 58314 - DNA, 936 bp, Acinetobacter baumannii
atgtgtataagagacagatataaagtagaagaatatattgttgagtgtattgagagtatatgtaatcaattgatcagtggcgtagagattattttggttaatgatggtacgcctgatagatctatggctttagcacgtaattatattgctcagaaatatcctcattttgaaaaacaatttgtttttattgatcaaaaaaaccaaggacaaagcgttgctagaaataatgcattaaaaatagcaaagggtgagtatgttggatttttggattcagacgattatttattaccaaactatttttatgaattaataaaagttataaatgagaaaaaagtagaaataattcattttaatgctaaacaatatgatatagataaaggttatgttgagaatatttgttttgttacacatagtaaaatttcaataaatgatgaatcctatagagaaaagttgtttttacagtcttattggtatccttggttaagagttatcaaaaaagacattctaagtaaatttgcttttgatattaatgtgtatatggaagataagctgtattttccaaaaatttattactttgcaaatggtctagaaatttttgaattgcaaaaagaacttatttgctacagacatagagagggtagttcaattagaagtgggtatccagcacctcttctaaatggaattgacttagggataaagaaatttataccaacaaataaatatcctctttattctattatttataatcaatttttatctcaaaaaatatcaataatgatagatagagggcaaagtttgtctacagtctattcatttgttattagtgaggaggcaaatattaagctaaattatagagttagttataagatttttttgttaaagtattttccttttatctatctagtgttattaaagttaaaaaagaaatgggtgtga

SEQ ID NO: 58315 - DNA, 399 bp, Acinetobacter baumannii
atgctcatcggtatcaatcaccacagcatcacccttatgctgagggatttcaactgccacgatttctttagaaaaaaagcctttggcttgcgcgcttgcggtgcgttgttggctcaccaaggcaaactggtcttgatctgcacgattaacgttaaactgttcagccacgttttcggcagtctggggcatggtgtctacaccatacaattctttaagtttagggttaatgaaacgccagcccatagtggtgtcttcaatcttctggctacggccaaaggcactgtcagacttacccattacataaggtgcacggctcatgctttccacaccacctgcaatcaccaagttcgcttcgccggctttaatggcacgggcagcaatggcaatcgcatcgagtga

SEQ ID NO: 58316 - DNA, 522 bp, Acinetobacter baumannii
atgatggctggtattgagcattttacagcggtacttgccgaatacatgatgaagcacgaaaagaatttctactattcagatgatgcaaaaagccgtgctttatggatgtggcatatgcttgaagaatctgagcataaagatattgcctatgatgtatatcaattactcaatggtagctactcactacgagcttctggcttcttcttagctttctttactattttaggtttaatcccagcaactaccttgtttattccggttttaagaaaaccgcaggaaatgttgactagaaaattctggaaagacgcgcgccgtggtgtaggacttatttttggtccaaaagatggtgtatttggtagcaccattggccagattttcgattacttacgtcctgacttccatccaaatgaccatgacacgaccgaatatctagagtactacaaagacaaattactcaaagaaggcggcgcgattgcaccttactttgtgaaggaatttaccccacctgtacgcttgtcttaa

SEQ ID NO: 58317 - DNA, 462 bp, Acinetobacter baumannii
gtgaaagaatcagagattactaaagcgactttttataattattttcactctaaagaacgactcattgaaatttgcctgatggtgcaaaaagaaaagctccaggaacaagtagtcgcaatggtcgaatatgacttaaacactcttgtaatagataaactcaaaaagctttactttctacataccgatttagaagggccgtattacttattatttaaagccgtttttgaaattaaaaatagctatcccaacgcttatcaatccgcagtgcgctatagaacatggctaaaaaatgaaatttatagccagcttagaaccctaaaaaccgatgtctcttttaccgatgccaaactatttttatatatggtggaaggcacaatcattcagcttttaagttctggcagggtaagcgagagggagagtgtgtttgaatattttttacgaggactaacttcatgcaaataa

SEQ ID NO: 58318 - DNA, 405 bp, Acinetobacter baumannii
gtgcagtctcatttagataaattaactattcataaaggctatttgttaatttctgattcaggaacacttggtcgtattacatatgctttggaacaacatgatggacatgtagctacaaacaatttgattcgagtactcattgatgatctagctctacgtggatatgtttttcaattcttgaaaagtgatattggacaaagtctaatattgaaaaatgcttatgggacaaatcaggaacaccttgagccagatgtaatcagtgaggttctgatccctattccaacagatcggactgttgtggaggaaattggtttacaggtaattaaatcaattgatgaattagaggcttcaattaaaaatagcagagaatctaatgataagttactcactgcattatctttatag

SEQ ID NO: 58319 - DNA, 489 bp, Acinetobacter baumannii
atgtgtataagagacaggtgtacgccagcgcaacgcttttatgaaaagcatctttattctattttttttggtactcaaccaagtgatgaaattgagaagaagctttttgggcctatagatgaatatggttctaaagctataaaagcatttcttacaaatgatgaatcattgtggcatgaaaattttatagcattatttagatatttagatgctcagaaacttcgaacgcctaaagggcttgattggattaaaagtaaattttcaaatttaaatcaaagccagttaatgacagagatgcaagcattgaatgatatacatactacaatttggactgaaggggttagagaatttgtatccgctgagcactcacaagttaaatttatactctctgatcatcctataacaatttataattatgctttatcaccaacgcataaagattgtatataccctgtctcttatacacatctccgagcccacgagacgtag

SEQ ID NO: 58320 - DNA, 144 bp, Acinetobacter baumannii; identical to SEQ ID NO: 48941

SEQ ID NO: 58321 - DNA, 849 bp, Acinetobacter baumannii
atgagttacgaagctaaagtattcaatgtaatgatagcctctcctggagatgttgcatctgaaaggactatcattcgtgatgtaatatatgaatggaatgctgttcattcaaaatcacgaaatattgttttattacctgttggatgggaatctcattcatctcctgaaatgggagcatctcctcaagaaatcataaataaccaagttttagataaatgtgacttccttattggtgttttttggacacgcattggaacacctaccacagaatatgctagcggcactgtggaggaaatcgaaaaacatatagccactgataaaccagcaatgctttatttttccagtcagcctgttgtaatagacacagttgacccaaatcaatatgctgaattaagtaagtttaagaaaagttgtcaaactcgtggcttatatcaaagttatgataaccaatctgactttaaagagaaattttatcgccatctccaacttaaaattaatgaacactctttatttaaattcgaaataagtgactcattactacataaaactgaagtagtaaaatctaaaatttcacttccgactttatcaaacgaagctcgtacattacttaaagaagcaagtctcgatagtaacggtactattatgtatctaagctatcttgggggtgaagacattcaaactaatggtaaaaattttatttcatcacgacaaccaagagaggttgcccgttggaaatcagctattgaagaactaaaagatgaaaatttaattgaagatcgcggctataaaggtgaaatatttagaatcactaatctcggttatcaaatcgcggatatgatcgaattataa

SEQ ID NO: 58322 - DNA, 354 bp, Acinetobacter baumannii
  misc_feature (333)..(342): n is a, c, g, or t
atgatttctagtggaccaaacctgaacccagaattacctggaacttatattaatttattagttgatatggttaagcgcttgaatatctctgctgagcagtttttagatggaagtggcataacattagaaaaattaaacaaaccgtattggtatgttgagtttaataccttaaataacttacttaagcatgcgattcaacgcactcatgagccagcattggcgggttatttggcgttggaaatgaaagcgtcttgttatggttcggtgggtatggcggccatggtcagtacaaatttgggagaggccttaaaaatatttgagcaatttatagcnnnnnnnnnnggctcgttgtga

SEQ ID NO: 58323 - DNA, 1377 bp, Acinetobacter baumannii
atgtcatatttttggttcttaatcgtatgtatattgctagtattaatttggaaaaactatgaaaaatcaaagcaagataaagacatcatcatagatcagcaaaaaaagctggatgagcaacgccaacagctagatttaacaaacaaaaagttaaatcgcattggtgaatttgaagaagttattaaaaatttaaagattgaaatagaagacacacgaacgcaatatttaattaagaaaaattatttggatgaagtagaaagtcgattaaggctttactctaatgatttagatcttattgaccaaggggtttatgaaccaatcttttcttttgaattaagcaatgaatataaagaagctttaagtaaaaataaagaacttcaaaaggaaatggttaagcaaggaaaagctgttatttctgaagaaagttgggaaattattggcgcaaatggaaagaaaaaaagtggagaaaaacttacgaaaaacactatatttctaaccttgcgtgcattcaacggagaatgtgatgctattatttctggtgtttcttggtcaagaatacatactgcttcacaaaaaattgcagatatatttaataacatcaataagaaaaatgagattaatttaatttatatcagccaatcatatttacaactgaaattagatgaactcaacctaaagtttgagtacctagaaaaaatccagcaagaaaaagaagagagagcagagctaagacgtattcaacgtgaagaagaaaagctacgtgaaagtatagaagatgctgaagaacaagaaagagaatatgaagcaaaattagcaaaaatacgtaaagaaatcgaaaaatcagtgggtgaagaacaaatccgcttaaaagcacagattgatttgttgaatgaacaattggaaaacgcccaccaaaagaaagaaagagctctatcaatggcccaacaaacaaaaatgggatacgtatatataatttcaaacattggtgtatttggcgaaaatatttataaaattggcttgacccgaagagttgatccatttgagcgtattaatgaattaagcgatgctgcccttccctttagatttgatgtacatgctatggtttatagtgaaaatgctcctgagcttgaatcaaaacttcatagatacttcgatgatcgacgtataaataaggtgaattatagaaaagaattttttgaagcaaatttaaatgaaattgaagaaattgttaatcaactgggccatcaagctcttttccatccaattcctgaggctaaagaatatagacaaactttacagttaatcgaaagtgctaataaaaatacgattgaaggttcattaactttgaaagttgatcaacttccaaatactatttaa

SEQ ID NO: 58324 - DNA, 1191 bp, Acinetobacter baumannii
atgataaaagttattcatttagagggtaagtttattttggtagatgatgaatatgttctatcagttcaagcttctattatcagcactaaagatgaagatggttatattccaaatgaattttttgagttcgtaaaaattttggatgaagacgagtttgagatagatgaagtaggtttgtcatttaatcccctctatcctaataaagaatcattttctacaaatatttttatattagaaaatccatctcaaataaaacagataaaaaaattgcagttacttgataaagtaataaatattcgggatgtaaatactaatgaaagaaatatttttttgtcgaataaattagaggaaaaatcattaaattcatcttctaaatgggttccgcatttagccgcaaaagttttttcaaaaccaaatgagagtgtggttagcatcaaagctagcttatgccctcaacccgatgaagatcagtatgtctcagatgaatattttgagtttattaaattcttagatgacgaaggctttcagcttgaagaagtaggcattagttttaataatacaaaacctttgaaaataactaactctactgcaaaaatagagctttacgatagcgctctgttaaataagattaagtatattcaactttttgactctatagtttgtataaacccttccttagaaaaaaataatgatttaaaaaacaaatatatacaaaatcaaaattttaatacccataaagagtccgaaaccttttctcaaagtaattttaaatctaagggctcttgtaaagaatgtcatgctgaaatacctttaggaatagatatttgtgacgattgccgttcagaaaaactaaaaaaaatacgtggtatagctccccaaaaaacttatgaaacaattaaaaagcccataaatttttgcgaaaaatgcagaagtgagatcccttttggtgcaaaaatttgtgatgcttgtcgatcacaacagttaaaaaaaatatactcaggtgaaaaaagtaatattcaaaataattctacgatgcatactgttacacctaaaaatgagtggaagccatggccccctaaagcaccagcaaatattactcaaacagcaaagaaaccagaaaaaataggattagttagttggattataattatttgtattggattctttttactaaaagcttgttttggatag

SEQ ID NO: 58325 - DNA, 351 bp, Acinetobacter baumannii
atgttcagttcagatttaacagattatgtcattcgacaattaggtcggactaaaaataaacgttatgaagcatatatagttagtcgaattattcatttacttaacgactttactttaaaatttgtcactcaacagtttgttagattatcaaataagaaaattgctttaactgatttatattttcctcaacttggtattcatattgaagttgatgaagggcatcactttttaagaaatagtaaaatggagtattcactcaaccaaatagatgaacctctttatagtatctctcaaacagaaagtgatcctagccaaaataatggacagtacttccctctaaagataacgtaa

SEQ ID NO: 58326 - DNA, 132 bp, Acinetobacter baumannii
atgttttttcatcctgatcataaaaatttgatgggaatgaaatgggaatggaatcctcttatttactcactacctattacgttgcataacgctagtaatattacgttggtaagtaattctagagaaatttga

SEQ ID NO: 58327 - DNA, 315 bp, Acinetobacter baumannii
atgcaaagcgaatttgatcaatacaaaagttttttattgcagagagaagaactttccaaaacaaacaaaatagctccttggttagattacttaggaaacccaatttttgaaaatgacttaattcaacacccatctggtgaaattggtttagttatatttttacagtcagaatatgagccatataaccaatggcgtgtgaaatataatgacaatgttttatccagactttgtttgcaaataggcgataaaggacaagccagtgtagttggtcatccattagagcatattgaagttattcaaactgtagtgccgtag

SEQ ID NO: 58328 - DNA, 1059 bp, Acinetobacter baumannii
atgaatcccctatcgactgcaaaaaatttagttagttttgccaaaagccaattaccagtttttcaaagcaaaacaaccaaacaagaatcaatggcctttacctttggtgatgccgttccagtcctcaatggaaatgaattatcggattacatggaatcatggttcaatggccgatggtatgaacctcaggtcagtatgagtggtttggccaaatcatataaatcgacaccatatttaaatagcggaattatttttaaacgtaattttctggctaatctttttattcctcatgcaaagttaaatcgaaaaggatttgaacaagttgctttagattatgtttggtgtggaaatacttacttagaagaaatcaaatcacgactcggaagtgtaattcagtacaaaccagctttagcaaaatatatgcgtcgtggtgaatactctgatcagttctttttactttgtgatgaccataaaggctatcaagaatttgaattttataatcgtgtttgtcacattcgggaaacagatattgatcaggaaatttatggagcacctgaatacatatctgctttgcaaagtgcatggctaaacgaatctgctaccttattccgtcgtaagtattacaacaatggatctcatgctggattcatcttatatgtgaatgacgcagcgcaggatccaaatgatattacagctttgcgtcaggctctaaaggatagtaaaggaccagggaacttccgtaatttattttattacgcaccgggtggaaaaaaagatggtatccagatcttgcctgtttctgaaattgcagcaaaagatgacttcaccaatattaaatcaatcacacgtgacgataccttggcggcactccgcatacctcctcaactcatgggtattgttccaaataatactggcggttttggatcaattaaagatgcagcagaagtgttttatcaaaatgaaattgttccactccagtcacgcatgcagcagctcaatgaatgggctggtgatgagatcattagatttaaggaatatgatttaaaaaacgttacctaa

SEQ ID NO: 58329 - DNA, 1779 bp, Acinetobacter baumannii
atgaatgaattatcacagttagctaatcttgagctgattctagataacaaattaaaagccaaatttctcttttggcttggctggaaaattgtcgatattgctgaagcgctagacgaaaatgagcgtacagttcaggcttggaaaaccagagaagagtgggataaaacacgatcagaaagtcgtgttgaagaagcattaacagttcgcttaatgactctcactctgaagaacaaaaaatcgagtggagactataaggaattaggcgaattatttaaaaattataaagaatttgcccgaattgaacgttataaggaaggcggtaatgaagcggatctaaatccaaatattgccaagcgtaacgcagcacccaagaagaaaaaagaaaataatcagttcactgaagaacaagttgaacaacttatttcagcctttgaagatagtctatttgactatcagcgcgattggtataaagcaggcaaccaacgtactcgagtaattctcaaaagccgtcaaattggcgcgacatggtactttgcccgagaagctttggtcgatgctgttaaaacaggtcgtaatcaaattttcttatctgcttcaaaggctcaggctcatattttcaaagaatacattaaaggttttgcgtatgaagcttgcggagttgaattggtcggagatccgatcgtactgccagataataatcaagcttcattgtcattcttaggtacaaattacagaactgcccaaggccaccacggtaatttttatttcgatgagtttttctggacgtttggcttcactgaactaaacaaagtagcttcggctatggctttgcataaaaaatggcgtaaaacctatttttcaacgccttccacaatggcgcatgaagccttcactttctggaatggaacacgtaataaccgtggtcgacctaaagaccaaagactcgatatagatgtatcacatgatgcattaaaaaatggccgcttatgtgaagacaaaatgtggcgtcaaatcgttacgatcttagacgctgaaaatggcggatgtgatctattcgatattgaagaattgcgatacgaatattcacctgaagaatttgcaaatcttttgatgtgccaatttattgatgatggcgcatctgttttccctttagcaatgcttcaaccatgtatggttgactcatgggaagtttgggctgatgactttaaacccttccatgctagaccatacggcaataatcctgtttggattggttatgaccctgcagaaagtggtgatagtgcaggcttggtagttgtagccccctcccctgttcctggtgggaaatttcgcgtgttagaaagaatccaattccgtggaatggattttaaaaatcaggcagaaatgatccgcaaaacaacactacgttattacgtgacttatatcggtatcgatattacaggtatgggtactggtgtttctcaattagttaagcagtttttcccaaatgtcactgagttcagttattcacctgaagtaaaaaccagacttgtacttaaaacaatggatgtcattagaaatggtcgtcttgagtacgacgcagggtggactgatctttcccaatcattaatgagcattaaaaaaacgcttacagcaagccaacgtcaaatgacttttacagcaggccgttctgaagaaataggacacgcggatctagcctggtcactcatgcatgcactttataacgaaccacttgaaggccaaacacaaatgaatcaatctttcatggagatctattaa

SEQ ID NO: 58330 - DNA, 831 bp, Acinetobacter baumannii
atgactgaaaaaacacagccgaaaaaatttaaatcgaaatggtttcgagttgccgtggctggtgacaccacagatggtcgtgaaattcaacctgaatggatccaccaaatggctcagacttatagtctggatacctatggtgctcgtattaatttagaacatattaaaggcctttcacctgatagcattttttgcgcttatggcgatgtactcgcagtaaaaacagagaaagtaacaattaatggtgaacaaaaagatgctctttacgttcagatccagccaaatgaaaatttgattgctttaaaccaaaaaaatcaaaaaatttatacatctatcgaagttgatgaaaattttgcgaaaactggccaagcctatttagtgggacttgccgttactgacagtcctgcatcgcttggtactgaaatgctctcttttgcagctggcgcaaatgaaaacccacttaaagcgaagaaattacgtcctgaaaatttattcactgcagctcaagaaacaaaactcgaattcgaagaagttaaagagtcatttgccagtgacttggtgaataaggttaagaacttatttaaaacccaagaacagcaacaacagcagactcaagaaaactttagtcaaaacgaacaagccattctagaaattgcccagcaaacagcgaatcaggggactgagtttgcagacttaaaagtcaaacatgagcagctgcagactgaatttaatcaattaaaaaacaagctagatcaagagccacaaggtcaaccacgaccactgtctaacaacagcaaatttcatgaagaagttggtgaagtcgactgttaa

SEQ ID NO: 58331 - DNA, 1011 bp, Acinetobacter baumannii
atgcgtacagaaacacgtactaagtacaataaggtcatggttgagttagctaaactcaatggggttgaaaacgtttcacaaaaatttaatgtgacaccaactgttcaacaaaagcttgaagataaaattcaagaatcatctgaatttttgaagaaaattaatatttttcttgttgctgaacaatcgggttctgcggttggacttggtatttctcgtcctattgcttctcgtacaaatacagatgctggagagcgtcaagctacagatccaactggaatggatgagcgtttttacttttgtcgtaaaaccgattttgatacagcaattaagtacgcaaaacttgatcaatgggcaaaattcaaagatttttatagtcgattccgtggcgctatcgtaaaacgacaagctctggaccgtatcatgatcgggttcaatggtatcagtatcgcttctaatacggacattacagcaaatcctttattgcaagatgtgaataaaggctggttgcaaaaaatgcgtgaagagaatgaatcgcgcgtaatgaaatcaggtgctgtgcaaggaaaaattacagtaggtaaaactggcgattataaaaaccttgatgcattggttatgaatatcgttgatgaaatgattgatgacgttcaccagggcaatccagacttagtcgtaatgtgtaaccgaaaaactgtttcggataaatacttcccattggtcaataaagatcaagacaactctgaaaaactagccgcagacatcatcatcagccaaaaacgcatgggtggattgcctgtttactcagtaccgtttttccctgaaggcatcatctttgtaactacattcgataacttatcgatttatgttcaagagggcgctcgtcgtcgtacagtcattgacaatccaaaacgtgaccaaatcgagaattatgagtcttcaaacgaagattattacattgaagatcttggtcttgcttgtatggctgaaaatatcgaaattctggcggagtaa

SEQ ID NO: 58332 - DNA, 864 bp, Acinetobacter baumannii
atgaacttggctcgaaagcacttccaacagcatcaagctaaatccgcagctgagacagctgcggagttcggtaccatgcgaaatacaaatgcctatgagcagcaacttttgcagcttaatagtgataaaaatcgactcaaaaatattcagtccaaacaaaacaaaatcgaattaaagcgccagttaattccaaattacaaaccatacgtggaaggtattttagaagtaaaacctggtgttcaggatgcagtaattactgagattttggtttggtcaattgatattggtgattttgattttgcacttgatattgccgaatacattctgaaatacggcttaaaacttccagaccgttttgaacgttctgaagcatgctttattactgaagatattgcagaagaatttttaaaattactcaaaactgaagctggtatcgatcaaaaaggattagatcaattagtgcgtttagaacgtctaattactgataaatctttgccacaaaatcgtcttgatatgccagatgaagttaaagctaagctttatctcgccttaggtaaaggtgaaatgcagtttttgactggtgatcttgaaaatgatttacctcgctctgttcatgctcaatgttggttagaaaaagcattagatcttgacgataaatgtggcggtcgaactgatctaaacaaaatgagtaagctttctaccaagttattagcagaaagagaaactacagatactttggcttatcaaaaagaatctcaagtagttactaccaacgaacaaacagaagttaccgacgttttgttaaatcaaaatggaacgcctgtggttgatgaccacggcaatatggtaccgacttctgaataa

SEQ ID NO: 58333 - DNA, 450 bp, Acinetobacter baumannii
atgggatttatcgcaaacggtgcaataaccccaagtcatatcactatttcaagtggcaccttttttcctgaaatttctctagatgagatccgcagttttgttcggatcgacggatcagtgaccgatgttcgattgcaacaacttactcgggaagaagtcatcgatgtaaatcgtttacttgcaaacttagtgatgaaagccgaaaagctagttgatttagctgttaatgaaattgacggtaaagcagatactgaagtgctttatttttcagccgtatcgaatggtgtagcagcaaaagtaaacgaaatttatcgtaactatgacagtactaattctggtgaaaaaaaatcagaatcgatggattgttcagttgatgactaccgacgaaataagcaatgggcgattcaacagctaaaaggcgaaaaccacagcatagttgagttgatatga

SEQ ID NO: 58334 - DNA, 213 bp, Acinetobacter baumannii
atgagcaaaaccattacagctattcaaaatgacactatcaactcaatttgttggcgatattacggacgcagttcgggtgtagttgaaaaggtactcgaagcaaatccagctttggccgatataggaatttttttgcccattggcacctctgtaattcttcctgatatcgatacaccacaacaaatcaagcaaacagtacaactgtgggattaa

SEQ ID NO: 58335 - DNA, 357 bp, Acinetobacter baumannii
atgccagaaccaactacaacttcagcaattacagcagtttcaattagtgcagcttcattacttccatttgtaaatgggaatgcattgcttggggcagtatttggagcagctctatttgctacaacgaaaaaagatttaaaaccattacagcgactttggacgatgatcattgccgttggtattggctatttacttgcaccagaagtaacaactagaactttgattaccaacgatgcaacagcaggaatgattgcttcaattttttcattaccaattatcttaaaagctatggtctgggtagaccaatcgagtctatctgacatctggaataagtttcgtggaggaggaaagtcatga

SEQ ID NO: 58336 - DNA, 273 bp, Acinetobacter baumannii
atgatcgaaattatgtttcaactgattgctctgattgcctacttgatttgtggtctacggatcatctgttttgatgctgaaggcctacgccatcgtcatggcttttcaattttggccacgattcttattgctgcttttatcgggcaatcaattcacattctcttttttaaagatcctgtcacgttatgggatgccatctttgcagtacttttggcggtcctaatttgccgtgcaaaaggtaatgtcgcaaaacttatctggagcacaacataa

SEQ ID NO: 58337 - DNA, 861 bp, Acinetobacter baumannii
atgccagttatcttaaaatttgggtcaaaaggcagtgatgtaattacattgcagcaacagcttaaaaagcttggctttaaaggcgttaaagggaaagagctttctatcgatggtgattttggagcttccaccgaatatgctgtcattacattccaaaagcaaaaaaatttggttgcagatggcaaagtaggggataagacgcgcagtgcccttctggaacaaaacatctcaaaattgcttaaagatagtgattataaaaaagcagctgagcgcctaaaagtctctgaattggtcatccgtgtttttggtgcagttgaaggtcaaagcgttgggtttcttaaaaacggaaaacctaaaattctatttgaacgccatcgaatgtatgcatatttgcgtttgaaaaaaggcacagcttttgccaataaaatggaagctgaacgaccgaatattgttaatcgtaaatatggtggatatcagggaaatgaagcggagtatgttcgtcttgaacaagctaagcaaatcgatgttgaaagtgcattgatgtcaacatcatggggacagtttcaggtgatgggcgaaaattggaaagatttaggctatacatctgtccaagaatttgttgatcagcagtttgtaaatgagtcaaaccagttagaagctttcatccgtttcattgaatggaaaacaggcatcattgaaaagaaaaaagttgctctaattgatgcgctgcgagcaaaaaattgggatgttgttttcacactctataatggtcctaattataaaaaacttgggtaccaggcaaaattccaaaaggaatatgatcatttagaaccactatatagtgagactaaagcagcatga

SEQ ID NO: 58338 - DNA, 501 bp, Acinetobacter baumannii
atgaaaaaaccagatagtttaagaaaatatcttttagatgcgattcctgaactacgtcgtgatcctgaccgcatccttatttttgttgatgatggtgcggttcggagtactttggcaaatggtttatcatttgaatatgcatacaccctcacaatgattttaaccgattatgctggtgaccttgcagcagtcagtattccattattggattgggttcgtatgaatcaatctaatctaatggccaaccttgataacgttaaatctggcattaagtttgaagctgaaattttggcaaatgataaagttgatttggctattcagttgccactaactgaacgtgtgattgtgaagcaaaccagcgaaggtttaagtgtcgactatccagatgagccacgttatcacaaagccgaagaatcaaaacaagtcacgctgtttgataaagatggatctgaattgacgtcttggatttcaagagatcctgagcaagagtattttctataa

SEQ ID NO: 58339 - DNA, 453 bp, Acinetobacter baumannii
atggctgagcttgaatatctttctgagcatttaaatgctttattagtatccctaaacgatgcagcgcgtcgcaaaatggcaatggtaattgcacgtaaaatacgtgcaagccaaagtcagcgtattactcgacaacagaatcctgacggtagtgcttatatcccgagaaaaaatttaagaaaaagaaaagggcagattaagaaaaaaatgttcatgaaattaaaaacaacacggttcatgaaaatcgaaaatattcctaatggggtaactattggatttgatcaacgagtatcgagacttgcccgaattcaccaggacggattaattgataatttgaaatataacggacgatctttcaaagtcagatatgcacagcgtcaattgcttggctttactgaagctgaaattgaaatgattgaaaatgacgttcttaactttatagattcaaaatga

SEQ ID NO: 58340 - DNA, 534 bp, Acinetobacter baumannii
atgaatgcagaatccaatcgtcgtcttgaaaatatgatccgtctaggacgtatcaagaccgtaataccgtctagcccttttcataaagttacagtcaatttaggggacatcgtaactaaagaattgcgcctattaaatttaagagctggtaaagattcaactcatgatttaccgagcattgatgaagaatgcattgtatttagcccttgcggagtaatcgaactcggagtcgttgttgttggtttaaacaatgaagattttccgactcagtcattagatccagatattaaatttagagcgtttgaagatggtgcagtcataagttatgacgtcaaaaaacatgagcttcaagcaattcttccagaaggtggaactgtaaaaattgttggcaatctcgaagtagaggggggaatccattccactttggatattacctcagatgcggatgttatcgcaggaaagataagtctaacgaaacataaaacctctggtgttaagggtggcggtgaaacttctggaggaccagtaccatga

SEQ ID NO: 58341 - DNA, 345 bp, Acinetobacter baumannii
atgatctcacgtcattctggcgtaacaatttcagaaatcgaaagtatagagcaatcaattgaagacattgtgactactcctttagggagtcgtgtcatgcgtggcgactacggttcgatagtgcctgaccttatcgaccaacctatgaatgatgtacttgttctaaaaatttacagtgcaatttatacacctgtgactagatgggaaaaacgcatcagtattgaaaatatcaacatttccaagatcgcttcagggcttatgcagttagatcttgagacagtccataccattactggccagtccctaaatttaaatattccacttcaaatgggggcttcatcatga

SEQ ID NO: 58342 - DNA, 906 bp, Acinetobacter baumannii
atgagcgtcgattttagccagcttgctccacctgacattattgaaacgatagattatgaagttatcttagccgaacgaaaggcagacttaattaatagatttccagatgatcaaaaaccacagattactgaagtacttaaccgtgaaagtgagcctttgacgaaatacattgaagaaaattcttatcgtgaaacagtgttaagaaatcggattaataccgcagcacgtggcttattattggcttatgcggaaaaaaatgatttagatcaactaggcgcaaattacaatgttaaacgtctgattattaagcctgcagacaatacaaaaacgccacctgttcctgctgtctatgaatcagatccagcttttcgtgaacgtatccaacttgcatttgattcattgtcggtagctggaccagaagcagcttataaaaaaattgcgcgtgatgctgatggccgtgttgctgacgtttcaattacttcaccaatgccagcccatgttactttgaccattctgcaagcggactctttaacaggatctgcttcccctgagcttgtccagattgtcgacaaggcagcaaatgctgaagaaaagcggccaataggagatcgtgtcacagttatatctgctgaaattattaattattcaattaatgccaagctatacatcggtaaagatcctgaagcagcaactgtacttgctcaagccattaacaatgttactgagtatgcgcaaaagcaaaaacgtattggtcgatctattcgtatgtctgcaatttatgcagctttacatgttgatggtgtaaatagagtggagttacttaatccaactgcagatgttgttttaactccaacacaagcctcgttttgtgaaaatatttccgtggttattgggggcgttgaatga

SEQ ID NO: 58343 - DNA, 531 bp, Acinetobacter baumannii
atgagtaaattactgcctcctaatagcactcgatttgaccgtaacgttacggacgtttgtgcaaatagtttagagcttcctgttcaaattaagagtttggcatcaattgaccaagctccagatcattttttgtcatttctggcttggcaatactcagttgatagttgggatactgattggcaaccatcacttcaacgccaactaataaaaaaatcatttagacaacatcaaattaaaggtacacgaactgctgttcgagaagtactcgctcagtttggatatacatgtgagtttcaggaatggtttgaaacagttccgaacggagtaccaggtactttctctttaacactggatctaaacgggcttgaacttaccgacgcaacttacgcagaagtaaacaggcttgtcaaagatgcaaagcctgcatcacgtcacctaacaaatttagttattaacgttcaaccgctttgtattcctcgtgttgctattggttgtcacggtgctgaaacagtcacaatttttgtcgagtaa

SEQ ID NO: 58344 - DNA, 387 bp, Acinetobacter baumannii
atgaaatattttagaaatcaaaacactggcgaagtatttgcatttgaagcagatttaattgaaatgacgactgaagaaattgatcgccatcttaatccacaaaactatctttctgatgaagaaaaagaacagttgcgacttgctgaatttaagcctcttacaagacgccaatttaagcttgcgctccttcagtatgagttgttagaaaaggtagaacaatctatagcagccattgaagatccagcgctaaaaacacgagttcagattgaatataacgaatcagaaaagtttgagcgtgcaaatgattcagtcaaatatatgcttactcttttagatatttctaatgatgaaatcgatgaaatgtggcgctatgcaatgacactttaa

SEQ ID NO: 58345 - DNA, 1173 bp, Acinetobacter baumannii
atggctcaagattatcaccatggtgtccgagttttagaactcaatgatggcaccagaccaatacgaacagtatcaagttccgtcgttggtatggtatgtactgcatccgatgcagatgcaaccaaatttcctttaaatacacccgtattacttacaaatgttcaagctgctttagacaaagcaggggatcagggaacattagcacgctcacttcaagcgattgctgatcaaactaatcctgccaccgtagttgtacgtgtagaacagaaagctgatgctgcagaacaaacgtccgcaatcattggcggttcagtcaacggtaaatatacaggcatgaaagctttgcttgctgctgaagctcagcttggcgtgaaaccacggatcttaggtattcctggtcttgatacatctgccgtttcagttgccttagtcgcattagcgcaaaagctacgtggatttgcatatctttccgcaaatggctgtgaaacgaaagaagaagctcaagcgtaccgtcaaacttttggtgcacgtgaagccatgcttatctggcctgatttcttaggctgggatactgcaaccaatgcgaccactacttttgaagcgactgctcgagcacttggcctacgagcaaaaatcgataatgaaacaggttggcataaatcgctttctaacgttgctgtcaacggtgtgacaggcattagcaaagatgtgtattggcagctgcaagatcctgaaacggatgctggctatctaaaccaaaatgacattacgactctcatccaacgtgatggcttccgtttttggggttcgcgtacttgttctgacgaccctcttttcgcatttgagaactacacgagaactgcacaaatccttgcagataccatggcggaagggcacatgtgggcggctgatttaccacttacaccaggtctggccaaagacattattgaaggcattaacgccaaaatgcgtgaaatgactcaaagcaactatttactcggtggtgagtgttggttagatccagtcatcaatacaaaagaagtcctcaagtcaggcaagttctatatcgactacgactacacacctgttccaccacttgaaaacttagtgttacgacaacgcattactgaccgttacttggtcgactttgcttcgcgtgtaacagcaggataa

SEQ ID NO: 58346 - DNA, 519 bp, Acinetobacter baumannii
atggctataccaagcaaattaaaactctcaaacctatataacgaaggtaattcatatcttggccaaactggtgaagtcacgttaccgaaactaggccgtaaactcgaaaactggcgaggcggtggcttgaatggcaacgttaaggtcgatttaggtcttagtgatgatgcgattgagatgacctggaaactcggtggtatcgataaacttgttttacaacaatttggtgctgaaaccatttctgcaattggtttgcgttttgctggttcatatcagcgcgatgatactggtgaagataccgcagtcgaaatcgtaattcgtggtcgtcacgaagaaatcgattttggtaatgccaaagctggtgatgatactgaaataacagtaaagactatttggtcttattacaaactcacgatcgatggtgaagttgtcatcgagattgatattcctggtatcaaagaaaatgtaggtggtgtcgatcgactcgaaaagcaccgtgccaacatcggtttaatttaa

SEQ ID NO: 58347 - DNA, 336 bp, Acinetobacter baumannii
atgcaaactttagaacaagttgaaaacactgcgaccattaatctagatgtccagactgtagaccttgatagtccaattatgatgggaaatctagaaattaaatctttagagattcgcaaaccaaattcagaagcattacaggggttgaaaattgctgacttattacaaggtgatgtctcttcaatttttactattttgcctcgtattagttcgccaacattaacaaaaactcagatccgtcagcttgaaccttcggatattgcacaaattggtggagtaattctactttttttgcagccgaaatcagcacgtgcggaagtattacgccaacagtag

SEQ ID NO: 58348 - DNA, 3174 bp, Acinetobacter baumannii
atgaaacccttaaaacttgaagtcctgtttggatcaaaagatagtttaagtccagctctcaagttaatgattggaagtagcaatgctgcttccaaagcattaaaaaatacccgtgatgaattaaaacgacttaatgatcaacaacggcaacttgattcatttaaaaagctcaaagaggatgttaaacaagcctctactgaactagaacgcaataaaaaaatagtacagtcactgcgcgagcaattagcggtaaatccagatgctaaattgacaaaagaattaaaaaaggcagaaacacaagttaagcaattaactaaggtcgtaactgaaggtcgaccacgtctaattgaactcagaaatgaattaaacaatgccggtctaaagtcgaaaaactttgctgaccagcagcaagaattaaaagaaaaaattaatgcagccaatacatcgatcgacagtcaaaaaaataagctcgaaaacttaaaccgtttccaaaaatcacatagcaagatgacgggtaatgtacggactgcagccatgtatggagcaggtatggctgcaactggtaccgctgccttatatcaaatgcgtaaaccaattgatgaatccaaacgggtagatgttgaagaaaatcgtatcgcatcactaggctttgggaaaaaagctacagatgaagcaattcaatacgctaaggcaatgaaaacttttggtaccagtacgctagataatttaaccctggtgcgtgatggtgtcacagcttttggtgatgtacatcatgcccaatgggtagctccaacactggctaaaatgaaatttgcaaatgaagccatgtatggtgaccacggtgtagaaaatgaaaaaaaattcatggatatgcttaaagtcatcgaaatgcgtaatggtttaaagagcaaagaatcatttcaggaacaagccaatattattcaacaagtgattacagctacaggtggacgtgtacaagctgaagagtggctcaatgtaatcaagacgggtggtatcgctgccaagggcatggataacaaggcgttctattacaaaatggagcctttagttcaggaaatgggtggacatcgtgtaggtacatcaatgatgtcggcttatcagaatttataccagggcagaacaacacaacgagcagctgcaaatctcgataaatttggtcttattggtgactattctaaagttaagcataacaagaccggagatttatcatatttagatattggcgcgattaaaggtgcagatctctttaagaaagatcagttcgcttggatggagcaagttttagtaccggcactgaatgccaaaggtataactaaagaaggggacgttatcgatgcgattggtagtgtcttcagtaaccgtactgcttcaaatctatttgctcagatgtatatgcaacgtgatcagatccataagaatgccaagctgaatgaaggtgcattcaatattgatcaacttaatacacaagctcaaggcacaacatcgggtaaagagctagaagcaagggcaaaacttaacgacgcatatttacagtttggccagactattttaccgatctatacccaagcacttgtcatggcatcaaatgctttgcaaggttttacaggctggatgcaacagaacccgactttggcaaaagcattaggcactggcctgttattgatagctggtggtttagtcgctattggtggcttacttctagttttctcaccactcattttaagcatgttaagtttgcgacttatgatggcgacattgggtgtgcaaggagggctcttaactagactatttagtggactaggcacttcatctatagcattaactacccgattctcatcagtgatatctaaagtttctgcattatctggtgttttaagaactagcttaactacagcttggttagcgagtagtccaaagggctttatttcaagtctcagacaattacctagtgtcatgaaaatagcaataacaaatgcttggatgatgacaaaaacatttggagccggtttatatacatcatttgtcaacgcagcacgtggagtatgggcatttgcaacagctctaactacaaatgcagttgttgccttaaggaattatgtttttgcagcttctatagcgatcagaaccaatggattactcggagcatctaaaatattgctcagaaatgcagtattaggtttatggtctgttttaagtggtggagccgttggtatgtttgctgctttagcaacaggtgcacgagttgctgctcaaagtgtattatttttaagtcgtgcactgcttatgaacccaattggcttaattattacgggtatagcaggcgctgcatttcttatttataaatactggcaaccgatcaaagctttttttcaaggattttggcaaggtctaacagaaggcatagcacctttaagtgcagcttttgctccattatttcaaacattaggatccgcattagctcccttaaaacctgtctgggattggctcattaactcatttaagacagcatggcaatgggtaagccagttgtttcaaccatttcaagccacaaaacaacagctcgatagtgccacaaatagtgggaaggcttttggcttatggcttgcaggtttggtaaatactgtagctgggctagtaggtaagttcttcaattttggggcaaatatcatcgatggtttaatcaatggtattaagtcaggctttgcaaaactaaaaactgtctggagtgaagtcaccagttacgttccaagcttttttacaaaaaaaatggacatccattctccatcccgtgtgatggccgaattgggtgggcacgttgttggtggtattggcatgggtttaactcaagcctttccagagttaaagaacaaatacaatcaagttctcaatttgttcaccaataaaactcaatcacccactatggatcagattgatattgctgctcccgttatttcaaaaattcaaacagcaccaaatttaacttcaagtcgtcagtcttcattggctgtggctggagacacttacacgattcatattcatgctgcaccaggacaaatagttcaagatcttgaacgtcaaattgaacaagtaattaatcgattacaacgcgataaattgtcacgtgtacgcacaatcatggcagatcaggagtaa

SEQ ID NO: 58349 - DNA, 423 bp, Acinetobacter baumannii
atgatgatgatattgggcatgttcccgtttagcatcccgactgcggtttaccagcagttacagcgtagtaccaactggcggcatccgagtaattcccgcgttggtgaaatgccagcctatcagtttgtgggtaggggggaagatacaattaccttagaaggaagtattgtgccggagtttggttctcagatgagtattactgctttacgtaccatgggtgatacaggtaaaaattttccgcttattgctggaacaggtaaagtttttgggctttatcacattgatgatttgcaagaaacacaaacttacttttttacagatggtactcctcgaaaaattgagtttagtttaaagctgacacaaggacagaagccaggaactctaatcggtaatgctgcaggtaaattgataggcttattatga

SEQ ID NO: 58350 - DNA, 1503 bp, Acinetobacter baumannii
atgacccttatttccgcaataaattcagttgttgatgatgtactgcaggcgagttctgttcctatttataaacttgttgttgatggcgtagatatctcatcaaaggtcaacaatcgcttagggcaaatgcgtattgaaaacaaacgtggttttgaggttgatacgcttgatttaacattgtccgatcatgatggattacttgaaatcccaagtaagggtgcggtcatacaagcatggcttggttggcagcattctggacttgtttataaaggtagctacatcgttaaagaagttgagcatggcggagcaccggatacacttcggatccgtgctaccagcgcagatatgaaaaaatctttaaagcaaaaaaaggaacgtagctttgatgatattgctttgggggatctgattagaaagattgcaatcgaacatgatcttaatgaccaagtatctgaagaactggccaaacataaaattattcatatcgatcaaaatgaatcagatgcaaatttactgactcgtttagcagatgagcacgatgctatagctaccatcaaaaacggtacattactctttatgccaaaaggccagagtcagaccatttctggccaagatttaccaacttaccttttgaccaggtcaaaaggcgatgaacacagatatagttttagtgatggaggggaagaggtcactgcaatacgtgcattttattacgacgataaaatggccaaaaaacttgaagtgattgttggtgaccaatcgaatcaaaatattaaagagttacgtcatattcatcgtgataaacaaaccgcaactttagctgctagagccaagctaaaccactttaaacgaacagcagaaacactcagttataaactggccagaggaataccagatcttgtcccggaacaaactttcttgtttattggaatcaaagagcagattgacgaaatttactggcttggaacaacgatcacagacacactggacagttcaggtggatatacaactgatcttcaacttgaagtttttttcccagatgcagacgatgtatctgaactatttgaagaccaatttgtttccgagaaagataaaaaatggactggtgttgtggtttattatcaagaaggggataaggctgtaaaactgactaaaggtgatcaatcaaaccctaaacatttctcatatctttatttgactaaagctggagcacaacaacgtttagatcgtgaatatgccctattagatctcgagacaggtaaatttacagcgcataatgagttagaccagaaggcttatacaggtttaaaaacacaatatacaatcggccaaaataaaagcccacgttattgggtaaccttgggggatcaaactaaccccaaagtcattgatcgtgtatttcaaagtaaagtggctgctgaaaaacgattaaagcgtgaattaccacgccttaatgctaagaaagatatgcttgaacaagtcaaaacagatcaaaagttataa

SEQ ID NO: 58351 - DNA, 804 bp, Acinetobacter baumannii
atgacacaaaacctctcaccacaatacaatcctagtggacatagtttcagtggttggctcggtggtaaatcacaactagctagaacaatcattgatatgcttccagaacataaaacatatgttgaagtcttcggcggagcaggatgggttctatttaaaaaaaccccttctactgtagaagttattaatgacattaatgacgatctgattaacctgtatcgcatattaaaatttcacttcgatgcgtttttaactgaatttgaattattgttattttcacgtactcaatttgacgattttaaacgtgaccaatctggtcttactgatattcaaagagcagtgaaattttattatttactacgctctgcctttggttgccaattagatggctcttttacctattctaaagatagaacgaaccgcatgcgtctgggcgaacgtctacgggaacatttagtttctattcatgaacgtttgcaagatgtagtcattgaaaatcgctcttatgattatgtcatcaatcgcttggatggtcctgacacattattttatctggatcctccctattgggattgcgaaaatgtttatggtaaaggcatttggtctaaagaggatttttatactctaaaagacaaactagataagattaaaggaaagttcattttaagcctgaacgatgtgcctgaagtgagagaactgtttaaggactatcaaatgacacatcgtaaaatccgttggtcagtgaactctaaagcagctcatgaagaccacaatggcaatgagttgatcatttataacttttga

SEQ ID NO: 58352 - DNA, 294 bp, Acinetobacter baumannii
atgattgcacccaataactacaacaaaataaacaaaaacaattcccgtccacaactcgtttgcccacactgtaaagttactaatctaaaaattcgctcaagtgagcaacgacaccctttactgaaggacgtttggctaacatgtcctaacttattttgtggttttacatgtggcgggcatattgaaattactcacactatttctccaagtgcagcaccagatccgaagattcatatacctactttattagagttaaaagcaacaaatgatgagaattgggacattaagccatga

SEQ ID NO: 58353 - DNA, 450 bp, Acinetobacter baumannii
atgaaaagagtccagcatctaactcccattttaaatattgtatttaagggcaaaattttctttttaagccgtgttaatggccgtgagcttatatggctaaagcgttgtgaagaaatgctacctgagttgtattgggattattcattagactttccatttaaggctaaaagcatttcaaaggtaaaggatcgaaagcaccggagagcttgttaccagtcatttgctcaatataaaaaatcttttaaaccacgacctatcccaaaactaaaaattttaaaagatgaatggccagctttagagaaatggatagcttcaatgcaggaggcaactaaaacggctgttaaaaagtttatcgatactgcagacgcaatgtcttctgcatttaattcattagaaaactttaggactaattacttgtgtagttgggatctagcagctggagaggattaa

SEQ ID NO: 58354 - DNA, 198 bp, Acinetobacter baumannii
atgcaagtcatgatcagggttttagaagctagaaaaatagagcacggttgtaatttgcttgcagagataaataagaaaggagaagtcaccaatctttatgattacaatggtaatgaattaaaaattaatttcttacgcaatgaggtttattacaataagatttggtggacgttcccctctaaagtagaaaacttttaa

SEQ ID NO: 58355 - DNA, 459 bp, Acinetobacter baumannii
atgcataaattatttttgggattgttttttttattagcaacatctgtatgttctgcacaagatgctattcaagttgtttttggaatgaaaattaaaggtgttgagttcgtctatccatttgatgaaaaaaatgatttgaatcaccaattaggtagacctaatcaatacatagaaaaagtttcatggccagatcctgaagtcgaccccaagtttgaaagtgatggttattatgatagtgatataccgcctgaaaaatttgttggtgggactattgaaaaatttagaaaccaagcagatttaaatagacgttataactatataaaaagtgtacatttggcaatgccaatgactaatcaatacatgtataaaaaaggactatttttacttcgtttggacagagaatttacgcctgaacaagctaaagaatatgagataaaattttataaaactgttaaatag

SEQ ID NO: 58356 - DNA, 594 bp, Acinetobacter baumannii
atgtttaagttaaatatttcaacacaagcgtgtatgcaagcttcactgccgatttctttagatgttgcagaatatctaaaaactcgtttgcaaaaagaggaagttaaacgcgacgaacttcttaaaacaattggttatccagttggagtgggttcaaattctggttcatttttagatagtgtttataactttgctaacgcaattttaaaggactcaaatgctgaggttttcaaagtccaaattgaagctattcctgctcaccaaaaattaaatgtttttaaagggaaagatgaaaagccaaaagaggattgtccagtcgttgtgttttttgccaatcaaactattgaagcagatgttgtttattgcaaagcatgtaaagcatggcatacacgaaaagggaaccttaatgaagatcgcattcaccaatgggtatatgcagacgatttctacaacttattgaagtttcctgaattccctcaagccaaaaccaataaagaagaagttccagagcaattagtaaaacttcttttacttaaagccatttttggtgcagctacgtcttcaaatgatcgtagccacattaaatttcactaa

SEQ ID NO: 58357 - DNA, 1005 bp, Acinetobacter baumannii
atgccacaactaaaaaattataccggctcggtatatggaggactaggacatctattaaaagcttattgcgaagctaatggcttagctattccggaacaattagaacaaatacaaaatctggaacgctttgactatgtggtttggcgtgatctattagaagtcatttataaactcgacccgaagccgggtttagggctagaaattgctaaatatgttcagcccaaacacttaggaattattgcctatcttgctctctcttgcgataacttaggtgaagctttaattcgctatcatgactttcaccgtctaatttatgacggaagtcctttaatagtcgagttacaaggtcaatatggctctattcgctgggaagcgactgagctacacccgactcaacttaccgatgaaatcgcgattgcactggtgattcaattcttacgtctttttatgtctcatgaaaatgtacatttacatgaagtacgtttcttaaatgcagcccctaaaaatatcagggtttacgagcagtactttcaatgccctgttcgttttagccagccccgtacagagttacttattccaattaccgaaattcacaaaccgcttagtagcgctgaccacactctacagcagctattggttcagcaagcccaagcacttttagaacagttacccaattcgactcaacttgatcaacgtttacagcattcaattttgactggcttacaaaaaagtcagtatcaaattgaatatattgccactcaattaggcttgtctgttcggcaacttcagcggcatttacaacagcagaacaccacctttcaggaacgtgttcagcaagtacgctttatgctcgcaaccgagtatttaaaagatccgcatttaagcctacaagagattgcacttttgctgtgttattcagaacaaagcgcatttcaaagagcatttaaacattggaccaatcaaacaccccaacaatggagagatcaatttttagacaaagaataa

SEQ ID NO: 58358 - DNA, 1785 bp, Acinetobacter baumannii
gtgaattcctgtttagaatatggcaaagtgacagatagttcttcttctgcccctgtagactttatagcattaaaaaaagtttttacatcacgattaaaagttgaatgtgactgttttgcaacttataaaaccagtaaaccaattgaattgttcacaggacaaaaaattactggaaatggtgcaacaatttcaaaatattcagcaagtaaaacaggcattacaggaagaacagatcctgcaggcaatccatataactatgatcaagattgtgctgtagttttcgcggcgtggtatggatactacagttatgttgacatcgaaaatttgactattgttaaagaaaaagtcaacggagaagatgtcgggaaagtatttttcgcaccctatatgagccagtcgaactttaaatctctcactgtaaaaggtggagagtatggtttttattgcgaagatatctggatgatgaactggacacgttgttcagcatacgcaaagtgtggtttttatatcggaacaggcacatcaaatacttttgatacttgttggtctaaagaaaccaaagctggatattcagcatatcggattcataatttagtgtattcgactttaaaaaactgttgtgcagaatttgttggtgaagatggtaagccagctgaagcagcatttcatatctcaaattcagacttaacaatgatcggatgcggaattgaagcatgccatgcctataatttattacgtatttcttactcttggattcgcattgagtcaccaagctttatttacggcatcaataataaatatcgacataatatttttacagggctaattgacgttgctagttctgattcagttgtgaccttagctggtggtcgtattcttgctacaaatactggagcttatgcagatgcagtccgtgtggatggcggtacattcaattatgagtcaccactctgggtcggtgtgggcttcccagaggatactgctgattttaaaatcagagtgtcgaattgggctgcaattttaaatttaagtgattttacagggcgtaaatatacttacagtggtcgatcaaaagactggacgaataaactgccaacatctttcgataacggaataattattaatggtttagttttagaaaacttgaatgacattcgtagaaatacaacattctccatgcagggtaattcgaactacggaacaaaaacgaataattaccctgttgatggattcggtggagctattttaacaattggttctaatgatgctggagcttataccaatgcaatacaattagcttttccagtcaactcaagaatcccttattttagaaatgctgaatggggtggtgcatataaagcctggaactttttttatacctcagcaaacacaactgtaacagctgatggaacattaaaagcagcatccccaatcgttaaattatattcagatcatattgaatgtaatgatgaggccgaagaacaaaatcctttatttgaaaaagtcagtactggtcattatctagtaaaaaatacacttggctttgctcaagaaggttggtggatcgaagttccaagtgattcaaacggcaataaaatttgcgcaataaaatatcaaacacttgaaaatggagatattgaagttaaaacatttaagcgtaaatttgatgctgaaactgcctcaattattgctgatgaggaaaacccaatagatattcctgaaaatatgaatggagagcaacgttggattgatataaggcttcagcaatcagttaaagatgattaa

SEQ ID NO: 58359 - DNA, 1173 bp, Acinetobacter baumannii
atggcagattcataccaccacggactgcgtgtcgttgaaatcaacgaaggtacacgtccgatccgaaccattgccactgctgttcaaggactcattgccactgcagaagatgcagatgcaaccgttttcccattgaatacgccagtgctcattaccaacacccaagctgcagttgcaaaagccggtaccaacggcacactaaaaacagcactgcaatcaatggccaaccaagccaattcaatttgcgtcgtggtacgtgttgcagctgctgaagatgaagcagcacaaacagcaaacgtcattggtaccgtagacgctactggtaaatataccggtgcaaaagcattgctattagcgaaagcaaaactaggcgtacagccacgcatcattggcgcaccaggtttagatacgcaagccgttgccactgaacttgcaaccattgcaaaaaaacttcgtgcctttgcctatgtctatgcatggggatgcaaaaccaaagaagaagttgttgcctatcgtgatgcgtttgcagcgcgtgaactcatggtgatttggccaaacttcgtggcattcaatgtcgacacagcgcaaaccgaaactgtacctgcagttgcagtggcgatgggcttacgtgccaagatcgacaacgaaattggttggcataaaaccttatcaaacgtggcagtcaacggtgttaccggtatcgatgccgatgtgacttgggaccttcaagaccctgcaaccgatgctggctatctcaacagcaacgaaatcaccacactgattcagcatgacggcttccgtttctggggctcacgtacctgttcagatgacccactctttgcttttgaaaactacacacgtacagcacagatcatggctgacacgattgcagaagcacacatgtgggccattgataaaccaatgcacggttcattggtcaacgatatgttggaaggcattaaagccaaacaacgtgaatggacacgcctaggctatctgatgggtggcgatgcctggtatgacccagagctgaactcaaaagacacgctcaaagccggcaaattgtatatcgactatgactataccccagtgccaccgcttgaagacctcaccttccgtcagcgtattacagacagctatttggctgacttcgcttcaacgatcactgcatag

SEQ ID NO: 58360 - DNA, 516 bp, Acinetobacter baumannii
atgagccttcctcgtaaactcaaaaatatgaacctatttaacgaaggtgaaagttatctagggcaaatcaaaacggtcgtattgccgaagctcacacgcaaaatggaagactatcgcggtggcggtatgaatgctccattaaaaattgatatgggcatgggcgatgatggtcttgtacttgaatcgacttttggtggtttagacctgctcacattgcgtcaattcggtcttgaaaaagttgacggtgtttatatgcgttttgctggtgcttatcaacgtgatgacacaggcgaagtcgatgcagtggaagtcgtggttcgtggtcgtcatgaagaaatcgatggcggtgactctgaaccaggtgaagacactgaacataaagtcgtgaccaactgtgcttattacaaactcacagtcaacggcaaagttgaaatcgaaattgacgtgcttggcttcaaagaagttgtagatggcaaagaccgtctcgaagcacaacgtaaagcaatcggattataa

SEQ ID NO: 58361 - DNA, 342 bp, Acinetobacter baumannii
atgaatactcaagatcaagaattaaatacgcaactgattcaaaacccgaaccaagaaactgttcagcttgagcaaccaattcaatttggtggcaataccattactgaaatcaccatccgtaagccgaacgtaaaagccctgagcggtgtcagtttacaagccatctatcagcacgacgtaaacgcattaatcaaagttttaccacgtgtcaccacacctgcattaacaccacagcaagtgcttgaactagatccagtcgactttgcacagctgggaggtcacttggtcacttttttgtacccgaaggatctgcagaaagcgatcaaagaggatcagcaataa

SEQ ID NO: 58362 - DNA, 2457 bp, Acinetobacter baumannii
atgtcaaaactaaaattagaagtcctatttggagcagttgataaactcacaggaccaatgaaaaccatcgttggtggctctaaaacaatggctgacgcgctcaaaaaaaccaatggtgagctgaaggaccttgaagcacaacagcgcaaaatctcaggtttccgtcagctcaccgcacaatctgaaaagactgcccaggcattggccaaaaacaaacagaccatttctgaattaaaagcagcactcaaaatcaatcctgaagttcaggaaaatgtcacagcattggcacgtgctgaagctgctcataaacgcctgatgggtgtgcagaaaagccaacgtacagaattgaccggtatggctcaggaattcaacaaagctggcattcagatggatcggttgaatgatgaagaatcagatctaaaaaataagattcatttgactaccatggagttaaacaaacaaaaagaatccttaggcaaacatacagaagcccaaaagaaatacgaaaaaatgcaagaacgcatgggcaaagccaatgaaatggcaaaaaaaggactcatgatcgctggtgctggtgcagctgctttagcagtaccagttaaaattgccattgattatgaatcggcaatggcagatgtagccaaggtcgtggatggcctgaaagatgaagccggcaaaatcacaccggcttatacagccatgtccaatcaaattcttgaaatgaccacacgccttccaatggcggccaaagatattgcagccattgttgccgctggtgctcagtcaggtattgccaagaatgaacttattggcttcgctgaatctgcagtaaaaatgggggtggcatttgacatcactgcagatcaggcaggtcaaagcatggcagaaatgcgtgcagcattcaaaatgacccagccacaggtcattgccttagccgaccagatcaactatctcggcaatacatcaccaaataaagctgacaagattatggaagtggtgcagcgtattggtgctctgggtgaagtcggtggttttgcttccagcagtattgctgccatggctgcatctctgacttccgttgaacctgatgttgcagccactggtattaagaatattattctggcaatgaccaaaggcgaatcagcaaccaaaggacaagtcgaagcctttgaaaaactaaaactgaaatctactgatgttgctaagaacatgcaaaaggatgctgaaggtaccattgcaacggtactgaaagccatccagaaactaccaaaagaagaacaggtggctgtaaccaatagcctgtttggatctgaagcactaccagtagtcatgcagtattcacaaggtctggatacactgaccaagaatctgaatgctgtatcaagtgcattagtctacgctggatcaatggaagcagaatatgcagcacgcgctgcaactacagccaataatattcaattggccaagaaccagatggcggccttaggcatcaccatcggcaatgttttattgcctggtgtcaattccatgattggcagtttcaatggtgttatgagctcagttcaaaaatgggcacaagcgaatcctggtctagcatcaggtttagtcaaagttgccattggagccattgccattgttggtggattatctgccctatcaattggcttaatcacaatctttggaccaatgatgatggttggtcgtgcatttggtgcagttgctttggctgccaaaggtatgagcatggcgttactgaccaacccaattacatggattgtccttgccattgctggtgctgccctgctgatctataagaattgggccccgatctcagcattctttgtcggcatttggaacaccatcaagacggcattcaatggtggtatcaccggaatttcagcactgatcatcaattggagtccaatcggactgttctattcagcatttgcaaaagtactgtcatggttcggtgtggatcttccagcgaagtttaccggctttggtgccatgattttagaagggctcaagaacggtattttatccaaagtaaatgccgtaaaagatgctatcacaggtgctgtcagtggcgtgattgataaagccaagggcattctaggcattcattcaccctcacgtgtcttcatgggcattggtggctacaccatgcaaggtatggccaacggtattgccaatgccaatggattaccgattgcagcaacatccaccgccacacaaggtgtggtcaacactgctgcccaaactaagccagtcaaacccatcaatgttggtcgcaataacccacgttcatatatcagccaagacacgattgaagtgcatattcatgtcaaagatggatccgtggtcaaaggaacggctgaagcaatgcgtcaagaactccagcgagtggctgaagaacagcagatgaaaaaacgtaaatttttaacagacacggagtaa

SEQ ID NO: 58363 - DNA, 441 bp, Acinetobacter baumannii
atgatgatggctctaggcttgtttgtcttctcattacgaacagcgtcatatcaagaactgcaacgtgtcaccaattggcgacacccttcaaatagccgtgtcggggactcccctgcctatcaatttattggtaaaggtgaggatgtcattacactcaaaggtgtgatttaccacgaattgacaggaagtcgtgccacattggacaccctcagacaaatgggggatacaggcaaggcatataccttaattgaaggcacaggcaaaatttatggcttagtcatcatcaatgatttagatgaaaccaaaacctatttctttaaagatggtgcagcacgtaaaactgaattcactttaaaactgaccattgtacgcgattggcaaccgaccttattaggcaccctgatcggcatgggtattggcgcactaaataggattctctaa

SEQ ID NO: 58364 - DNA, 1314 bp, Acinetobacter baumannii
atgctgaataaagtcatgaacgtcgttggtacggcattaaattctgttgaaaaaatgacggaatatccttacccaatttttcgagttgaagtcgatggtgtcgatatttcatcccttatgacttcacgtttaatgtcactgagtattaaagacaatcgtgggcttgtggtggattcagtggacatcgaattgaatgatgcagatggaattctcagtattccacccaaaggtgccatcattcaggtctggttaggttggtccaataccggtttattcgacaaaggcaaatacaaagtcgattccacatcccatcgtggcgcaccagatgtacttagtatttctgccatggccaatgatgtatcagaaggtttaaaacaaaagcgtgaacgcagctggagcgacaaaaccattcaagaaatatttgaaaaagtcggtgctgaatatgaactgaaagtcattgttcatgaaaaattcgcatcaaaaaaaattaaatacattgcccagaatgaatctgatgcaaatctcattacacgtattgccgatgaaaatgacgcaattgccacagtgaagaatggacatttgattttattaccacgtggcgcaagtcaaacggtttcaggtttagccctaccacgtgtgcaaatcaccaggaataagggcgatcagcataactacaccaatggcacaggtacggacaatattacaggtgtcaaagcctattactacactgaaaacaaagccaagaaattgcatgtggtggtcggtgacagtgaagacaacatgaaagagatccgctatgtgcatcgggataaaaccaccgctgaactggcagccaatgcggaatacaatcgttgcaaacgtactgcccaaaaactgacatataccttggcatttggtgatccaactttaatccctgaacaggaatttgaattcattggcttaaaacctgaaattgatgacattatctggttaggaacaaacgtcacccattcactcaatgacaatggcttcaccacatcagttgaacttgaagtgcagctgcccgatgccgatgatgtatcgacactgtttgaaggcaaagaagaaaagactgaagaagaaaaagaaaagtccaaaaccaaaaagcgcactggtaaaaattatgcagattataccggtgtcattgcctattacagcgaaggtggcaagtcagtcaaaatcacctcaggtgatcaaagcaagccattaaagttgactcacgtctacaaatcgaaaaagaccgcgaacaatgccgtaaaacgtgaacaagaaaaaatagacaaagccaaaaaatag

SEQ ID NO: 58365 - DNA, 252 bp, Acinetobacter baumannii
atgtctaaaccaggacgtacgataagtaataaatgcccccattgcagttctgcactttggatccgttcaagtgaacaagtcgaccctcttttaaaacgcttatacggccaatgcaccaacttacattgtggctttaccgctcaaggcttcctgacatgggatgctgaactttccccatctgcaatacctaatcctgacattcatcttccaaaatccgcagcaaaacaacataaagaggtggcatgtgtctga

SEQ ID NO: 58366 - DNA, 201 bp, Acinetobacter baumannii
gtgtctgacccaatcgaccaagctcaattaaaccaacttaaccaggtcaaagtaaaaccacgtgattacagcgcaccatcactgaccgagtgttcagagtgtggcaatgacattcctccagaacgccaaaagctgggtgcagtgaccttatgtattgaatgcaaaaatttggaagaacgctatgccaatcgttatcgctga

SEQ ID NO: 58367 - DNA, 252 bp, Acinetobacter baumannii
atgatgaatctgttcatacaagaaatatcacagacagcagtcgggctaattttctatagcgatcacccattggatgaagctaccagatcatcattagaagccctaacccaaaaattagataaacctattttcattcttgaaaatcacactctttctgaattaaacgatggcgatttaagtaaatatggattgcaacgggtagagcaagaagaagttgaatgcccttgccctgaatgcacatcacaggattaa

SEQ ID NO: 58368 - DNA, 279 bp, Acinetobacter baumannii
atggaagaagccatcctttttaaaaacggacaaaaaatcgctgtaattggatgcctagaagcaaccatgcctagaattcgtcaattaggaaaatcagctcttaaagaaaactatgaaaaatttggcaaagcggttgatgaattagaacagaaattagaaatgttcccagaaaaagaattttggattggctgggatctgtgtcatgaagcctatgttgaacaatttcaaaaacaaaatcgtgccttgttacctggtacattaattggagtaataaagtaa

SEQ ID NO: 58369 - DNA, 357 bp, Acinetobacter baumannii
atggacaaatatcctctcattatcctggcacactccaaaaaaggtgaacactatattctaagcaacagcaaaggctatcttagtgctcactgggaatattcccctacccatcagcaggttttaaaacaagtttgggatttagaaaaaatcaaaagttcacttctaaatcaacatgcgaccattgactgggaagcctaccagtggatcttaaacagattcgatgaacttaatcaggacagtcgttctcctgccgacagggtcgcacaaagtcttaaagctgctgttgaagcgttttcagatggcatccttcgtatggctaaagctttggcaaagttcggctacgaggtgaaaaaataa

SEQ ID NO: 58370 - DNA, 330 bp, Acinetobacter baumannii
atgaaaaaatttataagtgcattatgtgcagcatttctatctgcatgcagcagtacaccagaatataaaacagtggaagtcacagcagatcagtttggggataaatggccactgactgtggataaaggaaccttacattgcgaacaaccgacacgaatcatttttactgcaccagatggccaaaaatatggcgtcaatggatcggctcaaaatgactatgtgacaatcatggaaattacaaaagatactgaaattatgggacaaaaaattaaaatgaatccatcggtattaatagaagaaggtatgcaactctgcgaaaacgccaaataa

SEQ ID NO: 58371 - DNA, 240 bp, Acinetobacter baumannii
atgaattattcaaatcaattgctgacactcgacggcattcaatcttcagctcctgatctccagcaaactctaaatactgaacttctaaataaacagcaacgtcacgatcttctggttcgtgtgctcaaaagtaccgcttataaacctagttttatcgacctgctaaaaagcatcctgatatccaataaaaaatggcatataaccaaaataaaaggacctcgtggtgtcacttttttgtga

SEQ ID NO: 58372 - DNA, 198 bp, Acinetobacter baumannii
atgaatacaccaacgaatgatgatattcgggaagaaattttgttgcatatgctcgatttaaaacatcgcttaaatttaatgagtaaagttcaggtgacaaatggggaacagattgaacatgaagaattgaatgcactgtttagctcattcagcaaagatatgaatcagattatcgattcgttccaaagtatcgtttaa

SEQ ID NO: 58373 - DNA, 207 bp, Acinetobacter baumannii
atgtcgaacaataccgtcaacaataatgatgaccagaacgaagaaacactaattgaattaatccacttaaaaaactgtctaggtttgatgagtaaaatgaaagtccaggaaggtgaacagattgacgcagcagagatcaattcactattcaccacaatgcatgctcaagtaaataaaataattaaaaaaattgaaatgtcattgtaa

SEQ ID NO: 58374 - DNA, 342 bp, Acinetobacter baumannii
atgtcgattaatgataagtttttggagcgcggggcgcgcttgaagtcggagcgtaagcgtctcaagctaactcaaccagccatgggtgagttattggacgttgctgtaggttctattgttcgttatgaaaagcaaggcgatccgttgaatcagaaccaattaactgttctgcaagatgctgggtttgatacgttctatgtgacgtttggtgtccgatttacggaattaagtgaagatgagcaccaagtaatttctgcttatcggtcactaaaaaacgatacagcgaaaataggttttctcggaatggccaaagcctatgcaacgcaaaatgccaccgattag

SEQ ID NO: 58375 - DNA, 192 bp, Acinetobacter baumannii
atgagtaatgtcgaaagcagaacaaaagcaatcatcacacacacaactccgaaccgtcatcagttcctgagagtctgcgctgctgaagcaggaatgacaatttccagctttacagaaaaactcatttctgaagctttatcgaaagttgaaaaatctgacaacccattttctgaagccaaaaataaacaataa

SEQ ID NO: 58376 - DNA, 240 bp, Acinetobacter baumannii
atgacaacacttcaagaactttgtataaagcgaaagaatcaaattgcgaaccgcaatggtacagaagccttacgcaatcgtatagcacaacttaaaactttgtctggtgaagaacgtcaacgttttgctgaaaaactgaagggttatatcgaagcattattcgataaccaactgattaccttccaggacgcaaaggactgggaatggattgttgaaagcaacgtaaagggacttcactaa

SEQ ID NO: 58377 - DNA, 2760 bp, Acinetobacter baumannii
atgtctgatattaaaaaccgcatcattaaccgtcttgaaaatatgttcagtttcaagacacgtggcgaatggttccgtgaaggtgtctgcccacaatgcggtaaaaaagaactttatacccatgcccacaatccacgtatcgtgaaatgtggtcgtttggtcaaatgtggttatgaagaacacgtcaaagatatctgtgaagacttattcaaagactggtctgaataccatccgcaaactgatgcaaatccaaatgctgcagcagatgcatttttatctgaaggtcgtggtttcgatcttaaaaatttaattggtaaatatacccagcagttctatacagataaagacagcaaagaatcatcagcaactgttcgctttatgctggatgaaaaaaactattgggaacgtctaatcgacagaccagaacgtttcggcaataaaaaagcacgttttaactatggttttaaaaatgctggccaagcatggtcagtgcatgaattggatgaactttgccgtttaggggaaaaaggccaagcgatctggatcactgaaggaatctttgatgccattgcactgagtcagtcaggtgtgaaagccatgtcttgcctgtcatgtgtcaactacccttctcaaatgcttaaagccatcgctgatcgctgccatgaactcaaaattgataagccacgtttacgttgggcattcgataatgattctgcaggtaaaggttacacagttaaatggcatgaacgttcacgtgctgaaggttggtcatcgactgctgcacagccacctgcaaatggtggtaaaaaacttgattggaatgatttatttcagtgggacaaactcaaccctgatcaattcccaaagtacaaacactatggtgaattgctgattgctgaaactgcagaagaagccggtcttttaatttataacttctatgaaggccgtcgtcataccttctactacaaccacaaattccgtttgtactggtgggaactcgactatgacaaatacaacaaagcagttcagcatctggaagaccgcaacaatgaagcagctgaaaatggtggtcagattcttactgataaagaaatccgtgccagtgcattgaagaactgttcagcagcaaaagaaatctgtaatgctcaaatcgaaccgttgtacttccaacggaatgaaatcaccgatgaatcttggtactacttcaaattgcaaagcccatggtcagaagcaaaaaccacctttacagctgatcaaatgtcatcacgttcaaagttcaaaccacgtgtcatgtctgtgatgtctggtgcaatgtggacaggtacagataatcacctggaaacattcatcaaacgtgaaactgagcgtttacgtgaagtcaaaactattgactacattggttatagccgtgagtaccaaacttatatctttgaaaaatatgccgtgcataagggccaaatcattgccatcaatgagcacgactttttcaaagtaaaacgtcaggaaattaaaacactggcaagttcaccagcgatcacattgaaccctaaaaaacagtttgatccgtcatggtggaatgacttccataaagtccgtggtgccaaaggtattgtggctttggcttggtggatgggttcatattttgctgaacaaatccgtgccacgcacagctcatatccatttatggaaattgtcggtgaagccggtgcaggtaaatcacgtttaattgaaatgatgtggaaactttcaggccgtaaagactatgaaggctttgatgcaaacaaatcaacaaacgtggcggtgtaccgtaactttgcacagatcgcaaacctgccagtggtcctgatcgaaggcgaccgtaatgatgtgaatggtaatgctgttcaaaagtctaaattcagttgggatgaactcaaagatgcttttaacggtcgtgcaattcgttctaaaggtttaaagactgcaggtaatgaaacctatgaaccaccgtttcgtggtgccatcctgatttctcaaaacacggcaattcaggcttcagaagcaattttgacacgtactttgcacttgtactttgaccgcaaaggacagtcactggaaaccaaacgcattgtcgatgaactggatcgcatggaactcgaagatgcatgcacgttcatgacgcattgtctgcgtaatgaagacaagatcttggagacatacgcatcaaagctacagtcaattgaagatcactatcatgaaattggcattacccatacacgtattgccttatgtcatgcacaagtggctgcactgatcgaagcaatggccaaacacgttttgccaatcgacttggaagacatgcttgaagcacaagaaatgcttgaacaaatggcgcgtgaacgtgttgaacagttaaacggtgatcatcctgatgtggaaaaattctgggatgtttatgagtacttgcaaggcaaccgttcaccagaatggggactcaatcatcatgacaacgatgctcaaactatcgctatcaacttaaacgaaatttacaaagtggctgcacgcaattatcagcagctgcctgaaatcaatgaaatgaagaaattacttcgcacctcacgcaagtacaaattcattgaaagcaataaacaggtgtactcagaccgcttccctgccgatgacgtggcagcagtgaataaaagtcgtgaagcaccaggtaaaccaagccgtaacgtgaagtgttggatcttcaccaatccaaatttaggggcaaaaaaataa

SEQ ID NO: 58378 - DNA, 516 bp, Acinetobacter baumannii
atgaacagtaattctaaaaatgcaatcgatttagaaattgaacaaatctcaattgaattagaaatgaataaatattcaattggtcaatcggttgtttatgtggacgattttatgccagatacagtcgaagttatcactggaaaggaaagtgatcagatccttttcaaccatggttcacgcagttgtattcatgaaatgattcgcccagcttctccagttgagcaagtactaggtcgacgtgttttcaatagtgaagatctgttaaatccagatatcagcaagtttttatctgatgaatttgttttggtacctaaagtatttcctgaatctcaggcgttagaactggcaaaaacaaaagttgaagctaaatcaaaacgtattgatgacaaatacagggatggaactgaatacagcgaagaaaaaaaatctcagttaatcaaaattcatgtcggtgaaaacaagaatctttttatcgattttttcagaatgttagatcaactggagcaaaactcatga

SEQ ID NO: 58379 - DNA, 486 bp, Acinetobacter baumannii
atgaacgctcaaaaagacaaaagcttttacaaaatgatcgctgaacaccaggaactttcagcacgtgcattgcgccttcatgaagttctgaatcagcatgcatgtgtacgtcacatgccaactgaagcatgcatcctgatcaacgaaatgaaaaatattgttgaaactggcaaagcacagccaggtggacttgaaactgctgaactcaattttgactctgaattaccgttcacagatccagaagttgcaacggctcatgacttcaaaattggtgacaccgtttgggttccagatgaattcgcacgttacaaattgattgtcagcagtcaccagcgttttgaagtgactcagatcgtcggcaatgatcagctgtatgtttgtcatatccataatccgaacattccattcactaataaccagaaatgcttcacagcgcatttcagtcattttgccaaatttgaaggagaaacatcatgcgcggtgtaa

SEQ ID NO: 58380 - DNA, 354 bp, Acinetobacter baumannii
atgcgcggtgtaaataaagttgtactggtaggctcattgggtgccaatcctgaaagcaaaagctttccaaacggtggttcactttgcaatttctccattgcaacgtctgaaaaatggcaaaacaaacagagcggtgaatggattgaacaaactgaatggcaccgtatcgtggtcaaaaaccgcttaggtgaaattgcccagcagtacctgaaaaaaggttcaaaggtgtacatcgagggcaaattaaaaacacgtcaatggacggatcagaacggtattgaacgctacaccacggaaattcatgctgatcaattgcaaatgttggattcagctccacaagcaaattcttactaa

SEQ ID NO: 58381 - DNA, 495 bp, Acinetobacter baumannii
atgcaaaaatattatgaaatcattgatactgaatctgtaaataaaattgatgcagcactttctgcttcaaataaattcgatgaaaagcttcatttagtgggtgaacaatataatgctgatgggtatggcgtttacaatacgctatcaaatggaaaaatcttccatcacatttggttttttgatgaatcaaaaattgacaaaacgctttttaaaattagcaaaggcaagccaatggatggaaagcctatttttgaagcgagaccacgtaaaacgaataaacagttttattcagaatttatgaaggatatgaataaccttaattactctgatctgacaacgacactctttggtgaagtcatccgttatggagctgatttagctttccaaaagaaaggaaataaatattttgtgtcagcaaactttgacgttgttttgccccacattgaattgactgctagtcagtatcaaagtgctatagaggaatcaaataaatga

SEQ ID NO: 58382 - DNA, 228 bp, Acinetobacter baumannii
atgatcaaagttacccctgaccatgaaaaagcggctgaagcctacgacacagtaaaagccatgaattgtgaatttgtaaatatcattgccaaggaatatccaatttcggacacaaaagtaggctattacattgccggcatttctccagcaacagctgaaaatggtgtaagtcgtgaacaatggcttgcagagtttgaagcactgcaacaggacacagataatgactaa

SEQ ID NO: 58383 - DNA, 204 bp, Acinetobacter baumannii
atgactaaccagcaacttgaaaagctcaaggccgaaaaacctgaaggtgcaaccatcgtggcagtcaaagctgatcgtgtgacctacttcaaggaagacggcaaggatcgtttgctgacctttaaccgcaccatgtgggtaaagacctggttcacaccatttcacatgaacctaaaacattttgattttattgctgttatttaa

SEQ ID NO: 58384 - DNA, 177 bp, Acinetobacter baumannii
atgtcctggcatccaatggtcaaagtggccaaagaattggggatttgtgtgaatacctttaagaagcattacatcaaaaagtatcctccggagcgtgttttcggaaaccgcaaagagtggaaagaaacaacactcgaagcaatgcgaaatgacaccacgattggtacacagtcatag

SEQ ID NO: 58385 - DNA, 1188 bp, Acinetobacter baumannii
atgttataccaacgttatacgggtataacatttgaaatgttgtcagacttaaaagtaaaaaatttaaagccacaagaaaaacgctattcgattgcagatggggaagggctgattatttctgtatttccatctgggaaaaagaaatgggtactgtcgtatcgtcaccacggtaaacagaatcaaaaaacgttgggtgaatatcctgaaataggctgtaaggatgcacgaaaccttgcccgggattttaaatcacagctgagtggtaaaaaaatcaatgtgccgactttgggcgaagttatccaggagtggctggccattatggggcctcgttggaccagtgataaatataaatatacggtgatttaccggttaaattacattgctgaagacttctctgacatcagtgttgatgaaattgaacgaaaagatgtcgtaaaaaaagtaaaagagattgtggccaaaggaaccattgaaactgccaagcgatccttgcgcctgttgagtgatgtttttaactttgcgattgcatctgattacactgaaaagaacccatgtattttggtgggcgatgtaattcctaaacaggacgttgaaaatctggctgcattgaagccacatcaaatgacagagttctggactaaggttcagcaaagctatgtcactgatgatttgatgattgtcctaaaacttgcctgttataccgctgttcgtatatctgagctgcttcatgccagatgggatactggggaaattgatctgaataaaaaagaatggatcattcctgcatcgcggatgaaaatgcgtcgtgatcatgtggtaccgcttacggatcagaccgttgcgttgtttaaaattatgtatgaccgcaaaactgataacggttttatctttaaacatacgcggaaaccgaatatgccgtgccgatctgaaagtatattggcgattattaaacgtaatggctatgctggtcggatgactacacatggattccgtaccgttttttcaacacatgccaatgaatcgaccttatttcgtgaagatgtcattgaatatcaaattgctcatgtgcctaaaaataagatccggggcatttataacagggcagaatactggtcggaacgggtggaattaatgacctggtatgccaatgaagttgatcgatggatgaaaatttttgaaaaaggttag

SEQ ID NO: 58386 - DNA, 726 bp, Acinetobacter baumannii
atgaaaaaaataactgctttactccttactctttgtgcaactgcgagtcatgcagaattacaaactttggacaacgacgctttacaggcgattaatggtcaagctggtgctgatttgtctttaatgcttaatttaaaccagaccagtaacggtatatttgataatggtagtggcggcgtttgtgaaaacgtagagttctgccacattggtttagcaattaataaacgctttgtgcaagcagacgcgactaaaccaagtggttgggctgaaaatagtgatagtggtaataagctttggttggtgtttaaaggtgtacaaggaactttaaacatccaaaaaatgggtttggatggtgctgatttgaagtatctcgataaaaccaataccgaaattataaaacctgctattcaactaagttttagtgctgcacaaccaattttaattcgtaattttggttttaatgctttatccattgagcaagataactttacaagttcaacaacgacccaaggctcgagtacgaatatgtatgattatgcatatttcaaaaaaccaacgtatgctgcaactgcaaacagtgcgactcagcaagtggccacagcaacgccttcagcctatgactatggacgtgaaacaggttttatgggtttaatgatgaacggcaacttggctattcaaggaaaagtcatggtgtttagctgtgatggtagccatccccgttgttaa

SEQ ID NO: 58387 - DNA, 852 bp, Acinetobacter baumannii
atgaatactcaaagtgaaatatctgacgggagagaaaaagatacatattttgttacacccaacgatattataaacaccttacctatagataaaaattattgtttatttctggatattgatggaacattagctccatttcaagttcatcctgagcatagttttatacctaatactacattagaagttataaaaaaaattattgaattaaatataccagtgattgctgtaacaggacgtgatgttgaaacagctagtaagctatttcagtctattgaaattcctatagccggcttacatggcttagatatttattttgattccgacaattatattcgtccagatttaagcaatattaatttcaaaaaattaaaagaagatattataaaatcttgtgaaaaatatcccgatttattaattgaggataaaggacattctattgctttacattatcgaaaaaaaccagaattagaagataatgcaatttatattatgcaacaaattaaatatttctatcctcaattaaaattaaatagaggtaaatttgtcattgagttattacctaaacaggcagataaaggtaaagcaattcaaacaatattagaccatcttaatttaccattaattcacccaatatttattggagatgatttaacggatgaatcgggtttcacttttattaatcaacaatttggcacttcaattaaagtaggttctggtgaaacagaagctcaatatagattaaaagatattaacagcgtttctaattttctttttttctttctagaaaaaataaaaaagttatacgtcaaaaatagtcaagatcagaatggagaacaaatatgtctaaattaa

SEQ ID NO: 58388 - DNA, 294 bp, Acinetobacter baumannii
atgcctaatcaaatcaaaaaagcttataacccatctctaggcagtaccagtgccttttttgtaccccatccagaggcaaatcaattaaatgctcaggacgttgcctatgaattggtagcaagtgcaaaagatatttcgattgctacttttcaatgttttgaaggtggcaataaattaatgattaaagcagaaattgttgccaatcttattattgaaattcaaacaaaattagaaatgattgaagctatcttgccgatggcatttgatggtgaagaaggtggccacaatgcttga

SEQ ID NO: 58389 - DNA, 414 bp, Acinetobacter baumannii
atgcaaatgattaagttgatgtcagaaaaaccttgtattacccctatacagattccaataaagtcttggggtaatcttgtggcattgtcatgtttagtcacgttttcaccgtcaccccttgcactacgaaactttcgtagttatagttgccttgctttgagcaaaatctcaaagttagctttggtcggctatcattctctagcgcatacagtccgcttaatgggctttttttgtatgtgtaatacctctatgcgttcgcatatctttatggcgaagttggagggggacactttcgagtgtgctggtgacctagagagccagtcgaccaacccctttcagctttgccaccataattacttggtcgtaattggcagagcttctattaattctctaggagcacatactcatgcctaa

SEQ ID NO: 58390 - DNA, 270 bp, Acinetobacter baumannii
atgacctttgataatcaggaatacacctacgttgtagcagaattacgcccttgtaccgatacagatgaatataccgatctagttattgataacgagcattatgccatccaccgccttgacccttgcaaggatatggaaacggcgatgtacaccgccattgatattgagcgtacagagccaaaccataagcacatcactttgcaccatgaaagcctgatgaagctgatacatggcatacacggcgaatatgagccaacagccacaacgtga

SEQ ID NO: 58391 - DNA, 369 bp, Acinetobacter baumannii
atgattgagaatgtaaaccctgagtttttcaaagcgtttgaccactacaaagcaatgctggcccagtatggggaacaccaccccatcacagaacaggcattcattttgacaatgcactacacgcctgagcatatcaaagaagaaatgcaccaaaaggccaaagagctaaacctattgccaccagtaagcggttacacggatgacggcgaaccaatgtaccgcctagaggatattgcaaagcattttggcattccatttgaggaagcagaacagcgtttattgcaaatgatggataaccgccagcaagtcggattatcaaatgacggcgttttgattaattcaaatatccatatcaaccgtgtgcaatga

SEQ ID NO: 58392 - DNA, 555 bp, Acinetobacter baumannii
atgaaccaagtaacccatttcgattttaaatccaataccgtgcgtattgcccatgatggcaatggtgaacctttattttgtttggcggatgtgtgcaaggttttaaatatttctaggtcatccgatctattacagattcaaagggggtacgttaaaaacgaaacccctaaacgacatggcgcattagaccctattggagtacacagaatcagtgtttcaaccaatggcggtaaacaggaactaatctttattaatgagcctaatttatatcgtgtcattttcagatcaaacaaacccgaagcccttaatttccaaaattgggtattttctgaggtgctgccgaccattcgcaagactgggagctattcagcaagacagaccgcttatgaagaactgaaccgcctttgtatggaagaaaaagtatcaaaggacaaaggcacgtttcacagtttaggtatgcaccgccgtaaacgagaaaagcatcaaaacgctatacgcatccaaacatgtaagacaaatattcagcttggctttgaggggttacaccatgattga

SEQ ID NO: 58393 - DNA, 213 bp, Acinetobacter baumannii
atgatcaaccatcaaaccgtcatcctagaccatctcaaacaaggcaaaacgcttagccaagccgaagccatagccctatatgactgctatcgcctaagcgcagtcattgaccgcctacgtaagcaaggctttgacatcgtgacccatcacgaaaagaacttgaacagcaaaggcacacatgcacgatatgaattaaaagaggtggcagcatga

SEQ ID NO: 58394 - DNA, 237 bp, Acinetobacter baumannii
atgactacatctaaaaatcaacaaattgaaaataaccgcttaatccgccgtaaagaggtgcaaaccaaaacaggattaggtgcttcatctatttacgccatgatgaaaaatggtgaatttccccagtgcttaaatttatctgaacgccgtgtcgcttggattgagtcagagattgatcagtggattgccaatcgtattgcacagcataaagctactaatgcagtgatggaggcttaa

SEQ ID NO: 58395 - DNA, 1029 bp, Acinetobacter baumannii
atgacaagtacaaatactggtaaatttattttatatgtctccgaagatggcgagttaaaaattgatgtccgattgttagatgaaacaatatggctaacccaaaaacaaatggctgagatgtttcagaaaaatgttagtaccatcaatgagcatattaaaaatgtatttgatgagggtgagcttgatcaaaattcaactattcggaatttccgaatagttcaactagagggcgacagaagtatagagcgagaagtacagcactacaatttagacgtcattatttccgttggttatcgagttaagtccaatcgtggtacacagttccgtatatgggcaacaaaggttttacgtgagtacatagtcaaaggttttgcaatggatgacgcaaggcttaaaaacggcggaaataaccagtattttgatgaattacttgcacgtattcgagatattcgagcatcggaaaagatgttttatcgaaaggttttagacatttatgccactagtgttgattatgaccataaagcagcagaatctttaaaattctttcaaaccgtgcaaaataaaatgcactgggcagcacatgggcatacagcagccgaagtagtttttaaccgtgtagacggtacaaaaccaaacatgggaatgaccagttttagtggttctggacatcctaagtctaaagatattgccatagctaaaaattatttagatgaaaaagaaatagacctacttaaccgtattgtgaccatgtacctagactttgctgaaatgcaggcaatgaatggcattcaaatgtatatgaaagattggttagccaagcttgatcagtttttaagttttaatggtcgtgaagtattagaccattacggcaagatttcacaccaacaagctgaaaataaagccaagtcagaatatgcaatctataagcagcaatacattgattatcaaacgccagtagatcggcattttgaagaagctattaagggcgtaaaacaaatcgctaagcagcaaccacgcaaaaaatcttga

SEQ ID NO: 58396 - DNA, 1251 bp, Acinetobacter baumannii
atgacggcaaacagtttttttagtacagatcgagaggtcaaaaacctcaaattactggaaaaggtttacacggcaaaagataagaccaataacggtttatttgttgaagtacgtccgactgggcgcaaaacttggatatatcgctacaccatcaacggtaaacaagaaaagctcacattgggacgctatcccgacttatcgttaaaagatgcaagacaggtaagagatgaagcagcaagccaagctgctaaaggtatttccccacagcaacaaaaaatcaaagaacaacaaggacagcttgaaacaatactattccgagactacggcgaacggtacaccaaagaagtgatactaaaagaccgtgcaaatcctgaatcaatgctgatgtatctcaataatgatatttatcccatgcttgggcatatcgccatgaaagacattggtatagaggatatacggcgcacaatatggcgtaaaaaagaacagggctatgatgcagcagccaatcaagtacggggactacttaaacgaatgtttgactatgctgtaacacttggattagttccacataatccagtaatggcaattccaacacgtcatgtattcaaagccaaacctagagaccgctatttgtctactggagaaattcgagcctattacactaccctactcgattcacgtatctataagtcacgtaaattaggcttgttgctgtcattgctaaccttgttgcgtaaatctgaattacttgcagcgaaatgggaacacattaactttgacacaaagatatggctaattcctgaaacaaaagcggacagtaaaacaggtcatagccgtgaaatgcttgtgtatatgtccactcaagtgattgagatactcaaagaactcaaaaccattgcaggcgatgagccttatgtctttgttgggcgtaaacgtggtacacatatcagccacaatgcttttaatacagcacaaaaggcagcgttagcattaaccgatattcctaacttcaccattcacgacctacgccgtacagcaagcacacatttaaatgaacaaggctttaaccgtgatgccatagagaaatgtttaaaccatactgcaactggagtacgtagcgtatacaacaaggcagagtatgccaatgaaagaatcaagatgatgcagaaatggagtgactttatttttagtctgatctatgagccgaatctcatattttttaatgaagtaaagcagcgtaaaagcagttaa

SEQ ID NO: 58397 - DNA, 192 bp, Acinetobacter baumannii
gtgctcatttctgacgaagagttagaacaacgccgccgtgaatggaaaccgacggtctctgcctctcaaacaccttggcaagaaatgtatcgcaacatggtaggtcaattatcgactggcggttgtttggaacccgcaactttatatatgcgagtcgtaaaccaagacaaccttccaagacactctcattaa

SEQ ID NO: 58398 - DNA, 1623 bp, Acinetobacter baumannii; identical to SEQ ID NO: 54163

SEQ ID NO: 58399 - DNA, 2550 bp, Acinetobacter baumannii
atgacagttcaagttaccgaccggctcagccagctatatgttgggaacggggctaacacacgctttgatttcatttttagagtttttgatcaagaagacgagacgggtgtagctgtcagagtaaaggtcggcaatgattttgaatttctcgataaatcaaaatattcggttacggttaaccaagataacttgggtggatatgtaacttttaatgaagctcctagcaatcaaacatacttttatgttgctggtaaaacacctgtagatcagcttcttgatattacaaattacgataatttctaccctgatgcgttggaaagagcattagataaaattactgctattttgcaagaatggaaccatttagtagattttgaaacacaagcacgaattcttgcggatattgcatatgacgatctagccaaggaacgagaggcagatttaaaagcgtatatcgatggtatcgcaagcgctattactggaagacctgttttgggtctgccttcggaatttgttgtagatggtaatgatacccaaaagcagattaatgacaagtcagttcgcaattttgagtctattgctgatttattgacttatacgccaagaaatgatgggcaagtcgtctatgtaaaggggtatcatgctcctactaattttgcattagcacaaccctataaagggggtgggcatcgtactttcgttgaatcacgaagaaatgaaaacgacggcttcttatgtattaatggatgggtattgcagattgagaataataccgttactcctgaacaggctgggtgccatggtgacaatacccatgatgactacgcacagctacaaaaagttttaaaatcagagttaaaagttgaatgtgatgcttttgcgaattacagaattagtaagccagttgagctgttcacaggtcaaaaaatcaaaggaaatggcgcaaagatcacgaaatattcatcgagtacaacaggaataacaggacgcacagatcctgcgggtaatccgtacaattacgaccaagactgtgcggttgtgtttgcagcttggtatggttggtacagctacattgacattgaaaatattacgattatcaaagaacaagttgcgggcgaagatgtcggaaaagtattttttgcgccctatatcagcatgtcaacactaaaaaacgtggtagcgaaaggtggtgaatacggattttatggtgaagatttatggatgattaattggatacgatgtgaagcgtactctaaatgcggtttttatatcggaactggtacatcaaataccctaaatacatgttggtcaaaagaaacaaaggcgggctattcagcgtttaggcttcataatctaacgtactcagcactaatcaactgctgcgctgagcatgttggggaagatggtgcacctgcggacgctgcttaccacattacaaattcagacttgaaaatgatcggatgtggaatagaaggcatccatgcctataatctaattagagcggggtactcgtggattacaattgataatcctagctttatttatggtattaataataaatatcgtcatgaaacatatacaggtttaattgatattgaccactcggatagcgttgtgtcattgaagggtggtcgaatcacttcgattaattcagaagtgtttgcagatgcggtgagggttaatggcggtacatttaactacgaaagtccactttgggttggggttggttttcctgacgacacctctgattttaaaattagagtttcaaattgggcagccattttagatttaagcagtttcactggtcgtaaatacacatacaatggccgtgctcaaacatggattaataaaactccgacgcagttcaatggcggcattatgttgaacgatctgggtgcaatgaatttaaaagatatccgaaagcatgcatattttggttcacaaggttcgggtgcgcgcggaagtattgctaatggttaccctgtggatggttttggtggtgtagtattaaattttgcatctggtgatgatggtgtttacacaaatgcagtgcagttagcattaccagtgaatactaatactccgtatttcagacgcgcgggctggtctgagggtttcacgacatggtttaaatttctaacttcaggtaatacggctatagatgctaatggttttatcaaagcagcatcacccattgttaagctttacgcagataaaattgaattaaatgacgaagctgcacagcagaccattacttttgaaaaagtttcccttggcagctatctggtaaaaggatcattagggttcgcaacagaaggttggtacattgagacaccgaaggatgcgaatggcaatatcttatttgcagtgcaatacaagcaacttgaaaataatgatattgaagtaaaaacttttaagaaaaagtttgattttgaaagtgcttcaattgttgcggatttatccaatcctgttgatatccctttaaacagatggatcgatttgcgcttaaaagtagcgccaaagcctgaattgattgaatcgacgatctga

SEQ ID NO: 58400 - DNA, 231 bp, Acinetobacter baumannii
gtggtcgatccagatgttgtcccagtacatgctgaaattgctgtagaattagtagctccattaggaccaagagcaccgccagaaactccaacttcagcaaaagtaatagacggaacgagtacagttaatatgccccaagtaagtggtttaattttaaaattaattgaagttgaggactgtagaaaatcggtggcttcagtagaaggcatcaaagcattatttgttctttga

SEQ ID NO: 58401 - DNA, 2781 bp, Acinetobacter baumannii
gtggtcgtaacaactggtgatatgtacggtctgtttagtcaccctgatcacgaaagaattttaaatgtattaaaagcgagatttggtgatgatttatatattgaatttagtccgatcaatacgccattgttcgaccgcttaaactacttaggctatttggcgtatgaacgcgaaaaaattaaaaccgtcgtcacttatccttttaactatcttgagaatgaagatgcggacactttggatgtattgagcgctatcgcaaccaatacccaacttgatttgcactatcgtcctattcaatacgtaaaagattttggttttaaagagccaaaattcattttagaccatacaaaagctgctattcagcgtatggctaaatatgagcgcgtcaattcagcggaagcttggaaagaaggtctaaagaatatttctgagctggtggacaaatgccaatatatttttgagaagcagccagtttccctacctaagctaagcactgacgaatttaaaacactatgcgcgaaatgcttggaaggctggaagaaacgcttttctaaagagattcttggatataagccaacgaaagctgaattagatacagtatataaatctcgcttaggctatgagctttcaatattaaaaaagatgggctttgagtcctacttcctgctcgttgaagacttggtgatgtggtctaaaaacaacggcgtgattgtaggccctgggcgaggttctgttggaggttcattagtcgcttatctgcttgggatcacggacgttgatcctatacgttttggattgatcttcgaacgtttcatcaatcctgaacgtcttgacttgcctgatgccgatctggacttcgcttcaagcggtcgctacaaggtgattgattaccttgttgaaaaatatggtgaagattatgtcgctggtatctcgaactattcaacactagcttcagcctcagccctacgtgatacaggtcgtatcagcggtttgaacaacatgcaattaagtgcgaccaagcttgtgcttaaagaacatggaacgtcacttgacctgaatacttctgcggacgctgtgcctgagctagacaagttccgcaatgaacatcctgttatctggaagcatgcaactaagcttgcaggcacaatgaaatcgtttggccaacatgcggcaggtattgttgttgcaggcgaacctatcgttaatcgagccgtgctcgagactagaggaaagtcaccagtcgtcaattgggacaagcgtgtagttgaggattggggattgatcaagatggacttgctcggtcttgccaccttagatgtattaaacattgcttgcgaatatatcaaggaccgtcatggcaaagagattgatttgctgtctattcccctagacgacccaaaaacatttgatgcatttgccaagggcgaaacgacaggtgttttccagtttgaaagtaaggggatgaaaaaccttttaagggaaatcgccaaaagtggttcgatgacctttgaggatatttccgcagcaaccgctctttatcgccctggtccgatggattcaggactgcttgatgactatgtggccgttagacaaggattgaaaaacgttgagtatgatcatccaaacatgatcgatgctttgaaagacactttaggggtcattatctatcaagaacaggtaatgaaagtgtcggtcgactttgctggctttaccaatgcagaagcagacagtttgcgtaaagcaatgggtaagaaagacaaagacaaaatggccgaaatgcgtcaaaagttcgtagacggcgcagtagccaaatcaggtgtagagccagatttcgcaggtgaaatctttgacaagatcgaagcgtttgccggatatggctttaacaagtctcactcggtcgagtattcaatcatttcggtttggtgcgcatatattcgcgttcattaccctgctgaatactttgccgcaagtctcagcgtggttgatacagaagataagctcactggacttgtgaaagatgcgcgtgaatgcggcattgagattcttcctcctgatattaattattcagccgatcgttataagattaaatccaatactgaaatcttggcgcctttcaatgcagttaaaggtatttcagaaacgattgccaaagcgattgtgaaattgagagagaagaatcgggcttggaaagtcgttcgctacaagaagtcgagaaagacaggtgaaaccacaccgatctatggtcctgatggttcagttccaccaaaaaaacgttttgatagctttgacgagttcgagaaagcagcatctcaaccaaactcgaaagtgaataaaacaatcgttgaaaatctcagagcaattggggcgtttgcaagcattgaacctagtgagccttcagcgaaagacctctcacgacgaaaggatcaaatgaggctattaccaggattaattattgattctgtaaaagcagatagatacacagatacctcagagccattcctgcgagcttcgttggtcgagcatatgcgcgattgcaagcaatgtaacggttgcgaccttgctggacaggttcatccagatattcgtttgggtaaaaagatgcgatttatggtcgtggctgactgcccaacttgggaagaggaaaagaaaggaaaacttcttgaaggcgagacggcccaatatgtgaaagctgcaattaaagataatgaattagcagtagcggacggttattacacaacgctcgtcaaagccaaaaaagggactgttctaaattttgtgtaa

SEQ ID NO: 58402 - DNA, 990 bp, Acinetobacter baumannii
atgcgtaacgatacacgtattaaatttaatcatagcctaaaaaaattggctgaaattaatggtgttgaaacagtagaaaaacagtttactgtagcaccagcacctgaacagaaacttgaagaaaaaattcaagcttctaatgcatttttgcaaaaaattaatattactccagtgactaaacaatcaggtcaagcaattggtctttctgttaataatacaatcgcaggccgcacagatacatctggtaatggagaacgtaagccttctgatccaactggattaggtgcagatgaatatacttgtaagcaaaccgattttgatgttgctttgccatatgaaaaattggatgcatgggctggcttccctgatttccatgctcgttggaataatgctgttgctcaagctattgcattggaccgaatcatgattggtttcaatggtacttcagcagctgccactacagatcgcgtaaggaaccctaaactacaagatgtaaatattggctggttagaaaaaatccgtactaaagcccctgatcgtcgaatgaataacgtaactattggggcaactggtacttataaaaatcttgattcattagtaattgatgctgtcgctgagttaattgatgatgtccaccaggatgcaacagatcttgttgtaatttgtggacgttcacttttaaacgataagaattttcctatcgtaaacaatgctgaagacaatcaaaatactctggctggtcagattttagttggtcaaaaacaaattggtggtttaccagctgtacgagttccatcttttccagataacacaattttaattacttctttagataatctttctatttattatcagaaagattctaaacgtcgttacattgttgaagaaccgaataaaaatcgtgttgcagattaccaatcttcaaatgaagcttatgttattgaagcttttgaaaaagttgcattggttgaaggcatcgcaattcaataa

SEQ ID NO: 58403 - DNA, 2493 bp, Acinetobacter baumannii
atggcagcactatatcactcactttttactgaaaaaggcttggcattacttagagagtcgattcaaaacggaaccaaattaggtattacacatatgtcatttggtgatggtggcggtatgttacctactccagatgcaacatttactcatatggttaatgaagtatatcgtgttgcactaaataggcttgctccctctagagagaacccaaactggttagaagcagatggagtaattccttcagcaattggtggatttaatattcgtgaggtcggcctatgggctggcaatatcatggttgcgtatgcgaactatccaccaacatataaaccaagtggtgatcaaggcactgcccaaatcaaatctattcgtattgtattgcaaattgataatacggctaactttgaattaaaaattgatgcatcagtagttatggccactattcaagccttagaagatgtaaaagttgaggtaatagactatgtagatgaaacaaaaacacatacagttgattatattggagatttaaatctaattgaatcaaaatggaatggtcgaaccgtatatgtaatgtcttatcataagcctgataatttagccctagctacccctttaaaaggtggtggaacacgtatctacaatagcagtagaaaaaatgagaatgacggttttctttgtatcaatggctgggttctacaattggacaataacattgttacacctgaacaagcaggagccaaaggcgatggtattacagatgactttatagcattacaaaaagttttcaaatccaagttaaaagtagaatgtgattgttttgcgatatataaaactagtaagcctattgaattattttcaggacaaaagattactggcaacggggcgacaatatcaaaattttcggaaagcaaaacaggtattacaggaagaacagatccttctggaaatatatatgactatgaccaagactgtgcggttgtttttgccgcatggtatggttattacagttatatcgacatcgaaaatttgacaattgtaaaagaaaaagtgaacggtgaagatgttggaaaagtcttttttgccccattcatgagtatgtctaatttcaagtcacttacagtaaaaggtggagaatacggcttttattgtgaagatatttggatgatgaattggaaacgttgttctgcttattctaaatgtggtttctatattggcactggaacttctaatacttttgatacttgctggtcaaaagatacaaaaactggatattcatcatatcgaattcataatttagtttattcaactttaaaaaattgttgtgcagaaaatgttggcgaagatggaaaaccagccgaatctgcgtttcatattacgaattcagatttgacaatgattggatgcggaattgaagcatgccatgcgtataatttattacgtatttcttactcttggattcgcattgagtcaccaagttttatatacgggatcaataacaaatatagacatgacatttttacaggattgattgatattgccagttctgattcagtcgtaacgttgtctggcggtcgaattctttcagtaaacacgggagcttatgcggatgcggtgcgggtagatggtggtacatttaatcttgaatcaccaatgtggccaggcgtaggttttccagacgatgaagtagcttttaaaattcgtgtatcaaattgggcagcaattctaaacttaagcgattttactggtcgcaaatatagttttagtggtcgcttaaaagagtgggtaaacaatactccaacttctttcaacaaaggaataattattaatggtttagctgctgaaaacttgaataacattcgtagaaacacgacattttctatgcaaggcaatgcaaataatggaacaaaagcaaataattaccccgttgacggttttgggggagctattgttacattcggttccaatgatgctggagtttatacaaatgcagtacaactagctttaccagttaattcaaaaacaccttattttagaagcgcagagtggggggctgattataaaacttggaattatttctatacttcagctaacacaacagtcacagcagacggtactttaaaatcagcatcgccaattgttaaattattttcagatcatattgaatcgaatgaagaagcttccgaacagaatcctgaatttgaaaaaattgggattggtcattatcttgtcaaaaatacattggggttcgcaaaagaaggctggtggattgaagtgccaagtgattctaatggtaataaaatttgtgcagttaaatatcaaatacttgaaagcggagatatagaaattaaaacgttcaaacgcaagtttgatgttgaatcagcttcaattatggcagatgaaatgaaacctatagatattcctgataacatgaatggtgaacaacgctggattgatatacgtttaaattcatatgaaaaggtcattcagttgtaa

SEQ ID NO: 58404 - DNA, 708 bp, Acinetobacter baumannii
atgaaaacgaaagatttaattggaaatgttgttgccgtttcattcgtgtcattattgtttatatttgcactaacatggattatttttgactttaatggctcgtcaagctctttaaaagatacttggtctattgtaggttctgtttttggtggtattactaccttagcagcggcttacatcgcatactctttgtatgatgactgggtaaagccacataatttaagcatcgaaactgaacataaaaaggatattttaaagataatacgtaaaatttcacccttagaacataagtatgatggattaattagcaaataccttctgtatcccgatcaacctgatagaaccattcctattgagataaatgaatcagatttaagtgaatttataaataatgttaatgaactacttggtttactacatgaactttattttattactaaagatgaaaagatttctaacattacaaatcagtactttaattatgcacaactatacggatttatcctaagcaaatcggaatatctttataaaaatggaaacaaggaagacctacttaaatttttaagattaaagttaaagtttgactatattgatttagacggcaaaaaatggactactactacatcttatggctatgccattagaggtttggagaaagtagaattaagaaaatatattagtgaaaatttaaaattaaaggaaaattaa

SEQ ID NO: 58405 - DNA, 444 bp, Acinetobacter baumannii
atgaaaattaatctgaatgatttaaaaacattttctgaagtagtaaaaactaaaaattttacgaaagctgcggcatatatgggcgtgacccaatcggctgtaagccagagtattaataatcttgaagcacaattagggataaagctattaaaccgttctacccgtagtctcacccttacagaagcaggttcgcgccttatagagctcgtcggtcaaaacattgaaaatattgacttaggcatagaacaaattagctcgatgaaagacctgccaagtggtcatgtgcgtatttctgccgatgcatttaccattaagtattatttatggccaaagcttaaaaagcttgtaaaactgatatacgctgaattatcaggagactttcccttgggagattctaggcagccaacttataaaagtcttcggccatttgatttggtgtcttaa

SEQ ID NO: 58406 - DNA, 852 bp, Acinetobacter baumannii
atgtccaaggctaagaagaataacaatctcctgatttcgggagactatcctttaattgcttcgcctacgcttgcaaaagcgtttggcgtagcggctgccaattttctacagaaattgcattattgcttagaaaataacgaggggaaaatttttaatggaaaaaagtattggttccatagctacgagcaatggcaagcgacgcttggcgtgtatagcgtatcaacaatcaaacgaattgtggcaaagttaaagcaagctggaattcttgtgattgaaaagttagcacagaacaaatggctacaaaccaatttctatacgattaattataagaaattaaaacaactcatcacgctgaataacgggcaaaacaatcagcctaatgagatcgtaccaactcctgatcccgtcgtaatcaccccctctctggagaagtctgctcaagccgtccagtcatccatgttaatgagttcaatacaacaggcatttcaaaatatcaaggttaaatcaaatacatttgaaccaacattaaaagtggcaaaagaatcccgtctgcgccccgactttgtcacgcgtgaatcttattcagtaaaaggattaagccaacccctccaccctgctgcatcaaacgaaacgttaaaaaatatggatgtcaattaccgctgcttttatcaagcactcaggcagcaccgtgtagatattgattgtgatgatctacgtattcaacaactcttaaagtatcagaagcggattcttcaacatattgtatatatcaaacagaattttgcaggacatgagcgctatcaatggcacatgcttgaacagctacaaatggaaaattatttaaagaaatag

SEQ ID NO: 58407 - DNA, 948 bp, Acinetobacter baumannii
atgtattattttcatttaagtcacaacgttaaaggtgatagtcaaataaaattgagtgacggtcattcaaagtatcgactatcaaaaagtgcctatcactatattactcgcaccttatatttttctaagcataaaagtgagattgaagagcttgaatattgtgcttcttatcatatgccagcttgggtcgataatcatcccgatcagttttggtatgcagcagatcaatatacaagtgagacccgacgaacctcatcacatattacaatcgctttgccaaaagaattggatgaaaatcggcgcattgaattatctgaaaggttaatgcatgagttttgtggtcaatataaaatgccatgtacaatcgcaattcataatcatgttgctgcgctggatggacagtcagaacaaccacatttacatttattattttcagaaaaaagtatgttggataatatccaacgtttaccagaacagttcttcaagcaatatcgtcaaaaaaatcctgataaaggtggtgcattaaaaatcacggctgatgtgcttgggtttggtcgtaacatattatttcactacagaacaaaaactgaaaaaataataaatgaatttttagaaaaatatgcgccaactaagattgtagaaattcatggtcttaaattagaagtgagcagtgcagtgtcatgtttatcaaatgaagattataataaaaaatatggaactaaattaaaggatgttcctcaaattcctaggcacttactgtatagcaccgatcctgaagatcaagacacagtgaaaaattatagaaaggagattcgggaaattcgtcaaaataacttatgtgaactctataaaaaagagtatgagttagcgttggctaaaaaacgtgaacaggaaaatacgaatacacattatcgtgatcaatcgaaagatctagattatgacttttaa

SEQ ID NO: 58408 - DNA, 693 bp, Acinetobacter baumannii
atggctagagttaaattaacagtgagagaaataattttaagagttgaaaaacacttaaatcagatagcaagacgtactcattcagatgagttggtacttcaattaattcaatcgaaaacagaaaatcaatttaccgaagaagacacaaaaagattaaataataaatatcacaaaatcttagaattagacagattatcagaattaatggattctatctgcacaatcgaaaagagtaatcgctctgatattgaaaatgatatcgttgattttagtggatatgaagatcctttttctcagactgaagaaagattaaaaataacattaaaaatgctaaaaaattacaatagaaaaattccatatgaaatcaaacaaaaagcacactatgaaattaaaaaatctttgaataattcgtataagcaaagaaatcagaagataaaagacaggaaaaaagagaatcatgagaagttttttcttggcagtgtgcttatatcatttttaaaatctaaagatattgaaatgaattatctggatattacacttaagatggtagagctttatcagactaaaaattattttaacagagaattattttcagaatatgaaataaatgaatttaagttctcagaaattggtagaaactttaacgataagaaaaactctattttatctgacccaaggatgccttttaaataa

SEQ ID NO: 58409 - DNA, 216 bp, Acinetobacter baumannii
atggctgtatctatagacctaactaataccgaacgtcgagtatctactgccgaattcgctttgcgcatgaatatttcagaaaaggagctatatgatcgaattaaaactggtcgcgtgacaagaccaatcaaagatggacgtaaaaattactggcttaatagctatgtcctttcctgtattattcatgaggaaaactccactcttacgtcagaatga

SEQ ID NO: 58410 - DNA, 333 bp, Acinetobacter baumannii
atggaaacaaagcgtttacttgatgttttagatcagcatctggcaaaaaacgaatatttggctggttctgaatattcgattgctgatattgcggcattcccttggtatggtggtcttgttaaaaactgggtgtataacggcgcggagtttttaggtgtcgatcaatataaaaatgttcagcgttgggcagatgcgattttagcgcgccctgcggttcaacgcgggcgtatggttaaccgtacttttggtgatttagctacgcagttgcatgaacgccatgatgcgagtgattttgagaccaagactcaagataaattgcagaaccagtcttaa

SEQ ID NO: 58411 - DNA, 165 bp, Acinetobacter baumannii
atgcaaaagccgcacaataatggtgtgctcgcctatctcgggtttattgttgctatgatttttggtcgtaacgatactaaaggcgtagaaaacctagagtcgattgaaccgttttatagactttttaagtggtatgggcagagagaatttggcgaaagccaataa

SEQ ID NO: 58412 - DNA, 2253 bp, Acinetobacter baumannii
atgcgtataccacaatttaatcgtcaagtttcagataacagtgtgcctagtgttcaagtttctggcggtgtatctccaagtgaagctgcaagtttagtcggtaacagaacagatggtttagtaggtgcgctaaactcaggattaaaagcttaccaagaatatcaagatgaagcggatcgtgtgcgtgttattgatgcgcaaaataaactcgcagaactaaaacaacacctacagaacaacgaagtcgatggttacataaataaaaaaggcgtggatgttgttagctttgatgatggtaacggcggcggcttcgtagattactatgctaaagcataccaagatggcgtgggagaaatcgcaagcactcttggaaacaaccgccaacggtcattgtttaaagagatggccgctcaagatgcagtgcaatttaaaggctcattacaaaactattttgtacgtgaaaacgatacttaccaacaaagcgtttattcttcttcagcggatcgatttattcgtgagataaatgataaccctggtgacttcaataaaattgatgagagtcgagctaacctaaaagcttctttaggtaagcttatgaatttggaaggcaaggcagcaacagaggcagataatatttatcttaaaaacgtttctggtgctcacattaccaatatcagtgcttttgtagaaaacggagatttaaaagcggctctcgcgtataaaaataaatataaagatgaaatatcattagcggatagctttagagtagatcagcgcattcatcagaagttagaagaccaacaagttgaagcattagttaatatcgcaacaaccggtacacaggagggcagtaaccctgctttaaatgctccgcctcaagcatctgcaaaaattgctcaagagcttaaaagtcttacacctgatcaaatgaaaaacattaaatataatgatcagcgtttagatgtttacaccgttcatgctgcaaaagaaaaaggaatggaatgggcagcaccgcttttacttgctattcggttatctggtgaaaaatcaaataatgatgcagtttcaccaaagggtgccaaatcagtaatgcaatttatgcctgatacttggaaagaatacagtaatggtggtaaacgagatattaataatcctgctgatacgatcgacgcttctttagattttatagactggattagtaaaaaatataaaactaaagacccaattgttattgctgcttattacaacggtgggggtaatgcagcttccgcagttcttaaaggtgggcaaccgcctgcttcagaaactcgaaactatattcaacgaattgataaatggttaacgaatgattttggcaaatatgcaaatcaacccgctaaaacccgtgaagctgcatacaacgaaatatggaatagcaatgcccccgttgaagtaaagcaaaaagctttagtggcaactgatcgttattatagtggacttgataaatccaagaaggacaaacaagatcaaagttatagcagcttatataacggtattgtttctggacaatacacatttgaacaaatacccgctgcaagtatcacagccctagaaccaaatcaaattaatagcttaagggctgttagtaagtctgtttactcaaaagaagttaaaacagacccaattactttaagtatgataatgctgaataaagatgaattactgaaaggtaaaccgcaatcagtattacaccagtatgctgacaaattatcgcctactgattacaaagaagtcaccaaggtttatgctgaagtaaacggtttaaaggacgctaagaaaaaagaagaaaaaacatttttggtaaatgactctacaatatcgagtgctctaaaaccttatttgggtatgattggtattactagcactaccgataaaaaacagttagaacactataacgctgttaaaacagatttgatgcaaacgttattagaagcagaagcgaaaaacgggagtcatttaacttgggatcaagtgaatcgtgttgtattgaagaacgttaatcgtcaagttcaaattaccacttcaagaccgttctttgatgataaggttgaactgaatcgggtttataatcaggttaaaagtaagagcgatattaccgactcaatgagaacaaaaattgataatatatttaaaaagcagggaagaaaccctaacaatgtaactaattcagaatacattaatgcttattatacgtttatgagaaggggttattaa

SEQ ID NO: 58413 - DNA, 624 bp, Acinetobacter baumannii
atgataaatccatatgcatttgctgctgtaaagggtgtagaggcgctatctacttatggcaaattaaaagctcaaaaaaaggcgcttcaacagcaagaacaacttgctttatctaatgcaacgctttcagataatcaagcacggcaagctattgaagatgggactaatgccgtaaccgattaccaacgtaatgtttcggcatttaaatcaagccaaataaacgcgctcgctgaaaatgggattgatgtaactcaaggttcggctgttgatctgcttgcatctactgaaatgcttgcgcaaggtgatatcgattcgattaagtacaatgcctctttgcagtcatgggggcataaggttcaagaaactaactttcgaaatcgagccgaaaaatatcgtgtagccgcaaaatcaattagaccattaacaagcacgcttttaagcctagcagggggtgctgcatctgcatacgggtcaagcatgggtaaaggtagtttgggtgggcaagcggaaagttcttcgttgggcagcggttctgactttgcatcaagtctctataacgcaggcaatggtacccaaggcgcatcttggcaaaattataattggaattggttcggagctagttaa

SEQ ID NO: 58414 - DNA, 2037 bp, Acinetobacter baumannii
atgcaatattcgtttaatggtggtgtaatttcgcctgatatgttcggccgtattgatcaagccaagtatcagacaggcgttgctaaatgcaaaaacatgtatgttgagctattcggcggtcttgtatatagagcagggtttagatacgtacaccattatccgaaatctcatggaaagatgcgtcttatccgttttgtctttagtgaagaacaggcggttgttttggctattcgtgccggtgcggttaacttctttgcaaaaggtggaatacttctaaatgatgcgggccaaccattagaagttgaattaccttatgcagaagagcatttaatgcaacttcgatatgctcaatctgcagatgttgtaacgattacgcatccagattacccaccaagaaaaattattcgtaaaggcgcaaccgaatggagcactgaagttgtaagtgtcggttatggattaactccaccccaaaacgttgcagcaacagcacatattgaagataaatataaagaaggcggtaatatgcacgactcatatattgagcgtgattactcataccaagttaccgcagttgatgaacaaaatgaatctgctgcatctacaaaagtcactgttaaaaacgatattactcttgcaggcaactacaacacgattacgtgggatgttgtaacaggtgcaactagatataacatctttaaattacgttctggtttagcaagctatattggtgaaactactgaaacaagttttaccgatgacaacattgaaacaaacggttcaatcaccccgccattaatccgtaatccgtttgaatttaaccctactgcggttgcgtatcatgggcagcgaaaagtttatggcggtgggtaccaatcgccacaatggatacgaatgtcgcgcacggctacagatgataattttggttatcacattcctacacaagatactgactcaatccaaatacgttttgctgcacgtgacggcaatggcgttaaacacttaatcactctgaatgatttgcttgttttaacaagcggtgcaatgtggaaactttcgtctgatggtgctatgaccgcagcaagcgtaaatatgaataaacaatacagtactggtgcaaatgatgttacacccgtagaggtggacggcgcagcagtatttgcttctgatcaaacaggccatgtacatgaggcatctttagcaagtggttacaatgcttcttattatcaaacactagatttatcaattatgtgtccacaactttttgatgggcataaaattatagattgcgctgctatacgcaaccctttgaatattatatattttgttcgtgatgatggggttttgctttcattaacctacgaaccacaacaacaagtatgggcatgggcagaacaccatacggacggcaaatttctatcagttgctgaaatacctgaagagaatcaatcagttctatacgcttttattgagcgtaatggtttttatactattgagcggatgctcacacgccaaccactagatatgaaagataaatgttatctggacagcagcattcaatataaaggcgaaccaacagatgttttaagcggtctggattggttagaggggcaaacggtttctatatttgctgatggcggtgtaaagcctgaagcggtcgttacagatggaaaaattaaacttactcgtaaactatcaaatgttttagttggcttgccatatgtagcagaaatgcagaccttgccgatttatagagaacaaagcagtccgactaagccgaaagtcgtgaataaagtgtttttaagagttcgtgaaacacaaaatattcttgtcggtgcgaatcaagagattgcaaatcctacagatattgatgaatacaaaccccgtaaccttgaaccatatggagcaccactaaatttaatatcgggctttgtagaaataccagttgacagcacttacgaaagagacattcaaattactgtgaaacatgataaacctttacctatgaagttattggcattagaggttgaatacaaatga

SEQ ID NO: 58415 - DNA, 555 bp, Acinetobacter baumannii
atgagatcaattgttgatctttgcaatttagccctgtcgcatctcgcgcagggctatgttgttaaagaactaaatgaaccgacaaaacatgcaaatctttgcaatacgttttatccagtttgcagacgcgagttattagataacgaacatcagtggacttttgcggttaaacgtgcgcgattgaatgtagacgcagcctatgagtttggcacagcatacgttttgccaagtgataatgtccgtatatttcagcttgaatcgggcagtcgattctttgtagaaggtaatcatttatttacagatgatcccgcacctgtattgcgatacgtccacgatgttaaagacttggcgttattgcctgaaacctttcaagtggctttgtcttatctactagctgcacgaatttcggggccattaacccaaagtgaagaaaaacaaagacaaatgttggcgggttatgcaatgaacctgaataaagcgatctttattgatcttcaacaacatcgtattgaaccccgcccagaacacacgggctcaatgtttgaggcacgataa

SEQ ID NO: 58416 - DNA, 186 bp, Acinetobacter baumannii
atgtcagaccaagtattagtagttgctaccaaaaaaggtttttaccatggtattcgtgatgtaggcacacagttttatatacctactgatctggtgaatccaaaagtaagaacttggtttaagccagttgaagaaaagccgaaggcttcaggtcgaggcgcgacgggctcaaaacaagctgagtaa

SEQ ID NO: 58417 - DNA, 336 bp, Acinetobacter baumannii
atggcatttgccaaaagcataatgttaagacaagtttttggagctatcgaaatgtgcacaaacaaagcattggattttataacaggcggaatgattggcggtcagcttggtgatgccttgggacttggcaagcaacctacagttcaagtacaggcaccgccaaagcaaccaactcgacaagattctaaatcgcccgattcatcggcaacaatcgaccgtgtacagcaagctcaaaactcaatgtctggtggcattgctaatacgctttatacagatgcacaaggcgttaatgctgaagatttgcgtctaggcaaaaaaactttattaggcggttaa

SEQ ID NO: 58418 - DNA, 585 bp, Acinetobacter baumannii
atggctttacgtggaaaacaaaagatattcgtacatgaatacctgaaagatttaaacgcaacgcaagctgcaattcgtgcagggtattctgcaaaaactgcgtattcaattggcgaagagaacttgaggaaacctgaaattcaaaaagccattaaagaagcccaagaacaacgcattaaacgcctaaatgtagatgcagattacgtattgcatcggctcgttgaaatcgaccaaatggacgtccttgacatcatgaacgatgacctttcgcttaaaccaatcagcgaatggcctcctatctggcgtcaatacatttcgggcttagacaacatggaagagtttgacggacgtggtgatgaccgaacaatgattggttatctacgcaaaattaaatggcctgacaaagttaagaaccttgagctattaggcaagcacatttcaatcggcgcgttcaaagatcgtgtagaacttggcaacgacccagaaaacccgctaaccgatccaaaagcagcaagcacacagttaagccttcttgccaagttgaaaaaggctaaggctaaaaaggagaaaggcgatggaaattaa

SEQ ID NO: 58419 - DNA, 474 bp, Acinetobacter baumannii
atgacaacagatatccatacatggcgcagcctaatctgccaagaccttatcaaagcgggtttaacaaactcaaatgatatcgttacacaagcttcaaacattgaagtctatgtatttggcgataccaaaacggcagaagcaaagcctgaaatcaaaaacacagaaattaaaacttctagtcctgcaaaaaaccaagcagctaaagacgctgatgcagctgcggttgaagctgaacaaaaaattgctgaagccaaagcagaagcagttgaagaaccaaaagacgaagttgttgaagaaacaactaaatcagaaatcactgaaaaagaagtgaaagacgcttgtttagctgttgctaaaaaagaccgtgctgcacttttagcgatcttaagcgctgtaggtgcttcaactgttgcaaccattcccgcggataaatacgcagaagtaatcgcagcttgtgaatcagcacttgcataa

SEQ ID NO: 58420 - DNA, 579 bp, Acinetobacter baumannii
atggaaaacatcaaaattgaaattccaatgcaggtattggatgcagcaacaatttgcacagctattaaagacatacgtttttatttaaatggcgtggctattaataaagggcatgttgtttctaccgatggtcacagagcatttgcatgcaagatcgacggtttaaatgaagaaatcaacttcattattccaactgaagctgtaaaagcctttattaaaaaagtaccaagtaaaaaccgtaaggggcattgcaccatcgtaattgatcgtagtacacagcacggaaaaatttcaaactttcctctacaagtgcatgagcttttcattcctattgatgggaaattccctgattggcaacgtatttatccaaaagaagtacctttcgagtaccaaggacgctatccgactttcaattggtcctatttggctgatttccaaaagattcataaagcacttggtggtaatggcataaacgttttattgcgtccacagtctgcaaatcaagctgctttagtagattttgacggcactttattcgaccaacatgccaagggcgtagttatgcctttacgggcgtaa

SEQ ID NO: 58421 - DNA, 474 bp, Acinetobacter baumannii
atgacagaaaaaccctatatcggagttaaggcccaatctattgaagaaagctgtgcttttcagggcgccttgtttttacaaggttatgagtggtctggttcaggtaaacgttttactgaccatacaaatttttatgcaagaaaacacgacaagactttaatcacttgttaccacgacccttccattgatgaagaaagtgaatttttgacactagatcaaatcaatggcacgcaaccacctgcattggaacaggtattaaaaatacatgaagaaatgcttgagacaaattcgtattgttattttgaattagcgtacacacgtaataccgattggatggtgtggatatgttcaaacgcaagagaagctgacccaaaccgtaaagtccttttacgtggtcagggtttaacaccagaagaagctgcacagaatgcgcttatcaattatgaaggtacgaaaaatgtcccaaccacgtaa

SEQ ID NO: 58422 - DNA, 486 bp, Acinetobacter baumannii
atgagtagcatttgtttggtagataccagtatctttcttaatattttgaatgttcctaatcgcaataacgaaaggaatgaaattttaaagcaatttcaagaatatatagaattaggatgtagctttattattccgatggcaacagtcattgaaacaggtaaccatattgcacagaatggtgatggaaatactcggcgtgaagttgcacaattttttgttaatactttagaaaaaacttttacaggtgaagcaccttttcgtatttctaagtggttatcacaatctgaaattaaagcatggcttgcagagtttcctagtcatgctcaacggaataaatcttcaactagaacaacagagggtacaagctttggtgatttatcaattattaaagagtttgaacaaaattgtacaaaatttccaatgagtgagatttttatttggtcattagatgatgatttaaaagcctaccatcaaacaagtgcataa

SEQ ID NO: 58423 - DNA, 1341 bp, Acinetobacter baumannii
atgctaaaaggtatttggatagaaaactttaaaagttatcacacaggacaacttttgcctttagcgcctttaacattaatgataggggcgaatgcttctggaaaatcaaatgctatagaggcttttcgttttctcagttggtgtgtcggtggagaaaaattaacaacaattcaaaatcgtattaatgactctgaaaagatctttagaggagatgttcgtgatttattccattttaagtcgaaagaatttactttaggtgcggatttttctaaatttttttctgagttaaggattgaaattacatctaatgaactaaatgagctaactataaaagatgagtggctgaaatttacgaattcacaaaaatatttatataaaattgatacttttcctcaaaacctaaaaaaaaggataaccaaggaagacaaattacttaaaattgaactttctcctacaacacctaatcaaagtcttaagggtatatttactcagtatgataaaaatgcatctaatctgcaaagaataaaaaatttattgcagttaagagccgatgatgaggagcgatttgatgagcgatttcaacaaagacttcatgaattactatttatcgagaaagtattgtctagcacatatttttttgattttgtaccctcccagatgcgtcaagaaagcttagaagaaataaagttgcgaccaaatggacaaaatttatcaggtgtattgtatacactatggcagaatgaagaacatcaaagaaatattttagagtttattagaaatttgcctgaacaagattttaaaactctaacattttataaagatcatagggagcgtattgaattagctttagttgaaaatttcgctagtcaagaacaggaatggagttgtgatgttttatcagatggaactttaagagttttaggtatagctgctgccattttatctgtgcctgaagattctacactggtgattgaagagatagataatggtattcatccatcccgagctaaatcattacttagcacaatgttagtttttgctgaaaaacgtcatttaaagcttttacttacaacgcataatcctgcactcatggatgctctaccagataaagccttaggtgatgtagtttttgcatatcgggatccaaaacagggtgatagccgtttaattcgattgagtgatttagaggattatgaaggtttagtttctcaagggtcattaggggagttggtcacaaaagaagtagttgatcgttttgtaaaaaatcctatttctagcgaagcaaaaaaacaaaaagctttaaattggttggaacaaatgcgcgggatatctcatgagtag

SEQ ID NO: 58424 - DNA, 273 bp, Acinetobacter baumannii
atgtctacaaaaaaatatcaggtacggattcgtaaagatttatcaaatagcccaattcaacaaaaagcagcttcattgcttggggcatgtgctgtttctgaaatcacaactttgattggaaagtttgaaaatcttcaagatgcatttgaaaaaatggcaactgtaaaaagattagaagaatacgaaattatctcaattattctgattgatacggataacagcgagcagcttggcgaggattttgattgggagcaaaaagcatgcgcggaataa

SEQ ID NO: 58425 - DNA, 474 bp, Acinetobacter baumannii; identical to SEQ ID NO: 54904

SEQ ID NO: 58426 - DNA, 333 bp, Acinetobacter baumannii
atggagcaatatagaatagttttagaaaatcatttcacaactaatagtgccactccaccaagtcagcaagaaattgaaaaatatgtgagggaacaatttaatctatatcttataaaacaatatgcggaatgctcttcagcatattatttaaataatgtagatcgtcaaacaaagctgactaagattgcaagcagctcctactcgattttagtcttaacactaattgttagtttattttatgttggtcacaaacttgaagggaaattcgatgagtcaaaatcaaaacattccaccaccaccaccaccaccgcctgtaagagtaataaagggtga

SEQ ID NO: 58427 - DNA, 699 bp, Acinetobacter baumannii
gtgattgaacctcaaaatttagtcatacctgctgaacatttaggtgcttatcaaaaaattattttagatatagaaaaaggaaactctttaaataaatatcaaagcagaaaccttaaaaagctagattataatgatgatatgttatctcattggagaatccagcattttcatttaggtaatgttgtggaaagtgatgggtatatggaaagaacgtcagatttattgtttatccacttttctaactctcaagcacacattattggtattttctcacatggcgattggtgcgatttagatatcatcgaaactattcatgaaaattggcctaatctactaattagttttaagtctgaatcgactagcgaaccattgacagaagagcaatataaaattttaagacgtaaaggctacaacacaacagttagagtaaaggatggtacagaatatcacccaccaggttttggtgttgttgctaatggatcgcctgtagaagccataacgaatgttcagaggattttaattacatttgagaactcatttgatgcaatttctacgaatattgatcaaatattagaggctgaccctcaaaaaagaacaactgaaatagcaactatcggtttggagatggatgaggctaatcaaagatttgtttatataattaaggaaacaggccatagatttaccttagattacgaataa

SEQ ID NO: 58428 - DNA, 630 bp, Acinetobacter baumannii
atgaagaaaatttttataactactttcttagtgatagtactgcttttgggctactatgttgctatggtaggagtattaaaaggttggatgaataatttctgccaaagaaaatattgcttggagtttttatcattaggtgattatttatcaattttgatcgcagtaattggcctagtgtttgtcgtacaatcactagatgcttggaaagaacaagataaatttttaaatgcaagaaatatatgtaatcagcttataaaatttcaggatttatgcgaattcgatctcatattattaattcaagagaaacaaaatgaaataaatcaattagcttctttagaagaacagaggaaatttttaaaaaacactttttttgaattgggattatttcaaataaatcaagagctagatgaaaggttaagacaatctaattgtttgtataaaagtgaattaaatgagatttataaagtattaaatcaatgtttgaataaaatgtttacgaatatagaaaatgaaaaaagaagttttcataatattgatagttttttaaatcgagctattcgtgatgatattaaagaagttaataataaattaatgcaaataactcagaaattaaataaaaagataaattag

SEQ ID NO: 58429 - DNA, 1122 bp, Acinetobacter baumannii
atggctctacctattattacggctgaccaaactttattggttcaagcaattattgtgtacctatacgctgatccgggtttaggtaaatcatcgatgggttttactgcggaaaaagcaatttcttttgactttgaccgtggtgctcaccgtactggtgaattacgtcgaggtgcggttgtacaggttcaacaatggagtgatgttgcaaaccttactccgcaggacttagcaccatataaaaccgtagtcattgataccgtgggtgcaatgcttgaatgcattaaaacccacctgttacttacggcaaataaccgtcaaaaagatggttctttaaagttaaaggctcaaggtttagcgaaccaaacgttcaagcaatacatcaatactttgatcagtttaggtaaagatgttgttttcattgcacacgcatcagaagatcaaaatggtgatcaaattatttaccgaccagatttaggtggtaaaaaccgtaacgagctttaccgtatcgcagatgtcatgggttatctaacaactgttactacaggtgaaggtaaaaatgcccgcgttattaattttaaaccctcgcctacacatcatgcgaaaaactcaggtgctttaggcggtgaaaccggtgaagtatgggtacctgatcttaaagcacaccctactttcttggctgacctgattactcaagctaaagatcacattaacaccttaacgcctgcacaacttgcagcagctaaagcccaagaagagctagaaaactggaaacaaagctgtgaggaagcagagcatgcaggtgaccttaatcaattaactgagtcgcttgataaagaacacatgtattaccagaacatgcgccaagcaatgttaatgagggctaaagcattgaattgcacgtttgataagcaacgtggcacttggattagtccacctgaatttaacggtatctcagatcaacaaagagatgaacttcaaaactttattgctgaacggggcctcgatgtaaaaacagtttgtgagcacttcggcatagatgcccttattcaaattgaagcggcaaagctaacagcagttaaacaagacattgaaactttggctaaaactgggatgacagcatga

SEQ ID NO: 58430 - DNA, 501 bp, Acinetobacter baumannii
atgagtgaaattcacttaagcccagaggctaaaacggcaatttacaaaattgttcaccaatcgcaaggtatttcaccgcaagaaattgcagacgttctaggcgattcatacaagagcgttcttaactacgcaaacccaaatatggaaacgcatttcccaagtatcaaaaaacttgaggcaatgattcagtttactcgcaaccctgcattagttaaggcgtgggcgcatatgcttggatttgtattagttccagcaagtcaagccgatgaaaaagcccatgaagtaagcattgttgaaacgttgctacatataaacatcaacaatggccaagctaatcagcaggtccacaaagttttagaggatggagttgttacgcctgcggaattagcagatacagaagaaatcttagaagaaatggaaaaccacattcgccaacttcgagaggcgcttaagtcggaagctgcaacttatatttctaaggtaaagaaagaaaaagcctga

SEQ ID NO: 58431 - DNA, 288 bp, Acinetobacter baumannii
atgcaaactaatctatcaaatcaacagcaaataatccagagctggtatgaaccggcactaaatactctcaaagcattaatcaaaaaatgtgaagagaacttagaacgtattaaggctgacactaaaaatgctgcggtaaagcgtgatgatttcaaagacgttttagtccgtcagcatcatatgacttacatgcaggcagaagacgttatcaaaagccttggccgtgctggtcggatccgttttctaggaagtacttatattcaaattaaaaaagaggggaataaatga

SEQ ID NO: 58432 - DNA, 753 bp, Acinetobacter baumannii
atgaagcattatcacggcttgccaatcacacccgctacagcagcttatgaagcagttaagcaaggacatgcatttgtgagttttgcacacaaacagcaattgggtgtagcaattgatgtttgtcaaagttttgcagtagataacggagcttttagcgcgtggaaatctggaaatcctattatagattggagtgagttttatagttttgctttcgattgccttaggtatcctcattgcgattggattgtagttcccgatgtgattgacggcactgaagcagacaatgatgctctacttgctgaatgtcctatttcaagagactttgctgtacctgtctatcacatgcatgaatcattagatcgtttagagcgattggcgtctgattattcacgcattgcgctgggttcatccggtgagtttgcaaatgtcggcacaaatgaatggtggcaacgcataaatcaaatgatgaatgttgtatgtgatggggatggattcccattagttaagatgcatggactacgcatgttaaatccagcgatcttttcaaaacttccacttgaatcagcagactctacaaatatcgctcgaaatatcgggatcgatagctcatggaaaggcaattacatgccgccaactaaagagatgagagctgctgttatgcgatcaagaattgagtccgttaattcagccaatttctatgttaaacaacctgtgtcaaatcaattatgcatatttggagccagccatgagtga

SEQ ID NO: 58433 - DNA, 231 bp, Acinetobacter baumannii
atgagtgagtttaaagtcggggataaagtttgctttttaggtggtcattcactaccagagttctttggtggagtgtatgaaattatagggcaaacgattgctggaatttttaatgatgaatatgtactcaatgataagggtaagaatagacgagtaagttacaagacgattcggcacgccacgccagaagaaatagcagcaggccaccgtattgatgaagtgggtgattga

SEQ ID NO: 58434 - DNA, 240 bp, Acinetobacter baumannii
atgtttaatagagaaacacttaaattaatcaattctgcaactggtgaagaaagggaattacagcaatgtaatgttggtgagaacagcatccacagcaaggatatcaaagttcctgtaagagaaggtgacttcctcattagacaactaccaagtggattggaggaaaaatatcaagtgttagatgttgtggcgtacacaaattcacgtcctcattatgaactgaaagtgaaaaaaatctaa

SEQ ID NO: 58435 - DNA, 177 bp, Acinetobacter baumannii
atggacacagtagaaataagaaaaaatatcgacatgtactcgtcagaattaaacaagtatcaaagtctgtctcgtcaattgctcactcgtgatgaaatgattttagttgatcggaagattgtgcagtttaaagaacgcattaagaatttaagagtggtacttgatgcgcgacagtaa

SEQ ID NO: 58436 - DNA, 228 bp, Acinetobacter baumannii
atgggaactaaagcaacaaaatctaagatgattgaacgagcattcgagtttgcagaaaaggttattgccgaaaaccaatgcattatcaatcacactaatattccagaagtcagtgcgcgtgctgctgacctggttgaattggccaaatcatttaagcttttactttcagatacacatgaagatttaattaagcttgaaaactacggcaatgatgattatcgtggttaa

SEQ ID NO: 58437 - DNA, 327 bp, Acinetobacter baumannii
atggaaaaccaacatcgtaaaatcaaaggctatcgtgaactttatcaagaagaagttgacctaatgaatcgcatcaaagaaaaaggtgcagaactacttacacttcaggctgaattggcaaaccgcttaaacacagatttagaagttaaacaagcagcagctaaacgcgcccagttagctccaaatgactttgcaagtgctgaatggcaagaatatgaacgtttcaaagacgctgagcctttgcgttgggctgctattgggaaaactgacattcagacaggcatcatggctctagttcgtgcggtagctcagccaacaggttgttaa

SEQ ID NO: 58438 - DNA, 492 bp, Acinetobacter baumannii
atggaaccacgattcgtcatcaaaaaccattctgacatcaactatgtaattggctatctcaataataatcatgcaaaggcggctaacgaagggaagcctttagtcgtattgattgcacctcaggagaaagatcgttcaaaggctcaaaaccgtttgtactggatgtggcttaatcaatgggctaagaagcagggaacagataaagattacgaacatctgttcttcaagaagaacttcctagcaaaaatctatgatcgtgatgacgttgggcaatacaagaccacattcaaggctgttagagaattgaaggattctaaacatccactctaccaagatgtagcaagtggtctatgtgagctaatgagcactacagatgcaagtacagcacagttcactgaatacctgaacgacattcacgccttctgcaacaaacaagggtgttatttggaaacgcctgatgatttgaaatggtgttatgatttgattaagtaa

SEQ ID NO: 58439 - DNA, 657 bp, Acinetobacter baumannii
atgaatcagattaagccaaaacgtcttgtgatagtgtttgttctattcttaatttttattgcgggcattatatgtttaagggttaatgagctaattgattctagggatttaactgtactaactacagtttttttggttggttcatttatagctattttttttgaaaaaatatctgaaattactttgattgggaatagtgtaaaacttcaacagataaatgagaagtcagagcaactgttagagcaattgcaagtagagcacttcaaattaagaattgagtcagcatttgctgcagacaacctctttggtggtgattcagtttttacatgtagagctaaattgttcgaagttgccaaagatattaaggatgctgagttagtagaaaatgaagaactaaggaataagatactaccattactgaaattacatacaggtaaacatttagagttagttcaaagatatggggccaatttagaagcaaatcctttagttagcgttgatgacccagaagaaatgacaaaggtaatcacagacgaatttgttaatagcgctaaaattaacgggaaaacatcaaatattgaaaagtataaagaaattataaataacatcaatttataccaaaatcttcttaatgctagtaaatggtttgaaaattag

SEQ ID NO: 58440 - DNA, 471 bp, Acinetobacter baumannii
atggcgacactaaaagagcctgtgaaaatctttatagttcagtctcttgcttgtcgtgatacacctcaagaagtggcggaactcgtaaaacaagagtttggcgttgatatagatcgtgttcaagttgcaacttatgaccctacaaaagttgctggtaagaacttaagcaaaaagtatgtcgaactatttgaaaaaaccagagatgagtttgataaaggcttaattgatattccaattgccaataagtactaccgattgaagcaataccaaagacagcttgagaagactagaaacgtcaaaacagccttaaaaattcttgaacaagccgctaaagatattggtggtcaatttactaatcgccaagaaattacaggcaaagacggcggaccagtccaaacagttaattctgaaattccagttccaatggaagattacttaaaagcgcggagggaagtcttagatgagtactga

SEQ ID NO: 58441 - DNA, 138 bp, Acinetobacter baumannii
atggctgcttttatcgttcttgttgtcatgttcttaaccattcctgtttgttatctaattaaatggtatcaagactacaaggcatggaagtttcataaaaacagaagccgtcctttaaacccgtggtctgattggtga

SEQ ID NO: 58442 - DNA, 318 bp, Acinetobacter baumannii
atgtgcagattgctaacatcaaacagaaccttaaaaatgcgtgatgcaaagcgactggctgcaataagaaaattaccatgcgttagatgcggctatcctcactcacaagcggctcattctaatttcagtgaacatggtaaaggcaaggggattaaagcagatgataaatacactattccgttgtgccatacctgccaccaatggctcgaccagtaccgagggatgggacgggtagaatctaaagaatggttcgacaagatgttagaaaaaacagagcggatgttgaatattgatggaaaatcacaagatttattttga

SEQ ID NO: 58443 - DNA, 195 bp, Acinetobacter baumannii
atgaaagtattcaaagctgatttagaaggtggtcgctttaagttccaagaactggattctattccaagtgatattcaatgggattattcaaaaaaatgttttgatccagttaatcaaatatatatttttcataggcataatctttcatttaatgagttagatgaattaaaaagacagttctttgatgaaaaatag

SEQ ID NO: 58444 - DNA, 456 bp, Acinetobacter baumannii
atgggttggacaagcaaaccgagtgacttcactaaaattattgaagctgaccttactaaaaagcaaaaagatattgtgattgatgcattacaaggtgttgttctccaaagtccagttgatacaggggcatttagggcatctcacagagtcagcataaaccagactgaccaatcatttaatgaagcagagaaagataaaggcggtgggtcaaccattagcaaaggcacaagcgctttatctcgtctagttccttactcaactgtatatattcaaacgaatgcgccttacgccactgctattgagtttggtcaatatccaaatccagtcaaaaaaggctcctacgacaaaaaggctaaaagatacgttattaaaagtatcaatgggttttcacaacaagcacctcaaggtgtctacggcttaacctttaactatattgctcaaaaatacggtggttaa

SEQ ID NO: 58445 - DNA, 396 bp, Acinetobacter baumannii
atggcaatgactttagatcaagcacgacaagccataatcactcgagcaatggcatttactggaatagctcaaagtcggattaaatatccaaataaagatttcacagtaccaattgatggtctttggtgtgacattaatattttatggggacagtcattgattgctggtattggagatgaaccttgtacacgccgaactgggattatctcaattaactccatggcccgcctaaacactcatgaagtagctatcacacaacttgcagatgcttggctaagccactttgaatattttcagatcggtcagttagaagtactgcaaggtcaagtgcagaatctcggcagtaatggggattttttgcagtacaacatttcaataaattatcgcgtcaattaa

SEQ ID NO: 58446 - DNA, 702 bp, Acinetobacter baumannii
atgcgaataactctagaaatcaaatgtccaacctgcctcggtgacagtataaagaaaaatggcatcaaagtagatgggaaacaaaactatcagtgcaaagactgtaaacgtcagtttattggtgaccatgctctgagctatctaggatgtaattcaggcattactcgaaaaatattacagttgatggtcagaggtagtggtatacgagatatcgctgaagttgagcgaatcagtatcggtaaagttttacgtactttaaccgaatcgacctaccaaattcagcctaaacaaagtcattatgagtctcttgaagttgatgagttttggacttttgtgggaaataaaaataataaacaatggcttatttacgcctaccatcgagaaacaggtgagattgttgcttatgtttggggtaaaagagacttagctacagttcaacgattgaagacaaagcttaaacaattaggtattcactacacccgaattgcaagtgatcattgggacagtttcataactgcttttaaaaactgcaagcaaagtattggtaaattttttactgtaggtattgaaggtaataattgcaaaataaggcatcgaattaggcgtggttttagaaggagttgtaatttttcaaaaaagattgaaaaccattttaaagctttcgacttaacctttttttacatcaataatggcttcatttaa

SEQ ID NO: 58447 - DNA, 657 bp, Acinetobacter baumannii
atgggtcccattaccttacatgaaatgattatgttggctgtatttggaattttattattactctgggcaggtattcctgccatgttgttgggtgatatgtggactttagacccaactacaaccgcgtttattggtttatcactccttctgcttacaggagttttaacttgggatgatgtcttaactcaaaagagtgcatgggatacagtaacttggtttgctgcattggtcatgatggcgacctttttaaataagctcggcttaatcgcttggttttctggtgttttacaaactagcattggacagcttggcttaacgtgggttcctgcttccatgcttttactatttgcttatatgtacgctcactatatttttgccagtactactgcacatattaccgctatgttttcagcattctacattgcaggtatcgcactaggtgctcctccaatgttctttgcactgattatggcagcagcatcaagcattatgatgacgctgactcattatgcgacaggtacatcccctattatttatggttcaggttatacaacgcttggtgaatggtggaaagctggttttgctatgagcattatcaatatagctatttttattgtattgggcggactttggtggaagatgctgggctattggtaa

SEQ ID NO: 58448 - DNA, 222 bp, Acinetobacter baumannii
atggggtttcaaatggatagtaaacaatatacttgccgtgttacatggtcagcagaatataatgagtatgttgggttgtgtgctgagtttccatcattgtcttggcttgatgcggatcagtctaaagcattctcaggaatagaggagctcgttgctgatgttgtcgctgatatgattagcaataatgaaaaagttcctacaccactctccgggaaaatatag

SEQ ID NO: 58449 - DNA, 3201 bp, Acinetobacter baumannii
atgcaaaaaatcaaagaactaataaaaccacaactagacggtctatttgttgatattcagaaattggtgaaaaagtcgcaagaaagacagccttctttacctgaagtattgacgcaagacatgcagcaaaaacttgatcagcagatcgccgaaaaatggcatgacattaaagatagtgttgattgtttgagtcaaaaattgagccgagatgaacaatctaaactgatgcaatttactgaagatgaatttaataaaagaagaaggcaattcaaccagaatgtagataaaaaatcatacagaattaggctaaatccacatactaaacggatcgtactgcctagaaaaattgagagtacggagtcacggttaaaacaagggcagttacatgcccaggtactcaatgctttgaaagcatattggaaagattcacttggatattgggatgaccctaaatatttgtggggggatttatgcttaagttttatatatatttcaggctgtgcagatgaacagcatctggttgctattcagcagcaattgcaggaggccgttgagcttggtacagatctgaattgttttcggttataccattcggactacaaaaaaatcactaatccattgttactacattatcgtgttgaaaactctcaatatggcaacgatgtagaacagagaaagttgtaccaatggaagcatgttttttttaactcatatgctcagttcatcttgcaatatttaaaaaagttgaaagctactcataaagaatatcgtctgcaacaatcaattgaagattgtattctggaaagcttgagtcgcatgggacgaaacaaaagtttgggcgatctgcaatatcaaattaaacgccgtggatttcgtgcatttaatgatgtgcaaatggtacttgaatttaatccaaaccttagcctagatatatttttaagtaatgtacttcagcaagagattaatactgtcgccttacggccatccgaatttagattgctatggagtaatgaacgtaatcaagtcatggaactagagaatagccctattcattttgaacaagagcagttacatcctgaagttccgacggctcaaagcaaattacaaacgattccgtatgagttgatgttgtttgatcaaaagaaacgtaaaggtcaaaaagttgagcgcttagataaaaagaggaataaagaagaacgcacgctacgtttttggcaagaaatcagaagggtgttagaggagaagatgcgtgatgcaaatacggaagaaaagtctttaattgaagcccaattacgcttaattcactggttagtgcatttaaaaaaaagagggcttcaattatcaactattgaaagctacttaggatcatttgctaaagaatttatatttgaaatttggcttaataaattggatttaaaacaacaatccattgatgattatgaagatttatatcgacagttgttgaaatatagcagtgaacgagatgcacaagcaactcaacgtgaagctgttaaaggaaaaacctctcgtaagatgcaccaaacagcagaataccgttttggtcgcctaaaagattttcatcaattctgtatagagaattatgatgctccaggggtattggtgttacagaattcaagttttaagcatttacaaatttgcaatgcacggctagtgagtcctttgctatttggcaaattattggaaaaactagaaaatttaagtcaagagccaacggcatcagagtgggtcgatcatctgagttgtttaaagctgatgtatttactaagttatagaactggacttcgattaaatgaagttcgttgtcttaaaatacaagatattatttgcccagagctactttataaagaaaaagaaaatacagtttttaataatatcacgcttcatatccaagacaattcatatcgccgtctgaaaacgcgaagtgcgaatcgtcaaataccattgaaaattgcattgtcagaacatgagtttttagtagtacaacgttacatacaacatcgttatgagcaatatttggttaatcagcaggatgatctactttttagtgtgaatcatcgtgtattaactgatcaatgtatcagcaaaattacagtagatttgtttagtcaaatattaggtatgcatcatggctttagttttcatacattacgccacagtgctgctaactatctagcaataactttgctcggttcaaaagaaatgatcaagacctacacagattgtccttgggtaaaagcaaaaaagatgagggatttattgtttggtatgaaagcacgtgctcaagaagagattattcaacataaatggcaggtgctcgcctcttggatggggcatagcagtattgagcaaacggcttcaaattaccttcatgttttggatttattagcagtcgatcgaatttataattcgccgtgtatcatttcaaaaaaagtattagaacagtgttttagtccagtgaagtcaagtacagactacataaacctaaatcgttatactcagcagcagaaatggtttaattcttatcagcaaacacagccagttacgatggctggccgacaagaaaagaagtttagtatagagaagagtactctgacaccttttcaacgtttgataagttttagagaaggtcgtttaagcgaagatacccaagctcaagaatggatgcaacgatgtcaatggatgagcactaaatggatggatcgccaaaaatttaatttaaaaacgaattatgtttatagtaagaatttagaagagagttggtttgatgaactttacgaaaaggctaaaaaactgactcgtccagatgaaataattcctctccttgattttcattataaagatgataggcagcaagatgcactgaaagaaaagaacatggttaaggcgcttaaaatattattattatttggaaaactgcgtaagaattttctacattttcaatgccgaatgaaaggtgatgagcaacaaattgttaattttattactggtatagagccaatgttaggagatcatctgtatttagaaaaacaaaactacccagttaatttggatgctcctgagcgaaccgttaaatttagttttcaaagagttgtcggctctaacaaaaaaaatgttactccgctggttatatttaatttaatgttaaaaatgatgcaaaaagatgaactctggttgaaatag

SEQ ID NO: 58450 - DNA, 1446 bp, Acinetobacter baumannii
atgctaactatttctgaaaaagaaatcctagaccgcctaaattttgataacccttggtgggaagataaagatacatctatcaatcatagcaagcatcccaaaagaaaatacttttttgagttctatgaaaacatcctagatcgttctgttaatcgggctcttgtcctaatggggccaagacgtgttgggaaaacagtaatggtgatgcaaagtataagtgagctaatccataaagactcaattgataataaaaagatattatttttatctttagaaacacctatttatacgggtattgggttagaaaaattattaaatattttcaactcattacatgggcacaaacgaaatgacgaactatatatatattttgatgaaattcagtatctaagagactgggaagtccatctaaaatctttagtagactcctacccaaactataaatttgtagtaacaggatctgctgctgctgccctgcgtctaaaaagcaatgaatctggtgctggtcgattcagtgattacatccttcctcctttaacatttgctgaatatctgtcatttattaataaggaagctgagttagttacctatattgaagaatttgaaagcattgatgatcgatatagcactaataatattgaagagctaaataaagaatttgttaactacctcaattatgggggttatccagaaacagttttttctgagaaaattcgcgaaaatcagtcacaatatattaagagtgacatcatagataaggtgctattaagagatttacctagcttatatggcatcaatgatatccaagagttaaataggctcttcacaaccttggcatacaataccggacaagaagtatccttagatggtttatcaaaagattctggtgtcgcaaaaaatacaattaaacgctacttagaatatttagaagctgcttttttaatcaaaagagttgaaagaatcgataacaattgtaaaagattcaaaagagctaattttttcaaaatatatttgactaacccctctatgagagcggcattattcgggcaaatagatcctaattctcaacacatgggagctctcacagaaactgctatttatagccaatggcagcatgggaacatagactctctttattatgctagatgggataatggtgagattgatattgtctatctcaatgatctccaaaaaccccaatggtttatcgaaatcaaatggacagatagaccattttcagatcataaagagttagataactgtataacattcaaacgtaagaatcctaacttatcaggagactctatcttagttacgagtaaaactattgatgatgaactgacatatagagatgaactatttgtattcaaaccatcaagcttgtatgcatatattgttggttttaattctttaaaaagaatggggacaagaaaaaaagcaccataa

SEQ ID NO: 58451 - DNA, 363 bp, Acinetobacter baumannii
atgactcctatttttgatagtaactgtgacgtaatagcttggttcgatggtaaaaattttttcgacgaagatattgcatgggtagcttttctacaatctggcaattgtttttctgcagaaaatttagattggcttggagcacttcatgaaggaagtctgctagatactaatggtaagcctgtaggatggttacaaggaaagtcccctagcggaacgttacctctattaaaaccacttcgtccactaagaccactccgcccactaagaccactccgcccattaagaccacttcgcccattaagaccattactaccattaggtggatggtctaatttaagtttcaatcaatggttaaatccgtaa

SEQ ID NO: 58452 - DNA, 270 bp, Acinetobacter baumannii
atggctgcatatacaagcaacactgaaaaacatttacagaaagtagatcattcaaaaagtcactggacagattcttatactatcggcgatacagtacccgtgtcaggtatctataaatgccaaggttgcaataaagaaattactagtaataaagatgatccttttcctcctcaaaacaagcatcaacataccgatgcacagggcaaagtcctctggaaattgatcatacgtaccgatactaatggtgataattttgggatagagaaataa

SEQ ID NO: 58453 - DNA, 525 bp, Acinetobacter baumannii
atgagttttaaaaatgttaaagcaggtactaatccaccagatgactttaatagcatcatcgaaatcccggcaaatgctaaacccatcaagtatgaagtgaataaagaatatgatgctttattggttgatcgctttctaagtacagcaatgtcatatccgtacaattacggttatattcctcaaacattaagcgaggatggtgatcccttagatgtatttgtaatagctccccatgcggttgctgtaggatcagtaattcgcagcagacctgtcggagtcatgtatatggaagatgaagccggtattgatgcaaagatcattgctgtacctcattctaagctcacacctctatataacaatgttgaagatctgagcgacctccctcagcttcaattagatcaaatgaaacatttctttgaacattataaagacttggaaaaaggtaaatggatgaaatttaatggttggggcaatgtagaagaagccagacaggagattctaaaatctatccaagcatacaaataa

SEQ ID NO: 58454 - DNA, 381 bp, Acinetobacter baumannii
atgtatctttctcttttatcaattgctctcggttctgtaatcggtgcctggcttcgttggggcataagtctaagatttaatagcgtatttgaaaatattcctttcgggacagtgattgttaacttaatcggtgcttttattattggattagctgtatcatttttttcaaatagctcaataagccctaattataagttattcgttgtgacaggcttctgcggtgctttaacgaccttttcaacattttcagttgaaattgttgcgttgctacaagcttcaaagtttgaatatgctatctcaacaatagccatccatgtaataggttcattaatctttacagtactaggaatactttcctatcaatttttcactaatcattaa

SEQ ID NO: 58455 - DNA, 210 bp, Acinetobacter baumannii
atgtttaatttcaagatttttaataaagtctctacggaagtattgacgatcaaaaatgatctccagcttaatgctgagctgcaattaattaataaatataaaacggctatttctgaagattataaacaggctattgttttgatctttaaagaacgcggctacacacgtttggaaataggtcaattacttggggagctaaaagcttcataa

SEQ ID NO: 58456 - DNA, 228 bp, Acinetobacter baumannii
atgcatagtttttctgtaaaagaattggatcagttgattgaaaatgatctaaaggaaaagaaaaaatccagtaagttattgattggatataaactatttcatgatctaatgaatgaccctaaatttcatgcagaagtgacagattcagccctgagtgccacaaaacgaaaatataagaacctcaagatcaagattacgacggataaatatcaacttcattttgaataa

SEQ ID NO: 58457 - DNA, 558 bp, Acinetobacter baumannii
atgaatacagctacaaaatacagtgttagtgatgctgcaaccctgtataaaaaatctagggctacactatataaagatataaaaaatggtgtgttaagtcgtgatcatgatggctttatagatttttcagaactacttcgtgtctatggtgaaccttttggagcaaaacatgcaaaacgtattgatgcgtctccaatacaaaatcaaaatacacccgaatacacagataaaactgtcatagaactgaaaagccaaatcgattttctaaaaaaacaattagaaaaagcagaagatcgtgaatccaaggcgaatgctcgtatagatacgcttctaacactcattgaaatgaagcctcccacagccaatatgactacgtttaccgatcagaaacatagccaagatatagcaacagatcctcagccagaacctgaaccgaaacatgacggattgactactccggagcagccgggaaataagcggattccagtgccagagcacattgaactggagcagccgaaaagagggtggttaagccggtttttcttgccgaatggctaa

SEQ ID NO: 58458 - DNA, 924 bp, Acinetobacter baumannii
atgacaaataacaataaattagtcgttaaagataatgctcttatcgatgcctctttcaacttatcactcatagagcaacgtattatgctcttagccatagttggagcgagagaatcttctaatctcacacctgatacaccaatagaagtacttgtaagtgactacattaatcaatttaaagttgatagtaataatgcctatggcttgcttagagaggcagcgaaaacactaaaaagaagggagtttagttatttagatagatataagggccaagaggctcttactaccgcaaattgggtaaacaaagtgacctatgtcgattctagtggtcttgttgttttataccttagcaacgaagttatcagcttaattagccgattaagcgaacaatttaccaaataccatatagaacaagtatctgactttaagagcaaatatagcatcagattatatgagctattaattaaatggttgaatgtagcaaaaactgagaaatatagtattaatgatcttagatcgaagttaggtcttgatgtgaatgaatattcaactatgtctaactttaaatcgaacgtcttagacagagcagtaagtgaaatcaataaacataccaatattactgttgactatgaccaattcaagaaaggtcgagttatcacagatattcaattcaaaatcaaatcaaaagctaaaccagctcaacatgaagcaaccaaaacatccccagcagtattccaccaaatgacagatgctcaaatcaatatgtttggcaatcagctttcacgactacctgaattttcaaacttagcaaatgggaatgaaagctatgagagcctagcagcaaaaatcaaagacctgctgagagatccaatacagcaaaagcagtttttaccccatctaaaaaaccttggctttaaagcttga

SEQ ID NO: 58459 - DNA, 357 bp, Acinetobacter baumannii
atgaatattttagatttttttggaaaaaagaaaggctctaatttcactcaaattcttaattcgttgcgtgtcaaaaatggaattgtgtcgattagcgtttcaggatttacgcatacatttgaagtaaaaaattgtagatttactgatgaaaattcatactttgatattgaaaatgcacaaactgtaatcagtccgatttcaattgattcatcagatgtaatttattttacttacacaaaaaaaatggatggtatgaacgaatatgtaaatacaagatttactcttgataattcaaatgattataaaaaattaaatcaaaaatttgtatctgatttttataaagtgaaaaatcaatga

SEQ ID NO: 58460 - DNA, 894 bp, Acinetobacter baumannii
atgactttgcaaagtgagcttgatgagctttgcaaaaaatttcgtaccgggtcgcacgcgacccaagcgaatcgtcgtgcgatgttgagacttttttgcgatcaacttgcatcaatcggctttaatacttatacaatgcaagcaaaagatataaaaggaaaacatatcaataggttgcttgaattttggcatagagaagaattaagtgcaggcactataaaaaatcgtatgagtgttctcagattttgggctgaaaaagtcgggaatccgggcgcgattaaagataataatacttataaactcgaaaagcgggtttatgtcacgaatgaaaataaatcaatttctttgaaagagctcgatttatcaaaaatcgatcaaaatattgcgcagtctttgcgtttacaagacgcttttggccttagacgcgaagaaagcatgaagtttcagcctgtttttgccctggatgggcaaaaaattgatagtgctaaatacattcgaatcaaaggtagctgggcgaaaggtggtagaccgcgcacaattcctataacgaatgaaaaacagcgcaatgagctaagaaacgcatatgcgagagcggttgaaaatgggggctccctgattcctaaagaaaagtcgtatgtttcgcatatgcattattttgaaaaagtcacaagcgcacttggagtcggtcaaacgcatggcttgcgccatggttacgcgcaagatcgctattttgagctgatcggctttcaatgtcccgctgttggttgtgctcgggagctaacgacagaagaaaaggaaaaagatgcaattatacgtctacaaattagtgaagaacttggacactctcgaataaatattacgtccgtgtatttaggcagttggagcaaaaaatag

SEQ ID NO: 58461 - DNA, 231 bp, Acinetobacter baumannii
atgggaattggggctgagattagagaaaaacttccactttgtggtcactgtgttaattgtaaattattgatatggaatgaaaaatctgaactaaaaacaaatcaaatattaattaaattcaagagtttagagtcatcttatttttatacagtacgttgttcttggctgaaaagcccagtttctgaaccccagtttttagaggtttgcgaaggaagacaggaatttaaatga

SEQ ID NO: 58462 - DNA, 1743 bp, Acinetobacter baumannii
atgacatttaaaattttgctgattttactcttttttgttgctattggtcttttcgctgcggcttattttgtgacgaactttatcatttctgaaacgatcggaaagataaaacaagatcagctagatgatgttaaaagaacggctgctaagtgctcattaattccattaataattttatttgctggtttttcatatttcttaagagtcaaatttactcttcaagactctgaattttttattatttctggtattgccgctatattattttttcttgctttcttttttggtgctcaatttattgatcccaagaatattgagtatgagcgaaaaacgattgaaaaaaaacagtccgctgaagggcttggaacgcttttaaatgaagtggaactaactgaggatgtgggaacacctttaatttcttatattttggatgatcagtttaaagaacctgtcaggaaagcactaagagtcactaatgaagatcgtgggattgttgcaggtgtacccggtgcaggtaaaacagcttatttagtcctgcaattgattgactggatggagtcgggacaaagttttgttgcaacagatattaagcctgaaatctgggcaattttgaaatataacaatattttcgagaagtttggatataaagattgggtttttaatccaaccgatatcaatgcggatcattacaatttattttcagaagtgcatgattcagcagaatttaatgaagtgcttaatatcattattcctgactctgactcatcagatgcaaaagtctttaatgataatgccagacggcttttaaaagcggtcctcattgaattgggatctcaagcctccttgccgaatgcgcagcgttttattaattcaatggacgataatgcagagctgttaaagactttgcgacagtctgataatgaaactgtgtcgaacattgcgaaagagattacgcgtatagcaaaaggcgataatttgtttgcatcgatcatgaccgcagtgtctaaggcctttgattttcttgatgatgaacgtattagaaaatcaatttcagacaatgcagagggcttttatttaaaagacgttttgatgcaacctaaacaagcggttttcttgcagtttgatcaacagtataagagttcaacggctaccctcttcggtgcaacagtggcgcatatcatgcgtattttgcaagcgaatcaagaccgtggtgcggtgtttctcgcacttgatgaaattatcaattgtgcacccattccaaagttcactgatttgctcaatacgatccgttctgcaaatatgcctacgttcctatatttgcaaagttttgagggcttaaatcgcttgtatggtgcaaatgcggacaggttattcttaggttcgagcaattacaaggttttgttcagaattgatgatattgctactgctaaggaatttagtcagttgatcgggaaaacagaagcgacttatttcagctatgacaagaaaaaagggcaaggtgtgagtaatcatgatattcagactcacaacacgtcatcgggcgattcacaaagtttcgggcttctagacattattgagcctgaggagctgattcaattacctgaacacactgctgttgttatgtataaagggacgtttggcactttgaacatgccgaagtattgggagttgtttgatatgccgatacgcattaaaaaagccagtccgagtgattacttaaactatgaaaaaacggctatatag

SEQ ID NO: 58463 - DNA, 342 bp, Acinetobacter baumannii
atgagcaaccttaaattcactttcgaatgcgacttagacggaaatagtaatactcagcgctttaatacgttatcaagcaaatttggtgacggttatgaacaaaacattgctgtaggtatcaataaccgatctggtgaatggacttatcaaagaacggcttacaaagccgaaattatgcaaatcaaagcattctttgatgatcacaaaggtgctgactcgttcctttgggattcgcctttagatggtgaagttcgagttaaaacaggtgaatatcagcctcgccaaattggcggtgacacttggcaaatctcaacgacattcacccaagttttttacccttaa

SEQ ID NO: 58464 - DNA, 3978 bp, Acinetobacter baumannii
atggcacaagaatcacgtctcgtcattgtaattgatgcaaaaaatgcagagcgaaatgcgcgtaatctaggcaatgaattagatagcattgagcgcaagggagactttgctactaagtcgatggatggtttgtctgttgctacacgtcaacttgcaggatacatggctggtttagttactgtaagtgctgcaatctctaagatggatacttatacagggcttcagaacagacttaaattagtcaccaattctcaagttgaactaaataaagcaacggaagacactttccgaattgctcaaaaaacctattcgacatggaattctgtattacaggtttaccagcgatttagtgataatgcgaaaacgctcaatttaaatatggatgaaacagctcgtctaactgaaacagtatcgaaagctgttgcaattagtggagctagtgctcaagcagcagatgctgcattggtgcaatttgggcaggctttggcaagcggaacattgcgaggtgaagagcttaactcagtaatggagcaaacaccagcacttgcaaaagcgatcgcacaagggatgggcattactgtaggtcaacttcgttcagttgctgctgaagggaagattacttcaaaagaaatcgttaaggcccttaaaaatgttcaagatgacgttgatgctctttttgcaaaaacagatatcactatcggtcaatcactcactcttttaaataacgagatcacaaaatttgtcggcgagtcaggaaagggaagcggtgcggctcatgtgcttgctgattcgattcagcttcttgcatcaaatttaaagttgatttctgatggagcactggtgttagggattggacttgtaactaaggcaatcgctactaaaaccgttgcggtatatgccgatgttgcagcaactgccgcaaatgtaaaagcaagcaaagaaaaggttattgcagacgcagctgaagcagccgctgctgtaaaaacagcacaggcgcaaatagcaaattcacaagcaacattgcaggttctagccagtgaaaaagcattagaagttgaaagactaaaagctcaaatgaatgcggtcggtcgcacacaatcaattacgcgtatggccgaattaaagaaaattgaggctcaggtaacgcgagaattagctgctgcagaaacagcattagcagctgcacaaactaaggccaatgctacaaaagtgacagcattaacaacattagggcgacttggaaaaggagctttagggctggtaggtggacctattggtgcactcgctttgggagtttcagcacttgctgccacatacacttattttaaggacaaggcagaggaagctaataagaagcttgaggagcaagctaaggttgctaatcgatctgcaacggaattaaaaaatttaaaaggtcaagccaaaacagatgcaattaatgacttaactactgcattcaaggctcaaaatgatgagcttacaaaaatggaatatcgagtaggtgctgcgttaattgatatccagaattatgcacaaggaaatgctgaagtagctcggatttcaaatgaagctcgcttaggaaccattagttatcaagaagctttgcaacaactagcaaaagtgaaattaccgcctagtttaagacaagcgcttgaggaacaaattgaaaaatacaaggatgcatatgacaaagctgataagacaaaaacagctattaagctatttggtattgaagtattcgtagctggaaataaagcccagaatgctgctattgaacagcaaaaacatgctgatgcaatacaaaacaccaagcaagcagcagatgaggcacaaaagtccttacagaaaatgtatcaagataaattgtgggattctcaatttgtcgagatagttatgaaaaaaggtttttctgagtctcaagctaatgatttactgaagctttataaagattctttagctaagggtcttaagtcagtagaccgagaggctctaaaatcattaacggatacttggaaatctgaagaatcaatcaaagctatgaccgatgctagaactgattctatacgtgagcaaaacaaggagctaaaaaatcagcaaaaagtactaagtgtaaatgcgaaagtcctagccaatgcttcaaaattcggattttcagatctagagtctaaatatgagttattgccaggcttactatcagcaatcaacatgcaagaaagcaaaggtgatgcaaacgctattggtccgcatactaaatacgggaaagccaaaggtggtttccagatgctggatgatactgccaagcgctgggggttggttggtaaagaagtttttgatactggtaaagctgcagaagcagctgcgaaatatctaaactttttgtttaaaaagttcggtaattgggatcaagcaatttctgcctatcatgctggagaaggtaacgtagaaaaaggtaccaatattggtccagttaataggcagtacgttaaaaacgtaaaaggatatgttgctggatataatggttttgatatgaagggagtctctgaaaaagatttcgattcataccttaatcaatttctgaaaactcaagaggagaccgaaaagttacgtgatcagtatcgagataaagatacgcttgctgagaaagaatatttaaaaagaattggtgagttaaaattgcattttaaagatgcagagttaaagcagctcactgataaagagacagcacgtttcaatgctcaaaaggagttaaacactgaacaacttgaatttgaattaaacgagttccgtttaaatgaagttcaaaagctggaaaaacaaaagcagattaaattactgcaaatcaaagcatcaactgattactctgaaactgaaaaagaaattcgaatcaaagctgttaatacaatgtttgattatgaaatttctgagtacagaaaactccaaaagcaaaaattggaggagtatcgaaaaacaatgtatgagcaagcctcaataccacaatcagatgttattaatttactagctaaaaagaacctaacttcttcgcaatatgattcatggaatctacagaatcaatatagtgatgaaatgcagaatgctaatgatacatattcctcaaatgttaaagcagtttcagaagataaaacaatcgttgacgaagagaagcgcttccaggccttattagatgctgaagagctattccgtcagcaaaagtttgctattaatgaaaaatatacgcttatggagcaagacttacagaaatcggcaagagaacgagaactcgaaggctacgggcaattgatgtctcaagcatctactgtttggggaaatttgactgccatggtcagagagtcagctggagagcaaagtggcgcttataaagcaatgtttttggctcagcaaggtattgccatagctcaagctatgattaatacagaattagcagcaaccgaagctttaaagttaggtccgattctaggtattccagctgccgcggttgtgcgtggtttgggctatgcctctgtaggcttaattgcagcacagacaatcgctggtttctcagacggtggttataccggtaatggccttaaacatactccagcaggaattgtgcataaaggtgaagttgtttggtcgcaagaagatatcaaacgctggggtggtgttagcgttgttgaaagcatgcgtcaaagtaaaccaagtggttatgctaacggtggctatgtatcaaacaatcaaacggatgcaattgcaacagttagagagcatagacaatttgatgcgattaattctggaagaactgagaagtctcaacctactgttaccattatcaataaaacatcagaaaaagtggatgctacctctgaatgggatggtaaggagttaacagttatcttaaaagagtatcagaaacaaaatgaggcaatggtggatgcaaagattgaaaaacgattccgaatgtccaaacgacagggatggtaa

SEQ ID NO: 58465 - DNA, 342 bp, Acinetobacter baumannii
atgaaaaattttattttatttatttcagttgtatttattacaacctcagtattttctgcacctaataaaaaatcagctaaagaacagcatgaagaaaattgtgtaaatttagctaagctagcccaaacttttatgacatctaaacaaaatggtgttcctattctttctagtctggaaacagtaaacacaataattaaagatgagcaaagagcagaaataatcagattgattgttaaagatgcttattcgcaaccaaattactcaaccccgtctgtgaaagaagaacaacttaacgaatttactgccaagtattatattggctgttcagaaatgtataaataa

SEQ ID NO: 58466 - DNA, 165 bp, Acinetobacter baumannii
atgagagtacaaaaaggacaccaatataaattacggtttttggatgatgcatatttagatgcgttgaagcaaaaaggcaaagaggaggatagatcactaaattatttaattaaccaagctataaaagaatttatagctaagcaacaacaaggtgcgaaagcatga

SEQ ID NO: 58467 - DNA, 372 bp, Acinetobacter baumannii
atgagcgaaaatcaaaaagatcctcaatataagttgcgctggtctgaagagcttcgcaataagattgccgatgcagctaaagaaaataaccgttcaataaatgctgagataactacacgactagaggaaagtttcaataatggaattactgactcggctataactacaatcattccagcctacttggtcggattgatcacaaaatatgaatcccagaaagctgctcatttgatgcttttgcctaaagctgaaagattcaatgatcagccagcaattaagatgcttaaagatgaagctgatcgttgtgacatgctgattgcggaaataaagttactaattcagcaatttaattcagtatatgacctgaattaa

SEQ ID NO: 58468 - DNA, 1296 bp, Acinetobacter baumannii
atgggtggtgctgtgggcacaggactttttttaggctctgcacaagtcattcagtctgctggtccttcaatcattttgggttatgccattgttggtttggttgcatttttaattatgcgccaaatgggtgaaatgattgtcgaagaacctgtagttggctcttttagctattttgcacaaaagtattggggaagatttcccggttttttatcgggctggaactattgggttgtgtacattttagttgcgatgactgagcttaccgccgtggctaaatatgtacattattggtggcctcatattccagcatgggtttcggttttatttttctttgtgctggtcacgtgcttgaacttaggcaatgttaaattttatggcgaatctgaattttggttagccattattaaagttaccgcagtcatttcaatgattgtgtttggcttatatttattacttacagccggcaatgattctatagcgagcttttcaaacctatggcaacatggcggatttttcccgcatggcttttcgggtttgttctatatgctcgcctttttaatgtttgcatttggcggtattgaactgattggaatgaccgctgctgaagcagaaaatcctgaaaaaagtattccacaagcgatcaaccaagttatttttcgaattttggttttttacgtggcctcgctcgcaattattatgtcgcttattccatggaaccaactggaccttggtggtttagataaaagcccttttgtcatgatttttagtcagcttggcattggttgggcggcacatttacttaactttattattttgactgctgcactttcagtttataacagcggcatgtatgccaacagccgaatgttgtatgggctggcagtacagggcaatgcccctaaagtctttgcaaaagtaagcaaacaaggtgtacccacagttgctgtggtcttctcttctatcctgatttttgggtgtgttttactcaactactttgtaccagaagaagctttaagccatcttatgtatatggctgttgcagctttagttttgaactgggcgattattagctttacccatttaaagtttaagcaagctatgaaactagatggaaaagttgccaaatttcctgctctattttcgcctttgagtaactatgtcgtgctcgcttttatcggcatgattttatacattatgtggactcaaggctttaaagaatcagtaattttaattccgatctggattactttaatgcttggtttatataaagtgttaaggttagataaatcactctga

SEQ ID NO: 58469 - DNA, 984 bp, Acinetobacter baumannii
atgaccagaccagattcaaaaagcatgaactatcaattactcaaaacatttagccgactacctattcaatttgggcgttctattgctcgtctattggctggccttgtaaatactttaaaaattactaaaacttcaaaaagtatagagcttaacttaagaattgcactgccccacttaacaccacagcaacgtatagcaattacagaaaaagctgtacgtaatgaattaacctcatatttcgagtttttaagtatctggggttcatctaatgaagaaaatattgctcgtatccatcggatagaaggcgaacaatactttcatgatgctttagcagcaaaaaaaggtgttgtgctcattgttcctcattttggcacatgggaagtcatgaatgcatggtgtgctcagttcacagcaatgactattttatataaaccagtcaaaaatgatgatgctgaccgttttgtacgagaagctcgcagtcgtgaacaagcaaatctagtcccaaccgatgaaactggtgtaagacaaatttttaaagcactcaaacaaggtgaaactacagtaattttgccagatcatactccgaacattgggggagatatggtgaactattttggtgtgccacttgcttcaagtaatttaagtgcaaaactcatccagaagactaaggcaaaagctttattcctttatgcgatccgtaatgaaaatgatggttttaccatgcatatcgaaccaatggatgagaagatctatgaaggaactgcagacgatggtacttatgtcatccatcaggcaattgagcaactcatccataaatatccagaacactatcactggagctataaacgctttaaagcaaacccagctttagacaatgtttataatattgaccctgcagaagcgattaaaaccgtgaataggctcaaggctgaagctttagggaactctacgcaaccagaggcgctcaaaacgtcggttgtgtaa

SEQ ID NO: 58470 - DNA, 540 bp, Acinetobacter baumannii
gtgacggtattagtttcaaagaatggtgaagttattggacatatttttggtaatgaagagatgatcaagctgaatactccggaggggtgtgtagctttagatgatcctccttatccaaatatgttttatcagggtgggtgggtagagatgcctgctcaaccctcgccatatcatatcttcgattatgaaactaagaagtgggtcgataatcgatctttagaagatgtgaaaaggcacaaatgggaacaaatcaaacagattcgggatcagtatgagtttggcggttttgagtttgaaaataagctttatgattcagaccataattctcaattaagaattgctactgctgctttgctcggcgtatcagttgagtggactttaaaagataattcagttgttaatcttagtcctgatcaattgattgacttaaaaacagcacttgcagtgcacattaataacattcatgaaagagggcgtattgcacgacagaaaattgaaactgctttgacatatgaagaaattgaagcagtaaatttttaa

SEQ ID NO: 58471 - DNA, 4401 bp, Acinetobacter baumannii
atgaatgcagtagtaggcgcaaaaaaaggcagtaaaaaacaacgacaacctgtcatttcaccagattctgcacaatctaaaacctttatcaaggttctatatggcttggctgaaggcgagattgaaggattagctaatgggcttcagtcaatttatttagaagaaactccacttcagaatgcagatggaagccttaactttgaaaatgtaaaagttgattttagaaatggtactaatgatcaggaatacattgaaggttttcctgcagtagaaaatgaaactgctatcgatgtggagctgaagtctgaaacaccgtgggtccgcgcttttagtaatcttgatcttgacgcagttcgtctgcgcttaaaatggggacctttacgtactcagaatgctacaaatggtgacgtatctggcgtaacaatcgaatacgcaattgatttacagattgatggtggtgtctggactgaagtactaaaaaccaaaatttcagataaaacatctgcaaattatgaacgtgctcatcggattgatttacctcgagctgactcaggttggctaattcgagttcgcagacttactccgaactcaacttcagagtatgtcagcgacaagatgtatattgcagctgtaacagaagtgatcgatgcgaaattacgctatccaaatacagcattattgggtcttcagtatgatgctgagacttttggaaacgttgctaaagttgcaatggatgcgaaggggagaatcctaaaagtccctacaaattataatccggttacacgtcagtatgttggaatgtgggacggtactttcaaagaggcatattctaataacccggcttggatatattacgatatatgcacagtagaccgttatgctttgggtgaccgcttaaccccgctaatggttgataagtggtctttatatcgtttagcacaatactgtgaccaaatggtgccggatgggttgggcggtcaagaaccacgctttacttgtaacgtttatcttcagagtgccgaaggtgcctttgaaattttaactaagttagcaggtgtattccgtgccatcacattttgggatggcaatagcattatttgtgatgcggatattcctcaagatacttacttcacttatacccgggctaatgttattgatggcaattttgaatatgcaggtactcgtgctcgagacaggcacaatgttgtaaaaattgcatgggataacccggctaatcactacaaaaccgaatatgagtttgttcgcgatgagaaagcaattgctgaagcgggccaagttcgtattcttgagcttgacgcatggggatgcacttcgcgaggacaagcgcagcgagcaggctggtgggcattaaagtctgagcaacttgaaacacgtactgtgtctttcaaggttggtctggacggttatataccattgccggggaaagtgattgaagttgctgatcctttatttgcaggtcgtgcaaatggtggtcgtgtatcagctatttcagcagatcgtaaaagcattacgcttgaccgtgatgatgtggtcgcagttgccggtgacaggctgattattaatggcgaggatggcaaagctcaaactcgaattgttcaatcgatctcgggtcgagtggttactgttactcatgagtttgatgctattgccgctcaaaatgtatgggttatagatgcccaagatttagcaacaatgaagtttcgagtgatttctattacccaagatgagcatcatcaattttcagtgactgcacttcaatataacccagccaaatttgatgccattgataagggtgcttattttgatgaggttccgatttcgattgtgaacccaacaattcaggatcctgtaactgatgtcgttgttactggtgaaagccgagttgatcagggcatcaacgtggctaccatgatagtatcttggacgcaggcaaaaggagccgttaaatatcaagttgagtggcgtaaagatgacggtagttggattaagcttccagtaaccggcaataactcagtcgaagtacctggtatttatgcaggtcaatatcaagcacgagtaacagcgatttcagcatttgaaatagcttctttaccagtttattcaactttgactgaactctctggaaagcaaggcttgccgccgaaacccgcttttattcaagctacaggaattttattcggtataaaacttaattggggctttccatcaactggtgcgcttgatacggcttatactgaaattgaagtttcaccagatggaaccagtaatattgcccaattaggcttattcgcttatccaactaccacacatgcgattcaaggcttgcagtcaaatctgactcaattttatcgtggccgcttgatcgacaggatcgggaatataggaccttggtcggactggactcatgcgacaacttctgccgatgctacagacgttcttgagctcttgaatgatcaaatcagtgaatctcagctcaatcaggatcttaaaaccaagattgatcatattgagactattgacgctgaaattggtccaattaagcaagatatacaaaatacgaaagatcggattgcacaagaagtcattgatcgacaaaacgctattcagcaagccaaagatggtttatcacagcaaattattgatggtgatgaaggtgttcttaaagttgtaaatactgttaaacagtcaagtgatgatggtcttgctgcagctcaagaaagcattcgtgttgttgcaaatgatctttcacttgtagctgaaaaaacggacggtgtatatgcacagttaaatccacctttgattggatctgagtctgatttgatcggtaatgatcagggcttcgcaggaacttggtctgttcaatcggcaatgatcgaaggggacttagcacttagtaagcgtattgatacaacggcagttgagttaaataacttacaggcttatgcacaacgagaagtacaagcacgaattgagggtgatagggtaactgttcaaaaaatagataactatatcgcaagcaatgatagtgctcttgcaactgtacgccagtcggcacaggtagcagttgagcagtcatcggcaaatgctgaagcgattgatttcattaatcttgagcttgacgataaagcttcaacgggacaattgacgcaagttaagtctgatattaagaatgtagatgacaaagttattgcccaaactacaaggattgatggtgtatacgcccagctcaacccgccgttaatcggttcagaatctgacttaatcggaaatgaaggtggttatgcaggcgtatggtcagagcaatctgcacgtatcgaaggtgatttggctcaatctaaacgtacagatcaagtttctgcacaaatgaatgagagcaatgctttgtttcagcaacaaatcaatgcaaatgctagtgctatttcttcaacgataaaagtaacggaaacgttgcaaacaaaagtcggtgagaatagtgcgtctattcaaaatgtcactgaaagtgtagatggcatctatgctcagcagtttactaagttcgatgtaaatggccatgtttctggtcatggatcaatgaatgatggtacgacttctactttcatttttaactatgattgcatccaatttggcacacctgtgggtattgatggaatagagccaaaacccctaatgacattacagaatactcctgtgactttgcctaatggcacagttattccgcgtggcttatatgttgataatgctagttttgggtatatcaatgcgaatcgaatctgggcagaaaacttaagtgctattagtgctgatttaggtgatattgaagttgataatgctcacattaaaaacggagcagtagatactttaaaaattcaagatgaagcagtcactgttccttctggagtaattaatcaatcagagcgtaagttttattttgctgtttctaattcaatggcgggttcggttgcctatacacaagacctagtgactcttaatgtagaaacccaaggaggcaagctaaggattgatggatcgtttgtgtttgactgtaaggtcaggatcacacaatatccatcctcctacgacattttgaaatgtgtgacattggcttgtcgggtattagtaaatggtactgttgcatacactcaggaaatttacccaacattttatgatgggaatagtacaatccgctttatcggggttacagcaacgccagtttatatcttacctgcatccactggtacaaaaactatagtgcttcagctggcatatatcacaaaatactccaatatttattatggttcatttgtagctcaaggtggctttgccgaagctcctacaataatcaccatgtcatctttatcaacattggagcttaaaaagtga

SEQ ID NO: 58472 - DNA, 621 bp, Acinetobacter baumannii
atggaaaatttaatcaagactgtgctcgatatttttagaacacataatattttactttatgttgtagctattacctcaggcttgctttcttacaatattttcggagtatcagatttaactggatatgctttgattaaaacagagtttaaaaattatgttggactggctttccttgtttctacaattacaattttagtgctttgtactaaatctattattaattacatccgtgatttattgagtaatagtagcttcaaaaaacaatccggaagaaggattaaggaaaaaattgagaatcttacgaatcaggaaaaagctgtccttcttcaattttttatccaagaatcagaaactatatggttgccatttagaactcaagaagttgttgagcttatgaactctaatatccttacactagccagtaatgctgcaaggatgaccttagtaggtgaagcagccatgttaaagctttcaaaagatagcaagcaaaaacttgctaattcttatcctaatatattctcagataactttaatctaactgaagttaaaaccttagttgaaaaatatacacccaacagtgtcaaagaagttaatagggatagaaggatgtcagggtattaa

SEQ ID NO: 58473 - DNA, 324 bp, Acinetobacter baumannii
atgagagacggaatttactttgtgaaattcaaaagcactatccaagattttggtgagggtacggtggtggtaaaagatggagtggtcaatggtggagattatggatttacataccgtggcagggttgaaaacaatcttctcaaattaaatgcaaaacaacatgataggaatgttgtatctgtatttggtgatatcagtgattacgaattaattttagaggttaaacctactgatactggctatgatttagttggtaatactgaagcaataccaggtgtggttattcaagtaaaagctaaatttattggtgatcaattagcttaa

SEQ ID NO: 58474 - DNA, 4086 bp, Acinetobacter baumannii
atggcacaagaatcacgtctcgtcattgtaattgatgcaaaaaatgcagagcgtaatgcgcgtaatctgggcaatgaattggacagtattgagcgtaaaggtgattatgcttctaagtctatggatggcttatctgtagctactcgtgcactagctgggtatatggctgggctagttacagtaagttctgccatttcgaagatggatacatatactggactacaaaaccgccttaagctggtcactaataatcaagttgaactaaataaagcaacggaagacactttccgaattgctcaaaaaacctattcgacatggaattctgtattacaggtttaccagcgatttagtgataatgcgaaaacgctgaatcttacaatggatgacacagcgcgtttgactgaaacagtgtcaaaagcagtggcgattagtggtgcaagtgcagaggcagctgatgcagcattggtacagttcgggcaagcacttgccagtggtactttgcgtggtgaagagcttaactctgtaatggaacaaaccccagcattagcaaaagcaattgctcagggtatggggattaccgtaggtgagttgcgttcagtagcagcggaaggaaaaatcacatcacaggaaattgtgaaagctctccgaaatgttgaaaaagatgttgatgcactttttgctaagacagatattactattgggcaatctctaacccttctaaataacgaaattacaaagtttgttggcgagtcaggcaaagggtctggtgctgcacaggcattatcaggttctatccagacacttgcagggaacctagatacattaacaacagcaatgatgcttggtggcgcttattggctggggacttatatcccagcaatttatgcatctggtgttgcagtcgcagcaaaaactaaagaattagctgcacaaacagttgctcaatacactgcaattcaagctgaaagaacagcagcagcccaacaattaattagtacacaaactctagtagctaatacacaagtaactttggcagcaatagctgctgagaaagcattagaggttcaacgccttaaatctcagatttccgagcaaggcagaacagctacaattactcgaatggctgaactcaaaaagattgaggctcaagttacgcgtgaattggcattagcagaagaagccctagcagtagcccaatcaagatcagccgcagccggggctgcaagtgttggaattggtgcacgactactcggagttcttggtggacctgtaggcattggtattactgtagctagcttagccgctggctatttgttaatgcgagacaacacagcggaagctaataaaaaacttgaagaacaggctcgagttgcagaaaagacagatgaggcattaaagaaattagctggcaatgataaagcaaaggcagttgatgatttaacagcagcgtttaatgcccagaacgaagcattaagtaagtcgtcccttgctgtgggagctgcattaattgatatagagaactatgctcgtggcaactgggaggttgaaaaaatctcccaagaagcgcgaaaaggaactattagttacgcagaagctattgaacgcttaaataaaattaagctgccaacagatctatatgaaaacctcaagaaacaagcagcgcagtacgatgagaactcgtctaaagcgaatttatctgctgagaaactgaagttatttggtgttgaagtaaatcttgctggtaacaaagcacaaaatgctgctgttcaagtaaagggaaatactgatgagctaaatagcaatgcaaatgcagcagataaagctgcaaaagcacagaaagggtattttgatagcctccgtactgaagttcttaactctaatgaagagttagctttattaaatcttggctacagtgaagaaactgttaagaagatcattgagctgcaaaaagctaaacaggctgttgctcctcctggtactactgcaattgtcactaaagaggagatggatttagttgcacaagctcaaaaggcccttgatgtacttaaagataaaaaggatgccctaaatgatgccgagcgtaagcaaactaaagagctaacaaagcaagcggtattgctcgcagggaataatgagcgagtgagaaatatgcttcgtgtatatcaggctttccgtaatgctggattgggagataagcaagcacgagtaatgacagctcaagttgggcgcgagaatgattttagaaatgaggcaatgtttggtagccataaggatgaaaataatggttatacaaatactggatttatttcttggcaaaagactcgctcatctaaactcatgcagtccttacagggacaaggtgttttagataaaaatggaaaaatccagcaaacccaagatgctttagatgcgcaagctaagtttttattgcaagaggttatgactaataaaagttatagcaagactaaaagcgcccttctcaatgacgatttggactatcgaagtttagaaaaaatcgtggggaaaaattttatcgggtgggattatgaagggaaaaagcttggcaaagataaagcttcacagcatttagccaaacaagactcttattacaatcagctcaataagattttaggagctagccctgatgcagcatcaaaagcgattggtgatctttctaaatttgaagatgaagcctacaaggcgcgtgctaaaactctagaggaaataaagcagctacaggcaagctatgactcggattcagttgctagaagcaaaaaacgtgaggaggaaatcaacaaagcaaccattttaggtcaatcaaatttaatcccaaaaattaatgagcgttatgatgctgaagacaagttagctcaaaaacaatttgattttgaagtaaatggttataagtggactgaagaggaaaagcttaagtatacgaaggaaactagtgctttaagattagtggctgaaggcaagctttctaaagaacaattggatattgcaaaagaaggtcttgatcagcagtatcagcatgagttggagttgatcaacctcacaaaggctgcacgtcaatctgcatatgatcaagctaatttaaaagcattacaggagttgaaacagcaaagggatcttttagcagcaccgcttgggcaaagagctggactttctttacaatttggagaaagaaatgctctttctgaaaacgacgccactcttattaataagggtgacgaagctaaaatgaagctcaagcagaaagaaattgatcagcttgaatacaacaagcggattgaagatgctgttctgatacatgaacagactaaacagaaaattcaagaggagtatgcggaaaaatataaggatctgcagaaggggcaatatgaatcacagctagacctttacaacagtcttttatctcaggcctcaactgtttggggaggtattacacaaattgttaaggatagtgcgggagagcaatctggtgcatataaagcaatgtttctggtgcaacaagctatcgcaatgagtacagctacaattcaggcctatcaagcttatgggaatgtacttgctaatgccccatatccattaaacctaactatggccccggttgctcttgggcttggcatggcaaatgttggcctaattgcagcacaaacaatcgctggtttctcagacggtggttataccggtaatggccttaaacatactccagcaggaattgtgcataaaggtgaagttgtttggtcgcaagaagatatcaaacgctggggtggtgttagcgttgttgagaacatgaggcaaagtaatccaaatgggtatgctaacggtggctatgtatcaaacaatcaaacggatgcaattgcaacagttagagagcatagacaatttgatgcgattaattcaaatcaaacacaaagcagttcgagtgatataccaatcaatgtttatgtgacagttaatgctgatggttcaagtaaaaccgatacccaaaatgattctaagcagcttgggcaaatgatcggcaatgctgttagaacgattatccggcaagagcaacgacaaggcggtttattatcaaagtaa

SEQ ID NO: 58475 - DNA, 1662 bp, Acinetobacter baumannii
atgttaattacagcttgtgaaagctctgataatgatgataaacaaacttcacagccttctatacaacctattccatttgaaccattagaggctactatttctgatttacatgcttcattagaaagtaaaggatcaaattgcgttaatgtcgtgcaaagttatttagatcgtattactgcatatgataaacaaggtcctactctaaatagtgtcatttctattaatccaaatattctacaagaagcgaacgagctcgatgaatattataaaaaaacaggtaagttcaaaggtagcttacactgtgttcctgtattagccaaagacaatatagatgttattaatatagcaaatacagcaggttcagatgctcttttagataatatcccacaagatgatgcatatattattaaaaatattaaagctcaaggtggtttaatcattggtaaagcaaatttagatgaatttgcctttggttttggtggcaagtctacagtaggtggacaagcgaagaatgtttatgatctcacaaaaggtcctggcggctcatcatcggggacaggtacagccatttctgctagcttagctatggtaggaattggtacagacactggtggctctattcgtgtcccatcagcagtacaaggattagttggtttacgtccttcactacgtgttcttagtttggatggcatcattccattagcaccaacacaggatacagctggtcctatgtgtcgtcagagtattgattgcgcaaaattatttacagctatggttggatatgatccatcttctagttcaaatcaacgtaatagttttgaacatgatgcaccattagtgaactcagaaacagcctatcgaactttaataaatcaacaagaaaattatgttcctcaaaatgcatctttagtaggtaaacatattggtttaataaaaaatgtttatgctaatagtgaagaaggtcttctagttcaagagactattgcaaaagctgctgagaaaatgcgtgaggcaggtgcaatagtcgaagaagtagaaatatatgaccttcctactattttaggaagtgctgatatcactactgattctgggtatacaggacggtttgcaagtctctcgagctttgaattcaaaaaatccctaacaaattatttactaacagctacaacaagttataaatcctacattgatctactgaatagtggaaaaatgatttcaaatttcaaaaattatgatactgacttaaatacgtctgatttcatcaaccgctatcatttaaatactacagtacgtgcaccatttgttcgtttacgcttaaactcagcattagataacaccagattagatggtatgtctaaagggcaaagatttgatgcattggcatacccatcaattacaggtttaacaaataatataccgtctagtccaacaactggaagtaataatcgtataagtccattttctggatttcctgcactatcaataccagcaggtgctgtaaattatgaaaagcgtagcgcatatccaatgaacgttaatatcgaatttattgcgagagaatttgatgaaccaacattatttgaaattgcggcagcttttgaaaaaataaatccttcaagaatggtaccgatacatactccagcacttaaagctgcgctataa

SEQ ID NO: 58476 - DNA, 612 bp, Acinetobacter baumannii
atgatagaaatgaatacacgtatttatctacgagcttcaactaaagatcaagatgcaaaaagggctttgcagattcttcaggatctaaaccaaaacttgaatttgggtgaaaccattgtgtacgtggaaaactatagtggtacgaagttagaccgacctgaattgaataagctgctgtcagaagcaaatcaaggtgacaccttgttagttgaaagtattgaccgcttatcacgcctaacccaacgagattttcaagagctgaagcgcaggattcaggagaaaggacttcgattaattgtggcagatcttcctactacctaccaaatgattcaaaccagtgacaccattactcattcaatcctagaactcattaataatatgttgattgatctcctggcaacaatggctcgcctagacaatgagaaacgtatagaacgtattaagcagggcctggcacgttcgggttacaagccaacaggtaagaaagccaatgaggctaagcacaaacgaataaaagaattactagcagctggcaatatgactaaggaagaaattgccaaagcagtgaattgtggagttgcaactgtttatcgagttgctaaagtcatttaa

SEQ ID NO: 58477 - DNA, 195 bp, Acinetobacter baumannii
atgtcatatctatttacaaaggaacaaggcattcttaaagatcaaaagaagggattaatgatgaaaaagcatttgattttccttgtttttatagtgatggtttttattttagctctagttgtaaagattaataatgatcataaaaaacggcaagcattaaacaaattggaactagttgaaaagcaaatccattag

SEQ ID NO: 58478 - DNA, 1215 bp, Acinetobacter baumannii
atgagtgaatctgctggcggtacgttccgattggtatgtggtcagatcggtgcgggtaagtcttatttgtatgttaaacaagttgaagaagaagtaaaaaaaagcggtaaatataaaaagatttattcaaatattcgtgcacatgctgaattagctgaaggtattacaccgcttcctgatgattggcgagaatgtgaacctgatagccttgttattattgatgaggtgcagaagcatgagaagtttagtaaacatttctctagccgtagggatagtgagattgtagaccttacaatgattcgacatcagcgtttagatttatggcttatcagtcctaatcctgcgttagtaaacagtgatgtacgtaatcttgttactcaatacttttggcttgaagttgtaggggctaaaacaaccaaatgttattgtttcactaaggtttataacagcattactaaatcgattaaacagcaggcttatgatgagtttgtttatacaatcgaagagaaatatcacaagctatataaatctactgaagacggaatagcttcagggcgtaactataattttaatgttaagttatggggttttattgggggcttggtttttgttgtcataatcgcgtgtttacttgttgcattcttggctaaaggtacgaaaacaaaagtagatcaaatgtctactgctcaaaagtctgatgcagcacaagcacagaaaacaaaagaagagagcaaagataaactaggtgttatgtcaaagctaactgatgaagaatgtagaaagggtgtaaatgtagataagcctgaatgcgtggaatattttaaccgcctaactaaaaatggtgagtcagttgggcctgctgtacaacaagtaagttatgacccgtctaagccttttgaatcagccgaaaagatacaagaaacggtaacctatcaagttactgcaaagcctgtgttgtctggatgtatgacagatcgtcatggtaagttagtcggatatactcaacaaggtacaattattcacggccttaatcagtccgattgcaaacgtataattaagggagatcgtccgtttaattactttgctcagcagtccgtacaacaacctgtacaacaagcagttcagcaagttgctactaatcaggcctatcaggctaataactatgttcaggaaggcttagaacgtaatccagtgaatggcgcgaaccaattatga

SEQ ID NO: 58479 - DNA, 279 bp, Acinetobacter baumannii
atgcttaaatttctggcgaagttaaccgagtggcttttaaaaaactctgttcaaaaggttctgactggtgcgggtttatcggttgtttcttacttatcagttgtagctgtaataagggttgcatttgaaagattaattaattcagttaatagcgtatctgctgacctacttaattttatggggatatgtggtcttgattacgcattaagtggatttgtttctgtagctgttttcttgatgacaattaaacaaggcagcttatctttgaggaaaaaataa

SEQ ID NO: 58480 - DNA, 1416 bp, Acinetobacter baumannii
atgtttatacgtttattactaatctgtcttgctttattcactgtcgaggctcacgcaactgatgatggtgattggtggttacaacgtgagattaaattacagcaaaaccgtgaagactacgctagacgtgtttatggtcgttctgctcgttcatttgttgaaactgacccagtaacagctaagagtaaaacagttactaaaattgctattgctgaggcatcaccaacggcttccaaagtaggttcttcaatgtttaaacgtgtggctttttatgcaaaaaatccaggcgttcaaatgattggcgtctatgctgcaacacagttaattgaggctattggctgggtcatgactgatggggcttatgtaaagaaaaagccagtagatccaactgacccaactgaccctcgtttacattactactaccagactacttcttttacagttacgaaaaagtttggttcaaatagtcaagcagctacagatatttgtactcgtaatgcacaaggctatggctggatttttgtttctgctactccttataactggggaccaaccgagactggccagaaggatgcgaaatgtgtaattaaacgaagtccaacaagtcagaatgagacttttggttgggtttatcagcgtcaagcaaatccaatttatgatccaaatgcacctaaaccacctgaccaaattattcctttaacacctgagttattaggggctgcaatgatgggtgaaggctatcatgatcctgtagattcaactgttgatagtaaagttaatacgggtttaatggatcaatctgtagctgattcttatagtcatgctggtaatggtgttggtgatgaattagctaatgatatggattatcaaattaaaaatgctccattaacaccagatgggcaaccagcgccttttggcgatcctcgctataaaacaccgccattatcagataagccttttatgaatgatcgttcatggcgtaccgatggtggtactgctgatggtaaagcggaacctattaaagacccagacggaaatcctactggtggacaatctttatctattcaatttcctgttttctgcgaatgggcttttacggtctgtaaatggtatgacgactggaaaaaaacagatcaatggatgaaggatgaaccagaactaaaggatgaaaagtttgaagtacaagatgaggatttacccggttatcaacatgttgattatgtgaagtttgggcaaacgtgtccttttatgcctgaatcagttgtatttgattacggtattggtcaaatggcttttgatgctgacccctcaattctttgcacttatggcgaaattgcacggccttatattatcggtattagtcatcttggctgtcttatttacctgttgtttgctttaagaaatggagctgtctaa

SEQ ID NO: 58481 - DNA, 264 bp, Acinetobacter baumannii
atggacaataaagaacaaactccaaacactaaccaagaaactaaaaaggtgctcactgctgctaaacgtgccgtgatgactgcgggtgtagtaattgctacaactgcaactacctttgctgctgatggggatacaactattgacttaactactggcttggctggtgttgcgattgttgcgggtcttctttcagcgggtagcttgaaagctgtaccgacatacgttggttggggaatccgcaaagcattgtcaatgcttcgttaa

SEQ ID NO: 58482 - DNA, 213 bp, Acinetobacter baumannii
atgcagattgatgattgtacagccacaacggtaatcaatggggtcaattactgcgtactcgtcatacatcaacaaagctggctagacgaactcaacaatttatccgttgtccaagttggtctcttactgtctagcacagcgttgatttggtacgttgcttggggcatacgtgccactttagacctacttgggcacacttctaacgaggaataa

SEQ ID NO: 58483 - DNA, 321 bp, Acinetobacter baumannii
atgcatacatctaaagtaaaaattttaggcgccaaagctgttgattttaaaccgactgacggctcaggtcgtcattacgatcatgttgcgcttcattgcgaagttccaatggatttgtcagatggtacagctattggtaatggttgtgagattttcaaatggcaggattcttcaaacattgcgttactgcgtaagtttaagcaatcagactttccaatcgaagctgatattactttcgatatggttacatcaggcaaaggcgttaaatatgttgtagtagatgtacagctaccaacaccgccaaacaaaccagctatttaa

SEQ ID NO: 58484 - DNA, 1158 bp, Acinetobacter baumannii
atggataagtataaaaaacaaccaatccccactgtattatcggggggaatgaaaaaagtggcagttgtaacccccattaataagatgggggtaaaggtatctgatacacaacctcaagacgccgatctcccgttccaagagcattcgctatataccattcctcggactcacatgatcatgacgaatgatggtgtgaagcacatcgagtacagaatgcctgctgacaatgaaattgctgtgattgactgggtcaatttcacatttggtatcgagactgttggcgatagattctggcaagaagacgaatttattcttgaatcacatcgtattactgctgctgtagaagctcttgaagctgatttggaacatatctttggctttacaacgactttacgtcgtaagaaaggccttaatttctatgatgaaagttatgttttaggtgaagatttcggctttttatgtattggtggtcagcgtaatacgattctaattatgatcaacggccgtggctgtaatttcgctaaaagcggttgggaattaagactttatcacttcttagttaccaaagcgaaaagagcgaaattaacccgtgtagacattgcacacgatgattttgaaggcaaacatgtcagtgtagattggggcaatatgcaagatgggttagggggttttcagctcggtaaccgtgctccaaacattgagcataaaggaaattggcgtagaccaaacggtaaaggccgtactttatgtatcgggagtcgtgattctggtaagtatctgagattgtacgagaaaggtcgtgccgaaggtgatcctgatgataattggcaacgtgctgaggttgaatttaaagcaattgatcgtgtcttaccgtttgacatgttgcttgctcctagtgaattttttattgctgcttacccatgtttccgtgatttagctgaacacttacagcctgaacgcattgaaactattagtaaaactgctcaaatcaatttccagactgctattgataatctcaagcaccagtatggcaaatatatcaacgtctttaaggacgtattcgaacctgaagaactcattaatttaatttgttgctctgatccgcttgcatatcccaagcgacttgatcacgtgcttctaactgctcggagaatgtaa

SEQ ID NO: 58485 - DNA, 291 bp, Acinetobacter baumannii
gtgtcacacgttgcagtgttgcgcgcaattctgttatatttctgtcaaatagttgcatgtgatgctgttgcaatgggtaaagaggaagcttttgagatcgtagctaagatcgtccacgaccgtggcgtcgagctaatagtggggggcaatccagctttcgagactgagtttgttcttttttacattgagtcgaccatgcttgcttggggctataagaatcctaaagtcgcagcttactgtgacgctatcaaagcagagaatgacaattttagagcgatggggatttgctaa

SEQ ID NO: 58486 - DNA, 207 bp, Acinetobacter baumannii
atgaaaaagtcagacttatcaaaaacatatagagttcgtggggaattcgtagaatcgatcaaagagaaatctttagatttcattatcgaaacgaaagaaagaattgaggaagcggatattattaatgctttgatttataagcatttaagctcgataacagcgaaagatgtaacaaaatatatcgaagaagtaaaaaaagcagattag

SEQ ID NO: 58487 - DNA, 189 bp, Acinetobacter baumannii; identical to SEQ ID NO: 54757

SEQ ID NO: 58488 - DNA, 1365 bp, Acinetobacter baumannii
  misc_feature (1298)..(1333): n is a, c, g, or t
atgaaccaaaactctaaaactagcgaagatagcatcgatttaaaagagttattcttttcattgattgcacagtggaaaatcatagcatgctgcgtggtcttaagtttaatttgtgccttgctatacttacggataacgccagatacttattctgtagatgcaatggtacaagttgaggacagtaaaggcgctgcctctgctgctttgcttggtgacctttctaaagtcagtggaggtctatctcaaaaatcaccagctgatccagaaatagagattcttcgttctagaatggttttaggacaagtcatccagaaccttaatcttgatattaacgtcaaagataaccaatcaggattgatcgacaagttaatttcacaagataagagtagacttgagtatcgtcatgaatctgtactgtacagtaatcaaaataataatttgattatacgagaacttaaagtacctgaatattatttagataaacccttaaagttagagttcaaaggtgcaaatcaattcactttaacatacaaagatcaagttgtatttaatggtcaattaaacaaaaaaaatatactaaatacaaatagaggtctttggcaggtacaacttaatgctcaaggtaacctgaaagaacaaagctatactttaactaaactcgctctaccaacagccgttaaaaattttaatgatatctatagtgttgctgaaaaaggtaaagcgactggtgttattggtttaaattatctaggtcaagatcctgagcacattacacaagtactaaataatgttctaactgtttatcaccaacaaaacattgagcgaaagtctttagaatctaaacaaactttagcttttcttgagaaacaattaccagagcttcgaaagcagctagaagattctgagatcaagtttaaccaatttcgtgaaaagtataaaacagtcgatgtaaatgctgagtcggagctattacttaagcaaaatattgatttagaaaagcttaaaatcgagctacaacagaaacaagctgagctttctgctaaatataccaatgatcatccattaatccgtcaaatcgatgcacaaattacagagattaataaaaagattgctgatcttaataatcgtttaactcaacttcctgaaacacaacgtttatatttacaactatatcgtgatgtaaaagtaaacacagagctctatacgtcgttactaaacagttatcaacagcttaaaattgctaatgcaggtgagattggtaatgttcgcattattgatactgctgtagaacctgttannnnnnnnnnnnnnnnnnnnnnnnnnnnnnnnnnnnacctgttaaacctattaaacctaagaaattaa

SEQ ID NO: 58489 - DNA, 1605 bp, Acinetobacter baumannii
atgaaagtacgttcagacattatgaaattagcaaaaagcatgcatacttgggtgggtgtatgtgcagggattttgctttttatctgtttctttgctggtgggcttagcatgtttcagcaccacattagtaagtgggctacgccaacgcagcaagttttacctaaagtttcccccaaccaatataatgagcttattcaaaaagttcaggctacctatcctgctgcacaaaagaacttcacactaaatttatcgtctaatgaatttcactacgcgcctattacgtggagtgaacatgaacgtggagatggctttaatactgctcagtctacgtggatggcaagcttagacgataaaggtcagttaatcgttgctcaggaaaacttatctaaagcaggctggctaatcgaacagttgcatgaaacagcaggcatacccggcatggcaggtcatcacggattaggactttacgtgatgggcgtggtttcgattttatattttcttgctttactttcaggagtgattattcttttaccaactttggtgaaggattactttgtcatccgtcctggtaaaaataaaaagcgtttttggttagatgcacataacgtgattggaattacgagcttaccttttcacatcattattagcattagcgttattgtctttgcttttcatgactttttttacgatgcgattggtcagctggcactcaaaggacagccagtttttcagcgttctccccctgcgcttattcaacctaaacaaacacaaatagatgtgcagcaaatattagctcaaacaaaaaaagtagcacctgaatattcagttgactatatccagttcagtaacctcgataaacctgaaaaagccaatgcacgtatagccttgtatagccccgatcagatgttacgtggcgcaaatcaagactttatgcgtatgaacccctatgccgttgagcactttaaccataaaggtattaatactcagactgatggaggtaataagttaatcaatgccatgtttagcctacattttggaagttttgggggtacgggcgtacgttggatttattttgtgttaggtgtcggtggcgctttcctattttacacagggaacattctttgggttgaaactcgtgcacgtaaacaaaagcgtgctgaagactctgttcctgttcaacgtaaagatgtggtgttcctcgcgaacttaactataggtgcatgtttagggtgtgttctagctgtcgtaggcacaatgttagctagtcgttggcttttcgctacactcaacattgaaagtataaatcacgtcttcatgtatggttattatgcgattttcctactgactttgatttatacctttgtgattggctacgcaaaagctttaccacaactgctcttaaccttggtttttgtgttatttgcgattccacttacatctcttttagcctacttcattccccaaagtggcttatgggtccatggaggagaaatcttagtagttgatttcttagctgtcatttttgcgttcgctttctggcgtttttatcaacaagcccaagatcgccgaaaatctgctccaacgggcagtttatgggctagctaa

SEQ ID NO: 58490 - DNA, 2094 bp, Acinetobacter baumannii
atgacttcaatgtcgaacactacccaaaagcactttattgttgagcagtttcctctaccgacttgggtcagtgatgaaaagggcttaattttatactgcaatacggagtgtacaaagtactggcgcgatacttctcctccattgtttcagcaatggttagatttcgtgtaccctgccgatttagaagaagttaaaaataaatggttagatgctatacggctccaatcaagagttgagtttaaatgccgtcttttgcataagagtcaccactatcgatggtgtaaactttctattcaattgtcgaaataccatgaatcttctcaggaaaatgaatggtttgttagtttcctagatattgaccaagatattcaagaacaacaaagcttacgcaaagatatcgatatacagaaccaaatgctcgatattagtgtggattgtattaaagttttaaatactgatggtacagtatctcatatgaataaatcaggatgccttgctctaggtgtacctgtaaatgaaaaaaaatttggcatgcgatggttagaccttttaccatctcatattcgtaagcgtggaagagttgctttaaaaaaagccttagaaggtaaagtagctcgattcgctggcatgagttgtttacctcatcaagatcctgaatattgggataacatgcttaccccaatccagcatacaaatggcgaaattattcaaatattgtgtgtttcccggaatgtcactcaacaatatcttactgaaaaccgtttaagagatattagtgaaagagatgaacttactggattatttaatagacgctcatttaagcttcaactaaaacgtactctagcctactcaagggaaacgcaaacaagtgtaggactacttttaattgatttagatcatttcaaacacattaatgacaccataggccatagtgctggtgatcacttattaaaaatactatccaaacgttttaatcaatgtgtagaccatgaacgatgttctgtcgctagattaggtggcgatgagtttgcagttattgtcagccatctaaaaaatgaaaatgatgtgcgcgagcttgctgaagtattgcttcagcaacttaatcaacctattacgtatgccgggaatgtactcaacggcgggatgagcattggctgtgccatttatcctcaagatgctgttgatcaatcaagtttattaagctgtgcagacatggcactgcatgacttaaaagctcgaggtcgtggcggtatacgtatgtataacccgagtatgatgcaattaaccgaggcaatcgcgtctcaacttaacattgcccggcagcttattcgtcaccataccatccaaccttattatcaacctaaagttgatttaaaaacacatactgtcgtgggctttgaagcattactccgttggcacacgacgtcggctcagacaggtttaccttctcagattgctgaagctttcaaagattacgatttagcaagtaaaattggtgaaatcatgcaacatcaagttttgcatgatatggctaaatggataaaattaggttttcagccccttccagtatctctaaatgctgcaccagttgagtttttaagagataattatgcagaacggctattaaaaaaaattaatcatcttgaaattcctacacatttaattgaagtagaagttactgagcatatgcttggggaccgtggttcggaatatgttattcgcgcactcaataaactaaaacaacatggtgtacgcattgctttagatgatttcggaacaggattctcttctctaacacatataagagattacccaattgactgtctaaaagtcgactgtagttttatacaaaagatgcaaaatgacccatcaatttattcaattgttcaagccattggcttacttgctccaaatctctcacttggtctaattgcagaaggcattgaaacaccagaacaagaagaattacttcttcaatttggctataacattggacaaggctttttattcgaacaagctatcgatgccaatcaggttgtatctattctcaaacaaggtcaggcttacttagaaagtcattattcaatgagttaa

SEQ ID NO: 58491 - DNA, 165 bp, Acinetobacter baumannii
gtgaaatcaacgattacccatcctgcgaccacaacgcacggcaaactttctgctgaagcaaaacaagcagcaggtattcaagaaggtctaatccgtgtttcggttggtttagaagatattaacgatattattggtgatatctcacgtggattagatttaatctaa

SEQ ID NO: 58492 - DNA, 123 bp, Acinetobacter baumannii
atgacaacttggcaaataataggaattataggttttagcttattttgtgtggttatgagctattactacacatggtctgctctccgcaaagacgatattaatgatgaagttgagctgaaatga

SEQ ID NO: 58493 - DNA, 1584 bp, Acinetobacter baumannii
atgatgatttcaagatcgtttatgccatctgtgctgatgttgtcaatcagcacagtcatgctcggatgtggaggcggttcaggtggagattccagttcatccaatgacggtggaacggataatccagataatggcaatacaatccctaagcccgtgacctgtgttgaaagccaatatctggaagagggtgtatgtaaaaacaaggtagtgcagaatattcagtcactaccattcagtaccctgattcaaggtcaaagctatccattatcgcttcagacagatcaagggctggcagtgacttttagcagtaacactcccaacatctgtagtgtaaatggcagtgaactcaaagctctaaaggttggacaatgtactctgggattgacacaggcaggcacggcaaaagttctaccattgaatagcagcatgaccgtcaatgtgacttgtgctgccgatcaatatctagaaaataatgtttgtgtcaataagctcaaacaaaccattgtcccattcaaaatgaaatacatcctgacggagagtgtgtattcactggatactgaatccagtgccaaacttcctgtcacgattagcagcctatctactgcaacctgtacttattctaatggtgaactaaaggggagtggtgcgggtacatgtacccttaaactcactcaggagggtgatgccaaaacattggcagcacagagtcagacgattagtttcgatgtgtttaaaggctcatccatgagtgatgcccccgatatcaacaactgttatgcaggcaagctcagtgcaaagtttagaaatgaatttttaaatgagctcaatacagttcgtgccttgcatgggctgccaagtattacatacgactatgcccgtgaagatgaaatgatgcaaaccgcactgattcttgcggcaaacaacatcctgacccattaccccgaagctaacacaaactgctattccgatattggtgcagtgggtgcaagaaccagtagtctggaaatgggagtaagacagaataagaatgactattcacctgccgaaagcattaccaatatggtgcatgacaaattaaacctgtttgcaggagatgtggggcatcgactctggatgctcaatcccttcttacaaaaatcggcgtatggttcagttaatgcaccatcatttaaagatacccgattcccttatgtggtcggtacgtcctataaagtggtttatccctttaatcatacaaccactgcaccactcggtgtgattgcctatccctaccacaactatccagccaaatattatatggcgggttcaattctctcgatttcagttttaaccgaacaaaagaatttctttgccaatcgcaatgtggactacgctaaagctaacgttgttgtcactgaacgaagtagtggggctaaacagaagatcagtaatatccgttatgaaaatatcggagttcccaaccatatccagtttaactttgacgatttgaagttgaatgtgatttatgacgtcaaactcagcaatgttctggtgaatggtcagcctaaagaatattcctattggtttaacgtgaatggtcggtaa

SEQ ID NO: 58494 - DNA, 3048 bp, Acinetobacter baumannii
  misc_feature (1614)..(1623): n is a, c, g, or t
gtgcaaagtacgtctaaagttacaacatataattattttacggatattactaaaccaaataatggtcttttaagtagtaaggatggtccacgttcaggtactttagataaaataagttatacatatgataattatgggaatttagcatccgtttctacgactattaatggtactgaaaggactgaacaatatgttggatataattcatttggagatcccgaacgtattgtttatccaaacgggatggttgagaaatatacttataatgacgatggtactataagtagtgttgtaacaggaagtggctcaactgcagggactattacgggaaaaacagttacttttagctatgattcacttggtcaactagtaggtagcttgaatgaagatggagaaaagacaagctattactatgataatttaggccgcattattaaaacaatttattctgatggaagtattagcacaaaaaattattttaataacaatattatcagtagtgatgaggtaaaagatagttctgctattacagtttttaaaggtttgtatcggactttagatttaagtgggcggataaataaaattcaaatcggaactgattctacatcaaattggaaaacattaggttatgacggaaatggtaatgttatacaaacaaaaacagcgcaaggaatcattgaaagctggacttatgatgcattaaatcgacctattagtcatattgatggatcaggtaataccgatactaaaacttatgatgctttagataatccaattactgtacttgatgcattatcctctggaactaatccttatctctatcggaatggtaatgtcttggctcaagagactaataaagattttggcattaaaagttatagttataacgaggctgatcaattagttcagagtatatacggtaatcgcaaatgtagtttctcgaatatagatgaaattgggcggaataagactattcagtgtcaaagtaatagttctagtacacctgatatgcttacttatgatgatacttatacatttgattcaagtcgttatagtcgattagataaaatagtctctaataagccttatggagttgatatcagttatgtctatgacttatatgatcgcattattgggaagagtcaatctaataaagctttaactgcatttggatctagtgcaaatactttatcgaatacctatgcatggagtattggtaataagatcacagggataactttaccttctggtcgtaagcttacttataattatgacaacacatcgaaaggccaaattacaggtttaactttagatggcaatgctttgttgagtaatattggttatgacgcaagtggacaaatgacaggctggacatggggaagtaatgctggaagttacacatggacttatagttcagcaaaagatggtgtcattaatcaaattagtaataaaaacagtggaggggctgttacttatagccttaattatagttttgatcgtgataaccgtattataagtattaagcggaataataacttaaatgataattttagttatgatcaggaaggacgtttattgacagaaagtcgaagtaatgatgcaagctctatctannnnnnnnnnatctacgctattacctatacttatgataaaaatggcaatcgtttaagtttacgagcgtccggcactcatttacagcctgctgcaaatgtggattatgcctatacaggtaataaacttaccacattaacaaaaaatggaacagctcagccacttaattatactgcaaatgcagaattatatatgggtgaaatcttaccgagttacgattatgcagggcgacgtcgaggtgaagggacatcaacaactattaatcgttatatgagttataacgctaataatgaaagaacactaagtggaagtacaagtgcatggagtaatacggcagttcaattcatctacgatgaaaaaagtcatttgattggtgaatatacagctactggaattccacttgtagaatatatttggttaggagataaaccagttgcagcagtttacgagagtggagcaactaccaagatttattatattgtaacggatgtacaaaataccccgcgtcgactaattgatagcaatggtagtgttgtatggagttgggacagtacagcttttggcctaggtagtcctgtaagtacgataacatttaatttacgttttcctggacagtactatgatgcaactacagggcagttttataaccataatcgtttttataaccctgaacttggtcgatacatggaaccagatccgattggtcttgcaggtggattaaatccatacatatacgcattaaataatcctgtgatgtatgtagatatgactggtgaaaacccaatattaattgcaatgggtgtgagcgcagcaacagcaggtgcattttatacaggagaagtattttttaatgcagtatatgacgcatataaaaatgaccaaagtatattagatagtttttctaaatcattttcaattaaagagttaggtcaacaaatggttataggtgcagcatttggtggagttggtaaagctgcttttttagctgctgatgtacatataattagtaaagctgcacctactatcattccagcgggaacatcggttctgaaacggtgggggttaaaaggtttaaatgcaattaacaatatggctaaaactagtaaaattaataaaataagagaagtaactactcctgctggattggttctcacaggaaatataattgcaggtaaaacaacaacaaacttgatattaaatgatattaatgaacggagttctgctcgtagacaagggggtggtgaagttggtaatagtggtattaatcaaggctctgattatttaggttttaaaagttatcaacctaatggttatgtagcaggatattcagagatgtatattaacggtgtatataatggtaggttatggactatttactttgattcaggtgatactgttcaatatggttgttatcttaagtgcgcattgccattgtaa

SEQ ID NO: 58495 - DNA, 1209 bp, Acinetobacter baumannii
atgaaagatgaagcaatgctggcattagccaaagaatttgccaagaacttaaagacagaagctgacctgaataatttcagtaaagctctaaagaaattaacggtggaaactattctaaatgctgaactcactgaccatttaggttatgagaagcatagtcctagagtaggtaaaaatgctcgtaatggctatacaactaaacgcctactgactgatgatggtgagtttgagctagacacgcctagagatcgtgatggtacatttgagcctcagttcatcaagaaaagtcaaactcgaatcacgcaaatggatagtcaaattctatccctttatgctaaaggcatgacgacacgagatatcgttgccacgttcaaggaaatgtacgatgcagatgtctctgctaccttaatttccaaggtgacagatgctgtgatcgaccaagtcactcaatggcaaaaccgccctttggatgcattctatccaatcgtttacctagactgtattgtcgtgaaggtgcgacataacaacaccgttatcaacaaggctgtatttcttgctttgggtgtcaatacagaggggcagaaagacttacttggactgtggatggctgaaaatgaaggggcgaagttctggttatcagttctcaccgaactgaagaatcgtggcttacaagagatactgattgcatgtgtggatggattaaaaggctttcctgatgcgattaatacggtctatcctgatacccatatccagttgtgtattatccatatggtacgcaatagcttgaagtatgtcagttggaaagattataaggccgttacatctgatttgaagaaaatctaccagtcggtaaccgaagatgaagccttacacgcccttgatgaatttggtcagaaatgggatgacaaataccctcaaatcagcaaatcatggctcgggcattggccgaatctcaacacgttctttgcttatcctatggatattcgtaaagcaatctacacaacgaatgcgattgaatcattgaacagcgtgatccgtcatgcgaccaagaaaagaaaaatattcccgactgatgattcagtgaaaaaagtggtatatttagcgattatggcagcaagcaaaaaatggacaatgcctatccaaaattggaaatctgctatgaaccgctttagtatcatgtttgaagagcgtgtaaccaagtatttttaa

SEQ ID NO: 58496 - DNA, 309 bp, Acinetobacter baumannii
atgcagcatgatggaaattccccgattgatatagctctagctacgattcttggttctgaacacggtagacctgaccaaaaagccgtttctttccgtatagattttaaaaattatgtaaatctttgcgctttgcagagcattactccgaaaggcgttagccgaaatcagcttttaaatgatcttttagcagttggcattgatcaagtcgcatcttctttaccagatggcgcaatcgaagcttatgaagcttcggttatagagcacgaagaaggtttatctatggttttggaacaggaaggacacttatga

SEQ ID NO: 58497 - DNA, 210 bp, Acinetobacter baumannii
atggctgtgccacatactactgttttgtctttgcttggcaaagaagtttcattttctgtcttattagatgaccaaataaaatccttttttcctcaaggcatccaaataaatggatgcgttcaagaagtaattatagccctcaatggcaatcatcaaattttggtagatgacgagttttacgaactctcacgaattgatctattttcttaa

SEQ ID NO: 58498 - DNA, 165 bp, Acinetobacter baumannii
atgaaatcagataagacaaccttactgattcaactcgatcttgatttaaaaaagagcttccaagctgtttgtgatagtcaagatcaaaatgctagtcaagttctacgtcaattcatgcgtgactatgtcaaaaaacatggtcaaggtgatttatttaaaaagtaa

SEQ ID NO: 58499 - DNA, 468 bp, Acinetobacter baumannii
gtgctcaaaggaaaacgcttaagtggtgcgtttggctctctctatggtgtaaaaattcctgaaaaccttgcagatgaaatgccagatgaaaaggatttaccttatctcgagatgctctataaattcgtctacggaaaacaatcctactatgaccttgcttcaactagacacgtagagccacagagcaaggacaacgacaacgaggcggaggagcttcgacgacaacgaggcggagatgtcataagtgatgtggcgacggatgggcgaggaacggaacgcactgcacggagggctcgcacggtggagcgtaccgtaccgcagtacatccgcaaaaagaaacactggcaaatatccccttatgtccgtgttaggacacgggctagaatccaccagtgggacggattcctatacaacatagatttattcccttatgttgaaaataaagtgcttgcattttgtttaaaataa

SEQ ID NO: 58500 - DNA, 270 bp, Acinetobacter baumannii; identical to SEQ ID NO: 54737

SEQ ID NO: 58501 - DNA, 285 bp, Acinetobacter baumannii
gtgaatattcaacaaaaagatgatacaaaacacggcagatttagcttacttgatggtgaaaccgttgcaggcgaaatgacttatacatgggcaggcgaaagcatgctaattattgatgccacagatgtgaatgaaaattatcgtggacaaggcgtaggtcgccaattacttgatgctttagtggcttttgttcgtgaaaaagacgtaaaagtaattccgctttgcccatatgctaaatcggtttttgataaagacccaagcattggcgatgtacttagaaagtaa

SEQ ID NO: 58502 - DNA, 543 bp, Acinetobacter baumannii; identical to SEQ ID NO: 54121

SEQ ID NO: 58503 - DNA, 285 bp, Acinetobacter baumannii
atggatgaattggaaaaattatatatttatatggaagactatcttatgtctggggaaggagatataaaaaatgaattatgggctgtaatggaatctcgattgccaaaattttacttaaatcttgataggaatttatttttccatacagattggcaacgtgagtttgaaaatcaattgccagacaattggaaaggaaaggcatccagtcaattttggtcattaattccagattcatatcaatattggattattaatggaatgaatttttggaaattatatggttag

SEQ ID NO: 58504 - DNA, 2100 bp, Acinetobacter baumannii
atgcgcattgaaaaaattaaagtagaaggttttaggcttctggagaatgtcgaattcggattggaagagaattcaactgtaattgttggacgtaataatagtggaaagacatcttttaccagtatttttgattgtttttgtggtgaatctggaacaagatttcggctagaggatttttcagttttatcacgagagaaatttttaaaagctaaagaattaagagaggcgggggaaagttcagaagtaatattcgaagcacttcctcgaatttctcttacacttacatttcaatataataaactttctcctgatttaggttctctatccccttttgttattgatttagatgaagactctacaacggctattgcgcgagttgagtatcggcctattttgaaaaatatgcatttgctttttgaccttaccccatcttccgcagtggttgaacctcgtacacatttttataaaaatttgaagggtaatttgtctaaagcttatggggttcatgtaagtgcagttgatcctactgatattacaaatacgagagattttgaaggcacatctgctttaacagcattattacaatgtaactttgtattagctcaaagaaatcttgataaaacaaaactaggggatgctgatgtaataggtaaattgcttagtgagctatttaagacagctacagcaccatctgctgctgaggcagatcaaaatttagctataagattaaagcaatctgttgaaaatattgagcataatgtccaactcgactttgatggtatgcttaaagaattattaccagttatgaacgtaatgggattcccaagtcttaatgatactgagataagaccagagacatcattaaacgtggaatcattattatcagggcatactaaggtcgtttatagcggagttgatggagtacatttaccagaagggtataatggtctaggaacccgtaatttgatttacatgttgctacagttagcaagctatcacaaaatctatagatcaaaatcaattagccccgctactcatttaatatttattgaagagccagaagctcatttacatcctcaaatgcaggaggtttttatcaatcaattaaatgtggctgttcaaaaattatcagaaaattattctaacaaagataaatggaatatccagtttgttatcacaacacactccccacatgttgcgaatgctgcaaaatttgatgctgttagatatttttataatgaaattcataagatagaaaacgtacgtcagacaaaggttaaagattttaagaaggggttgagtagtatttctgttaaagatcaaaaatttttacatcaatatatgaccttaacgaaatgtgatctttactttgctgataaagctatcttagttgaagggacaacagaacgtttattaatgccaaagttatgtcaattagttgatgagtctcttgatgaaccacaaaaactagccagacaatatgttacttgtgttgaggttggtggagcacatgcgcatattttttacccacttcttgactttctggagttgaaaacgttagtaatcactgatctagattcaacaaaaaaaggcaaaataactaagaatggaaaacaggaagatgcatgggtgaaatgcccagtagttgatggtcagaatacatctaatgctgccattaaaaactggttttatcctaaagaagtcgatgatactggtaaagttaagaaaaaagctaaaaatgaggatagtcaaatttccccgtcagtcttgattgctaaaactgctcaagagaaacaaattaagttccgtagaattgcatatcaaataccagaagatccagaaactaatatatgcgctagaagttatgaggatgctttcatattagctaatctttctaaatttgaattacctgaaggacaagatattgctgttgctgcttgggaaaaagcacaagggcttattaaatctgatttcgccttagaatatgcaattctaatagaagattggtcggcaccaagatatatcaaggaaggtctaatttggttatctgaaatggacactataaaaaaatcaaactatgaattaactacaggcgaataa

SEQ ID NO: 58505 - DNA, 1155 bp, Acinetobacter baumannii
ttgtcacatcagaataccgtatttcatcaattactcaaacccattttaaggcaagattttgaacgtctggctaaactgcaccactctgggcaaaaattaagatcagccacccgctgggatcagtttgttgccatattaatgtcccaactttcttgtcggcaaagcttaagagacattcaatccaatctcgaatcccagcaggaaaagctctatcatcttggcgcgaaaagaattgcgcgaagcaccttagcaagactcaatgaagaacagcccgccagcctgtatcagcaattgttcacacagctgcttcagcgctgtgaaaactctaaaactgcacataaatttagattcaagaatccgctgtattcactagatgccagtcatattgatctttcactgtcattgtgcgaatgggcaaaagtgcatgaatccaaagccagtattaaactaagtgttggcttaaatcacagcaataccattcctgaatttgtagcgcttggggatggtattgaaaatgatatggtgcaaggcagagcatttaaatttcctgctggcagcattatcgtctttgataaaggatatgttgattatcaatggtttgctcagttgacacatcagaaagtcagcttcgtaactcggctacgccccaagacagtttatcaagttaaatcaagccgcaacgtattagcgactaaaggcattattgcggatgaatgtattgaattgagcagtgcgcacgccaagaaaagaggtgcccctaaattattaaggcgtatagagttttatgatacagataagaaaagaacattcgaatttctgagcaacaactttcatctggcagcatccaccattgctgcaatttataaagaccgctggaagattgagttattctttaaagccataaagcagaatttaaaactgaagtcatttctaggtcgaagccgcaatgcgatacaaacgcaaatatggattgcattaatcgcctatttgctggtgaacttcgctaaacacatggcacaagaagaatggagtattcagcgtttattgcgaattattcaggtcaatttatttgaaaggaaacttttaaggtcactctttgtgcctgataaaaaatggcgaaaacaagaagaacctcaattgaggttcttcttgtga

SEQ ID NO: 58506 - DNA, 300 bp, Acinetobacter baumannii
atgcctttaatagtagaaccagaaatccaaaaattagctaaaatttttcagcaaaaaatcattccacaattacaggaatatttctttgacgattgggaaaagattgatgcggttttaaatgggaatggaatgcttcataaaaagtatgagctaagttcgcaaaatagattatttaaagatcaaagcttgattaatcgtaatatttgggaaattaaggctgaagcattcagtgatgtgaagaagtatattgcaatttatgatgaaacatccgaagtcagaaatgagttaagtggattgtga

SEQ ID NO: 58507 - DNA, 228 bp, Acinetobacter baumannii; identical to SEQ ID NO: 58456

SEQ ID NO: 58508 - DNA, 228 bp, Acinetobacter baumannii; identical to SEQ ID NO: 58456

SEQ ID NO: 58509 - DNA, 228 bp, Acinetobacter baumannii; identical to SEQ ID NO: 58456

SEQ ID NO: 58510 - DNA, 228 bp, Acinetobacter baumannii; identical to SEQ ID NO: 58456

SEQ ID NO: 58511 - DNA, 228 bp, Acinetobacter baumannii; identical to SEQ ID NO: 58456

SEQ ID NO: 58512 - DNA, 147 bp, Acinetobacter baumannii
atgttaaaaattgtttctaattataatttaaaatttctaaattattttagaataaatctatcagtaaaaatatttttagatgtatttttttataaaagaatacttatgttgaaattaaaaaatgctatatataacataggattgtga

SEQ ID NO: 58513 - DNA, 516 bp, Acinetobacter baumannii
atgtttagatctcctggttttactatagttgagctctctataaccctcgtaattcttgtgattatgtcagttatagccattcctttataccatcaatttatggcatctgtagaattaaaaaatacttcgcgtgtactcacaattcatatacaaaaagccaaatcggacgcaattattaagcataagaacattgttctgtgtccaagttcagatcaggtaatctgtaatacagattggaataaacacttaatcagcttcatagatagtaaccgtaatctacagcatgatttaaatgaagaattattaacctctatagatcttaaccatacttatggttctatgaaattacaacgttttggtaaaaaacaaaatagtattgtttttcaaggaagctcgggacttccaatcgagtctaatggtagttttatttactgttcttatgatcagcttaaaaattttaaattagttcttagcaaaatggggcatgtgcgtgtcgaagaattaaaaaattgttag

SEQ ID NO: 58514 - DNA, 141 bp, Acinetobacter baumannii
atgtttttagcagtagcagcatcaccattggctgaaattgtccagcctgcattcgctgctgtacctgcatcagtgactgctttatcaagtgctgttaaagcatcaccaacattgtttgcacttgtacctgcaacattataa

SEQ ID NO: 58515 - DNA, 378 bp, Acinetobacter baumannii
atgccatctgcaaagttaactgtttcacctaacttcacattgtctgccgtaccaccattgacactaaagttcagacctttgtctgccgtcgcttgggctgcagcagcattggtcactgccgtgtttgcagtgttttgggcagtggttacattctggttcgtggtatttaactggctaccattcactgcatctgtagaactcgcagaaatagttcctgctgctacattggtaatcttctggttacccgcattaatacctgcagtcgttacacttggaccacctgtaatggttaatccactgttatcaactttgctgttgcctactgttaggctaccggcattggttaatgcaatgttgtcatttacattatatttatag

SEQ ID NO: 58516 - DNA, 522 bp, Acinetobacter baumannii
atggcgggtattgagcactttacggcagtacttgccgaatacatgatgaagcatgaaaagaatttctattataccgacgatgccaaaagccgtgctttatggatgtggcatatgcttgaagaatctgagcataaagatattgcttatgatgtctatcaggttttaaacggtaattatccgttacgtgcaaccggctttttaatggctttcatcactattttaggacttattccaacagcaactttatttgtacccgtactacgtaaaccacaagaaatgctaactaagaaattctggaaagatgcacgtcgtggcgtcaacttaatttttagtccaaaagatggtgtatttggtagcactattggccagatttttgattacttacgtcctaacttccacccaaatgatcatgacacgaccgaataccttgagtactacaaaaacaaattacttaacgagggcggtgctatagcgccttactttgtgaaggaatttacaccaccagttcgtgcagtttcataa

SEQ ID NO: 58517 - DNA, 132 bp, Acinetobacter baumannii
atgaagactgcttatgccacaattaaaggtattgaagtcatgcgtgcactacgtaaaggacaagcatcgtcattttattatggtcagcctcagggtgaagtgtgtctaatcaacagggttttcggtctctaa

SEQ ID NO: 58518 - DNA, 132 bp, Acinetobacter baumannii
atgaagacggcttatgccacaattaaaggtattgaagtcatgcgtgcactacgtaaaggacaagcatcgtcattttattatggtcagcctcagggtgaagtgtgtctaatcaacagggttttcggtctctaa

SEQ ID NO: 58519 - DNA, 270 bp, Acinetobacter baumannii
ttgggataccaaaacattaatagtgtttcgtatggtagcggtcatgtacaaagtttaatagtgaatggtcaagaccttattagctttgagcgtgatgatttacaccgtgaaattgtacgtcactatgccaacggaattagccaagaacaacattacgatacgatgggacgtttaacccagcaaaatattgttaatggtcatgagttcggttatgaaaagttagaaatcaactttaattatcaattaaatatccatcctcctaagatatag

SEQ ID NO: 58520 - DNA, 408 bp, Acinetobacter baumannii
atgcttgaagaatctgagcataaagatattgcctatgatgtttatcaattactcaatggtagctacccactacgagcttctggcttcttcttagctttctttactattttaggtctaatcccagcaactaccttgtttattcctgttttaagaaaaccacaggaaatgctgactagaaaattctggaaagacgctcgccgtggtgtcggacttatctttggtccaaaagatggcgtattcggtagcacgattggccagattttcgattacttacgccctgacttccacccaaatgatcatgataccactgaatatctagagtactacaaagacaaattactgaaggaaggaggtgcaattgcgccttactttgtgaaggaatttactccgcctgtacgcttgtcttaa

SEQ ID NO: 58521 - DNA, 219 bp, Acinetobacter baumannii
gtgtattgttattttggagaggaggtttatggggtattaggatacttaggttataactttaatgcatttgctgatgtactgcgggatttgcctttaaaagttaaatggataaattttcagtactctaaagataattttgagtcgaaagaagatttttatcatttagatgattttattgaagtgttaaaaaaatactcgtcattagaaatttcatattag

SEQ ID NO: 58522 - DNA, 318 bp, Acinetobacter baumannii; identical to SEQ ID NO: 55062

SEQ ID NO: 58523 - DNA, 396 bp, Acinetobacter baumannii
atgaatacagatatggtgctcgatgcattagagcaagcattgcatgatcgaggcatgccaaagaatgtgattcatcattccgacagaggtgtgcaatatctttccattcgttatacccatcgtttagaagcagcaaatttacgagcatcagtcggtacgactggtgattcatacgataatgctttggctgaaacggtgaatggcttatacaaaacagaggtgattgaatatctaaaagcagattggcaaggtttagcagatgtacaacttgcgacactaaactgggtagattggttcaataaaaagcgtgtacacagtgcactgggttatgtatcgccttttgagtttgaagcaatgtactatgataagattaacccgttaggtcaggtggcctaa

SEQ ID NO: 58524 - DNA, 144 bp, Acinetobacter baumannii
atggaaattgcagcgagattggctaaagttactgcactgattatcagtcgagatgtcgttattgattatgccttatacggaactccagaattagccctcgttgcgaacaacaaagcagaaatcctgcagttccgcggacgctga

SEQ ID NO: 58525 - DNA, 228 bp, Acinetobacter baumannii; identical to SEQ ID NO: 58456

SEQ ID NO: 58526 - DNA, 228 bp, Acinetobacter baumannii
atggttactaatcatcctgagttgcaatggagagctgcatgcggcggagtaggtttagccgttctacctgactttttaggccaacaaggcaatttgataaaattaccagataatgacccgatgagcgctgaaatttggttggtcatccatgaagatctaaggagtagtcctgtggtaagagtagtgatggattttcttttgaattgttttgaaccatttagagtttaa

SEQ ID NO: 58527 - DNA, 261 bp, Acinetobacter baumannii
atggctaaaaccttaataaattatcataagcctatacgtaaagcggatgattggagtttcttattcgattttgactctactgcacatatttttatgtcctttattgttgatcatcccgttattgaaagtggtgaaatcagtcaacagttaagttccattgaagctgagcgagctggacattgtgaaattaggaaaagtaaatatggtacagctatccgtaaaaatattgcaaaatttttgagcagaacatacccgatttaa

SEQ ID NO: 58528 - DNA, 1011 bp, Acinetobacter baumannii
atgagaaatctccatattgatgccacaaaaggtgtcttaatttttctggttgtattgggtcattaccttgaaaggttaattggctggaacgaacctctaaatcaagcgattttagggagtatttactttgttcatatgcccgcttttatttttatatcgggaatattttttaaagaagagaaaatcctagaaaagttaatttactttttatcgttatatttgccgtttcagcttttatttcaattgcttgatgctttttataatggaagtctttggaatgggacatttcaattcttatggtttgctaaaccttattgggtgctttggtatttatttagcatgggaatttggacgcttttagcttttttcctaaaaaagacagcatatccagttctatgttctattattttagctttacttattggattttcacctatcaataattatagttattcaataggtagaattttcgtatttttacctttttttatgactggggcgatctatggtaaaactatttttcagtatattccgcagttaccttatgaaaaattatttgctgttatcatattattaataattactattgtagccgctataagccattatagttattattggttatttgggagtctatcttatattcagttacatgtagatttatggcaaggagtgctgatccgcagtgtaattatgttgctatcggctatgggtgttttgagtttatttgtattcactcaaaattttaaacaaccttggattggtttaggtcaaaaaacactgccagtttatatattgcatgcttttgtaattattgttttgacccatcagttaagctttaaatattcggtagagattaatattttcattagtcttgttttggctgtcctaacttgcatggttttacagttacagatatttgaacgtttaattcgcttcatctctttatttgtatataagccttttatgaaattactagaaattctaaatccaaaaaagggctttaattaa

SEQ ID NO: 58529 - DNA, 1911 bp, Acinetobacter baumannii
atggcctatattactttaagggatgtccaacttgcttttggcggacctgccctgctcgatggcgcgaacttcaacctagaacgtggcgaacgagtctgtttaattggtcgtaatggtgaaggtaagtctactttacttaaactcattgagggaagcctactaccagattctggtgaagtttctgtccaaaatggtttaactgtttctatgctagctcaggatgttccaatgtcatcgggcaaagttgcagatattgtagcagaaggtgcaggagaagctgctgccgtacttaaagcctatcatgaagcaagtgatgcctgtgtacttggtgacatggaagcttgcgatcgtatgggatctttacagcataaacttgaccaacttgatggatgggcattagaaaataaggtcaacacgattttaggtaaaatggagttagatccgaatgcagatctagccgacctatcgggtggtcgtaaacgtcgtgttttacttgcccgcgccctacttacccaaccagatgtgttattactcgatgagccaactaaccacttagatgttgaaagtattgagtggcttgagaaattcctgcttgatcaaaataatttaaccttactctttatttcgcatgaccgttcttttgtagaccgccttgcaactcgtattgtggaattggatcgcggcatattacgcagctatgaaggaaactattctcgttaccttgacctaaaagctcagcaacttgaagctgaagaaaaacaaaatgccttgtttgaaaagaaacttgccgaagaagaagcatggattcgtcaaggtattaaagcacgtcgtacacgtaatgaaggtcgtgtccgtgcccttaaagcattacgagaagagtcaaaagctcgccgtttccaacaaggcaaagtcaatatgggcgttcaagaagcacagcgctccggcaaacttgtatttgatattgaacatttaagcgtaagttacgatggacaaaccctcattagagatttctctgccattgttatgcgcggtgaccgcattggtttggtcggtgataacggcgtaggaaagactactttaattaaagcgatcttaggcgaagttcagcacgaaggtgttgtcaaaacaggaactcagcttgaaattgcttacttcgaccaattacgtaatcagcttgatcttgaaaagtcggtttctgaaaacgtttctgaaggttcagatttcgttgatgtaaatggtcaacgtcgccatattctcagttacttacaagacttcctattctctccggaacgagctcgtacaccggtgaaagcactttctggtggtgagcgtaatcgtgtcctgttagcaaaactgttgctcaagccatcgaacctgattgtaatggatgagccaacgaatgacttagatatggtcacacttgagctacttgaggagatgttgtctgaatataaaggtactttgcttctaattagccatgaccgtgcttttatggacaacgttgtgacatcaacttgggtatttgatggcaaaggcggtattgcagaatatatcggtggttatcaggactatttgattcagcgtccaaatgagagagtcgttgaccaaaaaggcgatgtaaaaaaagctcaggctaaagcagaagctgaaaaaaatgcagctcaaacgaacgtaaaaaaggtcaaattaagctacaaagatcaacgtgaacttgagcaattaccggcagaaattgaaaagttagaaaatgagcaagctgaactttctgacaaacttgctgacggctcctggttcgtaacggatgccgatgcggcaaccaaagcaagccagcgtctagcagaaattgaagagttactccttgaaaagttagagcgctgggatgaacttgagcaagtgagtaaaggcagttaa

SEQ ID NO: 58530 - DNA, 1311 bp, Acinetobacter baumannii
atgttagtaaaaaatattacttcttttggagtggtaatttatcttattacagcactattgggatatcgaattggctggtctgtctttcaatatgatgaactacgtctattacaatttcctttagcactatgcgctttattaattttacttcttacaaaagaaataaaattttcaattttcacccaaattactttttttattattggtgtattcatattaattcaacacataaattggggaatttttgagtttcaagagctttggtctgcgatagcattactatttatattttctgctttaacatatgagttaaggaatataaaaaatatagaacatggtgttgcactaattgtagtttcagcgattattccatgtttatttattttgatttctatttttaattttattatccatcaacaatggtttgattggcagtttaactctggcacgattcggatttatgatagtgttattgttcccttatttttcttcttgatctatctaaaaaataaaaaatatctttatatctcttatttttaccctatagcaattttcttttttgctttagcatggttttttgatggtgcacgttctgctttgtttgcaatcataactggtctaataatatttttccttttatcaaaagaaaatcataaattggttctaaaaatatttttgtatatgttttcagcttttatagtttttaaaggtacagcttattttgcagataaaaatacgatgactgtaatgcgatcaggtacatctttacgtgccgagatgtggcattttgtatttgagcaatggaaacagtatccctttagtggagtaggaggaggatatttatctagaatccaatatcaatatggtcatcatatacataatctttatttaagattaatttttgaatggggagcgattggatgtatatttctagtttggatgacttatcaactagtaaaattatttttgaataagggaagtttacccattgcaaaagctggtgttgctgcaattttaattgatgcaatgttctctggtagcatggtatatccaacttcacaaatcgcttgtatattttttatagcttttgcattttctcaaaggaaagtagcttctagttctcaattttcttttttgtctaccaaagtacttatcagcttatgggggactttatttttatacattacaataatgtatttaggacaagatttaatgtgttggggatgcagcagttatgtgggaagaatggctccaaacttttgggaatatggcggaactgaacatctaattccaactacccagattccataa

SEQ ID NO: 58531 - DNA, 240 bp, Acinetobacter baumannii
ttgcagcttatttggtttggtgtaattggtgattgtatggatatgatcgaagcaaagaagaatctagcaatatacaaagccaatttaagcaaactgcaatcttacaatcatttatttagtagctattcattccgtgctgactgtgagcgagaagaaagattattaaaagagcgtattgaggtgttagaaaatgcgttcgaaaaagaggctaaacgagataagagcactaccctgcgttag

SEQ ID NO: 58532 - DNA, 1608 bp, Acinetobacter baumannii
atggcgattatcactgaagaaaagatgcgtaatcttgatcgggatattgaggatgcaggcaagtctattaatatcattggaatcattaatccgagatatggagcgccatttccatctattccaatggttattcgggatgctcaagctaatattgaagatgcaatgcaggagattgttgcaagtacagagttaaaatcagctcagtttatggacgacttggcaacacgatatttggctttatctttaaaaggggattggactcctaatacaccgtatgtagtgaaagacttagtttttgtaaataatataacttatatatgtcttttagcgcacacttcttcttccagcttccaaaatgaccaaaacgctggtaagtgggcagtatatcaaggtgtaactcaagtcgacttacaatcgtatgttgcgatgaataagacttatgcaccagttctgggttcgccagtaaaatttaaacttaatccgctgatggccagttttttatacggtatcagtgatccaactcataaagacgatgatttaaacaacttccgaggtttaaataatcctgatgcttggcatgactccaatattgctatcggtggatttgcggtaggaagaaataatgtaccttttgcttatcttggaaatgccttcggtcatgattgtattgcatacggagttgcatctttagtaggtggcgctgggtcatgtactggtaatccagatgaccctaacgaatctactggaaaatatgggtattgtgggtttgtttggggtaaaaactcacaaggacctggacgaattagtaatgcgatgggtgaaagatgtatttcaggtagtaggtattcttcaacagatggttatagatcaatcgcaggtggaacacagccctcacatcctgattatgacttatatggtgatgatggtgctgagggagcagcttcacgagcacatggctatagagctgaggcatacggaaattttgctttttcttacggaacatttctacgtgcttacaatggttctcaagttatcggtaagggaattaatgaaggttcaccccttgagataagtaaaagaggcttgggacttggttataacgttgatgtccctacaatattttgtcaagaaggtcctggcgaaaatggggcgcatgcgtgggtcggtttcaataccgccgagccgctgactaaatatgattttcgtttaggcaaatcagacacggtaattcatcatattgaagtaccgggaaacccagatgttttaactgctaatgaggttaagggcatgttgggtgacggtagttatgcaagtctatataacgttattgtgacacatccaaatgctggtcaaccttatgctacggttatatatcgtattaatggcactgaattcctaagaattgatccaacaaggcgggctaaattcaatggcgctattgagacttcatctggcttgtatgttgagggtaatcggctagttggcggtcaaatgccagcaatagcgaatttacccccagaagccactctaagcgatgtcattacaaagctaaatgaacttttagtggcccttcgagatggcacaggtcacggtttaatagctaaataa

SEQ ID NO: 58533 - DNA, 513 bp, Acinetobacter baumannii
atgattgaacttacgcctgagcagttagctttgcttgatcaatcggcaggtcctgttggttggcttgaatctgttgaaattactcacccgaattggccgtatgttttacattatgtggtcaattctagtgagcctatttcattaacccatgaagatgggcaaacatttgaatatgtttatgtacctttaaccataaaccgtggtggcgatgaagataatcttgatcaaaagctttcagcaatcattggggatgttggaaccattattcccgatctgattaagctagtgcttcaagatgaagagattacaccgccaattttaaattatcgagcttataacatgggtcattatgatgttccagtgtgggttatcaaagatttagaaattgctgttgttactcgtgatcatcgtggatcaaatattgaatcgcaagcacctggcttaaatgattgcggaaatggtgaaatttattcacctagtactgatgaaagcttagaaggtttttatgcatga

SEQ ID NO: 58534 - DNA, 738 bp, Acinetobacter baumannii
atgaatacattagtttttcaatcttcaacattagaaccagttcaattatcagataatcaaatctgggtaacaggaagtgatttagcaaaagccttgaactataaacaagctgatgctgttactaaaatttttaatcgtaataaagaagaatttaccgaaaatatgacgcaagtcattgataatccccacacgcccaatttgggcgtacggatttttagccttcgtggttgccatcttattgcaatgctttcgcgtacagatgttgctaaagcatttcgcaaatgggtgttggatgttatagaaaaaacagaggttcaacttaaaccctctgttgctatggtgactcaggcaacttatgacaaactggctttgaaatatcatcgaatttttcggcaatatgacaatatgattgacgatttgagagttcagatcagttcaatgcaaagtaaatgtcaccgctataattttgatatgcaacttaatgcaattcctattgagcaagtggcagagaaaatgggccttacagtttcaagagttaaacatttattaatgataaatggcattatcgaagaacggaacccatacgtcgagctagataagactgttattaacattactgaacgcgggaaaaagcttgattttgtatatttagatagttgtgtggtagatggtgttgcacaagattctataaacatttcgaaagatggaataacttacttgtatgagttgttaaaatag

SEQ ID NO: 58535 - DNA, 390 bp, Acinetobacter baumannii
atgagtttagtgctaaagtgcatggagatgtcccgaatgttttacaacaagcataataatactgacatcgcccattgttgttttcacaacatgttaagggcgttaagggatatgttaagggtatttttctacacccttaacatcaacaaatccaatcatatcaatacttacagcctttatgttaagggtgttaagggtttcgcgtgcgcgcgcatacgcgtgaaaaatattgcattgaataattttattaataaattaattgataaaaattcttacgtgcgtgagaagaatacccttaacactgttaacacccttcacaagccttaccaactaagagttatatacttttatacccttaacaatactcttaacacccttaacattgtttaa

SEQ ID NO: 58536 - DNA, 207 bp, Acinetobacter baumannii
atgacacgtgatgaagcaatcaaactactggactgcacatattcagagcttgcagagaaattaggaattacaacagcagcagtggcacgttgggctaatcgtgaacttccgtatgaccgtgaatatgaaatacgtgaattggctgctggtcgtacacctttacgacttcagaaagcaactcagaatttatctcatgcaaataattaa

SEQ ID NO: 58537 - DNA, 375 bp, Acinetobacter baumannii
atgtacgcatcattacctggaaaatttacctctgtacaggacgacgaatggggaactgaatgcgatcgacatcacgaccgtgaagcagtaactcgtatatgtgtggaagcagatagttttggcgctgaatattcaaatatgtgtcaagaatgtcttgataaatatgaagcccaacaaaatcaaaaggaaaatgacccatcacaatgggaaacatgcaaatgtggaaatagtgaaccttcattaatctcttatcgggattatgaagaaggtatgcatggtcctgtttatcagcactgctctaaatgtcatgaaaagatgaataagcgcattgcggaagaagaagatttttattcccaagatgatgattattattga

SEQ ID NO: 58538 - DNA, 315 bp, Acinetobacter baumannii
atgaaatataaagctttacctgaagctgaagttttggcagttcttgctgaaggtgaattagatgcaagcgatttgctttacacagctaatccaaactttgaaaaacgttttaaacgcttaaacacagcacttgcaaaactccttgatgaagtacgcgagtatttccccgatgctaattattacagtcccaatgatggcatggttttattgcttggaagttctcatgcaaaaaaacacgatcagccagcacaacaagaattagtagcagcaacaagtcatgcattagtttgcaagttaagcggaggtgactggtaa

SEQ ID NO: 58539 - DNA, 660 bp, Acinetobacter baumannii
atgtatataccaacaacaaaatattctgatcttatgtcaagtcttgacttacttaagcttattaatgatgcacgcatggaatgtggtgagccaccaatccgtgccaatgacttccataaacgtgttgaagatgaattagatggagaccactacgaaagtttcgtagttcaaaatccaaacaaaacattaactaccgtttttaatttgtctgaggatcagtgcactttaattggaatgcgtgaatcaaaagccgtacgtaaaaatgtattgatgaaattaaagcagaagaatggaataaaaattcctcaaactctttctgaagcattgcaattggcagctgaccaagcaaagcaacttgaacttgcagccccaaaggttacttactacaacacagtagttgaaagatcaaccctactcaatgcatcacaagtagctcaaaaaattaagatgtcagcagtaaagatgaatagaattttagagtctctaaatgtttatcatcgaggcgttaaacgagcgaggctttttcaacaatggtttattgataagggatttggtgaggttaagcaaactgaacttggtttttcacaaccaatgtttaccactaaaggtgaggcatgggtacttgagacatttataaatgagggggttttggaagcatga

SEQ ID NO: 58540 - DNA, 318 bp, Acinetobacter baumannii
atgagtattttagataaagaatatgtcgtgactatgccagacgaaagcaaatgggctgtaccagttcgcataattgctgaaagtcgcgccaagtattttgcaggtgttgatgaagtgtcttttgaagaaagtctaaatgatgacactatccctctctttgaatctgacgattatgaaattcatgattgggctgtaaacaatatgaattggagagatgttaaagaacatgccatccaaattgaacgcccaagcttagattatgaagatggctgggtaaatggaaaatatgaggttaaagcggaaagtaaggaggggtga

SEQ ID NO: 58541 - DNA, 183 bp, Acinetobacter baumannii
atgcaagtgcatgagaaaagaaaactacttgaagccattgatgtgcttattcgtcgtcctgcttcagcaacagagacaacacttgctgaggcaatggcctacttcaagatgctaattgaggagtctacacaaggacaaattgaagtccggtattcagacactactcagcagttgccattttaa

SEQ ID NO: 58542 - DNA, 378 bp, Acinetobacter baumannii
atgaatataaaagccaacatagtcaaatcaatgggattcgtgggagtagttagtgctctaactgctgcttatgcatttaccccagctaacaaagaacctgtaacggttgcagctcctttcaaagttgaatcaatcgaccctgaaaatgaacaagcagtacttcaaactgcaaatgaaaagttcaccttagaagttgattttgatgctcagtactcaattgatggcaacggctatcaagcttggcgtgatgttgaaattaacgagattaaagacattcgcgtttatgacgaagatggcgaggtattggcttacgttgatcgtttggacgtagttgagattaaagatcttatcgaatcagggattagagagcgcatttaa

SEQ ID NO: 58543 - DNA, 534 bp, Acinetobacter baumannii
atgaaatttggagagcaagtaagacttacaggacttcttaagcaaaaagttatcattgagactttatataaaaatggaaagattgtgaaagaagaaggttatttatctgagttggcgtgcaaccataagtgctcatgtagagatgtgctgactttgggagatgtgtttgagcgagagtggatcaagactacatctgctgtaaatgatgaaatgcagttcctagatggtctcgggacttatgacaacttttgctacaacactgtaatcatcacttcacagaagattaaaaacagacttggtcaaaggaaagttattcatgaactagatatatctgcaggtcctcatggtgagcatgggaagctaataaaatttcctgaaaacacacacattctagaagtaaagaaaaaagcagcggaaatcattcttaatgcttataaaaatggggattggtactttcacttacgtgatgcaagcaatggagaaggatgtgctaactgcgcacttgtagaaataattttggagtgcgctcaatga

SEQ ID NO: 58544 - DNA, 417 bp, Acinetobacter baumannii
atgaaaccagaacagtttattaagcgttacggaattaatgaggccaaaaagattattgataaggcacccaatggaacaacgcacattcattcagtgacattgcaaaactatatgcagggtgaaggcaataattatgtttggtgtggttcaggtagagatggttggtatttctctatctacgatacgctgaatggaatgatggccttggaagacctcaagcgtctggttgagagcgttgatttggttgagctgcttggtggaatagatatagcaaaaaggaaagtgaagatggctgaatttaacggcttcttacttatctcagttccagtagaaaacgggtttggcgacatatacgcgcaaaaggttgagcgcgccatccgcgaccacgaatcaatatacggaggcggggatgagtaa

SEQ ID NO: 58545 - DNA, 303 bp, Acinetobacter baumannii
atggataagtgtagagaagagtttgagcaatacattcgtgatcaaagcgccttcacggcagattttcaaattggatgtaatggccaatacaagtctgacctaatgcatttcatgtttgttacgtggcagcaccagcaagcgaaagtggaggagctgcaaaccctgtacacccagcaaggcataaacatgtttaagctgcaaaagcgggtggataaagcaatcagattgcttgtagaagccgaattatatcaatcagagccaaacattgatttggcggtaaaagcgctcaagggggaagggtaa

SEQ ID NO: 58546 - DNA, 501 bp, Acinetobacter baumannii
atgaatgcggcagtaaatcacattatgcaaacaacggactggaccaaatacagtctagaagaatggctttatcaatttggggcttggatgtactcaaattctggaacttgtggaaagagcataaacccgattgctgtcgctatggatcaggctgctaagaagcgtaagcaagaagtgaaaggcaaagagcagatcatggctgattggctgtgttctgatgattcaacaatccctaaaggtcgtgggcgtataacatgtgaaatcacagacaatgaagcgcgtgcagttcaacgccttatcctagatatgcaagggcaatcagaagtgttagatggttggcttgaaatggtgatatttcgctactgctattcaatgcccttatctagacttgtcacgccatatgcaacgctaatggatgttaagtttgacattaagtgtggattagcagctatgcatgctagatacccatttattgcttacaaatcaaaaatagcttcatga

SEQ ID NO: 58547 - DNA, 711 bp, Acinetobacter baumannii
atgaagaagcctacacacaaaatctaccgcacaaccaactggtcttcctataatcgcgctctcattaatcggggcaacatttccatttggtttgatccaaacactcagtggtatgcacaaccacaaaacaagcaaggtcgaaatcaaacttacgccgatacggctattcaatgctgtttaatgattaaatccttactccgtctatctttacgtatagtcactggctttgtgcaaagtctgattaaactttgcggattaaattggaccgcaccagattacaccacgctttgtagaagacaaaagcatattaatattgcaatcaattaccaaaaaagtagcgatgggctgcatctactcatagactctacaggcatgaagtttctaggtgagggcgaatggaaacgcaagaaatatggacctgaatatcgtcgccaatggcgtaaacttcatattggcatagatgctaaaactctacaaatacgcgctattcagcttacaaccaataatgtcagtgattcacaggtgcttggtgatttacttaatcagattccacaagatgagcagattgactctgtttataccgatggagcttatgacaccaagcaatgccgtgaggtcattgcagatcggcaagcgcatgcggtgattccacctagaaaaaaatgcgaaaccttggaaagatacaaagagcagctcgctagatcgaaatga

SEQ ID NO: 58548 - DNA, 918 bp, Acinetobacter baumannii
atggtggatttcatccataacaataaagacttatatggtgttgatgcgatttgtaggattttaccgatcgcagcttcaacctattaccggactctagatctctgcgatgagaagcattgcttcgcaagggaacatcgagcaaagcgagatttacatgacttgcatcatgctgaggagattaaacgaatttggaaggaaagttcaggtcggtatggtgtacgtaaagtctggcaaaaactgaaacgtgaaggctatattattgcacgctgtactgttgctcgattaatgaaaaagctaggtatacaaggtgtttggcgaggtaagaacaaacaaaccacccgtagccgagatgaccaaaaacgagcacctgacttggtgaaacggaattttaatgctgatcatccaaaccaactatgggtgggtgactttacgtatattcaaactcattcaggctgggtctataccgcctttattattgatgtgctctcgcgagcaattgttggatggaaagtatctacacgaatgaatacagatatggtgctcgatgcattggagcaagcattgcatgatcgaggcatgccaaagaatgtgattcatcattccgatagaggtgttcaatatctttccattcgctataccaatcgtttagaagcagcaaatttacgagcatcagtcggtacaacgggtgattcatacgataatgctctggctgaaacggtgaatggcttatacaaaacagaggtgattgaatatttaaaagcagattggcaaggtttagcggatgtacaacttgcgacattaaattgggtagattggttcaataaaaagcgtgtacacagtgcactgggttatgtatcgccttttgagtttgaagcaatgtactatgataagattaacccgttaggtcaggtggcctaa

SEQ ID NO: 58549 - DNA, 318 bp, Acinetobacter baumannii
atgacaaaattaaaatatacccctgaaatcagagaaagagcggttcaattattgattgaatctgaaaaagattatccttctacttgggctgcaatcacagcaattgcgcctaagattggttgtactcctgaaacacttcgtgcctggcatcaaaagcatttagatcagcaaaatcctattaaagtacaacagatatatgatcaagaaaaaatgaagcaaatggaacgtgaaattaaagaattaaagcgtgccaatgaaattctacgtaaagcagccgcttttttcgcccaggcggagctcgaccgcccacacaaataa

SEQ ID NO: 58550 - DNA, 855 bp, Acinetobacter baumannii
atgagtagtttagtccagacaaaacctaaaaaccaaagtacatttttgattaaattttttcagcagttgaggttatatccaacgcatttaaaaaactatgccattgcttttacatctatagctttctggatagtcatttggcagggacttgctcagtttaaaataaatttaggtattgtgaacttttgcaatgtcccgacacctttagatgtcattcatgcgctatgggctttttttcaactcagcactgcgtttgaacatgtcgaatctagtgtatttcgtgtagtggttggttttgtgcttgcggctctaattggtgtaggcattggtttgttggcaggacgttatcaaaaactggctgcctttctaatgccaccattagaagtattacgtccaataccagcagttgcatggattcctttagcaattctgatttttccatcctcagaagcgtctatgatttttattacgtttattggggctttatttccaattttattaaacaccgtacatggtgttggtgcagttgatccacgactcgttgcatctgcaaaaagtctaggtgcttctgatcttgccattattcatgaagtcattattccgggtgcattacctaacattattactggtttatccattggaatgggcacttgctggttctgtttagtgactgccgaaatgatttcggggcaacatggaattggatacttcacatgggaatctttcaccttgcaaaactatagcaatatcgtggttggcatggtgctaataggagcgttaggtatgtttagcagtacattggtgcgtgtgattggaaaccgatttactccatggtatcaattgaggaagtcttaa

SEQ ID NO: 58551 - DNA, 510 bp, Acinetobacter baumannii
atgtcttttaaatctattcaaaaatcttatgatgaatatgtcttaaaatttaattcatttcctgatcttatttttgttggtaacaatgtttatagagatctctatgatgaattaaaaaaaaatacaaattggaaggtagtttttgaatcaagatataaaattgactcgataatcggatgtaagttaattattgtcccaagtcatcactatgattaccgctttgactttcttgaatttgatgatcttgaagaacgcaaaaattttattttcgatgaagattttagaaggtcaacagactatctggtgatcaataaaaatttactttcaatcaatgattgtaagccttgggaagcatcaccaccgacgaagtcttttgattattatttaaatatttcatttgccgctcttgatcaatttaagcttgaaaatttaactaagagtgaaatcgaagatagaataagcacttacaaaattagaaaaggcatttatgagcctgaaccgagattttag

SEQ ID NO: 58552 - DNA, 693 bp, Acinetobacter baumannii; identical to SEQ ID NO: 54353

SEQ ID NO: 58553 - DNA, 318 bp, Acinetobacter baumannii
atgaaaaaacctaaatatacccctgaaatcagagatagagcggttcaattattgattgaatccgaaaaagattatccatcgaattgggctgcaatcacagctattgcacccaagattggttgtactcctgaaacattacgtgtttggcatcaaaaatatctggataaacaaaatccagttaaagtacagcagctttcagatcaagaacgtattaaacaactcgaacgtgaaaataaagaactgcaacgtgctaacgaaattctacgtaaagcagctgcttttttcgcccaggcggagctcgaccgcccacacaaataa

SEQ ID NO: 58554 - DNA, 435 bp, Acinetobacter baumannii; identical to SEQ ID NO: 54443

SEQ ID NO: 58555 - DNA, 657 bp, Acinetobacter baumannii
atgttccaatcaattgccggcacccaactggctaatgaaggttttggaatttcacttgatttactacaagaaggatatgaagccaccctctcactcaagcgcggaaccattggacaaaacgtcatgtactttgaaacgggacaaggtagtgccctatcaagcaatgctcatcacggagtagatcaacaaacattagaaactcgtgcctatgcagtggcccgtaaatacaatccgcttttagtgaatacagtcgttggttttattggccccgaatatctctttaacggtaaacaaattatacgtgcgggactggaagatcacttctgcggtaagttacttggcgtgccaatgggttgcgatatttgttataccaaccatgccgatgccgaccaaaatgatatggatgtacttcttactctatttggcgccgcaggcattaactttattatggggattccgggttcagacgatgtcatgctcaactatcaaaccacttcctttcatgatgctctctatttaagacaactcttaggtttaaaaccagctcctgagttctccgcttggcttgaacaacaagggatttttaaacaacaaaactctcaaatttgttgggcagaccatatgcctgaccaattctctcgtctgcttatgaactag

SEQ ID NO: 58556 - DNA, 240 bp, Acinetobacter baumannii
atgacaggtttattcattttcttggggattttcgttgtactgattgcttggggcatccacattcgcaataacattgtgcgttatttcaatgcgaccaaacgcgcttgggctgaggttgccaatttcgaacgccagaaagtaaaaacacttgaagcactagaaaccacactcaatcaatatactcaaacaagtaactgctttacgtcagcaaattctaagtttgaatgtcgatcatactga

SEQ ID NO: 58557 - DNA, 372 bp, Acinetobacter baumannii
atgcacgcttatacggttgagcctttatatgttccatgtgatcaggaaatgatcgcagctgacttttatattccaaaaacaaataataaatctgcggtaattatcatggcacatggttttgccggattgcgtcaattcaaactcattcaatatgcccagcgttttgctcaagctggctatgcggttattttatttgattaccgatattggggtggaagtacaggtaagccccgagagatgatttctatcaactatcaactatcaactatcaactatcaactatcaactatcaactatcaactatcaactatcaactatcaactatcaactagaagactggaagaccatgatccaatatgcttctacgtgtaa

SEQ ID NO: 58558 - DNA, 180 bp, Acinetobacter baumannii
atgctcacaaaagaaattgttctttctgatcaagaactaaaaattgttcaggaagtacagaagcaactgaatctgaattcagttgaagaaacgatggaatatctggccagagaacgtattcagcagaaattacttaatctggcaggtgatgaaattaaacgaaaacggcatttcttttaa

SEQ ID NO: 58559 - DNA, 246 bp, Acinetobacter baumannii
atgtctatcaaaccacgaaaaatcaaaaaacaacttcgggataatcgcttcagtattaatttaactaacgatgaaaccgacttgctaacagctgcctcaaatctaacaggtgtggaaattagcgttcttattcgtcaaatggttatgaaacaagcaattcatactttagttgatgatccagaagatgattttaatttgcagagattcataagtgaaggtgcacaagaacagctttcaaggagctga

SEQ ID NO: 58560 - DNA, 201 bp, Acinetobacter baumannii
atgagtacaaatatttcacctctaaatcgcccccggtctaaaaagatcaccggtggacgtgttcggtgcatcgtttatctaactaaagaagaagttcaagaaattgacaaaaatgctgaagaggcaggaatgagccgttcaagcattatttcccaaaactactatttaggtaaaaagcagacatcaactaaagaggactaa

SEQ ID NO: 58561 - DNA, 354 bp, Acinetobacter baumannii
atgcctaatctcgacccaaatattagtctagaaattggaaagcgttttaatgaagagttagatcggaaaaatttaaaagccaaaacgctatctagagagattggagcaagcccaaacactttaggtgtttatgtacgtggcagtattcctgatcaatgggtctatctacataatttgcataaacaaggggtagatattcgttatgtgctgcttggaatagatccagactttagtggtcttacaagtgaagaaagtttgttattaaaagcatatagacagcttagccctgaagctcaggaagctttactacgtttaagttctgtttatgcgaaagaagtcgaaaataaagaatga

SEQ ID NO: 58562 - DNA, 534 bp, Acinetobacter baumannii
atgattgaacttttatttgtttgtttgattatctggatgctttatgcttggaaaactggaaaattcagtaaagaaaatcaagaaaaaaatagagctgaatttagaaaagactggcttaaattaaagcaggattttaaaaaagcatttacgaattctaaatctcttgaagaagataaactcaaattgcagtctaaaaatgactatgaatatactttaaaaattttgggtaaatctaagactaatagttcatcggataatcaccacacattttcagaatcaatagatgaacctgattttgaaattttatattcttcatataacaatcccgcttcatataggaagattaaaataattgatttatataataaaaaatatgatggggagtattatacctatatcgatgcttactgttttagtgctgaagatgaacgtacatttcgtctagaccgtatcgaacaagtgaaagaattaagttcggggaaaatatttttttctcaacacgaaatagaaaaaatttttaagagaaattgctaa

SEQ ID NO: 58563 - DNA, 282 bp, Acinetobacter baumannii
atggctaacgtgaagacatgggaacaaacttatattgagtttttagtaagactatccaaaccaattaatcatgatttacctatgggatggtctatctggactatagattttttcatggtgatcttatcttttgtaagttctttgcaaacctaccgccattctttccacggaatggtagcagaccgaacaggggtggaaataccgtccaaaagagtacaacggccagctaaaagctgccctgcccgatctaccatagagagtctatcagatcagacattttag

SEQ ID NO: 58564 - DNA, 396 bp, Acinetobacter baumannii
atgtcagttaaagcacgagatatatttcagcatgctgagtctttttttgatcctaaaaattgtgatgaaattgtagctaggatgctgataaatagagcatattatggtatttatggttatgttttgagtgaggtagagaatcgtcttttctatgatctagacaaatcaaatcctagtgtacatcaagccctcattaacacctttaagtacaaaaagtgttcttcagtagatcaacaaaaattagttgctaaaattgcaacacagttgcgtcaggcaagattattaagatcaaatgctgattatgaattgcaatatcatataactcacaaagatactgaacaggctcttttattgggcaaacaaatttttgaaatgattgagttacttgatatttag

SEQ ID NO: 58565 - DNA, 354 bp, Acinetobacter baumannii
atgtattctggatatccgcatatcaatcaaattcagcaagagttctatttagaaatacagaaagttgcatcaaaattagagaatctgaatatctcatggaatgatgctcttcaagtttcaaacctagcatttcagcttatgtttaataacaaagtaagatcaaattctcttgttagaatcaaagcttcagatgatgaaatagtaaatattattcctttatatacagatatcgaaaccgtttttaagttaaatgatgaaatttttgacgaaattttttcgagaggtttaattgatgtatggaataaatttatgtgtatgtttgttgttgcaagtcatgatgcgatagctgcatag

SEQ ID NO: 58566 - DNA, 1548 bp, Acinetobacter baumannii
gtgtcaacacaccctaataaactcttgttttgtcttggatttgattacaaagaaaatatacatttatcaatttttcatcacactgaaattcttttaaacaaggaagatgtaacatccgaaagtaagctcgatatttataatgatctattaaagaatcaaataaatactattcgagattattatgagtatatttatatacccagagaaattgacacagagtctttcacaaagttagaaacaagtgaaattcagaaactcatgggtgaaaatttatatgatgaattagaaggtttaattacaaaaactgatattcgtgaaataaatactaaattaaatggctatatcacttctttaagtaaagacttagttgaatatacttatagaacttcaggtttaaagcaacaatatcttaaaccgaaacaagtttatgacttagttattcaagcatttttcaatataagaaaattatttaaaaaagaaggtaatgactggcttgaaattaacagtttaagttcaggagaaaaacaaaaagctcttattgacatggcggaaaaattattagaaaaaagaaataagaataatcaaaatgttatattagcaattgatgaacctgagtcatcactacatatgtcatcctgctatgatatatttgatcaactatacacaatgagtagtcactgtcaccaattacttattactacccattggtatggttttttacctattattgaaaatggtaatgcaagtattattaccagaagttcaaatgatcaacataatgctgatctaataaatttatatcattacaaagagcagattaaagagttaactactgctaatagaggagctttcccctccaatattagattaaaaagtatgaatgatttaattcaatcaattattacaagcgcgacaaataatcccccatataactggttaatatgcgaaggttcttcggagaaggtatatttaaattattatttagaagatttaataaaagaaagaaaattaagaataatacccgtaggtggcgctaaagcaattaaacaaatatacggatatctatcaacagcctatgaagatttttctagcgaagttaaaggtaaaatctttttactgtcagatactgatgcatcattagtccgatatgaagttaaaagtgacgatcaacacaagaatttacgttcaaagagattagcaaactgtaatacagcatttactacaaaactagtaaccattcatgataatcacatgacatctcctaccgagattgaggatgttttaaatgctaatttatttaaagaaacattaaaagaatttcaagatgactatgatttggaatttttaaattcagcagcatttgatccagcatattgttctcaatggtgttttacattacatccaactgaacaaataaaattaaaaggcttctttgacaaaaatggagtaaagttcaaattcgctaaaaaatatgttgaattatctaaatgccatcctgatgagcctccagtctggattaatgaaattaaaacatggtttttaagttaa

SEQ ID NO: 58567 - DNA, 459 bp, Acinetobacter baumannii
gtgaaagattcgtctgttggtaataaagtaatattggttgtttttcttatatttttcttatatttatgctatgtcgcatttggttttttttctaaaaaagaagaaaataaaattaaggtaaatatgagcaactcagatatccattttttattaaataaagatggaataatggttcatggttatgaagtaagaagcttgattgataaaaaagaaaatagtttagaatataagaaaattttgcaaaaaaatgttgaaaaaagagtagccgagattgttattggtaattataaaagcaacggaattgaagaaaagaaaccttactatatttctatttcaagagagggacttttcaatgagcctggggtagtaatgcaaacattaaatttttgtattaaagatcacaatatattttcttctgaaggtgacgaagaaagctttgtacgtgaatgcattaattag

SEQ ID NO: 58568 - DNA, 150 bp, Acinetobacter baumannii; identical to SEQ ID NO: 47629

SEQ ID NO: 58569 - DNA, 564 bp, Acinetobacter baumannii
atgaaaaaacaacgtttgatgatagctttgctggcgactctaggcatgggttcagcatttgcatcaacctcgagtgaatacaatattgccaatggcttgcttccagtagaaaaagatcaatcaatttctgtattacaaccatttcagggaaattttaggattttaggttcaaaaatttatcacaatgatgagcaagccaaattttcaccgattgattatgcggtaagttggggtttatttgctcaacctgaaatcgcgcgacatatttcagtgaaacaatatgaccgctatttaaactggaaaatagcaaaacttcctgtaccagctgagcaagcgatgcagatggtatcgaatatgcacattattcctgcaaaccctgaaatcgcccaacaaattaagcaagttaaacgtggtgatttggtttatttaaaaggtgatctggttgaaatcaaagataaagatttggtttggaagtcatctttgaccccaactgataccggcgatggtgcatgtgaactcttccgtgttcaatcaattcactgggttgaaaaacaaaatatttaa

SEQ ID NO: 58570 - DNA, 597 bp, Acinetobacter baumannii
atgacagccattacgttggcaacagctttggcacaaaaaggatataaagtagcattggcagattctgataaccagaaatcttccttacaatggttaaaacaacgtccagataacgtagctgtaattcaaagcctcgactggcgtcaagaaaaatcaattggtgatgcacctaaaaatttagactatttaattattgatgcaccgggtgccctttcaggtgatcatgctgaacaattagtcagcgaagcccatgcgattattactccacttcagccttcatttttcgatatcgacagtacacgacgttttctcaagcatttgcaggatattaagcgtattcgtaaaggtaaagtacaaattttactacttgcaaaccgagttaaaccgaacagcgccagttcaaaagatattcagcaattttttgaaaaaatcgaacatgaacctattgcatggattgccgagcgcagtgcttatggcagtttagcaatgcaaggtttaagtgtatttgataaaccacaaaagaactttattgcaattcaaagccagtggcagcctcttttaaataaactgattgaagataaatctgagtggttctaa

SEQ ID NO: 58571 - DNA, 1119 bp, Acinetobacter baumannii
gtgcatccatacgctcctactttacagcgcgttttattgtttgggctgttttttatcctgatctttttaggatttaacatcctgaagtactttattgtacctgtactttgggctgccattattgcctacatgacttggccgatttatttaagaattcagcatttttttggtgaaaaccgaaataatttaaatgctacagttatgattagcttagtcattttaattgttggcgtaccatttacatgtgctatttttattctacaacatgaaggtcgcaacctttattttgatttacagcgtcaagtcttttcaggtcatttaagcgttcccgattttattcgtaatcttccgtttattggtaaagaaatatctcgtacactcaacgaaattaacacagatcctaatagtactattcagaatattgcagcttgggtacaaagccatttaagttatgggcgtgtgttattaaatgaaattagtaaaaatatcgtcaaactttgttttgcgattttaagtcttttcttcttttatcgtgatggccacacgatcttaacccaagtgagtaaagccttggaaatggtgattgggccacgtattcatcattatctcgacacaatttcagaaaccacacgtgccgttgtgtatggtgtgggtttaactgcaattgctcaagctgtacttgctggattaagttatttcgtcgctggtgtacctaacccaatggttctcaccattgcaacgttcttattagccctaattccgtttggtactcctgtttcctacttaggcgttggactatggttgttctctcaaggtcaaaccatggaagctattggcgtcatcttatggggtgtgctgattgtaagtagttcagacaacgtgatccgtccacttgtaatctctggtgcgactcaaattccttttttattgattatgttcggtgtattgggtggtattgcaagttttggtttagttggtctatttattggccctgttattttagctgttttattagcaatttggcgagaatggcttcacgagacaattgaccctgaacccatgccaaaaacaaccatgatgtggggcttggttagggttatagtggctaccagcagctaa

SEQ ID NO: 58572 - DNA, 702 bp, Acinetobacter baumannii
atggatagtatttttcaaaaatttaatagtaaaactatagcactgttgggagtcttagaaaaaaacgagacaacgcatgaatctaacgttttatttagagggacatgcttcaaaatttatcagaattattatttaacctgttttcatgttttagatttatcaaaaaaaatggttatctcatttccaaatgaaattgatggtttttttgataccaaaaaaaagcaatcatttcaatgtattaatattagagtaatttctaaagatgtaaaaaatgatattgctctaattaaaattgttggcaattatcttcattatggatatgaaccaaaacctatcgatctcatagataatactattagcaaaattggaaacgatgtgctttatgcaggatacccattctgtcatcaagaaatgacttctttaaaatggtctaaatcaataatatcctccaaaattctgagttctaaggcaactaaacaatatatgttggactcagtagtgcatcagggtaacagtggcgggccattaatagactctaatacaggaaaaattataggcattatttctatgacatataacccgatgtttggaagtggaatcatgtttggtaaccaagcactatctacaaccactagcttaggcatggctatttccatcacccatgcaattaatttactaaaaacggcaaatatatatgattga

SEQ ID NO: 58573 - DNA, 462 bp, Acinetobacter baumannii
atgattgacttctctgtagatataaatgatttagttgctcaattagaacgcgattctactgtcagcattgaggaaaaaaaacaaattctagaggtgttaaatgatgaaactgatgatgaacagttaagtataaagatggaggtcttggctaaagattttcttggtgaagattcaactactcaagaagaatgggctttagtcagtggtggtgatagaggatcatttgttgatgagtataaaaaacaaatatacaagctaatatgtacagaatcagaagaatataaagaagatagactagctctttcatctcattctaaaagtttacttcaaattgcaatatctatagcaacaacaacatatagcgtaagcttagctgtagtttcagcaacaatttattgtattttaattcctatattaaaattaggaaaaaatgcatattgcagtatgcatcatgtttcataa

SEQ ID NO: 58574 - DNA, 813 bp, Acinetobacter baumannii
atgaaaaaattaaagtttgctgtactaccactatctcttttatttatcacgggtttaacacatgcagctacatctgatggtaagacaatcggtatatctgctggttggatgcatattatgcctcaaggcaaaaaacaaggtgttaatggaaatgttaaagatccaagcttagtaggtttaataggtacactttcagatccagatgcaggatttgaaataaaggatgcagatactggtgctatattattagactattatgttaatgataatgtatctatagaactcgttggtggtgttccacctaaaatgaaaatagaaggcaagggatcaattctaaaaagtaacaagccattaggtctagatgcgactatagatcttgagtcgttggggactgtaggagatgtggatgcttatacaccagcattactagccaaatatcaatttggttccattgattctaaattccgtccattttttggagctggagttatgtatgcccattttagtgatttcaaactaggtggtaatgtcaatcaggcgctaacaaatgctaatgatttaacaaaactcctacaaccctctgttactaaagtagatattgatgatgcttttgcacctgttgttaccttaggtgcagattacaatataactaaagattggtttgcaactgcatcagtaacttatgctcatctcaatacaaatgcaactttagatttaaatagtaatcttctagaaggagatttgctacaaggcaaaagtaaaatcgaaattaatcctattgtcacctatgtcggcattggttatcgattttaa

SEQ ID NO: 58575 - DNA, 873 bp, Acinetobacter baumannii
atgaggtacgcctttattcgggacaaccagcgtatctggtcaatccgtcgtttatgttcaactttagatgtccatcacagcggctattacgcatggttaaagcacccctgtagtaagactactaagagacgtgaacagcttttaggcctcattaaacagttttggctggaatctggtggagtttatggttatcgaaagattcactgtgatttgaaagatgttggtgaaagttgcggaattaaccgagtacagcgactcatgaaggccaatggtcttaaatcacagcgtggctatcgtaaacctagagttcatgtaggtactccagctgtcattgctgcaaatacgttggatcggcagtttaacccagctcatcccaaccatttatgggttactgatattacttatgttcgtactcatgagggatggttatatcttgcggtagtcattgatttattctcacgtcttgtagttggctggtcgatgaaatcgagaatgactacagatctggttttagatgcattattaatggcgctatggcggagaaagccacagaataaagttctgattcactctgatcagggtagccaatacactagccatgaatggcaagcattccttaaacaacataatttggaatgcagtatgagtcgtagaggaaactgtcatgataatgctgttgctgagagtttctttcagttgttaaaacgagagaggattaagaaaaaaatatatacatcaagagctaatgcaaggtctgatatttttgaatatattgagatgttctataattcaaaacgtaggcatggttccaatggtcagcgttctccattagattatgaaaaggtccatcaaaagatggttatgtgtgtctag

SEQ ID NO: 58576 - DNA, 279 bp, Acinetobacter baumannii
atgagcagtaaacgataccctgaagaattcaaaattgaagcagtaaagcaagtgactgagaaaggtcatagtgtggctgacgttgctttacgtttaggtacaaccacgcatagcctgtatgcttggattaagcgttatgatccagagcagcccaatatcacagaatttaatgatccaagtgtagaactagcaaagctaaaaaaagaactgcaacgagtgaccgaagaaagggatattctaaaaaaggccgcggtgtacttcgcaagccagtccaaatga

SEQ ID NO: 58577 - DNA, 903 bp, Acinetobacter baumannii
atgtttggtattttttcttctaaaaagcagaactccttaaagaaccctgtttacttagaaaaattcataaataatgcctatttagaattaagtaacagtattaaagcacccaatgagctttatctttttttaattgaggaactttgtggagcatcacaagggaacaatgatggaaaacaactagtgggtttttcacgatttcatgaaattgaatatagggatgcactaaataaagaatccgcaatggacttacctaatagcccactatcaatattaaataatagtgtcagcccccagttgattaaagagttaggaatagatgaggctgtaaaaataagatgtacgcttataaaaaggttaatagaggcaaatcaaaacacattaaatagtagccgtttaacttttgcaaaaagcaacattcagatgggaagttcttatctttcagaaggtgaaattcaagcatggtttgatgtcattaactcaatacaaggagctagtaaaaaaactatcctagaacccgatgatttaacagaaattattactccttcaaaccatacagcacaaggaaagtactatgacatgttcaaagaccttgaggattatttaagtagcttatatgaacagccatcacatagtacttttatgcccttactttacgctctccgtatcgcttatgctggcatgtattctcaaggaatatgctcaaaagctgactttgacgctgttgatcaaggcttttttaatagagtcattctaattggccaatctatttctagagaagagcaagtctcttttcaagaagcatcattagataaagcactagagtggatcaataaatattatattgttttagacagacagacctcttcacatttagtgaatacagctaaatcaggcttgtaa

SEQ ID NO: 58578 - DNA, 387 bp, Acinetobacter baumannii
atgaaatattttaaaaatcaaaacactggcgaagtatttgcatttgaagctgatttaattgaaatgacttctgaagaagttgatctccatcttaatccgcagaaatatctttctgatgaagaaaaagagcaactccgacttgcggaatttattgcattaaatcgtcgtcagttcaagcttgcactactgcaaaaaaatttacttgaaacattggaacaagaaatttcacagattgaagacccagtacaaaaattaagaattgagattgaatataaggaatcagataagttcgaacgtacaaatgaatcagtcaattatatgtttggtcttttaaaactttctgacgatgaaatcgatgaaatgtggcgcaacgcaatgacactttaa

SEQ ID NO: 58579 - DNA, 387 bp, Acinetobacter baumannii; identical to SEQ ID NO: 55443

SEQ ID NO: 58580 - DNA, 783 bp, Acinetobacter baumannii
atgatggaaatggaaaaagcaaaaaagcgtggtcgaccagctcagttacttcagagagcagagttacatgctttcgtggattttttattagagaacaatcgacgtactgaattacagaatcaggtcattgatgcattggaggctgaagactttaattttgagatgttgtctgaagcacagaaaatattagtcaaagaagcattaaaaccttacagagagcatctgaagcttcagctgctgtttgatgagctgtctaaaaatcctagacagactgaatatgaagctaaatttatcgagttgtttcatgcataccaggacaatcaactgggtgttgctgaactgaatattctgaagatgatgtgtacccgatatctgaatttcaaagctcaaaaactgcaatatgctgatttggagctgtacttgagtcagatccagaaaaaagatgcagggaaaaagcgtaaagctgaaaacaatcgaaagtatcagctcggtggcgctgtgattgctgcttataaagaattgggtcttaatattgataccttgacaccagatcaagttagaaaagccattgtaggaaataagaggatcatcaataagatcgaaaaatctataatatttgagcagattgatatggatcttggtactttgtacttcaggtggccaatatttctgaaggtcattgataaattagcaatgattgagtatgagggtgaagtcgttcctgagtatataaaagaaatttatttagctttatcagagtgtaaggcaggaaaaaatagttaa

SEQ ID NO: 58581 - DNA, 1164 bp, Acinetobacter baumannii
atgattaattctctctatatttctaattttaaaggctttaaagaaatacagatcccagaactgggtcatttaaacctgattgtaggtaaaaataattcaggtaaaagtaccattttagaagctttaatgttgtattcatcagctggtagtgaatcaaccttacatgaaatatcaataaatcatgatgaaaagtcacgagaacgtccacgatttaatgatccacgatttaattcaaatgatgataaaacgaatgacatagatggaggatttccttatgagcatctgttttacggaagaaaattcaatggaaaaataccaatccagattggtgaaatagaaaatgaaaataagttattaactatttcttatttaaagagaaaacaagatactaatgatagtaaaaatgaaacattaaaactattacaaaaacttaatgtaatagatagcgaagttattttacctaatgcaacatctcagaatattttagaggtcaaaaaaggtagaaccaaacatattattccactagatgagcttatttatagacgattaaatcgttatgtagaatctgaagaaaagcaaagaacaaattttcaatatgttccaacgaagactacatctatggatgacttaggtgtcttatgggataaagcaactttaacaccatatgaaaaatatactattaatgccttaaggcttattgaacctcatattgaggatttaaggttcatcataaaagatgaaagatctaatgagcgaacagctatcgtaaagttgtttgatgaggaggttagatttcctattcgtagtatgggcgatggtattgttcgaattttacaattaattttgaatatgtatgctgctaaagatggtttttatctaatagatgaatttgataatggcttacattatagtgttcaaaagtcactatggcagatgattttttctttagcaaaacagttaaatattcaggtttttgcaacaacccatagttgggattgtattcagagttttacagaagttgccatagaaaatatagatatgaatggaactttactgaaaattgggaaaagtaagctatctaagaataaaggtaatccgattgttactattttcaatgaagaaaaacttcacgccattactcaggaaatggtggaagtaagatga

SEQ ID NO: 58582 - DNA, 690 bp, Acinetobacter baumannii
atgaaaaagcatattccaaacgttttaattgttgaaggaagtaatgataaaactttttttgagaatctttgtaaagcatataatttgaacgtacatgtgaaagttagtaaccctttagatttttcttttagtggggcatttaactctaagcgtggtgtgatagatagcttagaccacttattaccttttttggaagatgcggattctgctattcaaaaaatagcagttattcttgatgctgatataactggtgaaaatagaggtggttttaaagaaactatagctcaaattaaagaaaaaacttcaaaatttggttataaagaagtacataaatatattaataatggcgtagaaattccacactctgataaaggaatgaatccattaggtgtttggattatgcctaataacaaagctgatggaacaattgaagattggataaaaagtaagatattggcttctgaaactgatttatttaatcatgcatgtcatacagttaaagatttaactaacaaaaaatttagtcaaaactctattgttaaagcagaaatagcaacatggttagcttggcaaaatcaacctggtcggacaatagcttatgcattaaaggaaggagaggaattattagatattaatcatgaaagttttaaagaacttatttcttggctcaaagccttttttaatgaatga

SEQ ID NO: 58583 - DNA, 264 bp, Acinetobacter baumannii; identical to SEQ ID NO: 47503

SEQ ID NO: 58584 - DNA, 387 bp, Acinetobacter baumannii
atgatcaatgtaggaggatggcgtaaacagcgccaggaactgcaattaattaattggtttggtgatattcctaaatacataattactcttgatgcccgagtatgtcaggtcatgagtgatactgacttttgtgccttggttgagcacgagctttatcacataggacataagaaaaataaagattctggcgagtttgaatatacatctgtaggcgaacctagattgtatttacgtggacatgatgtcgaagagttccatggtgttgttcaacgttatggcgcatcagaagaagttcagaaaatggttaatcttgcgaatgaaggtccaactatatctagagccaacattgctcatgcatgtggtacatgtttgttgaaactagcttag

SEQ ID NO: 58585 - DNA, 522 bp, Acinetobacter baumannii
atggcaaaactaactgatcctatgaaaatctttatagttcagtctcttgcatgctttgaatcaccccagcaagtagcagacgctgtaaagaatagatttaacattgaaattgatcgcatgcaatgcgctgggtatgatccaacgaaagtgacaggcgagaaaatggcaaagaagcttaaagagcttttttataaaacaagagaagagtttaaatccaatatctatgacatacctttagctaataaagctgtccgcctcaatgagcttcaaaaaatgtatgaagactggggtaaaaacaaaatcatgaagcaaggcatcatcaaacagataagagatgaaatgcatggtcatgatttacaactactagatcttgaattgaagaaattagaaattcagcgattgagagatggcgaggatggtgctggtgatgatccaacacctgtaaatgtcactattcatgttgtagatgcgagtaaaaaagatgccgaacatcaatccgacgctgaatgtgcctcaggctaa

SEQ ID NO: 58586 - DNA, 369 bp, Acinetobacter baumannii
atggggtggaagggagtaaggccgagcagctttagttttgaagttgagaaacaggcagatgagcatgtaaaaaaaattaccatggatacagtgcaatcacttgttgtttctagtcctgttgatacaggcgcttatcgggcatcgcatattgtttctgttggatctggcgattacggtgtgcgggaaccctctacaaatgcggtgcaagatgccgcgattcaagctgttaaatttaagctgggtagtttgatctatattcaaaacaaccagccatatgctgagcgtttagaaaacggttggtccgatcaagcaccgcagggcatttatagcacaacgtttacttacattactcaaaagtacggtggctaa

SEQ ID NO: 58587 - DNA, 387 bp, Acinetobacter baumannii
atgaacagtactcgaaccgttgccgtcagattagacaatcaagtcgcacaagaatatgagcgtttggctcagttgaagggcgataaactcggaacttatttacgggatttactgaccagtaatttacaaatggccagtattgaacggcaggtcagtcggattgaaacattggtgaatgattttgaaaagcaaattaattattccctagataagtttactgaagccaattatttaaatgaaaaattctttgaagactttggacatatgtacatgtttcaaatggggatgttgatgcatctaagagtagatcgagaagacatccgaggaatgcaaataaagggaaatgcatatgcccaaaagaactattttgcggggaaaaagccgtga

SEQ ID NO: 58588 - DNA, 171 bp, Acinetobacter baumannii
gtgagcaatattattcaactttctaaaccgtgtgctttctgtgattcaatggaaaacgtacagctttttgcagggctgatgctttgtgggaattgtcaggaaaatatccggattactaatcctggcatgtttgaggccaatgatcagattgaacaaaaagcccaggattaa

SEQ ID NO: 58589 - DNA, 603 bp, Acinetobacter baumannii
atgaaaaagttaataggtttcacagctatagctattatttgtacaagttctttagcagaaattcctgtaaaaaataatagtattccttttaataagcttcctatagaaatcaaagaagtagtccaaaatcattatattgaagcatgtgaaggcatagctgaagatgaagagatggcgatcaagaatcctaaaatcactttcgataaaggttttctagtaaatgtagattttaataatgatggcttaaaagactacattatccgatcttcagaagttacctgtgaaggtgcttactcaatgttcactggcaacagtgatggttttatagatatctactttcaaaataaagcaggtaaatatgatcatgtacttaactattggttaggacgtgaaggattagaacttgaaaaaagaaaagatggctatcgttttatatctgaatataacgacagttatctaacatgggataaatctataaataagtttatttcatattatggccctgaaaaaagaaaagatattttagatattaatgatgagaactcgacaactagccaaacctctacagagaaaggtgaagttctaagacaagcttttcaataa

SEQ ID NO: 58590 - DNA, 225 bp, Acinetobacter baumannii
atgaaaaaaattattatcggggttttaactgcatcaacacttttaatttctgcatgcagtacatcacaacctatgtggagaaaagcaggaataactccacacgatgtaaataatgctttagcaaaatgtcgctatgatgtaggtttggctaaagtaaaccagaatgaaaaagctgaaatgatacaagattgtatgatggctcaaggttttagatacacctattaa

SEQ ID NO: 58591 - DNA, 315 bp, Acinetobacter baumannii
atgaagcatttaggatttgtcggaaaaaatacagaacatcttggatacacacatgttgaaattattaacagttctctccgactgtccttcaacgtgccattaaagaataatcctgaggaagtctttaaaaaaatggtagaaagcaactacgatttattaatggcaacctcatcagaaatttcgtttgaattagaccatgaaataattgaaaatttagaaaaattaattaaaaaacaaggtgttgagttggatgagtttattcaggatacgttgattaaatttatcaatcaaaaccaattagatactgccaactaa

SEQ ID NO: 58592 - DNA, 192 bp, Acinetobacter baumannii
atggctattgcaagtgctgttcatagaggaagttggatttatgtatacgatgaaaaagggcgtaaattagctgcacttgcaggtgatgccttacacggatttacatcatcaactgtaagcgtcaagaaaggaagttggatttacgtctatgatgagaaagggaaaaaaatatcatcaatcccagctaaataa

SEQ ID NO: 58593 - DNA, 279 bp, Acinetobacter baumannii
atgtcattagcaaaaaaatttgaccctctattcagtaataaaatggctgaattacaacactgtgggtatgttgaattttataaatgggaacttttaacttggtttcaacgagatagaataactaatgttatctggaatgaaatttatgatcgttgggcggatatctgggaagatacaagttctagtgttgaagaaaaccaacttttatataaagacactggaaaatcatatgtaattattaataaaagccacttcacagaagtatttgaacaggaataa

SEQ ID NO: 58594 - DNA, 336 bp, Acinetobacter baumannii
atgaaaatagggatcttttggtactggaataatcaagtcattggtattgcacattcctttaatattacgaaagcagactctattggcctgattgatagcccatatacacatattgaatattggattacattgcaagaaaagtattctgaactacaaaactatgagtatgaacagatcccaagaggtcgagtaatttttgataccaacaaagaaaaatcaattatttatttggataaaacattgttatataaatcaaaaattaataaagtctatgatttttttaatttaaatcctgaacaatcggtgctaaaaaaagactcacactatcaaatttga

SEQ ID NO: 58595 - DNA, 192 bp, Acinetobacter baumannii
atggtaagcgatatgagaaaacgtcttaaagattataatattgaacaagtatctagtcgtgaaaaggtttctggacaagttttacctatacagtttagtaatgatgaagcaactaaacgagttgttatgcatagtgctagacgagtgatccagcaacataaagcagaaatacaaaagttagcttataaatga

SEQ ID NO: 58596 - DNA, 561 bp, Acinetobacter baumannii
atgagtaatcttaagaaagttattttaatccaaacagatattacaacattcgctgtacaggctatcgttaattcagcgaataagtctttgcttggtggcagtgggcttgattatatcattcataaaaaagcaggacctttgatgaagactgaatgtattcaacttcatcaagaaaaaggcgggtgttcaactggacaagcagaagttactactgctggaaacctgcctgcccaatatcttattcatgctgttgggccaagatggttagatggtgagcgtaatgagccacaattgctttgtgatgcttatagtaatgcgattatgaaagctaaccatgttggtgtaaaaactatttcttttccaaacatcagtacaggtgtttatggttttcctcgccaactggcagccgaaattgcaattggtaccatactttcaacacttccccaatatgactgtgttgaagaagtattttttgtatgccgagatgatgaaaactatttaatttataaggagatactttctaacattaacgacccaaaaataaaaatacagattgaataa

SEQ ID NO: 58597 - DNA, 516 bp, Acinetobacter baumannii
atgactgaaaaagaacatattaatcaatatattaagagcacgtgtgatttaatcattcaacatgtaaaaaacattatcactcttcaagaaaacattaataaaccatggggatatagctccagattaatggagcatttatttcatccagaaaatgaactgctttttaaaggatactcaaagaatatttttaataataaatcagcaatggctattaagccatggaaagaacatattgttcccatggcttatgtctttaacaacttatgggtattaattgaaagcaatgaattatcagatgctgaactctccaaaattctacaaagaaatcttggtgtagcccatatttcctatgaagaacagaaaaagttagatactaaattttcaggattaaaaacaaatatgcctaatggatggtgtttgaaaacaggtgatcctatagatcgtttaaaagcagttggtattgaattagttgatgaaaatggggttgaaattcaatctttaattacccctatttaa

SEQ ID NO: 58598 - DNA, 228 bp, Acinetobacter baumannii; identical to SEQ ID NO: 54609

SEQ ID NO: 58599 - DNA, 681 bp, Acinetobacter baumannii
  misc_feature (656)..(665): n is a, c, g, or t
atggctggtgaaaagtcaaccatcatttacacactgactgacgaggcgccattattggcgacttattcgctactgccgatcattgagacctttactaagccagctggtatcgagattgttaaaagtgacatctctgtagctgcacgtgtgctcgcagaattcgctgactacctaagtgaagagcaaaaggtatccgacaaccttgctgagctaggtcgtcttacacaagatccagatactaacattatcaaactcccaaatattagtgcctctgttgcgcaattgacagcatgtattaaagaacttcaatctaaaggttatgcaattcctgactatccggaaaacccagcgactgaagaagaaaaaacaatcaaagctcgttatggcaaatgcctaggttcagcagtaaaccctgttcttcgtgaaggtaactctgaccgtcgtgctcctgctgccgttaaaaattacgctaagaaacaccctcactcaatgagcgagtggaaacaatggtcgcaaactcacgtttcacacatggaagaaggtgacttctaccacggtgaaaagtcaatgacacttgaccgtccacgcaatgtaaaaatggaacttatcacaaacagtggtaagagcattgttcttaagccaaaagttgcgcttcnnnnnnnnnngactcaatgttcatga

SEQ ID NO: 58600 - DNA, 273 bp, Acinetobacter baumannii; identical to SEQ ID NO: 54601

SEQ ID NO: 58601 - DNA, 498 bp, Acinetobacter baumannii
atgaatcaaacatcaaattattacaatcaacatgctcaagcattttttgaaaatacctatcaggttgaaatggaaagtctatacgcaccatttctaagatatttgccggaacaggcattgatcctggatttgggctgtggctcggggcgggacactttggcatttaagaaaaaaggctatcaagttgaggcaattgattattctaccgagctggttgaaaaggcgagagagctgacaggcatcgaggtacgtcagcaaagtttttatgagctgaatgaagtagctaagtataatgggatttgggcttgtgcttctcttttgcactgtgaaagagatcgcctgactgaagtgctggcgcgcatatttaaagcattaaagccaaatggtgtgtgttatatgtcttttaaatatggcgatacagaccgtgagaaagaagggcgcagctttactgacttgaatgagcagcaagcttacgacttactcaaacaaatagattag

SEQ ID NO: 58602 - DNA, 522 bp, Acinetobacter baumannii
atgcctgatggccaaacgcaagtcaagctttatgggaatgtccgtgtagatgcaacctatgactttaaagggtcaaatggcagcatttcaaatggtgctaactaccctttaaataaagatgacccaagacagaactcattaaatgtatctgcagcgactacacgcattgggttagatcttactcgacctacacaatacggcgatttaacaggcaaaattgaagccgattttatgggaggcaatggcgataatggcagtggaactttccgtgtacgccatgcctatatgtctttaggcaaatggttagctggtcaaaccacttcacctttcgtcaatacagatacttctccggaaacactagactttaccggtgcagtaggtacaggaaccacacgtactgtacaggttcgctatactcaaccaattaatgctcaacaaaaaatattagttgccttagaaggtggtgatgttgaaaaagtgagtaatgctgctggaggaagcctttattatctgcggttttga

SEQ ID NO: 58603 - DNA, 1206 bp, Acinetobacter baumannii
atgaatttacaaaatcccaaaaaattcaaaatgatgattgatcaggcacatgatgttgcgatcaatgttttacgccctatttcccgtaaatacgataaagcagaacatgcttatccgaaagaacttgatatgctcgcttcactcattgatggcatgaatgaaggcggtgaaggaattaatgcaggggctgccggtgcaggaaaacgtggtgaaactgataatgaaggaatccgtaatggaaccaacatgtcaacagcgttaggcatcattgaaatgtgttatggcgatacgggtttattgctcagcatgccacgtcaaggtttaggaaattctgcaattgccgcggtcgcaaatgatgagcaactagaacgttttaaaggtacttgggcggctatggccattaccgagccgggttgtggttctgattctgctgcgatccgtactacggcaactaaagatggcaatgactatattttaaatggtgaaaagattttcgtaacttctggtgaacgtgcggactcggtagttgtatgggctacacttgaccgaaaacttggacgtgcagcaatcaagtcattcgtagtgcctaagggtacacccggaatgaaggttgaacgacttgaacataagttaggtatcaaagcttctgatacagccgttattagttttactgactgtcgtgttccggctgaaaacttgctcggtaaccctgaaattgatgttgcaaaaggttttgccggtgtaatggaaacctttgataatacacgtccattagtcgcagcaatggcaattggctgtgccaaggcttctttagagcgtattaaagaaatttttaaagaccagttagacaccaattactctactccatatttacaaacttctaaccttgctgcacaaatttaccgaatggaagccgaatgggaagctgcacggttacttatgctgaaagccacctggatggcagacaacaaaaaaccaaactcaaaagaagcttccatcgctaaagcaaaagcaggtcgtgtaggcaatgaaatcactttgaagtgtgtcgagttagcagcaagtgttggctataacgaagatgaactacttgagaagtgggcacgtgattcaaaaattcttgatatttttgaaggtactcaacaaatccagcaacttattattgcgcgacgtgagcttggaaaatcttcaagtgaactaaaatag

SEQ ID NO: 58604 - DNA, 498 bp, Acinetobacter baumannii
atgagtgctgctttccatgcttctatggtaggaatttttggtaaaggtacaattccttatttagcaacacaagcattttacgggattagcctattcgaaattattaactatattgaacattatggcttattgcgtcagaaaaaagaaaatggccaatatgaacgtacaatgccagagcatagctggaataataacaatgtagtgaccaacttattcttatatcagttacagcgtcactcagatcatcatgcttatccaactcgtccattccaagcgttacgtcattttgatgaagcaccagagttgccaagtggctatgcaagtatgctgctaccagccatgattccttcatggtggtttaaaatgatggataagcgtgtatttgatcactacaaaggggatttaaataaagcaaatatttcaccaaaacgtcgtgcaaaaatcttcaaaaaatttggtgtagtcgataagtccctagaagctacacaggctgaataa

SEQ ID NO: 58605 - DNA, 1488 bp, Acinetobacter baumannii
ttgactctccgacaaacccggtacggttcacagtactataaagataagcaggatactgactacggaccggattactcttatttaccgacaacccctaagagtgaagatgctacaacaccaacttataaggcaattaaaggtttaaagcttagtaatccattatttaccgagcgttatgctgttaattcacagtatcaaaatcaagactttttaggccaaatactaaatgttgaagcatattatagaaatgaaaaatcacgtttcttcccatatggtttattaaataaatccgtgacttctgtaaaccagtctcaatcagaaattgaagtagctggattacgttcaactatgcaaaccgatcttaatgttgccaatcgggatatgaagataacctatggccttgattatgattgggaaaaagataagcaatttgttgacattttggcgactcaatatccttatttagtatatacgccaacaggccaacgtaaaggttatggaccaaatactgaaattcaaaatattggggcatttgttcaaagcgattatgcagttacgaataaattgaacttgcaagcaggtattcgttaccaatatattcaagcggataccgatgcttatattcctagccgagagacaacaatggttccggcaggatcaacacatgatgataagccgttatttaatttaggtgcggtttataaacttacagatgcgcagcaaatatatgctaatttttcacagggctttagtttccctgacgtacaacgtatgttgcgcgatgtttctacttataccgtttcaacagcaaatctacagccaattacagtaaatagttatgaattaggttggcgtttgaatcaggatgatggcctaaatctggggttgaccggtttttacaacacttcggataaaactgttcaattcgacaagcgtgctgcaaaggttgtagatacagatcaaagagtgtatggggcggaagcaacaattagctatccatttatggaaaattataaggtcggtggtactttaggatatacccgtggtcagtataaagacgtggcaaataagtggcatgaattaaactcatttgcagttgctccgatgaaaggaacactttttgctgaatgggataataatgaagggtatggtgttcgtgttcagatgcaagctattaaaggaacaaataaagcttataaagatgaccgtgaattagccgcatttgcaaaaactcaagatgaagctttcagaaaagctgtagagaatgacgcaaatagtgctgcgcaaatcaaaggttataccactatggatgtattagcacatttcccggcttggaaaggtcgtgtagattttggcgtctataatgtgtggaaccgtcagtatcgaacagtatttgctcagcaagcagccgtctctaatgctaatccgttgttagcaatccctgcagaaggccgtacttatggtttaagttatacttttaactattaa

SEQ ID NO: 58606 - DNA, 399 bp, Acinetobacter baumannii
atggaaatgactttagaggaagctagacttgccatagtagaccgtatggaggcttttaaaggtatttctcaagaaagaattaaatattccaatcagccaggctttacagttccaactaaaggtttgtggtgtagtttgacaattaaatgggggccaagttacacagttggtcttggtgataccccgtgtacacgtcgtactggtaatatcttaattcagtgttttgctcgacctaatacgggagaccaggaaataacaattctaggtgatgttttgcttgctcattttgaatactacagtgttcaacatctgaaatgctggagtggtcaatcgattgatgcaggtaaagatggagattttgtgcagcagaatgtgaccattggatttacagtcaattga

SEQ ID NO: 58607 - DNA, 2154 bp, Acinetobacter baumannii
atgatccacgctggcaatgccattaccgtccaaatgcttgcggacggaattgcagaattccgctttgacttacaaggtgagtcggtcaataaattcaaccgtgcaacaattgaagatttcaaagctgctatcgcggctgtaaaagctaataacgatattaaaggcttagttgttacctcgggcaaatctacattcattgttggtgcagatattaccgaatttggtcaaaactttgcacaaggcgaaaaagcgattgttgactggcttatgcctgttcacgaaatcttcaatagctttgaagatttagaccttccaaaagttgctgctattaacggcatggctttgggtggtggttttgaaatgtgtttagtttgtgactatcgcgtgatgtcagaagctgcacaagtcggtttaccagaaatcaaactcggtatttaccctggtttcggtggtagtgttcgtttaagccgtctcattggtattgataatgcagttgaatggatggcaatggctactccaaagaaaccggctgctgcacttaaagatggcgctgtagatgctgtggttgctgcggacaaattacttgacgctgctactgacctggtcaaacaagcgatttctggtcgtttaaactggaaagtaaaacgccaagaaaaacttgaagctgtaaaattgaacccacttgaacaaatgatggcgttcaacacagcaaaaggtgcggtacttgctaaagcaaatcctgctcaataccctgctccaaaattattacttgattcattacaagctggtgcaagccttgcacgtgatgaagcgttaaaagctgaggctgaaggctttgccaaagcagccgtaactcctcaagctgaagcattaattggtttattcattaatgaccaagttgttaaaaaagcatctaagcaacatgaaaagggtgctcaccctgtaaaccaagctgctgtacttggcgcgggtatcatgggtggtggtattgcttaccaagcggcaagcaaaggcactccaatcatcatgaaagatattggtaacccacaacttgcattaggtatgaaagaagcaaacaacttgttaaccaagcaagttgaacgcaagaaaatgaaacctgcgcaaatgggtgaaacacttgctcgcatccgtcctactttaagctacgaagagtttaaagaagtcgacatcgtgatcgaagcggtaactgaaaatccaaaagtaaaagaaatcgtacttgctgaaactgagaaaaatgttcgtgaaaacacgatcattgcttctaatacttctaccatttcaattacacgtttagcaaaagcattacaacgtcctgaaaacttcgttggtatgcacttcttcaacccagttcacatgatgccacttgttgaagttattcgtggtgaaaaaacttctgaagaagcaattgcaactacggtcgtgcttgctcaaaaaatgggtaaaacaccaatcgttgtaaatgactgcccaggattcttggttaaccgtgtattgttcccttacttcggtgcatttgaccttcttgtaaaagacggcgcagatttccagcaaatcgacaatgtaatgtctaagttcggttggccaatgggtcctgcttatctgatcgatgttgtaggtatcgatacaggtgtacatggtgctgaagtgatggctgaaggtttccctgaccgtatgaagccagactacaaaggcgcgatcgaagcaatgtacgaagcgaagcgtcttggtcaaaagaatgatgtaggtttctacaaatacgaactcgacaagaaaggcaagaaagcaaaaactgttgacccaacagcgtatgaagtaattgctccattcgtaactggcgaaaaacgcgaatttgataaccaagaaattattgaccgtatgatgcttgctctttgcaatgaaactgttcgttgcttagaagacaacattgtagcgactgcgtctgaggcagacatggcaatgattatgggtattggtttccctccattccgtggtggtccatgccgttacatcgaccaaacaggtgttgctgaatacgttgcactttgcgacaaatatgcgcacttaggtaaggcttatgaagcgccacaaatgttgcgcgacatggctgctaacaacaaaaaattctacggttaa

SEQ ID NO: 58608 - DNA, 1884 bp, Acinetobacter baumannii
atgggactatcattaggaattcatttaggacatcatgcttcattagcattagttcaagatggtacgcttatagcagctacacaattagaacgaataaccagaataaaaaacttcgtttgtcatggtttatcaaagagactagaaataaagaattttttagaatcttttggattttcaatcgaacaagttgatattattgtgtcttcttttcagggtactgcaagaggaggtgtaggatttcagcattcggttatagaagaggattttgatgattttgatccctattcaaataatcattacgttatttcacatcatttagctcatgcttattgtgcttcaagttatgcacctaaaaaagaaatttgtgtattagtatctgattatgctggatcagctactgaagaattagaagattatgaaatgaagttttcggaatggtataattcaataattgaatgtaaaaaaccagtcaaacttaaatctgaaaatttaagtatttataaaattaaattaggtgaatactttgatttaaaatatagagaaagccaaattcctcaccctaataacttttcaataattcaaagtgttggagccttatatgaaaatgttagtagattaatttttaataaagaggggcaacatggctccttgatggccctagcagcctataacaaacgtaaagaattaataaaaatttttgaagaagaagatggagaaatcatatatcataataattggcaacagatgctatataaattaccctcaaataataatgataaatttacattaacagatgaaactaaattttatttggcagatagttgtcaaaatgctgcagaaaatatacttttacattatgcaaagaaagcatcagaattaacaggtttaaaggatatcgcattagcaggcggctcttttcttaatattttagctaattctaaaatctataacagtagttttttcgatagtgttagtttaccaagtgcgccaaatgatgctggaatatcaattggttgtgcattttggggtgcagttaaacttaaagatcaagttaacaaagttacaacggataggcttggcatcaaatatgaactagatatagatattttaaataaagagcataaaaatttcatttcattcaaaaaaacgaatacccatgaagtagcaaaattaatattcgatgggaaaatatttgctcgttgttcaggtcgctcagagtttggcccaagagcacttggtggacgaagtatattggcctctccactattggatagtacaaaaaacaaattaaacaaaataaagaagagacagtcatggagaccagttgcacctattattctaaaagaagaaataggaaatatctttcacggtcccttaaatagctcttggatgacgttctcatataatatatctgatagtaatctaagaaaaatgccagctttagaacatccagataatacgacaagatgccaaacgctagattatgaagatgatccttggttatatgatttaataacaaaatttaaagaaatgacaggtttaggcgtattagttaacacatctttcaatggtccagatgagcctattatagaaaattataatcaagcaatagattggtatctaaaaaaaattgatgttgattatttattaatagataactacttagtcgaaagaaacaattatttcatcgaagcaataagggataataaatatagaattaataataatatttttatacttagaaaatttaatgatggatctcacaatttaaatgatgatctcattctaagcttaaatgatatttctttaataattaaagaagagcctctaaaaagattattttctgtctcttatacacatctgacgctgccgacgaaggcttag

SEQ ID NO: 58609 - DNA, 2400 bp, Acinetobacter baumannii
atgcaactgccgaaagttgacattgatcctgctctgtcacaatgtctcattgaaaatacagcaacctgtggcttatcagaaatagaatttgaacgatttcttcatccaaaatttaaatatcagcagaacactcttactgattcagatgtagaaaaatcaccatctattgtgggtcaatcttactcaaatgatgacattcaacaagcattatatgatgtgataaagattcacaaagaccttttacaattgattcgtaccacacaaactgatcaaagcatcgatgcattaatcattaaatattgcattgaaaatactaataaatttaatgagtacagtaaacgtgtcgccttatggctcatcagcctttataaaccagaattagaacaaattcagtcactggctgaacgtttaaatttttgcactagccaatttcaaaaatcgtttcagcagaataagcgtttaaaagacggttcgatttacacttattattcgcgtattgcagagccttggctgacccattctttacaatatctagatagcgaagatgatcctaatacaataatcattaatatctaccgacaaatcattacaaacacccgacttgcagctgaagccggcgagcctaactttaaaaaatccattggtcaaactgtcagtatgttgaagcgcttccagagctttcaacaaatagtttttgaagctgaacctctcgaattagagtcaatcgctgtacaaaataggcctagagcccgtattattagccctttgacttatcaagctttcatgaacaagttagataccttattttcaggtgctaatagtcaagaaaacacttataagatattaaaaatcatctatatcttagcttaccgaaccggtatgcgtattaatgaaattctgggcttacgtgtgcgggatatcgagggcttgagctgtctatccgtatggattcagccctacggctcaaaaaagaaaggaaacttacatcaacttaaaacagatagtgctgaacgcaaagtccctgtgtattgcttattaaaaaccgatgaatatcaaatatttcgtaattatgtagtcgagcaacgattactcaatcaggaaaacttatacctattccgtaattggaatgaaaatagcaagctgaacaaacatacggtgacaacaccttttagaatgattatgaacgagctttttaaaactcatgattattctttccactcatttcgacacacagcagcgaatcacctatcggttgttctcaactgtaattacgctccattggtcaaaaatctgacggattatacagaagaagaatatcaatctattcgagcagaattactccgtcatacgcatggtcaaaatcattggtttatgattgcccatttactgggtcacattgaccctacagaaacctttaaaagctatattcatcttagctacctgatcgctgggcataaaatactgcaatatcatccagacatcgatactcaattagcaaagaagatgatgggctacctaccttctttcaaatttttaaacacagtaaaagattctgctccattcaattttgaaaagcatgctgttcatttaagtcagcagttacttaacgatcaaactgactggttaaaaagtaacgtagaagacattctagatgaggtttcatttaactcacagcctcatgatttttttaaatatttcgcaggaacaaaagaatctaaagtttcatttgcatggttttttaagtgcctaaatttactggaaattcatcatgatccagaccgggtatcacaagaaatgagcttacctgtcgaactggttagctattggtatgaaaatgccaaacaactgggccaactcaaatctcaaaaaagcaacccaaggttatttgatctcaacaacaaaaatcatctggataaacctttgaaacccgccatgatagataccgttgaagagcgcatagcaagaaactatttctttgaaaatattcaaaatatctttgaaaaaaagccagatgaaataaaagcggtgcttgagacatttttaagtcgtgttacggtttcgcataccggcattcattatcgatggaataaaatcgatcaattggaatcattttattccaaggtaaaagacctgtttccccatcaattttggcatttgctcggacaagacttggtacaattgctagataaaaagaaacagcctttattactgaagctggctaaatcgagcacaacagagcatcctacgactcaagaagattatgttcgtctccagctttactcaacaaaagatactaaagcactggccgcatttaaattctgtttacatttagcctgtattggcagacctcgatctcttgaacttaaagccgaaggtctaaaaataactacatgctgttaa

SEQ ID NO: 58610 - DNA, 363 bp, Acinetobacter baumannii
atgcatacaacatcagaaaaaactgcaaaacagaaaatgatattagctaaggcagttttagctgctgctgaacgacttggtcttgcacaggatcaactagccttaatactcagtatagattcggtgaaaactttaacctctcttgaattagatcccacttcaaaacaaggagaaatagccctcactttaatccgtattaccacatcactagagactctggcgggtggagatactacctggatgcagcatttcatgaagtcatcaaataaattaactaatggtattccggtagaacagattcaaaatgctcagggattgttttctgttttacaattgctagagggtcttcgagctaaactttaa

SEQ ID NO: 58611 - DNA, 807 bp, Acinetobacter baumannii
atgaccctgaatagtgatttccagaagctgtatgtcgatggattaatccatttgtatgaactagatgccagcggcttaggtgctggcatcttgcgttttcacgggcatatttcttttcaagactgggagaaaatctactcttcaattggttcaagtggtctgatcggtgccgactctggcagcattggcaaagtttttgatgctggcgatcaaaaagtatggaaccgcaatattatttggcaaggacaagtttttgagccgatggcacttgaagtatctggtcttgaaatgcgatcagatggtaaagcttcagcacccactttaagcatggcgaacaatattaacggcattcaaaatgctgtgtctgcttactgtttgcagtttaaagactttgctggggctaagcttaaagtcattacgacacttgctaaatacttagatgctgaaaacttcacagaaggcaatccaactgcttccaatgagtttaaagagcagctttggtatatcgagcaaaaaacatctgaaaacgcccagcaagtaacttttgagctttcaaacccaatcgattttgaagggttgaaaattcctgtacgtcaaattacatcattatgccattggtgcatgatggggaagtatcgcggcgaagagtgtggttacacaggtgtagcaatgttcaccgataaagatgagcctaccaatgatccagctttagatcgatgtggtgggcgcctgcggtcttgccgcttgcgatttggtgaaaataagccattgccttttggcgggttccctgcatcaagtttattgtga

SEQ ID NO: 58612 - DNA, 1176 bp, Acinetobacter baumannii
atgaccattcaaacagtaaatttaggtacggcaccaactggcgcaggtggagatacattccgctccactggcgcaaaaatgaatgaaaactttacaaacaacactcatgcagctagccgatatgtgggtaccgctgctgggaatgtgatggaagttggtgcatttggtttgggaaaatcaattcgacttggaactcaaaaattatcaacattgaggggagttggtaatgctttgtactggcagaacaatggaactaatatttcaagtgctggagattatcctgacagcaattcgcaagcaattattaatttagatcttaacgattcaactgatgcttgtgcacaattaagcataacgcataactctgatttttatattagatctgtaaactggaatgtaaatacttttcagccatggcgtaaaatcttgtcatcaaaaaatacaactgtggatgcaaatggtttcatcaagtcagcatctccggttgttaagctatttgcagataaaattgaacctaacgatgaagccgcagaacagcctctctcttttgaaaaacaaggcattggtcattacgttgttaaaggatcatctggttttgctaaagaaggctggtggatagaaattccgaccgacactcacggtaataagatttgtgcagttgaatatcaaacacttgataatggcgatcttgaaatcaaaactttcaagaaaaaaatgaatgatgaaggcgatatagttgcaaatcttgatgcaccaatcgatattccgaacaatgcaaatggtgagccgcgctggattgatattcgtttaaacagtatcaagaagacaatcgtcagaaaaattccacgtactgaaaaacaaccgcgtatggtccagcaagtaaaatatgcaccgcaattgacctatatcactaaatacgaagatttatttgatgatgaaggaaaagctgtaattgtggatggcaagaattataaaaagccagtaactcacattcaaactgatcaaaacggtacgcctattttgtcgaatcaaccagtcattaatgaaaatggtgagccagtttttgaatgggttcaagcagttgatagtgatggaaatccaatctatgacgaggtgccagtcttagacaaagatggaaatccaatctatgacgaggtgacttatgaccctgaatag

SEQ ID NO: 58613 - DNA, 759 bp, Acinetobacter baumannii
atgttagtaagaggtagttataaaattatacctatagaagatatggggggagggtctttcggttttgtacaaaaagttgaagtttataatcagaaagatcatctatgtggcttatttgcaatgaagacaatgaagtcaaatgcaagagaaatagaatcttttaggagaaggtttgttagagaagggcatctacaagctaaatgtagtcatccaaatattgttcaaatttatatttgtgatctagaaagtgtagagccttggtttgtaatggaattaggcgaaatagatgtagaaaagttaataataaatggcaaatttcccaaaaaagaaagattaaaatgtattttagatttacttttaggaatgagtcatattcatcaacaaaaacttttacatagagacattaagccgtcaaacatggtaaaagttggtgataaatataaaattgcagactttggtttagttaaagatactgtttctagtccagagacaacgccattgactgctattggtcaaggaatgggtacaccgggtttccttgcccctgaagcagtttttgggcattttagtgatcaatcagatatctatgctattggtacattcttagagtatatgtgctatttagatgaagaactaactcgaaagttagctcctattattaataagtgtagagcacatgtaccttctgacagataccaatcagttaatcaaatattgaaaatatttttaccaatttatgaggaggggatgaatgcttga

SEQ ID NO: 58614 - DNA, 744 bp, Acinetobacter baumannii
atgcttgaactaactaatgtagctgctttcacgcactctaaatcttcaaataaaataaatgaagactctattcttctcccattgaagctaaatggaggatatatttttgctattgctgatggtgttggctcatatcctggtgcaaaattggcttcagaattagcaattgaatttatttctaaaatagaaaaaatacctacagagattgaaatagatcatttattattaaaaattaaaaataaaataagtgagcttgaattaattaaccctgaatattttcaggcagcgacaactttaacagttggagtagttgagaaaagcggtgtgcatatcattcatgttggtgatagcagactttatataaaatctgaacagaaattaatttgtcatacaaaagaccatacacaacatcaaaagttattagaggctggactatatacagagcgtcagttaaaaaaaatgccaggtaaaaacatactggtgacggccttatcaaagagtattaatttagaatatcaatattcatttcatatgatgaaagatttaattgatgagcaaggaaatttaattgtaaatattatgtctgacggagcttatgaattctgggaaaaaagaccaaaattttcctcgaatactatgaataacccaacagcctttagtaccagtttgcttaaacgtatagaaaaaaatggtcctcttgatgattattctttaatttctactaaatttaaaattagtacttaa

SEQ ID NO: 58615 - DNA, 1674 bp, Acinetobacter baumannii
ttgaatccagatatttactatcctgttatctttcagttggctaccggtaagcaaaagtatgattttaaagtattttgtactttgggcggccaaaataatagtaatgtgccttgggctacacatggtacacgctctttcggtcttaattgtgaatggagtgttaccgctaatggatggggtactcaagcagaaagtagaattattgaaaaattctcgtatagctggactccacaatcaccattaataaatatcaggcaaatgactaatgcttctattgaagtcgtctttttacggggtggggcgagatatgatatttcacactataaaacgattacaccacttattaaaactgagtctttcacagctttgggacaatctattgaaccaattcaatataattcgtcacttgtaccagtaccaatttttgaagaaattgtaaaagctcaagacacagctgctgcagcatctagaacagttgctgacatacaaagagattatgtgacttcttcaaaattgaatgaggcagttgcttcatccaatgaaagattatcagccctctattcagcaaatagccaaaccattatggcgtctgctttgcaaacttttgagaaagattggattaacagaacgcctagcggctcaagaataggtatgcgtttaattgaagatcaaacatgtcggggtggttatgcattacgaatgggagataattctggcaacgatgaaatctggctaaactggttctctaccttaccaattgatgataataagatgtaccggattaaataccgctacagaagggtgtcaggtgctggtgtcgtttatgtgggggccacctgttttaatgccgcaaaatctgcatttattacagatacgaattacataaatggagatattggctcaagtcattatgtggttggaggcgctgcacctgcattgggttcttgggttactggtgttgcgtatttcaagggtaggtctgctggtgcaagtagtggtgctggaacacttactaatccaaaaacattcgcaaataaagcagctttctttactcctgtttttatcggtaattatgcagctcaagcaggcgaagtagatctagattacattgatattgaagatgcagacaatattgctgaatttgagagttttaaaactacatataccacggatgtaggagcttacgctggttcacttcaaactctcacttcagtatatgggccaaatgcaattaatcttaagtctcaagttgatttgatcaacgggatgaaaggtaaatacgtaatgggaatggataacaacggtgttttctctggtttatccatggtaagtgaacaaaataatggaactgtccaaacttctataggtttccaagctgatagaattttcttcacaacaggttcttcttctactaaatacatgccgttcatagtccaagacaatcaagtcattatgaatagtgatgtttttattaagaatctaacagctgcaaactttaaagcaaaatcactaactgctgaagtattaaatgttgatagtttgagttccatcactggtaatttcggaacatttatttcagtcgccccagatggaagtaaacaaattatttctggtggatctacacagattttctacccaaatggaaatctagcaatgaggattggtattaagtaa

SEQ ID NO: 58616 - DNA, 1779 bp, Acinetobacter baumannii
gtggcttctaaccgcggcttttctgtgcatgttttagcagcagatggctcgattgcaacttcaactcgatatgacacatatggtgaccctgcaaacgccgttgccatgagtaatgctattaatgaaatacctaaagatacttttgtgattatcactaactatgattacattgctatgaatttaaacacagttaaagctgcgttactttcattaggtgcaaatcaatttactcttgatcagattacgggaagggatgcatatatccttattggtcagaaaggaataggggctggaagaggtattgaacttcacgcaattcctgactctggtctgaatggtgcaaaacagataatggttgctgttcaggtcgttagtggcattcctctaggtttggcaaataacagtggaaacttgcaaaaagttttagaaaatcatgctcaaattcttcaacaaaaaattactcgatctgatgcaaaagaagtatttgcagaagaaataaaatccttttcagcaaaactggatactattcaatacgcagaagacaattggattttattaggagatgaaaccaaaacattaaatgtttcaacaggcacaaatcaaacttttccagtctgggaactacaatataaaattaaagaactaccaatcgctaaaggtgatcctgtagttatacgaatcaaatataatgcttcggcaggtctaattggtgcagtttgtaccatccaatttcacggcgcggtatatgggcttggtttaccattatttactgttcaagcaagtggagaattagaattaacggggatttttccaagtgatgtaaaagctacgaattttgaatttgttcctctgggtttacgatttgataatgctccttcagcgggcacattttcagtttcgaatattttcattagccgaggaaattctgctcctaatttcaaaggaggatttaaaactactcttaaacaaaatgcgaaatttgtggaagatacatttatcaatgctgatgttaacaaaggtgttattgcacaacaaattcagcaatatgatgcttcagtgccaggtggactttcaacggtattaaaaactactaaagcagcagcggatcaaacatcaaaagatttaattaatcttcgtaataatgatattactcagctccaaacaagcaccgacaatctgggttcagcattagaaaatacaactaagcttgcaatgatgattactaacggtaagttgctttacggtgatgtaaatttcaagaaaggaatgaacaacgtcggcacttataacaatctaggcaatggtacagttagtgttactcgtgaagctaaaagtgctgacaatccgacaacttcaactcatgaacttagaatcgttacaactggttcagcaagcccgaatttcggcggttttcatcaacagtttttcacacgttcaaatgctattttcatcattaaatacctgattaaattacctatcggctacaagttatatcctgcagcaaatttaatgggcgatggatcagtagataaattcattgggagcactgacgggacgggtagatttgaagtttatgttcgtatggttaaatccggtgccaccggaagattcgatacttctggattcgtacatgtagcgggtggaccagccccaacacctgaaagccctctatcctggactttagctcaaattgaatgttatgacgtaactgactatgcatctgcagatcctaatttacaagatttcgtttctacagctacagaatcatattcatcatga

SEQ ID NO: 58617 - DNA, 411 bp, Acinetobacter baumannii
gtgcttggtgatttacttaatcagattccacaagatgagcagattaactgtgtttataccgatggagcttatgacaccaagcaatgccgtcaggtcattgcagatcggcaagcgcatgcggtgattccacctagaaaaaatgcgaaaccatggaaagatacaaagagtagctcgctagagcgaaatgaattacttagaacaattaaacgtttaggcaggacactatggaaaaaatggtcaggctatcatcgtcgaagtttggttgaaactaagatgcattgcatcaaattattaggcgataaactcagtgcaaggagttttgatagccaagtgaatgagatccatgcacgtgtagcagtccttaacagatttacggaattaggtcgaccacttacccaagttacgccttaa

SEQ ID NO: 58618 - DNA, 372 bp, Acinetobacter baumannii
atgacagatttgaataagggaagagagctagaagctcaaattgaaacttttaaaaaagaagctatggagctttggtttgtgcctaatttagctgacacgtacaaaaataaggatcttttcatctattcaattatagatggtgaagtcttctttatgcgtgaacaggctcgacaattatggagcttttgtaataaagccaaagctcaggcggtgccagagggttactgtttggtaccgaaagagattccagacagcgttgttagctgtttagaaaatagtggattccattggggcgatgggactcgtgatcattacacgcctatttattctttaatggttgaagtggcaagcgaatcgggagctgagggttga

SEQ ID NO: 58619 - DNA, 579 bp, Acinetobacter baumannii
ttgcgggtatttgttaaatcactttattggtgtgaggagtttaagaatttacttaacgcaattattagtggtgaagtaggtttgacaaatatagatgacgacaacatcctaaacgttttgggaccaattgaacctaaagcagataaagaaactatctcaactcaagcaaaaaaaactgcgaataaggccaataacaaagaggaaaattggactcgttaccataatgacaaacctgttgagtctccgttagctggccatattgaaaagctaaagaaaactaaaactgcagatgcagctaatagtcttattgaggaaacgaaagactgggcttctgaacatcaaaaatcttttttaactgagttaaataaacacttagtcattattgctggtcaatcaaaagaaaatatttctattggggaaaagatcagacaagcaaaggacctgactacattagatgcccttgaaattgatatttctgaagctgatgaacgtatacaagaacgtctaatggagctggttataaaaagaagaaaagaacttgaggttgaaggtaactttttattggagtcgcctcaatga

SEQ ID NO: 58620 - DNA, 201 bp, Acinetobacter baumannii
atgtttgttcagcatgatgaatatctaattaatacatcaaatattaacttcattaaattaaatgaaaaggttttaaaggtttatgtgtactttgggcctactggtgaaggtaatggcggaggaatgatttctctgagttgtgaagatgaagcagaatatgaagcagaatatgaagaattgattgccaagttaactaagtaa

SEQ ID NO: 58621 - DNA, 327 bp, Acinetobacter baumannii
  misc_feature (306)..(315): n is a, c, g, or t
gtgaaaatagatactgatgtcaatactggatacggcaaggataccgacaaaaatggatatgcaaatattaagtatcgtgagctaattcaaaaattaacagcaacattatcattgacgcttttgtcatttggatggggctctacagtaaacgcagcacaacaacaaatcgctttagtaggaacctggacatctatcccagatgcaccgcttgtgcaaaaaccagaaaaagccagtgaaggtttgtaccagctacaagttaatgctgacgggaccttcattttcttcattagtggtatatgcaaaacnnnnnnnnnnaactcctgttaa

SEQ ID NO: 58622 - DNA, 561 bp, Acinetobacter baumannii
atgttagaacaattacagcgtctacaagcgcatattggcgttttaaaaacacgcttacatcatctagagagtgaaaattctgctctctcggaagctaaagaactggctgaaacagagcatcacgcacaagttgtgcaaaaaaatagcatcatcactaaaaaacaagaggaaattgagacattaaccgagaaactcactcagttacaaggccaatttcaacaattgaatcaagatgctaacacacttgcagagcgttacagccgcctagaaaaaagtacgaccgatttaaaaaatcgttttcaggaaattttggcagagcgtaatgaattacgcgttaccaaagaaaaacttcagtcacagcaacgtcaaactcaacaagagttacacgacttgcagcaagatcgtgaccgtttgttacaaaaaaatgaacttgccaaagcaaaagttgaagccatcattcaacgtttagcaattttaggtactgctcaagatcaacatgcgcaagaaattcagcaacttgctcatccaaatgctgaagctggtgaggagacacaatcatga

SEQ ID NO: 58623 - DNA, 273 bp, Acinetobacter baumannii
atgatgacaagtttattatgctcaacacgaggggcactacgacgcatatcattgaatttttcattgagaagctcagctgcacgttcaagctcttctcttttatcagaagtcgttgcaagcctaaaagtttgttcaatcagccgaagctctaccatgacttgttcactcatgattgtgtctcctcaccagcttcagcatttggatgagcaagttgctgaatttcttgcgcatgttgatcttgagcagtacctaaaattgctaaacgttgaatga

SEQ ID NO: 58624 - DNA, 249 bp, Acinetobacter baumannii
atgactaaatttttaactgtaatatttataagcctagtgtttatagggtgttcttcatctaatgatgcaattaatgcattaaaagcaaatggatttacggacattcaaactgatggtcatgctttttttgcttgtagtaaagacgatacattttccacaaaatttacagctaaaaataaagatggccagaaagttaaaggtgctgtttgcagtggttggctgaagggagcgactatccgttatgattaa

SEQ ID NO: 58625 - DNA, 417 bp, Acinetobacter baumannii
atgttaattcagccacaaacccaaattgataaactattgggagagttatcaaacttaccaaaaggtcgggtattgtctgaatttgcactagctagatttctaaatcaagctgataagcttatttcatttgatgctgctcacgcttggcatgtaaaaggcgtggcaaattattacgcaaatgaagtggcagaaatgattcgctgttttgatatagcaataaatttattacctacagaccgaacacttctaaataactatgccgcatgtttaatgaatcaagggcaacttgaggagttatacgagcttgtgaaatcacatatagatttttatataacagatatcgatcttatgctgaaattaagtcgactcgctttagatactgtctcttatacacatctccgagcccacgagacgtag

SEQ ID NO: 58626 - DNA, 732 bp, Acinetobacter baumannii
gtgaaggcagagcttaatgacaaagttattgtgttatctggtgattttagtgatgactataaaccaacatttgaaaacgccgtgagttgtgtagctaaacttatccgtgaagcacaatctaagatacaagaacaaaataaacgggaaaaagttagtttgccgccgcgccgtacttctgtagatcagaaaattaaagaagtacaagaacaagaacaaaagctagatgaagatttagcaaaacaaacagctcagcgtgaccaactgaaggaacaaattgaacatgctaagcaacaactgggtataagttcggaggctggtcaatccgaactgggaaagcctgaatttgatagtgcgagtccaatcaaatcagttacagcaaatatcacgcgtggtaaagctgcaatgaacaaagccattatggaaaaaaccacagtgcatagagcaatgtatcgtaatgatctaggctgggtggattttgagtatggcagtgataaacagggtattaagcatattatcaagcgccgtatggaaagtgatggcatgacatatgatgaagttgtgcatatgcttgtggatactattgtgcaaacaatcgctcaaggtagtacacaacggcgtacagaacgtggattatctacaagaataaatattgtatttaattcgcatgaagcgtcattgattaagcgagaaggtagtaatgcatggctgcttacagcttttgaagtgcattaa

SEQ ID NO: 58627 - DNA, 777 bp, Acinetobacter baumannii
atgaatgtagcaactaaatttatcaaagatcgtgaggaagaaattacagtaccatttcaaggagatctatggggacgtaagcaactaagtgaaaagttaactcatttcatttctaacttgcaatgtggggcgacaattgcattagatgcggaatggggtgcaggaaaaacttggtttgtcaaaaattggaaagctgatttagaagccaatgagtacaaggttatttatattgatgcctttatgcatgattttatggaagatccatttctaattttatcaatggaaatccttaatgctgttaaagctgataaaactgtttcggatgattttaaagaaaagttagttagtgcctatcatgcaattcttcctaatatgccgatgcttttgtggtcattaacaatgacattgatgggtgctggacattttagttcaacagttacacaaactttaaaagatattaaagacggtacgggagaatttggagaaaaagcgggtgaattactagaagaaaagctaagagaacatctcacaaatttagttgaagactataataaaagtaaaaatgaacttggtttttttaaagatgagcttacgaagcttgttaaagatctagaaaaacctttggtctttattgtggatgaacttgatcggtgtaagccggagttttcaattaaactgattgagcggattaaacacttctttgatattccaaatattgtttttattctctcaacaaataagtctcaattagaagaatctataaacagggcagagtaa

SEQ ID NO: 58628 - DNA, 189 bp, Acinetobacter baumannii
atgctaaactatgacaccactgttaaggtcaacccatattttatgaacctagctaaagtttccgagctcacaaaagtaagcccacgtatgctgcggtattatgaaaatttagggcttatacagcctcatcgagcgagtaataattatcgaagttatacgcaaaaagatattgaaaatattaagaaatga

SEQ ID NO: 58629 - DNA, 354 bp, Acinetobacter baumannii
  misc_feature (318)..(327): n is a, c, g, or t
atgtctaaaaaaagtcaggtaattttcgcctgtggcttagtcatcattgctcctcagttattagcaggaacaaattatgcacagttacagcagcaagctattgcaaatgattcagttctaaaaagtttgcagcaatctcagcaagcttatgatgtaaatcaaaaatatgctggtcggatgaacaatccaactttcaatgtcgaattggataatttgggtaattctaagctgaaagatttggatggcccaactgcattcatgggtttgtcccaagaaattccgttgaataataaactcgctttgcgtaagcaattggcnnnnnnnnnngcaattggcaggtttgcaaggaaataa

SEQ ID NO: 58630 - DNA, 918 bp, Acinetobacter baumannii; identical to SEQ ID NO: 47938

SEQ ID NO: 58631 - DNA, 600 bp, Acinetobacter baumannii
atgacgattgaggcaattgaactttcatttgacctttatggaggagatagttcagccgtagtcataaaattgcataaagcaatgcaatatcctcaaaccgctaggttattccgagtatataaaacgaaagggactcagcgtgatatacctaaatcaatgaaagagttatatgacttgctacaaagtggctacaacattggcgttggtgatcatcgttttgatgagttttgtgtgaggttgtatttcaaacgtacggacaaaggaggtcagcctttacctcaaaaacagcacagagcacgtattgaaattactttgaaaaaatcaatttttgatcatgaagttgttgaccgaaacatagcgaatttatcgcagcttattaaatttggatttaagaaaatgcaatttacaaagcttagtaagagggcaacattcaaggaaaaggatgtgtattacacacaagtaaaaccttttggaaaaggaagtacttgtgcaatgagtgttaatagacataagcgctttttactcaattctatcgctaccaatggaactttaaatgaggctaaaagattagcagtaaaagcactttctcataaattttaa

SEQ ID NO: 58632 - DNA, 756 bp, Acinetobacter baumannii
atgaagcttacagcaaaacttaaaaaagcaatcatggcccatgcggatgaatgctatccacacgagtgctgtggggtgattattgataagcaatatattccttgtcgcaatatttctaaaaactctgatcaattcgaaatccatccagaagatttagctatagcagaagaccagggcgagatattagcgtatgtgcattcacaccctgacggaactacaagagcctcagaactagacttaattcaaattgaattacatcaaaagccgtgggtaatttgttcatatccggatctggattttcaagtttatgaaccatttggttatcgcgcccctttagtggggcgtaattattttcatgggtggcaagattgctatgcactgattcgtgatttttatagtcgtgaattgggcgtagaactgatggatttcgagcgtaaagatgcatggtgggaagataaagatcatccatcactttaccttgaaaattacgaaaaagcaggcttctatgaagttgatacaccgcggtatggcgatatgcttgtttgtcgtgttgggcgtaccgagcatcctaatcatgcggttgtttggctgggtgataatggacagcttaaatcggagcaaactgagcaatgcataggttcaagcttaattctgcatcatccatataacagaaagtcagtacgcgaaatttatggccagcagtggagtgaacgtactgtaaaaatcttgaggcatagagatgttaaaaacaattaa

SEQ ID NO: 58633 - DNA, 720 bp, Acinetobacter baumannii
atgaactttaaaatattaaatcagaatattcttatgagctgcttactagccagtttctttctcactggttgtgtgagtaatcgaattattggtgaaaacacgcgaaagctatttacaaaatacgactcaggctatgaatggatcactttaacagaagatgatgtaattgcattcggtaaaccatcagtatctctcccaaatgaaccagaggacagtattgttatcgcagggaaaaaatatagttatgtcattagtaaaggcggtaacgatttcattcaattaattagtcaattaaatccacaatatattcaaataagtaatgagctagattttaatgctccagcttcgaatagtaaccatttttacggacatattagattttcttacaccccacctaatgggaaattgaacgagaaagaatcagctttattcaaacaatatggtgtaattccatgtgactatgaaaagacattagaactacataaatttgagttaaatcttagaggaactgtttatcctcctgtaaacaatcttaaaaaaataacccctttatccaagccatatcacgttagaatccaatatcttcatgataaaagcggaaaagtacccttatcaactaaggagaagctagcaagtttaccactgcttccgtttaactttcgatattattgctttacctgcgaaagtcatgggtatcatttaccagccttaatagattag

SEQ ID NO: 58634 - DNA, 456 bp, Acinetobacter baumannii; identical to SEQ ID NO: 47724

SEQ ID NO: 58635 - DNA, 336 bp, Acinetobacter baumannii
gtgaaaaagtatcttatgacttttctgcttgctttattgataactgcagttttttacataagtttaagtttgattaagtctaatcatattgaatatgcaactggtttcgtctttgggttgtcgttcacactcatttttcaaaaacaatctaagagttctaaagttgctgacttaataggcaaacaagtaaaagaatgggcagttcgtgaaagtaggcgtggggggttatttgctccagatcaaaatacgcaggatctagaaagttgcaaaaaacgttttaaagacagatcagaaactatgaaaattgattggccaaaaaatcatgagcaaccttaa

SEQ ID NO: 58636 - DNA, 567 bp, Acinetobacter baumannii
atgtctaattctctatctaaaacgacggcatacgtccaagtcattcaaaatgatcaacaagcaattaatgctgcttatcaagtggctgattttgctttagagggtcgtaatacacgtgatcaacaacgcttattaccgcatgagcaaatcgaaagctttagccaaaaaggcttaggcggaattcgtattgcaaaaaaatacggcggtgctttcgtttccaataaaacactggcacaagttttccgtattttaagtaaaggtgatgcaaatgttggtcagattccacaaaatcagattagtctgttaaacctgattgaaatcatgggtacagaacaacaaaaacaatttatcttttcagaaatattagccggtaaacgtcttgccaacggcggtcccgaacgaaatacccatgactcaaaaaccttaaaaaccacgcttactattgaaaacggcaaatattttttaaacggcgaaaagttttattcgacgggaacaagttttgcgcattggcttgcaattaaagcggttcctgtctcttatacacatctccgagcccacgagacgtag

SEQ ID NO: 58637 - DNA, 153 bp, Acinetobacter baumannii
atgcaacaaagccgttatgaaaaagcaactaaagcaactaaaaatgctactgagctgagcaagctcatgcagaagcaatacccaacgcttcaaagtgttgatagcttagagctcggcgctaaagtggtaaaaggtgaaatgcagtggccataa

SEQ ID NO: 58638 - DNA, 228 bp, Acinetobacter baumannii
gtggcaaatggatttggacatgagcaagctttttctaacattcaaacgattcataaaaatttgaatcttgagcctgttgtcggcactttaaaaagtgttgaagaaactttgaataacggcatgattgaaattgaaaaaaatgattttatgcaaggacgattaaaaaacaatggagcattctttcaaggatttgttaaaggtacttgtctaaataaatataagctttga

SEQ ID NO: 58639 - DNA, 198 bp, Acinetobacter baumannii
atggatgaaaaaatcttatgtatgccgggaattttgtgctcggctgataaacgttttagtcattgtttacgtattgcagcttgttttgagttaaatcctaaaatgttaaatgctttgatgcgtttaggagagttagcaaaaaatatgctacctgtacaaaaagctatagatcaaatccctactaattcagtaggttga

SEQ ID NO: 58640 - DNA, 519 bp, Acinetobacter baumannii
atgaaagtaattttcactttggttgtattttctgtgttcattcttttatttcataacaaaagaattgaaacgaagattgttataaatcagccaatagatcatgtttggcaaacgttcacatgcacttcatcgtatccgaaatggaatacattatttgatattgatagattccctacccatgtaggtcaacaaattagtgtagatttatacaatgaaaatagaaaagtgcaatttacaatgcagccagtaataaaaaaactagataaatatcacttagagtgggaaggtaaattctatattaatagattatttaatggtcgacatcaatttattttcactaaaattgatgctaatacaactcaattagttcaagcagaagattttaatgggctacttgtacctattttaaattacattattattcaacctacaaagttaaattttaataaaatgaatagatccttcaaaaaacatattgaaagtcagaacttaaataataatacctgtaaaatatcctag

SEQ ID NO: 58641 - DNA, 447 bp, Acinetobacter baumannii
atgaataatcaaaaaattgtaatagactacttagataaaaataatgaactctcaaaagagttaatatggggagagatatacaggaccgaccaatactttattagaagtattcctttctttgcatctaaccttgcatttgatgatcttattaaagtggaaatagaaaatgaaatactttatttttatgatttaattacaccttctaataattcaacattgagaattatatttttcaacagtgaggtcgattgtattcaggaaatattatcaactttagagactttttcatgtgattgggaggagtttgtgggaaagccatattatgcaattaatgtacctaagaaagttaattatgctctaattaaaaaatatttagatgataggaaggattttcttgattatgaggaatcatgcatgttggataagcatttaggagatttattctag

SEQ ID NO: 58642 - DNA, 900 bp, Acinetobacter baumannii
ttgaatagaaaaattcatgaaggaattagaagctatcttaataaaaaattacaatttgattctatagatggtggcgagaagaatagtttgtttaatatcttttggactaaagatcagcatgatgaagtagttgtttttataaaagaagaaactttagcagaagaacttattgaaaaaatatttttaatctgtagaaataacttagagcgtgatttacatctaatccgtgacgatattgataagttttctgaacaaatcattggtcagttagatcgtatttatcaaaaaatggtacgaagtatagatagaaacctattatcagatcatttatataatattattcaagctagagaaagttttcatgaaaagatgcaaactattaagagttggttctatatctctacagatcttggattagaatcctttcctataactcatgccgtttcagtatgtattaagcagattgaaaattgttttggaacaggtaaacctataataaattttattgataatgctgaacatttaagtggaaagtattttgaaggtctttgtaagattcttttcttgcttattcaaaatgcgataattcataatgaatttgatagcgatgatactttagagttaagcctcgaaattattgaaaattctttacacattactagttctaactttatttcatttaataaggatattgttcaatttagaaaagatttggctattgctcaaactaatttaactgttaatagagcatgccttgaaggtggatctggtttatcaaaaataaaggttattgccgaatttgattttaaaaagaaatttgatattaaattagatgttagtgatgattacttgttttctgtttacataaaagtaaaggatattaatgatttacattgttga

SEQ ID NO: 58643 - DNA, 444 bp, Acinetobacter baumannii
atgatttacattgttgaagatagtgacttaaaaatccaaaaaatagaatcttttttattggataatggttacacaaaagatcagattaatatctatcggagttatcaaagtggagttcaggcgattttaaagaatcctcctgatctagttatactagatatgtcaattcctacctttgataagagtattgattcacgcgaaggtcgtgcaagacctttgggtggctatgatgttatgaaaaaaattttatttaagcagataaatacaaaagttattgttcttacacaactagaattttttggtgaaggtgtagaaaaaattagctttgaacaacttaaaactaaatgtgcagaaaatttctcagacatttttttagattgtatttattatagtccaacagagtcatcttggtgtaaaagccttctaatgtatttaagtgattaa

SEQ ID NO: 58644 - DNA, 984 bp, Acinetobacter baumannii; identical to SEQ ID NO: 57578

SEQ ID NO: 58645 - DNA, 234 bp, Acinetobacter baumannii
atgtcaaaaacaatcctgtattgtcgacaaaatcgttgtaacaagaaatattacaaatattttttattttttaaaatcaaattattaataaaaaatgaactcaagcttcactataaattattctttagacaaattctcacgtttttcatcccacaaaaaagaaaaattacagagcttgaaattatcaaattgatcaatatatatacacatgaaaatcgtgattttactgaatag

SEQ ID NO: 58646 - DNA, 399 bp, Acinetobacter baumannii
atgaagtttaacttaaaaagaataagtggatttttaattattacatctactcttatttttactgcttgtggtggtgaaggctcagatcaaaatacaaatgatcaagctgaaagtaatttagaaaaagaagatactatttataaagtttattatcaaccttcggatatttcttcaggtatctatagtgacttttttgaaattacgccatattcaattaagaataatgagattttctttgcaaagtcacataatcagccattagaaactgaacttttaactgagcagaaagttttaaataaagggaccttacaaacgaatatcgtgaaaaggttaactcctagcagttggtcttatgagcgaatccctaatctaaaacaaaatttaaaatttaaaatttga

SEQ ID NO: 58647 - DNA, 504 bp, Acinetobacter baumannii
ttgttctataaagaatacttgaactctgcaagaaagcatcagtacacttgtgaagaaattcttagatgtattaaaaatactaccgtctctaatacccaaaaacaggttaaacagaagcaattaattttaaacctcttttatctaagtggatatataattgaatgttctgttaagtatggaatttatcacttaatttcatatgacagaaacactcctgtaaatcaattaaaacaagatggtttgacatacgaagatcatattaaaaagcataaatttgactgctacactgaagcattcaatcgtcttaaaggtggctttaaattgattgatgaaagatcaaacatagatcgagatgtagttcacatttatcgcatgtgggatgcagaagtaagatattggtatagtaatactgataggaagatcatagataagattacgctaaaaaatgttgagacattttataatttagctaccgaattaatgaaagaaattgaaggcttataa

SEQ ID NO: 58648 - DNA, 1029 bp, Acinetobacter baumannii
gtgagtgcaacggtgcaaagctatatcatttcgaatgaaatggatgctataaatcttttggagaaagttttaaataatgaagttgatacagatcatttaagtataaaggttgaaaactttactccttttaatttgcatgttacgggtgataaatttcatcaaacaattacttcatcagttatgaagggttttttggagatgcaatctgcaatctataaatcttactctttgatacgctataatgatgaggttcctaataagttaactcaagaagatagggatgaccttgaacttgaggtgaaagttttgaacggttcatcaggttttaatgtagattgggacggtatattcaataacttaattgagaaaacggtgggtaggatgactggcaaacaagtttttgtatccgttctttttcttatagcaacctttggtggcaatagtatctatcaaacccatattgaaaatcagactcaactcagaaaagctgaattggaattgaaagcaaaacaacaagaaagtaatgaacgtcttgaaactgttaaaatcctgaatcaagctaatcagagaactcttgatgtacttgaaaaagctgtaaatgctgaacctattacaaaaacaattaaaaatgacgcaaaggaagttactacaaaactagttaaaagtgtcagaactgcagataaagttgagtttcaaaatgcagtagaatttagtggcgaggcagctagagaaattactacctcctctaaatcaagttgggaaccaaaacgtattgatggattatatataattcaatatgttgattcatcaaatgctgcaaagcgaaaaatacgtttacaagatgtagaaagcggacaagtatttgttgctactttagaaaatgactcacttgatcaaaaaattcttaatgctattaagaatgctgaatggggatacactaaggtttacctaaaaataaaaactcaaactcaaaatggtaaatataaagattcaattattattggtgcttctgagccacaaaaagtttag

SEQ ID NO: 58649 - DNA, 642 bp, Acinetobacter baumannii
atggagcagatcagaccatttccaccgactgattttattgatcaagcagatgaagaagaagcaattagactaacaccagcaccagatctaaaaaaatgggttgttgctaattacttaactattggtgggcctctttataaccccgatcatgatcacatagctgagctgcttcacgataatgaagaatttttagcatttgcttgggcctcttctgcatataaaagcaagcaagctatggtgttaggccagtgcgaaaaagtcatgttcaatgttggtggatggcgtaaggccagacaagagcagcaaatgcgtgactggttcggattcgttcctgtttacttaatcacaatcgatgcaagcttttgtgaaaaggcaaacgatagcgagttctgtgctttgcttgaacatgagctttatcacatcggtgtagaacgagactcggacggtgagattatttacagtgatcatactggcttaccaaagcactatcttgcaggtcatgacgttgaagagtttattggcgtagttaaacgttatggaccaagcaaaaatgttaagcgacttattgaagtcgcaaaaaatccgccgtttgtttcgaatcttgatatttcaaaatgctgcggaaactgtgtaatcaattga

SEQ ID NO: 58650 - DNA, 1128 bp, Acinetobacter baumannii
ttggcacagaacgggatccgacatttattaaagcattatcgttgtgctttatatgttgactatcctgcagttacaccggctcgaaatcttgcggagtttaaacagcaaaaagcctacccgatgattcacttattgaatgccattgatgtgatcaattgggattcaatgatgattgataaccagaaaaagctttgcttggtggtcatccgtgaatttacttcagaacgaggcgctgatggctttagcaaatctgaggtagagcaatacagagtacttcgtttagagcctgataatgaaggaaacttcatctatacagttcaagtttacacaaaaggcgacaagggtacatggaagggcgaagataagaagtatcccactgataataacggggatttctggtcttatattccattcacttttgtgggggctattgataactctgaagagattaaaaagcctccattgctcccattggctaatcttaatttagctcattatagagatagtgcggactttcaagagtccgttttttatatgggccaaccacagttttatgctaagggagttaattgggcttggtatgacgaggctaaaaagcgtggcatttatatcggtgcgaaagttctattacctttacctgaaaacggtgatttggggattgtacaagcagatccaaacacattagcacgggaagctatgaaggataagtgggagcaaatgaaggagcttggtgctcgacttattgaaaaaggttccgcagctaaaaagactgctactgaatctaacagtgatgatgccgtgcagcattccgttctttcactttgtgttgtgaatatgaatgaagctttgtctatggctttacgttgggctgctaaatttgtagtacctaatgttgatgttctgactaaagatgaactgatgttcgaaattagtcaggaatttaacaagcaaggttatttagctgagttggctcgtcaattgtttgaagcagctttacaaggtagatcttcattcaaatcttggtgggaatacaaccaaacaggaatgtttcctaaacaaaaatatgaagaagaaatcctaaatgttgaagctgaacaggatgggactttgaatcaaggagtgaattga

SEQ ID NO: 58651 - DNA, 1701 bp, Acinetobacter baumannii; identical to SEQ ID NO: 53419

SEQ ID NO: 58652 - DNA, 636 bp, Acinetobacter baumannii
ttgaccccttggcttccagatttaccccatcaacttctaagttatggatggtttatatctacaactatactactgagtgctttgctgctagatgcaacaccatatatgaatagattagagcaaagtgcatttattaatatcgataaatggataattaatatcggtttaatctctcttagtatttttcttatttctgtcttttttattattggtgaacctaatcatatctggttcataatttatagtctgatcccgatctgtttcttattttacccagaatctttccgccctctcttctatatttttggatacaataaagaagatacccacttaacagataaacaaataatgtatagaagtattggtattatcttctttaggctattctgggtttttggctttagctatttatttataaaatcttcctcacaaccttttatgtatgctgcaggcttgattctaggaagtatattaataaccggatttagtgccaagaatctctcttctacacttaaatatttaacctacatcgccttatgtatagcaacgttatacaccatactcttccctttgatattaatttattatttatatcaaagctatcaagcaaaaaaaatcattttatctagctgctaa

SEQ ID NO: 58653 - DNA, 510 bp, Acinetobacter baumannii
atgaccgttatgttggtaaaacctcatttaaagtttaaagaaagctataacaactatattaatgaattagcagatgaagatcgccaccctttgacaatggattttgatcatagaaattttgatgcgtttttgaaaaaactgagagattatgaaaaaggggagtccctagaagaagggcatgttcctaacattacatattggttagtagaaggtaatgaaattattggcgcatctaacttgcgccttaaactcaatgagcagattgaatattgtggtggacatattggtttaggtattcgtccctctaaacgtggacagaattttggctcgaaattgttagagcttacaattcaggaagcatggaaactaggcctaacggagttacatatacattgttataaatctaatttagcttctgcaaaaaccattcaagcaaacaatggccgcctccattctgaaattactctcgatcaagtggttcaaagatatgtggtatataaaactctataa

SEQ ID NO: 58654 - DNA, 225 bp, Acinetobacter baumannii
atgtcagaatggttcatatccagtatatgctttaaaaagcgcactacatattatttagtattgagtctcgcaattaatatccctttaactgtatatgcatcagacaatatgaatagggaaaatattttaaaagctgattttgatactaattttttagtgggaaatgcacagaaaattgatattggtcgatttaagtacggcaatcctaggcagagtaaaacttga

SEQ ID NO: 58655 - DNA, 924 bp, Acinetobacter baumannii; identical to SEQ ID NO: 56984

SEQ ID NO: 58656 - DNA, 786 bp, Acinetobacter baumannii
gtggagtcggtcattaaggatgttttgtctataaatactaaagcattaatagtcattaaatctactattccagtcggttttgttgataatattagggaaaaatataactccaaaaatattatattttctcctgaattcttaagagaagggaaagctcttcatgataatttatatccctctcgtattattgtaggggagcaatctgatcgagcacaagagtttgcagaactcttatcgcatggggctattaagaaagatatatcaattttattaactaactctactgaagctgaggctataaagttatttgctaatacttatttagctatgagagtagctttctttaatgagttagatacttatgctgagctaaaaaacttgaatactaaacaaattattgaaggagtatgtttagatcctaggattggcaattattataataatccatcttttgggtatggaggttattgtttaccaaaagatactaaacaactattagctaattatattgatgttcctaatgatattattggagctattgtaaaagctaatactactagaaaagattttatagtaaaaaatattatagctaaaggtgctaaagttgtaggtgtataccgtttaattatgaaacatggctctgataattttcgttcttctgccgtgcaaaatattatagataaattgaaggagcaatgcgatattattatatcaaatcgcttggaagatgatctcttagatgttttagataaggtttatacacgagatatttttaataataattaa

SEQ ID NO: 58657 - DNA, 957 bp, Acinetobacter baumannii; identical to SEQ ID NO: 56987

SEQ ID NO: 58658 - DNA, 957 bp, Acinetobacter baumannii; identical to SEQ ID NO: 56988

SEQ ID NO: 58659 - DNA, 1113 bp, Acinetobacter baumannii
atgattgatggtgcattcttccaagacgaagtggaacaacgcaaaatcatggctgtaccgatggtcttccaggacaatgaacacattggtcaaggtcgtatgacccttgaagagattgtggcaaaacttgataccaattcagctgaaaaagacgcagcagcactcaatgccaaagatgcgtttgatgtattggtgattggtggtggacctgcaggtgcaacagctgcaatctatgcagcacgtaaaggcattaacacaggtatcgtggctgaacgctttggtggtcaggtcatggacaccatggacattgaaaacttcacttctgtgcaaaagacccaaggtcctaagtttgctgccgagatggaagcacatgttcgtgaatacgatgtggatatcatgaacctgcaacgtgtcagcaaaattaccggtgcagatcaaacagcaaatggcttggttgaagttgaacttgaaaacggtgcaaaacttgaatcgaaaactgtgatcctttcaacaggggcacgttggagagaaatgaatgtaccgggtgaagctgaataccgtacccgtggtgtagcatactgcccacactgtgatggtccattgttcaaaggcaaacgtgttgccgtgattggtggcggtaactcaggtgttgaagcggcgattgaccttgcaggtattgttgagcatgtgactctggttgagtttgacactaaacttcgtgctgaccaagtcttgcaaaacaagttaaacagcttgccaaacaccactgtgattatgaatgcattaagcacagaagtattgggtgacggttcacaagtaaccggtcttaaatataaagaccgtgcgactgatgaagagcatgtggtagagcttgcagggatctttgtacagattggtttacttccaaacactgacttcttaaaagatagtgaagttgagctaaccaaccgtggagagatcattgtcaatgaccgcaacgaaaccaatgtaaaaggtgtatttgctgcaggtgactgtaccactgtaccttacaagcagatcattattgctacaggtgaaggcgctaaagcatcactctctgcgtttgattacatcattcgttctgggcagtaa

SEQ ID NO: 58660 - DNA, 933 bp, Acinetobacter baumannii; identical to SEQ ID NO: 49388

SEQ ID NO: 58661 - DNA, 465 bp, Acinetobacter baumannii
ttggccactgtaaatgtagcggttggaattactccagagctgcaagaagttattgataaaactaaagctgagtgtgaaaaggttgttgaagaaaacgggcaacttaaacagaaaatcgaaatcttggaacaagctaatggtgatagttcagagttaatttctgaaaacacacgtttaaaagatgcagtactccaagctgacaatgctactaaagcggctgaagaaaaggtagtaagcattcaagcagagtttgatgcttttaaaaatgatgttgctgctatgcaagcgcgtattgctgaattggaagctggaaaagcggcagaaaattcagcaacagaaacggcagctaatgattttgaaaactggtcaaatgatcaattaaaagagtatttggctagtaaaaacattggttacaaaccgtctgcaacaaaagcagaactccttaaattaatcccgaaggaataa

SEQ ID NO: 58662 - DNA, 624 bp, Acinetobacter baumannii
atggagcaagccgcaccatatgtatttgccgggcagtaccgacaaatgccatcaccgccagcaggcggtttttttaagcccgacaatattcaaattgttgatgctttgcctgcagatgtagtgaagcaagtaagggcatgggactttggggctaccgaaaatgagggcgactttacagtaggtgtgcgagaagctctaggcgcagatggttttacttacattgtcgatgtaactagaggacagcttggacctgacaatgtgaataagcgcttagaacaaacagcaaaaatagatgggaaaaaagtttctgtgcgtctaccacaagatcccggacaagctggtaaatctcaagctagttcatttgtgaagcttcttgcgggttatagcgtgatagctaagccaatttcaggtgacaagctcacacgggcacaaccatttgcggcccaagttaacgtaggaaatgtacgaatgctcaaaggtgaatggaataaggattttattgatgagcttcgtcattttcctaatggcacacatgacgaccaagtggatgcagcctcagatgcatttaatgaattacatgaaggttttgaagccttttttgctgatatgggatttgctcgatga

SEQ ID NO: 58663 - DNA, 711 bp, Acinetobacter baumannii; identical to SEQ ID NO: 56977

SEQ ID NO: 58664 - DNA, 678 bp, Acinetobacter baumannii
atgccacatgatgcaccacactcggtagcaacaattgcacgcttaaacaatgaagctaaaacacatcgtgaagccaaagaagcagccgaaaaagcattaaaagcttttgaaggaattgaagacccagcggcagctaaaaaggcattacaaacaatccaaaatctcgatgataaaaagctggtggatgccggtgaagttgagaaagttaaagctgaagctatcaaagcagttgaggaaaaatatgccccgattgttgcgcaacgtgatgctctagaagcctctttacataaagaacttatcggcggtggttttgctcgttctaagtacattcaagacaacattgcagtacctgtggacatggttcaggcaacctttggtcatcacttcaaaatcgaagaaggcaaggtggttgcatatgatccgaacggcgaaaagatttattcacgtgtccgcccgggtgaacttgcaaatgttgatgaagctttagagtcattggttggtggataccagcataaagacttaattcttaaaggtggtaaaggaactggtggcggttttcaaggtgggggcaaaggtggagcacctacaggaatgaaacgcagtgaaatgtctgtttctcagaaagcagattacatcaaagaacatggcaatgatgccttcctaaaactaccgaactaa

SEQ ID NO: 58665 - DNA, 255 bp, Acinetobacter baumannii
atggatttggcggttggtgccaagaaagtatttatcactacagaccatgtgaccaagcaaggtgagccgaagattgtggctgagctgacttatccagtgacgggtaagcactgtgttgaccgtatttacactgacctgtgtgtgattgatgtgactaaagacggtttaaaggtgattgagaaggtggatgggctgagttttgaggagttacaggctttaaccggtgcaactttgattgatgcgactcaagggtaa

SEQ ID NO: 58666 - DNA, 168 bp, Acinetobacter baumannii
atgtttgttttagtgattgctttattttttgtggatatgccacgtgaaaatagcaatctgattaatacggcattgggcttcattgctggggctatgacaactgcatgtggcttttattttggtagctctgagttagagaaaaagaaaggtgaatccaatgacaactaa

SEQ ID NO: 58667 - DNA, 801 bp, Acinetobacter baumannii
atgaataacaataacaacccgattggaatgattgattctggtttaggtgggttgtctctctttaagcatattcgggaggcgctaccgaatgaagatattatctatttcgccgactcgaaatatgtcccttatggagacagagaaagcgactggattgtttcaaggaccacgcatttaatttcaaacctagttgctcagggcaaatgcaaagcgatcgtgattgcttgtaataccatgacggctgttgcggttgaaacgattagagcgcaaattaatgtgccacttattgcgattgaaccagcgataaaacccgcggtggcaatgactgtgagcaagcatattgcggttttggcaactgctaccacggtgaagggcaaaaacttaaagagtttaattgaaacgtatgcgcaagatattaaagtgtctttagtgccgtgtattggcttagccgaaaaaattgaaacgggcaaagcacataccgcggaagttaaagattatttaaaaaatattttggcgccgttggtcgaacaaaaagtcgatacgattattttgggatgcacacactatccatttgtttcagacacgattcaggaaattgtaggttgtgatattcaaattattgagccttcagaagctgtaacagcgcaattaatacggcagctcaatcaatatgatttaagttctgaaagtccaaatgagggcaatcatattatttggaccagttcagacccgttggaagttgcggacgtgactttttctttgttaggtacgcgattacccgtaaaagctatagaaaagtaa

SEQ ID NO: 58668 - DNA, 381 bp, Acinetobacter baumannii
atgaggggaaaatttgagtcttttctgtttgcagaatttttcatttactttcttcgattttttgcatatgggaagtggtgttttacttttttgcatatttatggggatatgaggtatcagaatatgattatagtaacgagtaggccgagcatatggtactgtctcattcatttcagaagttccctattctggtcaaggtccactacggtaattcaagaaagtattagttttcttaaagtttctaattacggtccatcagctccaaagcaaaaaagatatggtctagtgatggtctatcattcagtatgcttgttatgtttcttctacttagccattatcatttttcaagaaatttgggttcacattcatctactcacttaa

SEQ ID NO: 58669 - DNA, 306 bp, Acinetobacter baumannii
atggatcgtacgccacagaaaaaaatagtaaaaaagcaaaattccacctcatcagtggataaagccgaagaaaataaacaaaaaactctacaaacaaaaaacactcaaattttccccctcatgcctacatcatcttttttcctgcagctaacagcgctgctagtgagcaccactagtctggtttctttagtcgtatcgtctgattcttcatctccattagaagattcttcagtcggtttttctactactttattctcgtggctagatttctcagtgtcatcacgtgcttctactttatcctcgtga

SEQ ID NO: 58670 - DNA, 186 bp, Acinetobacter baumannii
atgaaaaaaacatggagtcagaaaaagttccgtgattctggaaaagctaaaaaaccctaccatctcccattgactcaagagactcaagcacagcttgaagaactggttaaattgaaaaacatgaataaaagtaaagttcttgaagctattatcttgaaggagtttaatgaacttaaactaaaatag

SEQ ID NO: 58671 - DNA, 918 bp, Acinetobacter baumannii
atggaatcaaaaataacttcagatttagcattacttgaacagaatattgttgaaaatttctgttactactatcagtgtgatttggtggcagagtttgggaatccattatatgcagctatgaaagaaaaaattatgcttcgaatgaaagataatgatttttcactcagtgagcaagccttaagtctgatagaggtgagtggcgatcttaaatcaattccttttaggcctactcaaatttttgaacttcttactcatatcaatagcttaagacaagagatggagaagttaaaaaagacgctccaaaaaaatcgttactcaaatattttaatggcatatgtagatgcattgggtggagatctaaacttaatatacaattcgacgcttgaaagacaggccaaagcaataaaggcagcaagggcaagtcacactaaaaatttatatccaagacgcaaaataatacttagcgttttacgtgagcaacttgctcaacgtggacataaatgggataacctgaatcaggcggtcacttcaattattcctatattactaaaagagtttgaaaaatatgatctcatttggattaagtctgaaattgacctcaagcaggctgagcttcataaacttgaacaagatgatgaactcaagtctgaaccatttttagagaatgcaataaaacgtaaaaaagcatcatctgctgtaaaagctaacaaagtaaaaaatcttcaagatgaacttaaaaaactagacagtatccttcattctaaacacccttcatcaaagctaaaggatttgaaatataatataccatataacaacacagcctatttggatgaaacaatcatccattggttgagggaacagcctgaaatattgaaggagattgtattgaatcaagcaattaccaataaaaatgggtaa

SEQ ID NO: 58672 - DNA, 1158 bp, Acinetobacter baumannii
atggctgcaccaaagttacgttttaaagagtttgatggagatttaacagaatcaaaacttgttgaattaactttatgggcttcaggtggtacaccagcaaaagatattcctgaatattggggggatgatattccattgattagtggtgcttccatgcacacaaatcagctttatgaatctgatgtaaagattactaggttaggtctacagaaaggttccaaattagcaccaaaagattcaattttaattttggtgagaggaagtatgttgtttaataaaatacctatgggaattacattaggtgatgtcgcttttaatcaggatgtaaaatgcattcgcccgaaacaggaacttgccccacaatttttgttccaatggttacatgctaaagaaaatactattcaaaataaggtaactgctacaggtattggtgctggaaaactggatactgctgacctacaaaaccttaagttatataaaccatcctcagaagaacaaaccaaaatcgcctcttttctatcgaacgtggatgaaaagattagccaactcacgcaaaaacatcagctactcagccaatataaacaaggcatgatgcaaaagctgtttagtcaggaaattcgttttaaagcggatgatggaagtgagtttggggagtgggaggaaacagagctaggaaagcattgtcaaattaagactgggaaattagatgctaatgcaatgagaccgaatggtgagtttcgcttctatacttgtgcaaaagaattttatttaatagatgaatatgcttttgatactgaagctttattgatttcagggaatggtgcgaatgttggttatatccattattacaaaggtaagtttaatgcctatcaaagaacatatgtacttgatcagtggcaacaaaatatcatttttattcaatatttcttagaacagtttttgaaagagcgtatatatggtgagaaaaaagagggaaataccccatatattgttttatcaactttaagcgagatgcctttgttattaccttgcctagaagaacaaactaaaatcgccaatttcctctctgcgattgaccaaaaaattgaagtggtggcacagcaaattgaacaagccaagacttggaaaaaaggcttgttgcagcagatgtttatatag

SEQ ID NO: 58673 - DNA, 456 bp, Acinetobacter baumannii
atgattaaattaggtcatatcaatatgaaattaactttattaaaaaaatcccttacttcatttcttttaatcagcatgtcaatgtttagtgctaatagctttggctacactcccaaagatttacaaggtatatgggcaatgcatccgcttaataatggaattgccaacttagttgagttttcaggaaatacagctactttacatcctgtgcaatgtgattttgaaacgggtctttatactgtagatagtattgaaaaatcgaactttaaaattaataagcaaaatcaaattgagttgtataatgaacagggggagttcgagcaagcattaagaattataagtatcaccgataatcaactagttttagaagaagctgctagtgacacgataatgctgaaatttcactataacaaaattaacaagctaaacccaaattgtattaaatataaaaaataa

SEQ ID NO: 58674 - DNA, 507 bp, Acinetobacter baumannii
ttgcaaacttatgatattgcttctattgaaacagaagctaataaattttcatcttatttgcttatgccaatagatgattttagaagacaaatcgatcaaacacagttaatccaatccttatctttatgtgcattaagatatggggtttctttaacagctgcaatattaaagtggttagaatttacagaagaaagcgtaattctaattaattctagagatggttttatgaattgggctgtttcgagccggtcagcaaaaaataacggagctttttttaaaacaaaaaagaatattattgagatacctgagcaatcattagctagtaataatttagttttagaagaaaaaaatggtgaaaaggtacaagctaatatttggtttccatatgctcataaagatgcttcggttatagagtataaaattacatcagaaagatttgaccatatattaactttaattttattgcctagaaatttaaaggtatggaagcccaaagatttaaattaa

SEQ ID NO: 58675 - DNA, 447 bp, Acinetobacter baumannii
atgactcatcccgactcggttttaaaattttcacttggtctaaatagtctctcgtttgatgtagacagccaacacattcaccttgagcagggcttaggttttgttaattcaaaaagtgtcagcgatggcgtgattgatgaactcgctatcgaaaagatgatttattttattgaagaaatcatcgagtcaaagcccctcagaaatttaaatataagtggggtagctgttacgtctgatgctgctatgacacacctcagtcagttattttttagtgctaaaaagcaaatcagccgtattgagcttgagcatggatttaatgattttattgagcgtttgagctactacacaaatcaaatggctccaaatcagctttatgtttttatctactttgtatttgttcgagagatgatgcatcacttaagagttgagcaaattcagatcatttaa

SEQ ID NO: 58676 - DNA, 819 bp, Acinetobacter baumannii
atgaaactttatcaagctaccctattttctttggttttatttacgagctttgcacaagctgatgtagaaaacagccaatggattaccacttggtctgcgagccctcaaaaagtctggaataaagacttcgtttttccaacactcattccagagcaagtatctaatcagactattagacaaatgagcaaaattagtttgggcggtgaagctgttcggctcgtttttaccaatcaatatggtgaacagccactttatatcgatcaaacaacgattggtttagcgaacacagcaactctaaaatctaagagcacctatcccgtttatttttctggtcaacttaaagcaagaattttacctggcaaacaactcataagtgatccaattcagttgcctgtacccgatcatactcaattggtggtgaatagctttattcaaaagcctacaacgtttaaaacatttcattgggatgccaaacaaaccagttggctgattagtggaaatcagacaacaaatttaactacgccaaccgatgccaaaacaacgacggcacggttattactgtctgcaatagaggtaaaacccaaacaaaaggctcatgtagttgcagttgttggagactcaattaccgatggggcgactgcaaccttagatgcaaatacaagatggaccgattttttagcgaaacgtttatctgtacatcgtgtggccgtgattaatagtggcatttcaggaaatcgattacttaccgatggtatgggtgatagcgttttaaaacgtttaaacagtgagatattcaatattcaggcgttaaaactttaa

SEQ ID NO: 58677 - DNA, 594 bp, Acinetobacter baumannii
atgttcaacaaaaaagaaatatttttcttaccaatcaaaatagataatgaaaaagtctatgctggtttttggaaacgtcttagtgctggcattattgatatgctagtgatgattccttttatggtaataactcattttactcaaagtatatctataatcagctcaatgataactttagttattatggcagtactgggtatcatttatacaattttctttcactatcattttggtgcaacgataggaaaaatggtcgttggtataaaaatcacacgtcctgatggtagtaaaatcagtcttacacaagctgtattaagatcctcaattgatattggcttttgtattgttatggttatatcccaattaatcgcattaaactatgcagatcctgaaatatatctaaatgcagggccaattgatcgagcaaaatatattctacttttatatccagcttggtatagtactgttcgctcagcgagtgaattatggacttggagtgagtttatcgttttactttttaataagaggaaaagagctattcatgactttattgcaggaactattgtaattaaaaaacaatattcaaaacactaa

SEQ ID NO: 58678 - DNA, 177 bp, Acinetobacter baumannii
atgccaatgaaaatgaaactattaatgacgagcgttcttagtacgagtttatttttagtcgcttgtggaggcggaagtagtgatgatggcccagctactactaatccatccggaactccaaccaataatattcaaatccagttgttaaagttgaagcctatacaagtactaacttag

SEQ ID NO: 58679 - DNA, 891 bp, Acinetobacter baumannii
atgaacttggctcgaaagcatttccaacagcatcaggccaaatccgcagctgaaacagctgcggagttcggtaccatgctaaatacaaacgcctatgagcagcaacttttgcagctcaacagtgataaaaatcgtctcaaaaatattcagtcaaagcaaaataaaatcgaactgaaacgccagttacttccaaattataagccttatgttgaaggcattttagaagtgaagcccggtgttcaagacgcagttatcactgagattttagtttgggcaattgatatcggtgattatgaatttgcactcgatattgctgaatatgttcttgaacatggcctaaaactaccagatcgttttgaacgttctgaagcatgctttattactgaagatattgctgatgaatttttaaaaactcttaaaactgatgttgcagttgatatcactgtattagagcatttagagcagttaattacagatgaatcattagctcaatcaaagcgtgatatgcctgatgaagtaaaagctaagctttacttagccttaggtaaaactgaaatgcgttttgtcactggtgaagagttagttgatttagtgcatgcgacccgtgctcgtgatttcttagaccaggcatgtaagctcgatgacaaatgtggcgggcggactgatctaaacaagatgaccaaactagccagtaaattgaatgcaatctttaataaagatgaatctcaatcatctgaacaatctacacacccagaagccacgactgttttatcaaacgaaaatccagtggttaatgaaaacgaacaaccagaagtcaccaacgttttgttaaatcaaaatggaacgccagtggtagataaccacggcagtttggtaccgacatctgaataa

SEQ ID NO: 58680 - DNA, 450 bp, Acinetobacter baumannii
atgggatttgtcgcaaatggtgccgttacaccaagcaatatcattatttccagtggcacattctttcctgatatttctcttgatgaaattcgaagtgttgttcgtatcgatggatccgtcaccgatgttcgtttaagacaagttatccgcgaagaaatcattgatgttaatcggctgcttgcaagccttgtgatcaaagccgaaaaactggcggatttagctgttaatcagattgacggtaaaccagatactgaagtgctttacctgtcagcggtcgctaatggggtggctgcaaaaataaatgaaaactatcgaaattatgacagcacaaactcaggtgtaaaaaaatctgaagtaactgaatgttcagttgaagattatcgacggaataagcaatgggcaattcagcagcttaaaggtgaaaaccacagcatagttgagttgatatga

SEQ ID NO: 58681 - DNA, 855 bp, Acinetobacter baumannii
atgattttaaagttcggatcaaaaggtaatgatgtcattacattgcagaagcagttgaagaacctaggttttaaaggtgttaagggaaaagaactctccatcgatggggattttggagcctctactgaatttgctgtaatgacattccaaaagcaaaaaaatttagtagcagatggcaaagtaggggacaaaacaagagcagctctatttgaccaagatacatctaaatttctaaaagatagtgactataaaaaagcagctgagcgtttgaaagtttcggagcttaccattcgtgtttttggtgcagttgaaggcaggggagtcggttttcttagtaatggtaaacctaaaatcctgtttgaacgtcatcgtatgtatgcatatttaagactgaaaaaaggaaccgctttcgctgacaaaatggctgcagaacgccccaatattgttaaccgtaaaacagggggatatctgggtaatgaagcggaatatgttcgtttggaacaggcaaaacaaatcgatgttgatagtgctttgatgtcgacgagttgggggcaatttcaagttatgggtgaaaactggaaacagttaggttacgcatctgtacaagaatttgttgaacaacagttcgcgagtgagtcttatcaattagaagcttttatccgattcattgaatggaaaacgggcacttttaataagaaaaaagtcactttgattgatgcgctgcgagctgaaaattgggatatcgttttcacactttataatggatcaaattataaaaaacttgggtatcaggccaagttccaaaaagaatacgatcatttagagcctatttatggtgggatcaaagcagcatga

SEQ ID NO: 58682 - DNA, 501 bp, Acinetobacter baumannii
atgaaaaaaccacaaagtttaagagcacatttgctagctgctatccctgaactatgtcacgatcctgaccgcattctcatttttgttgatgagggtgcggtgcgaagtacgatggcaaatggtttatcttttgagtatgtctatatgcttacaatgattttgacagattatgctggagatcttgctgcagtgagtatcccagttttggattgggtccgtattaaccaatctgaactaatggccaatctagataaagtcaaatcaggtattaagtttgaagctgaaattttggcaaatgataaggtcgatttggcaattcaaatgccattaactgagcgtgttatcgttaaacaaaccagtgaaggtcttacggtcgattatcctgacgagccgcaatatcataaagctgaagaatcaaaacaagttacgctggttgataaagatggtaccgagcttgcatcttggttatcaagagatccacagcaagagtattttttataa

SEQ ID NO: 58683 - DNA, 453 bp, Acinetobacter baumannii
atggctgagcttgaatttctttccgagcaccttaatgcgttattaacaacattaagcgatgctgagcgtcgtaaatttgcaatgatgattgctcgaaaagttcgtgcaagccaaagtcagaggattacacgtcaacaaaaccctgatggaagttcttatatccctagaaaaaatttaagaaataaaaagggccaaattaaaagaaaaatgttcatgaagttgaaaacagcaaaattcatgaaaatagaaaaaatccctgatggtgtgactattggttttgatcaacgagtatctaggcttgcacgaattcaccaggacggtttagtcgatacgttgaagtataacggtcggacatttaaagtcagatatgctcaacgaatcttacttggattttctgatgcagaagtagaaatcatagaaaacgatgttttaaagctattcgattcaaaataa

SEQ ID NO: 58684 - DNA, 666 bp, Acinetobacter baumannii
atgaacgcagaaaccatccgtcgtcttgaaaatacaatccgtttaggtcgtatcaagaccgtaaccccgtctagtccttttcatacagttacagtcaatttaggtgacatcgtaactaaagaattacgtctattaaatttgagagctgggaaagactcaactcatgatttaccaagtaaaggcgaagaatgcattgtacttagcccttgtggagtcatcgagcttggtgttgtcgttgtaggtttgaataacgaagactttcctacaccatcacaagatccaaatattaaattacgggtatttgaggatggtgctgtcattagctacgacaccaataatcattctttacaagcaatcttgccagccaatgcaaccgccatcttaactgcgcctggtggtttaactgttaatggagatacaaccattaatggaaatctcatcactaatggtgactcaacaacaaacggtaatgttcaaaccaacggcagtacagccatgacaggtaataacaccgttggaggaagccagttagtacaaggatcaagtcactcaagtggagactttagtacagagggtgatgtgaaagcaggtgaaatcagtctcaagctccataaaacttccggtattcaatctggtggtgatacttcaggagtaccagtgccatga

SEQ ID NO: 58685 - DNA, 345 bp, Acinetobacter baumannii
atgatgtcaagaagaacgggtttgtcaatcacagaaatagaaagcattaagcaatcgattgaagacatcgttaccacgccacttggaagcagagtaatgcgtcgggagtatggatctatcattgccgatttaattgatcagcccatgagtgatgttcttaaagtgaaactttacagcgcaatctatacgccagtgtctcgctgggaagaacggatcagtattgagagtttaaacgtcagtgatgtgtttgctggtggtatgcaacttgatttggaagctgttcatacccttactggtcaatctcttaacttaaatattccactgttaatgggatcatctctatga

SEQ ID NO: 58686 - DNA, 2247 bp, Acinetobacter baumannii
atggcagcactttatcattcacttttcacagaaaaaggcttggagctactccgagattcaattcaaaatggtacaaaactaggcatcactcatatgtcatttggagatggaggtggtgaattacctgttccagatgcatcatttactcagatggtaaatgaagtttaccgtgtacctttgaatcgtttagcaccatcaaaagcaaatgcaaactggttagaagctgatggagtgattccctcagctgtaggtggttttaatattcgtgaagttggcctgtgggctggtaccgccatggttgcttacgcaaactacccaccaacttacaaaccttctggagaccaaggtaccgctcagattaaaaccatccgcattgttcttcaaattgataatacagctaatttcgaattgaaaatcgatgccagtattgtcatggcaacaattcagtcagtagaagaagcaaaagttgaagccattaattatgcagacaataccaaggtgcattcccttgagtcattggaacaacttacattactagagccttgggaaggtcgagctgtatacgttaaatcagtaaaagcaaataaaggtattggtggaggaatatttgtatatgaaagtgagagcgaaaaaactgctgatggctatattgttattggcacttcgcctaaaggtagatgggtaaaaatatcactagcacatttgactgtagatgattttggagcagtcggaaataatgaagatgatgattcaacagctttcaatgcctatgcattaagtccttacactggttcatcaatttttcttggtgtaagacaagcgcaatatgcgatttataagcaagtaaactgtcaaggaaaaggattagtcggaggcggatttagtaaacaaactaatgatgcttatgcattgaattctattcgagttaaagatggtgactatcagaatcaaacagctcttttaaataatactgcattcattaaggtgggtgcagaagtacgggaccttcaattaaaatgcgattctactattaataaaaatattaatggcattgagataagtgcatacaatggaactgtagataatgtaaatattacaaacttctatgatcagatttatacaatcggtgcaacggtcgcgttccgtgcccagaatttcacatcaattggagcaggcaacgcaggttttcactttcttgatacaaataatgaccagagcactactgcctatttcaataattgtagttttcagtggggtaagtatccgatcctatttgataaagaggtttatggttcaagtattacaaacacaattattgaatacatggcaaaaggttttacggctaaagtttggtcgaattgcaattttgaccaaatttgggctgaacaaactttagataatagtcctcaggattggttagtaaatacgcttcaccaacaatcctttggaaatacttatggaacactctatatccgtaatccttggcttaatagagcagccacttcagatatagctggttccaataatactggaggcatttctcttagtggatctgctgtagcagttaatagtgcgactggtcacaaagtagttttaagtataagtggtttgtatactagatttgcggattggattagtggtcctgcaagaagacttttgataacaacacaacctacagcagcaggatcaggttataagactccgttatatattaatgccccaaatggtgaattgtactttggtaatcaagatgaaacctcaacactggctcaggtatttaaaagaatcattggaggaaatgcagataattcagcaccattttttggagcagatgcctggacgaaaagagtaagaaaatggcaagcctttgatcatactgtaaatcagaatggtcagtttatggcaccgatgatgctaacttatgattcttcatttacagagcagcaaaagaacgcaggctggagcataacaaaggaatcaactggaatttacattctgcaaaggacagcaactactgtagtgcctatgacgaatccgaatattaatattggtggaattgtgatgggaagtaaattaggaaatggaacttctgttaactattcaattcaatttatagaaacatatacaggaagttttactacttatactgaagctgcaggttgtaagatttttttccgtgatcaatcaggtaacttggtagatccttttagattttcagcatttttcacattagtatcaggattttaa

SEQ ID NO: 58687 - DNA, 228 bp, Acinetobacter baumannii
atgagtgaatttgtcgattcaatttatgaaacagtggtaaaaaaaattcaaaatgatattgaagaatctggtgagtcccgattatcgctgagatttagttttaatattgatgatagaaatgaattagtaaatagactgactaatgacctttataatgtaactgaaacaactgaaatagagtctggtataaaaagtgaattcttactcatcaagaaagtaacttcttaa

SEQ ID NO: 58688 - DNA, 252 bp, Acinetobacter baumannii
atgatgtgtaaatatttaaatatagtattgctaagcgtagtgttgttgggatgttcttcttctaatgatgcaattaatgcattaaaagcaaatggatttacggacattcaaactgatggtcatgctttttttgcttgtagtaaagacgatacattttccacaaaatttacagctaaaaataaagatggccagaaagttaaaggtgctgtttgcagtggttggctgaagggagcgactatccgttatgattaa

SEQ ID NO: 58689 - DNA, 978 bp, Acinetobacter baumannii
atgtttaattatataatctattatttattagagatggatatgcctaaaaacaaagaagagcgcaaatcaaaacgaaaaaaaaatattgagacatgggcaatagctttttctattatagtcattgtacttatttggataatatttccttggtgtttatcatatttaacagataagtttgaatggagtattagaaatgcgggtgacaccaattttggtacatttggtgatacttttggagcgctcaatacgctctttagtggtctagcttttgcaacacttatcatcacattatttcttcaaagaagggaattagagttacaaagaaagactgttaaggaccaacagatagaaattgagaaaagtaatgatatagctgaacaacaaattcttattacacaacagcaagcagatcttttagaaaaacagataaaagaagctcaggttcagaatttctttaatatacttttccccttacttaatagaaaaaaaacttactatgaaattgccgatgagttacctgtttttggctcatctgcttatagggattctattaagaatgaaagtacatttaaaacattacatatgggggcactaaaaatttataataattttgagaaatctcatggagatggatttcttcaaaaagatgaaatcttaaaaattttaagaaaaatgatcgttgaaattccgccttatgtgcttgcttatagttatatgaaaggcacaaaatataaagaatatttcttatatattattaattttattgaaaactttgaaggtgttgataaaaaagacaaagaagtggctatgtctatttttctatctgatttttctactagagaactatatatcatttcacttttgactattgaaaatgagattcttatggaaaaggttattgagcacaaagtttttcgttcatttatagaagcagatcgaaacggaaattcggtttttagcttattattctctgaataa

SEQ ID NO: 58690 - DNA, 906 bp, Acinetobacter baumannii
atgagaaaatactattacgatctaaataaagaaaaaattctatacgaagatacagctaataatcaaaaatgtatattttgcttgaaagatgatactgaaactagttttgggaataaacctcatgttattccctattttttaggaaataaatatttattgcactctaatgagtgtgatgaatgcaatgcatacttttctaaatctttagaggatgccttagataaatatactgcaccttttcgtaccttaaatttaataaaaaatcgcaggaataaattaactaaggtaacttcacaaaaaggtgactttatatatgcctacaatacaatcaagaaagcttttacaatttcaggagacaatatagataactatgtctttgatgatgaagaaaaagaagttttaactattgtttttgatatcaaaagacatcgccctatagacgtatacaaagcatttatgaaaatcttttatggtttacttccccgaaatgaacataaaaactttactgagcttagaaagtggataatggatcaaaatgcagacagtcttttcgtaaaaccattacgcatttttagaagttggcatcctagttttaatacaatacccctaacaatttttattatgcaccgaaaaagtaaattagaatcaaatcctaatttttttgattatagtggattaatttcatttggaaatattatttatgaaatgcctatattttcagatgacttcttaaaacatgtagcaaaattaaaattacaaggaaagtccttaaattttactatgcagttactccccaaaccctttgaagttgttaatactgaaattattgatttatcctatactgatttcttaacagagagatgtgaagtaaatttcaagtataaagatagagtccagaatgtttaa

SEQ ID NO: 58691 - DNA, 519 bp, Acinetobacter baumannii
atgcaaaacgattctaacgtacaaatcgcatcaaacaataagtttccttcagctctttcaggagaaatgtttaataacaatgttgtatttcacaagattcttcatgttccaaccttaaatgttggcttaaatgttagtgaagactttgaagaatttctgtgggctttagaaacccaaaatggtgatgatttaaaagaccaacaccctcaattagaaggttttattaataatgttttacgaaatttaagtcgagaatgggccatagatcatgcaagcaatttagtcgcagatcattctgatttggagtttcttgtaaatctggaaatagccatcccatttaatttccgctttagtgaggatggtaaatacctttctaattcactcgggcgttcatatcgttgtcagtggatccttgcaacaagtatgaaagatgcagcagaacaagctattaaacttgctgaagaattacatgctaaagaagaacaaaaagcaagaattgagaaaggcttggagggttaa

SEQ ID NO: 58692 - DNA, 246 bp, Acinetobacter baumannii
atgccacattttaaaatgaagataaaaacagaatttaatgttgttgttaccgcaagagacgaggctgtggctcttcaatttactcaaaatcaattttctaatattggtggagagccatctattcaaatatggggagaaattcacccaaatagacttgataaggaaattgaatgggatgctgaaaagtactttgatttggggaaactaaagagtatagacgaacaagacgagttgcctttcatttaa

SEQ ID NO: 58693 - DNA, 321 bp, Acinetobacter baumannii
atgtcaaaccaatttgattctgtctctataacaaaaaaagcaaatgttcactatgaagggctttctattagccatgtcattaaacttgatgacgggacaaaaaagactcttggtgtaattcttccaacagataaatatttaaccttcaagacacatgtgccagaacgtattgagataatttcaggaaaatgtcatgttcagatcggcgatgaaccagacactaaaatttactctgatggcgagtctttttgtgttcctgaaaatagttactttagaattataacagatgaagtaattgattatatctgtcatttgggttaa

SEQ ID NO: 58694 - DNA, 1272 bp, Acinetobacter baumannii
atgccaaagaaatctaaagagctatcagcactcagtgtagcaaaaattaaaacaactggtcgacactctgtaggtggtgtcgatggcttatgcttgaatgtcgaaggcaattctcgtgtttggattttacgtgctgttgttggcaaacgtctcgatagagatggaaagttaaaacctcatcgccgtgatattggtcttggtccctaccctgaagtttcattagctgaagcccgagctaaagcaactgaattaagattacaaatacgaaatggcattgatccaattgcacataagcagaaacagcttgaaaaattgcatagccaaaaacttcgtgacaaaacattcatggagtgtgcggaagttgttattgccaataaaacccgtgaactcaaaaatcaaaagcatattgggcaatggtcatccacattagaaacctatatctatccaactttaggtaatctcaccattggcacaattaccaaagttgatattgcagaagctcttaaaccaatttggatcgaaaaaaatgaaacagccaaacgtattcgtggtcgcatagaaactatttttgattatgctaaggctatgggatattttgagggtactaaccctgctgaatggaaaggtaatcttgagccaatcttaggcaacttaaaacaggaatcgcgccctcatccatccctgccttatgaacaagtcgctgagtttattcaacacctgagacagaaaaaaggaatttcgcctaaagctctagaatttgcaattttaacggcctgtcgttctggtgaaatttttggggctacatggcaggaaattgattttaagaataaaatttggatcattcctaaagaacggatgaaagcagaaaagcagcatcgtgtgccattgtccgaagaagcaatgagtttgcttgagtctattcagccatatactcaaccacaagatttcatttttccagcacctcgaaatggtgcaatgctttcagatatgtccttagccaccttgatcaaacgaatgcatgaacagaagcttaaagaaaatggcttaggctatattgaccccaaacaaaatcgggtgattacaacccatgggtttcgttccacattccgtgattggtcagccgacaaaacagactacgctagagaagtctgtgagcatgtgcttgcacataagctaccagacgaagttgaagcagcatatttacgcggagcctatctagaaaagcgaaaaggcataatgactgcttgggcaaagtactgttgccaaaattag

SEQ ID NO: 58695 - DNA, 516 bp, Acinetobacter baumannii
atgcaacaaagccttgttcaattaaaaacagcttcagggagaatgcctcaattcggcgatgaacaattcaaggatcaaacagagaatgaaatgttggctgatcttgtaaagccaatcataaaagcggtctggctgaacaaagattcaaacgatgtgattggcattctgtctaaaaatgagatcgatattgttggtgatataagtaaaagactgattttctttgtgaaaaaagaatttacagatatagatgattgggcagattctcaattatttcaatctctcagtccattttttgaaaatacgattactcacagtatttcttatggtgacgtgccatcaatgaatgctggtatagctccaatgttccaagggcagcattcaaacttttacgacatcaatcagtctggcattgctccaaggttaaatcgtttaaaggcacatctttacggtactgactattggatgcgtgtagatggggatagagctactgtgcgaattgaacacctatacggttga

SEQ ID NO: 58696 - DNA, 1077 bp, Acinetobacter baumannii
atgacaacaggaacggtagattcactggcagaacagtcaaatttgattaaagtattagccttaaatggtggaggcgtgcgggggttatttaccatcaccttgcttgctgaacttgaatcaatcattgagaaacgcgaaaaacgtgaaaatgtcaaaattggtgactattttgacttaattaccggcacatctatcggcggtattctggcacttggtttagcaagtggcaaaagtgcccgggaattaaaacaagctttcgaggataatgcacagcatatctttccgttaaagcgttttaaacaaaaaaaatggtggaatctactgcggcgttcaatctatgaaagtgagcccttgtacgaaacagttaaaaatatgattggtgattcaattaaatttgaagatctcaataaacgggtaatgatcacctcagtcaacttgtctacaggtaggccgaagttttttaaaacgccacataatccgatgttcacctttgaccgtgaaattcggcttattgatgcagcaatggcaacatcagctgccccgacctattttaaacctcattatattgaaaaattaggtcattactttgccgatggtgggttggtagcaaacaatccaagttttgttggtatccgtgaagttttaatcgatatgaaaactgatttccctaatgccgagcctaaagatgtgaaagtcttgaacatcggtacgttgagtgaagattactgcatcagtccagatacactttctaaaaaatgtggtaaaggttatttggggctatggaatatgggggagcgcatagtattaactactatgactgctaaccaacatctacagcgttttatgctattacgtgaatttaaagcacacaatattgaaaaaaattatgttgaaattgatgcaaccataccgaatgaagcagcctccgaaatcactttggataacgcaacttctagcagtttagatgcacttcgtggaatgggtaagaagttaggtgctgaacgttatactgaagatcccgaattgcggaaattcttcctaaaaccagttaaaccatttatagccgatacacaataa

SEQ ID NO: 58697 - DNA, 462 bp, Acinetobacter baumannii
atgattgataaagaacttgtgtttaaagctcaggatcgatcgttagttgtgatctccactgaggttgtcaatatattagtgtcataccgtcaattaagtgattttagccaagaaagtgccggagtgcttattggtgaacgtaggggtgttcatattgttattaggacgctatctgagcctagtcgttgggacattagaagtcgtttcatggtagatcgtgtgagtaagcatcaccaaaaggctgttgataatgctttcaaaaaaagtaatggtgaatggcagtatttaggtgagtggcacacacatccagaagatgtaccaaaaccatctgtgacggattatagcagttggtataaaaatctaaaatcgtcaaatcctctaattttgattattgcaggtcggacaaatttttgggtaggtaagaaaattaacgagaatattgaggttttaaaacagatataa

SEQ ID NO: 58698 - DNA, 3252 bp, Acinetobacter baumannii
atgagtctagacgccacccgcgaaagcattttccagaacgatatcattcagcagatgctggctcagggctggcaacttggtacgccacaaggctacaaccgtgaaaccgccttgtatgagcgggacgttttggactttgtacagcagacgcaaagccaggattggcaaaagtttcagcgcatctttccgcaagataccgaacggctttttctagaagccgtggttgcccagctgaaaaaagccgacatcaatgccactgataaacagtcacgtagctttggcactttaggtgtgctgcgtcacggagtgaaaacccgcagcgcacgatttttcctctgtcaatttaaaccagaacatgcgctgaatcccgataccttagccaattacaaaaagaacatctgccgcattgtgccagagttggtctatagcccctatgccaccgctgccgagttacaggacatgggcaaacaggccaagaaatggcgtattgacttggtattgtttattaacggctttcctgttgctactctggaactcaagtccgagtttaaacaggctgtgcagaatgccatgttgcagtacaaacgcacccgcttgccgaaagatccagaaaccaacaagcctgaacccttgctgatgtttaagcgtggcgcattggtacattttgccgtgagtcaatacgaagtctatatggcgacccaactggccggagaagatactttcttcctgccattcaataaaggcacgcatgacggtggcgcaggcaatgatgtgccagaagaccagaatcagtacgctacggcctatctgtggaacgaagttctcacaccggacaatttgctgaatatcattggacgttttgtccatctgcaaattgaagaaaaagaagactgggaaggccgcaagtacaaaaaagaactgctgatcttcccgcgttaccaccagtggaatgtggtcaccaaactgatcaatgccgccttagaggagggcactggacagaaatatctgattcagcacagtgcaggttcaggtaagtccaactcgattgcctggacagcacatcagctgtcgaccctgtacgatcaacacaatcagaaactgtttgattcggtgattgtggtcactgaccgtactattctggatgcccagttacaggacaccatctaccagtttgaacatgccgatggcgtggtcggacgcatcaataataaagaaggcgatggctccaaatcggaaaaactggccaaggcactggaaacctcacagccgattattattgtgaccatccagactttcccctttgtgctgcgtgcgattgaaaacagtaccaatctgaaacagcgacgttatgcggtgattgccgatgaagcgcattcttcacaaagcggctctacggcacgacaactcaaagaagtgttgatgctggaagagcgcgaagaggatgctgaactgtcttcggaagatattctggatgcggtggtggctgcacgtaagggcagtaataacctcagttactatgcctttaccgcgacaccgaaagacaaaaccctgcaactgtttggccgtgtacccaatcctgagctaccgccatccaagcaaaacaagccggaagccttccatgtttactccatgcgccaagccattgaagaaggctttattctggatgtgctaaaaaactataccaactataaagtggtgtataagctcaaacagaaaattgaacaagccgacaaacaggtcgatgccaaaaaagccaagatcagactgaatcagtgggtgcgcctgcatgaccacaacatttcccagaaagtgaaagtcattgttgaacattttaaaaataacgtgatgggcttattgggtgggcaggctaaagccatggtggtgaccagttcacgtaaagaagcggtgcgttacaagctcgcttttgataaatacgtgacggatcagggctataagtccattcaggctatggtcgcattctcgggtgaggttgagtttaatgacaaggataccgacagcagtggtttagtcgggcagacctttaatgaacgcaacatgaacccaggactgaaaggtcgggaaatgcgcaaggcctttgacagtgatgactatcaggtgatgctggtggctaacaagttccagaccggctttgaccaaccgaaactgtgtgccatgtacgtagacaaaaagctgggtggtgttgagtgcgtacagaccttgtctcgcctgaaccgcacctatccgggcaaagcggaatctggcacctttgtcttggatttctttaacgatcctgaagacattcttggggccttccagccttactatcaaaccgcagaactggctgatgtatcgaatccggatcagatctttgacctgtttgaaaagctgaaagctaccaagatttttctgtggacggaagtcgagcagtttgtcgatgcgttctttatcaagaacaaatccaatgctgcgattagtaatatctgcaaaccggcggttgaacgctggcagaaacgttatagtcaggccatcgaagcctataacaccacccgagatatgctggaacgctgcaagaaaaccaatgatgcggtgctgattgctaatgccgacaatgcctttaaagaagccaagctcgaaaaagacaagctggaaatctttaaaaaagacttgggcagctttacccgtttctacgagtttatgtcacagatcgtggactacgatgacaaagaactggagaagctcagtctgtatgcgcgtaacctgcgtccattgctgcgtgaaaccgcaacgaaagacgatgaggtggatctaagtaatgtcagcatgagccattaccgcttgtccaagatccgtcagcaggacatcaagctgaaagaagatgccgaagacaatcagcttgagccgggcaatgacctgggtgcagccaagccacgtgataagaaagaagaattcctgtcacagatcattgagcgtctgaatgatgtctttatcactgataacctgactgataaagatatgctcaactatgcctatacggtacgtgacaaactggctgagaatgaaattgtcatgaagcagatcgccaacaatacccgcgaacaagccatgctgggtgatttcccgaaagcgatggatgatgccattcttggtagcagtgccgcacatcaggaacagatgatgcagttgctgtctgatccggcgaaggccagcatatttgcacgggtgatttttgatatgttgagcagtccaagatga

SEQ ID NO: 58699 - DNA, 1362 bp, Acinetobacter baumannii
atggtgaatacagtggcgaagtatcaaaaatatactgaatataaaaaatcaggtgttgagtggttaggtgaaattcctcgccattgggattcaaaacctttgaaatatttatgcacttacaatgatgaggttttgcctgaaacaactgctaaagatgcagagattcaatatattgatattggtagtgtttcagcagttaatggtatttctaaaattgaaacaatgatttttaaggatgcaccgtcacgagctagacgtatcgttagagatggtgatgtgattgtttcaacagttcgcacctatttagaagcaatagcacctattaacaatcctcctgaaaatctaatcgtttcaacaggatttgctgttattcgtcctaatcaatacttgtataaaagtttcgcatcatattgtttaagggctaaagggtttatcaaagaagttgtggctcgttcagtaggtgtaagttatccagctattaattcatctgatttggtgaatattgctatcccaagtattgaatatgcagaacaagtgaaaattgccaacttcctggaccatgaaaccaccaaaatcgaccacctgattgaaaaacaacaacaactgattgagttgctgaaagaaaaacgtcaggcagtgattagccatgccgtgaccaaaggactcaatccgaatgtcccgatgaaagattcaggtgtggaatggttaggggaagtgccggagcattgggatattgtacaggcaaaatatattgctgatatcactagaggtgcgatattaagacctgttgatgctccagaatactttgatgaggaaggggaatgggcttatttgaatatttctgatgcaactaaatgtgataagtatttagatgagtcaaagttaagactttcacaattaggaagtaccaaaagtgcaagagtttatccaaataatttgataatcacggcatcagctactataggtaaagcatttattaatagaataaaagtctgtgtccatgatggctttattcctttttgtaatatcaaattagatatcaactacttgtatcattatgtatctaatccttacttatatgcagcgatgggcaagtccaatacacaaaagaatatctatttggatgaagtgaaaaatatgatggtgactgttccccctagatgtgaacaagttgcgattgttaagcatatagaatctagccaatttaaatatgatggtctgattcaaagtgcaaattctgctatcaaattaatgcaagaacgccgaaccgcactcatctcggccgcagtcaccggaaagattgatgttcgtaattggcaagctccaacgcttggtggtgcacagacggagttaagcgcatga

SEQ ID NO: 58700 - DNA, 171 bp, Acinetobacter baumannii
atgctaaacactctcgaacagaaaaaaaaatatatccaagctacgcgcttgcagaattatcaagccagtttaaagctggaaggcattaacccgtcctcaaccgcaccggcactaagtaaagctcagattctacagaaatataagaaattctcacagacctcggaatcgtga

SEQ ID NO: 58701 - DNA, 597 bp, Acinetobacter baumannii
atggataaatatggtgaaatggatgacagcatttactgttaccccgactcggacgtcctcaaaaacaaactgaacattcaggatgctgaaattctgcaacaggcagaactggagttgactgagtatgccagcacacgaattgagtatgcggagccaccttacgatctcaaatacctgcaatccattcactttcagctcttttcggacctgtatgcctgggcaggtgaactaagacaagtggatattgccaaaggcgatacccgcttttgtaccttcccgcgtattgaaattgaagccaataagctcttcaagcaacttgagcagcagaactattttcaaggtttagccaaaccagtacttatccaaaaaattgccgatttttattgtgaacttaatatcattcaccctttcagagaaggcaatggacgcactcagcgtattttctttgagcatttactcgcccactgcggctatggcgtacaatgggacaaaattgacaataaagaagtttggattcaggccaatattgatggattcaactgccggctagatggactgatcgctatttttgaagcctgcattatcactcctgaataa

SEQ ID NO: 58702 - DNA, 1092 bp, Acinetobacter baumannii
atgaatcaaagcataactacaacacctacagtgaattccaccactttaaccacaaccaacccgactgctgtcgctgattcaagacagctaaatccaccaccaagcccttcaaaacgcagcttaaatgccagacgtctgatcaacaccaaacaactggactatcaggcatggcttgaagtgcgtaaacagggaataggaagcagtgatgccgcagctgcctgtggcttgaatccttatatgtcgatgctggaactgtggatgattaaaacaggacgggtacagcaaaatatagaagatgaaagctcaggacatgcacctttatattggggcaagcagttagaacccttagtggctgaatactacagcatgcacaccaataataaagtccgtcgggtcaatgcggtgttacagcaccctgatcctgataaagcctttatgttggcaaacttggattatgccgtggtgggcaatgaagaagtgcaaatcctagaatgcaaaaccgcaggagaatatggtgccaaactgtggcgagatggtgtgccgttatacgtgctatgtcaggtacaacatcaactggcggtgacaggtaaacaagcggcacatatttgtgtgttgctgtgtgggcaggaaaccaaaatctacaaagtcagtcgtaatgaagctttgattgaacagatcattcaggcagaacggctgttttgggaatgtgttgaaaatgacgttccgcctgctgttgatgccagtgaatcggcagccaaagctttacaacagctctatcctgaacataccccactgagctgtgttgatctaacggaggtgaaacttgctaatgaactgtttgatcagctgatacaggagaaacagcagattgaacagcaccaaagccagtttgacctactcaaacaccgagttcaggcactgatgcaggaacatgaacgtgctgtatttcagcaaggttcagtgacatggaagaagagcaaggacagtatcagtctggataccaagtccttacttcagcaccaacctgaactcatccaacaatacccattgcagaaagcaggcagccgtcgtttcaacatttatcacgattag

SEQ ID NO: 58703 - DNA, 1038 bp, Acinetobacter baumannii
atggcacatcaacttgaacaaatggcgtatgtcggacaaaccccttggcatggtctgggcaatcaacttagccaaaaccaaccgattgaagtctgggccaagcaagcaggtatggattggcgtattgaatcatccaatgtcagctacatggctcaaaactcacgtggacaaagcatcatcatgccgtatgaagaacaacgggtactgtatcgttcagatacccatacccctttatcggtggtgagtcagcgttatcaggaagtccagccaatggagattctggaattctaccgagacctaacggagcaatcgggctttgaactggaaaccgcaggtgtcttaaaaggtggcaagaagttctgggccctggcacgtacaggacaaaccgcagaacttaaaggtggggatgtcagcaatggctatattctgttggcaaccgcatgtgacggcacgttggcgaccacagcacaattcaccaatatccgtgtggtgtgtaacaatactttagcgattgccttacgagggcagagttccaatgcaggcgtggtcaaagtaccgcacagtactaagtttgatgccgacaaagtcaaagatcaactcggtatttcagtgaaaacatggtacgaccacatgtatgaaatgaaacaactcacccaacgtaaagtcacccagaaagaagcagcggcttattttgatgcggtatttaacaacaatagcctaagtgcgatggaacaggaggataacattattcagtactaccgtaatgtcgcgtctcaagccaatccacaacccaacaaaactgaaccgaatggacgtgccatgaccaaagtcatgaatatgtttaatgggcagggacgtggagcagacttatcttcagccaaagacaccgcctatggactactttgtgcgatcaccgagtttgtcgaccatgaacgtcgtgcgatgagtactgatcaccgccttgactctgcttggtttggtgcaggggcagcattaaagcaacgtggattagagcaagcattatatcttgcagcctaa

SEQ ID NO: 58704 - DNA, 300 bp, Acinetobacter baumannii
atgtccttaattcaatgcccctattgtcaatccacctatgtcagacagactgattcaagtcatgcaaacgccaactatttcgaacaactgcaacgctgtatttcaccgacacagatggcgctgttcggcatgcagcttgccaaaaaggcaggattcccgccttttacaggcgcagccatcggtgttgtggtgggtggtgtattggttattgtcagtcagtactgctatgaaaaatattacagcaatgccgagcagtatgtctgcttggattgccaacaacagtttgcatgggcgaggtaa

SEQ ID NO: 58705 - DNA, 381 bp, Acinetobacter baumannii
atgaagcaacttttaaaacccttactcttcgcagtgactacaacgacaggcatcatgttaagtggctgtaatgcaggtcttgatccaaacacgtttacggtcgaactcgatgtaattgataccagtaactggtatgcccaaaatcaatccgctacggtattgaccatccgttccaatattgcagagcctatcgatgtcagccatgtttctgtcaatcatggacaatgtcgttatgaaggctatcgtcgatcgttggaatatccgcagcactttaagatggggcaacgtttaagactgaaattaacagactgtagctacagtaatgtggtgcaggttgatgtcgaaacagataaaggcactgcaagctatagctttcaatag

SEQ ID NO: 58706 - DNA, 501 bp, Acinetobacter baumannii
atgaacacaatggcccaaagcaagctgtttggtcttgctgaaaatagaacagatgtatggtcaacaccgcaagatttttttgaaaaattggatcgagtttttaactttgatttagatgtttgtgctctgcctgagaatgccaaatgtgagcgctacttcacgcctgaaattgatgggctgaaacaagaatggactggaacatgttggatgaatccaccatacggccgtgaaattgtagattgggttgccaaagcagcagaaacagcaagtaagggtcatacggtagttgcactcgttcctgttcgcactgatgcccgttggtttcaagactattgtttgggtcgtgaaattcattttattcgtggccgcttaaagtttggcgattcatcatctaatgcgccatttggttgttgcgttgtcgtatttcgtccaagtcttaaagatgttcagtggattgtgacagagactgattttagaaaagcggaaagtatggaggggtga

SEQ ID NO: 58707 - DNA, 1326 bp, Acinetobacter baumannii
atgcgtaatgatgtaatgaaaaaggcacttcttcctataaaaaaagaaatcaaaaaatttagtggtgtaacaatcacccttccaaagcgttttggattcaaaaatcatggaatcatggattttaatgggatattaaaatattttgattggaacttagaaaatatacaagtaaggattgattttactgaatgtacatcagctgactatcaagcaatatcattgattgtaatttattcttggtacttaaaaagtagaggttgcactgttgatcatgtgattgacaaatttgcagatcgtgatgctagtgtaatgtggaaaagattgggagggctgggatcttttaatgttctttttcatacataccagcagtttaaaggtgataattataaaccactttttgcattaagaaaggagtcaaatggcaaggattttaaagatattctttctgccattgaacgttatacgggtgagtttgatatttcttatactgatactctaagttatgtactaagtgaattaatgtataacgcattagagcatggttcatcattttctccagttacaaatatcaatttgcccgctctggtgcagatgagttggtatagaaataaaggagagatgaattttatcattgcagacttaggagtaggcatcaaaacccatattgaacaaacatatccagggcaagagtctagtgaatctgcgataagattagcaattcaaccagaaaaatcaggaacattcgctaactctgatccttataacgcgaaaaataatgctggaatgggcttatatttatcatctaatatcattaggcgtcttaaaggtgatatgtatgttttgtcaaatgatggattagtacatatttcacctcgagatgtaacttcgacaacactttctcatcagtggaaaggaactattgcatttctatctataaaaataagtaaagaagatagtaataatttaactgccatacttcaagaattaaggcagaatgctgaacaagaaagaagttatttaagaaatgaggaagttgataaacaatttgttttatacatgacaaactattttggcgatcatgccgaattgaaatctgaagcaataaatattagagataaatatttacttcctgctattgaaaatggtaagaaagtaattatagactgtaaaaatatcaaaagggctccgcatagctttttgaatgctcttttagcgacacctataacgcgcttaggaatgtctgcttacaaaagaatcaaggtgataaatgctgaacctgatataagagaaacaattgattttatttttgaagacaacactaactaa

SEQ ID NO: 58708 - DNA, 345 bp, Acinetobacter baumannii
atgtcagatgatgttcaatttaacttgcgcattccatatgaactcaaacaacgtatagttgaagcagcaaagaaaaatagtcgatccattaacgctgaggcccagcttcgactagaacgtacttttgagctcgatgatttgccagaacctagcaatccacaaaatataaccgaccctaaaaaactagaagaatgggcaaaatcaattttgaaagaacttttaaaattaaaagagttaaatgaaagacttgagcgtcttgagagtgatgtaagttctcttgaagctaattcttatgatattgaaaatagaataaatgatttagatggtcgcggatttttaccataa

SEQ ID NO: 58709 - DNA, 165 bp, Acinetobacter baumannii
atgacgagaagtgaagcacaggtgaactttagaatgcctgaaaatattttggtgcgctttaaagctgaaattcagaaggaacgtagatcgcaaaccgctcaactaattcttttggttgaagagtggttggaaaaaagagagaaacaacaggatgcgaaagcatga

SEQ ID NO: 58710 - DNA, 987 bp, Acinetobacter baumannii
atgaatctaatagacaacaaaaaagcccatgatcttggcggacagggcttaattgatgtcaatacaggaatattaactatgaatatagtagcagaaaaaattgatttacaacataccttaactggcaatcaggtacttgatctagttgaggtagatattggtggtgacaagcagtttgctgtagatgctagatctttgcactcatttttagaagttgggcgtgattttacaacttggattaaagcaagaattgcaaagtacagctttataaaagaagtagactacacaattgttgaaagtttgagctcaccaaaacaggggagctcaaaatctagacagcaaaagcagactgattatttcctgactttggacatgggtaagcaattatccatggtagagaacaatgaaaaagggcatgaagctagacgttactttcttcgatgtgaaaaattagcttttgaagccatgaaagaaaagttcatgggcggtgcaattggaacacgaaaagtaatttcacctgaacaaaaggattcattgcagaaaattgttgatgctaaggtgaacggcaacaatggattaagagcacaagtttggactcgacataatcggcatttcaaaattaactcttatcatgaacttctagccatacactttgaggactctgtgcagtatttgttaagcatggaagtaaaaggaaaggtagagaatccattagtaccaatgcaagtaaataatgaaccttggaacgacaccgatgttcagttcttaatgtggtttgtgcctaagatttcaaaaattattaagaacgatatttatccggcactgagtatcttgcgcagtgaatgtgctgcacaggtaatagggataactcaagagatggcggtacatgccaatgcattaaatcgaagagcattgaagcatggtatgacgcactattcacaactaggtggacaacccatccatacaattgaatggtatttatcttaa

SEQ ID NO: 58711 - DNA, 558 bp, Acinetobacter baumannii
atgaaaaagataattttattggggttattgctttgttcagtggctagcgcggaggatcggcttgaagaacttgggtcctctttatcaaaaaaaatatatgtttatgaggacgaaaatggcagcacgttgttaactgctaaagagtctagtgatcagcaactacaaaaagttaaaacaataaatatggaaaacaacttactagattggaaaatcaattgcaccaaggaccggtttaatggggttaaatcatgcagcttaaataaagcctatagagatgtaatggtaactataatagagggcagatatggggtttatattggtcgcaaccacttcccaagatcattgagcgcaataaagatcgatgaaaatgccccaatctcagggtatgaaggagtgagcaaaaccccattgaaggtaattgagcagatgaaaaaaggcaagatagcctacacaagatataaggaatggccttatgagtacaataaggatggtgaagttgagcttgaaggatttgctgaaaagtttgaagagatgaagttggaatacaaaggtttgtaa

SEQ ID NO: 58712 - DNA, 477 bp, Acinetobacter baumannii
atgaacacattaaaatattgctcaacacaagagggttactccgctagtttgaagagtggagtaatctcccaagaattagatggaggtgcaccacgttaccgaagagcagtgaagaacgggtatcacactgtcaatgttcaatggaaagtctttgatgttgggtttcaatatcttgatgcgttttacaatgtttggtgtgagactcctgggcggaggttttatgcttcacttcgcgtaaatggtccagagtttaagccgtatgaatgctactttgttgaagacagttttcaactatcaagtatgcaaggtccagtttacactgtgacagctcaattacgagttaagcctattgtagattcggagctaaacaagatcattgttgagactggcaacgatggggaggacttagcatcgttattcaacccactcgaagaactggtaaatgacgatctgccaagagcgatggagggtatttag

SEQ ID NO: 58713 - DNA, 528 bp, Acinetobacter baumannii
atgatcttttcaatattatttagtgtactgtctagacttggtctcttagttctaacaattgtttcggttaagttacttacagttaaaaattatggcgaattttcatattttttaaatattattaatacgttcatacttttttctagtgcaggtacaggagtctcaacaaatatagccatctcagaacattttaaaaataataataaacatgcaatggatgtagttggatttaatcttgccctagttgtaatattatctatattagtttggattacatttctaggtttttacttatttattgattcaaatttctcacttcttctcatatctataattgggttgattgttatagtttcttcaaatataaatgtaatatatgaaaatatttatatgggtttgggtgagttttttgaattagcaagaaatgcagtttatatatttatagttgcggtaatttcaatagtatttttagtttgggaatatggtgtaacctgtctcttatacacatctccgagcccacgagactaa

SEQ ID NO: 58714 - DNA, 1128 bp, Acinetobacter baumannii
gtgaaaaaggttttattggtatttggaactcgtccagaagccatcaaaatggctccattagtctctcaattgcaagataataaaaatttctttgaaacaaaagtatgtgttactgggcaacatcgccaaatgctggatcaggttttggaattatttgatttaaaaccagattttgatttgaacttaatgaaaccgggtcagactttatctgatgttacttctggtgtgttaaaaggtttagagcgagtattcgaacagtggatgccagatattattttggttcatggtgatactgcgacgactttcgctgcttcattagcaggttactatcataaaattaaaattggacatattgaggcaggtttgagaacaggtgatttatattcaccctggcctgaagaggcaaatcgtaaacttacaggagctttagcagattatcattttgctcctacccaatcatcttatgataacctttttaaagaaaatgtggattcagataaaataattgtgactggaaatacagtaattgatgctttattacaggtaaaatctaaaatagagtataataatgatttaattgcgcagttttctcaaaaatttagttttttagataaagataaaaaattgattcttgttactggtcatcgccgtgagaactttggacaaggttttctaaatatttgttcggctttagcccagttagcagaagagtatccaaatatacaaatcgtttatcctgtacatttaaatcctaatgttcagcaacctgtaaagaaattgcttgctcatatagataatatttttctcattgaacctcaagattatttaccttttgtttatttaatgaatcgaagttatcttattttaactgattcaggagggattcaagaagaagcaccatctctggggaaacctgttctagtaatgagagatacaactgaacggcctgaagctgtgaaggctggtacagtaaaattggttggtacggattctattaaaattcgagaaaatgtagtcgagttaattgaagattctaataaatataaatgtatggctgaggcccataacccttacggtgatggaaaagcagctaaaaaaataattaattttttgaaagctgagttatga

SEQ ID NO: 58715 - DNA, 318 bp, Acinetobacter baumannii
atggtggttgtgcctttagatcaagtgtatgtagaagcaaacttccgtgaaattgagctaaaacaaattaaaatcggccagcctgtcactgtttatgtcgacgcttacaatgttgagttaaaaggtgtggtagatagtttctcaccatcgactggtgcattcttctcgccaatttcagcaacaaatgcgacgggtaactttactaaaattgttcagcgtttacctttacgcatcaaactccttgagaaccaacctgatattaaattgttgcgtcctggtctatctgttgtggtttctgtggataccactaaaaaataa

SEQ ID NO: 58716 - DNA, 201 bp, Acinetobacter baumannii
atgtctgatttaaaaaacaatgaagccttccaaaaagcattagcccatgtaattcaacatgctgaatttaatgaaaacatagttagtttagttgactacattactaataataaaggtgatgtaccattttgtataggaatgttagggagttatgctgaagctaacgcaatggtatcttttggtttcgcgataaagacttaa

SEQ ID NO: 58717 - DNA, 507 bp, Acinetobacter baumannii
atgactcaatttcccgatttacttaagaagttacaccaactagattttgattatgctgatggagatggcattgattttgagccataccaagatttcttatcacctgaagaaacagcaggatttttaacagcttggactggaaatcctcaagctgatgctagtacattattattttttggccaagatggtacaggtgggtgtgctgctttctggatagtaaataaagacaaaaatatattagatcaaccaattgtattcttaggatcagaaggagaaatgggagttgtagcgaaagattttgatgattatctttggttgttatcacagaatcacggtccatttgaatctatcgaatatcctgaagctaacactcaaattaataatgattttctgacttttgcaaaacagaattctaagactaatactagaccagttttggaaattataaacgatgctcaaaattcttatcctaattttaaaacttggatagaagatatgattcggtaa

SEQ ID NO: 58718 - DNA, 1065 bp, Acinetobacter baumannii
atgaacgaaaacaaggcaatctttataaaaccgaatcacctaggcttgaatataccaaaattagatcctgttttaataaatagtaataaaaaacaaggtattgagactacattcgtcttggattctaatatcttaatcaaaatggaacgtgtcgttaaagcggggaataagtggagctcggttaaagaaaatggattagataatttaattaaattgcttcaaaaatgtaatccttatagtgtttgtttatctccagggtttgcattgaaagaaatgcctcctcaaaaagccaaaatttccatggatttttatgaaaatttttgttcagtacatttaccaaattttgtagatacacctaatagtacacgtaaagcttatacggattttagtagcgactatggctttgtcgatctaaccacagaagcaaagttagcatttgtattaccttatcttaactttctttatctgaattacattgagtattgttattcaggtactccaattgaaaaatttaaagcttatgttgatttactagaagaaaaagttgatctattaagtgccacagaaattgaagtagccaaatattgtttttttaatacaacaaaccttcaagaaggaaaacttaaaaagttctgtcaaaaaattagagagaactccgtaaaatacaaaaataaacgtgctgtagacataaatcaaattaagcaaatagcatttaatggagcgagtgatattcatttattacatgtaacaaatgcgatggataaaaaattattagataatataaaacaagattgctggcttgtaactatggacaaaaagttggcagctttttgtgacctttttcatcaaataagtgttaatggtgtttctcaaccttatgccatgtcaacaatatctgaagaaatggtgaatgatgaatattggcaatctgcaaatgaatactttttattaaaaagtataaagcgtcgtgaatatcatctatctcgagaatttaatttagaaaatttacttccagtagttgaagatgctatatctatgtttgataaagattttaagtcaatttga

SEQ ID NO: 58719 - DNA, 348 bp, Acinetobacter baumannii
gtgggtaagttaaatattttactcgacgcagcaattttactgcttgatgaagctgctgaatatttagatgaacttgatcaacttcaaacagtgactgacgaacaagtagcaaaagcttcaattttggtcgcagaagcaaaagtctatgccaatgatgctgccctacaaatctctgaaaaactactagagctaggcggtagccgctcaagcttaagccaacataatttagatcaacattggcgaaatgcccgtgtacataccttacacgaccctgttcgctggaaattacatgccattggcaattattaccttaatggtcatttccctgcccgccatgcctggatttaa

SEQ ID NO: 58720 - DNA, 195 bp, Acinetobacter baumannii
atgtccgagaaaatttcacgcggagaattaattcaaaaaagtctactcggttttgggctttatctatacctgttgcttttacaggttgtaatgatggctcagatgatgaaagcccagaaatacaagcagattttcttcatggtgtcacaagcggggacccacgacaagataaagttattttgtggacacgagtaa

SEQ ID NO: 58721 - DNA, 768 bp, Acinetobacter baumannii
atgaaaaccaagccaattgttccttggatgggtggtaagcgtcgtcttgtgtcgcaattagttgaaaaaatgccagaacataaatgttatgtggagctgtttgctggaggtgcagctttattttttatgcgtgagcaaccagcaaaagttgaaattatcaatgatgtgaatggtgaattagtcaatctatatcgagtagttcaacatcatcttgaagagtttatccgtcaatttaaatgggcaatcattagtcgacagatgtttgaatggttaaaagctgctagtactgacttaatgactgatattcaacgtgctgcacggttttactatttgcaacatactgcttttggtgggaaagcgacgggacagaactttggaactgcgacgacatctaaagcacctagttttcttcgtatcgaagatcagttgacagaagcctactataggctttcgggagtaaccgtagaaaatcttggttgggatatttgttttgaaaagtatgatcgcccccacacgtttatttatgctgatcctccatattggcaattatttggctatgggatggactttggctgggatcagtacgtaaaaatggctgagcttatgaaaagctgtcaagggaaagtcatgctttctattaatgatcatccagacattcgtaaccttttttctgacttcaatatcagtaccactacaattaagtattcagttggtcaggttggtgctggtagagatcaaaagcaggaactcatcatcaccaattactga

SEQ ID NO: 58722 - DNA, 552 bp, Acinetobacter baumannii
atgaaaaaatttattttagttgttgggctacttgtattaactggatgttctaaagaaaaagttgctgagcaaggtgaaattcaagcagcttcagaagcacaagtatctcaaaataaatggcaataccaccatgagaaaaatccaattgatgatagttttacggtgctagcttatgtcgaatctgatgaaccattaaaactagatggaattcaaactagaccaagcttagttctgcgttgtcaagaaaataaatttgatgtttattttgcattaaagaatagtgttgattctgttgggagagattataaatcttcaaatatcactttgcgttttgatgctgaaaaagcagtcgactattcaatgcgtagaggcgatgatttacaaacactattctttagtaatcctattgaaatgattgatcctttgttgaagcatgataaattagctctaaaatttactactacaaataaaaatgttgtgtttgtttcttttgatattcgtgggcttcaatatgtgatttcgccattagaaaatgcttgtaagttaaaataa

SEQ ID NO: 58723 - DNA, 237 bp, Acinetobacter baumannii
atgaacatcaaacagaaacgccagcacttcaacaaagacttaaataagttagttgataacaaacatgcagttattcccaacgaacttacttgggagcaacttcagaaactttctgatgatccagaattctttgaactgtaccaagaagccttacaaggtgactctggtgaagactgtgcttgcctaattatcaaggcaatccacaacgcattgttgcgacttgctgggagtcactaa

SEQ ID NO: 58724 - DNA, 213 bp, Acinetobacter baumannii
atgggttacttcatttttgggttaattattgggtggcttatttgtaagtcatatacagaaaacaaaattgctgaagaatgtgagcgtcttggtggtttttatgttggtaaaaaaacttacttgtgcaatcaaatagttgatcactcacagaataaatctacacctgaagcaataattgaagcagagaaaggtgcaagagatgaaattcaataa

SEQ ID NO: 58725 - DNA, 651 bp, Acinetobacter baumannii
atgaatacgatggtagtaaaagcaactggcacaatcgctaatccaagtaatacgcccgttattgtgggcgtccctgtgactagtgatacgttttctggcggtgacggtgacatcttgggccgtaaaagtgatgctggtatgggtggtagccctgtagtttggcgcgggtttgataattatacttcaactggaatctatgccattaataacaatacacttgtggctacaaaggataataactttggtgttgttggtattgattataagttaacaaacttagcagtacagtttaaagttgctcaatctggctcggatttaaatgctttagcagtattttttgatgtgagacgtgtaaacggttctgttcgtgtgtatcgattaaacttttatgggggtaataaggtagatcttgtttaccgaaatgaaagtagtgttgcttctgtattagcttcaactaatgcgacagtaaatgacacaattctctatattgttgatggatcttcacataaagtttatgtgaacggagttttaaaaattgatttatctcatgccggatatgtcggcgaggggtatgtgagcttatcaagatcttcaatctcaactttagctggcacatttggtatcgatgatttaatcgtttattcgatttaa

SEQ ID NO: 58726 - DNA, 1476 bp, Acinetobacter baumannii
atggctagcgaaatcattactcggaaagaacttgaagatgcaaaagtagatgctaaagacttgggagagtgtattcatggtaatgaaacaggagttgtaacgccacggtttggagactcatatccaaccttaccagcagcagttcaaaagattatggaaactggaggatttgagccatttctaaccgaagcgcaattaaaagcaagtattccaactgtcacaccaaaagcagccaaagcgctcgacacgggaaaaatttggtattgggatggcgcttggcatgacactggcttgagcgagcttgatcaagcaatcaattatgcagatgaacaaaaagtgcaaaagtatcaagctttaaatcgtattggtgttctgtatgaaatcacagatactcaaggtaatcaaacatggctacaagtatcatctacagatggattaccaacaccttttgctaaatccgcaattagacaatctgcaagtatcgatgaatctaagttgattattctaaaagacggtgcgttgttgtattgcatccctgatgcaaatggaaagccttcagcactttcagtacgacaaaacgacgggatgtttcccgactttgtaattgaagacattcaaaagcgcttaaatttagacaatacaaagcctaatctagatgatttgcaatataaacctaagccatccgattttcaggttatttcaagtgttgctcgtggtgtcgctcgtcatgtagctgataaaccattgccagccaaaaaaacagattttgtaaattctacagcccagaataatcgccttacttttccgaacacttatagcgatgcaactcctttagttctagtaatttgctttgaaggtgtaggagatcagcagcttgatatacgtgcagcttattccaatgtgcttgatcacggtgttctgtgggcaagatgccaatttcatggagatagctacggctcaccgaaagcgatgcaagatgcaattgagctttatcaaaaagcttgtgcaattgcgccaattgcaggggttgtaattgttggaaactcaatgggtgggtgcgctgcacttaatgctctcacaacagagtcaatcccgaatatcttgggagtttatttgactgatcctgtgtgcgatttgcgtcagcgctacgacaatggccgggcaagtgaaattaatgccgcttatgaatgtgatgcaacaacatatgcaacgaagacagcgggctatgatcctatgttacagcactggtcaaaattcaaaggagcaccaatttctattgttgcaacttcaaacgatacgcttgtacctaaagctctacacactgacaaacttttagtaaagcttgttaatcacaacaaaatcagtgtattggatacaaaagcacccaatcataactcaccagaagaatttattgtgtcgcgtttaattgatttcatcaaacaatgcacttcaggctcagttattacacaaatttaa

SEQ ID NO: 58727 - DNA, 2559 bp, Acinetobacter baumannii
atgatcataacggcaattctggcggcttatagtgtttacactgtattaaccatgcctaaaccacaggctccagttgcaggttcttcaaataacgaattagcacaacgctctaatcaagctcgattaaatggacgtattccagatatttttggtcgagttcgctcttatcctgatcttattgcgcaaccatacactatttataaagatggtatcgagattgaagaatgtttgatgtgtatcgggcgtggttattatcaaattctagatatgcgcgatggtgaaacagatgttgcaaatattcccggtacgtctgtctctgtatacaatccaaatgttcaaattgttggtgccaatcaagcgttttatcaagtgggtgaaacattcactgagttgccaatagaggtaaaaaaatcagttgctatcaacggtcaaacgttaaagcgaccaaatgacacgcaaatagaatcaaatcagatatggtttgaaagtccaaattacatcaaaagtaactctatagatttctcacagtattttagttcaggagaaaatgttgctgtttataatgctgaatacggtgtcttaaatgttgctttttcaggatctattttagttacagaagactttcatgtaatcattgaatcaacgattaacgttgataatcccaatgcatttaaagctttacagctaacaggagcacaggttgatatcgtaacaaacactggaacaccgccagtcttagaaactacatcacgagatttgtcaggccaatacatcgtatctggtatcaccaaaactacgatatcaacaggctttcattatgacattgtgttatcaaatccaagttcaataaacccgaactggtcgcttttgaatgacgactacacaataagtgcaggcgctgttttaaatcaaaatgaaaacggaatcaatttaggtggtacttacacaatttcaagcatgacagcgaacagcattgcacttatcaacccaagtgcgatcaaccctgaatgggataaactcgcaacattgccaaaccagagtacacaagggcagaatatcacaccacgtctcgattcagtcaacaataaatgggtgggctggttcaatcttgatatgcaaaatgctgagggtatgtacgtcaatttggtttggccgcaaggtttgttttggcagtcaagatctggaagacaagatcccactgaaacacgagtcagaattcaatatcaaatgttggatgaagatggcgatcaatttggagatattcttgaaagtgttctattttttagagaatatcatacgtcacaatttgggagaaccatgacgattaattttggtcaatctggatcatttaggtttcgtgcttgcatggattggccgacagattccaactatcgtggtgaagtgaagattaaagatgtttatgcttttgcacagtcggataaagacatttacaacaatgtgacggtattgcgttctcgaacagttgctaccgatggcgccctaagcatcaaagaacgcaagctgaactgcttagtgaatcgcaagcttccacttgatggtacagggcctctacaggtcacacgctcagcagggcaggcgctcatcaatctagcactagatcagtacattggccgccgaactagtgcagaggtagacattgctcaaatcaatgcagagattgccaaagttaatgcttattttggttcagatcttatgtctgagttcaattacacaattgacgatgacaatctaagctttgaagaaattgcggggatggttgcgagtgctgctttttgtgagccgtaccggtttggaagtctaacccgtctcaagtttgaacagcctcaagaaaatgccgtcttacttttcaaccaccgaaacaaagtacctttaacagaaaagcgctcttatacatttggtgtgcagaaagactatgacggggtagagcttgaatatacttctgatgtggatgatgcacgtgtgaagtacatcatcccagaagacaccacgcctaagaatccattgaagattactacaactggtattcgcaatgaagctcaagcgaaagtaagagcttggcgtgagtggaataagcttcgctacaagtacatgtcgtgtgaggtggaagttttagatgagtctgaattgctgatccggaatgaccgaatcctcaatgctgacaacacaattgtagacacacaagacggtgaagttgaagcagtagacggattgattatccagacatcgcagccatgcacatttgatgtaggtagtgattactttattcacttgcaaatatcgaatgcaactgtagatgtggtgccatgtacggcaggtattgataaataccatgtagtgcttagccgcccaccagtacagcctcttgtagtaagcgacgatcgatacgttaaaacactctacacattagttcgcgctgatcagtcggaagcacaggcattcatgcttgaagaacttacccctcaaactcaaatgaccaatacgcttaaggcttcaaactacgatgcccgattctatgagcgtgaccatgactttatttaa

SEQ ID NO: 58728 - DNA, 1164 bp, Acinetobacter baumannii
atgcgcgctcttacataccacggtgcagaagacgttcgagtagaaacggttgcagacccgattattcaagaaccagatgacattattttacgtgtgactgccacagcgatatgtggttccgacttacatttatatcgaggcaaaatcccaaagactgaacatggcgatatctttgggcatgagttcatgggcattgttgaagaggtcggtccagccgtcactgcagtcaaaaagggcgaccgtgtgattgtgccatttgtgattgcctgtggtgaatgtttcttttgccaactcgacttaaccgctgcatgtgagaccaccaatacagggcgcggcgcgattatcaataaaaagcagattccaccgggtgcagctttatttggctatagtcatctttacggcggtgtaccgggcgggcaagcagaatatgtgcgtgtgccaaaagccaataaaggaccttttaaagtgcccggctcactgtcagatgaaaaagtacttttcttgaccgatattttgcctacggcttggcaagccgtgaataatgcccaagtgaaacgtggctcaaccgttgcaatttatggtgctggtccagtcgggctattaagtgccgcttgtgccaagatgcttggcgctgaaaaaatatttatggtcgatcacaatgaatatcgattgaactatgcggcggcaacctatgacgctattccggttaattttgatgaagtcgatgcagccgaatttattattcaaaatactgacaattatcgcggtgtcgatgctgtgattgatgcgattggtttcgaggcaaaaggcagtgtgattgaaacagtcctgaccaatttaaaacttgaaggttcaagtggcgcagcgcttcgtcaatgtatagccgcggttcgccgtggtggtgtggtcagcgtaccaggtgtctatgcaggcccgattcatggttttttatttggtgatgcttttgataaagggctaacttttaaaatgggccaaactcatgtgcatcaatatttaccgcaactcttagaattgattgagcgtggtgaattaacacctgaaacgattattacccaccgaatgaaattagaagatgccgcagaaggttatcgcatttttaatgaaagagaagaggactgccgtaaggtgattctgcttccttaa

SEQ ID NO: 58729 - DNA, 597 bp, Acinetobacter baumannii
atgaatgaggaaataaacaacaaaaagaaagtagcgttatcagctcgtgcaatagataagatgaagattggagacccagataaaagtgatattggagaatatagtggtttaagagttacttgtggaaagacaggacttaaaagctttgtttatcgatatagaagcccgatagataattcattaaagaaaatcactttaggtaattatcctcatatgtctttagcagaagctcgtatagagcttcaacgtttaaagcttctaagatctcaaggtgtctgcccagcaacccaaagaaaagaagaaaagctgactttaaagaaaaataaggaagattcaacagcaattactattaaaactttaactttaaaaggtgtaattgatctttatttaactgaagtaattgaagatagagtgattactgatcaacgtactggagcaaaaaaattaattcaaggttcacgaactttaaaaggccaacgagaagctagaagaacattatatgtcgatgcagttgcaaaattaggtgacaggcctgctgacggtttaataaggctttgttgcacaaacctagcctataaggtttattcagtcctataa

SEQ ID NO: 58730 - DNA, 354 bp, Acinetobacter baumannii
atgaactcaaccagtacaacaatggttttagcacaagccgtcttgaaaaccgcgaatttacttggtcttagcaatactcaactgactgctgtgataggtctcgatctcgcttcgatgaagcaaatcgaattctcagctgtattagaacccgcatctgcacaaggtgaatatggattattactgattcgcctttatcaaagcttatcaacactcactggcgatgattctgaatggattgattattttatgaatgcattcaataccgcaactgatggtgtccccattcagcaaattcagatcataaaaggcttagagaaagtcttaacagtagttgaagccctaaacaatcattaa

SEQ ID NO: 58731 - DNA, 432 bp, Acinetobacter baumannii
atgtctaaaaaatatcagatatttcttacctgtggatttgtagcaacagcagcaaatgtattcgcagaaacgaattatgctgaactacaaaagcaggtaatcgcaagtgatgctgtactcaatagcttaaagcagtccgagcaagcttatgaaattaatcaaaagtttgctggtagattaaataatccgactttcaatgtggagttggataatctcggtaattctaaactgaaggatttggatggcccaacaaccttattgggactgtcacaagagattcctcttagtaataaactttccttgagaaaacagattgcgagttttcaaggtgatcgtaatcagttcgaaatagcaaagcgtcaggctgaactcaaagcagatttaagaatctgtatgaaccgtaccgggtttgtcggagagtcaatattctga

SEQ ID NO: 58732 - DNA, 669 bp, Acinetobacter baumannii
atgttaaatgaatatgaaaaaaatgacttaaaaaaatatgaagaatctgttactaagcattttaagaaaaaacttagagaaaacagaaatccaattttcgtcattaatttaagctcagatgtacataaaatgactgatactttaattagttcagtcaagaaaaagggagttcgttttggatgcgaaaatagttgtagccattgttgtaatttaagagttgagtcctttgctccagaaattttttatattgctaaacaattaaaaagtaaaatgaaatcttctgaattggatattttgatttccaaattaacggattactctgataaagctaaaaatttaaaagctgaccagcactttttaccttgtatttttttagataatggtaaatgttcaatttataattttaggccagcaacttgtcgtaaatataattcattggatgcagaaatttgtaaagaaccttttggatcagtccctgaatcttcagagatttttttaaaaggccaattattgtttagatcattcatgtattcagttgctcagagaaagatgagggctgatacacatgaattaggtcaatctttacttattgctttaacagatagttcagctgagaaaagatggagcagtggtgagcgagtattcccattactacctgaagctatttaa

SEQ ID NO: 58733 - DNA, 612 bp, Acinetobacter baumannii
  misc_feature (595)..(604): n is a, c, g, or t
atgactaaaagaacaataaatatttatggtgccagacaaaataaccttaaaaatatttcattgaagattcctaaacataaaatcgttgtctttactggagtctctggttcaggtaaatcttctttagttttcgagactattggcgcagaagctcaaagacaaattaatgaaactcaagatagttttgtacgtaatcgcttgcaacattttggtgttactgacgttgataaaattgaaaatttaaatgtacctgtgattattaatcaaaaacctttaacgggcaatattcgctcaactgttgcaacaattacagatatttatgccaatcttcgcttgttattttcacgtatgggtgagccgtttgttggatactccaatgtcttttcttttaatcacccaaatggcatgtgtccacaatgcgaaggtattggaatcgagcaaacaattgatatttacaaaatattagatttagataaatccttaaatgaagaaggtgctatagacttccctacttatcaacctacagcatggcgttggacgcgatatgcagattcaggttactttgatttagataaaaaattaaaagattatagtnnnnnnnnnngattatag

SEQ ID NO: 58734 - DNA, 1425 bp, Acinetobacter baumannii
atgagtacgcttatttacccaaatttaaacttaaaagatcctcactttaaggtatttaaaatatcagatgattttattccacagacacaaagtcatacgttcaactcagagctttttttaaaagaagttgatgaatatttaagtttataccctcacactcagcacatcgatatttgtctacatgacttaaacgggcatattcgtggcaaacgtattgacgttaagagtctgaaaaatctatcgaatggatgttattttcctctttctgtttatgccatgagccttgatggaaaagtgattgaagaaacaggtctgggaaaatatattggtgaaccagatagactttgcctgcccattttaggcagcttgcaacccagtgccttatccccagaattaaatgctcagctttacctatccatgcaagaagaagatggttctggctgtcgctatgaaccacgtaatatattaaaaaaattattaaatcagttacatgctaataattatttccctgtcatggctgccgagctagagttttatcttttctcacctcagcatcaatccgagatatgttcagaaaaccaatgttttgatatagatgcgccaaataattatcagcaagttctggatgaagttgaaaaagcagccctactacaatcaattgaaattaccgctattgttgcagagtcatcccctggacaatatgaattaaaccttcaacacagccatgacattttaaaactctgcgatcaaattaatgccttaaaaagaattgttaaacaagttgcaagaaagcatgacttaaccgcttgtttcatggcgaaaccaaacttggcaaaggctggtagtggtatgcattttcatatgagtatgctgaatcaataccatcaaaatatatttagctcagaagaagaaaaaggtgagcttgcagccaaattattgagcgcgattagcggactcattgagttaatgcctgcatctatggcgattttagcgcctaatattaattcttatagacgttttaaaattggtcatcacgtgccattagaagctaattgggatactaacaaccgaaatgttgcaatccgaattccatgctcagacgtacaaaatcaacgcttagagtatcgtgttgctggagcggactgtaatccctatttggtaacagcgactattttagcgggcgcgtcttatggcttatctcataagttaccactgccaaaacctgcacatcttttaaaatttccagacgagcacattttattagctaacaaccaaccagaggccttaaaaatatttaaaggaagtcttattttaaaagggtatttaggggcagactttgtagaacattggtacacggttaaacaggctgaatatcaaaatatttacagtcaaatgactgaagcagaacaacattgggatatataa

SEQ ID NO: 58735 - DNA, 306 bp, Acinetobacter baumannii
atgactcaaacaaaattttgttatgcctgtggccagcaaattgatgttcgtgcagaaatttgccctaaatgtggtgtaagacagcaagatgttagaatcactgggcgaaaaagtaaggtggctgctggtgtatttgctttgcttctaggtgggtttggggctcataaattctatttgggtagagttggccaaggtatcctataccttattttctgctggacttttataccagctattatcgcatttatagagggtatactttacctatgcagttctgatgaagattttgcaaaaaaatatggctaa

SEQ ID NO: 58736 - DNA, 1146 bp, Acinetobacter baumannii
atgcttaaaaaaaatgtattccaccatatgacgattccttcaggcttggctttggctattttatctgcaacaactgtgacgcatgcggaagaacagggctggtcggtttctggttttgtgcgaggcaattatcaatataaagaatatgctgaaagcgaaaagagtaaagcgcagatcagtgatgtcaggctcaatctgaattacaagaaagatcaagtggatggcaagattacagcacgttgtgtccagtttaacgaaatgtgtgatttgatgacattgtcagatgcttatctgggttatcaattggatgagcaacagaaagtcaccgttggcctgcaaccgattccattcgggattggaacctattgggatagcagcttctatgaaagtatgatgtataccattggcatgcaggatatccataatattgggattcgctatgatctgagtcaggatcagcagtcttggagctttggctattttccaaaggatggcggtaactataaaggggatagtaaggatgcatcacgttatagtgccaattttattgaaggcgtatcagacaatgccacccagattgatgaaaagaatatgctaatgatgcgttatgcatatcagggtaagaaggatacggctggatatacgctgggttcatccgtttggtattcattcttggacaataaaaataacaacaagaccggcagtcgcatgaatgccaacgtgtttggccagtgggcgacaccaacttatgacacaaccttaacttttggttatcaggatatcgacaacaaacaagctggagtgaactattcaacctttggttcttttgatacggaatatcatgtagcgaataaagcctactattatgttgctgatatagactataaaacttcgtggaattataaggattggaaaggatttaaaccatatctcgtattcagtggtttgatgaaacaggatggacagccaaactcctaccgtaatattgctggtctacaggcagattacaaaaacattactatcaatgcagagtatattttggcgaaaaatgatgcctttgttggtggtaataccaattcctttgctaattcgactgacaatcattggaaaaagctactttatattacctttgcatataagttctaa

SEQ ID NO: 58737 - DNA, 1296 bp, Acinetobacter baumannii
atgaaagtgatcaatgcaaccttacgtaaaaagaccggtttattcacgatcagctatcacaatggcgtaattgatgcgattgagccacagaccgggttactcatcctcgaaggagctgacgtgattgatgcgaaacagcagttactgatgtcaccactggttgatccacacattcatctggatgcggtactgaccgcgggtgagccggaatggaatatgtccggaaccctgtttgaaggaattgaacgctgggcacaacgcaagtccagcattacctttgaagacacaaaacaacgtgcaaaacagactatcgaaatgctggtggcgcatggcattcagcatgtgcgtacccatgtcgacattaccgatccgcaattgactggattgcaagccatgtttgaggtcaagaacgaagtcaaggatgtggtgaatctgcagatcgtggcatttccgcaagaaggcattgagtcctttaaaaatggccgtgaactgctagaaaaagccttgcagatgggggctgatgtagtcggggggattcctcattttgaatatacccgtgacaaaggcgtgagttccgtgcattacctgatggacttggctgaaaaatacaatgtactggttgatgtccattgcgatgaaatcgatgatccgaactcacgttttctggaagtattggccgatgaagccttggtcagaaacatgggcgaacgtgtcacggctagtcacaccacagccatgggctcttatgacaatgcctactgctataaactgttccatttgctgaagcgttcaaaaatcaactttatttcctgcccgaccgaaagcatccatttacagggccgctttgacagctatccaaaacgtcgtggtctgacccgcgtggcggagattgaccgtgccggcatgaacatctgctttgcgcaggactcgatccgagatccatggtatccggtcggtaatggcaatatcttacgcattctggatgccggtttgcatatctgtcacatgctaggctatgaagacctgcagcactgtctggatctaatctcggacaattctgccaaaaccatgtgcttgggcgatcaatatggtatcgaagtgggcaaaccggcgagctttatcctgttcaatgccaagaatgattatgaggttgtcgcgaatcaggccaaggcggtgctcagtgtgcgtcatggcaacatcatcatgcagcgtcaggaagatcaggtgcaattattgtctgttaacacgcctgctcaacgggatgttgcgactacgcgtttagcgattggcgtctaa

SEQ ID NO: 58738 - DNA, 1218 bp, Acinetobacter baumannii
atgagtatgacggtgcaagaagtactggaactaccacagttgtatgaactgcggctgcgggcaggtgccgatcatgtgcaccgtctagttcgctggttctatgtcgccgagaacgaaggaatttccgactggattgaaggtggtgaactgatatttattaccggtatcaaccaggtacgggatgaagccaacctgctagatctattagatcaggctgctaccaaaaacgtagcaggtattgtgatcttgaccggtaccgattttattcgtgagattccggccacagtgctggaaaaggccgatacactcggattacccctgattgaacagccttaccacctcaagctagtggaactgacccatgtgattggaacccgcttggtacagctgtcgcaaatcaagaagtctgcagaggacgtggtgagccagctgttactgggccagtatccatcactggaaaccattcagttgcgggcacagcagttgggtttacccttgttagggcaacatgtggtggcagtggttcgtttgagtaatgtgcaagacttttttcaggatagtggtgcacaacacaaagcccatgatctgtaccagaaaaaacaggcctgttataaacatctggaaagctggagaaaacagcatgaacaggttttccctattgttccgcagggagagcagtttagtttggttctatccttgcaggatcaggatctgaatttctggttccaggctctgtcggcattggtttctgctttgcgcgagtctgaatccgatctcaagttgtatgttggactttccaccgaagtgaattctgccgttgcctttcagcgcggctactgggaagcctgtcaggctgaagaaattgccgctgatttaaagaccagttccggtgtctgcctgtataacgaactgggcgtgctcagattgatcaaggcaattccaaacaaagccgttacccagcaactaatgaatgaaacactcggctgcctgattgagccagaaaaaaaacaaccctatctgctgattgaaaccttggatgcctggttaaaggaaagtggcaatgccattcaagccgctgcccggttgggtattcaccgcaataccctgaaccagcgtatccaaaaaattgaagcattaaccggacaatcattgggcaatcccaatttccgtttgaatgcttctgttgccctattaatttggcaaatatcccatgattag

SEQ ID NO: 58739 - DNA, 1278 bp, Acinetobacter baumannii
atgagtacacatgaagaaagtccactgaccgaaacaccccaagccaatcgaaaaggattgtttccgattgcaatggtgctgtttagttttactttttttaccggcactatgtttgctggtggcaaaattggtgtcgcatttaattttgttgacctcctctggatcacggcaattggtaacctgttactggctctctatgctgcatcactcggtttaatttctgcccgcagtggtttaaatacggtattaatggggcggttctgctttggtaatttaggcagcaaactctccgactttttattgggttttgctgaactgggctggtacgcctggggaactgcaacactggctatttcgctggtgaaaattgttgggatgccagaaagctgggtaataccattaatggtgttgttcggtttactcttctcagtgaccgcattggttggttttaaagggctggaatacctgtcacgggtttcaattccattgatgtttatcctgctcattacctcaattgtattggccaccaaagaaattggcggttggacgggcttgactgctgttaagccaacggaagccatgacgttctctaccgctgtgacaatcgtatttggtacgtttgccagtggtgcaacgcaaatcaccaactggacccgtatgtcgaaaaacggcaagatcgcagtatgggcatgtctgatcagctttgtcattggtaacggtttgatggtcttggcgggtgcctggatggcgattgtttaccaacaagctgacattgtagaggttctagtattgcaaggcctatctgtcgcagcagtgattatgctgtgcatgaacttgtggactattcaaggcccaactatctataacgtgtccgcagcagcatgccatttagtacgtagcgaacgtcgtaaaaccatgacgatcctggcggcgattgtggggattgtgctggctgtcgcaggcatgtatgagttgttattgccattcctgttgttactcggtgcgatcatcccacctgtaggtggcgtcatcatggcggattactgggttcgctacaaaggtcaatatccattgttgaatgatgtagaactgccaaattttaactggaatggtctgatagcttatagcatcggtgcaatcgtggcgtataactctccctggattgccccgattgtcgggattgtggttgcttccgtatgttatgtggtgttgatccgtttatttccagcaaaatcggctgaaaaaacagcacaagtgatgacaggaccatcagtatga

SEQ ID NO: 58740 - DNA, 432 bp, Acinetobacter baumannii
atgattcatttttttgagaagattcaaaatttatttaaaaagcatccagatcaaattaaagccgtgcttgaaatattcttaagtcgtgtcacagcctctcatacaggtattcactatcgatggggtaaaattgatcaatttgaatcattttattccatgataaaaggcttgtttcctcgtcaattttggcatttgcttggaaaaaacttagtcaaatcattagatactaagaaacagcctttattaatgaaacttgcccaattacacagtaaaactgaaggttatccaacaacgcaggaagattatgttcgccttcaactttactcaataaaagatggcagagcacttgcggcgtttaaattttgtctgcatctagcctgtattggccgaccacaaactctcgaacttgatccacaaaaatcggagccttaa

SEQ ID NO: 58741 - DNA, 672 bp, Acinetobacter baumannii
atgatgacaccattgctcattgatgcattaacaatttctgaaggcaggtttgaaaaaccatgcccagttttagttttgaaaatgatgttactcaatgaggaaataagcagtgagttttcagaaaaaattaaaaatcaagcattactactgctcgcgacatatcgtaagttactgcgtgctgttgctagggatttatgtgatgtaaaaactctaaaggacagtgtgaaaagaagacactggggtaaagtggataaagtgcaggataagatggttgttgcaaaagaacttcgactaaagcatttagatctagaagaaatgcctttattttttcatacacagcattttttaaaaaaactaccgatttcctttgttcaaaaattggtagattgggctccaccagcggtgagtggtacttttttaatcgaaaatattgtagcaggttatatcgcccagaagcttttgccattagaaaaaattaaagtaaaagagcttggcaagtctgtgcaaccctattttcacatagctgacttttttgtgcttttacctcaactagaagaactttatcaaaaatatcaaaagcaaattgtttgtgtggcaccaacggcagaaattgctttagctttaacagactttaagaaagcatggatctatcgtattaggagcagtttatga

SEQ ID NO: 58742 - DNA, 720 bp, Acinetobacter baumannii
atgaatatttattttaagcagctcatagaatggatgaagcagcatgaaaatatagaagaacaagaacttatccaagcattatttttgttgcgtgcacattatagcttagctggtattgttgtcatttgtcagcgaatcttcacattgattggggatgatgaattaccagaatttcgtgatgagcttaatacgttaaagatcattagtagattgcagaattctgatcaacattcacattttttctcagaaacaacagatagaaacaaacataaactcacgccattacgtccatacactggagacagtggaatttgtgatttgctattgattcaagcaggactaagtcgaaataatgagcgttttgatactgtaatcatttggtttttagagcaaatatttcactttcaaaaaaaagtacataccctagggctttatagtcattatttaaagggtgatggaagcataaagctgaaagatcaaaaaggatctcgtgtgtataacgcctttttagcgatcaggctgttgggtgatccaagtaatgaggatattttagaacaagtcgaaaaattactgactaaaaacggaccgaaacaactgattcatttgatgtccgctggttctgaagacaaacgattaaatgaagttttttatgcattaaagctctttttatcacaaatttggcaaaagaatcgactaaaaaataagaaaaaacgtctttaa

SEQ ID NO: 58743 - DNA, 300 bp, Acinetobacter baumannii
atgttatatccagtatatgttcataaagatgaagatactgcatacggcttaacttttcctgactttgaagggtgttttagtgcagcagatgaaatgcaagatattcaacgcatggcgcaagaggctgtagagcttcattttgatggtgaggatttgaaattaccaaaaccatcaagccctgaacaatggttgggtgatgagcgatttcaagatgggttctggttgttgattgatattgatacaagcaaaatcagtccgtatcaatgtcagtatgtcagagtctttggtcaaacatattga

SEQ ID NO: 58744 - DNA, 891 bp, Acinetobacter baumannii
atggctgttgcccgtactggcagtttacgtaaagccgcagaacagctttttatttcagtctctgcagtgcatcggcaaattattcttgctgaagaagagttaggcgttgctttatttgagcgtttaccgcaggggctgaagctaacgttagcaggtgaattactttatgctgatttgcttaaatggcaaaaagaatatcagctgactcgaattcgatttgatgaaattcaaggattaagtcgcggcaatattgaaatgggttttatttctgccctaaatgatggttttgtcgtggattgtattcaacgcatggctgaaagctatccatggattaatctcaatatcagtatgaatagcagtgaagaaatatcgagaaaaatcattgatgcagaattagattttggcattatcttaaatcctaaaagtcacaatcaattagaaatcttatcctttattgaaattcctttaggctatgttttatcaccacatcacaccttagccggcatggataaaatctatttatctgacactttaaatgagcgtcatatcatgccaagtgagcccttagtcatcagtgattatgtacatacactctataaacatcacaaatttaatcctatacaaaagatagaatgtaatgacattagaatgataacatcattaattcaacaacaattaggcattggcttaatgtcatatatggatgcattaccacttttaaactcaaaaaagatcgtatttaagcccattcgtgaaaaaggtatgcatcgtttaaccattgcactgtgcgtcgcttcaaaacgtcaaacatctcgtctttcacaaataatggtaaatttattggtcgaaaaaatggaagaaatcaaattgcaattaaagcaacttccttaa

SEQ ID NO: 58745 - DNA, 318 bp, Acinetobacter baumannii; identical to SEQ ID NO: 47461

SEQ ID NO: 58746 - DNA, 1371 bp, Acinetobacter baumannii
atgaataaagctcaaattgatcaggtaaagatacatattgaagcttattacgcactcgggctttcaaatatccttgctcaacagcattcccatatatcagacctaagcaatgttcagattggtgaatatacagcacaagaatttctcagtgtctctaataaggttttcacccaatttaaagaagagatcgataccgtgtttgctaaagctttaccatatagttatcaatttcaaaatgaatatggtggtgcagatttaaatcaagatctagctggttatttacaaaatattaataatcgaaattttcctgctgcggttttacatcttaatcgtttaattcattaccaagcaataaatgggttttgggagaaaagtaaacggaaatattttcgaagttcggaggttaatgttcaacaagataaagaacgtatcgaattagtttctacttatctagacgccacatcaaaacgattagaggtcttattaaaagaactagaaactagtaaagatgatttggattcttttacttccgtaaaaagaagtgaattaagtgagatagaggcgttagtaactgcgagtcgaaatcactcattagaaattactaatctacagagtcaggctgcggttttaattgaaaaaataaattctttattacaggcatctgaagagaaaagagcggattcagatcgactgttgatcgagacacgtgctcaattacaaacgttaaaaacgacttttgagaacctagagcaaaatattttagaacaaaaaaatgattttgaaactctcaaacaggattttaaatctaagcttacctttgtagagagcaaacacgcatactttgaacaacggaaccaatatctagacgatttaataggtagagaagttggtgcatcgctgtttgaaacgtttaaacaaaggaaaaccgaattaacaggttcaattaaattttggaaatggagtattcctactatagcactggtatccgctttttggatcgtttatctattctggggaactgatcctgcgtcgattagctggcagttgcttttaataaattcaataaaaaccttgcctgtattgggattgtttttctttacgatttctcaatacaccaaagagcgtaactttcaggaagagtatgcatttaagtccgcagttgcacttacagttaattcttatgcagaacaattaaaagagactgctaatcaagacaagttaattatggattctgtgcaaaccatctatatgccacccagcaaacaaaaagtagagcagcaaaaagaggggttgtcttcaattcaaaacttaaaagaaatgattggccaagttaaagaaattaaagacattgtgggtgatagtaagccatga

SEQ ID NO: 58747 - DNA, 330 bp, Acinetobacter baumannii
gtgattcatcattccgacagaggtgtgcaatatctttccattcgctataccaatcgtttagaagcagcaaatttacgagcatcagtcggtacaacgggtgattcatacgataatgctctggctgaaacggtgaatggcttatacaaaacagaggtgattgaatatttaaaagcagattggcaaggtttagcagatgtacaacttgcgacactaaactgggtagattggttcaataaaaagcgtgtacacagtgcactgggttatgtatcgccttttgagtttgaagcaatgtactatgataagattaacccgttaggtcaggtggcttaa

SEQ ID NO: 58748 - DNA, 447 bp, Acinetobacter baumannii
gtgcatgttgtacgcaatagcctgagatttgtaagctggaaagactacaaggctgttacgtcgggtctgaaagcgatttatcaggcaagtacagaggaaaatgctttaaagtccctagacatcttctgtgatcaatggaatcaccagtatcccaaaattggagaatcctggcgggccaattgggaaaatatccgaacgatctttagctatccagccgaaatacgtcatgcgatttatacaacaaatgcgattgagtcgttgaatagcgtaatacgccattcaacgaagaaaaggaaaatcttttcatctgatgactcagtaaagaaggtcatttacttagcaacatcaaatgctgcgaagaaatggacgatgccaattcaaaattggcgtttagcaatgaattggtttacgattcagttcgatgatcgattaaaagatcatttataa

SEQ ID NO: 58749 - DNA, 1488 bp, Acinetobacter baumannii
atgcgcacatctgaaaaacaagtaaaacctattgagattgatgatatcaatatcatcgggaacgaaaaaaccaaaaaagcgattactgcagctgtattaggtaatgcaattgaatggtttgatttcggagtttatggttatgtggcatacgttctcggtaaagtatttttcccagatgcttcaccaagcgtgcaaatgattgccgcgcttgctacattttcagtaccttttattttccgtccattaggtggtcttttctttggacatttaggtgacaaatacggacgtcaaaaagttctggccattactgtcattattatgtccatcagtacctttggtattggccttattccatcttatgaaacaatcggtttatgggcacctattcttttactcatcgtaaaaattgtacaaggcttctccattggtggtgaatactcaggtgctgcgatttttgtagctgaatattctccagaccgaaaacgtggctttatgggaagctggcttgattttggatcgatagccggctttgtacttggggctgcaactgtcgccttgatcacacacgccgtgggtgaggcacgttttgccgagtggggttggcgtattccattctttctcgctctaccactgggcataatcggtttatatttacgaaaccgccttgaagaaacccctgtatatcaacagcattcagagcaacaagcacaaaaaagcaaacctcaaaaatttagtttcaaagaaatttttgttaaacataagcgtagtttattggtgtgcattggcctcgtaatcagcactaacgttacttactacatgttgctaacttatttaccaagctatttttcgcataacttaggctattcagaagcacatggtgcacttattatcattgcggttatggttggcatgttatttgtacaacctgtgattggttatttgagtgataagttcggacgccgcccatttatttttattggaagcttttctcttattttcttgtcctatcctgcctttgtattacttaactctggagtaaattatcaaatttttataggcttacttattcttgctttatctctcaatatgtctatcggagtgatggcatcaactttacctgccctatttccaactgaaatccgttatagcgctttaggtattgcctttaatttctcagtggttattgctggtttaaccccaactcttaccgcaactctagttgaaactacccataatctgatggttccagcttattacttgatgatttgcggggtggtaggtattgctactgcaatgtatttaaaggaaacagccaataagcctttaattgggggcgtgcctattgctcacaatatagaggaagcacaagagttacttgaagagtttcatgaaactattgaacagaaaattgaaaatattgatcagaaaattcaggagcttcaacaaaaacgtcaaaaacttgctgataaacaccctgatatagcatga

SEQ ID NO: 58750 - DNA, 537 bp, Acinetobacter baumannii
atgttcactctcaacgcttttaaacttgtcatatatcgccaatttattattttcaccctttttatatttcgtcacttaaaaagctatccaattcgatttcttacacctgaagaaaaagctttagcacaaagggtgtttgggagtttgctagattgtgaacgtcctaaaattattgctactcgttacttaccgtggcaagcgcatggaattttgatggctccaaatggaaatatatacgtcaatctttctgactacagcagtaattacgcgctagagtctaaattcatacaagggatttttattcatgagctagctcatgttatgcaataccaacgaggtattcatgtattactaaaaggtgcgttactacaatccgcctactatctgagctttaaatattacaatccttataaatatacttatcatcctcagaaagcgtttagttcttacaatattgagcagcaaggagaaattgctagagatatctgttcaggtaaactgccaaatatcatttgcttacctcgacttgatttgtaa

SEQ ID NO: 58751 - DNA, 453 bp, Acinetobacter baumannii
atgtttacatttaataatttaccagacaattatttacctcttgataaattaactatctgtagtaataaaataattggtggcggattcccattttcattaggtgaggggttaccaattattattggaggagggaataatccaaatgtttggattcaagcagtaacaaatattcataccaaaactctttcattaattgttgaggaaaatatttctaaagctaaagaaatatcagtagttaaaccaactaatggtgttattgaagtttattataaaagcacttttaaaattttacgtgtaaaaagcaatggtgaaaaatcagctacaatttctcatttagatttaagaccgattggattaaatattacgggaactccttttcagttaaatattggtggatcaagtttttcaaataataccgttaaaggtaccaatgtttttgttgggcttggataa

SEQ ID NO: 58752 - DNA, 420 bp, Acinetobacter baumannii
gtgcagaaagaacaaataaatggtcaaataattgagttaaaactttccgttcatgatgctttaatggaaaagggttttagtctcactatcaaacctgattacaatttaactgaagctgaatttaaagatttaaaaagtccagcaagaagttgggattttctaagtacagggctttttatgttcggaattggtttgcttctaacttgtttgagtcgcttcctagctcagaattttttatcttcttcaaaagtagaaccctatgaatggatatgcggactcatttccttaattcttgcaggtatcgcttggggaataggtttaatggtttcaaatcccaaaaaagaggttatgaaaagaatagaagatcatttttctacacatatgccttttcaacagtttgtaagtaagagagataaataa

SEQ ID NO: 58753 - DNA, 525 bp, Acinetobacter baumannii
atgcctaaatttaccgtaaccgagttatctaaaaaatatggtattgctcgtacatcaatttatgatcgtatgaagaacggtactattagctatgagattgataataagaatcgaaaggtaattgatttaagcgaaatgcaaagggtgtacggtacacctgacagtaagcttacaagtaagcctgacagtacagaaactgacagtactacaattgaaatgtacaaggtattaattgaagaacttaggcaagataaacaagatgctaaagtacgtgaagaacttatgtacaaagagatagaggcattaaaagacaagattgataacttaactttagctcttggatatacacctttaaaaattcagcctgacaatgagcctgacagtacaaacgaacaaaacagtacaactacaggcttacaagaaaatgtatatactgaaactatcaacaaaatagaaaataataattcttcccccactctaatcgatcgctttgaaaaaggaattaaggctttctttagaaagtga

SEQ ID NO: 58754 - DNA, 489 bp, Acinetobacter baumannii
ttgaaaaaaatactaactgaaactgaacgtgattactcttcaagaattatcgctaatattgaattaatatttcatatctatagtgggcgcttaatacaaaattatcaacgtggtctaggactgtttatagattatgcagaagggcagcagattcgcttctgtactgcggaaagttctgaccatgatgcgacactagcaatgagttctggtcaattggctgcattgagtctagcttttttcttatctttaaatagagtttattccgagaactctttagttttaattgatgatcctgtgcaatccttagatgaaatcaatattgcctctttaactgacttattacgttgtgagttaaaagacagacagttaatcatttcctcacacgaagatgatatttctagatatatgagatatcgctttgaacgggctggtttatctcaagtatcgattcatatgcagagccataatacagatagtgtaattcaatga

SEQ ID NO: 58755 - DNA, 1833 bp, Acinetobacter baumannii
atgcctacattaaattggataggaaaagaagcggttgaaaaacatcataaagatgttccttataggttgcttgagcctgtagctgaactttcatgcggtgatgaacatagtggtaatcttttagtgcagggggataaccttcatgcattaaaggcccttttgccacgttatgctggaaaagtaaaatgtatttatattgatccaccatacaatacaggcaacgaaggttgggtttataatgataatgttaatagtcctgagatacgtaagtggttgggtgaggttgtaggaaaagaaggtgatactttagatcgacatgaccgttggttgtgtatgatgtatccccgattgttgttgttaaaacagtttttggctacagatggggttatattcgtatcgattgatgattatgcaatacatcatttaagattattgatggatgaaatttttggaactaaaaatcgtttagaaagctttgtatggagaacagatggtaattttgataatcaagctaaaataaaaaactgtcatgaatatattttaatgtattcaaataatgctgcactttttccccaccctaaagttattgatccaagtgtgggagaaaatagtaagttaaataaaaatattattcaaaatacgattgtaaaaaatggtcctaaaaatccaatgagttctgtgctattgccagctggatttccttgtacagtggatgaggtgataattccaaagagaacggatgcttatcctcattacgatagcgatgtagtaattaaagagggaaaattagtttatccagttaatgctactagtggttggtcatccaaaaatattttattagattttataaataataatttagaagcagtttttgattctaaagatcagctaacagaatttgttattacgcacactggtgccatcgaatctagaaaagtaagaaatagtgctagtcatgttgtatcagtaattaatggtgtaggcagtacccagtctcaaaaagctgaattggaaaaaatgggttttgattttcaatatcctaaaccagtagatttgattagatatctaatttctatgatagctggtaacgattttattgtgatggattcatttgctggatctggatctacagcacatgcagttttaaaacaaaatagtctagatgatggtaatagaaaatttattcttgttgaattggaagatgggattgctaaaacagtgacagctaaaagaataaatatggctatctctggatatgaatatattggtaagcataaaaacactatttattctcataaattaacacttaatagtctgaaaaatagtgagaaattgttgagcaagttaagtgaaattcaagatgaaaatagagataaatattctaatattaaaacagtcattgaaagtgattttatatcattaataggtgaaatcactgtcacagaaaaaacaaaaccattaggtagtggatttcaatactgtacgttatcaagtgagccattattccaatcagatggtcaaatacgttcggatgtgtcatttgctcagttagcagagtttatttggttttctgaaacaggaactggttatacaggcaaagcgaactcacctttactaggtatattcgaaggacgagctatttatttactatataacggaattttaaaagatcttacagaacaaggtggtaatattttaacaaagcaggtctatgatgttcttcccaaatttgatgggggaaaagtgatttatgcagcagctaatcgtttaggggtaaaagctaaacgtgaaaatataacatttaaacaaacaccttatgcgcttgaggtttaa

SEQ ID NO: 58756 - DNA, 1005 bp, Acinetobacter baumannii
atgaaataccaaccgccttataccatcacatcaaaaatcatccatctaattgcacagatcagtgagaatatagggcgcttgaccgttttagaagaaatccaaaatagtcttaagctaaggaaggctaatcgtatccgcacgattcaaggctcacttgcgattgaagggaacactttaagtaccgaacagatcacggcgatccttaatggtaagacagtgattgcacctccaaaagaagtacaggaagtacgtaatgccattaaagcctatgaagcctttcagcagtggcaaccaagccaagaaaaagacctattacaagcgcatcaaattttaatgacaggcttgattgatgaagtcggtcagtatcgtcatggtggtgtaggtgtgatgtcaggtgatcgagtggtgcatatggctccacctgcgaatcagattaaccgtttgatggctgatttacttgattggttgaatgacagcgatatacatccactgattcaaagctcagtcttccactatgagtttgagtttatccatccatttgcagatggtaatggccgaatgggaaggctatggcaaactttgatactaagcagatggaattcaatctttgcaaatatccctgttgagagtttaatctatcaaaatcaaaaagcctattatgaggctttacaagcaagtaccgaccgaacagactcagccccatttatagaattcatcttgcagatgattttagatgcaattcttagctcaaatgacaccgctcaagatagcgatcatgttaccgctcaagttgacgtacaagtgagcgaccaagttcagcgtttaatttcggcaatgaagcaagaagactacactttggctgaattgatgcaattggttggattaactcatcgagcaacgttccaaaagaattacttgaatcctgctatagaagcaaatttgattgagcgtacaatcccaaataagccgaaaagtccgaaacaaaagtatcgtcttaaaccatga

SEQ ID NO: 58757 - DNA, 771 bp, Acinetobacter baumannii
atgagtacttttgaaatgcaaggtctgacatggaaggcaagatcgaagtatcaacaagatgccatattgattgaaaataaagttattcaacataatggactcatcactaaactatatagccattctgaaaaagatcagtggtgtgttgctgtggcggatgggattagtaatagtccagtagctgagcaagcatcctatacggtcttaaaagctttaatacaaaataaaaagatagaaccttgtcaagcatttaccattcagcagtatcttgttgatcaattagcaaataaaaaaagtagttttggcgccagttcaacactcgcactcattcatcacggtacaagacaaggttttgtaaccattcaatatattggtgatagccgagtttatttgtttagtcagcatgatcaaaaatggcactgtctgacgagtgaccataattatcttgaacagttaagagcaaatggagaagtaaaagctggagagaactatgccagtatgtatggtgcattattacaatacttttgtgctgatcccttgcatgaagtgatggattttacaatagctgaggaattcttaactcagaatgatgccctattagtctgtacggatggtgtacatgatgtgatggagtgtacagaatggcctccattaaaagtagatatggatcttcgaacatggttactcaatatgaaagcgtcattagattcaaaacaggcgtatgacaatatcagcatggtcttagtacgagcaaaaaaattaattcattga

SEQ ID NO: 58758 - DNA, 222 bp, Acinetobacter baumannii
atgcaatcagatgatctttttgaacgtgccaaattattcacagaggaagtgggtgtcgtttcggtatcgagtttacagcgtaagtttttaattggacatactcaggcagaacaactgcttaatcagttaattgaagaaagtatttgtgaagctacaaaaacttttgttctagattatgggtatggctataaattgcatcaaggtatgaaagaacaactttaa

SEQ ID NO: 58759 - DNA, 1434 bp, Acinetobacter baumannii
atgactcagcatcaagttgatcaatttaagacagggatttggtcagtaaaaaaattgctattaagtttagatcaactgagtattcctgattaccaacgtccgtacaagtggactgaaaaaaatttaaatgctctcgtcaatgatatacaagaacataaagataaatctgcatatcgattgggtactatcgtattacaccacgataaaaataatacgagccttaaaaatataaatattgtggatggacaacaacgaactttaactttaatgctgcttgtttgggcgattattcagaagccagaattagatttagaacgagaggatctgaaaacagctttgaatgaaatatcgaatcaaattaatgtctttatgggtgtgcaagaatttaatagtgatattagccattacaatatttatcagaactttaatgccgctaaacggatcgtttcagtaaacttttcggaacaagatattgattttttactcaataattgtcaggttgcggtttttattttagatgatatttcagaggcatttcagttttttgattcacaaaatgcacgtggccgtgatttagaaccgcatgatcttttaaaagcttatcatctacgagaattttctgcacaggagcaatatttaaaagcccaaactgttgctcattgggaaagtttagactcggctcatttggcaaagttattttcgaactatctattccgtatccgtctttggtcaaggggaaagtccgcaagatttttcaataaagatcatgtgcatctttttaaaggtattcatcttgggcaatcagaccatcatccatatttagaaccattacgcatagcgcattattttattgataactataacgcacagtatcaacggcaaatagatcgacaagaaatgagttttccgtttcagcttgatcaaatgatcataaacggtcgtcgattttttgaaatggttgagcactatgaaaaacagatcagtaaagtggtggatcatcaagatcagtctgagaagatttctatatttggtgcgacactacaggatcgagcgaatagaattatcaaaatattgaattcatatgatgcaagaaatagggatggggatcgttatgtgcgaaccttgtttgattctgcattgattttttatatcgataaatttgctacagatcggttatcagaagcgattgaaaagatttttatttgggcatatcgctgtcgtattagtcaatattcggtgcaattggcaacgatagataattatgtcctagaaaagaacatattcagtttactgaaatatgctcaatcacccagtgagttaatgggatggtcgctcccgatagtcgataaacaagaaggcactaaagttgagcctttgatcactttatttaaagaactaaattatcttaaacaggaagatcagaatgacaaatga

SEQ ID NO: 58760 - DNA, 144 bp, Acinetobacter baumannii
atgagcttccgttattcctctactgctcgaaccctaattgtgtttggcaatttgatgaaccattactacgacaatgtaaacccgtctcaaatcgatagcttagtggttgaggcgaaatttaaagaagcaacttggagaaagtaa

SEQ ID NO: 58761 - DNA, 1188 bp, Acinetobacter baumannii
atgattagaaaatatataaaaagtgatactgtaaaggctaaagaattagaacctgcattaccgagagctagcttatttatctggattatttgtattggtcttttgtcattactcatctgggcatggctttttaaacttgaagaagtttcaacaggaattggcaaagttattccatcttctaaagagcaagtagtacagtctcttgaaggtggaattttaacaaagctttatgtgcatgaaggacaaatcgtacaagaagggcaggtacttgctcaacttgacccaactcgctttgcatcaaatgttggtgaatctgcatccttactactagcatcacaagcaacagcagcgcgactacgtgcagaagttaatggaactagtttaaaatttccgagtgaagtacttaaagagcgagatttagttgaagaagaaacagcactctatcattcacgacgatctaatctagaagaatctttatcaggtttacaacaagcacttattttagttgaagaagagctgcaaatgactgaaccattagtagcgaaaggtgcagctagtgaggtcgaagtattgcggctcaagcgccaagcaacagatttgcgcaatcaaatgaatgatgtgagaaatcaatatttggtaaaagctcgagaagagttggcaaaagccaacacagatatcgaaacgcaattacaagtcgtaaagggtaaatcagactctttaaatcgtactctttttaaatcacctgtacgagggattattaaagaaattgatgttatgactattggcggagtgatttctcaaaatggcaagttgatgacaattgttccgctggatgaacaacttttggttgaggcacgtatttcaccgcgagatattgcttttattcatcctgggcaagatgcactcgtgaagatcactgcctatgattattctatttatggtgggttgaaaggaaaagtttcaattatttcaccagacacattgagagatgaagttaagcaagatcaattttattatcgagtgtatattcgaacggattcaggaaaattgatgaataaagcaggcaaacaattcagtattactcctggcatggttgcaacagtcgatattaaaacaggggagaaaacgattttagattatctaataaaaccatttaataaagcgcaagaggctttaagagaaagatag

SEQ ID NO: 58762 - DNA, 2118 bp, Acinetobacter baumannii
atgaattatcagccatggcttcaagccgttctagcaattgcaaaacattatcgtatcgaaccatctgaagagcgtttacgtttgcaactcgattggaatccgagccagtcacttgatgatattttgagtttggtgagccgtcagatcgggatgagtctaagaaaaactgaatttagtgaagatattttgaatccgtggcgtttaccacttcttattcaaatgcaagatggacaagttggcgtattgaatcaactcgatgtcaatgggaatgcaaatattcagttcagtggtgatcaaggattagcacaggtactcactgtagagttattaaaagaaaatgtgaacaatgtttatattttaagacctgagaaatcaattccagatgtccgtattgatgaatacataaagccttatgagccaagctggttttggtcaattgtgctcaaagactggaaacgctatttggatgtgatgtttgcatcattaatggccaatatacttgcattggcgacagttttattttcaatgaatgtttatgatcgagttattcctgcacagtctgttccaactttatgggtattagccggtggtgtactaattgcagcaatatttgaattttgtttacgagttgcacgtatttatttatcagacattatcggaaaacgtgcagatctaaaaatctcagataaggtatttggtcatgctttaagaattaaaaataaagagcgctccaaatccacaggtacgtttatttcgcaaatacgtgaattggaaggtgttcgtgaattagtcacttctacaaccatttcagcgattgcagatttgcctttcttctttttgtttttggcaattttttggctgatcggtggcaatctgttttgggtaatggttttggttgtacctttaatgattattcctggaattttgattcaaaagccattggcaaaattagcatctgaaggaatgcgtgaaggtgctattcgcaatgcaacactggtggaagctgttcaaggtatagaagatattaagttattgcgagcggaatctcgatttcagaaccaatggaatcacatgaatgaagctgctgcagatatttcaatgcgccagcggaaattagttggaattgtgggggcgtggactcagaaagtgcaagggcttacttttgcgcttgtcgtccttgttggatgttttgctgtgatgaaaggggaaatgactacaggtgcattagttgcttgttcaattttatcatcgcgtatgcttggaccaattgcacagatttcaggagttctagggcgttttcaacaagctaaagttgctaagacaagtttagatgagcttatgaagaaaccagttgaccaagcaccaaatacacatttaattcatagacctgttttgaatggacattatgaacttaataatattgtcttcaaatatagtgaaaacgatgcaaaacctactctcatcattcctaaacttgaaattcaagcgggtgagaaaattgcgattttaggtcgtaatggtgcaggtaaatcaacgctattacagttgctatcagggatgcaagaacctgttcaagggaaaatcaatttagatggggttgacttggggttaattgatccaactgatgtacgtcgagatatgggtttactcaatcagaatgcacatttgttttttggttctgtacgtgaaaatttaacattaggctcacctttggcgactgaccaagagcttttaaatgtgctcaagctcacaggggcattaaactttgtattagataagaaagaaggtttagatcatcaaattttagaaggtggtgttggtttttctggtggccagcgtcaagctttacttttatcacgattattacttcgtcaaccaaatattctattgcttgatgagccgacagccgcaatagatgacgtttctgaaaaacaactaattcagaatcttaaggggtggttaggtcaaaaaactttggtcattgcaacgcatcgtcgagcagtacttgagttggtggatcgaattattgtagtacatgatggaaaaattgttatggatggtcctaaagagaaagtattaggtaatactcaaaccaatatggcgagtacagcatcatga

SEQ ID NO: 58763 - DNA, 1515 bp, Acinetobacter baumannii
atgaattttataaaatcaaagatatggcttgtgctatttcttccgttttgtgcaccaataacgcctatttatgcagcaaaaccaaaaaattatttagactcagctaaagtaaacatcgaacagtttttttcgtcgcaacctgcagatttgaatcaagtgagtattcaagaactaagtaaatactcatggggtgagcagacagcgcaagatactttgccagttaacaaatcgagtggtattcaaccacaacttaaaggtataggaaaaataagcattaactctgaagctgagctaacactttttgatgcaattcatcaagcgctgcagcgtcgacctgaaatcactcagagtattgctactattgcaggccaaggtgcaaacattgatgcggcgaaggcacaatattttcctcaaatctctggtggtattagtacagctgatttaacgactggcgaacggggaagacaactttacagtttatcagcgacacaggttttatatgattttggaaaaatcaaaagcgatatcaatatagaagaagcgaagttattacgagaacaagcaaatacattaaatagcattgatgatattgcatatcaaacagcgaatgcgatggtcaatattaaccgttatcaagaaatcgttcgtattgctaatcaacaaatcaaaggaattgctcgaattgcagaaatcgccaatttacgggctaaagcgggtattagtagtcaggcagatccgattcaggcacagtcaaatttagaagcggcgcagtcaaatttactcatacaagaaacgcagttaaagcagtatcagcaaaagttacaaatgctgctgggctatgatgtgtcccatttaaagatgaggattccaaatactattattcgtaatgcaggtttatacaatgaccctgaatttacgcatcttcctaagatgatagcagctcaggcagcagtacaaattgccaaatttcaaaaagaacaaacaaaactaagtacatatccaacaattaatattaagggcagtttaaatcaggccttgaatggaaaaaatccgaataataatgaagatgatggtttttatagctccattatggtggaagcgaatagcaacttttttcaaggcggggcagtccgatcaaaactccgttctgctaattatgcggaagaagcagcaaaagcagcagttaacacagtttatttagatgttttggatcaggtacagctcattcgtgtacaggtcgaaaataagcaaaagcaaatggaagttctggcattgagaaaagaaaccacggcacggacaaaagagttgtatcaagaacaatataaattaggcacacgcacagtggtggatttattgaattctgaacaagcaattcatgctgctgcacaggaaattgaaaatgctagatatgatatttacgcggccctaattcagtatatctatgttactggtgcttcaagagcattttatcaactaaataatatttctattcaagggtttgaaattttaccatga

SEQ ID NO: 58764 - DNA, 3294 bp, Acinetobacter baumannii
atgactaattttattgtaattgagaaagactcattaaataagtctacagtaaatgcggcacagattacattaaccgaagcttctattgttcatactaaaatgagccgtgatgacgtcgatgaatttatccgtgatggcaataacttagtgcttaagttaaagaatggtgaagttgttgtcattgagaatttttttataatatatgacgatgtcgcttcagatttggtttttgaagaagatgggtgtgttctatattggtttgatggcgtatcgggttttaaaggcattccgggattagaagcattattgcctgctgttgaaagcagtcaacttgttgggttgttaccttggttggtgggtgctgctgtagttggtggcgctgcagcaattattgatcacaatgacaaggatgaagaaccgaaagatactacagcacctacagcaccaactgttgagattaatgatgggggtgatggtgttatcaatccaacggatcttgtcaacggcaaagttacagtgactgttaagccgaccgagccagttgtagagggtgataagattacgatcactcatccagatggttcaatagaagaaattgaagttacagcatcaaacaaagatgacattaacaacaatggcattactgtcaaagtcacgcctgcagcggaaggtgaagatacagttgttacagcagttgtaacggatccgcaaggcaatacatcaccagaaggtaaagacaactcaacagttgacttggttgttccgggtgatgtggatggtgacggtgaaaaagacctaacaggtgcgccagttgttgaaatcaatgatggtgatgatggtgtaattaacccatctgacttgaatgcagacggcactgttgatgcaaaagtaaccttcccgaaagatgcgggttatagcgttggtgatactgtcgtgatcaaagatcaagacggcactgaactggttaagcgtccattaacagctgaagaccttgaaaacggcattactgtcaaagtcacgcctgcagcggaaggtgaagatacagttgttacagcagttgtaacggatccgcaaggcaatacatcaccagaaggtaaagacaactcaacagttgacttggttgttccgggtgatgtggatggtgacggtgaaaaagacctaacaggtgcgccagttgttgaaatcaatgatggtgatgatggtgtaattaacccatctgacttgaatgcagacggcactgttgatgcaaaagtaaccttcccgaaagatgcgggttatagcgttggtgatactgtcgtgatcaaagatcaagacggcactgaactggttaagcgtccattaacagctgaagaccttgaaaacggcattactgtcaaagtcacgcctgcagcggaaggtgaagatacagttgttacagcagttgtaacggatccgcaaggcaatacatcaccagaaggtaaagacaactcaacagttgacttggttgttggttcgcttgagattaccgaaattaatgaagatggagtggtaaaaggccaaactactgatgtgccagtaggcagtgatgttgttctgaccttcaaagatcataccggtagtcaaattaatgacccagtaacaggaaaaccagtaacagtaacgacagtagttaagccagatggtagctatgaagctcaattacctgaggatttaacaagcctgacagatcaaattaatgtaaaagctgattcatttgataacaatggtaaaccggttagtgacaatgaggataccaaaaagccaattactgaagtaactacaaatggtaatgatagtctaataggaacaacaggtgatgatgtacttgctggcgatacaggtggtttaaaaaccaattttgttgcaggtcataactacaatgtatcgattgttttagatttatctgggagcatgctttttgcaatggatggtacgagtaatcctcaagcgggtacgtcacgtttagatatggcaaagaaaggtttaaaagcttttattcagcaaatggtagatcatgacggagtaataaatttacaactcgcatcattctcatcaaccaatactggtaacaatgcaggtaatcaatacaataaatcatgggttgttggtaaaggtaatttacaagaaatatttaattatattgatgctctacaggctggaggtggaactcgtccagatcttggctggaaaaaagcagaaaattggtttgatggtagtttaactggtttagcaagtggctctgtcaaagcgaattctagttatgaaaatcagacttactttctaactgatggtgaaccaagtccaaaaggaactggtggtactgcattagctggcactgcaaatgaaacacaaaaacaatcatacgatgcagactttgtaggattgactgagaaaagtaaagtttttgctgtcggtgtcagctctgctgtatcgagtaataccgtctcacgttatgataacactgctgaaaatggagataagattttaaattggtctaaagataatcacggtgatgccaacgcaattgctgacgcagataaacttattgcttacctcattggcggttcagaaaactttattccagtagatgttggaaatgatgttgtcaaaggcggggccggtgatgacattctgtttggtgatgccatgaatacagattggattacaggcttagatcctctgcaatatccaaagtattcaggctactcaaaactgattgcgcatttaaaagcaaatgtgacgattggtgcagaaccaacccagcagcaaatctatgatttcgtaaaagacaactaccaaaaatttgtcactgctgatgctactgatactgaaactaaaggtggtaatgacatcatctatggcggttcaggtaatgacatcattattgctggtgcgggagatgatcgcatctacggtggttcaggagacgatattatttccacaggccgcggtaatgacactattatttatgatgtgttaaatgccgctgatgcaatgggtggtaatggaaccgatacatgggtcgattatgcagctaatgacaaaattgagtttggtgcagatttctttgaaggtctacttgctgataagtcgaatatttctgaatacattaaagttgaagatgtaaacggcaaagcagtattgaaagtcgaccgtgatggtgctgctgatgcaactggtggtacaacccatgattgggcagatttgttaattattgaaggtaaaaccgcatcggaattacaggatttaattaacaaccaaatcattattggctaa

SEQ ID NO: 58765 - DNA, 849 bp, Acinetobacter baumannii
atgttgagattgtcactttttttagctcttgtagcttcattgggagtagcggcttgcacatcaagctcatatacgaagccatcagatttacgttttcagaaaaaaacgcaagaaaataatcaacctattgtattaaagcgagatgagaagctgtgtggtggtgatacagcagaacagcaaaattgcccaattgaattttatatcgacagtattaaagctggaaatttttatataaataattcggctcaatatgcattgaaaccagaaacatataatttcaaagtaaaaaactgtactgaagaatcatgccaaagttgtgatgttgacttaaacgtaggaaagctaacaagcaatgaatttgtactctctgtcaatacagacagtaaaccttttatttccaataatggtcatcctttaagttgtgaggtgaagcatcaggttgctgctcaggaacagacaatacgagtggatttagctgcggacactttatttaaatttaacggttcttccttggatgatttattgccaaagggtcgtcaagaagtcttgaatgttgcttcgcaaattcataacaacttcgtttctgtaagccgcattaatttagttggtcacacagatcgtttgggaagtgatagctataacaatcaattgggacaaaaccgtgcagacacagtacgcaacttgttggttcaaaatggtgtggcagggaatatgatttcgactgcaagtgcaggtaaaagccaacctgtgacggatggttgtttttatgtaaaacagcgtgaagaactcaaagcttgtttacagcctgaccgccgtgtaactgtcgaaattacaggtattactaaatag

SEQ ID NO: 58766 - DNA, 576 bp, Acinetobacter baumannii
atgatgacggttgcgccacttaccgtttccagtattagcgcactccattctgaattaattcagaagttacaacatgcaattgcccatgatgaactcacctcaagtttaactcgacgccaatttttacagtcagtccgcctactccaagaaaaagtacaaaaggaaagtaagacctctgcattttttatgttggacgtcgatcattttaaaaaagtgaatgatagttatggccacttaattggagatagagccttacagacctgtgtaacgaccatacaaaatattttacatcctcatgacttactaggacgttttggtggagaagaattcgcaatttttattccggataccaccagagaggctgcctttgaactcgcggaaagaatacgcattcaaattagtcagcaaccgatttatgtatatggcaaattacccatctttgtgcaggtaagtattggtattagcttatattctccaagctatcaccgctctattgaaagtttgtttaaagaagcagacgatgcactctatcaagcaaagcgccaagggcgtaatagagtttttatttctttgtaa

SEQ ID NO: 58767 - DNA, 243 bp, Acinetobacter baumannii
atgactcaaacacgtccaagaatgaccaaattatttgaacagcttggtttagcttctactgaagaagcaattgcaaaattcatagagagccatcagctagctggagatgtttttttaacacaagcaattttttggactgatgctcaacgtcattttttagaagaaaaactacactctgatggtgaatggacgacagtgattgatcaattaaatgagtctttacatgaaaattcagtaaaataa

SEQ ID NO: 58768 - DNA, 432 bp, Acinetobacter baumannii
atgatgaaattcaaaaacatttttttgggcttatgtatcgcagccgcgtcattgaatacatttgcacagcaatccgatgaacacaaagatcaccaccctgaaaaaacagcaccatctgcagtaacaattaagcaaacagttaccagcaccactgctacagataaaatggctgcaatggatcaacacatgaaggcgatgcaagccatgcatgagaagatgatggctgcaaaaaccccacaagaacgtcagaaacttatggctgagcacatgaaactcatgcaaggaggtatgagtatgatgaaacagatgggcagccaaagcatgaatacaaatatggctgaccgtcagcagatgatggaaaaacgtatggacatgatgcaatccatgatgcagatgatgatggactgtatgcctccgtcagcaactaaatag

SEQ ID NO: 58769 - DNA, 249 bp, Acinetobacter baumannii
atgaatcaccaacaccaagaaaataattcagtacctaacttctggtctacacgttatgccattggtctaatcgtgctgggtggtatcgcagcttattttctattaacggaacatttagcccacgttatcggtgctttgccttatttattccttttagcgtgtccactgatgcatatttttatgcatggtggtcatgggcataaccactcgcagcaaaaaaaatccgatatatctgataacaaaaaatag

SEQ ID NO: 58770 - DNA, 651 bp, Acinetobacter baumannii
atgaatcatgcggaatcggcttatggtttatggacgctggttatcattaactcagcagtttttatcatgttcgctttcagtttttttagaccttccactgcgcgcgattggcgtacatttggggccttttcggcttttatcattgctctatttgtcgaaatgtatggttttcctttaaccatttacctgttatctggttggcttcaaactcgcttccctcaacttgacttactttctcataatgcaggtcacttgtggtcaacgctattaggtgaaaaaggtgatccacattttggcattttgcatatcgccagttacgttttcttgggctatggattttacctgttatcaacgtcatggcacgtgctgtacaacgcgcaacgtcagcattctttagcgatcacaggcccttatgcacgtatacgtcacccacaatacgtggcttttgtgatgatcttgctgggttttttattgcaatggccaactttactgacactgattatgtttccaatcctactcttaatgtacagccgcttggcaattaaggaagaggctgaaatgagtaaacagtttggcgctgtctatgacagctatgctcaacagactccgagatttattccaaaattcggccataaaaccacttttccataa

SEQ ID NO: 58771 - DNA, 2376 bp, Acinetobacter baumannii
atgtcagatcaaaaaaatcataaccaggaccatatggcacaggctacaacagacgtactgaaagacccagtctgtggtatgaccgtcactgaagaatcgaaataccatgaggaatttaaggggaaaacttactttttttgcagtgataaatgtcaatcaaagtttcatagcagcccggtgcaatatatcgctaaacccgcaacgacgactgccgatgcacatacacagcatcatcagactgttcaacacgttaatgcggcaagcacaacaggtacgaccatctatacatgcccaatgcatccagaaatcaggcaagatcatcctggaaactgtcctaaatgcggaatgacactggagccactcattcctgaattagaggaagatgagaatccggagttacgtgatttccgccgacgcttctggtggacactgccattgaccatcatcgtgacttttttggcgatgtttggtcatcaaatgaacctgttcaatatggctgttcagagctggattgaactggtgttgtcactcccaattgtactttgggcaggttggccatttttttcccggggttggcaatcggttgtgaatcgcagcccgaacatgtggacgctgattggtttgggcactggagctgcatttatttatagtgtggtcgcaaccattgcaccgcaaatcttcccagactcatttatttccatgggtcgtgtcgctgtttactttgaagcttcagcggtcatcatttcattgaccctactgggacaaatattggagttaaaagcacgttcgcaaacttctgctgcaattaagtcactccttgggctcgctcctaaaacagctcgccgaatcctgcctgatggaactgaagaagatgttcctctaacgcatgtccatgtaggagatttactcagaattcgcccaggtgaaaaagtgcctgtggatggtgtaatcactgaaggaagtagttcagtggatgaatcgatgctgacaggtgaacctttaccgatcactaaacgcatcggtgataaagtcattggtgctaccctgaataccaatggttccctaatcatgcgttcagagaaaattggttcaagtaccatgttgtctcagatcgtacagatggtggcgcaagctcaacgatcgagagcaccaatgcaacgtatggctgatcaggtagcaggttggttcgtcatggctgtagtgaccattgccttgcttaccttctttggatggggactattcggcccagaagaatcaagctgggtttatgcattaatcaatgctgtggcagtactcattattgcctgtccttgtgcactaggcttggcaactccaatgtctatcatggttgcgacgggtcaaggtgctactcatggtgtgctgttccgtgatgcagcagccattgagaatctacgcaagattgacacactaatcatcgataaaacaggtacgttaactgaaggacgccctgtattcgatcgtgtagttgccgcatcagattttgacgaatctgaagtattacgtttagccgccagtcttgatcaaggcagtgaacacccgctagccgaagcgattgtaaacgcagcacacgaacgtggcctgtctcttgaaacaccagataattttgaatcgggctcagggattggtgttcgaggtcaagtgggcgatcgtcagttagctttgggcaacacagcactgatggagcaattgggtatctcggtacaatctctgattccgcaagccgaagagctgcgttcggaaggtgcaagtgtgatgcatctagccatcaatggtgaattggccggtctgcttgcagtatccgatcccatcaaaaaaaataccccagaagcacttgccaccctgaaggaagcgggtctacgtatcgtgatggcaacaggagatggtctcaccactgcccgttcagtcgcagcacgtctaggcattgatgaggtacatggcgaagtcaaacccgcagataaactagaactggtcagcaaattgcagaaggaaggtcgcatcgtggctatggctggtgatggcatcaatgatgcaccagccttggctaaagctgatgtcggtatcgctatgggaaccgggactgatgttgcaatgaatagtgcccaagttacgctggtcaagggagatttacgcggtatcgcggttgcccgttcactttcggaagctactgtcggcaacatgaaacagaacctcatgtttgctttcctttacaatgctttgggtatccctatcgcggctggcgtactatatccatttaccggttggttgttgtcaccgatgattgccgccttggctatgagtttgagttcagcttcagtcatcacgaatgcccttcgcctgcgaaataaaaagttatga

SEQ ID NO: 58772 - DNA, 1284 bp, Acinetobacter baumannii
atgatagagagttcttttcttccaccagatgtaccaggtcttattgcagcacttgccatcggcctgctcattggtttagaacgaggatggcacgatcgtgaattgcccgagggcagccgagtagcaggcctacgtaccttcacattgacaggattgctcggaggagtgctcggtcatttacaaccaaacttcgggccttggccgctggtcgcggccgtattagggctttccttattattaacagtgtcctacgcgcgtaccgcaaaactttccggtaatctaagcgctaccacgacgatcgcgatgctgttgacattagttttaggtgcatatgcatcccatggtaatgttactttagcattaaccgcggctgtaatcgtcgctgtatttttggatctcaagccaaccttacacggttggctacgcttgatagagcatcgtgaattaaccgcatccctgcagttgctggtactttctgtcgttatattaccctacttacccaatacgggtctgggaccttttgctgcattaaatccttaccagttatggtgggcagtgatcctgattgccggactctctctggcaggtcattttgccatgcggcttaccggttcagaaagaggcatattctggacaggtctattgggtggtttggcatcttctacagctgcaactgtcgcactggcacgctatacacgccagcaccccgtcatggtcagtgctgctatttctggaacattggctgcctgtggcatcatgttttttcgtatggttgtgctgataggcgtcattgagccagcattgctaagcacttttggtggtgcaatgatgattgcgggaatccttctgctgggtatggcattgtggagacaacgccaaattaccagcgctgaaaacaacgatcgaacaatagaagcaatggctccttttgatcttgggacagcattcagcttcgctgctttcctggctgtcatggcagtcttggtcccggcagcaaaacaatggttgggcaccagcggcatcttcgtattatcgactatttctgggctagcagacgtagatgctattttagtctcacttgcccgcctgcatagtactgaaggcttaacaacaaatgtggctgctgtcgcgctagggctggccacactgagcaacatgttaagcaaagcgacaattgcatggatgacagggggggcacagtttggccgagctatcatatttggctacacaattgccatgataggtgctggcgtagctctggctctcagtttgagctttatgtaa

SEQ ID NO: 58773 - DNA, 504 bp, Acinetobacter baumannii
ttggcaaaagcagaacatggcttaaatttacagaacttacagaatattgacctcattaaagaagttaccgatttatttgatttctatgacgctctagctgccgaaaaaaatatgacacttcaacaaacaggatctggcaatgtaaaaggtgatcctgctatgttacgtcgcgcactcagcaacctattgtctaatgcagttaaatatggaaacaagaattctacaatacagataaaacttcaacagaatttagataacacaatattttcaattgaaaatgaaggccctgaactctctcctgaacaactatccagattatttgatcgtttttatcgaacagatgcgtctagacaaagaacagaagaaggaaccggcttagggcttgccataacaaaatctattcttgatatgcttggggcgaccatccaggctgaatccctcaatggtcgaatcatttttaccattgtttttcaaagtgaatccatgcaaggggaatcattttaa

SEQ ID NO: 58774 - DNA, 504 bp, Acinetobacter baumannii
atgcagagtttggctgcatatacaggagcagactataaagttccaggtagcctagactatcgcaattttctccgggcaaccttgatgtgtacgcaagatgtacgagaaagattgcatgcttttaaacgtgctgtgtttaatgtgcttttcaataatcgggatgaccatactaagaacttttcatttctcatggagaaaaatggtcaatggaaattggctccagcctatgatgtgaccttctgcgagggtccaggtggttatcatcaaatggacattatgggagaagcgctcaatatttcccgaaatgacatacataaactcggtacttcagaagctaatctgactactctagaagtcgatgagatcatcttgaccatgcgtgaaattgcacttcaatttagtcaaattgcgcagcgcctgtatccccatcaaattcgagaatctaccctacagatgattcaatcacggattcaacagaatattgattttttaactgaaacctaa

SEQ ID NO: 58775 - DNA, 288 bp, Acinetobacter baumannii
atgacctataagttagattttttagaagaagcattagcagaatggaacaagctgaatccaagtattaagcagccattgaagaagaagttgatcaaggttttggagaatcctcgcattcccaaaaacaagctgtcaggacatcctaatcgctacaagatcaaacttcgcagcattggttatcgcttggtttatgaagtcattgatgatgaagtagttatactcgtgattgctgtaggcagacgtgaaaacaatgctgtctatgatgatgccaactctcgttattcataa

SEQ ID NO: 58776 - DNA, 126 bp, Acinetobacter baumannii
atggctggatcgcaaatcggattgttatatgaaagtctttcattgcaaacgctcaaggatagcttccgtaattaccttgctgtgcattctattatcgggctgcacagcccatacgatcaaaaataa

SEQ ID NO: 58777 - DNA, 201 bp, Acinetobacter baumannii; identical to SEQ ID NO: 54147

SEQ ID NO: 58778 - DNA, 540 bp, Acinetobacter baumannii
ttggctggctctagtcgtcaaatcattaactatggtcatatatatggtactggcggttctggtggttactatgatgctgatgtagctatggtgggtgatggtggtacagctatcattgcacagaatgacagtagttttattgatgtacgtaactatggtttgattgcaggcggtggcggtggcggcgcagctggtaaatcgcaatattcaattggtgatcaagaatactatgctgttggtgcaggcggtggcggtattccgctgggtactggtggcagtaacatccgtcaaaatgcacctgaaggaaagactcttgtaaaccttgctggtacaacagcaacattatctattgttggcaatggtgcagatggaacaggtttagtagctggtgatggcggcaacgttggtgagaatggtaaagctagtgaatcagaccttgaaaacggtattgttggtttagctgggtttatttatcaaggcaacgttactatcacaaatattggtggtggacaaataaaaggtagattaccgtcaatctag

SEQ ID NO: 58779 - DNA, 153 bp, Acinetobacter baumannii
atgaatatttttattcgcgatgagcgagaagaagatattaaagaaattgaagaattgactaaagcggcatttctaaatgctgaacatacgagccatactgaacactttattgttaatagtttaagaaagcacaaacaaccacagtctctttag

SEQ ID NO: 58780 - DNA, 264 bp, Acinetobacter baumannii
ttgaatgagttaaaattgcgaaatatcagtatcagtatggatgggaaaggacggtggagagataatgtgatgattgagcgattatggcgcagcttgaagcatgaggaagtctatttgaaggcttacgatacggttaaacaagcgaaacaatcaattgctgaatatttggatttttataacacgatacgtcctcattcaagtttgaataaggcaacaccaaatgaattttatgatcaacatttactaaaagtaatggcagcataa

SEQ ID NO: 58781 - DNA, 249 bp, Acinetobacter baumannii
atggatattgaaacaactggggtaaaaaaatatgcattccaagatcttgtatgcatttctcttctattaaacctgcacttcaccgagaatgtacaattttttgtagagccagagaacagtgaagatgcaaagctaattactgatgatctaaatggaataaatgaaattgaaccgtaccgggtttgtcggagagtcaatattctgagagactatcccgatgacaaaaccaaactatacccccgaaattag

SEQ ID NO: 58782 - DNA, 372 bp, Acinetobacter baumannii; identical to SEQ ID NO: 56546

SEQ ID NO: 58783 - DNA, 369 bp, Acinetobacter baumannii
atgaaaactctaaaggaaatttatgatctaaagttagaaaaactagtctttatgagaaatcgatatacaagggctcaaaatgctggaagtttctcttatatttaccagcctaggaagaaatcttttaaagaggcatttataaaaactggaataaattattcattacaaattaaacgattagatgacagaatcaataactgtattcgtattattaaagatttaaaaccagtcgaagaagcctcatcatcaattataaaaaatattttccaacattttgaccaatggaagtacgaaatccaagatgataccaatcaatcactttatgacacagttaataaatactacaagtcgagtaagaagaaaaaatag

SEQ ID NO: 58784 - DNA, 234 bp, Acinetobacter baumannii
atggctcaggctaccgatcccttcaagatgatcaagcgtaccgacctagaagagcttactggcttatctagatcaactatctacgatcgtattaatcctaaatcctgtcgttatgaccctacctttcccaaacccgtgaagtttggtcatttaagcagatggagattaagtgaagttcggttatggattcagtccagaattgaagcgcgtaatcagcaacaaatgacggcgtaa

SEQ ID NO: 58785 - DNA, 1170 bp, Acinetobacter baumannii
atgaataaatcccaattactccataatgcaggtacattcacacttgaggaacaacttgcccttcttcgatcagatctaggttcaacagatattacagcacctgatggatcatcacggaagtttctacatgcgatagatcctgaagcggagatatgtgtgaatatcgtctctgcaattgataaatgtaagaaaaccaacctacctatagctaagctcaagcaggagaaaactctttcttcaattaaccgttattgggttcactttccacctacatggaaattacttgaagaaaaattgcgttcagcatttcaccatgaattctctaagaattatttttacagtgaagaggtaaaagcctggatgcatattcaatctcagtttacctctgaagaactagccatacttgctcgtcttctcccggtaaataacagaagcgaagtgagcgtacaaacatatgttgagctatttaatcattttactgaacaactgaaaaaatacgttcttagcgctgaatacaagaagaaaattcgagatagagatgcaacaaagaacgcgaataaaaacgcctgtattgagctgtttaatcatctcatcgctaagtttgctcgggttttggtggtaagagtagatttttcattgaagcgagatatggagactatccttaaacatgcttcaaccatggaatttccatattcacgtaatgatcttgtttatatcaaaaagtgtatgaggaagttcaaaaacaactggcgtagcaacaaactcttaaatgatatacagggctatatctttcaatatgaatactctcatgctactggatttcatattcacgcttattttttctttgatggtaataaacaccgagaagacatcactattgctaaatatatctctgattactggaaaaatattaccaaaaatcaaggaagcacttatatctgcaatctcgataaggagaactacaaatactgtgcaattggcatgattcattatgccaataaagaaaaacaagcttttttattccaaacctttgaatacatctgtaaggctgatcaattttttattttctctgagctgaaaaatagcaaacgatttcaacggagtgaattacctgagcccaaagccagttcaggccgtagtcgtcaagacccaccaacagaatcaaattaa

SEQ ID NO: 58786 - DNA, 1071 bp, Acinetobacter baumannii
atgaacttactcagcactatgcaaaagatagaaggtctcaactatctcaatcttgtgactaaggcctattttaaccagttatacacacaaccgtattccgtacctttatatgcctatatagatcttattgagcaaataaaaaaaaggaaaagttttaggatatttaccaataatccaacagcctatcctcacccttctgttcccaatttatatatgactaatttaggacacttagtactccaaatcgttaaagataatgtcataaacccatacacaaatggagtttttcaaaatgccttaattcaccctgaaattaatttattaagtcagttaatggtcaaacataacatcaatagtatctttataggtgaataccaatatctagaacatatctgcgaaacctgttttgcagactttaaggtacatattcaaactcgtgcatttattaccgaaaatcgacgttggagttacaaatattcgtgtggtgtgagttcttacaatcgctttctagaattcattttaagagaaacagaacgatttgaagtacattcgatagtggtacatcgcaaattacgagatgggcgtgagtcagcgtttggagatttagactttagagatatgtcagcgtatgaaatcgcacatgaaaaaagtaatcaaattatccaaactgtttggcgtaaccgtcgtaaaaatgaggtgttaggtatattgtctcgggatgaagtagatatagatcagacgtgcatgatcagacttctattttttgttaggaaaaagttttctgatttagttccgtttaaagatacccctctttacaatgccattgaacccttctttaaagacttaaatcttgatcgcgtagctttaggagaggtttatacgatgaactcaggtatagctcccctttatcaggaacaagagcagaattactatgatattaatcaagtgcatgtgggtaatagattaaatatattaaaaactcaactcactgtccccgattactggtttaggattcgagatcaagaaccaagtcttacgattgagcggggacaagctcattttgaacgttag

SEQ ID NO: 58787 - DNA, 372 bp, Acinetobacter baumannii
atggggcaggcaaaacaaagaggttcattagacgatcgcatagctgaagctaagcaacaaaaactagtggaagagcgtattacaattaatgaagctaagtgtcgattgggattgcctgatagtgctgagtttcaaggttatgtaattcatctttatgatgaggatgaatttgttagccgagtagaggaatcagatttaattattaatcgaatttatgtaaaaattcctgatctggcacataaatatgatagtgctgaagatgcagtaaatgaagccctgaaaattgataagtatcgtttaatggtttgcgttttatttgaagttgataataagcatatcatctatgatatttgggctaattttaacgattga

SEQ ID NO: 58788 - DNA, 639 bp, Acinetobacter baumannii
atgttaatttctgatttagttcaaaatataaagcaagaagagcggttacctgttattcaagtaattatagaccatgttactaatttggattttatatttgatcttttatcatggttgaaaaaatatgatgaggaaaaacctgaagtaaccgatgttttttcaagctttgatatggatgagttaagcaaatatgtagttggtcgaataaaaaatgagctttcttctaatgtcaatattattgaccttgccccaagaaatttacctactttattcagattacttaatgagtatatacaacctaattttgtagatgaacttctcataaaattattgcctagtaaaccaaagcttttaatctctattatcaagccatatttaggaatagcggaaggtggtaatcgttctggacctcatagaagtgatttaaaatttgaacaatataaacaaattagaaaacagataaatattaatatattaatagctattattgagcagaacattgaaccagaggctatattttctgagaatttccctgaacaatatgataacttggatgacaatgattttatatttatcaaacaattatattggttatataaaaaccgagatgatgaaaaggatttaggtgaagattcttaa

SEQ ID NO: 58789 - DNA, 300 bp, Acinetobacter baumannii
ttggatgatttaaaacttgaagatggccttgatgacgctaatttaaagcttaaattaacactcacctataatcgaaaaacatccaaaagcgggcaaaaagtaattgatactgttgcatcatctatgagacataatgatgattatgttataactcttgaagatggtactaaggtcacagcggataacttaaagatgagtggaaaaatatctgttgaaacaatcaataataaagtttataacgacggccttaaagttcaattgtacaattggatgactaccaatattaattttggtgattaa

SEQ ID NO: 58790 - DNA, 417 bp, Acinetobacter baumannii
atgtttaaggcatggaaagcaagagccaaagctcaggcggtgcccgaaactcacgtgcttgttgaaaaatctaaaatctctacatggtggcaagatgcagatgaaccagaaaacttcgccagcacagaagagcagttaatagcattaatcgcagaatctgaaatttatacagacgatatgcttgttgttgaaaaacatgttcaagctcagttgagcactcaaaaactttattgtgtttatcaaattactaataaagaaactggtttagctgaaatcaaggtttgtaaatcaaagtcagaagcagaagaaattcttaataacaatgccaaatgggtagcggaaaaagaagcagatcaatatgaaagtatgaatgcgttttttgaagaggaagagcgcaaatcgggagctgaacaatga

SEQ ID NO: 58791 - DNA, 672 bp, Acinetobacter baumannii
atgaatatacgaccactcatcggtttggcaggtgcaatttttgcagccatgactgtcgaatttaataaccgaattagcagcattaccttggtcgatattcgcggtgagatgggtattagtgtcgactccggttattgggtcagcagtatttatgccagtgccatgattattgggatgatactgtccaccagttgggccgttattttttccatgcgtcgggttcttctttttgcgataggactttgcctcttctctagcgttttaattccttttagcccaaatatcgaaatattttatttattacggggcttacaaggactcgccaatggtttaactattcctttattaatggcatgtgcacttagattcctaggacctgaaattcgtctatggggcttggcctgctatgcattgacagcaacttttttcccaaacttaagcgctgcgcttgctgccttttatttagatgtgattggttggaagatgatatttttccaaaccattcctttttgtgctttaagtgctgcgttagtttacttcggtattccgcaagatccgttaaattactcaagaataaaaacttacgattggactggcgcgattctagccattattggtttggcaagccttagtaccatgcttttgcatggcaatcatttggacatggtttga

SEQ ID NO: 58792 - DNA, 447 bp, Acinetobacter baumannii; identical to SEQ ID NO: 58748

SEQ ID NO: 58793 - DNA, 936 bp, Acinetobacter baumannii
atgtaccaaaataacccattagaaaatgaatcatccatccttatttcaatcgaagattttatgattagtacttgccatgagcaattcgttgatgatcatgaggaattcaagcgagaactgttagatgctgtatgtgcttttaaaatgatttacagagattactttttttattctaaaattatcaatgtttttaaaagagtgattattctcgtagattacatcatggaaaaattggatttccatatttatgaagatattcttcgatttgaactcaatcatatttttcatatccaagggactattctgcatgagatgaaaaatgctgttcaagatattcataaatttaaatatcaagaaagaaaaaaccaaattgaactagcttcctatttgaacaaaatgctccatcattatgctaggttggtctttgtacgagtagatgtaggaatccttcaagaacatcaagcgaattgggatgtcgaagactttcatcaggctttggaaatactacggaatagaatgtcgaacaaagatagctgctttcgtgatttacagggctgtgtttgggcattcgagcaaggtgcaaagaaaggctaccattgccatttattacttatttatgatggtaatctacgagacggcgatgaatggttaggagaagcagtaggaaagtactggcaagaatgcattactaatcaccaagggagctatttcaactgtaaccgaaaagagaataaagaaaagtttgaggtcaatggtttgcttggtataggaatgattcatagaaatcaaccaaaacaagtcgagaatgctattcgtgctggtctatatttagtgaatcctaaaaaagtagaacaacgcttacgtgccaagacatcccctaaaatgaggtcatttgggattagtcagtttgatctggattggcgaagaggcatataa

SEQ ID NO: 58794 - DNA, 1275 bp, Acinetobacter baumannii
atgaaattctggcaacgactcttcacatcatttttacaaagatttcatttgatgcgttttttcggtcgtaatcgatcttttaaagagctacatcaatctagttatgctcaagaaattagcaaaaatttatctaagcgtttgcttaatgcatcaagggctcaaacgaatgatctattaaaacaattcgatactcatttgacggggcttacagaagagcaagcgtatacccaacaaatgacggtgggacttaatgaagttactcatgaaaagccattaacttggtggcaacacctttggtattgctaccgtaatccgttcaatattttacttagcctgttggcattgattgctttctttaccgatgatctaacaggttcaaccattattagtgtgatggtaattctttcaacactacttcgttattggcaagaagcaaagtcaaatcaagctgcggatgccttaaaggcaatggtgagtaatactgctactgtattgcgccatcaagtcagtgcagaagatttagaacttatgcatgagcgttatggcattgatactaaaaaccaaaccactcaccaatttgagataccaattcagtatttagtgccgggtgatgtaattttattatctgcgggtgacatgattcctgcggattgcagaattttaaatgctaaagatttgtttgtttctcaagctgcaatgactggtgaatcaatgcctgtcgagaaatttcctttgcagaaaaatcttgaagaaaccagcgctttagagcttgataatattgtattcatggggaccaatattgtttctggttcggctcaggcagttgttttaagtacgggtattcaaacatattttggtgcactcgctcaccgtgttacagctactgatcgaagtaacacggcatttcaaatgggtgtcaacaaagtaagttggttgctcattcgctttatgttggtgatggcacctgttgtacttttcattaatggcttcaccaaaggcgattgggccgaagcatttttattcgcattatctgtagctgttggtcttactccagaaatgctacagatgattgtgacttcaactttggcaaagggtgcggttttcttatctaaaaagaaagtgattgttaaacgtctagatgcgatacagaactttggtgccatggatgttctgtgtaccgataaaactggaacactgactcaagacaaaatctttttatcccaacatattgatgttcaaggcgagaaatcagattttgtactcatgcaggcatga

SEQ ID NO: 58795 - DNA, 987 bp, Acinetobacter baumannii
atgacaggtggctcaaaagatcagccaatgtctggaatgaatcatgacatgtcttcaatgaaaggcatggatcacgatatgtcatctatgacaggtggctcaaaagatcagccaatgtctggaatgaatcatgacatgtcttcaatgaaaggcatggatcacgatatgtcatctatgacaggtggctcaaaagatcagccaatgtctggaatgaatcatgacatgtcttcaatgaaaggcatggatcacgatatgtcatctatgacaggtggctcaaaagatcagccaatgtctggaatgaatcatgacatgtcttcaatgaaaggtatggatcacgatatgtcatctatgacaggtagttcaaaagatcaatctatgtcaggtatgaaccatagcatgcgaatgactacatctaatgcatctacacaagaaaagaatggtgatgttgtatatggttgggcgaatgcttcaacacccgttggtcaaaaagtactccagtatagtgacttacaatctctaaatcctcaaccagatactcgtgccccagaacgtgaaatggaggttcgtctcggcggaaatatggagcgctatatttggactatcaatggtaagaagtttaatgaaacagagccatttaaagtgaaatatggtgagcgtatccgtttaaaattcgtgaatgacagcatgatggcgcacccaatgcatttgcatggcatgtttatgcagcttgaaaatggtcaagatcctagcaatatgccgaataaacatacagtaattgttccaccgggtaaaacgattacaaccttacttactgctgatgaattaggcgaatgggctatccattgtcatttgttatatcacatgtctgctggaatgatgaacaagctaattgtggcaaatgtagatagcaatgatgttgattcaacaggtgaagttgctaaaccccaagcaaatgataagggagtgaatcaacatgcaaaccactaa

SEQ ID NO: 58796 - DNA, 903 bp, Acinetobacter baumannii
atgcaaaccactaaaacactattttcaaaaacacttttatcaatggctttaatcgggttgtcaggtatagcatttgcaaatgtagattcagcagaaaacttgaataacgattcaaatgcttctatgtcgaagggtatgaaagcacttttaaaagaagctggaggcttgggttacgttgatcgtaatgtttatcaaaaggcctctacaggaaatgatggcgataatagtactgggtacgaaaccgtacctttaaaccagaaccatgataaacatcttaaagagcatggtggacaaatttatcaatcaacaaagtttgaaaatgcgtggactgtggatgaagatggtcatggtgctctaggttccaaaattgaaaccttgataggtacagatgaaaatcgtctatttattgaagcaaaactggacaagtcggaaagcaatgaccctaaatatgatatatcagcactatatagccgttatgtagcacccttttgggatatacaagctggtgtaagatatagtgaagataaaaataacaacaacagtaatcgagtggatggcgttgttggcatcatgggattagcaccttatttctttgaaacttcagcttatttatacggtggtgaaaataacttctggggagcaagtattgaactcgaacgtgatttattgttaacccaaaagttaattacacaaccttattttgaaatagatgccgtattcagcgatgactctgattatgctgcaaaatcaggtttatcagaattaaaaactggtatcaaaacccgatacgaaattactaagcgtatcaaaccttttattgacgttgcttatctatatgaaaaaggacagaaagccacttttatgcaagaggtaacagagtctgaaaggcactgttgcaaatag

SEQ ID NO: 58797 - DNA, 1092 bp, Acinetobacter baumannii
atggcagcagttaaagaatatgatttaacgattgctgaacaaacggtgaatgttactggtaagccacttaagcgaattactgtaaatggtaaattcgttgcgccacttcttgagttcgaagaaggtgatgaagcagttattcgtgttcataacaagttaaaaaaccaagattcttcgattcattggcatggtttgattttacccggcattatggatggtgtacccggatttaatcaatttgatggtatagcaccgaaccaaacctatgaatataaattcaaggttcgccaaaatggtacttattggtatcactcgcatagcaaaggacaagaacaagacggtttgtatggtcccctagttatttatccaaaggataaagcgcctttaacagcaggagaaaaggctgatagagactatgtagtcttactctctgactttcataattctactagtggtcagattatgaagaatctcaagaaagaagctgattattaccaaaatcaaagagaaacagtatttgatgtcttaaagcaagttaaacgtgatggcttgaaggcaacttggcaagaccgttcgatgtggaatcagatgcgaatgctcaagacagatatgtctgatgtaacaaagtatacgtttttgatgaatggtaagactccagaacaaaattggactggtaattttaagatgggtgaaaaagtacgtcttcggtttattaatgcctcagcaatgtcattctttgacgtcagaatccctaatttaaaaatgacggtagtcagtgcagatgggcaaccagtgaagcctgttcctgttgatgaattcagaataggaacggccgaaacgtatgatgttattgtagagcctaaacaatcaaattatcaaattgaagcagaatcaattgataggagtggtttttcagttggttccttacatgatgagaatactcctccaataaatcaaatcaaaatgcctaaatcacgtcctcgttctttattaactatggaagatatggggatggggcatgatatgtcttctatggcgggcatgaatcacgatatgtcgtctatgacaggggcactgttgcaaataggctga

SEQ ID NO: 58798 - DNA, 396 bp, Acinetobacter baumannii
atgaaacttatacccagctttcttgcaatactagtgtttagtctttcaaacttaacaaatgcttctatacacacatctccagatcaaactatcgatcattatggtacagggaatgatggggataatacctctggattattactcaaaaagccactaccaatagtttattcaaatagtgcttcagacataaatttaaatgctgaaagaatcgatcattatggtactggtaatgatggagacaacacctctggtttattactcaaagttccactaacaacaatttattcaaatagcatctcagacataaatttaaatgctgaaagaattgaccattatggtactggtaatgatggtgataatacttctggactattactcaaagagccaatactttaa

SEQ ID NO: 58799 - DNA, 603 bp, Acinetobacter baumannii
gtgccggaaaaactaggtttgaatcctaatgttttttctcaattttcggatcgtttgggagaagaaggaaaaacccctctctatgttgcgattgaccagaaacttgctgccattattgctgtagcagatccaattaaagaatcaacatttgctgcaattgaagcgttacatcagttaggtttaaaggttgccatgattacaggtgataaccgtcatacagctcaagcgattgcaaaaaaactaggtattgatgaggttattgcagaagtcttaccagaaggtaaaatagaggccgttaaaaaattaaaaaatcaatatggtaaactcgcatatgttggagatggcattaatgatgcccctgcacttgcagaagcagatattggtttagcaataggtacaggtacagacgtagctattgaagctgctgatgtggttttgatgtctggcaacctgaaaggagtgcctggtatgagctatcagcaaatttggggtattaaggctgagatggttgcagaagtccaagatggctatcatatcttatatgataaccaacattattggctgcctaaaaatattgatccatttttcaaagaaaatgaataa

SEQ ID NO: 58800 - DNA, 390 bp, Acinetobacter baumannii
atggcgacattaaacaaaaagcagaaactctttattgtacaatcgcttgctgtatttaatacccctcaagaaacagtaagtctcgtcaaggaagaatttgacattgaagtttcaagacaacaggtagagtcatacgaccctacaaagtttgctggtagagacttaagtaaggagctcaaagaaattttcgaaaaaacacgggaagagtatttgagccagccactaaataaaatcagtggagcaaatgacattgttcagttgaagattttaagtgatttactttgggctaaaaaaaacaatgtgaccatgacaattaagatcgtggaccaaatacaaaagatcatgaaagggttttatgacaagaagggggaacaaaataataaaggttga

SEQ ID NO: 58801 - DNA, 435 bp, Acinetobacter baumannii
atggattctacagaatacttttggcttactcggaaaaaagaacctaaaactaaacctaaaagccggccattgcctaaggcgaagcaaaaatatctcgaggctgaggcaacacttaaggaagagcttgaggatttggcgattggatttgaaagtaagtttcagccgatccataccaaacactggcgctttgattttcatatagtgaaattgcgtttgctcattgaaattgagggtggtccctggtctggtgggcgtggtggaaagctgtcaaataaagcatggagtcttgatcgatatgatcatgctgaagagatgggttacaaaatagagcgctttcatccagattctattttgtcgggatatgtcatcaactggataaaaagtgaattagcgagaattgaagatggagcaaataagaccatttccaccgactga

SEQ ID NO: 58802 - DNA, 711 bp, Acinetobacter baumannii
atgaaacgaattgatagtgctaatgcacgtccagatgtgaacggagcaggtaaagctggcttccatgcaaatgatgatgtgcccggacaagatgcaacttatctcactccagattttctcaataccatacaagaagaactagcaaacctacttgagcttagaggtattactttagatccagagaaacgtcgtcaactctttgatgcattggcaggtaaagatgacgtagatgctgctttggatctagtacagacactacttgataatgaacgtaatgcacgtattaaagccgatcaagatcacttagatgctttaaatccacatcctcaatatgtaatgagaaaggattttcgacttctatatagaactctaacacctgagacaacagtaaatcccaagatttatacggatgatccccaaaactggcaggttaagcatacagttgagaatatcagcgctcacatcatgccgaatggagttattaaacagactctaaaggttagaacggtttacgcagactataatgctcaggtgtatctaccaattggcatgtctgatatccttagtatttctgctcaatatcaaggacagaaagaaaatccaaatggtgaagatgacacaactattcgcctattagatacttataatgaaatagtcccattagaagacggcttacaggaatgtagaacagtcatcaagggactgttctaa

SEQ ID NO: 58803 - DNA, 540 bp, Acinetobacter baumannii
atgacctttgatcaaacagtagagctttatgcttcagtacttcgccaattactgccagctggcggttatgacacctcacctagaagtgttgtcgcaaaagatatttacgcccatgcaaaagtacttgcacaagctgatgttgatgcaaaacgtattttggctacattggaaggtattccagaagaattaataagtgagtatgaagctgcttatggcctgccactgaagtgttccttgaatgcaacaaaaactatagaagaacgacttcaaatcatcaaatgggttcaagagacaaagaatgttttaaatcgtacttatcttgagcagcttttagcaatgtttggtgttgaattaattaatcttgtcagatttacaccaatgcaatgtacagagccatgtgactctccagttaatacagacggccttcgctataaagtcaaattaattctaaaagcaccggttaaggctgacatcggctgcattattgaaaactatttaccagcatatgtgcgatatgacattgttgaggagcaagtatga

SEQ ID NO: 58804 - DNA, 1047 bp, Acinetobacter baumannii
atggcatatccgatcaaggcatttgaccaattacgctctgatattattcaggaaatccagaatttaactggattaacactggatgatgaagatgatgcagcaattcgtgcagatggtgaagccgctgtagttgaaggcctatatcatcatcaaagttatattcaaaaacagctatttgttgctacagctgatgaacctttcctttatatacatgcaaaacgcttggaatgtccacgtaatggtggctctaaggcttcaggacgagtcaaagcaacatcaaatactgcggtcactattccagctggaacaaaagtcaccgatggtaaaggtcattactggttaactttgtataaagagacatttaccgcaaataagcctaaagagatccaagttattgctgagtttgaaggcgtgagctggaatttcgatggtgagcagctgctttgggttagtccattaccgggtgttgcagcacaagtggatgttattgaaatatctgcgggtgttgatgttgaagacgttgaagcttggcgacagcgtatgatggataaagaggctttaggtcttattcgtgatcgtgaagctgatcttcgacgtatcgtaaaagatgtaccgggtgtggctgatgtttttatttttccaaaacgtcgtgggcttggctctttggatgttgcaatcacggcagctggtaatcctccaaattcgccaagtactgcattgttagctttggttcaaacggtactagatgaatatgctggattttggggtgatgtaagagcatatgcaccaaccaaagaatatttgaatatcactgctgtatttactggctctgtaagcgaaacagaggttgaaaaggtcatccgtgattatgttggtttactaaagccgggtgaaacttatgttgcttcaacactagttagcagaatcaaagatttgcaaggtttaacagacattcaactttcaccagcattaaatcaaacacctactttgagtgtatttactactggctggctccggatcggcacactcacggtgaacccatcatga

SEQ ID NO: 58805 - DNA, 252 bp, Acinetobacter baumannii; identical to SEQ ID NO: 56364

SEQ ID NO: 58806 - DNA, 453 bp, Acinetobacter baumannii
atgactaatagaacaaataaaaaagttaaaattgagcgctatgcaattggtcaaatcaatatgttagccaataaacttgctacaaaatctagtgaggcttatcaaacaaaatttgatatcggaataatggagtggcgagttttggcaatattagcagtttatgaaaattgttctgtccagaatattactgatattataggtttagataaaggtgcagtgagtcgagcgctcaaaaagttagaaagtaaatcatatgttacgatccaagaagatgaatttaataaaagagcttatataattaatattaccaaacaaggccgtcttttacataataaagtttatgattttagtatgaaacgtgaggaaaaactgctttctaaacttaatgaagaagaaaaagaagaattatttaaatatcttaaataccttaaggaaatgattgatgagctataa

SEQ ID NO: 58807 - DNA, 255 bp, Acinetobacter baumannii
ttgctccaacgtgggccattaaatattagagcaaatgctattttgcctggactaattgaaacacctctagctaagaatctaatggctgatcagccatttatggaaaaacgtctacttgcgactcctttacgccgtgtaggacaaccttatgaaatagcaagtattgctctgcttttggctagccatgccgggacttttataactggtcaaagcatcatagttgatggtggtacaacaatttcagatgggaattaa

SEQ ID NO: 58808 - DNA, 237 bp, Acinetobacter baumannii
atgaaatttgcaacttatgacaatggcacgacttatggtgaactctaccttgtatccaaagatggaaaacgagtagtttcaacaaaagaaatcgtctctaatctgtttgaagcagtaaataattgggctactgtaaaagctgacctatctgatctttataaaaaaataaatgaaaatttaatcaacacttcagaaattgaattagaccgttgtagagatatatctttttggaattaa

SEQ ID NO: 58809 - DNA, 825 bp, Acinetobacter baumannii
gtgcaacaaagccgtttaataagaaaagatatcgttgagtttattaaaggaattattgaccgtggagcccaagtccaagctgggagggttttatcggagcttgttgctgcctatgattatgcaattggtttagattactttccagaaaattttgctaatcctgccttacttgctaaatcaagcttaaaacaaacacgaattaaactgacctgtaataaacgtacgcgcgtactttctgactctgaattaaagcatgtacttacttggttaccagtttctggattttcgaaacaccataaaagtatattgatgcttgctctctggacaggggcacgtactggagaaatttgttctgctgaatggaaagatattaattttgaaaaagcaacttggcatttaagaggtacaaaaaatggtactgagcgtttcgttcaattgtctaagcaatgcatagaacatttaaagaaactcccaagcatagatagcatgtatttatttccttcctttcgaaccggaaaaccaatagcgcaaaagacgataactgaggctaagtgggtattaagaggagaaaacagagcaaagaattataatttccaagcccatcaactttggccaaaagatatggaagattggaatccacatgatttaagacgaacattgaggacaaatttatcgagattaggttgtccgacagatattgcagaagcggtactaggacattctaaaaaaggaatcgaaggtacctataatttgcatacttacgaaaaagagtgtgcagtttggttacagaagtgggctgattatttagagcacttaatggattga

SEQ ID NO: 58810 - DNA, 537 bp, Acinetobacter baumannii
atggctgataactactcttctgactcacctgtatttaaatataaggatgataaatttaatcgttgggaattttcgaagagaatagcggacgttatcgcaaataggaatgattcctctagtatagtaatagggctacatggagcttggggaaatggtaaaacgtctgttttaaacttcattgaggagtctttaactgataatcaggatgttttatgtataaagtttaatccgtggcgttttggaacagaagaagagttgctaaaagctttcttcttagacattgcgcatgctattgaagtcgaacttatcacgaagacagataaagccaaagatgctattaaatctttagcacctgcaattactagtatatttggtgcagctgaagtggggcaggcagtcagtagttttataccaagtctagagttacaaaagctaaaagagcgaattgaatgtgaattagagaaagcacagaagagagttttaattttaattgatgatgtggatagattagaaaaaacagaaatacagagcctgtaa

SEQ ID NO: 58811 - DNA, 1290 bp, Acinetobacter baumannii
gtgacaccaactaatctagcccaacatttagcccattttcccaaggggaaagcagagaactgtctttatgaccgtttgataaataatcctcatcttcttgttgtctttgttatgacagggagatgtaatgatgcaacatccccttttctttctatgtttgataacttctatacaccacataaaaccacgaatataaaaaaagaaaatgttaaagcaattataaatgaatttaacaatattgaagctgataccgcagaatccgaattaacaaaaaataggaaaatttatattaataacctttataataaatataaaattttaaaagttaaaaaagcttttgagaggttaataattatagagaaagttactgatagtagtcttttaaaaaactgctgtgattcattaagaataaactatacaatccctgatgataatcatcaatcagttattgagcgtttaaaaacagtagtatttgatggcaaatcctcaaaacaaaatatttttaatatttttaaagaggaactttctaaatttataccagaaaatatatatccaacaaattatattaaacaaggtattgaagataatttaaaagagattctttctaaaaaaaatgctctattaattacagggtcacctcgtattggtaaaacttacatatcacgctggatcactgctgaatattcaaaaatcggttttgaaataaaagaaactagtgacgtagcagaagcatctcgttttataatggatccttctagctctaaacgccttgtattaattgatgacccttttggagcagcacattctattccaaatgcattacatgcttttcaacaatttaaatccttgttaagcagactaagttctaatagaaaattaattacagcccaagttcaagatagactattagaagtagcctctgctgaaagctctgatgaaattatcatcggggatcataattggttgaatttaaataaaactaatcctatctttttaaatgatttatggaattcattagctaataaatattcagttcctagtaagttaaaagatattgtatctactaaattaataaatggggaactatttttagaagcaggttgcttggagtatttagctattcatcattctgaactaaaaaataattttaatttagaaaatattaaacgtttatcacatcaagatgctaaaaatttaggaaatgcattagcagatgatggatataaaccaattttgagagcactagctatagctacaaacggctttgttgcacaaagatttaaaagttaa

SEQ ID NO: 58812 - DNA, 447 bp, Acinetobacter baumannii; identical to SEQ ID NO: 58748

SEQ ID NO: 58813 - DNA, 1341 bp, Acinetobacter baumannii
ttgcaacagtgccttcatgaccgtggttttgttggactgtcatatagtaaccgtcaggatcaatatggtttaccagggcaggcggcacctggtgaggaagaggaagaaggatctgttgaaggcgcaggcccttggattgatttagaatctgaacgttatgacttgcgtaccgaactattgaatccaatgccgggctttgagaaattacgtgcccacgccagctttaccgattatgagcatgatgaaattgaaggtaataaaattgctagtaacttcaagagtaaagcttacgatggccgtttggagctagtacatgtgcctatcgcaggctgggaaggggtgattggtacccagtttagccagcaaaaaattgatcttgccgctgctgctcatgaagaggatgaaattgttaatgaggaagcagaaaaaggtcatgaggtattgatgcctgataccaagacacagaaatatagcctatttgccttggaacataaacagctcggcgatgtgcatgtagagttgggtgcacgggtagaacatcaaaaaattgaggtagatgctgaacagaaagactattcagataccggtgtatctgcttctgcagcagcaaactgggagtttgcaccgaattataaactctcattggtcggttcacaccagcagcgtttgcctattgcacaggaactttatgcacaaggtaagcattacgcgactaaaacgattcaacatggaaatcctgatctagatgctgaaaaatctaataatctcgaggtgggcttccactttgaaggtgagaaattggattatcatgtacatgtctaccacaactggtttgataactatatttatggtcaatcagaaggttatgatgaacacaatccagaattcttggtattagattacactcaagataaagccagattctatggtactgaagcacagctaggttatgccataaatgatacctataaagtcagtgtttttggtgactatgtacgcggcaagatcgaaggtgagaatgcaccacgtgtacctgcaggtcgtttaggtaccaaagttgatgccgattttgctgatggttggtcgggtgtagcagagtactaccatgtattcgagcagaataaagtagcgaaagatcaagatgagcagccaacacaaggctataacatggttaatgttggcttaagctatgcaaatagttttgcaaataaaaacgattatcgtgtgtactttaaagccaacaacttgcttgatgatcaagtctattcacatacctcatttttgtccaatattccgcaaatagggcgtaacttcacagtaggtcttgaatacaacttctaa

SEQ ID NO: 58814 - DNA, 777 bp, Acinetobacter baumannii; identical to SEQ ID NO: 52165

SEQ ID NO: 58815 - DNA, 210 bp, Acinetobacter baumannii; identical to SEQ ID NO: 50564

SEQ ID NO: 58816 - DNA, 480 bp, Acinetobacter baumannii
atggttgcgatttttattcctagcgccttggggggattctttttacatgttttatcgcaggaaaaatcaaaaattaaagaaaaaataagtaaattaacagtgataaattttattctctcatctttagtttgtatttttttacttattggtaagaaatatattttaagctatgcaggtaaagattttttgatttatgcaaatcaactatatatatatatggtttttgctgttgttttttattctattaatacagtattttctagtgtttggcctactattaataaagcatggataggcgttgctttaaatttaatatgggctgcaacattgttgcttttagtattctttttaagtcacttaattggtgttacagctttaggattatcttttttattatcttatattgtattatttgtgattcagttcttactgtattttaaatatataaaacaaatcaatcttttgaatggtgaaggatag

SEQ ID NO: 58817 - DNA, 1206 bp, Acinetobacter baumannii
atgcaaggcggcaaaagagaagattttttaattattgatgggcaacaacggttaacgaccatatcaattttgttgattgctattgtggatttattgaagcataaaaaagttattcctaaagatgatcgtttaattgagaaaatcaccaaaaaacatttagtcgatgagtatcaagaagatcagcggaaaataagattgaagccaatcaaggatgactgtaaagcttttgatgcattgtttggtgatgaatcagattttgttgatggttctaatgtaacgtcaaattttagatattttcgagacagaatactgaatgaaaatatcgacattgatgatttgtatgatgccatttcacgactacaaacaattgatatttttttagaaaaggatgatgacccccagcttatatttgaaagcttgaactcaacgggacttgaacttgaggaaggcgataaaatccgaaattttattttaatggggctttcttctgaattacaagaaaaatattatgaagctttttggaacaaaattgagaaaaatactcattttaaggttagtgattttttcaaagattacttaaccttaaaattaaatcgcacagtcgttattaaagatatctattttactttcaaagattatgtgaaaaaaaataatgatgatattgaagctttattacaagatttactggagtattcaaagctttatgcaatcattttgaatccgatgcaatatcaaaacagttttaccgctgtgttggtgcggctgagtcagttagagtttaccgttatatttccagtcgtattggcaattctaaaacgttggaatgaaaaaaatcttactgatcaagaggtcactgaacttttaagagtaacggaaatatttttatttagacgtttgattgttggtttagccactaatgctttgtctaaaatttttgcaactttagataaagatgtgactaagaaagcacaatctagccaattggcatcctatgctgaaatttataaatatgtgctgttaaataaagaggaatcaagtcgttttcctaatgatgaggaatttgagcaagctctttttagccgtaacatttatgccatgagttcgaaaaataaagcatatttatttagttttctagaaaatgaggaaagcaaagaacaaattaatgtaattgaaagaattaaagatggaacaagctttgttgcataa

SEQ ID NO: 58818 - DNA, 306 bp, Acinetobacter baumannii; identical to SEQ ID NO: 50616

SEQ ID NO: 58819 - DNA, 300 bp, Acinetobacter baumannii; identical to SEQ ID NO: 44684

SEQ ID NO: 58820 - DNA, 279 bp, Acinetobacter baumannii
gtgggtgcacaagcagagcaggttttagaaatgccaaattatgaatttcatcttggcaacttcaatgctcactgggaaaacaaaattgatctcactgaaaaccaacgaactcgaaagtttgcaacttggttaattcaggaattcacaaagtcgataagacctaaaaaacaaaactcaccaatgaaaactgcaccagcaagagacgtaaacagggcttggggtgattcaaaacagtatgcaccagccacagatgatatcgatgtaggggagatgctatga

SEQ ID NO: 58821 - DNA, 165 bp, Acinetobacter baumannii
atgtggacagtcattacaacggatctgtttaacgaatggcttgcacagcaagatcaatctacacaagagaaagtactcgcagcgttggtcgttctacagcaacagggaccaagtttaggtcgtcctttagtagaaccgtctatgactccaaatttaccaatatga

SEQ ID NO: 58822 - DNA, 930 bp, Acinetobacter baumannii
atgaatacagaatcaaaaagccgatacaaaacaacgaactggtctgagtacaatcaggctttacgtcaacggggtgctttcaccatttggtttgatccccaaatgcaatggtctgcaacacctactggaaaaaaaggacgtcaacctacctacactgatatagcaattcaatttgccctgacgatacgaaacctgttccaactggctttacgccaaacacaaggtttcattcaaagcctttttcaaatggctcacctcgactggaatattccagacttctcaacattgagtcggcgagcagataagctccagccacttctacataaatcagcaaaaaatccacaggaagacttgcatattttagttgatagcacagggatcaaagttacaggtgatggggaatgggtgcgtaaaaaacatggcgtaaaccaacatcgtcaatggctgaaattacatcttgcgacagatgcaaacagtggagaaatacaagcggttgaagtcaccacctgccaatatggtgatgctgaaatgctccaacctcttttagatcaaattgatgaacccattgcatctgtcacggctgatggtgcttatgacacagtgaattgttatgatgcgattttgaaacggcaagcaaatgtaattatccctcctcgttccaatgctgctttatgggcagaaaatgaaattggtaaagcaaggaatcatgcagtacaaggctgttgggacaagggtcaaaagcagtggaaacgagatattggttatcatcgacgatccagaatagaggctaaaatgtttgccttgaaacgacttggacaaggtgtatctagtcgatgctttaatcgtcagatggttgacttgcaaataagagtcgatattttgaataaatttactcaacttggtacagctaaaacggtggctgttgcataa

SEQ ID NO: 58823 - DNA, 384 bp, Acinetobacter baumannii
atggtgcttgatgcattagagcaagcattgcatgatcgaggcatgccaaagaatgtgattcatcattccgacagaggtgtgcaatatctttccattcgttatacccatcgtttagaagcagcaaatttacgagcatcagtcggtacgactggtgattcatacgataatgctttggctgaaacggtgaatggcttatacaaaacagaggtgattgaatatttaaaagcagattggcaaggtttagcagatgtacaacttgcgacactaaactgggtagattggttcaataaaaagcgtgtacacagtgcactgggttatgtatcgccttttgagtttgaagcaatgtactatgataagattaacccgttaggtcaggtggcttaa

SEQ ID NO: 58824 - DNA, 342 bp, Acinetobacter baumannii
atgttggttgaagcaatcagggttttttatcaaccaatatatgatttattacgaataaacaaagaaattttttctggaactttttctcaaagtagatttacgtataatgattctgaaaaagagaaaattaagcagttattagataaggcaatagatttatgtttgaatgtggataaagagaaaattattagcttattaagagatttatttcctaaagtcaattcttgttatcaaaatatgtattatggtactgaatggtatgcaatttgggaggaaaaacagaaagtttgtgctccaaattattatttacgatattttacctattccatatcaaaagattga

SEQ ID NO: 58825 - DNA, 513 bp, Acinetobacter baumannii
atgtttaccgtaggttacaacccattaataggaatatgggataatatattaggcttatcttgcagcctatcaataaatacaagtactaactgcttaactctaaataaccaaattttatatccattcaatggaaacacattaaaatatattatctttaaatttgcaattttattggtcgggatcactctatcaacatatttcttaaaactcacaagtttctatcaattaagacaagagcaagcaaaacagacaaaacttgaattagaagcctttcccgactatgtttcaggaatggaccaagatgttgccaataatattcgaaaagaacttgcactaaaatactttggtaaagatgtagataaaacacaaatagataaatctggagatttattacaagatcaaatgaagataaataccgacatacttaaagctactatagatttatttaagagcacaacatcagtaaatactaaagatgatgatactaagatgaaaaatccctcatcatcatag

SEQ ID NO: 58826 - DNA, 201 bp, Acinetobacter baumannii
gtgaatggcttatacaaaacagaggtgattgaatatctaaaagcagattggcaaggtttagcagatgtacaacttgcgaccctaaactgggtagattggttcaataaaaagcgtgtacacagtgcactgggttatgtatcgccttttgagtttgaagcaatgtactatgataagattaacccgttaggtcaggtggcctaa

SEQ ID NO: 58827 - DNA, 447 bp, Acinetobacter baumannii; identical to SEQ ID NO: 58748

SEQ ID NO: 58828 - DNA, 309 bp, Acinetobacter baumannii
atggcaaaaaatggtcaatggaaattggctccagcctatgatgtgaccttctgtgaaggtccaggtggttatcatcaaatggacattatgggagaagcgctcaatatttctcgaaatgacatacataaactcggtacttcagaagcgaatctgactactctagaagtcgatgagatcatcttggccatgcatgaaattgcacttcaatttagtcaaattgcgcaacgcctgtatcctcatcaaattcgagaatctaccctagagatgattcaatcacgaattcaacaaaatattgatttttttaactga

SEQ ID NO: 58829 - DNA, 330 bp, Acinetobacter baumannii; identical to SEQ ID NO: 58747

SEQ ID NO: 58830 - DNA, 156 bp, Acinetobacter baumannii
atgagtttaggtatttgtaagctatgttgtgagaaaaaggagctacaacgctcacatgtaattgggaaaacggtttttagtcgtattttacgtaagtctgtaggcaatgctggaataagtatttgtggctttgttgcacaaagatttaaaagttaa

SEQ ID NO: 58831 - DNA, 444 bp, Acinetobacter baumannii
atgctcgctgaacggggtgtgaatgttgaccacaccacaatttatcgttgggttcagcgttatgctccagaaatggaaaaacgcttacgctggtattggcgtaatcctacagatttacattcatggcatatggatgagacttatatcaaagtgaaggggcgatggacttacctgtatcgtgcagttgatcaacgtggtcatacgattgacttttacctttccgctagacggaacagtaaatcagcctattgttttttaggaaaaatcttcaatacggtgaaaaaatggaaaattccacgggtcatcaatacagataaagcagcgacctatggccatgctttatcacggttaaagcgagaaggaaaatgtccagtagatattgagcacaggcagattaagtataaaaataatgtcattgaatgtgatcatgggggactgttctaa

SEQ ID NO: 58832 - DNA, 267 bp, Acinetobacter baumannii
atgtcagaaaaattatcacactctgaagtgtcaatatctattttagaattaaatgtcgatgcgttattgaaagtacctgaaagagagatcggcttacatcctttgatagctacatctttattaaattttgagcacttgctaaatgctcctgctaaatatagtagctttggtgcaacccaattcacagatcgattgaagttaatacactttttgaatacaaacgatatatcttgtacttcagacatatcccatgaattaacgcgctga

SEQ ID NO: 58833 - DNA, 363 bp, Acinetobacter baumannii; identical to SEQ ID NO: 57683

SEQ ID NO: 58834 - DNA, 183 bp, Acinetobacter baumannii; identical to SEQ ID NO: 57842

SEQ ID NO: 58835 - DNA, 864 bp, Acinetobacter baumannii
atgtattttatcgggcttgatttttatgtttacagcaatcgggaattactgaaaagctcagatattcaaagaaatacaattgtgagtagtcatgcacaactattatgttttgcttatctatttgctttacctactttgtctattattttctttaaagattttttatcactggaataccttattccattttatgggttaattatactagagcatttaaatcaagagtttacacgtttgttaattgtgttgaaaaaaccaattagttctaatttgttactatttgtacgttctggtggttggagttttattataatttttctgcattttttgcatgtccatttaaccttaatggatgttttgaatatctggatagttgctgaaatattatgtttcttattgagcataattctactttatcgagagcaggttcgtctttatctatttcaacaagtgaattggagttggatctggaaggggctaaaaatttgcttgccttttatgctcggtactttagctgtacgtgcaatatttactggtgatcgttacatactagaatatttttatgatgctaatattttagcggcgtatgtcttttttgcttcgttagctgctgcaacaatgagttttatggatgcagcggttttttcatttgattaccctgagctggtgagatcaataaatacacgagataataagcatagagagcttataaaaaaactatataaaaaagtagcatttttactgattttgattaatctgagcgcatatgtttttattgatttgttgttaagattaattggaaaagacatttttaattcttatctaaattacttttatttgttaatgttagtgcaggttttataa

SEQ ID NO: 58836 - DNA, 693 bp, Acinetobacter baumannii
atgcaatacccttttgcaggtagccgtatgatgcgtgatttgttgaatcgtcaaggacatcatataggacgacgtcatacacgtactttaatgaagaaaatgggcattaatgcgttatattgcaaaccaaatttaagccaggctaatcaagctcaccgcaaatatccatatctgctcaaaggattggctattcagcgcagtaatcaagtgtggtctacggatataacgtatatccctatggcaaaaggctttgtttatttatgtgctgtgattgattggcatagccgcaaggtacttgcgcatagagtatcgattagtatggaggttacattttgcatagaaacattaaatgaagctattgaaaaatatggtcgacctgaaatatttaatacagaccaaggcagtcagtttaccagtgatgcatttattgatgtattgaaatcaaatggcattcaaatcagcatggatggtaaaggtcgatgggttgataatgtgatggttgaacgattatggcggagcgttaaatatgaagaggtgtatctcaaagcctacagcaatgttttggatgcgaagaagcaattaaacgcatattttgaattttataatttgaaacgacctcattcgagtctggacaaaatgactccagatgagttttactatgaccagctaccacaacaaaataaggtagcttaa

SEQ ID NO: 58837 - DNA, 306 bp, Acinetobacter baumannii; identical to SEQ ID NO: 57886

SEQ ID NO: 58838 - DNA, 306 bp, Acinetobacter baumannii; identical to SEQ ID NO: 57884

SEQ ID NO: 58839 - DNA, 1740 bp, Acinetobacter baumannii
atgaatattagtcgagtggtttatcgatatggtggactcgttcgaaacgaagataacgactcaactaatccttttgttgaagtgttattaattgagattagaaaaagtgatcaatggttatttttagataagtgctcaacattccttgttcccgtacttgatcttgatgctgttcaacatggcagtatttgggacgggaatgttctgaccaattacacttatagattttcaggaaaactcatcacaaaacgattttctttcgacttcagcaataataaaccgaggaacataaaactttcagacaaaattccggatacgtcagagtactacattccattaaaaaactattttcttcccaataaagttgattatgttctacaaggctatccattcactaaatacaccaatgattcatatcggaaagtgaatcactgcttaatgcattctaatgatggaactcaagtcatcacttcctcaatccatattttgcatagcttattcgtcaatcggaaggatattcggggactcttattaagcacttcaggccaatctatcattaaccgctttttagaatcttatacaacagaagttgagaatgataatattgaatataaaataaaaatcagaaagccatatgaagatattggcgaaacagcaattatatttctggctaatctagccttaaatccatatgtgcagacgatagtcgataaaattcaacgaagtatggaagttactgagtttcatcatcttcagcatggcacaggcataagataccccattgtatatccgccacatcctacaaagctttttcttgaagcagaaggaatttggctagatgacaataagacacgtttttttattactagagtgaaaaaatttgatcctattaacgatcacatgattgatgtcaataaagaccttaccaatactgtttcaaaaactgatgaaaaaaaccctcgtcctcgtgaaaaaagtcaaaataaaaatgagcatatcaatacacaaaaaccaccatcaagaacaagcggtgaataccgtaagcgttctgatgtggaaactggaaatacacaaaatattttgaagtattcttttaatgaaccagccaatgacccaattgaagttggcacatccaatcatccatattcagataaatcagaggatgttgaaacatcatctgatgaaccatatggcaataaaaatactaaaactaaaaagtctgaaacaactgataatccgcctagcagagatgaacgctttgatattcaatatattattcaatcacttaaccatttaacactagatacaacctctccattagaacgtgtgtattcaattgatatattggggaatgagatacacggattcaacttacttcaaataaagaaactcgttcctcaaccaaagcatccatcttggattgatgcagaatttggaaggaaattgttatttttaaaactggaattgaaagatcagcatgatcaatattatttaattgatatacataaaaataaaagccatgaagcattctgtgcttttattatcgtgtcaccacataagttaacccgtgagcaaataaaaaatatatgtatagagcttgagaatgcaaaaggaattaaaaaatggacgctacgttgtgaaagttttaccaaaaaaattatttcgattaaacattcatctgctactcccgatgagtggaaaaatagatttaaaaatttattttcaacattaattaattga

SEQ ID NO: 58840 - DNA, 426 bp, Acinetobacter baumannii
  misc_feature (410)..(419): n is a, c, g, or t
gtgtctttagaaccaggtggccttgcagaaaaaattggcaatcgttatgaatcctcttgggtcgcatttcagcttttaagattattagatgaaaaaatttcttatgtacaagtagaacctattggtccagatgaagatgctgtagatgttattattggtaatttggatggatataaagaacatcatcaatgcaaaattggaaatgtttctgatgatgcttggtctctttctactcttcaatctaaagaacttctaacaaagggttttcagcacattctatctggctcaaagtcttacaaggtagtttcaagaattggatttagaatactagaagatatttgtgaaagtgctagacacagtacaggttcaagttctgatttttacaattatcaaattcaaaatattagtgnnnnnnnnnnatattag

SEQ ID NO: 58841 - DNA, 375 bp, Acinetobacter baumannii
atggaggttacattttgcatagaaacattaaatgaagctattgaaaaatatggtcgacctgaaatatttaatacagaccaaggcagtcagtttaccagtgatgcatttattgatgtattgaaatcaaatggcattcaaatcagtatggatggtaaaggtcgatgggttgataatgtgatggttgaacgattatggcggagcgttaaatatgaagaggtgtatctcaaagcctacagcaatgttttggatgcgaagaagcaattaaacgcatattttgaattttataatttgaaacgacctcattcgagtctggacaaaatgactccagatgagttttactatgaccagctaccacaacaaaataaggtagcttaa

SEQ ID NO: 58842 - DNA, 372 bp, Acinetobacter baumannii
atggaagcatccgcttactttgatgcagtattcaataacagcaccatgaacaacgtattagatcaggaggataacatcattcagttctaccgtgatgtagccttgcaagcccaagccaatggcaaggacaaagctgaaccaaatgcgagatcgatgagtcgagctatggaaatgtttaatggtcaaggacgaggtgcggagctaagttcagccaaaggaacagcctatggattactgtgttcaatcacggaatttatagaccacgaacgtcgtgccatgagtaccgatcaccgacttgattcagcttggtttggtgctggcgcatcgatcaaacaacgaggattggaacaggcacttaacatgcttgcatag

SEQ ID NO: 58843 - DNA, 426 bp, Acinetobacter baumannii
gtgggatctgagttagttgataatattaccaataattatgataaagagttttataattttttgaattattacaataaaaatttcggtcaaaggaaagttgatttaaatgtaaaaaaaatattgaacacgagtgatgatgtttcagaacttataattaacaagtattttgaaaaatacaataaaaacaatactattaaattagaggattttattcatttttgcaaaagtttatctaaaaatataagctttgaagatattaatgatgattttatttatcttcatgattttttaccgagcaaacaattagaattgcttgataaaatattttatggccctacttttctgtataattttaattataaagaagttttgatgggaattaaaattaaaaaagtagatttaaacttagttgaaaaaaacttttag

SEQ ID NO: 58844 - DNA, 288 bp, Acinetobacter baumannii; identical to SEQ ID NO: 55098

SEQ ID NO: 58845 - DNA, 432 bp, Acinetobacter baumannii
ttgttctctatttcatatttactaacatcaaaaagacaaactcacattgccttggtcggtccagcgtggttcaatgaaaatttattgatccatcgaacaaatgtgctattcaaacagctacaaagttttgaaactcatatgttgaataatgctgatcgtattattgtttttagtactttattgatctatcaacatgaagcctatatgcgtgcttatcatctgaaccaatggatcttacataagttgcaaaaaggtaatgaaatggaaaaagttcaagctggttgggtggctattggtgaatcaagtaattttatagcagttgatctacagtcaaaaattaatgagattaatcgtcaattagatatttatagagaacttgctaaacccggttcagcacagcctaatctttctcatcagcttaaacctgcttga

SEQ ID NO: 58846 - DNA, 324 bp, Acinetobacter baumannii
atggcacgtagaccaagaagaaatcattcaaatgattttaaagctaaggtagcacttgctgcgattaaagcagaaaaaacacttgctgaattgagtgctgaatttgatgttcatcaaaaccaaattatcgactggaaaaatcaactgatttcagcttcctcgcaagctttcgatcaatcaaaagctccaacagaaccacccatcgatctaaaaaaactacatgcaaaaatcggtgagcaggcattagaaattgattttttagaaggtgtgttgaagaaactgggccgcttcatgaggaagtggtcattttcattggtcacttag

SEQ ID NO: 58847 - DNA, 693 bp, Acinetobacter baumannii
atgcaatacccttttgcaggtagccgtatgatgcgtgatttgttgaatcgtcaaggacatcatataggacgacgtcatacacgtactttaatgaagaaaatgggcattaatgcgttatattgcaaaccaaatttaagccaggctaatcaagctcaccgcaaatatccatatctgctcaaaggattggctattcagcgcagtaatcaagtgtggtctacggatataacgtatatccctatggcaaaaggctttgtttatttatgtgctgtgattgattggcatagccgcaaggtacttgcgcatagagtatcgattagtatggaggttacattttgcatagaaacattaaatgaagctattgaaaaatatggtcgacctgaaatatttaatacagaccaaggcagtcagtttaccagtgatgcatttattgatgtattgaaatcaaatgacatccaaatcagcatggatggtaaaggtcgatgggttgataatgtgatggttgaacgattatggcggagcgttaaatatgaagaggtgtatctcaaagcctacagcaatgttttggatgcgaagaagcaattaaacgcatattttgaattttataatttgaaacgacctcattcgagtctggacaaaatgactccagatgagttttactatgaccagctaccacaacaaaataaggtagcttaa

SEQ ID NO: 58848 - DNA, 912 bp, Acinetobacter baumannii; identical to SEQ ID NO: 57865

SEQ ID NO: 58849 - DNA, 375 bp, Acinetobacter baumannii
atggaggttacattttgcatagaaacattaaatgaagctattgaaaaatatggtcgacctgaaatatttaatacagaccaaggcagtcagtttaccagtgatgcatttattgatgtattgaaatcaaatgacatccaaatcagcatggatggtaaaggtcgatgggttgataatgtgatggttgaacgattatggcggagcgttaaatatgaagaggtgtatctcaaagcctacagcaatgttttggatgcgaagaagcaattaaacgcatattttgaattttataatttgaaacgacctcattcgagtctggacaaaatgactccagatgagttttactatgaccagctaccacaacaaaataaggtagcttaa

SEQ ID NO: 58850 - DNA, 693 bp, Acinetobacter baumannii; identical to SEQ ID NO: 58847

SEQ ID NO: 58851 - DNA, 147 bp, Acinetobacter baumannii; identical to SEQ ID NO: 56883

SEQ ID NO: 58852 - DNA, 3072 bp, Acinetobacter baumannii; identical to SEQ ID NO: 57849

SEQ ID NO: 58853 - DNA, 666 bp, Acinetobacter baumannii
atgactaatttagcatctatgccctatgctcactcattatatttgaatgagccggcagaatggaaaaaacagtcatctgttcaattatcattattggatgatgtacaagagccttctgtagttgaacgttctttacctgctttaccattaaaaagattttctaaattgttttcatttttagatttcgattttgatactaagtcatatgaatatatggtcggatcagatcgatttactattgaaactaaaattgataaagccgatcaagcttttgtgtgtttaattaatgaagttttaatggcttataagcaaaaaaatattttgcttacttcatttgatagcaaactgactcatactatcaatgcaagtgaaatttccaaagttgttggtatttcattagatgagtttgaaaaaagaatgaaaagcttagcaagctgttctttgagtgctcatcaacaccgcttacttcgtcatacaaagaccggccgcgaatcttttagatttgtacatatgttttcaaccaaactcgttagtgaatacgtttcttttgataaagatgggcagattttctacagctttaattatgcacctttctttgaaacgatgtttaaagaaaacctacataagaaaaatcaatcacaaccttatttagatcaagttgtgtaa

SEQ ID NO: 58854 - DNA, 1725 bp, Acinetobacter baumannii
atgaacgtacaatcacaagaattgactagttctgacgcagagagcttgtctcctgctgatctgggctatagtcaagctaatagtcttagtcaagggcacccaaatttagcctcttttaagtatgagacagagtttaaactgccagtttcattaattcatgtgactcatgaatgttcattagttgaacataagatttggttgtgtctcttgaatcatgcttgtgaaattcttgaaaattttcaagataatggttctcatcctattgttaattttaaaataccgtttgatctattaagattcaaaacaaatagtcaacacagacttaaggagattaataaatcactaagtaatttaagagatgctgaaatacaaatcgatatcttcaatgcacaaggattaaagtcatcttcctcacaattcagctttattcaagattttgcgatttataataaaaatatgatgcttaatcgagaagaggtggaagctgataacaaaccagactaccaaagtcttgaaattgtatattcattacctcctttttttagttcaattattactgattctatttcgattgaaaaagtaaaacgtttatttagttggacacaaatacaatctttaagtacatcaacaggaagaaatggaaaaattgaattattaatttataaattactggaaggaactgatgagccaattactttggcatacgaaacattcaaacagtatctaggctatggtgatgtagaagaaaatcgttatttcttgcgtgatactcttaaaccagctttaaaaaattttaatgcaaacgaattgcttgaatatgaagttgaaacagactttataagaggtaagcgtcaaaaaatagagtcgataaaactattcaaaaaatataagtttgttgataatgaacaagctgctcatgcatggcaatcactcttagatagtccacctgagaatacaacaaatttacgaatccgtattaagcagttagtgccggaaaattatgatatcgatagtttaacagatgattctatatatacgattctatcgcgtcttaaacaatggataaatggattgaagaaaaagggccagacaattaactttgtcggggcatgccgttcagcatttaaagataagagctggattgattctaaaaatggtaaagggcaatcatcattaattttaggcgaagaagtcgatgatgttgttgtgaaggctagtagaacaaactacgaaagtgccgtgggtaaaggcgatattcccaaaacttcacaagagtctgattacaataatccagtgaataaaattgctaaatctgttgcgactttgatttctactttagctatcaaaggatctaaaacaacgttctttgaaaatatatctaaagagaattttgacgaattgaccaataataatttgaagtactttaattatttttccgaaaatattgattcattcaaaaatgattatgttattgacatggtcaagcgaatattctttgttggaaatgaaaatgcattaaattctttactgaatcaaagtaatcagagtaaagtactctatccttatttatttagtgtaaatttcgcgatgcaaaactatactcagattattagtgaccctatccgatctggagcctatagtacaaacttagcaaataacgaacttgcggttaatattgtagttggagatttaattaaatattttaaatctcaattatcaatttaa

SEQ ID NO: 58855 - DNA, 231 bp, Acinetobacter baumannii; identical to SEQ ID NO: 47478

SEQ ID NO: 58856 - DNA, 693 bp, Acinetobacter baumannii; identical to SEQ ID NO: 58847

SEQ ID NO: 58857 - DNA, 384 bp, Acinetobacter baumannii
atgattgagaaagatttaaagctccaagatacttcttcaattactaacaacaacgataattatagtggtttcaaaaaggattttttatatattttattcattattatttgtttctatattcaaaacttagatcagtttaatgattctatagaggctataaatttttttattaatactgtcgagtgtaagggcgtaagtgtttcatatgtgaatttacgatcacaacccaatattactagtgatattattattacgatacccccaaactctttgttaaaagtatatgaagaagcaaacaatggttgggtaaaagttcaagtgaatattaacaatctagatgttgagggatatgtatcagaagcttatatacgtagattagaataa

SEQ ID NO: 58858 - DNA, 594 bp, Acinetobacter baumannii
atggatgaggttaatgagattaaacagcaacataagttctatgtttatcctatgcactatcatcctgaatcatcaacgtcggtattggctccacaatatacaaatgaatatcacaatatattaaatatttctaataatttgccatttgggcaatatttgtatgtaaaagatcatagaagtgcaatcggcttaaactcagatgagttttatagaaaaatttcagcattacctgcagttaggttaattcccgcagagtataatattaaagatttaataaaatactctgctggcgtgataacggttaatagtactgctggttatgaggctcttattttgggtaagccagtatatttgctgggtaatgttttttatcagaacttttctaatgttgtccgtctagaaaattttaatagccttaaatcttgtttagaaaagcctactgagtttattgaaaatgcagcagatattgttgcttacagacgggtaacttatgaagggattctgaactttaatatgattgaatatgattctaataaagttttttttgacaagcttgctatgaatatccaggaaaatatgttgggtaaaacctaa

SEQ ID NO: 58859 - DNA, 453 bp, Acinetobacter baumannii
atggatagttttttctataaaattataacagaaaaaaatattgatctcgtgttgtatgaaaatatttccaatagttttgagtactcagcatatagagtggctcaaacattagggaaaaagtattttggtttaattgcatcacgcatacctgggcgctatgaaattcaaacttctatcattgatgatttattggtggatttagaattggtgaaggaaaagccgcttacagaagaagaaataaattggtatgaagattataaatctaatattaataaaattgaacctgactatatgaaacaaaatggtttagataatgtttctttattgaataaggtgagatctaatattttttataaaattattaggtctataaaagctgatattaaatatggagcaaaatcagattatgctagtgggcttctatttttgatgattcaggatgatagtgcatag

SEQ ID NO: 58860 - DNA, 666 bp, Acinetobacter baumannii; identical to SEQ ID NO: 57861

SEQ ID NO: 58861 - DNA, 570 bp, Acinetobacter baumannii; identical to SEQ ID NO: 57873

SEQ ID NO: 58862 - DNA, 204 bp, Acinetobacter baumannii
atgtttaaaaaattgattagattctttataggaaaaaagactattgtaccaaaggctatttttgatcctatggacttctcccatgctatcagcttgcaaattacaataaagaaagatggctcgaaattgtatcaaccatttggtatttcaagtaaaaagggcacacctattacaacaatagtttatgaaaatgatattgtttaa

SEQ ID NO: 58863 - DNA, 534 bp, Acinetobacter baumannii
atggaaaaacgtttacgttggtattggcgtaatcctacagatcgacatttatggcatctggatgaaacttacgtaaaagtgaatggcaaatgggcatatctataccgtgcagttgaccaacgtggccatactcttgatttctatctttctgctagacgaaatacccattcagcttattgttttcttggtaagattttgaatcatgtcaaaaaatggcagattccacgagtcataaacactgataaggctcatacctatggccgtgctttgtcgcgactaaaacaggaaggaaagtgtcctgaagacctggaccatcgacagattaaatacaagaataacgtgattgaatgtgatcatggcaagctcaaacggatcatcaaggctacgttgggattcaagtctatgaaaacggcttatgccacaattaaaggtattgaggttatgcgtgctctacgcaaaggacaagcttcattattttataacggtaatattctaggagaagtttggctagtaaatagagttttcggtctctaa

SEQ ID NO: 58864 - DNA, 123 bp, Acinetobacter baumannii
atgctttccacaccacctgcaattaccaagctcgcttcacctgctttaatggcacgggcagcaatggcaatggcatcgagtgaagaaccgcataaacggttaatggtggttgctggaacctga

SEQ ID NO: 58865 - DNA, 306 bp, Acinetobacter baumannii
gtgactttgaataagataattgattttagtaaagatgatgtgaaaaataataaagaaatttcttctgaaaatggttctattaatatttctgcagattatgtggatcttaatgcggcaagattaaagtcaaaaaatggaatttctattgtggctaataaaggagatattagtcttaattctaaaaaagaaactttaaatagcataaatgttatggggaaatttactgagagttatggtgatccctatagtgaatttgaattgtttaaaaaaataatcctgaatataaaaagaaacttgatgatttaa

SEQ ID NO: 58866 - DNA, 231 bp, Acinetobacter baumannii; identical to SEQ ID NO: 47478

SEQ ID NO: 58867 - DNA, 204 bp, Acinetobacter baumannii
atggagattgatcgtcgtgtacgtgctaaagaatttatgtaccttctatcaatccagaaggataaattctatgagtgggtaaattctggaaaaatcaaacaacccattcgcgtaagtgaaaaagatgtattttggtactcttcatacgttaagcagaaagttgaagagtataagcaagaatctgatatagtagcccacatctag

SEQ ID NO: 58868 - DNA, 288 bp, Acinetobacter baumannii
atgagtgaatcaattttttataacattccaaaagaatgcccaaattctagatatgagctggaattcaaagatatcgaaacatggctggagcaagatttagagtttgttgggaatgaatgcgcccaagactattttgacaatcatgatgggtgggaatcttcatggcctttagaaattcgtgtctttaaagatgagcactctattgagccaatagcttcacttattgttgagatggagctggaaccacattttagttcaagtgttaaagcggaaagtaaggaggggtga

SEQ ID NO: 58869 - DNA, 228 bp, Acinetobacter baumannii
atgtctaaacgcgccctactccataagtcaaaactagaagatttcaagtcttggcttatagcaaaccaaattcagtatcgagatggcaaaggtgattttcaggttctgcaagttgaagtgaaagataggttttacccaatttatgacaggattcagggtgaccacttaacgactcaaagagaactcatccctttagttaaaagatacatagcaagtgaaaagaattag

SEQ ID NO: 58870 - DNA, 195 bp, Acinetobacter baumannii
atgcaagtacatgagaaaagaaaattacttgaagccatggatgtgcttatccgtcgtcctgctgccggcacagattttacccttgctgaggcaatggcttatttcaagatgcttgtagaagaaatgactcaaggcggggtgcgtgttgattatgtgcccgttgaagaaaaaatcaatgagttgagaggtgggtga

SEQ ID NO: 58871 - DNA, 1110 bp, Acinetobacter baumannii
gtgaaatacggatcagtttgttcaggaattgaagctgcaactgttgcttggcatgaccttgggttaagtgcttcatggttttctgagattgagaaatttccaagccaagtattacagcaccattatccggaaattctaaatttgggtgatatgacgcttatccgcgacaaggtgaaatcaggtgaagttgaagcgccagatgtattggttggcggcactccatgtcaggcgttttcaatagcaggtttgaaaaattcacttaatgatgatcgaggtcagttgacacttgagtttgtgagactagcagatgaaattgattcagcaagaactatttgcggacttgagccagccatcattgtttgggaaaacgttccaggagtgctcaacacaaaagacaatgcattcggttgctttttgggagcattgtcaggttcggggtgtgaattacaaccggcagggaaaaagtggacaaacgctggttgtgtgtttggaccatctcgacaagtcgcttggagagtccttgatgctcaatatttcggagttgcccaacgacgcaaaagagtctttgttgtcgcaagtgctagagaaggaagtgttgccaaagtactttttgagcaaacaggcatgtctgggaatactactgagatcagagaagcgaaaaaaaataataccgaagctgttgcaaagtgccttacaagacgtggcgcaggtggacaaaacctagatgcagaaacagcaacctttgtaatacatggtactcaagacccgctagtgaatgaagaaacagctcattgtttaggtagaaacagaggtcaagagaatgcagttttcactgtgaataaaaccgctgcgacgcttactcgaggatttggtgatcgaggaattgatgctgatcaaatcactaatggtaattgcgctattcaatttaaaggggtgagaagacttacaccagtagagtgtgagcgcctacaaggatttcctgaccaatatacaaacattccaaatgctaaagatagcccgcgttacgcagcgctaggtaactctatggcagttccagtaatgcggtggattggagaacgtttgctacaagtttttggagaagcagcgtga

SEQ ID NO: 58872 - DNA, 213 bp, Acinetobacter baumannii
atgaaaccagaacagtttattcgtgagtacggggtggataaggcgagagagttacttaacgctgattctgattttaaaacttactgcctaattgataagtctttttggggtgagtctgagggtacttgtagtttttgtgttgatcttgatggcgtcaaacgtctggtggagtctattgatttagttgaatcatgggcggcattgatgatgtaa

SEQ ID NO: 58873 - DNA, 234 bp, Acinetobacter baumannii
atgaatatacatctctaccaagcaaacttcgtcgaagacagttataaattctcacctttaccagatgacgggaaaattccaaatgaataccgatcaaatgggcttacatatacgccaaatgaaatcaggtatgagaatgctagatacttcatttactgtaatcatgaattaaatgattatgagagaaagaagcttgaactagattgggcagactgtccttatagtccaaagtaa

SEQ ID NO: 58874 - DNA, 207 bp, Acinetobacter baumannii
atgtgcaataactggatcaagtttgaggatgaatctccggtagataagggcgaagtaatcctctacttagaagatggctcaatgggttttggtgaaatcattgactgtggaacatatctcagaatgagatttaatggtacagggcaggctttagaatattgtaaatataaaccgacacattggatgtataaaccagaaccaccttaa

SEQ ID NO: 58875 - DNA, 462 bp, Acinetobacter baumannii
atggaagaacaaatcaaaggcgcagaacctttagagaacgagcgtcatgaaaagttctgccaagaatatattgcaaaccctaagttaaggatctctgaggctggattagctgctggatatgagaagcgccagaatgcttgggatgtgtttaagcgccaagacgttcaagatcggattgcgtatctaaatctagaacgaatggctgacttgcgtgttgatcagtacatggtaattaaaaaccttagagacattgctgaacaagctatggcagagagggaattttccgctgctaacaaagccaatgagctacttggcaagcatatgaatatgtttacagacaaagttcagcacgaacattcaggaaaagttgatattaaacaattgggcgatgatgacttagataagcgcatcaaagagcttgaaaataaggtgatgcaaaatgacaagagaggagaagcttga

SEQ ID NO: 58876 - DNA, 846 bp, Acinetobacter baumannii
atggatccgaattctgatactcaagacgtcgttgaaaccactgcaacggaaaatacaagtgtagaaagtcaagagacaaattcaccagaaacagaaactcaggaacatgaaacaggcgagcagcaagaaggtggcgagcctaaaccagaacctgaaaaaccaaagaaaagtcgtgctcaagaacgcattgagcaattggctcgtgaaaatgctgagcttcgtcgattcaaagctgaatctgaagcaaagcaaactgagccaaaagcagacgccaaaccaactaaaccacgaatcgaagactttgaaacatatgaagagtacttgaaagagcatgatgtatatgaagaaaagctagatgaatggcgcattagtgaggctgaacgacgcattcttgaaaagcaaaataaggctcaatcagaaaagacacaaacccaaaaacaagctgagttagagggagcaattgctgcatttgcagaacaaacgcctgattttgatgatgtggttcaaaaggggattgctcgtcaactgcctatgccaatttcgctggatgaacttgctgatgaatttggttatgacgcagctacacaaacacgacttctctatgagttggctaaagatgaagagttgcaccaactggtttctgactcatcaaaactcaaggctgcgcgaatcttaagtgagcgtgtggattcttggggaagcaaaccagccactccacctgtttcaaaagctccaccaccaataaaacctgtccaagcaaatgcgcctgctgttcgtgacccatctaagatgagcgatgacgaatggtataggactgaaacacagaaccggaataaaggaaaataa

SEQ ID NO: 58877 - DNA, 585 bp, Acinetobacter baumannii
atgtcagatgaatatccaaaaatgctctacaagggcgatttaattaaatttgaattcaccactgcagtttcagaagagcatgaagaagaattaaaagctgatggctgggttgagcatcatgaattagaagagccagtaaacattgatgacgctaatgatccgggagatggtattcaagaaattgatttggatgcgtatgtctctgttgagcagtttgatgcattagctgaaaagctaactgaagcagaaagcaagttggatgaaaaaacaattgagcttgaaaaagcgcaagagcaacttactacttctgcagaacaacatgcaactgttgtaagcaatcttgagggcgaaattaatcgcttgaaggaagagttgaaagcagcaccagcggaggcaggtgttccacaagaagtttatgacgcagtctatcaggagcgtgagcaactccttaaagaaaatgcacaatataaatattctgcaatgggggccaacgacttaagagccatcttagatgagaaaggcattaagtatggttctcgtgatgaaaagccagcgcttgtaaagcttgtgcttgaaaatcaataa

SEQ ID NO: 58878 - DNA, 1407 bp, Acinetobacter baumannii
atggcaagcactattattgatgtgcctattgttgggcaatcttatcatctaaaagactggtctgttgattgccaacgcacactaaatctattcccgcaagtggtcgaaagtggtaatgcgccacaagttgccgcgctacttccaacatcaggcctaattaaaaagtttgagtttgatagctatattcgcggcatgtatgccatgagtaatcaactattggtggtagcaggtcaaaaacttttgtcggttaagtctgataactctgtgaaggagttaggggaagttacaggcattggacgtgtttattttgctgataactcagttcaagtaatgattgtaagtaacaatacttacagtcttgatcttaagagcaatgttcttactaaacttgagctgggtgatttctttggagcatccgatataacggtccttgattctcgttttatatggactgttcctcaatctggccgtattcaatggtctgatttactctctactaagactactgcacttagttacgctactgcagaggctaagtctgacaaccttgttagaactattgaaaataatgggcagctttggcttataggcgaaagaacaactgagatttggggttcaactacttcaaaggatcagccattccaacgaatgggcggtggggttataccaaccggatgtattgcacctgcttcggtttgtcgattcggcgatagtctcgcttgggtaacacgtactgagcatggtcaagggcagattgtgatgactgaggggttctcaacattacgtatctctaaccatgcaattgagacggatattagtagttatcagaatatacaagatgcttatggatttgcttaccaggaaaatgggcacgctttccttttaatgacattcccgagtgcaaaaaagacttggtgttatgacgcatcaacaaagatgtggcatgagcgtagttattacaatccaaaaacatcccaacacgaacaccatcgagcatttgtacatagtttttttagcggaatgcaactggtaggtgatagacaaaatgggaagatctatcaactaactcaaagtagcaatacagatgatggcgaaacaattgttcgtgaacgtataactccagtagttaatccaacaacagaccgttggatatttcatcatttagaagtcacggcacaagttggtcaagaatcaaatacaaaaccacaaatcatattggattggtcagataaccgaggtcgaacttggtcttattcaagacaaatggatttgggtggtattggcgaatatgacaagcggttgatcttcaaacgacttgggcagtcattcaaccgtgttttccggttaaggtttacagatgcttcaaggcttgtggtgcttgaagcaaaggcaaaggtgagtcaatga

SEQ ID NO: 58879 - DNA, 129 bp, Acinetobacter baumannii
atgaacttagaacctccttataaccatccaatgtatgtaaatgggcagatgactatgccttggcgaacctattttgaccaaattaccaagttactaatcaaattgaatgaggcatcaaatgaaccatga

SEQ ID NO: 58880 - DNA, 522 bp, Acinetobacter baumannii
atgaaccatgagattgaagatcatgacaatactttgttgctcatgcagattttaggtgacatccagaaccgttcttacattgagttagtacgagatgttgagcagaaattaaaagcaggaatcgctgagggcgatattccagaaggtgaagctccagttacacatcactttgctcctaatgtttatatgcgacagatggatgccccggctggctctttagttgttagtaaaatgcatcgaactgaacatttgaatattttgctcaaaggtagcttaacagtagtcactgaaaatggcattgaattcttaaaagcgcccatggtgattaagtcgatgcccggaacaaaacgaattggatactttcatgaggatagctcatggataacagtccatccaacacaattgacagatgtagaagaaattgaaaaagaagtgattgtccctgaagaagaaatagacaacttcttagcttcaattgggcacaaagcagaggagtttaagttatgtcatggggagccgtaa

SEQ ID NO: 58881 - DNA, 669 bp, Acinetobacter baumannii
atgtcatggggagccgtaatcgcaggtggtgcagcgattgttggtggcgctatgtcatcaaatgcatccaaaaaagcaggtaaacaacaatcacaagcagccgaagcagccgcacaggctcagctagagcaatacaaccaaacccgcgaagaccttgcaccttatcgtgaggcgggcggttatggtttagagcaattattagcaggttacaaagatggcagtttgcttaagggctatgatggctcgcaactttatcaagatccttcttataagttccggctgaatgaagggttgggtgcagtccaatctggagcagcatctcaaggtggtttattaagtggggcaacgcttcgagctttaaataactacggccaagaggcagcaagccaagaatataacaatgcctatacccgctataccaatgatcagcaaaaccgctatgcacgacttaaagacctagcaaacatgggacagaactcagctgttcagactggaacaatgggacaaagtgcagtaggtgcagcaggcgcgaacttgatgcaaggcgctaatgcatctgcagcaggtacaattggggctaacaacgcttggactaacacaattggacaattaggctccgttgcatctgcgtatatgaataaccgcaacactggaacaaaggtggtttaa

SEQ ID NO: 58882 - DNA, 1320 bp, Acinetobacter baumannii
atggctattgatgcttctatccctttacaggcgcaagggattaatgttgccaagatgcttgatgatggctcgcaaatcggtcaactttggcaacaacagcgcctgaacaaagaactagaccgtatttataatgaatcacaaggtgatgttaataaaatgctgagtcttggtcagcaatcccaaatggctcgttatattgtccctcaaattcaagcacagcaagcagctagccaaaaaaatcttttagatcagcaaaagacgttggctgagattgctaatacaactgcacaagccaatgaacggactgcaaatgctggcaacatcacttttgatacatcgcaaaagaaatacggtgcaattcaaggagcgttccagcaggctgcaatgactggtgacaagggaactgtgctattagcccttgatgccctgcaaagaacaggagctattactcctgaggactatgctcacaactttaaagttgtaagtgttatgagtccagatgaaatcaaacaatatgcaacaggtagtggtttactgaataaggacttagccccttatttaagtcaaaccaaaaacaatgaagcagacaatgctacatccgttgctaacaatatccgcacaactgatgcgtcacgttatgcgactgataccgcagctgcaaccgcagataagaaccgtgctcaagatgctcaacagtttagccaaaaacagcaacttgatgaatggttagcgaagaacaagcctattggaacagagatggggaacgatggttatatgtatgccatttatccgggtgggaaaggtgtaagaatctcagatgagagaggaactccaattcaagttcaacctaaagggtccaatagtactgttgcttctcagaatgaggaaaagcaacgtattagcagggttaatgccgttcttgatgagatacagggaatcttgccgcaagcaacagcgagttatgcaggccgtggtatcgatcttcttgcacgtggagttggcttagcaacaccgggtgatgtagcaactggtaagcttggaacattaggcgggcaattggtagctcttatgccgaaaatgtcaggccctcaatctgataaggacgttgcaatgtacaagcaaatggctggtcagttagatgatccaaccattccactgcaggttcgacaggctgcattagaaactattcgaagcttaaacaataaatatgctgagatgaatacgcaaaggtctgcaacagtgccttatcggaatgatgcgtcaagcaatacacagccgcaaaaccaagcaaaattaaacaatattctgtttggccgataa

SEQ ID NO: 58883 - DNA, 231 bp, Acinetobacter baumannii
atgtttactattctatttgttgtttgtgtcatacttcttttgggatttattaacctgaagtttaaagtggaccgtctggaaaaaatcaatcaatataatcttgaaatctttgaaaaaaagttccaagaaatagaagattccataaattttgggaaagaaagagcggatgacttactcgaaagaataagtgaactggaatttcaattaccaaagaaagaggatattaattaa

SEQ ID NO: 58884 - DNA, 240 bp, Acinetobacter baumannii
atgacattgaattttaaagctctactttgtattggtggtggtgataacggtaagtttgttgaacataaagaatttcaccagatttttatagatggcatgtttttagaaccagaaacatacaagcctagatatttaacaaatccaaaaactaagcaaaatgaattgttctatgttctaacagacctttcagaccaagaagctagtgagatcttagaaagcttgctggtaaaaaacaaataa

SEQ ID NO: 58885 - DNA, 2706 bp, Acinetobacter baumannii
atggctcaactcgctccaatgatgcaattacgtgctcgctttgaagacaaatgtgggcacccgttagcaggtggtagtgtatttgcttttgaagttggcacttccacaccaaaagacacttatgctgacgcagaagggactaaacagaacacccatccaattaaactagattatcgaggcgaggcagatattttcctattatctgggcgctatagatttgttgtgtactcatgcacaggagtaaaaatctacgacgtagataatgtgggtgagtggcttggttcagtttctgcagacaatgtttacgatggtgataaaacgcagcatgagattaatcaagaacaagctgataaaaatgcatcactatcacaagaaattgtgaatgctgtaaatgtagaaaaagaaagggctttatcagcagaaacagttttaaaccagtccattcaaaacgagattaatagagcaactgaagcagagcaagcattaacgcaaagtgttataaacgaaacaaaccgtgctacatctgctgaagttgcattacaaaatcaagtaaatgcattgggtggtggtacatatggctttaacacatactcggcctttgatgcagttaagtctacaatacctgcaaattcacttgttaatatttcagaagttaataacacaggaactggtagctggggtcagggtgataatgtctgggatggcaccaacctaactaaatctccttatgacccactacagttggcaaaagatttttctaatgcaaacaaagcattcaaacctcagccagtagtagaacctacagattttaatactctagttacttatggattttactatttcttctctggtgcaacatgggatagtagccctaataaaccgccattcaataaccagtgggcatatatgcttgctatgcctgtctctactgacgttgtagcacagtatgtgtgggcattaaatactaaaaaacttgcttatcgttttcgtaatgcatctggtgtatggtcaacatggggggtctttagtgatgatgccacgttaacagccgctatcgaatctagtgttaatacggacttagatggtacttttgatgcacgtgcatttaatagcattacaccaaattttgaaactttaacgaaaaacctctttgataaaaaagcccctcttttacttaaccgacgaattgatcaatttggtgaactagaaaagcatcaaaaaagtgttacaacatcactaatcaatgtacaaggtttatcttctattgctgtgagtgggttgcaagcaagcactcaagcgtatagagcatatcgttttcttgataaagataagaaacttattgataacgatccaatcgatttaaataagacaagtgtagtcataccagttcctgcgaactctgttttttttcaagtttgtttgaaagacggtattgatacttgggaccttaacctagatacaattcaaattgaatcaggcactgctgtaacagcttatgcctcttatgtacgtggttacttaaaaactctgtttggtgctgatttcctactggatcctttccaattgagatcattgctagatccagcttttgagaatttatcgagaaacttctttgataagactgcgccactattaatgaaccgaagaataacttcttcaggtgtccttgagtatcacttaaatagtgttactaccatgcctgtctatgtgaagggtctatcttcaatggcagtgagcggcttgactgccagtgcaattgcatatcgtgcatatagatttttagataaggacaaaaaatggattagtaatgatccaattttgttaaataccacaagcaaaatcattccagtacccgctaatgctgtgtggttccagctctgtcttaaggacgggattgatacatgggcattaaacctagacacaattcagtttgaagctggctcaacagtaacagcatatacagcatatattagaggaaatctaaaaagcttatatagtgctgacattgctggatcactacaaagtgtgtcacgagcttatggtggaaaataccttttctttggtgactctattacccaaaccagtcgtgttgatgaaggtatttttgatgaaacgaatttacctttccctaactggccaacttatgcgaaagaacagctaaaaatgtctagttatcggaactatgcgaaatcaggcgcatctttccgagaatctggacaaacaaacccttggcagatgatgtcgcatcaagttaataccgccataacgaatgcagaaaacccagaaattataattgttgctatgggcaccaatgatggaataaccagccttggtgattatgaaacagctatgggtaaagcaacactgaatgatttagaccgtacgctcacattagaggcggcacggtgggcattctggactctcaaaaagaacttcccgaatgctgtatgtttctatgcgaatccattgcaacgagcaagtgcagacagtacagagttagcaccattaattgatgggctatctaaaatggctctgcgttatggcttcacattgattgaccaacatcatgaatgtggaattatccgagatcttgaaacaggaagtcagcacttgtatttggcagatggtttacatccaaatactgctggacgtattttgcaggcgaactatatcgtcagcaaagtaattgctcgtatgacttactaa

SEQ ID NO: 58886 - DNA, 717 bp, Acinetobacter baumannii
atgggtgaagcaaaaaaacgtggtagttttgatattagaaaagagcaagctttgaagttaaagtcccgcgaagaaacagaagccttgcgagcgcagaaaaaagaagagcaagaggaaacaatttatagagaaagattgctagcatttgctaaaagtaaattaagcataactaaacctcgcctactacagtttactaaatctattgaagaatccttaatctctaaaaattattttgctgccttaactatcgcattaaccctacctgatatttgttgctccctagaagatgaaaacaggcgaacatcgggtaaaaagtatgctgaatggtttcagaaatatgttggttccaaatataccagtaagatcggccatgaaaaagctgagactatttttttatctggggaagagtgctttgctttaaggtgtacataccttcataaaggaattaatcatattgaagatgagagaatacttaaggactacgaaggaggctctaataaaattgaattcatggctgaaatgaattctgactgcgttatagtaaatggtgttttattactaaaactagagaatttctgctgtaatataattaaaggcgttaatcagtggttatctgataaaaaagatgactttattattagaaaaagaataagcgaaataccagaaatatacaccagcagtttctcaccaatacctggagttctcataggtggataa

SEQ ID NO: 58887 - DNA, 126 bp, Acinetobacter baumannii
atgaaagactggatctgcttctacattgaacacacaatcaaatatggtgagccgttctataaagaggctggttggtctttgggcttgaagaataattatgtggttttgagtgaattaataagttaa

SEQ ID NO: 58888 - DNA, 1254 bp, Acinetobacter baumannii
gtggcgggtaacctcttttcattacccgttacccgtatgctttctgactctaaaatcaagaccttaaagccaactgagaaaatgtatcgcattcttgatgctgaacgcctgtatattgaagtgcggccgtcaggtaaaaaaatatggcgttttaaatatactttaaatggcaaggaagggactattagttttggtgagtacccgtctgtatcattagctgatgccaggaagcgaaaagaagatgcaaaggccttacttgcgaaaggcattaatccggttgaagacagaaaccagaaagaagaagaaaaacgtgctgcaaccaataacagctttaaggctgttacagaagagttcattaaagaaaaaatgaagtacaaatccgaaggatatgtagatcgtttcaagggggcaatggaacgagatatttataagataattggaagtaagccaatcaaagaagttaattcggctgatgttctccaaatcatgaagaacactatggagcgaattaaaaaacaagataactttgctacaggtgaagccgcagccaatttgaataggcgctttattgggctagttatgcgctatgcgattgtaactctacggactgataccgacccgacctatgcagttaaagaagctattgaaagcccacaagtagaacatgcaagaccactcgagccacatgagcgaactacccttcgcactaacattgatacatacaaaggctcttctactgttagaaatgccacactaaccttgctctactcaatgttgagaacaattgaagtaagaaaaatggagtggccatttgttcattttgatgaccggataattaaattccctagatcatctcgccggagacggcaagaaaggtcaatgaagatggatagagttcatatagtacctatgtctgaccaactgtatgagatattgaaagaccagtatgcaattaccaaaggccagaaatatgtatttgcttctcctcagaaacgcgactgcatgatttctaggacaacgttaaataaaatgcttacttacattggtttgaatgatgtaactgcccacgacttccgtgcaacagcttctactcttctatatgaaaaaggttatgaagaggcatggattgaaaaacagcttgctcatgccgaacaaaataaaacaaaagcatcctatgaccattctcagcacctagaagctagacggaaaatgatgcaagactgggctgatattgtagatagctggaaggagtga

SEQ ID NO: 58889 - DNA, 759 bp, Acinetobacter baumannii
atggaaatttatagtttaaagaaactagcaaagggatgctacttacatgtacttcacttaaaagattacgatgttgaacttttaagaaatattgatgaaaaaattattcagatttgtgaaggggattcagagagtccactcgatcttgtaaaaaaaagattaaaagattttttatcttctaaggatttaagaactaaacagggggcgattgcagaattttttattcatttatatttaaataacaataattataaacctgagtttattttttataatttagaggaaacctctattaaaaaaggatttgatggtttttactcaaaagaaaatgagacgtatatagttgaaagtaaatctggttcatgtacttcaaaaaaaataagtcactcagtaaaaattaatgaagcctatcaagatattgttgataatcttagtggaaagagtaaaaagggaaagaataatccatggaaaaacgcatattaccatgcgaatttaatagatgttggtagtgcaaaatcaataagatcaaagatagctgaattgagagaaaattttgatagaggtattttttgtgacgttaaagactttaatattatcccttgttcaactattttcttggatgatatatggacaaaccaatggtccgatgactttattagaaacaactctgtattagaaaaaatttctggaaagaatatcgatgtgattgttgttactaaaaaaaatatcaaacattttgaggattatttaaatgtttaa

SEQ ID NO: 58890 - DNA, 240 bp, Acinetobacter baumannii
atgttattcaaaaaattcgctgttgctgctgctgttgctgctactttagctttcgttggttgttctaagaaagaagaagctcctgctgctaacgctgcatctgaagctactgctgctgcatctgaagctgctactgctgcttctcaagctgttgatgctgctgcatctgaagctgctgcttctactgctgccgcttctgcacctgccgcttctgaagctgctgcttctgctgcacactaa

SEQ ID NO: 58891 - DNA, 399 bp, Acinetobacter baumannii
atgaaaatcatttggtcaattattgctggtctccttatatgtattttgatttttgggaatattgaatcgaaagaaaaaacaacatctaatgaaaatattgaagagcaggtggttccgaatttaaaaccagatagctctcttattgtaaaagcaaaaagatatttttcaggaatatcaaaagatccaggttctttaacctacaggaatatggagagtttttttgataaagatggaaatagttatgcgtgtggggaagttaatgcaaaaaactcgtttggtggttatgttggatttagaaagtttatttatgacggcaaaacgatgattcttgatggagaaagcaacatacctttctctgaattggaaaagaagttttgtctactgaaagaactcaaataa

SEQ ID NO: 58892 - DNA, 1362 bp, Acinetobacter baumannii
atgaaaagagctactagagaacaatttttggaaagtgcgtccagcatacataataatttctataattatgatttgattgaatatgtaaataagttaacaaaagtaaagataatttgtcctaaacacggtgtatttgagcaaatacctaaaacacatctaaaaggacagggttgtataaagtgcggttatgaaaaagcgaaacaaacaaatagaacttcagtcgaagttttgctagcggagtttaataaagtacataatggtaagtatcaatacgattttaaaaattataaatctaataaatcaaaaataaccatagtttgtccagaacatggaatatatgaacaagcagtagcaagtcacctaaaaggacatgggtgtgcaagatgttcggggagagctttgccttctaaaaatgagcttattcaagagttatatataactcatggaaggaagtattcatatgaagatatagagattaaaggtgccaaggggaagatatcaataacttgtccaatacatggtttatttaaacaggcattatatgatcataggacgggacatggatgcccaaaatgcaaagtagataatttaaaaggcttaaatgctttatcgcacatacaagcaataactgccttcaataaaaaacatggccataagtactcttacgacaaggttatttatataaataaccgtaccaaggtcattatagtatgtaaaaaacatggagaatttctacaaactccgaatgaccatcaacaaggggctggatgtcctcaatgtaaacatgaattactagcattaagtaaaagaagaggagtagatgagttaattgcaatttttaatgacatacataaagataattatgattactctcttattaatagctataggaataataagcagaagttaaagattatctgcaaacaacatggaatatttcttcaaaacgctaattggcatttaagaggtgctggttgtccagtttgtggaaggcagctaagtacaataaaaaaggaagaatatataaagatttgtgataaatatgatggttttagccatatttatataatacgctgttttgcacacgaagagagcttttataaaataggtattgctaggctgggagttaaggaccgatacaaagataaagctcggtttccttatgactatgaaattatttttgaaaaaaggggaagagctggcatagtttgggatttggagaaagcactccatttatttttacgaggtatgcattataagcctcaactttacttcaagggttgcaaatctgaatgctttagctcgttaactgaagatatttttgttatgttggaaagtgttaaagttgcaaaagttttctag

SEQ ID NO: 58893 - DNA, 930 bp, Acinetobacter baumannii
atgagtaatgtagcacaaataaccgtaccattccacaataacgaattatatgttgttgagtttgaaggtcagccatatacacctatgaaacctattgttgaggcaatgggcttggattggaaatcacagtacagaaagcttatggcagggtatggtgataatgaccataccccaaatagatggggtataacgaaaatcgttatacctactcttggcgatttacaagagatgatttgtttgcctctaaggaaattgtttggatggttaacttcaattagtccaaacaaagtaaaaccagaacttagagatacggtcatcatgtatcaaaacgaatgtgatgatgttttatgggattactggaccaaaggccaagcaataaatcaacgagcagctatcacacctgagcaacaagctttacttcacgaaattgttgcacgacgttctaatggtgaaagaaaaatatttgctgaaatgtggtctcgccacaataagcattttaagattccacgctattgtgaacttttggcaatacatttcccagaatctgtacattatcttgagactatggaaataaaggcaaagcctgagcaaattgaacaaaaagatgttgtggacaaacttgatagttatcttaaaaatctggatagccgctatccagctttaagcaatccaattgcttatgaaattggtcagaagatttcggattaccttcaataccaagatattaaggatgagcgcttgttttatacagtaagtattaatagtgggaaggtcgcagtgatgccccaaagtccgcaccattgctcacttaatattgtgaaacttgcagatgcttttgcgcctttatgggagtttatgcaaggttatgaagttagacaccgagctaaccatttaagaaagcttccactaagaagacttcctaatcaataa

SEQ ID NO: 58894 - DNA, 159 bp, Acinetobacter baumannii
atgaaagtacaacgaggacatcaatataaacttcggtttttagatgatgcatatttagaagctttaaaagcaaaagggaaagaggaggatagatcgttaaattatttaattaaccaagctattaaagaatttttagcaaaacatggtgcgaaagcatga

SEQ ID NO: 58895 - DNA, 438 bp, Acinetobacter baumannii
atgaacaacccatatttcaaacagacagatcctcaatataagttgcggtggcctgcagaattaagggacaaagtatccgcctcagctaaagcttataatcgctcaatgaatgctgatatcgttgctcgcctagagcaaagctttttacgtgagtcggacttttcccctctcaatatgccaccagaagaacttaaaagacgtcttgaaaatgccaaatctgaacttcaatctcaaaaagaaaatccacaagaactgaatcttattgtttcatccgaagataaagatggcgagaatgttgttattagtaaaaagttcttttctgaactaatggaaatcaaagatgctctacgcaatctatcattagctgtactggacttggagaagcataagtacaatctagatgatgcagttgaagagtggaaaaaagataatttataa

SEQ ID NO: 58896 - DNA, 471 bp, Acinetobacter baumannii
atgaaaaaacttacagtagctaaccttaaaaaagtaagtctcactcaaagtgcaccagttgaaaagacagtgcatttttctttagagggtgaagattacgaagctcaagtatttgtccgtaagctttcattcaaggatcaagagcaaatcctaaaggcatataaatggaaattcgatactaaagatatagaaaactctaaattagaaagaattgatggcatccgcttgcaagctgctcgcattcttgggtcaatttgtgaagatgccaaaggtacaccgttctttaagtcaattgaagaagttctggattgtgatgtctctgtctgtaacgctttctattctgcttctgatgatgtgaacaacttcatgggaaagttgatgaagaagagttcaaacgaaacgaattctggtgcgagctcgtcagttgcggaatcggtggaaaaaccatctcggaagcgaagcaaaacctaa

SEQ ID NO: 58897 - DNA, 315 bp, Acinetobacter baumannii
atgatgaagttttcccatggcggctatataaaaaatgattctcacaatacttttaggttagatcatagggattgcatttattcaaacatgacacctgaaatagcaaagactttaggttttaaacgaacatcggaattagaaaaaatgaatactccaaaacaaattagtgttgtgatcagcacaaaagtgtcagatgacagaagcgcgaagcagaaagtaggagaagctttagcaaatctttacaccataacttacgacgaattgaccgatgatatttggcaggcaataaagttgctgcaaaactcacaagaatag

SEQ ID NO: 58898 - DNA, 396 bp, Acinetobacter baumannii
atgaaatttaatcaaaaaggctctacagacattgttgctattgttctaacagcggcattggtcttaatcattattatcctaatgctatttgcttggcctcactacaaagtgtggaagcagggcatgaatggtcaagcagctttagcagaagctgaacagtcaaaaatgattcaagtgcaaacagctaaggctgagcttgaaagtgctaagttacgtgcagaagctatccaaacaattggaaaagcagctaaggagtttccagagtaccgcaagcaagagtttattggtgcatttggcgatgctttgcgtgaaggcaaaattcagcagattatttatgttcctacagaagcgaacattccagttttggaagctggcaagagaactacagatgagtag

SEQ ID NO: 58899 - DNA, 228 bp, Acinetobacter baumannii
atgggcgtagaaccttttaaaaatttctcagcagatgaagtgataggccaaattaattgtggtttggatagtattagcaatcctttcactatcgaagagcctgctaacttgtttgagaagaatgttcaaactaatgtgctcaagcattttgaaggttcaaatataaaagtagagattgatcggaaagatggttatctaatcattacagcagaaagagttttaatttaa

SEQ ID NO: 58900 - DNA, 255 bp, Acinetobacter baumannii
atgaaaaaccattattacatcgtttcagcatcatttagatctgaaatccctatgacttggacacatacgatttccataactcctgttgtacttagtacgaatctaattacccaaaaggtgctaagtgaaattcagagtctagtaaaagagagagtaagtaacggtgagcataccgatgcacatgatattgcaatccatggcctttcttatcttggctacatgactaaggaagagtttgaagggagtgaccaatga

SEQ ID NO: 58901 - DNA, 363 bp, Acinetobacter baumannii
atggataagtgtagagaagagtttgagaaagcttttccggttccagcacattggattgagtatgacgaaaaatctaatcgttactattgcccatatgttgcagatgccacagcttctacgtatcagtctaagtgggttgtatggcagcacctgcaagcgaaagtggaggagctgcaaaagcaattaagtgaatacatatttgtggttgaaactattgatgaaatgtatgtgaaagaagtccagaaaagtgacgatctgcaaaagcgggtagacaaagcaattagatttcttgtggaagcagaattatatcaatcagagcctaacattgatttagcagttaaagcgctcaagggggaaggatga

SEQ ID NO: 58902 - DNA, 243 bp, Acinetobacter baumannii
atgagtgagtttaaagtcgggcaagaaatcaaaggtaagttcaagaacttctttggtgaggaagtagttgtggatggccgtattcgtgaaattaagcatggtgttctttgctgcaatgagatttcaagtggtcgtcctttctttgttcatccaaaagaagttgaagatcaatcagaaaacctaggcgacgacttccccatagaaaaccacatcagcctgctgtgtaaatcaaaggatgtttga

SEQ ID NO: 58903 - DNA, 297 bp, Acinetobacter baumannii
gtgaaacatcctctagataatcaaacagtcgattggtgtgatgaagagtttaaaagccatatcgctatcttcgagcgctttgcaaaagtaattcaagttgtaagaactactccagtagcgactacacgagaagtgcaaaaacatgcattgccagatttaagccgtagatcggctcagcgatacatcaaaggactaattgacgcgggctatctcaaacgtcacgagaagaaagacccaatgggaacccgtttgtatccaacagaaaaagttaatgaattattgggtggtgcagcatga

SEQ ID NO: 58904 - DNA, 216 bp, Acinetobacter baumannii
atgagtgagataagtatgacagaaaaagcattaatagcaaagctgatcaagaatcagaaccgcaagcagacgattagacattctaactctggcttagtaatggcaagtgtatttgttcttttagcattcagtgcctttggttacttcaaatacctttcagatgatgtacagaagcatgatgagtatgtgcgtgtgcaagtggaaggagccaactaa

SEQ ID NO: 58905 - DNA, 198 bp, Acinetobacter baumannii
atgaacgtatcagataaaagaaaactaatcgtaggcgttgaagccttagctgttcgccctggcactgtaactgctgaaactatcacagacgttcttactgggtttcaagaactgatcaaagagtcattacaaggacaaattgaagttgtttatgtgatgagagaacaagaacgcgttcaggttgagggggtgaagtga

SEQ ID NO: 58906 - DNA, 510 bp, Acinetobacter baumannii
atgaagatcatatcaattcaaatcgacaaccttagtggtcttggtattcattgtggtgaagctatacctttcggaacattgggaatcgtaattgattcagtaaattttgatgtttatgaaaagcttggagaagacatatttttctcaaaagatggtgagttattagatatcttcgcctttcgaaatgactctaaagaagggtttgcaggccgtgaaattaaattacgtattaaagaaccatctgtaatgtttccaaagcttcaagctgttcgtgaatacacattcaaaggttcactatggcgttcagatgatgcgaaccaaaaggtagcagagcacttagggaagcaaatcttaaagattggtgttagggagcggaatgaaagaggaaatactttttttagttcactagcaactgaagatttatacagacatctttctaaactgttagttattgctagacctgatggtagtgatttcaatgctgaattgaaggagccctctcatggataa

SEQ ID NO: 58907 - DNA, 570 bp, Acinetobacter baumannii
atggataactacaaaatcggcgacgaagttgagcttcttgaagatttttacactagaagtggcgcagaaataattttcaaaaaaggcactatcgcaaaggtaatcgcattgcagctttatgatgaaattcacatcgatgtaaatggtgacaaccgttggtgttctccagatatcttgaagttggttgataaaaaagacccagccttgattagcggtgcggatgtcctacctagcggcattgaagcaaggaaggaatgggcaaatgggcaaaagattcagtttaaatctagacgcgataatagcttgccttgggaagatgtagatgagaacaagcacactctagatatttttagacactgttattggttccgcctcaaaccccaaaccatcaaggtcgaacttgaaatccctgctccatacaaagcaaagattggtggacgagatgacacatcgtttgttctgaacattggcagacatcagtattgctacaaaaccgaagaggaatacacaaaggctcgtgacgctttagaagcggtgtttgacgcagcagtgagaggtgctaactcatga

SEQ ID NO: 58908 - DNA, 228 bp, Acinetobacter baumannii
atgtctaaacgcgccctactccataagtcaaaactagaagcattcaagtcttggcttattgaaaaccaaattcagtatcgagaaggcaaaggtgactttcaggttctacaagttgaagtgaaagataggttttacccaatttatgacaggtttcagggtgaccacttaacgactcaaagagaactcatccctttagttagaagatatatagcaagtaaaaagaattag

SEQ ID NO: 58909 - DNA, 384 bp, Acinetobacter baumannii
atgacagatttgaataaggaaagagaggcgcttgtagctcaaattgaagagttcaaaaaagatgctatggagttatggtttgttccagacctagccgaatcgtataagaacatggatatgtttagctactccattgttgaaaataatgaagtcttttttatgcgtgaacaagcccgccaattatggaaattttggaataaagccaaagctcaggcggtgccagagacacacactttagtttcaaatgataagttgcatgaatggtattgcatggctgttcgatcggaggaacttggatgtcctgaatgttacgaagcgcgcggttatgtacataatcttgcatgtgagttaaatgaagcaagcgaatcgggagctgagggatga

SEQ ID NO: 58910 - DNA, 288 bp, Acinetobacter baumannii; identical to SEQ ID NO: 58868

SEQ ID NO: 58911 - DNA, 1803 bp, Acinetobacter baumannii
atgtacttgcgcaatattcatattagaaatattggtcctcttgaaagcttggatttagatttggaattacaggaaaatttaaatccaaaacctatcattatggttggtaaaaatggttcgggtaaaacatatactttgtcttatattgtagatgctttttatgagctagctaaacagcaatttactgacgtagtaacaaaatcttcagatatgaattcaccttactttaaggttatttcaggtagagatattaatactaaaactaatattcacagtgcagccgcatatttaagatttcttaatgatcaagatcgtcaggagatacactactgtgaaaaaattggaaacaaagatttcgctcaagatttgttgaacttgtatgggaacaagattaatggtattgatgctaatgatggaaatactaaagaaattttagctgatgaaaaaaatataactaaattattctctaatacaattaatttttttcccagtttcagaaaaatagttccacattggttaaatttaagagctcaaactcaagaaatatttgatgttgaaattaaatattctggtaggttgaataaagaaataatgtgtgtagatacttttcaaaagaatattcaatggatgttggatgtagtactagattctgcaatattaccagctgaattagattatcttgaaactaaagaagaaaaagatagtgttgttaataataaacacttaataaataactcttatagaaatataaataaaatatttaaaacaatcctagatgataatgaaatatatttaaaaactggttggcgtaatcaagcacaatctcgattgtctttgcatagtaaagggaaagttgttgtgccaacgttagaacaactttcaacaggtcaattagtcttacttaacttgttcattacaataattcgacatgctgattataaagatttaaataacagtattcgtttagaaagtattgaaggaatagtagttattgatgaaattgatatgcatttgcatactagacatcaaagtgaaattttaccaaagctcattaagttatttcctaaagtacaatttatcatgacatctcatgcacccctttttgttttaggtatggaaaaagagttcggaaaagaaaatattcagttaattgatctaccatcaggtatgaatattacttcagaacgatttggtgaatttgaagagtcttttagtttttatagggaaacagcaacttttgaagaaacattacataaaaaaattcaggatcatcaaaaaccattaatactagttgaaggtaaaactgatattaaatttatgcaaaaagcttttcagctaaaaggaaaaatggattggttggagaatattgaaattgatgaaattggaattacccaggatgatgggcaagtcaaatttggtggtgaaagcagcttagataaaggttttgactttctgaagcataatttgagtgcagtaaatcgaaaggttctatttctatatgattgtgatacaaatacacgtaaacagaaagtaggtaatattacgaaagataaaattcctttgaatgaagaaaatacaaagattaaaaaaggttcagagaacttactcaaaccagagctttttcttgatgaattttatacgaaaatggaaaaaatagatgattatggtgctacttcagtaattgaaaagtttgataaaaataaattctgtaatcatgtatatgaacatatgagtaatccagagatatttgataaatatgaggaattagtatttcctattattgaagagtttcttacatcttaa

SEQ ID NO: 58912 - DNA, 363 bp, Acinetobacter baumannii
atgaagaatatttatatcttaatttttataggtgctttaattgcatgtagtaataaagaccaagagaagacaccaagtagcttaaatcacgaatcgaatgtaaatcatgcagaaatgtatgagcaacaatcttcagctataagtgaagtttcaccagcaagtgagtcaaaagtaattacagataaggcggtcgatacaaaagatgatcttcaagcaaatcaaatttcatgtttaaataaaaatattacagattggtatggttttgatgaagctaatactgaacctaaatgtgaaaatttaagaaattttagattgacctcttataaatgtgatatctctaaaaatgcttttggtgctgaatag

SEQ ID NO: 58913 - DNA, 414 bp, Acinetobacter baumannii
atgaaatatagtgtgagcattgtaagagagggagaggcttttatagtcagttcgcgagatcttccttacttaaatagtgttggttattcattagatgaagctttatccgaagctttagatggtatagaaactgccttcgaaatctatatggatgatcgccaagctattccattaccttcgaaaggtaagaaagatgaatatgaagttcatcttccagttcgagtagctgcaaaagtacgtttatataatgagatgatctcgcaaaacgttactaaggctgaattagctcgtcgtcttgggtggttacaaaaacaagccgatcgtttgctttccttaaaacactcaacaaaattagagtctatcgaaagtgcatttcatgcattaggtaaagatcttgatattgttgttgcataa

SEQ ID NO: 58914 - DNA, 1050 bp, Acinetobacter baumannii
atgaaacccattcatcttttaaaaagtgccttcaatgtcatatcaactcaagtccaatcagctaaacctattggtcgtacagaagcctttacttttggtgatcctgtacctgttttatcaggtggtgaattatccgaatatatggagtgttggtttaacggacgctggtatgaacctgcggtaagtcttgctggattatcaaaatcattcagttcaaccccctatctttcaagtggaattatttataagcgtaacttccttgtaaatttatttaagccccatcctcttttaagccgatctgcttttgaacaagtcgtttttgattttatttggtcaggaaatctttatcttgaagagatcaggtcagttacaaagcgcacaataaaatttaagccaagtctctcaaaatatatgcgtgttggtgaagataatcgctatttcatgattacgaatgatcatcacggttattcagaatatgaatttcctgaaggacgaattactcatgtaagagaatccgatatcgatcaggagatttatggcaaacctgaatacatcgcaacactacaaagtgcatggcttaatgagtcagcaactttatttcgtcgtaaatactataacaatggtagtcatgctggattcatcatgtatgtaaacgatccagctaatgatcctaaagatattgataatttgcgtgaagcattaaaaaacagtaaagggccgggtaacttccgtaacttattcttttacagccctaacggaaagaaggacggcatacagatcattcccgtatctgaaatagctgcaaaagatgattttgcaaatatcaaatcaatcactcgcgatgatgtacttgcagcacttcggattccacctcaactcatggggatcgttccgaataatactggtggtttcggttctgtcatggatgctgcagatgttttctatcacaatgagatcatgccattacaaactcgtttatcacagattaatgaattaacaggcatagaattaatccgctttaaagaatatgatttgaaaaagtctcaataa

SEQ ID NO: 58915 - DNA, 861 bp, Acinetobacter baumannii
atgagcagcaaagagcagaaaccaaaaaaagttaaatcaaagtggttccgtattgccacggcaggggataccacagatggtcgtgaaattcaggaaaactggattcaagaaattgtcgaaacttataacccacaaacttacggtgcgcgtattaacgtcgaacacatccgtagcgtttttcctgatagcagctttggtgcttacggggatgtggtagctgttaaagctgaaaaggttgaggttaacggtgaaaaaaaactaaccctgtttgcccagattgaaccaaatgaaaatttgattgaactcaataagcgtaagcaaaaaatttatacgtcaattgaagttaatccaaatttcgctaacacgggtaaagcttatctcgtggggttggcagtcactgatagcccagcatcattgggtaccgatatgttgcagttcgctgcaaatgcagaagtaaatcctcttgaaagtaaaaaacagcataaagacaacctgtttacagctgcaattgaagctgatctggattttgaagaagttgcagaaccaaaagttttcggtgctggcttagtcgaatcagtgcgtaagctgttcaaaaaacaagaacaacaagaccaagcaacaactgaatctttcagtaatcaggaacaagcaattcttgaaattgcccaacaagctgccgatcagggggccgaagtaacagagcttcaaaattcctataaagagcttcagcaaaagcatgagcagttggccaacgatttttcagaactcaaagaaaagctcgacggcactccagaccaaccatcccgtccaaaagcctctcgttcttcattctctgaattagatgaagacgtcgattgttaa

SEQ ID NO: 58916 - DNA, 747 bp, Acinetobacter baumannii
atgaactttgcccgtcaacattttcgtaaacatcaagctaaatctgcagctgaacaagctgcagagttcggcagtatgaaaaatgcaacggcatacgaactgcaacttatgcagctcaacaatgaccgcgcccgcttgaagcagatccaatcaactgaaaataagatcaaactgaaagcagagttactgcctacttatgccccatacatcgatggcattttggaagcccaaagtggcgtacaagatgagattctcactgaaatgatgatctggaatattgatacatctaatttcagccgagcattacagattgcggaatatgttctggttcacaacttagcattaccagaccgttttgaacgtacaccagcttgtgtcatcacagaagaaatttctgcagcattccttaaacagcttaaaacgaatgttgaaattgatatcgatgtgctgaagcaactcgaaagtttaatgaccaatccagatttaccagagaaaactctggatatgccagatcaggtaaaagccaagatgtatttagctttaggtaaggctgaaattcgtcttatcagcgataaggataagcctgatcttgtccatacaaaagcagctgcagattatttgcaaaaagcagttgaacttgatgacaaatgtggtggtcgtggggatttgaatatggttcaaaaactccttgataaatttgccccagccactgaagccaataagggtgatgcagctgcatcatcataa

SEQ ID NO: 58917 - DNA, 450 bp, Acinetobacter baumannii
atgagttttgtcgcaagcggtaatactacaccgtcaaaaattacgatcagtagtagtgatttttttccaagtatttcacttgatgaaattcgagattttgttcgtattgatggggcagtgactgatgcccgtttaaagcaagttactttagaagaaattatcgatgtcaatcgcttactttcgagtttagtaacaatggcatctagtctagctgatttggccacagggcaggttgatggaaagcctgatacagaaattctgtatttttctgctatttcgaatggtgttgccgcaaaagttaatgagcaatatcgcagttacgacacaagtgctgcaggtaataaaaatgcaaaagaattaactccaacgattgatgaatgccgacgaaataagcaatgggccatcaaacaattactaggtcaaactcatacgacggttgaattgatatga

SEQ ID NO: 58918 - DNA, 531 bp, Acinetobacter baumannii
atgaaaaaattaaatgatcttagggaacatttattaaatgcggtgattgaacttcgtcgtgatccagatcgtttacttatttttgctgatcaaggtgcattgaaatgcacctttgcttcagggctatcttatgaatatgagtaccaagctcagcttatattgaccgattatgctggtgatattgattcaatcgctattcctttatttgattggattcgtgtcaaccagagtgagttattagcaaatttagatcgggttaagcaaggtatccattttgaagcagagctacttgataataggaaagtggatttagccatcactattcctttaactgagcgggttattgtcaaacgatctcaaaatgggattatgcacattgaaactccacctgaaccccaagttataaaaacagaacccgggcaagaagtcactttaattgataatgaaacagggcaacgcttagcgacttggatgtctgcagatattcctgatagttatgctgtggccatgcctttgcctaaaagggattaa

SEQ ID NO: 58919 - DNA, 462 bp, Acinetobacter baumannii
atggcagatatgaaagctttggttgatcatttaggaattttactaaatcaacttagtgataaagaaaaacgtaagctcagtatggaaattgggcgtaaattacggagaagccaaagtacccgtatttctaatcaaaaaaatccagatggaagcccatatcaaccaagaaaaaagcagaagatccgggataaaaaaggtcatatcaaaaataaaatgtttacccggattaaaatggctcgattcatgaaagttaaacaagaacctaacggagcctcagttggcttcttgggaaatgttgcgtttattgcccaagttcaccaattaggtttacgtgaccgtgtacaccgaagaaagaatagccccgttgttaaatacccagctcgtgagttacttggttttacatcagaagaaattgaaatgattgagaatgatgtattaagccatttctccaaaataagctag

SEQ ID NO: 58920 - DNA, 237 bp, Acinetobacter baumannii
atgaaaatttcaagattcttttttgcaaagaatacatttgttccggccgtgcacaggcttaatttccgtctatctaaaatagttaataatcttgattcaaaggtattagtaactactgaagagatcacttaccttcaaatccgggaccttacaaaagagacggaggaattggtttatagcttagctaaagaagactatttagaaatcgtttcgaagaaaacactcccgtccgactaa

SEQ ID NO: 58921 - DNA, 591 bp, Acinetobacter baumannii
atgaacatttcagaaattttacgtcgtttagaaaacatgattaggttcggttcaatcgacacagtcgatttgaatcaagccttttgtactgtcaatcttggcgatattaagacagctccacttaactggctcaatttaagagccggggcagactcgacttgggatccaccaacttcaggcgagcgttgtattgtgttctctccatctggagagttagcgcaaggtattgtgctattcggaatttatagtgaagaaaatactgctccgactaacgctgcaaatatcaaattgcgcaagttttcagacggaacagttattcaatatgacactaactctcatgtgcttaaagccactttaacaggtggaggtaaagtagaaatcactgcatcaggtggcatcacattaaatggtaatacaaccatcaatggttcattaacagctacaggtgtaaccacagttaagagcagcttaaatgctagtggcaatatcacttcaaatgctgatgtaaaagcagggaatattagcctaagcgggcataaacatactggtgttcagggtggtggttcaacttctggaggaccagtgccatga

SEQ ID NO: 58922 - DNA, 351 bp, Acinetobacter baumannii
atgagcatgaatcgcttaacaggtctaattgttattgatgagattgaatctatacgtcaatccataacagatattttaacaacaccgattggtagtcgactcatgcgacgtgagtatggctctctgctttatgaccttatcgatcagcctattaacgacgttcttattttgaaatgctacagcgcaatttattcagctcttttgcgttgggaaccccgtatcaatatcaaccagatcagtatcttcagtattgaaggtgcacgtatgcaaattagtcttgatgctgatcttgttcaacagaaccaacctgtgaatttatcactagcgttaaatcttggagcagctgcatga

SEQ ID NO: 58923 - DNA, 918 bp, Acinetobacter baumannii
atgagtgttgtggatttttcacaattgccacctccaaatctgattaaggaattagatttcgagcaaatcttggcaaagagaaaagaacgttttatttcactgtttccaaccgaacagcagcttcagtggaaagaagttttagaacgtgaatcagaacctgtaaccaagcttctggaagaaaatgcttacatggagctaatactgacgaatcagattaaccaagatgcaagggctttactgctggcatttagtagtggttctgatcttgatcatattgctataagttattatggattaaagcgtttagttattacaccagcaaatccaaatactgttccaccaactgccgcagttatggaaacagatgaaaatcttaaggaacgttgcatattgtccttatcaggattcaatacagctggtgcgacgaatgcttataagttttttgctaagtcagcagatggccgtgttgcagatgcatctatcatttcacatgaagataatccttgttttctggatgtttatattacccaacatgacagcactaactatgaagcttcgcctgatttaataaatatcgttcaaaaagctttagatccagaagatgttagacctgtaggggatagacctaccgttcatagtagcaaagcggttccatatcaaatccaagcccgactctatatttctcaaactgctgaaaacgtcatgcttttatcagttgccaaaaagcggctagaaaagtatgtcgagaactctaaaaaaattggtcaatccattagacgttctgcaatttatgcagctttgcatgtggatggggtcagccgtgttgaaatccttaatttaacctctgatattgagattagtcgttctcaacatgctttttgtacatccctcgatatacaaattggtggtacggaataa

SEQ ID NO: 58924 - DNA, 537 bp, Acinetobacter baumannii
atgaaatctctattaccaccaaatgccactgaactcgaaaaaaaattagcagaaacaggggcagaagcttttaaaaagccctcgatccgactagcgaaagatgttgatcagactcctgcagagtttctagcgtttcttgcttgggaacgacaagtaaattactggcgtgatgaatggccagacgctttgaagcggcgaatcatcaatgaagcaatccctcagcacaagataaaaggaacaccggcagcgattaagagggcattagagccatttggttttgaagtcactttaatcgaatggtttcaaacagatcccccgggtcgacccggcacatttgcacttcaacttgatttggtcggtaaagagttgaccgaagagacctatcacgaagtgaacagacttgttgaagattcgaaagcagctactcggcacgtaacaaacgtccaaatcacttcaaatcctgttttatacattaatacagcgattgcacttcaagacgcagtgacaatcgaatgcatgccacaaggttatcaataa

SEQ ID NO: 58925 - DNA, 4587 bp, Acinetobacter baumannii
atgagcagtccatattacaacgtaacgaccaatgcaggtgacgcagccattgcgaatgcgattgccactaatacaaagctcaacattacccatgttgcttttggggatggtaatggatcctcacctacaccagacaaatctcgaactactttggttaaagaggtttatagacaagctgtaaacaagtacacaaagcatccaacaattagtaattttcttattgtggaggcaattttaccgccgatagtaggtagcttttatattcgtgaaatcggattaattattgatagtaagaccatgattacacatggtgcagttgctccagtgtttaaagaagctaactctgtacgtgaataccgattaaagttcacgattaacattcaggatgctgaaattgttaatgtcatgctggatgacacgttgatctatgccactcaagattgggtaaatgataactatgtacctcgtgcagagattatcaataatctaacgactaatgatgcaacaaagcccttgtctgctgcacaaggtaaaaatcttcaagataataaattggataaaactgcaaatgcagtaagtgcatccaaacttttaacaccccggactttttccatctcaggggatggtacagcttctggatcctttaatggcactgctaacttagctctacctctagttttagcaaacactggagttgcagctggaacctatggcggggtaaccatagatccagcaacaacctatattccagtggtgcaattcgatgcaaaaggcagggctgtaagtgcgtctaatgtgccaatgaaaccggcaacgactgcgcagttcggattaaccaagttaaacgcaaatgttaattcaaattcgcaaacagaagccgcaacaccgtctgctgtaaaagcggcttacgatactgcggttaatgcaaatagcagaagtttagataatcaaaagcgtctaaatcagttagatcaggatgtattacttcgtgaagaagtcttatggatgcccggttctgacagtattagggtttttaaaaatattgttggttttcagaagaaaattaatggaattaaaggggcgttagtactccatttacctgccgcaaaaaataaatccaccacaatgatgggtttgaaaattaaaggttatgactatcggaataacgctggtatttgggaacttaatataggagggtataactattctacaggttggttatgcaattctgctgtattacagggtttagctccttttaatatcgtacgtcttgcacaagcggcagatcaccaagtaattattttaggaacagaggataccaattggttatatccaatggttctattagatgaattaattactggatatacaaatatttctggctggcgtgatggttttaatttcacatttgaaacagacctaacaccttatacagcaatggttacgcctcttttatatggaacgccaagagcgcaaaatgctgatacattgatgtttgcacgaaccattggtctttctggtgctgcaactggtactcctactaactttgatggatcggccaatattttaattcctgttacatcacttgatgccagtaaattaactggtacagctggagtaaatacaactggttcagcggctaaactgacaacaccacgtacaatagctttatccggagcagcaacaggtacagctactaattttgatggatcggccaatatttcaattcctgttacatcactcgatgccagtaagttgactggtaccgcaggggttaatacaacaggttcagcagccaaactcaccacaccaagaaaaattgctttatctggtgctgcaactggtacagcaacgaactttgatggttcattagatatttcaatacctgttacctcattagatgccagtaaattaactggtacagctggcgtgaatactactggatcggctgcaaagcttacgacaccacgaaatattaatggtgttccgtttgatggaactagtcatattactgtttatgattcttctaaattgcctatgactggtggcagccttacgggtcctttagctgctcctactttaggtattctcaatactgatggaacgactggccgaggaatctcactttatggtggtgcatcaagtgggcgaccaaattatggtgtgtattttgccggaaccccgacattcggataccacggggatattactggcccgtgggctacttactttagcgtcattacatcaaatgatacacgtgggtggattttccaagctaacgataaaaatattgtgtcaatttcaacaaatggtgttgtcacagctcccacattcgttggtggattaaaaggaaatgccgatacagcttctaaattatctgcggtacgaacaatcacttttaatggcgatgtaagcggctcttatggatttgatggttctgttaatgcattttgtaacattagcgtgaaggtcgcaactacttcacagaaaggtattgttcagcttaataacaccttgagttcaacggcaacagatcaagcattaacggccgctcaaggtaaagcattaaatgaaagtaaagttagtcatggagattatggtctgggtcagaccttaaatgtgcctgaaaatgtattgttgtctgaacttactactcaaaactctttttggtcacgtggatctggtccaatacctgcggattccccagttaatggggctattaaagccattaattttggtccttcaccgtggaattctcagattgttgtaccagcctatacaaatcaaatgttcctacgttcaagagtggctgctgatggggcattcagaacatggagagagtttgcatttacggatagcgatatcacaggtaatgcggctacagcaagtaaattaaaaacaccagttacgattaatggtgtctattttgatggtacttcaaatatcactgtcaatgactcaacaaaattgccaactacggggggaacaatttctgggaaccttgctgttaatggatatgttttaactggccaaattaatggtaatgctgatccgttatctattttaagcggttcatctgcaagaggtattaatatcggtcaattattggtttctaatcaatattctgatgtaaccaaagtacctgctaacggtggctatattagagggaatttaattgttggtggtggagtcacagggaatgcttcaacagcaacaaagcttgctaccgctagaaaaattaacggaattaattttgatggtaccgctgatattacgattagtaacttaccgaacacaatatctgtaggtaatggccaaagctcagtttatgcatctatgcagtttggtaactacaataaagtaactggcgcaggttacatgaatgtcttacataatggtttatgggaagacggtttacgccaaattgggttatcaaattatagcgatacaggtgcacatatttcgactctatgggtcggtaaatcaaatgcatatatcaagcttgggactacagattatcagcttgcaaaggttactgataatgttgctagtgcaacaaaattagcaaccgcccggactcttagtgcttcaggtgatggtacttggtcagtttcatttgatggtagtgcaaatgcaagtgctgtatttacacttgctaattctggcgtagctgcagggacttatcagtctgttacggttgatgcgaaagggcgggttacttctggccaaaccgttactactggtcttgtaacgagtaatgctgcaactggaactaccaatacagcaacaagtaataccaatacattcttaaatgtagttgagacgaaaggtggtgctgcttcatcagttgggacctctacgcaaataacaggtgcgggtagtgttacagtttcttctgatgctgcaggtaaattggttattactggtacaaatacaacttatactgcaggaaatggcctatcacttacaggaactgtttttagtgcgaaacttttaaatgtcctgacatcaactgatgccacctcagcattgactgctgcacaaggtaaagttctaaaagatacagtcgatcaaaaattagataaaactggcggtaccattactggagacttagctgtcaaaggtaagttcacattagatcaatcaaatcttgtggttgtatccggttcggattatcaaattacatatgactatgcgacacgaattgcaactatagaaatgactttgtttgagaataagcgaattgtagatgcaatgccgcggtatagctcaaatagtgcatgggtttttgcattagaagtttctttacctatccagttaaagaaaagacttacagaacatttttacattactgaatatgtagaaggaaacgttcaatttggccaagaggcttcagagtggatgtttaactgtatgccatcaaattatcgaccatattctaaagatactaatggtgcgtatgtggctgatccgaccaaacgtgtttcagcattaggtgaatcaaaagtatttgttctggcgcgtcgttggtcaggtgacaacgacgaaccatgtagtggttatttacgagttacaggattattttaa

SEQ ID NO: 58926 - DNA, 495 bp, Acinetobacter baumannii
atgaaatatttcttccattttgaaaaccaactttttgatattgccttcaatgaccaaacaaagcctaaaaacggctttgttgaggtcactaaggccaaatatgaccagctactcaacgcagtaaatatgggattgaagatttttgaagacttaacttgttctgggcctaaacctagcccgtatcatatttgggggaaaaatggttggtatgatccacggactccagaccaaaaacgagcagaatatttgttgtctttaaaaccgcttacacgtcgccaattcaagttggctttacttcagaataatttactagatgaagttgaaaagaaaatggctgaaattgaggacccctttatgaggaataaaattcagattgaatataatgaatccttaaattttgagcgaaataatgaatcagttttatttatgacaagtgtattaaatataactgaggaggaggtcgacaagatgtgggaacaagccatgaccttataa

SEQ ID NO: 58927 - DNA, 1170 bp, Acinetobacter baumannii
atggcagattcatatcaccacggggtccgggttttcgaaattaataacggaacccgtcccattcgcaccatatcaacagccgttatcggtatggtgtgtactgcttctgatgcagatgaacaaacatttccccttaatacggcagttttgatcaccgatattcaagctgctattggtaaagctggtgtacaaggtacgcttgctcgttctttacaggccattgctgatcagacgaatgcggtcgttatcgttgtccgggttgtacaagagcaagatgaagcagcacaaacaactgctgttttagggggaacaacggacggtaaatataccggtatgaaagcgttactaacttcaggttctaaattcggtatgaaacctcgtattttaggtgttccgggtttagataatgcagcagttggtgcgggtattacagcaattgctcaacagttacgtggctttagctatgtatctgcttggggctgtaacacaaaagaagaagttatcgcatatcgtcagtcctttggtgcacgcgaaacaatggtcatttggccagactttttaggttgggatacagcaactaataaaactacttcactagctgcgacagcacgtgctttaggtctgcgcgccaagattgaccaagaaattggttggcataaaaccttatcaaacgttcctgtgaatggcgtaaccggcattaataaagatgtgttttgggatttacagtcttcagctactgatgccaacttcttaaatgaaaatgatgtgaccacgctgatccaacgtgatggtttccgcttttggggttctcgtacttgttctgaggatccactctttgcctttgaaaattacactcgaactgcacaagtcattatggacactatgggtgaggctcatatgtgggcagtcgataagccactgcatccatctttagcacgcgacattatcgaaggtatcaatgcaaaactccgtgactggacgacaaacggctatctcgttggtggtgaggcttggttcgatccagcacttaaccctgctgacattttaaaagccgggaagctacgtatttcctacgattacacgccagttccaccgttagaagatctcagtttacgccagcacatcactgatagttaccttgctgattttgcttcacgtattgccgcataa

SEQ ID NO: 58928 - DNA, 366 bp, Acinetobacter baumannii
atgaatacccaagaccaaacaccaaagacagaacttgaagagcaacaggctgaaaatcaacaagccattaacccggatgttgaaacaattgaattagataaacctatcaaaatgggttcgattgaaattgcaaaattagatattcgtaaaccaaacgttatggcacttcagggcgtaaaaattacagacttgatgcaaggtgatgtatcagcaatttgtactgttatcccgcgtgtatcaagcccaaccttaacaaaagcccaaattaatcagctagaaccttcggatcttgcacagattggggccgcactcatcctttttttgcaaccgagctcagtacgtgcagcaatcttacagcaacagtag

SEQ ID NO: 58929 - DNA, 3921 bp, Acinetobacter baumannii
atgaagcaacttaaactagaagttatcttcggttcccaagataaactcagtcccgcacttaaaattctttctggcaacagcaatgctgcggccagagcactcaagcaaaccaaagatcaggttaaaaacctagaatcacaactagcaaaaatcgatagctacgaaaaacaaaagttaatcgtacagcagagcagtattgctttaaaaaacatgcaggatcaggttaaacacctgaaagctgaaattgcacaaaacccagctaataatctggctaaatcattggagcaaacacagcaacaactcaaggcgactgaggctgcaaaaaaacaactagatcaacaactcaaacgtattgatgcttttagacaacaaaaacaagctgctttagatacaactaaaagttatcaagcagttcaggttcgtattgctgatttaaagcggcagatggatgcccaaccaagtaagaaactgactcaggaatttaaccgggcatcacgtgaagctgagcaacttaagaatcgtattaatgaacaagcgattgctctacaacgttctcgaaatgatcttaaccaatatggaattagtacccgaaatctaagcaatgaacatatccgggtacgacgagagatagaacattcaaatagaactattgatcaacaaaagcagagtcttcgccaattaaaagaagagcataaacaaagccaatcttcattgcgtggattaactcagcaactcacaaatagcgagagggaagtcggtaaattaaccgctgaatatgacaagcaaaaactacatttgaagaatttaagccgggagctagatttatccggagtgtcggtaaatcaacttgctacacatcaaggtaaattaaaagaccggttgtcttctacaaactcgcagttagataaacagcagcggcaaatgtcccaattgacacgaatgcagcaaaactatcaaaaggttcagcaacattcacgcacagcaatgatttatggagttggtactactgcagcgggtacagcggctatgtatcagcttagaaaacctattgaagaaaataaacgtgtagaaattgaagagaaccggattgcatctttaggtttaggtgaaaaagcgacaaaggaggcgaccgcttatgcaaaagcgatgaaaaccttcggtacaagtacctttgataatttgcaattaatgcgtgatgggatcactgcctttgccgatgtacatcatgctgaaatggttgctccaacgctctcaaaaatgaaatttgccaatgaagcaatgtatggccatgaacaaggcagtgagaacgagcgtaagttcatggatatgctcaaggtcattgaacttcgaaatggtttaagaagtgaaaaagctttccaagagcaagccaacatcattcaacaagttattacggcaacaggtggacgtgtacaagctggggaatggttaaatgccattaaaacgggtggtgtagctgttaaaggtctttcaaatgaagcgttctattacaaaatggaaccaatcgttcaagaacttggtggccatcgattcggtacatcggccatgtcggcatatcaaaacatttatcaagggcgtacaactaaacgtgctgcaaataatttgttggaattgggccttattgctgatcaaagcaaagtgactcacgataaagctggacaagtatcatttttaaatcccggtgcattgaaaggtgctgaacttttcaaacgagatcaatttgcatggatggaacaggtccttttacctactttagctgaaaagggcataacttcacgtgatcagatccatgacacgattggaagcatattcacaaacaggaatgcatcgaacctgtttacgacaatgtatgaccagcgggaacaaatccataaaaatgcaaaactgaatgccggggcagataatattgaccagctcaatagtaaagccatgaacaccacatccggtaaagaacttgaagcccgggcaaaactaaatgatgcctatctcaactttggccaaaatatcttaccgatttataccagtgcgattgaggtagcaacggaagcattaaaaggtttcaacacatggatgcagcaaaatccaacactggccaagttacttggtgctggattattagttattgcgacttcattggtggccataggtggtgctttagtggtgttttccccattgattttaagcatgttaagcctaagactgttaatgaccacggttggtgctaagggaagctcactcggatttgtttttagaatgctttctggtccagttggaattttgcaaaaaggtttcactttcttaggtcgatcaattctctggttaagtcgattatttattgctaatccaattcttttggccgtgacagcaattgcaggagctgcttatcttatttatcaaaattggggggcgatcaccggattcttcagtggagtttggagtagcgtaaaacagatattcagtgatgggtggaatgcaattaagtctgtcattcaaagtgtagatagtatttttgcgaataatccgattctgactttcatttttccatttataggaattccacggctcatcatcgcgaactggtctagtatttctagtttcttcagtggtctttggaatgggattgtttctggagcaaataatttatggacgaatataacgcaaattttttccccaataggaacatggtttctaaatcaatggaattcagtaaaaactaatactgctcaggcatggactgcaataaaaacagcagtctcgaatgcatggagtagcttggtttcaaccattcagactaatccaatacttcagaaaatcatgagtggttggcagagtattcttacatacttacagtcacttaaagatcaaatgttgggtattggtcgaaatattattgatggcttaattagtggtattaaatcgggatttaatggtttgaaatcactatgggcgcaaattaataattacatgcctgatttcatgcggaaaaaaatggatattcacagtccgtctagagtcatgcgtggtattggccggtttatcgtggcagggcttgaagttggcttgggccaacaacatggttcgcttcagaaaatgtataaacgtattgtcgatacgtttactgcacctacgcctgtaactttcactcctggtgcaaatcctccggatcaacaacaaacgttatggcaacgggtcgtttatgcgaaacttccagagattatggatcagaaccagaatattcaacaggtattacagcctgctgaaatcccaactatagctgaccaaactcaaggaatatggcaaaagctatttaaagttaaagtgccgaaaattttaggcatgaatcaaactataagtcaggtgctacagcctgcaacaataccggcaatccctgatcagcaacaaaatattttgcagagtttacatccggcaattattccggatttaccggatcagaaacaaagtattcttcaaaaggttgttgctttagcaaaaccaataattgaagacgcgccaatatttaagttatttggccaaatcaagaatgaatggaaccgcctatgggctgggctagacaatatcgcggataagtttccagagagattgaaaatgctgcttgatgttcagccagcagagcagccgactctggccatgccttcatttactccacctcaattgcctccagttatggttaaaccacttcgtgccggtgtttcagcttcagctggtgagcaagcgtcaaaacctcatcaaattaaagttgagggtgacagtattgcgatttatgtgactgctcaacccgggcaatcaacaaatgatatcgctgctcaaatacgacgtgagttagaaagctatcaacgcgaaaaagaaatgcgtatccgcgatcagttctgggataaccaatag

SEQ ID NO: 58930 - DNA, 1218 bp, Acinetobacter baumannii
atgttcgaagatatcagcaatgctaatgcacaagccatatataagatagttgttaatggtacagacattacttctaaagttaattcacgtcttatcaatatgacaattacagataaccggggtatagaggctgattcggttagtttagaactatcagatcatgatggtttgcttgatatcccgccaaaggatgcagttgtagaagtatggatcggctggagtacaactggtcttgtctataaaggtaaatatctggttaaagaacgtatgcataccggaacaccagataaactatctatccgggctacaagtgcagatctaaaagcgagcttgaagcgaaaacgagaaggcagttttcacgataaaactataggtgaaatcatcagcagtattgctgctagaaatggtttaaatgctgttatccaagagaggttggccaacattaaacttgcgcatattgatcaaaatgaatcagatgccaatttaatgacacgtattgcagatgaacatgacgcaattgcgactgtcaaaaacgctacattgctttttatggccaaaggaaaatctgagacagttagtggccaaagtttgcctgaaatagaaattacccggaggcaaggggatcgacattattttagtgataccactgaaggggacgatatctctggagtaacttgttactactacgatttacggaaagccctgaaacaacatgtaatagtcggtaacagttcacttaatgtaaaagagattcgtcatatctttcgtgatcgtgaaacagctttacataaagcacagtccgaatataactatatcaagcgtaaagcaacgagcttcagctattcattctcacgtggacgtcccgagttaatccctgagatgacatttaaattttctggcttgaaatctccgatcgatgacatagtttggttaggtacaagagtggttcataaactggatggctctggtggttttaatacagatatattgctggaaatcatgatgccggatgcagatgatgtgagccaattaattgataatgaacgaggggattatactggggtagtagcgtactatggctcagctaaatcacctgaaaaagttacacaaggggatcaatcaaatccaaaacgtttaacttatttgtataaaaataaaattactgcttcaaaagcggctgaacgtgaatttaaacggattcaggatgaaaaaaaataa

SEQ ID NO: 58931 - DNA, 597 bp, Acinetobacter baumannii
atgaaaaagttctttatgtgggtgggtataatttttattgctttcattattttagcacttgtggttgggggtaatactactaaccaaactacctcaacccaaaacaatgataattcttcactaagcccagcagctaaagaagcaacagatgctgcaaaagaagctgctgaagccgcaaaagaagctcaagaggcaattgatgcggctgctaaagaaactgaacaagaagctacgactgctgcgaaagaagctaaagaggcagcagttcaagaagcacctagcttaacaggaccacaacgtcatgctgttagatcagcacagcaatacctcagtatgtcaggcttttcacgtaagggattgattcaacagttatcttcagaatatggtgatgggtacagtgttaatgacgccacagtagctgtagacagtctggatgttgattggaatgagcaagctgttagatctgcacaacaataccttgatatgagtggattttcatgtaaagggctaattaaccaactctcatctagtgctggagataaatacacagtaggccaagccacctatggtgctcaacaagcaggagcttgctcttaa

SEQ ID NO: 58932 - DNA, 792 bp, Acinetobacter baumannii
atgaacgttcaatacaatccccaaggtcatagtttcagtggttggttaggagggaaatctcaactggccagaaccatcgttgatctcatgccagaacataaaacttatgtggaagtttttggcggtgctggttgggtactttttaaaaagacgccctccaccgttgaagtaattaatgatgtaaatgataacctaattaatttatatcgagttcttaaattccattttgatgcttttctagctgagtttgatctcctgttattttcacgtaccatttttgatgatatgaaaaaaaatgatcgtggacttactgatatccaaagagcagctaagttctattacttacttcgatctgcttttagttgtcagcttgatggatctttcagttattcaaaagcccgtaaagccgggttaaagctaggtgaagaactccgtactcatttgcattctgttcatgaacgtttgcagagagtagtaattgagaatgctagttatgactatgtaattaatcgaatggatagtcctgacacacttttttatctagatccaccatattgggattgtgaaaaagactacggcaaaaatatctttggtaaagaggatttctttgcattgaaagataaattatcaagaattcaaggtaagttcattttgagcttaaatgatgttcctgaggttcgagagttgtttaatgacttcaatatgcaaaataaaaaaatccgctggactgttaataataaagccgcagcggaaagtcataatggcaatgagttgattattagtaatttttaa

SEQ ID NO: 58933 - DNA, 453 bp, Acinetobacter baumannii
atgaagaaattcttattaatttgtcttttccccgtttttacaactgcgtgcagtgcaaaaacaagtcctcaagaagaactagatctccaagctagatttttacctacagcttataatattgatgctggtacttatgcactggtttcaaaagaagaacctacagccttaacgaaacaaatgtatgaagacgcgatttataaacttggtttattaaaaagatatgatgaccaagcaagtgcgaatttcaaacttgaaaaaactgtagaaccgatacccctaaatactttatgtttaatgggcaagtttgttactaacccaacttatataaagtcagtaaagcgtaatattgaacaaataccagatttaaataactggctaaaagaacagcaacctaaatggcaagaaagtttgaaaaaggaaaatccagaaatttttgattacccttgtatataa

SEQ ID NO: 58934 - DNA, 450 bp, Acinetobacter baumannii
atgaaaaaattaataagtattttatttctatcagtctttataactgcctgtaatgcaaagccttccccacaagaggaactcaatatccaagccggctttttaccaacaattttaggtattgacggtggtgtatatgctttagcgatgaaggaaccttcgaccgccttaacacaagaactttataaaacagctgtgttaaaacttggactattgaaaagatatgagtcacaagctaaaggtgttcaaattgaaaaacaaagtaatattgttcaaatcaattcactttgtttaatgggtaaatttgtagaatcttatacccatcaatctgatatgaaaatggatcagcaatatcatgcttcattgcttaaatggattgaagataaaaaaaatatttggaaaccgatgttagaaaaagaaggaaaaaatgctttcgattatccctgtttttaa

SEQ ID NO: 58935 - DNA, 606 bp, Acinetobacter baumannii
atggataataaattacccccagcaaccaagcatattccggcatcaagtgaagcatgggacggatttcctacaacacatgaaagctgtagtgttcctaagcccttctgtttttttcagtttaatcgaccaattgcccaaccatatacatttatgatgccagctcaccattgggaagctgtagcacgaaacaataaattagagtttctccttgctgtcagattcgggatggaatatgacgtatctaaacttaatgatggcatattaagtactaccggttttcatactggtatgtatgtaaaatttcaacattatttaagaaaacactatgtaaaagaggcagcagtactacaagcaatttttcaacaaacagcttttactactcgttttacgtcttcatttgcgattgaagacttgattagtttaaaaggcaccattgaagatttaagaatagataaaatcatggttggtgctgaccttattgcaatgaatgggggattcgctacacaaattaataggaaaatgtatagacacctttttaatcaagattacaatccagcaatgttaaaacagctttctcaacaaggtttgtatcctgacgacgtttaa

SEQ ID NO: 58936 - DNA, 534 bp, Acinetobacter baumannii
atgaaaccagcaatcgttataggcaatactaccgatcacggtggaatagttagtactggtgatagtacatatttaattgatggtaaagcagctcatgttgagggtatgactcacttctgccctaaatgtaaagtcatggttacagcgctatcaagtagcccacttgttgttattaatggccgagcaattattgtggctggtgacaaagccagctgcggtgcaacattcttaccaagtcaaagtttatgggtacgtgatcaaggtatttcaagcggatctggaagttcctctacgaacgatagctttgttcagaattcagaaaaagagaatagtgtcgtgtttcaatttaacgacccaaatactggtaaaccccttactgattttccatatgaactaacgttaccatctggcgaaaaaattcaaggaaaaaccaatagagcaggaaaaactgaacttgcagtaacaggtgttaagccagaacaagtcaaaatcgaaactttagacctttcagaacctatgcctccgttggagtaa

SEQ ID NO: 58937 - DNA, 687 bp, Acinetobacter baumannii
gtgacagaactctataaacttattgtagaaaataaaattcttagtcaacaatatatttatactcttactggtgttttacttcttctctacctcgttaattacattaaaaaaaatgaattttttgaaggtggttataagctgtattcatctataaaaaatagagatttaaaaaggattgatgagagaattgattcacctcaatattcaaatgaagaaaaagaatattttaggtataaaaagaaagtcttggaatataaaagtttttataaaatacccgaaaacaacttaggtttctttaattatgtaaatgggtttgaggatcaaaatagttttcgaagcatgtataaaaacagctctaagttcttgaattttaatagagagaaaaaagagctagaattagctgagccaatagatcgtgaaaaagcacatagaaactataaaattggtgaaattatttttgtattaaatggaatgttttcatatgttttgtttacgctacctttattaattaagcctgaaaaggtttcttgggaaaatgcattattaattgtttttgtaattataccttttgtttttattcaaatttatttagggttgttgtttatgcgctatatgcagaggaaacaacatgcattaatgattttagaattgaaaagaattaatttagatgaacttaaagatgaataa

SEQ ID NO: 58938 - DNA, 312 bp, Acinetobacter baumannii
atgactaatcaaaatcatggcgtagctacacgcctaccaaataatatccatccgttcccggctttcgtcggacctattcatcctgcagcagttctacaaaacgtactggactattcggttcaggagcgtatgtatcaagtttgcctgcagcgtttgctctcaccagattttgctggccaaactgtttctgtaattcccgagtatcaggaggaggatttcgaaggaggcgttaaactctatatgcatcctgctgttatggcttttttacttatactgtttttaacatctgtttatttacttgtaggggtatga

SEQ ID NO: 58939 - DNA, 576 bp, Acinetobacter baumannii
atgaaagaagatatgattccttatgtacctcttacccctcgtgtcgtagtagctgatccgaatcaaatgcctatacttgcttatttcatgactatcttggatgcggcaagtaaacaagaactagattttaaccatacgcctgagctttttggttttttaagtattaatcctaatcaaataaatgacttagcagaattaacatcgttggaaccaatcgatgtggcagatttaaagaaggctttgggcagtttaatttatccagttttccggggggaaactacgattaatagtccactttggaataatcaacctatcgtcgtttggcaatttcaattgaatattatgaatagttggaactttaaaacgatgaataattcagtagatagagcagtagtttcatttgatcaagtattaggtatggttcgtattttaagaagttcgctagaagcaagacatcaagatcctgaaattactttgaatgcaaatgatattgctaatgtgcttttaatggttgaagagaagctgtcagaggtacagcagcttctcgacccggagataggaattctggacgattag

SEQ ID NO: 58940 - DNA, 243 bp, Acinetobacter baumannii
atgatgactcaatttgtgcattaccaaaacaaacagcctcgagacaaccgacgcaatgtgaacttaaacgattcagaaaccatgctatttgatgctatgtcacgtattaccggaacaccaatcgcaatcattatccgcgagttcgctctacgccatgccatacgtctcatcatggacacggatcaatctatcttagatcgcatcatgaatacaggcgcgccagagcacctccagagaggataa

SEQ ID NO: 58941 - DNA, 159 bp, Acinetobacter baumannii
atgctacttaacgagcaagaagaaaaagttttcgaagaggttcgccaattattcaatttggcgaccattgaggaagcgattgaatttgtgattcagcaaggcattcaaacccaactacagcaaattgctgaacgtgtagtacaacctagaaaatcctaa

SEQ ID NO: 58942 - DNA, 531 bp, Acinetobacter baumannii
atgcaaagcgattctaacgcacaaatcagtttgagaaataaatttccttctgctttgtcagaggaaatgttcaacaacaacgtcgtatttagcaagattctacatgtaccgacactcaatgtaggacaaaaagttagcgaggattttgaagaatttttatgggccttagactctcaaaatgcggatgatttaattgaacagcatccaaaattggaaggttttattaaaaatgttcaaagaaacatgagtaggggatggtttgaagatcacgcaaatgatttagctaatgatcatagcgactttgaatttctaataaatcttgaaattgctattccatttaatttccggttttccgaagacgggaaatatctttctaattcaattggaggctattcgcgtctgcaatggatctttgcaactagtatgaaggatgcagcagaacaagcgattaaattggctgaagaaattcgtgctgaagaagaacaaaaagctcgtatagaacaaggtataaagggggccgaccatgtttaa

SEQ ID NO: 58943 - DNA, 318 bp, Acinetobacter baumannii
atgtttaaatattattgcgaatgtggaggtctaatactccctgattttgatgcttataaagttggcgataaagttaaattcagagttcaaaaaagggaaaacagatatcaaagaaaaatctttgtcagtctgaaagaatacaaaggagaaataactgcgattgatggggatgcaataacagtaaaagctcatgtaagaacctatatttttaaccgccatgaaattatgcctatagctgcaccaagtccgattgcttatttacttattggtagttgtcgttgccagttaaataaaggagtgagtatatgcgcggaataa

SEQ ID NO: 58944 - DNA, 354 bp, Acinetobacter baumannii
atgcgcggaataaataaagtcattcttgtagggagtcttggagctgatcctattacaagacaatttccgaatggttcttcaataacaaacttttctattgctacttcagaaaagtggcaggacaaacgtactggtgattggatagagaatactgagtggcatcgaattgtggcgaacaataaattaggagaaattgctcaaaaaattctaaaaaaaggttcaaaagtttttatcgaaggctctttgcgtacacgacagtggaccgatcaaaatcaaaatcaattcactgtgacagaagtaagggcagatcacttacaaatgctggatagtcttccacaagcaaacccttattaa

SEQ ID NO: 58945 - DNA, 204 bp, Acinetobacter baumannii
atgaatagaaacaataatttgacttttggccagtggtgggaatgtgaagaaaacgttttaatcaccatgcttgaagacaataaacctgttcattttattgctgaggttttaactagagactatcacggagtaagaaccaaaattgaagtcttacttcggaatggaagaattccattggaactagtgaaaaaaactaagaaataa

SEQ ID NO: 58946 - DNA, 567 bp, Acinetobacter baumannii
  misc_feature (544)..(553): n is a, c, g, or t
gtggttttatctatttatcatttttataagattgactatctaccaaaagatttaacaattggtgatggttttttatttatgcttatatctagtaaatttgcatttataggatctatcttcataggatccttacttgttgtagggtttcttatatttaagttatttaaaataatatatcttttttataaagagcgttcttttgttattgttatctttatctatgggttactaatttttttatcaagagaaaatttagatggaaaaattatgatgacgcttggtactataatttttgtgcctctgagtattctagtggggatagtattttggggaagggattggattagtttatgcttgtttttagcaacaagttttataacttatattttttttgatatttttaaaagaacgaagaatcatagtaatttattaggtgatgaaaaatatacacagatgagtatggcgttaatttttatattaggttttccggtctatttttatagtatttttacagaaaataaaaagttgacagatttttctttannnnnnnnnncttcaagaaaatga

SEQ ID NO: 58947 - DNA, 1671 bp, Acinetobacter baumannii
atgaaatcacttttttttgaattcgattatttcttaaatgaacaaaaactagcagagttatggcttgatacagaaacattatttgttttagatactaatgttttgttaaatctttactcttatcaagatgctacaaggaaagctatttataagagccttgataaagttaatgaccgattatgggtaccacaccaagtcatgttggagtttcacaaaaatagaccagaaattatttataaaagtaaaaagtatttcgatctaattgtgggtcatttagatgcattcattgaagctcataaatgtaatgataaggaattaattactttcgatactaattttggaaaaatgtatcctgagttaagaggattatttactaactttaaagaatcaagtcaaacaaaaattaatgagttaattttaaagttagaagaagaagcaaaaccaataaaggaaaaagcaaaagagcttaaaaaacaaactatatctttaactggaacagatcatatttatcaaaagctattagagttctatcctgatgagaaagttggtctccctttcgatcaggaagtattggataaaatttatgaagaaggggctgttaggtatgcaaatgaaatacctccaggttataaagacaaaagtaaatttggagatttaattctctataaacaaattcttaaatttagttcagatataaaaattaagaatgtaatttttatatctgaagacagtaaaaaggattggaaagaaagtgtaccccatgaaaataataaatattatggagttagaagagagattcgtgaggaagcttttaaagaggccggaatattaaattttttagttttcaatactgaagaatttattaaacatagcaaagttaaattagatactagtttagttgctgacttaaatgctgttcatgaaaaatatataaatattagtaatttgctggatacttcagttattggaaataatcaaggtaatattcacggattagatgaagaaattattactttggaaagcaatattactgttttatctacacaaattgaacaaataaaatttgaagaaaaacatttgaagcttcaattaaattcaatccaagaagaaattataggttttgaacgaagaatagttgaagattttgaaaagcttgaagattttgaacttcatcaacaacatcttatgttacgagatttaaatatatctaaggaaatgctgttagagaatttagataaccttgagtctcaattaagacaatcatctaagaagagattttttctgagaagagagctagataaattattaaccattaaacataatgagttaaaggatttagatagtaatatcatagaagatattaatgaaaatttacgctttataaatcatcgttcagcttctgaaatgagagaaagtgctccggaaaacttaattactcgaagagctcgttcagcttctgaaatgagagaaagtgcttcagaaagcttaagtactcgaagagctcgttcagcttctgaaatgagagaaagtgctccagaaagcttaagtactcgaagagctcgttcagcttctgaaatgagagaaaatgctccggaagacttgaatattagaagaaaacaatcatcgatagctagtcgaagaaagaatattaatgatgaaaactcagattaa

SEQ ID NO: 58948 - DNA, 1638 bp, Acinetobacter baumannii
atgcaaattttaaaattaattatttctaaaaatggtgaagaacttagggaaattcctttcaaaaaaggattaaacttagtaataaacaaatcagtaaaatcagctaacactggcaatggagttggaaaaaccacattatctaaaatagttgattgcctatttcttggaaaggttgagcagatatataaagattatgaatttggtacagaaaatatagaaattttggattttcttaacaacaatgaaattttagcaactttattttatattaaccaaaaaaaagagattcaatataatatcccaacatcaaaaaccaattatgagaaatttataaaatcagaatgtttcaatattgactccaaaaagcccactttaagatcaataatttcaaaatttattagaaatgatacacataaaatgctgcacaccgtaaaatttcaggactcacatacaaatggtgcgcttttttcagagatttttttatacttgtttggtttctcaaatactcaactattatcagagaaaaaagatgcctctaatcttttaaataaaagatcaaagaatttaactagcgttaactacttagtcaaagaacaaaatcctaaattaaatttaactgacttatattcacaatctaaagcaatagaagaacaaatagttacttttagttatgaccaagactcatcaaatccactcaatgaattgactgagttacaagtaagagaaaacaactataatactgatattttacatataaaacgaaaaatagataatattgaaaaaactattctaattttaaatgaacaccctaaaaatcaacttttaggagaacttaatgatatctatcaatatgcaggcattactttagaaaatgccctacgagatttgtccgaagttatagattttcataataatctacttgataaaaaacaaaaatttatcggtaaggaactacccctacttagaaatcgattgatcactctcaacgagagcatacagaaaatccaatctaccaaaaatgcattaatgcgagaattgacatcaaatgaaaatcttgaattattaagcaaaaaaattaaagatttatctcaactacgtacggaaataggcaaacttgaaggacttattgaacaacaaataaaagccgaaaatgataaaaatcaagctgaagtcaaacttcatcaacttagtatagaagttgctaagaactttgatactgtcgaatattttattaaaaaattaaattttgagtttagtaataactattattttttatatcatgaaaaaattagtttagagtatgaatatgatgagaaaaaaggcattcttaaattattcattaataataatgcaaatccagaaggtggtaagaaaaaagcagaagtaatttctttcgacctagcatacattactactttaaacactctaaatattcataggcctaattttatttttcatgacagtattgaagatattgataaaaaccaaattaaaaagatatttgaactagctcaagaaattgaaggctatgaaattatatctatgctcgcagataagattgataatgatactttagcaaaatataaagattgtataattcttgaattatccgaagatgaaaaatttttcaaaatttag

SEQ ID NO: 58949 - DNA, 231 bp, Acinetobacter baumannii
atgattccaaaagttgggacaaatccagaaattaatatactgactattggagctaagatcttagtttatttaaggcaaaaaaatcagtgttgtatattagatgatatattcgaatattttcagaaaaattcaaatctttctctagaccacatcattctaagtttagattggctttatacaattaaagctataaatattgaaaataatcaggtttttatatgcaaattttaa

SEQ ID NO: 58950 - DNA, 579 bp, Acinetobacter baumannii
atgaaccaaatcagtaccagtatggaaaatataaaaaataaagttactatcaataaacagataggtaatacttatattggagcaaatcctgaactattaattggctcagcaataaatgaattattaaatacattatcaagtaaaccacgtgaatttcaagtaaaaagaagaagaccatctgcagatactataattaagattgaatacaataatcttaaagctcgtcaaaatattgttcaaacttaccagagctattcactacaaatagaagaatcttttatagatattgatcaacagattattaatggaaaaacagtaattctagaaaatcttcaaaatctatattttgaggttttagatgagctagaaattgattacatgtgtgtagatataattgatatcaataaaattagagaaaactccgatgatataattgactatattattctaaaattaaagaacttatcaatagaatctaataattgtaatatacctcatgaagctatcgatattggtattaaagtcatcgtggctcatgcatttattgaatgcattattatggagaatcctaatccatga

SEQ ID NO: 58951 - DNA, 165 bp, Acinetobacter baumannii
atgatttcttatttcagaagctaccgacaaaatctcggacaaacttgcacaaatgaaggttttgtttctaaagcaccaacagcggtttttgagggtgaaaaagcagagcttgctgctctgttacaggaagttaaagcgaatatgaaacaaattactgcgctttag

SEQ ID NO: 58952 - DNA, 450 bp, Acinetobacter baumannii
atgaatgcacaaaaaggttttacattaatcgaactcatgatcgtggttgctattatcggtattttggcagcaattgcgattccgcaatatcaaaactatatcgctaaatcacaagtgaacagtggattttctgaaatcagttctattaaaactggatatgaaaatgctgtaaatgaaggagcagttcctaccaagttatctgatgttggttttactgcagctacctctagtgtttgtgctacatatagtattgacgcatttactgaaacagatggagcaggtaagattacttgtactcttaaaggtaatccaaaaattgctactaagatagttgaattaactcgttctacagatggtgcttggacttgtgtttctgatgtgccgacagagtttttaccaaaaggttgtaccgcaggtacaccaacagaaggtgctatcactagtttgtaa

SEQ ID NO: 58953 - DNA, 423 bp, Acinetobacter baumannii
ttgcataataaatttgcggatgatattcgagatttcctggctactaatgccggtaaaacagttttagattatcccggtttagctggtaatttccaagaaaacccaactgtgaaaaaattcttggtagataaccaacctgctactaaaaaaattaattcaccggtcatgattgttcagggtactgctgatatggctgtaccatatccagtcacggatgccctgcaaaatggtcttaaaaaaatgggaactgatgtgacatttgtacctgttttaggggctgctcatactcaagcgattgtatgtagaaatgctgaaatttatcaatttgttcaatctaagatgccagctaaaacaaatatagtgcttgatccatcagtaatagatgctagtaagaatgttgaatgtactggaatagcacaataa

SEQ ID NO: 58954 - DNA, 540 bp, Acinetobacter baumannii
atgtcaaatgcaaaagcaaattttttagggtttatactgcttttcgccttactagcactaattgtttacttattatatttttttattggttggttaaaaggtttaaatcctagtgtaggagcagcgttggtaactgcttctttggggttagttgggctttggtatgcacaatggcaatcaaagagtcgagatatcgctgaaagtcatagagctagtaaaatagagctttataatcttttttttgaaatacttgaaagtttccagaatgaagaaatagattctggagaattgcctgaagagcttaaaaagaaattagtaaaacttaatcgtggattaattctttgggcatcacccgaagttattaaagcatatttgaagtttcgtataatagcgaatgatactaatagtagtagaaatcttttatttgcagtagatgagatttatcaggctataagaaaagacttatcgaatagcaatagtactttgagcaaaggtgatttaatacgattaaatttaaaagatccagatgaattaagataa

SEQ ID NO: 58955 - DNA, 999 bp, Acinetobacter baumannii
atgttaaaaaataaatttatgattttggccatccttccttttatgttgagtgcatgtggaggtggaggggcaagtgataataattctgcaaataacacaacagtagagtcgaatgattcaattaaaaatggatcacgatactatgaggtaaattatcaagtacttggagaaaataatgatagcttatcaataagttattatgagattaataataaacgtatttatggggtagatagcaatcaacccttgaatcgatatattgtgacgcaaaatcatttatatacccctcaagataggtttacttcaataattgacgtaaaatcaatggatgagtggactttgaatgttatagataatattaaaactgattggaaacttgaaaaagttaatctagcgggaaaaaatatttttgacacagtattgccgggttttagaaaatatggatttgatacaagtaatccatattttacagctagaaagtttttaagttcatacggccaagatacttttcctacaggtagtacttgttatcgtttgtcttctatcaaaaataatcaagagtttataaattttaatacaaacaatcctctaaattattcttttgatctcatacatgaagacaatcttctaactgcgcagagctttcaaacagttgctcctgatctagcaatagtgaacaaacaaggacagtttatgggaatagattggaccactttgtatagtacgaaaactggagcagagttagatgggttttcagtgattcaatataatggacaagtttttgatgatgttagttataatggagttcaggagcagacccgtacagcacagatacaatttcttaaagatataatatcttcgaatttattgtctgaaaatcctgaagcattaagagaaatcaaatttgatcttgaaaatttagataaaggttgttttttatacaatcaaactgctgtcaacaagcttgaaagtcttaagttaatcaattggaatcaatag

SEQ ID NO: 58956 - DNA, 1062 bp, Acinetobacter baumannii
atgttagatttatttacacctattgttgaaagcgaaaaacagcataaaatttttaaattgttattaaatgaagcaatgtatgctgaaaggaatgttttattagattgggcaaatggatttgttgatagggataataaatttgtaaaagaattccaaactacttttgagtcttctttttgggaattatatctaaataaaatcctgaaatctgaaaatattgatatagattataatcatcatgcgcctgactttgtatgtaacaaaaataattcacctttttgtattgaagcaacaattgccaacccagaacaagatggcctaccagcatttggttttacagatgcacatttagattttcaaattaactttaaagaattcaatagaaaatcaattattagattagccaattcaattgtctctaaaaatcaaaagtttaaaaaatcatataaagatttatctcatgttatgggtaagccttttattttaggtcttaattcttttgatcgacctcattcccattttataggtcatcgcggtttaattgctgttctatatggaatttatcttaatgaggaaaaggctatttcagataaactcaactacttgccaagagaaagaatggattttattgaaaaagataatggtgcagaaattcccctaggtttttttaagacttcagagtatgaagatattagtgctgtaatttataacccatatgcaacttgggggaaagttcgagcattagctgaagtaagtgaagcaaataaaactactttctttaatgcactttacactagggatgacgtaagtgagagtacattaattcctgatatccgcgaagggattcctaaagaagaatataaagaatcaatctttgatggtttatatatttttcataatcctcatgctaaatatccattccctgattttttatttaatgatcctcatattgctcattttagtgtagatgatcatggtaatcttcttgaaagtgttggagaaaaatttttactttcacgaagtttaattagttcatatgcaagttcaatgattcccaaataa

SEQ ID NO: 58957 - DNA, 492 bp, Acinetobacter baumannii
atgttcgtgaaaaagggttctattaatcccctaaaaacagtcctaatatctgtatttgttctggctattagtggttgtgctaatacgcaagttaataactacagagaagcagttattaactcaactcgtggagcagttgatatgctgatcatggaccaaccagtttatagaaacgcaattaataccgagaaaaataaggtaaccactgctctactttttactaccttaaaaaagatgggagtcttaaaggaacttgagaaagaggttggaaataatttcgtaattgaagaaagtctgtcactggcaaaattgaatcaattatgttggacaactaagttccttcagcactataaaagcgagttacctccacaatcacaggctgactataaagatgtctatacgtggatagatgcaaaacaggctacttggcttaagaaactaaatgaatcttatggtaaagatgaactcggagaaaatgattgccgaaagtaa

SEQ ID NO: 58958 - DNA, 702 bp, Acinetobacter baumannii
  misc_feature (672)..(699): n is a, c, g, or t
atgtataaaatgagaaatatagttccagaagcccaaattgaagaagaaatgctgtgtggttttaaaccaccagtttttgatgctcacttttcaaacttaccttttaatcagctaggtgatcgggaatttgaaattttagtttactcgctattaaatgaagaaataaagcaaaaaaaacatccatattttacaaaaattgctttaatgcaaggagtgggagagcgtggaagagactgtgttttatatgataaccaaggtgtttgtgggttaatccagtgtaaaaagtattccggtcgacttactaaacctcaaatcttaaaagaattaattaaatttgctttatactccattttggataatagcattcttccaaatattgatagctttaagtatattttttatgtttcaaatgattttactgaaccaagtctaaatttgctttttaataatagtattattttagatgatatcgaaaataatataattaataagtacattattgaactagttgaggagtatgagtcttttagacctttaagagacaatcctccctttgaaaatatttataatattcttagatgtttaaaaattagtggtgttaatggctctgaattaacaagtagaatccaaattcttcccactatcttgcagagtttttttaacataaaattnnnnnnnnnnnnnnnnnnnnnnnnnnnntag

SEQ ID NO: 58959 - DNA, 219 bp, Acinetobacter baumannii
atgaatagtgagaacacacgtacatatttggcatttgcagctatagcaatctcttttttctgtgtgattggtcttttctttattgagatgcctgagaaaaaccgagatttaattaatgtggcactaggtgcgattcttggttggtctggaactgtagtggctttctattttggatctagtgacaagcaaaaaaaggaaagtgagcaaaatgaaaattga

SEQ ID NO: 58960 - DNA, 306 bp, Acinetobacter baumannii
atgtttatagaatttaaagatttgaagaaaaagcgaaacatcgctttattaattgtaatttttcttatttttggtggggcatatttcattattaacaataagagtattcgtagttttggatcggaccattattctagccctaagcgaccagcttactcttataaggttgatataactggtgaaaaagctgatggaatagttgaaattgatatgagaaaagatcaaggacagcttaaatatctatatacgattaaaattacggatgtaagcccgcatagttttcgtataagaataggaaaacattga

SEQ ID NO: 58961 - DNA, 345 bp, Acinetobacter baumannii
atgaaagagcaaaaaatgattgacctgatcaaagcgagtcaagccgtgatcaagaatgagcttttaccgcagtcgggcagtcagaaatataatttgttaatgctgatgcgaagctttgaaattttgcaggcttatattttgcaaaaggaaacttgttcattacatagctcaggaattttgcaagattatttttcttttccgatcaaagatgttgatgatgctattcaattgtttattgccgatatacgtgagggtaaacaatctgagcatacatttgaaatattaaaagctcttaattctgaagacctaaaaattactgaacccaaggtgactcatcatggataa

SEQ ID NO: 58962 - DNA, 1350 bp, Acinetobacter baumannii
atggaaaaatctctaagcaaggattgtgctgacttaagatcacacttaaaaagagtgaaagatacttttgtaactaatccaaagaaatattccttcggtagaaggcttcagttgaaatctggcccaattatatttagcgtaattggtgtcgtttttagtagttatagtcaggcttctgcacttgaacagtcgggccaatcgatattaccttttttagaagcaggtaattatgcagaagtaaatgccttcgctgttgatccttctgtttctggcgtaattcatgatcgtccagatcttggtaaacctaatcaaagccgagatacaggaaatattgggcaagataatcaattttatactgccgccttaaagctacaactcacagaccaattcagctttgggttactttacgatcagccttttgctgcaaaaacagcttatccacttcttcctaataatagttattctgatgatgccagccgtgaaggtacatctgtaaatgtaaaaagccaaaatttaagttttattttaggttattcacctattaaaaactttcaagtgtatggtggacctgtctatcaaactgtagaaggtgatgtctctttcagaggaatggcatataccgaagcttttaatggatacaatgctaaatttaaagaaaagggagagctaggttggctattaggaggaagttatcaaattccggaaattgcgcttaaagccgctataacttaccgttcaaaaattaaatatgattttcaggtagatgaaaatatatttggtgagccactacaatacactgcgcctgcaaagacaaaagtcgaaacacctcaatcagtaaatatagattttcaaacaggtattgctgaaaagacgcttgcttatatgagccttagatgggtgaattggaaaaaatttaatattcgtccagcgcaatacgatgctcttacagcaatgtatatggatgcattaacggaaggggcatataaacaaggtattgatttggattcttaccaaaaagatcaatatagtgtaatgcttgggttgggacaacagttaactgaccgttggagtattgcatctgatattggctgggattcaggctcggggagtcctgcttcaacgcttggaccagtgaaaggatactggtcttttggacttggtgctcaatttaatccagcgcctaattattttattgctgctggcgtaaaatatttctggttaggggatactaaagctgaaggtggtggctattatttaccaatcgatggtattaaagaattttcagagcaggctgagtttaaaaataatcgcgcaattgcatatgcgttgaagtttggatatcgcttttag

SEQ ID NO: 58963 - DNA, 606 bp, Acinetobacter baumannii
atgaccacttctcgccgtagaccgaaacatgatccaaaagaatctgagcgagaaatattagaagctgccgaacagtttttaagtgaacatcattttcgtgatctcaatattgatgaggttatgcgacgtacaggtttaaaacgtccagctttttatgttcattttcgtgataagaatgatcttactttgcgacttgttcagaatattagtaaagaactatttgatatcgcggaccgttggttagctggcactaatcatcaggaagatttgcgtcgggctttggtcgattcagtaaatgtttatgtagagcatggccgtctgttaagagcttttgttgaagctgcgagtggggatgagcgtgttgatcgagtttatcgtggtttaatacaagactttattactgcagctgctcaacatataaaagcagagcaacaggctggaaaaattaaaaaagatgtagaagtagaagaaacagcaaaagctttgatttggcttgaagagcgatatctctcagaaacttttggacatgcctcacaagttgaacctgaaattgtaattcaggtattacaaaatatttggatttcaacattatatggcacaaattaa

SEQ ID NO: 58964 - DNA, 1536 bp, Acinetobacter baumannii
atgaattcatcagatcaaaatactattactgatgttttaattatcggtgcagggatcgcaggtatcagcgcagcctatcatttaaagcaatatagacccgatacaacattcgctgtattggaaggacgtgacaaaattggaggaacttggagcctatttcgctacccaggtatccgttcagattcagatatgcaatcttttgcatttggctttaaaccttggacaaataaaagggtttttggcagtgcacaaatgatttgtgattatttacaagaaaccattactgaaaacgaaatcgaatcgcatattcattttggttactacatgacaagtgctgagttctcatctgatgaaggcatttggacagttaaagtaaaacgtaaagatcaaaaaagtttaaccactttccgctctcgctttttactcatgggtactggttattatgactataatgctggttatacccctgagttcaaaggaactgaagagtttcaaggtcaaatcattcatcctcaacattggccagaaaatcttaattattctggcaaaaaagtagtagtcattggtagtggggctacagcggtcaccttaattcctgcgatggctcaggacgttgaacacatcacgatgcttcaaagatcgccaagttatgtgatggctgcaccaagtacagatgccattgcaaatactctaaatcgctttctccctcctcagcttgctttcaatattgttcgtcgtaaaaacattctcctaactcgtggggtctacaatttaagtcgccgttttccaaagctgatgcgccgttttttaatttctgatgtacgacgtaatttaccgaaagatttcgatatcgaaacccatttttcacctaaatataatccgtgggatgagcgcttatgtgttgtgccagatggagatatgtttaaagcaatttcttctggaaaagcttcagtggtaactgatcatattgaacgttttaccaaagatggaattttacttaaatcaggaaaagtactggaagcagatatcattattacagccactggtttaaatgctgttgcatttagcaaaacccaattaattgtggatggagaaaaaattaattacccagataccacaatctttaagtcaatgatgctctctgatgttcccaactttgccttcgcatttggttataccaatctcgcatggactttaaaagttgatcttgtatggaagcacttctgtcgccttcttgattatatggacgacaataactttaaaacttttaagccagtgattggcaacaaagatatgaagcgtgttccttttgttgatttgaactcaggatatattcaacgaagtattacccaatttccaatggctggaacagaaggcccatggatattaaagcacgactacaaattcgatttagagcgacttcataaaggctctgtatttgatcaagagttacagttctcaaatccgaaaagcgagaaaaaaattactctcattacagaagaacccctgacagcacaaattaaagttcaggcttaa

SEQ ID NO: 58965 - DNA, 924 bp, Acinetobacter baumannii
atggaaaatattaaatttacaagtaaaggagttacctgttctgcatggtatatcccttcaacttcagaagagtttatgacatctcgaggacgaccttgcattgttatggcaacaggttttggtggtacaaaagacacaggattattagattttgctgagccatttagccaagcaggctttgatacttttatatttgactatcgtggatttggtgagtcagcagggttacctagacaacatgtatcctatattaaccaacgcgaggactatcatgcagcgatagcagctgcacgaagtttgccacttgttgatcgaaatcgcattgtactatggggtacctcttactctggtggtcatgtggtagtggttgctgcacaagatccaaaaatatcagcagtcatctccatgaaccctgctacagatggtttagcagcgttaaaacaagttttccaatatggtggaataaaacagatcacgacggctataggtcatggcatcaaagatttgattcatgccatagctcaacgtcctccacatctcattccaattgttgggcaacctggtactgctgccatgattagtacgcctggtgctgaagaaagctataccgcaatggcgggtccaacttggcgtaatgaagtctgtgctcgtgcagctctggaagtttcatacaaccgaccagttacttttgccaaaaaagttaagtgtcctactttggtacaagtcggttctaatgaccaaattgcaccacctgacccagctcgaaaaacagcaagcctgattcaagggccttctaaactattggaataccctattgatcattttgatttctatacagaatcttggcacggcaagatactaaatgaccaaattgaatttttaaagcagttatttgcccctaaaacaaataggcctaaaagctaa

SEQ ID NO: 58966 - DNA, 876 bp, Acinetobacter baumannii
atgtcactcgttaaattaagcaaagatacacaaatcgatgagatcgtttcgattattaaaagagatggtggagtcatcattgaaaattttttaaatgatgaaattacccaagatatttatgaggcactctcaaagcaattagaattaattcctgacggagaagatgattattttgcaggtactaagacccgtcgaatgagtcgtttatttgcccgcttgccgcaaatgccgttagttgccatgaacccagtatttttagacactgcaaaagctattcttcaaactcctctacatgcttggagtggtgaaaataaaattgaattgtgtccagacatccaagtgggtgtgacacaagcaattcagatttggcccggtcaaaaagctcaacctttacatcgtgacgatactgtatggatgtggcgacatccggtttatggacgtgaagctagagtacaaatcatgtttgccgtgactgattttactgaagaaaatggtgctacacgtgttatccctgcaagtcatttatgggatgatcaaagagcaccgaaagaagatgaaacgattgcagctgaaatgaaggctggagatgctttgatctggattggttctacctatcacggcggtggagcaaatgtaagcaacgaaccgcgtatcggtttaacaatgtcttatgatctaggtttccttcgtcaagaagaaaaccattatttgtccttatcaaccgaaacaatcaaaaactttccagatgagttaaaagggatgcttggctggaatatgagcacgacatttgttggatttgttgaacacgacggtaaaatgatgaatccaatagatatgttaaatgttcaaaactttaaaacgtctggaatcatttaa

SEQ ID NO: 58967 - DNA, 1803 bp, Acinetobacter baumannii
atgcttaattttaaccctaatgatttaaatgaagaacaaaaaaaggctatttatgaagaaaatagtattttattggttgcctgtcctggaagtggtaaaacaagaacccttatttataaaatcgcttttgagttaagtaaaattgagtctactaagaaatttgttatagctattacttataccaatagtgcagctgaagaaattaaagagcgagtagaagccttaggtgtcgatacaactcagctttggataggtacaattcattcattctgcctacattggatacttagaccatactatttatatttggataatttaaagtatggtttcagcgtaattaattcctatgatacggaaagaattttatcagaattatgtttaagttataaaaatccaagaattacttattgggactgcggagtaatagcaaggacagataaaatctatttgacttgtactgatactgccaagcattcttcattacttaaaataatgaatgattattatactattttggcagaaaacaaacaaattgattttgaacaaatattgaaatactcatgggatctacttaatgaaaattcgattattagcaaatctcttagtaatatattttcaataattttaattgacgaatatcaagatactaaagaaattcaatattatatacttgctgaaatattaaaatcaaattatggaaatactaaagcatttatagtcggtgatcctaatcaatctatttatgattcattgggtggttttccaatgccaaagaataaattggaagaattattaggttttgagttgatagctttaagccttgataaaaattatcgatcatctgataaaatagttaagtattttgactactttaaagttaatcaaaatactattaacgcttttggtaaaaataaagattatcaaagtataattacatataataattcagtgttacttgatgatttaattgatgaaatttctaaactaataacaattaatattgaggaatataatatatctcctaatgatatttgtattgtagctccacattggattcatattggcgttattactagaaagcttatggtcaaacatcctgatttgagttttgatggaccgggtatggcaccattttctagagatattgataatttttggttcaaagtttcaaaattgatattaacagaaccttcaccagatatatatataagaagattgaggtggtgtaatgaaatacttaaggaacttgagttgttaggaataaatattaaccatttatcaaataaaagctttcttaaagtttgtaactcaatcaaaattgaggaaaatgatggtttgaaatacttaaagttatttttttcaaagctatttaatgatttaaatattgattggagatctattccttgtctcgtgaaccattatgattctttttttcagagttcttatcaaaaactagaaagactttcatctgaaggtataaatggagtagagactcttgaaaattttaagaaagtttttaaacagagggatggggtaacggtctcaactattcatggggttaaaggagaggagtatgatacggtaataggctttgctttacttgatgggtttgttccccattttagtgattcaaatagtgatataaatgcgaaaatgatattatatgttttagcatcaagagctagaaaaaaatttcatttaatatcagaaaaaatgagaggcccttttaatagttataatccagagggaaagaaaccaactccacatttactagaatatgtttatcaatatgatgaattataa

SEQ ID NO: 58968 - DNA, 939 bp, Acinetobacter baumannii
  misc_feature (910)..(919): n is a, c, g, or t
atgaatattattagtaggaaagtaaatttttctgaaacttatcaaccaactattggactttctcgtaaaagtattaatcaagttcagcgttatttggatgccgtaagaactaatctattattcgcaaacatatcgtcggcagcgtcagatgtgtataagagacagttattgcctattttaattaaaatagtctttggagtaagtatagatgagcttggattgagtttaataaatattcgtagcacaggttttgagaatgtcgctcaactttttcataatgatcgaattagacgtaaatgtgcaattttaacagatttagatagtgccatctgtgatacaacaatattagcgagtgataatgaagatattaaaaaatataaaagaaaagtagaagcttcacaaaaaagtggaatagaacgaaaaaatattttaaatgaatttggaaaagataatatatggataaaagctttttatgctgaccatacatttgaagttgattttattaaagctggcaatgtttctgaagttcagaatattgttgagaatgtctatacaaagcccgaaacatgtgctcttgctaaagcggaattagcaagtaaagatgtagctgtttatggtcgtagagtactgactatggctaaacaggaaggaaaaggatggttcgcaattctattagggggtgtgctatctagtggaacaagaattccagaatatattatcgatgctttaatatttgcgaagcatgattattctccttcattaatagcagatataatagagtatcgggttaaaatacatgagactattacacctggtgtatatgacttttctgatctttatatctttttagaaaaatttaaatctggtgaagaggtagatttatctgagatattgcatgaactagaacctnnnnnnnnnnctagaacctataaaaaatga

SEQ ID NO: 58969 - DNA, 297 bp, Acinetobacter baumannii
atgagtactttaacacaatttaataggcctttggaaaaccctattattgaatcaattgataaacagttctttgacttattaggtggtgaagaaccccatggacgccaatgttattgggtggtaattgaaaacggagaggcgggagttcagcaattacctgcacattttgctccaacaaatgttgttcaactttcagatgctttcaattcactacgtgaagtttttgttgcaggtgaaattttggagcatgcaagagctttgaaaaaaattccatttaaaatgaagaagaatagttaa

SEQ ID NO: 58970 - DNA, 276 bp, Acinetobacter baumannii
atgtcacataatcgcattacagcagctgaagcttctgctttagcatctggtcttcctgatcatgataaagaatatattattgatcaagtttacagaactgttagagcaaatctaaaagagggttctattcaagttcaatttgataaaaagttaacttctaagcttgctatggaggctgctattcgtcatctacaaggagatggctatcaagttaaactcgaaggtttagaggaagtggcctattattataaattaaatgtaaattggcctgcgtaa

SEQ ID NO: 58971 - DNA, 777 bp, Acinetobacter baumannii
atgacattagaaatatgtaaactttgcggagaagaaaaagagttacaacgctcacacgtaatcggtaaggctgtttttagaaaaatcctaaaagaatcagttggaaattatttaattgatatttcagttaataatcagaaaattacaaagagcaatgatacatgggaatcaaaactcttatgcactgattgcgaaacattttttaatagtcaatatgaaaaatattcagtcaatgttttaagaaagaagcaaaaaggagttcgagcaattgaaggtaaccacgggatttattttagggatgtagatcaaagtagaataattttatatttgtgttcaatttattggagagctgctcactcaactcataaagcatatgagggtgtaagaattacggatgaattaagtcagtatttagcgtatgtgtttaaaggtaagtttaatttaaatgctaaagttttctcagcacgtataagattaattactgatgaatcaaaaacctttacagatgatcgaattaaaatgattgttagtccgtattttcgatttaaggggaaaggctttgtgttttgtatggcttacgaaggttactttttcgaattgtttttcaatgcaagtaattttaaagaaaggcaacaacctggttttttgaataaagcaagttcttcattcttcgtcccaaaagtggatttattagacataccagcaattgcaatgaatatagctcaaggtattgaaatccatcaagcactacctgatgaagaaaaaattaaaatataa

SEQ ID NO: 58972 - DNA, 372 bp, Acinetobacter baumannii
atgagtgagtttaaagagttcaaagtgggtgacaaggttatttggcttgtagacgccccttggcaatgggatgtaaatgcgattcatgaaatcagagaacattcgcattgtcagtacaaagtttgtcttggggatgaatttgtttgttggtgtggcgatcaagtgttttggcaagagttccgtcatgccactcctgaagaaatagcagtaggccaccgcattgataaaccctcgaattcgagggaattagaaatcctagacaagccagtaggaagcctacaagaattgtatcctgagttcgcaaaggtgcttcacgagaactttctagagttgctcggagacgactttggcatacccaacgatagaatgtaa

SEQ ID NO: 58973 - DNA, 255 bp, Acinetobacter baumannii
atgagtaaaacaggattagtcattcgagtaaatcatgccaaaggtgttgagtcgattctcttggatacatttagatttacggaggcacagggccccctagtaaaagctcaagactttaatccaagacgattcttgagatgcatctattgtcactttgacgaatttaatgagcttgcaaccaattttcttgagtgcagccaatgtgaatcaaaggttgaaattagtcctagagcagaaggagccagccatgagtga

SEQ ID NO: 58974 - DNA, 492 bp, Acinetobacter baumannii
atgatgagaaggctaagacaacgccagcgtcaacaaagaagtatttttgggatgttatctaaccattctaagacggggctttcgaagaaagaagtcgaatttctaaaagcttacggactgaaaaaagcaagagaagttgttgaggggatgcccgaatgtgctaaccattacaagtttagtgaatacgcttctatagaccagtattacagcattcataccatccctcttaaatggaataattactcaaaaacttggtatcaacttagaaaaaaaccaaaagacttggttgatttgattgaccttaagcgtctagttgagtctctggatcgtgtcaatgaacatggcggttatttagcagctaaagagttgttgagcttttcgatagttcatcaagaagcatttggcaaggatgcagttagcgatgagaacattaacttgttaaaggactcaatcaaagaccacgaatcaatatacggaggcggggatgagtaa

SEQ ID NO: 58975 - DNA, 261 bp, Acinetobacter baumannii
atggatcactacaaagacatagttacagatgaacaaggcttaattagcgttacggaggcgttacgagctatggcttgtggacgtgttgttcaatgttcaagtaaagactttccaaattggaaggacttggaaatcacaaatcttaatgcgaaaaacttaattgatgaagatcgcattaataaaaacggttttaagtatagatataagccttcgcaaatctctgtaaatgctgaactaacacaaatgaaaaagcctcaatga

SEQ ID NO: 58976 - DNA, 402 bp, Acinetobacter baumannii; identical to SEQ ID NO: 46773

SEQ ID NO: 58977 - DNA, 147 bp, Acinetobacter baumannii
atgaatgattttttcgcaatggtagtaactttagctaaacactttaaggatcgccctgaagtcttattcgggcttatcgtggttcttggtggtattactttgatatgggcaggaaaactgaaaggagcaatttcctttggaggataa

SEQ ID NO: 58978 - DNA, 603 bp, Acinetobacter baumannii
gtgaacagaatagtaaaattcttcaattctttttttgaagagaaagttatatctgaacaagcttcaaaagaaagtattgaagctggaaaagctctgtatgaatattttcaaaaacaagtagagcatgagaaaggtagattccagaagtttgaagataaagcttcaaaattcctcactatggtatcagtgataattacagcttatctatttgttattaataatatttttgagaaaatatctagtgtatgctctatatctctggcattacaaatttaccaaattatcttaattatcttattcatacttttatttctaactttatgtgcgagttggttgtatctattgaaagtcttaaagcctcaaatcactaggcatctaccaactagtcaagataccattaacgtttatattaactatccaaataagttagatgagatttatcacgacaatgccaataaaatgaaacaagttattgatgaatataaaacaaccaataaagttaaagtacaattcctatcgaaagcgtataactgtatctccatttcgggtattttattcgttataattcttccattatcattaatatataagtatttaacatga

SEQ ID NO: 58979 - DNA, 474 bp, Acinetobacter baumannii
atgagtcataatagaaataacagcaatgatggatatcaaatattcttagtcattgctttaatcattattggtgccatatgttttggtatctggaaaatttcaaaaaaagttggattagagcctgaaacggttgctttaacgataggttttttaattggatggtgtttcctcttatggggaaagacgaagcttggtttacctaataggttcgcagttccagccttagctgtacttttagtagcttgtttctttcctgccttgaatgattatgccttgcaggcttcaactgcaagcttccatacggtgccgcaactgtcttattattcagatgattcgcaaaagatggaatttggcgcaactcaaatcaccgtttggtggggaatgtggtatatgaagttactctatcttgtaatagctggtggtttaggtgtctggcttcagcaatctttatttgaagatgactcatactattaa

SEQ ID NO: 58980 - DNA, 243 bp, Acinetobacter baumannii
atgagtatttttgagaaacttttagatatagaacaaaaatataacgttagagtgcatgagggtgaaaattttaaacaagccctttataacggtagaatgacggattctgatgaatgcatcattgataaaatagaactagttctaaaacactatccggataaaaagaatcttactttatctacttatgaatcagatcaaacgtctgaagttcaattttgttatgccgtagtagtaccccactaa

SEQ ID NO: 58981 - DNA, 171 bp, Acinetobacter baumannii
atgtgtgatattgataatttaaatggaaaatttgttaaatatgatcaattatactctattaatatatattttgatgactttgatggagtctataatttagatatggttttagccaaagatttatcggatatatatagtgaaaaaataaaaattaggcgaattcaaacatga

SEQ ID NO: 58982 - DNA, 150 bp, Acinetobacter baumannii
atgtttgagataacttcacacatgggagctggtttaattaagtttggtatgaaaagagaagaaataagaaagattttcctgagtatgaatctagagtgtttggggaaaactcgtctactggtagctatgatgaacttgggattagtttag

SEQ ID NO: 58983 - DNA, 621 bp, Acinetobacter baumannii
gtggatagccaaaagcaagggctactattagaggcatttgcagaacactctttaagttcgtctaaacaacattttatttcaaacaagaaatatagagtttacaagccacaacaaaatgatttaggcattaagtctgataatttggaggtagacttagtaattcacaatgataaaaatatagctttctttgaaataaaaaaccgtgttcttattaatagctcaaaagggggtaatagttattatattcttaatgatttagctgaatctcttattaaatcacagactcaacttaacaaacataaaagatatatttctaaattcaaagaaataacatttattgataaacaaaaactatatttagatgatagaaagatattcaaaataagtgtgagttctctagactatcaatctttacatgcacctcttgtttcacgtaactttttgagctctatccctacttttactcttaaaaatacaaacaaacctgaacttgatagtctagttgaaaatataaatgagaagtttactgatttctcagaggaaatttcaaaacccgaaactatcagcgaaatttcaaattttaacggtatgcaaaatacttacttcattttttatttttaa

SEQ ID NO: 58984 - DNA, 291 bp, Acinetobacter baumannii
atgatgaatggagattacagtgagttagttggagatgaagaagatcttgcaaagaaaaaattatattataaacacttacatgaaggtgtgaatgatattgaagaacttagaaaacagatatatttagatctaattattttaaaaccaattttgaaagagattgaaaaagatttaaaaaaattattttcagagaaaagatcaattatgattactgatacttcttttttagatgacaaagaaaagattaagaaaatattagataattcaaaagaggtagggaaatctacctaa

SEQ ID NO: 58985 - DNA, 816 bp, Acinetobacter baumannii
atgttgaatatagtacagcctaatatttgcttcattggtagcagtaatttgtctttagctttaattggaggtttagttttaaaaggctttcaaagagaaaaaattaatctaatagaggaagtcaaatttgagaatcaaatcattctaaagcaaaagcaacatgaggtgaaaaaggcagatatagttgttctattactagacccaaaagacttaaaggctatactggcgcccttaaaaaaatggttagctgataaaactattgtgtcgatgatggccggagttaatattcaacaattaatgagtattacgggttcaaaaaaaattatcagagtcatttctaatccgcctgtattaacttatacaggtacccatgtgttaattggttcagactatttagagcctttagataaagaagtgatagaaacaatttactcagcaacagggcgaacctattgggcaaattcagaatcccaaagtgacgcgattattgctttatcgggttcaggaccagcttacttcttctatattctcgacagtatggtgaaaacaggggtgtctatggggctagataagcaatttgctttagatctaatacttcaagctgcatcaggcgctgtagaaatggttcgtaaaagtaatgttcagcctagtgagttatgtggcaaggtcacattagcgaatggtattacagagtctgcattacgaatgtttgaattgggcaacctctctgatgatattcggttggctttaaaagcagcttaccatcgtagtaaagaaataagcttagaaattagtgcagaaattacgagacactag

SEQ ID NO: 58986 - DNA, 744 bp, Acinetobacter baumannii
gtgattgaaacagctcgtcatcaccgtgaatttattcaagacccagttttaaaacagcgtgttacttcattgattggacaagaggcgattcactctaaactgcacaatgaatataacgatgcacttaaagatgttgaataccctgtcgatttataccgtttcttgggcgaaaacttctttaaatatgtgtttttgaaattcccgcaaccgcttaaattatcgatgatggctggtattgagcattttactgcggtacttgccgaatacatgatgaagcacgaaaagaatttctactattcagatgatgcaaaaagccgtgctttatggatgtggcatatgcttgaagaatctgagcataaagatattgcctatgatgtatatcaattactcaatggtagctacccactacgagcttctggcttcttcttagctttctttactattttaggtttaatcccagcaactaccttgtttattccggttttaagaaaaccgcaggaaatgttgactagaaaattctggaaagacgcgcgccgtggtgtaggacttatttttggtccaaaagatggtgtatttggtagcaccattggtcagattttcgattatttacgtcctgacttccacccaaatgaccatgacaccactgaatatctagagtactacaaagacaaattactcaaagaaggcggcgcgattgcaccttactttgtgaaggaatttaccccacctgtacgcttgtcttaa

SEQ ID NO: 58987 - DNA, 123 bp, Acinetobacter baumannii
atgctttctacaccacctgcaattaccaagttcgcttcgccggctttaatggcacgggcagcaatggcaatggcatcgagtgatgaaccgcataaacggttaatagtggttgccggcacctga

SEQ ID NO: 58988 - DNA, 162 bp, Acinetobacter baumannii
atgtctgctgaaactgtgcctgtacctggcaatgaagtgttgcctgcagggtcagttgctgttgcagtcactgtatcgccatccaccaggttacccgggtttggtactgaccagctgccatctgttccagctaccacggttgcagttgtgccatcaggataa

SEQ ID NO: 58989 - DNA, 204 bp, Acinetobacter baumannii
gtgataaaaaaactatgggaaaaggtagtaaacttttatatttattcgttatttgccggacctattgccctagttttattaatgagtggtgatcaggactatatagtaaataaaattttaactttttattttatgggtgctatggctttagcaattatcctttggccaatcttagctcttataggcagaaagaaacgatcataa

SEQ ID NO: 58990 - DNA, 2874 bp, Acinetobacter baumannii
atgagtaactggttatcagatttatctagcgaaaaccaacaggactttgagaagctcaatagtcaggggttacagcatccagatactcgggcaaatgatccgggtgtcttcgatggcgctatctcttcaccttttcgcggcatggcaattggtcttaacaaagttggtgatgcaatttcggcaccgattgatgccgtcgtagaccgtgttagctatagtctgaaagacgtttctacaaacgaatttattgaaccgtatgaagagttcaaggctaagcgtgaaaaggcgcgtgacaatctggtttatggaactattgctgacctagaagacaaagacaatacaggcattgtcggcaatatcggtgttggtgttggtgattatctctggcgtggtacgctgggtgtagcaacaagtggcactttaggcgcagccactttaacaggtggttcaactggtaattatgtttacactgatttaacccgtaaagacgtagatgaaaatactgccttaaaagtggctggtgtgaatgctgtgggcgatgcgattggtacagccttgcctattggctatggcttcaaaggttcaggtggtttagttgccgatgctgcattgtcagttggtggggccactggcttaaacactggtatgcaatatgcaagtgagcagcttctaaaatctaatggctatgataagcaggctaaacaatatgaagttacaggcgaatctgtggctactgacttatttattaactcattaatgtttggtggtgcacgttacttaggttcccgtcaaaataaactagaccaagacgttgacgctgaaattaaccagcttaattcagatgattttgaaacccgtaatgatgcgttaaatgatgctctggtcaaaaatagctttgagtttgaagacacaactttaccagttcgaactacagatccagttcagcaaaacaagcactatcaaaacctagatgctgctacggagcaaatcctaaaagggcagccagttagtgtgcctaacacggtgcaaggagagccacgtagaaacacgattgattatgctactagctcattacctactaatgccaaacaaatcgcactacgcgcaaaacaagacggtatcgaccctagtgttgcattgacgataagtcatattgagacaggcggcaaatttaatcatacagcacaaaacccaacatcaagcgcttacggccttttccaagtcttagatgactcttggaaaaacttaggcggtaaagaccgcaacaatgttgatgagcaaatccgtatcggcttaaagcacattaagcaggccaataattacatacgtaaaaacttaggtcgtgatccggttgcacatgagcaatatctaggtcacttacttggaccagggggggctgtcaaagttcttaaagctgatcctagccgcccattaattgatgtagtgcgttcgtacgatgctaaaaatgccgatgctatcgttaaaaataacggtatgtctggcatgacagttggcgaagctattaacaaatggcgcagcaaatggaaccagttaagctcacgatatggcggtgaaacaagcacagcccatgggatggatggttcaagctatgattacgcttatgaagtgaaagattgggctgatttagtagcatctaacgaccagttatacggtgtaaatccgctttacccaagtgaactacagccacgtgaccgaacccgtgaagcatcacgccagcaaattgaacgcatggccgatgacttaaagcctgaattattgggcgaatctccaatgttgtcaaacggtgcaccaatcattggtcccgataatgttgtcgaatctggcaacggtcgaacattggctattggccgcgcttatgacaatggccgggcagatgcataccgcgaatttgttcagaactgggcaaatagtagaggcatggatatatccggtttaaatcagcctgttttagtgcgtacacgtcttagtgatgttgaccgtgtagctttctcccgtttagccaatgaaagcgatgtagcgcaattcagtgcaactgagcgtgctatgagtgatgttgatcgtctaccagattcaacactactaaaaatcaataatgatggttcaatcaatattgatggctctatggattatgtccgtagttttgtagatcaattgccacagtctgagcgcggatcagttatcacaagtgatggtcgcttatctcaagaaggtaaacgccgaattgaatcggcaatcgtacagcgtgcttatggtgattcaaatcttgtaactcggctatctgaaaacctagatgatgatagtaaaaacgttctaaacgccttgctccgtgcggctccgcaactttcacagcttaatgatttagtgaaacaaggtggacgctttgagaacactatttctcaagacttggcgcaagctgcacaaaagcttacagacttaaaagcaaatggcttacaggttcgtgactatttaaatcaaggccaacttattgatgatggattaagtgatggagcaagaagatttcttgaggtctttgataataaccgcaagagcgcaaaggcgattagtgaatccattaactctgagattcaggctattgaaaacatgggtgacccgcgacaaggctcgttgtttggagaaacaccagaagaacaagccgcgcttgatgtgattttctcaaatcctgatcaaccgattgccgtaagtcgcattaattcaatgggcgaacccgaagaattcaccatgactttacgtgattatcacgctgaacttgaagcagaaattaagcaatctgagcaagatattttagcagcacaaaccgccttgaactgtgctttacaatttggagcagcataa

SEQ ID NO: 58991 - DNA, 537 bp, Acinetobacter baumannii
atgattgaagaattatacagttgggtagtatttatttgggagttacttgggaaaagccagatacaaacatttatagctatagttgcattttggttggcttataaaggctacttaagggtattggagcaaataaaactttcgaattctcaagaaatcgaatcatatgagcaaaggaattatgagttaaaaattgaagttatgagtatgtttctccaaatcatagataccctgcatactcaagtgaacgatttaattgaactaaaaaacgcggcagaaaacaccccaactgaaaatttaagtgaagaagaaaagcaagatatgatagagatcctaggcatgttggagagcaagatatcagaaacccaacaattgcaaagcctcatgagtgaaacttctaaaaacttaaataaagtagctaagtttgattataaaaagtatagggagaaactaaatgatatttatgaagcattgtttgcttctcttcataggtcacacgagatatcaattttaaaaactaaatatctaaaagaagattag

SEQ ID NO: 58992 - DNA, 255 bp, Acinetobacter baumannii; identical to SEQ ID NO: 53063

SEQ ID NO: 58993 - DNA, 312 bp, Acinetobacter baumannii
atgaaaccagaacagtttattcgtgagttcgggcctaacactttcagaatatcaatgtcatttgtcaacactgctaagtatttggtggttcatgaaggtgaaattgattttacagatgaaatcaagcctcaccatggcgatcgtgtatttgagcgtgatgtggttaagcgcctcatagagtctttggatttggtcaagaagcttggtggcttacaaggtgcaaaagcatatgttccagatggttacaaatcagatcgtttgaagcaagcaatcaaagaccacgaatcaatatacggaggcggggatgagtaa

SEQ ID NO: 58994 - DNA, 321 bp, Acinetobacter baumannii
atggctgagaaattaaccgcaagtgtcacctttaagtgcacggatgaggaaaagattcttttagaaagaatcgctagatcaagaaaacaaactgtttccgaattaatgagagagcgtggcattgatgtaatccgtgaagttcaggagttacttcaaagtctacaggctgagttcgatctaaccacagttaccgtagatacaagaaatcctgagccattcgaactagaactggcaccaaatccacataaaacacaggcacaaaaaaagcccaattgtcgcaaccaattgagccttatctgccattccactgcaaagcaatga

SEQ ID NO: 58995 - DNA, 1158 bp, Acinetobacter baumannii
atgggtgagtataaaaaacaaccaaaccccacagctttatcggggggattgaaaaatgcgatggttgtaacccccattaataagatgggggtaaagacatccgatacgcaactgcaagatgccgatctcccgtatcaagagcattcgttatacacaattccatatgctcacatggtgatgacatcttcaggtgttaaaccagttcaatgccgtttgcctgctgacaatgaaattgctgtcattgactgggtaaattttacaatcggaattgagactctaggcgataagtattggaatgaagatgaatacatcatcgatacacatcgttggacggctgctgtagaggaactagaccaccagttacaccacatttttggattctcaacgactgcatgccgtcatggcggtctgaatttctataaagaaagctatgtactaggtgaagatttcggctttgtctgcattggcggtcaacgcaataccatcttaattatgatcaatggccgtggctgtaatttcgctaaaagtggttgggaattaagactttacaacttcttagtgactattgctaaacgagctaaattaactcgtgttgatattgcacatgatgactttgaaggtaaaaagatcaatgttgattggggcaatatgcaagatggtttaggcggttttagctgtggcaaccgtatgccgaatatcgaacataaaggcaattggaaacgtccaaacggtaaaggacgtactttaatggtcggtgcacgtgaatcaggcaagatgctccgtttgtacgagaaaggtcgtgctgaaggtgatccgaatgataactggcaacgtgctgaagttgaatttaagtcaattgaccgtgttttaccgttcgatatgttgctagctccaagtgagtatttcatagcctcatacccatgtttcgcatttttatctgaagatattcaacctgcaagaattgaaacaattcaaaaggttgcacgcattaactttgatactgccattaagaatcttaaacatcaatatggcaagtatatcaatgtttttaaacaggtttttgaacctgaagagttaatcaatattatttcttgctctgatcaattcgcttatccgaagcggttagatcatgtgcttataactgctcggagaatgtag

SEQ ID NO: 58996 - DNA, 192 bp, Acinetobacter baumannii
atggcaaaaaccgtgagattaagtgatgaagaacaagaagcgatccgtataaaagcggttgcgttaaataagaaacttatggaaaaaaataaacaaccactaagagatagcgaagttgtacacgctgttataagtctagcgcttgagaaaataagtgtaggtgcttcaggaaacttgattctagaggattaa

SEQ ID NO: 58997 - DNA, 684 bp, Acinetobacter baumannii
atgaatatcccacctcgaccatttaagttgtctgtaatcgcctgcgcgatttgttatgccaacctcacctatgcccaagatgcacaggtacaagctttgcaaacgattcaggtcaaagcatcaaatgcagagcagtcttctgaacagaccaaggcatataatgttaaaaactcaagtagtgcaaccaagcttaatattgaggctaaggaaacaccccaaaccattaatgtcgttactcgtcagcaaattgaagattttggccttaccagtactcgtgatgttttaagaaatacccctggtgtaacagtctctaatcaagaaactgagcgaaccacttatatggctcgtggttttgagatttcaaatatcttgacggatggcgtaggctttcctctttcaggttataactataataatacgaatcctgatacttacttttatgatcgtgtagaagtagttaaaggagctgactcgttaactaatgcctttggcgatccgagtgcaaccatcaataatattcgaaaacgtccaacccaagaatttcaagcaagcggtggtgtaagttacggttcatgggatacgcagcgctatgaagctgacgtatctggctcaattctaccaagtggaaaagtacgtggccgtattatgggctatgaacaaactggtgattcttacctagactga

SEQ ID NO: 58998 - DNA, 4695 bp, Acinetobacter baumannii
atgagaatactaataggttttgtatttagcttcttttgtttgattattcatgctggacaaatagattgggctgttgcaaaaacttcatttccgagtgatcaaagtattggtgatactgggcatgaaaagacacctaatggttatgtagatttaatgagtggtaatctaatttatgatactcctgaagtaatattaaaaggtgatagggggttagattttacactttctaagtcttacggaaaagtgaatagtggctttcgtgccatgggtaactgggaattggaagttcctagactagtaatgaatacgggaccatctactattctaaaaggagatatagatggaaatggaatttgtgaggccaacggagatgcaacaaacaattcctctgggcgacctagttttacagcatccttattaaatacttcatttaaaaataaaattgaagaatcatatgtaaaccaagtaaatttaaacttagcgaatcaaactttaaattcaattgtctacttacttggacagtttggaactgcaacaggggattcgaatgcccagtataataatcaacaggctcaatctgctctatcgaagttgcaagctcagctttacgatgcatttaaaacaaatgtaaatgcaatttctattagtagtgccgaggcaagtaccgaaaaaagtaaatataaacaaagtttaattaatactttgcaaacagggcaagtgaaaattcaggttaatggtatatccttgacaactggtaatattagttctgtgttagatgatttagctattaattctaattttactgtgaagacaaataacgtaatacttgacacagtgataagacaagttattgttggatacctctattatcataatataatagtagcaaagtctaatgaagtattgaatgggatttactcaacagtatcacttaatacatcttcatatgttgactcaagacaaagagtgattagtttatatcttccaggccaaaagaatattattttttatcccgttaatgagcgtgtaactggattccctaagtctgctaaatatgtatcccaagataactggtttattagctgtgcggaaagtggtaaagactttgttgtacgatctaataatggtgttacttactatttccctaattctaatcgagaaaatcaaacaggatttacttctttttttgcaaatgagtatattcctggaaaagtaactgtctatgcttcaaaaatagagaatcaatataaagaggcttatattttaaactattttagtaagcaggctaatactttaatttatagtgggtttaatacttctaataagttttttctaaaatctgttcaacatacattagatgataagcttataaattcaacctcaccagaaattagaattggctataaagattgggtttcttatacctattcatctggtgctaaagcaggtacgacttataagttaaatgattcaattctattaaatggtaatattggtagttttcaggatgaaaacgctgcgctcttttatttagatacagtaagttatatatctggagataaagtatcttatgcatatggagggccatatcgtattgtgggtaatataagtccatccgaaataggtggtataaccgcacaagattttctttggttttatagtgatttgacagcaattaagtattataagaactctaagagtggcttagttaatgctctctctgtggattggacttatgagttggtaaatagctcaagaccaggttttacagaagaaaagtcttttaaagttacaagttctaaatactctatagcgaatgctaattcatatgatgtgacttatagctatagccgagatgactctacacatgagcaaacaacagttgttactagcaaagattctgtaactggactttcaaaggcttatacttatgtaatgcatgcatttttaggtggtggtgctgagaacttcttacatgggcttttgaaaaaaattacgataggtgatcgagaagaaagttatacatggacaaccctatctctaattgggcaaaaacctaagactatagatgataactatactgattatgaggatgttcgtttagtccgtcttgctagtaaagcaattagtcattttggtgagtataaaactacctatagtaactttgaccaatatgggaatgcacaatcagtccagatgactggattgaatggttcaagtactgttcaatttccagcaacaacggctacatattttaatgctaatgctgcaagtgatgatgtaaatacaggaaatttaccttggattatcggattaccaaaacaaaaaatatcaggtagttttacgttacaaactactgaatatgatgcacaaggagcaatacgtagtaatactcaagctggtcgtgttaccaaatataaatatgaaacggtatcattctcaacatgtcttggaaatttagcgagctttcaatggtcaaagtttgttagttgcttatcaaattatgtattaggtgatcaacatgtgggtttaccaattgaagttgatgttggaaatggtaaagaaattactcaatttgctggttacaaaaggggtattccaactcaagttaaacttgcaaatggggcgacagaaacaaatattgtagatgactttggaaatataactcaacatactgatgcagatggggttatttcaagaaaacaatatgatgatgctggccgattatatatagatacaccaattgttgggttaaattactctacattcacttatgatggtttaactgtttctagggttgtaactggtggcgggcaactgagccgaatagaaaaatataatggtgatggtttactgatttcgagtgaggataagatatcaaataaatctattattaactctaataagtatgatgcatttggaaacctgatatttaaatccaatcctggttttagtgctataacaagtggaactacaagcagttatgatgtctttgaccgcccaattactgtcaatgataatggaagtgttgtgacatattgctatcagtcctgtggaggaaaaactggtgcaattgtacaaacaacagatagctttggtacaacagaatctaatctattagcagcaggagattttagtgctgatttaaaaacactggttgcacgtaaaggtacagatggatcagtctttcagacaacaactgaatttgaaaacgcacttttaaaaccaaaagttgctgtatcgggtagttctacacaaagttatacatataactctaatacaactttagcaacagaaaaagataatagtattagtgggcaaaagacatttaaatatgatgatactggccgaattacttcaattacccatccagatagttcagtagaaacgatcaaatattttcaattaaaggacctcatcgcgtcccggacatggcgagaagttgagacaacttatagttattctcttgctgggcgtttaaaaacaacgactaatgcaaatattagtgaagcatttgatcttgatacatatggccgtgttataagtcatacacaaaaaatcaatgccaatgataccaataattcatatgtcgtaagatatggctataatcaattaaaccaagttacttcaattcaatatcctaatggtaaatctgtaaatttatctaatcagaatgctttaggggaagtaacatcaataccaaatgtaatacaaagtttgaattataatgcacggcaacaacttacaactgtgcaagccaataccgatactttatggtcatatacttataatgatagcgggttgctgaataatatctctgctacaagtctggaaaagtgtgtcctcaatgttgattatggttacgataaattgaaccgagttaataagctttcggacaaatgtggatcagtttataacgctacaattgaccgttatggtacaggtttgatgagtactgttgagttagatcaagcacgttatcaatatagttataataatgatgacattactaaagttaatatcacttcaaaaagctcgacagtagcaccagctatctatacatataactatgtaaataacacttctcgattagcaagcgtaagtggctcaacttatagctttacttatgatgcgatgggtaatgtaacaaatgatggtgtgcgtactctaacttatgataattatagtcgcctcaataagaatggtaatgagacctatctttataatgctgatggactaagagtccgtgctgtaagggatgatggtttaacagattatatttatgatcttgatggtaatttattatatgacataaattataaatctggttatagccgagcttatgtctatgtagcaggtaagctggtagcgactttagaacgctatcctgatgccaataaaggttttgactttgttaatgattttgaagctgccgaattaggattaacagatctattaggtagctatacagacactgataatgatggattacctgattatttagaacgttttattggatctgatcctaacaatcctgatacagatggagatggacacaaagatggttatgagtatcgcttattaggtgcgaaaggggtattgagctcttcagttaagccagatgttgctgatcctaatgaaaatcttgcagcatggatgactccaatattagccttgattctggaagatgactaa

SEQ ID NO: 58999 - DNA, 1107 bp, Acinetobacter baumannii
atgacaaatatgatcaataaagcccaagggttgggtttatcgctgatcacaaaactagcaggaagcgatgtacttgatcaactcaaactacgtaaatttcttgaaaagtctctttaccaaggttcaaaagctggttttagagcattaagtcagactcagaaagcatttaaacctaagcaaattccccaacaacgtctacctcaacagaagaaaaacttatttgatttaagcctaactgaagaacaacagatgacttcagaagcaatgtctcaatttgctcaagaagttttattggaattagctcatgatgctgatcagacagctcaatttccagaaagcctttggcaatatgtagaagatttaggattaaactattacgctcttccagaagctctaggtggtgtcgccgctgaacaaaatattgtaagtaacttattgattgctgaaaaactagctgaaggtgattttagtcttacagcagggctcttaagtacgtttagtgttattaatgccattacacgttggggttctactgaagttcagtcaatgtatttaccttgctttgcagaagactcagacattaccgctactttcgctgtacaagaagctactccagcatttaacccttatgtcttaaaaacaaaagcttctcttgaaaatgatcaatattttatagagggtgaaaaaacattagtcattttaggagatttggctgatgtgttcttggtgagtgcggactttaatggcaagccggatgtatttgtagtacaagctggcgataccatttctattaaaagtacccctgctatgggtctcaaagcaacagagacagctactttaaaattcagccatacacccgctctacgactaggtgcaacagattttgattacaccgcctttttagatttaggcaacttaatgtggtgtgcaatggctgtaggaacctgtgaagcagtaaaagcctactgtattaaatatgccaatgagcgaactgctttcggagaaccaatttcacatcgtcaaagtgtcgcattcatgattgcagacatggcaattgaaattgatgctatgcgcatgctaattctaaatgctgcaagtcttgcctaa

SEQ ID NO: 59000 - DNA, 816 bp, Acinetobacter baumannii
atgctatcactattaaataaagcaaaatggctcattggtggaaatttcgttttcgcattttctcaatgggtcatcttaatttttcttgctcgtatgacaactcaagagaacttaggccaatactccttagcgttagcaatagttactccagtttttgctatttttaatttacaattaagaccgctctatatcttagacttaaatggagaacaaaaatatagatattcaaatttctattacttgagattaataacttcaattgttgctttatttgtttgtttatttgtttgtttattctcaaatgtttcattttttgttgttgttttagtagcatttttaaaattttttgaagcatattcagatattatatatgcttattacaatgcacatgatcaaaccaaattaattagtaagtctttatttataaagggggtgttttctgtagggggaatgctaataggtctttatttttttaatttttatatagctttaattttatttttattaatttatttattcgtgtggcttggattagataattcttatattgtaagaactaatgaattaaaaaaaattagaatagattactcaattatgaatttagctatacctatgggcatttcattaggtattgttactttacaaagtaatataccccgcttatttttaggtcattatattggagttaaggctgtaggagtttttacagttcttagttactttattattgtcggtagtatattcatcaattctatttgtcagtatcttagtcctcgattaacaagagcttggaatctgtctcttatacacatctga

SEQ ID NO: 59001 - DNA, 336 bp, Acinetobacter baumannii
atggataaagaaacggttagagagattgtgacggggttaattacttatggctggatgattgcattggcaatgtttggcggacttgtttcatttatccgtcgattaaatcagtcaaaggatcctaagccattaaaggagatattcatgcgacttgttggtgaattaattatttcagcatttgcagggattattacagtgctgctttgcatttattggaaaatgccacttgttctaattggtgttttagctggtatggctggtcacttaggcggtaaggcaatcgatacattcgtgttgatttggagagcaattgtttcagggggcaagttaccatga

SEQ ID NO: 59002 - DNA, 591 bp, Acinetobacter baumannii
atgagcaataaacttactgaatcacaaataaatcaacaggctgagtctctaggagttgagccagccgccttaaaagccgtgattgctgttgaatgcaaagggaatggattcaatcaagatggcacaccaataattctgtttgagcgtcatgtgatgcgtcagcgtttaattgctaacaacaaagcaaagatagccgatgaaatgatgcgtaaacgcccagacctatgcagtaaaacatctggcgggtatggactatattcccagcaacacgcaaagcttaatgatgctgctaaatttgaccgaactagtgcacttgaatcatgttcatgggggatcggtcaggtgatgggttatcactggtattcacttggctacccatcattacaagccttcattaatgccatgtataaagatgaagcctctcagttggaagctatgtgccgattcatcaaagtaaatggcttggtaaatgcattaaagaataaagactggaaagcttttgcccgaggttacaatggcccagcttatgcgaaaaatagctatgacattaagcttgctaatgcttacaagttgcacagctcacactattaa

SEQ ID NO: 59003 - DNA, 516 bp, Acinetobacter baumannii
atggctgcacttaaagaacaggtaaaaatatttattgttcaagcgcttgcctgcatggatacccctcaacaggtagctaatgctgtcaagcaagaatttaacattgagattgatcgaaaacaggtacaactttatgacccgacaaaagcggcaggaaagaatttaagtaagaaatataaagacctttttcataaaacccgagaggactttaaaaagaatgtttatgacatccctttagctaataaagcttaccgactcaaagagcttcagaagatctatgaagactggaagaacaacaggcttatgaagcaaggggttattaaacaggttcgggaagaaatgcagggttatgacctgatgttattaaatcttgagttaaagcagcttgagattgaaaagatcagagatggtgaaggggcagatgatccaacaccagtcaaggtaactattcaagttgtggatgcgagtaaaaaagatgccgaacatcaatccgacactgaatgtacctcaggctaa

SEQ ID NO: 59004 - DNA, 2889 bp, Acinetobacter baumannii; identical to SEQ ID NO: 49454

SEQ ID NO: 59005 - DNA, 519 bp, Acinetobacter baumannii
atggattttaacgtgcttaaaatggctgctgtggtttatgtcattagagaagggaagccaagagctttagatgaactggttggcgtgagagatacaccgacgatgtgtcaactgattaatgagcgctttccagatcacgatattactgtgattccagatgcttcaggtcaggcaacatcatcaaagaacttcagtgaatctgatcatgcaatcttaaagaaaaatggattcaaagttgaagttaatggtgtgaatcccggtattaaagatcgtatcactgcagttaatgcacaaattctgaatgctgagggtgaacgacacttaaaagtgaacacaaacaagtgtcctaactttacggctactttagaacagcaagtctatgatgattttggaatgccagataaaagcgctggtttggaccacgttggggacgctggtggatatccaatagctaagagattcccagtcatcattcagaaaatatttaaacggcgcgcaatcgctggtttttctcgttaa

SEQ ID NO: 59006 - DNA, 1341 bp, Acinetobacter baumannii
atggcagttattgataaacatccgcagtatattgctgcacaaaaaagctgggagattatgcgggacgccgttgctggtgaagagcagatcaaacaggcacaaacaaagtacctagctaaatcggccggaatgattgaggctgaaaagcaaggtgatacgactggagagatttataaagcctatctaagtcgagctcagtatccattatgggttcaggattcattacgtacgatgattggtttagtttcaaagctggaacctaatatcgtaattgaaagttctctgttaaagggtttgatagagaatgcaaccaatgatggttttgggcttaaacaactctttatccgtatttgcctagaattacttgaatatggtcgctgtggtttgcttgtcgatgttgatggggctggtgtgccatatttcgctctatatgatgcgctatcaatcattaactggaaggaaaacagcattggtggccgtaaggatctaaagctgttagtgctcgaggaacaattcgaaaatagtgaagatgagtttgggcatgatacaaagacggttcaccgtgttttatctatggttgatggtgcgctaactgtacggttatttgatggctctgttgaagaagataaaacgccagatctcggcggtaatcagctatctttcacgccgtttgttttctgtggcacgaccgataattctccacaagttggaacggtaccattgcttaccatggctaaggcagcactcaagtattaccagctaagtgcagattattaccagtcacttcaccatacagctcatccgcagccttggattaatggacttgagggtgatgaagatattagcgttactggtgtgatggctgtctggagccttcctggtgaatctcagtgtggttatctcgaaatttcaggtagcggcattgaactcaccaaaaaggaaatggatgcacaaaaaaatgctgctcttgaagccggtgccaaggtagtcgataccaatacacaggaatcaggtgaagcgcgccgtgcacgtcaagatgatcagcaagcaagcttacatagcattgtgacgtgtgctgctgcggctattgagcaggcaatcaaatatgctgcccaatggttaaagttggatccgtcaaaatatacattcacagtcgaaccagaatttattgtccagcaatacgacatcaatcttgctaagcaactatatgaaggtgctatagctggaaagaattcgttccagacgtattgggaatatatcgctactggtaagttgccagctcatgattttcaggaagagttgaagcgtgttgaaagtgagcgagatagtatgccgttgtag

SEQ ID NO: 59007 - DNA, 216 bp, Acinetobacter baumannii
atggacaattcaaaacgaccaatcaaccagattattgctcgtatcaatgatgctgctaaacatggtgaagctttggtgctaacagccgaagaagtgaagatcctctctaaggatattggtgataaagtctttattccagtccttacaaatcaacaagtagtgcagttggtaaaagaaggaaaactggggcagaaaattaataacaccaaagattaa

SEQ ID NO: 59008 - DNA, 513 bp, Acinetobacter baumannii; identical to SEQ ID NO: 50974

SEQ ID NO: 59009 - DNA, 1098 bp, Acinetobacter baumannii
atggcaaatcttttatttagatttagttgggaccaccgaccttttgtttataactcatctcaaggtaagcggcaatttatgctaccttttgcctccggcattccaaacctcactccagactggactcaggtaattgggctgggtccagcagcaacaagagatgttggtgtagaaagcggtaatgtagcagcttatggttcctatggtttatcaaacttaggttatggtggatctccagcttcagaaactgaaactgatattgatattggttataaagcaggggggcaaaagactcgttttaagaattcaccttccagtatttatacaaatccctatgtagcaggctatgcgccttctatcgtggttactcgtggaggcttaactggcactgagttatttttaccgtattacacctcaacccgtgccaataacatggcagtaattgcatggagttataacccctctactggaaatctcagtaaaaccgagcaaatcgtttatacaagtaagaacaatgttgtttatacaactgataacagcgcgaccagcggcaagttggttactgttgagtcttctggcgaacttcgctccaaggggtttactgttgattcgaacggggtttacaaggcagcttcaccgattgcaagactatttgctgattcacttgaactcaatgaagatgcctcaaaacagccgattaactttgaaaagttaggtacaggtgactacctgataaaaggttctctcggatttgctaaagaaggctggtacattgaaatgcctaaagatgcaaacggtaatgttcttgttgctgtgtcttatgagcagcatgaagatggggatattgcagtaaaaacctacaagaaaaaatttgatatcgaaacagcctcaattattcctgatttcgataatcctgtagatattccagaaactcgctggattgatattcgattacatgaagaacctgaaccagagcctgaagaaccgttgagtgaaacaccattggagttccagcctactaacttatctcaggcagtagctgcagccatgattggtgtggaaccgccagaaatctccgacacagatgcaatatcttaa

SEQ ID NO: 59010 - DNA, 693 bp, Acinetobacter baumannii
ttgcatgcccgtggtaaggcatggggtgcaaatgatttatctaaagctttatctggtgatgacccattgggtgcgattgctgatcttgtagcagattactgggctcgtgaatttcaggggtttaccgtaaatacacttaaaggtgtatttgggtctgcaagcatggcaggtaatacccatgacatttcggctggtactggagcagcagccgtaattgatggtcattcatttatcgatgcatcttataaactgggtgatgctgttgataaattaacagcgatttcaatgcactctttcacaatggcagcactagccaagcaaggtttaattgaaactgtgcgtgatgctgatggtgtagtgctttacaaaacttttatggatcgccgtgtgattgtagatgacggcatgcctgttgaaggcgacgtatttacttcttacttgtttggttatggcgcgattggtttccaagatattggggcaccggttggtgtagagacagaccgtgacagtttagcgggtactgacattcttattaaccgccgtcactttgtactacatcctcgtggcattaaatgggcaggtgatacaggtattgcacctaataatgccggtcttgctacagccggtaactgggaacgtgtctacgatcctaaacagatccgtattgtggcattcaagcacaagatcaaataa

SEQ ID NO: 59011 - DNA, 828 bp, Acinetobacter baumannii
gtggctttcggaacagagggtggtactactgtaaatatcccattctggaatgatttaagtggggagtcagaagtactttcagattcaacccctttatctgtaaataacatcacatcaggcaaagatattgcgattcttcatgcacgtggtaaggcgtggggcgctaatgatttggctaaagcattatctggtgacgatccacttggtgcggttggtgatctggtcgcagattactggtcgcgtgagtttcaaggttttaccgtaaatacccttaaaggtgtgttcggtgcagccagcatggcaggtaatactcacgatatttctgctggaactggagctgccgctgtaattgatggcgtatcttttgttgatgcttcttataagttgggtgatgccgtagataaattaacggctattgcaatgcattcggcaaccatggctgcattagctaaacaaggtttgatcgaaaccgtacgtgatgctgatggtgtagtgctctataaaacctttatggatcgccgtgtgattgtcgatgacggtatgccagtggaaggtgatgtctttacttcattcctgtttggtcaaggtgcaattggtttccaagatattggggcaccggttggtgtagaaacagaccgtgatagccttgctggtactgacattcttattaaccgccgtcactttgtattgcaccctcgtggcattaagtgggcaggcgatacaggtatagctcctaataacgctggtctagcaacaccttcaaactgggaacgtgtttacgatcctaaacagatccgtattgtggcattcaagcacaagatcaaataa

SEQ ID NO: 59012 - DNA, 519 bp, Acinetobacter baumannii
atggactttaacgtacttaaaatggctgctgtggtttatgtcattcgagaaggtaagccgagagctttagatgaactggttggagtaagagatacaccaactatgtgttatctgatcaaagagcgttttcctgatcatgatattaccgtgataccagacgcttcagggcaagcaacttcatcaaagggatttagcgaatccgatcatgcaattttaaagaaaaatggctttaaggttgaagtgaatggtgtgaacccgggcattaaagaccgtatcaatgcagttaatgcccagatcctgaatgccgatggggaaagacacctcaaagtaaacacaaataagtgccctaactttacggctactttagaacagcaagtctatgatgattttggaatgccagataaaagcgctggtttagaccacgttggcgatgctggtggatatccaatagccaagagattcccgatcatcattcagaaagtatttaaacggcgcacaatcgctggtttttcccgttaa

SEQ ID NO: 59013 - DNA, 327 bp, Acinetobacter baumannii
atgacgggacagccgatttcaaatgactcgcaagactggcattggtacttaaatggcgactttatggttgtcaaagtaaccgatgctgaagctgcagtgcccggtaaaggttatcgaacccaaaatgatcgttatggatctccattgtctggtgatggtggaaactggggccagcgcggtaccaaatcaaccaatgatggaacgtggaactggcaataccatggcacaactgaaggccagccgggaccgggaggacctgctattgtgggagttgctccacttacaaccaaattaatgaatggagggaaaatcttacaaaccctttaa

SEQ ID NO: 59014 - DNA, 219 bp, Acinetobacter baumannii
atgtcatgtatgctgactttagaagaaatcgaaattaaacggcaagagctggaacgacatttagaagatattatgtctgtagagctgaagaagtggcaaagcgaaaacaaactctgcgtttccgatgtgaatatacgtttggccaatgttaatagtcttggtggaactaaacataatgtagttactggagtaagtgttgatttagattacaagccttaa

SEQ ID NO: 59015 - DNA, 1488 bp, Acinetobacter baumannii; identical to SEQ ID NO: 56954

SEQ ID NO: 59016 - DNA, 351 bp, Acinetobacter baumannii
atgtcaaaaataattgcatgtatagatggctcactcggtacaaataccgtatgtgattatgcagcttggttgagtcaaaaacttaacgcacctcttgaactgttacacgtaatcgatacacccaaagctcaagcacctcaagatttgagtggcgcaattggcttaggtagccgtgaaacactattgcaagagttggttgagcttgaagaacgtaaaggcaagattgaacttgagcatggaaaagttttgctaagagaagcaaaaaaatatgtactcgaaaaattcagtctggatgctcatagtttccaaagacatggcagtttattgggggtatacggatttaatggttga

SEQ ID NO: 59017 - DNA, 840 bp, Acinetobacter baumannii
atggtgacggtgttcggcattctgaatctcaccgaggactccttcttcgatgagagccggcggctagaccccgccggcgctgtcaccgcggcgatcgaaatgctgcgagtcggagcagacgtcgtggatgtcggaccggccgccagccatccggacgcgaggcctgtatcgccggccgatgagatcagacgtattgcgccgctcttagacgccctgtccgatcagatgcaccgtgtttcaatcgacagcttccaaccggaaacccagcgctatgcgctcaagcgcggcgtgggctacctgaacgatatccaaggatttcctgaccctgcgctctatcccgatattgctgaggcggactgcaggctggtggttatgcactcagcgcagcgggatggcatcgccacccgcaccggtcaccttcgacccgaagacgcgctcgacgagattgtgcggttcttcgaggcgcgggtttccgccttgcgacggagcggggtcgctgccgaccggctcatcctcgatccggggatgggatttttcttgagccccgcaccggaaacatcgctgcacgtgctgtcgaaccttcaaaagctgaagtcggcgttggggcttccgctattggtctcggtgtcgcggaaatccttcttgggcgccaccgttggccttcctgtaaaggatctgggtccagcgagccttgcggcggaacttcacgcgatcggcaatggcgctgactacgtccgcacccacgcgcctggagatctgcgaagcgcaatcaccttctcggaaaccctcgcgaaatttcgcagtcgcgacgccagagaccgagggttagatcatgcctag

SEQ ID NO: 59018 - DNA, 1290 bp, Acinetobacter baumannii; identical to SEQ ID NO: 52954

SEQ ID NO: 59019 - DNA, 213 bp, Acinetobacter baumannii
atgaacggtgaattaatacagtttcctaagacatgctcgatttgtgatcaatattcacaaagttttcaggaaattgagcaaagttcaagttgttttaaaaaagaatatatatgccaggattgtattgatgttgcagaaggcatagatattcttgaaaaacaaatgcttgaaggtttacagaattcaaagaaaatttatattgttggaaaatga

SEQ ID NO: 59020 - DNA, 306 bp, Acinetobacter baumannii
atgaaaccaacctcaataaaaattttactaattttatcgatagcgtcatttggatattttggtttatctatttcaagtttctctccaattgaacctgaagctgggtatctaatctctaaagtctgtaatacgttatttgcattaggttttataattctacttggagtttttataaaaaaatatagagaaatttcattcggttgcggaactctatttataatatcagcttatatctcgtggtatgtaatatcgttaatatatccatcattgaatttagttttaacccttccatataaatggtggtag

SEQ ID NO: 59021 - DNA, 327 bp, Acinetobacter baumannii
atgtcaaatataagtggattatcaattgaagagttagaagatcttcaggttgaagcagccaaattaattgaaatcaaaaaagaaaaagccattgaggatgcttatcttaaaatactttcaattgcagaaagcgtgggatattcagtagaagatcttttgaatgttggtgcagcgaatgctaaaaagaaaaaccgtaagatagtagagccgcgctatcgtagtaaaacaaactcacaagatacatggacaggacgcggtaaacaaccacgttggttagtagccgaaattgaaaaaggtgcaaaccttgaagatttccgtatcaactaa

SEQ ID NO: 59022 - DNA, 243 bp, Acinetobacter baumannii
atgaatcaagaaaaacaacctctttttattattaaaaatgattttgaagttatcattttaattttaattggtttattagttggttatggtttaattgagctatgtaacaagattgataacttgttattaataattgtggtgccatgtttggttttggctgaatttctttggattggcttgattctttcatcaagggatagaagttcctctaaagagcatgaagatgataaacaaagtaattga

SEQ ID NO: 59023 - DNA, 336 bp, Acinetobacter baumannii
atgaggaaagtttttttacttacgcttaaaactagtgatgatggatcaaaattcattacgtgggtgaaagatcagccaaatttttactggtcatcatcatcactcattgggatacaatccatgctaccgacacttaaaaaagaaatggacttaaattctgagcatgttgttggttttgcttatagaaaaaaggatcgttattcagctactccagcttataaatggattgttatgttggattgccaacaaaatctactcaatacacccattcacctttttagaagtgggaaaatgattattgttgatttgattggtgaatattcccatatggtatag

SEQ ID NO: 59024 - DNA, 513 bp, Acinetobacter baumannii
atgaaatctaattttatgagcattcacagtttgattcttaagagctcattcttaagctttagcttattacttgttggatgcaactttccgttgggcgctaagccttatgaacctttcgagtatgtacttggtgaaaaaattattaggtccttaaaggaatgttcaaccgacatacaaaagattttaaaaatttgcagcccagcagcatcaaagcaacagatcagtcaggccatttcaaaatgcccggatgtgaaatttgagtttgaaaaaatactaacccctagtgttgtattgagagaggttaaaccggctcaagttttaactgttaataagctaaacagcttattaaacgaatgcatgaaaaaagcaaagcctaatttaccggatgaaaaagataaggtgatagctgcacaacttagcgttatagctgaagcaaaatacaaagacataatccaagacaaaaagattcatggtgatgaaaatctaatgtttgaagaagataatgctgaataa

SEQ ID NO: 59025 - DNA, 330 bp, Acinetobacter baumannii
atgtttgatgaaaatattagaccacttatgatagcggtttatgcactttttattatgtttcttctatatttaatggctggtgtggttttaacaggcattaataatatcaaacccaaaaaagatcagtacggccagtcctgtcataaagtaggtattttcacagattggacatgtccttcagatactgagcaatataaacaactgaaaaaagaaggctgtaaacttgtcactgttattgagccaaaagaaacagattatataaaacagtatcgatatatgtgtcgggaaaataaagaatatattctaaattttgaatataaaggtttgtaa

SEQ ID NO: 59026 - DNA, 729 bp, Acinetobacter baumannii
atgaatatcaagacaaattcaattgcaccagaaaatgatcagaagccaaatactgaagatttttttcttcagtatcaaaattcaaaaattgttcaagatgataattttctaaagcaacgatatgcggattatgaacaattattcaataacgcagttcagtacacaccaatttcagaaagtaattttctttttttgcaaaagagaatgcggatttatggcttaattttaatagtctgtattgcattaaatgccatcattacattttgtattatttataaattattctttcaagattattacacatctataggtatgagtgagcaattaaagactttatttgctggaacattcagttgggctcttgaggtaggcattgtctcatttgttttggctatgctatttaaagataaacttagaacactttatttaaaatattcaatacgaaatgactatttagaagaagtagttaactacacatttacaccagtaatcccgcaagactttgaaaaaatcaaagatttttcaacgttagactcacagttaaaagaaaagatccttgaagtaactgaatataggaatgggaaattgcttgatattgattttaaagagttaaatattgagtcaattcttaattgtagagctgagattaatcacgttctgaaaaatcatttagattatgaggaaaaaactcaaagcatcttagaaagtattaaatctgataaggtttaa

SEQ ID NO: 59027 - DNA, 204 bp, Acinetobacter baumannii
atggaagatctaatttcgaatccttattatgaaaaatacaagaatgaacctgacgtaagagaaataattaataaagcaaagatagacaatcttataacctatcatgagcaaaaggaaatacttgatttagttaaaaataaacgtttcaatcaagctctagccgaaaacaaaatttggtatcagaaacaaattcatgatctttag

SEQ ID NO: 59028 - DNA, 300 bp, Acinetobacter baumannii; identical to SEQ ID NO: 49175

SEQ ID NO: 59029 - DNA, 228 bp, Acinetobacter baumannii
atgagaatgaagtttattgcatatgaccctaactctggtgaaaaactcagcttgaaagagcatattcatcacatggataaatacacaacttatgttttttttagtgatgaaaaagacaatatggttttcaatccacagaaaaaacagatatttgaaatcagtcaatatacttctaatatgatggttgaaatttcaagaaagttatactacttgattggtgaatattag

SEQ ID NO: 59030 - DNA, 924 bp, Acinetobacter baumannii
gtgattgcccatgcccaaaataggctcagcctttttgctgctcagagcgggctaaaagcagtagctgcgcaaggtaaggtagaaatacaagcccagtctgatgctttagatgtgcttgctaataaaggtattacgatttcttcgacagaagactgcattgaaattagtagtcctaaagaaattgtaattactggtgcaagttcacaaattaccttaaatggttcaggaatctttccgaaaactggtgggaaattccaagtcaatgctggacagcatgtgttccaaggcggcgcatcggcaagtgttaaatctagtttgccaccaccaccaaaacgtgcacaaggtgtacttgagcttttgcacgactattcacatggagcttttgttaaaggagctggttataccgtaactgataatttgggcaaagtcgttaatggaaagctagatgataaaggatttgctcgtgtttcaggtttggcaacgggctcagtgaaggttctttttgatccagatccgcgtaatccttgggatgaggcaagtgattttaaacgcaaggtagagtggccaaatcaaaatgacgtagaaggtagcattggtattgaatctggcagtaaagggttaactgaaacattgaaaaatgactttaaaaagttgagtcaacttgcgagcaatgtgaaatctgtgcagcagaagattgaatcggttaaaaaaatcaaagatcaaggtgctaaagcattattgccaatggcgatggaacaggttttaggggggagtgatggatctaagttaagtcaatcatttgttagtcaaaatagctttatgccttcaagtcagcagagtaacccactcagaagattggctcaagcaagctctgacaaaacagcaataacaaaaatccaatcaccttttgaaacgtttgtataa

SEQ ID NO: 59031 - DNA, 981 bp, Acinetobacter baumannii
gtgattgcccatgcccaaaataggctcagcctctttgcagcacaaagtggactaaaagctgttgctgcacaaggcaaggtagaaatacaagctcaagcagatgcactggatgtactgagtaaacttggaattactatttcatcaaccgatgacaaggtcatcattagtagcccgaaagaagtcaaaatcacgggcggctcatcgcaaattactctaaatggttcaggaatctttccgaaaactggtgggaaattccaagtcaatgctggacagcatttgtttatgggaggagcgagtgcaaacgccagtgctcctgagttgcctaaagctaaacctatgcagggagcattggagctactgcggagttatggtggagataacttcttcaagcaaaatagttataaagtcattgattcattaggtaagcaaattacgggcaaactcgatggaaatggttttgcacaagtaacaggtattgcacccggaccagctaaagtagtttttgagaaggataatacaagtgcatggctacaaagcagtgattttaaacgtaattatacgtgggctgaaccagtcaaaagtgttcaaggattaatgaaaaatgccctagaagcagtggggcaaaatacgatgtctcagttgcaaaataatcttctttcaacggataaaaatagtttcaaaaatttaggtaagaatactttagataatttagctggccaaacagtagcccagattaaaaatcaggtaactaatactgcccttaatactgtttcaaaacaacttaatctcaatttatctgccgatcaaatgaaaagtcttggtcaaatggcgacgaatccaagtcaatctcttgaaatgcttaaagagcagggcggagattttttgagtgatcaaatgaccgcaaaattatttaagaccacaaatcaagagtcacctattcagcagggcgatttagatacttttgtacggtcaaaaaagtag

SEQ ID NO: 59032 - DNA, 519 bp, Acinetobacter baumannii
atggactttaacgtacttaaaatggctgctgtggtttatgtcattcgagaaggtaagccgagagctttagatgaactggttggagtaagagatacaccaactatgtgttatctgatcaaagagcgttttcctgatcatgatattaccgtgataccagacgcttcagggcaagcaacttcatcaaagggatttagcgaatccgatcatgcaattttaaagaaaaatggctttaaggttgaagtgaatggtgtgaacccgggcattaaagaccgaatcaatgcagttaatgcccagatcctgaatgccgatggggaaagacacctcaaagtaaacacaaataaatgtccaaacttcacggctactttagagcagcaagtttatgacaactttggaatgccagataagagtgctggattggaccacgttggagatgctggtgggtatccattagctaaacgttttccgatcatcattcagaaagtatttaaacggcgcacaatcgctggtttttctcgttaa

SEQ ID NO: 59033 - DNA, 1341 bp, Acinetobacter baumannii
atggcagttattgataaacatccgcagtatattgctgcacaaaaaagctgggagattatgcgggacgccgttgctggtgaagagcagatcaaacaggcacaaacaaagtacctagctaaatcggccggaatgattgaggctgaaaagcaaggtgatacgactggagagatttataaagcctatctaagtcgagctcagtatccattatgggttcaggattcattacgtacgatgattggtttagtttcaaagctggaacctaatatcgtaattgaaagttctctgttaaagggtttgatagagaatgcaaccaatgatggttttgggcttaaacaactctttatccgtatttgcctagaattacttgaatatggtcgctgtggtttgcttgtcgatgttgatggggctggtgtgccatatttcgctctatatgatgcgctatcaatcattaactggaaggaaaacagcattggtggccgtaaggatctaaagctgttagtgctcgaggaacaattcgaaaatagtgaagatgagtttgggcatgatacaaagacggttcaccgtgttttatctatggttgatggtgcgctaactgtacggttatttgatggctctgttgaagaagataaaacgccagatctcggcggtaatcagctatctttcacgccgtttgttttctgtggcacgaccgataattctccacaagttggaacggtaccattgcttaccatggctaaggcagcactcaagtattaccagctaagtgcagattattaccagtcacttcaccatacagctcatccgcagccttggattaatggacttgagggtgatgaagatattagcgttactggtgtgatggctgtctggagccttcctggtgaatctcagtgtggttatctcgaaatttcaggtagcggcattgaactcaccaaaaaggaaatggatgcacaaaaaaatgctgctcttgaagccggtgccaaggtagtcgataccaatacacaggaatcaggggaagcgcgccgtgcacgtcaagatgatcagcaagcaagcttacatagcattgtgacgtgtgctgctgcggctattgagcaggcaatcaaatatgctgcccaatggttaaagttggatccgtcaaaatatacattcacagtcgaaccagaatttattgtccagcaatacgacatcaatcttgctaagcaactatatgaaggtgctatagctggaaagaattcgttccagacgtattgggaatatatcgctactggtaagttgccagctcatgattttcaggaagagttgaagcgtgttgaaagtgagcgagatagtatgccgttgtag

SEQ ID NO: 59034 - DNA, 168 bp, Acinetobacter baumannii
atgggtccattattctatttaacaggtatttcaattttaatgggctggcatatattttttatccatagatttaataatcttgtgataccatgccttgcatcggtgttagcattatcatttatgttaattcaatccaattttccgccttcaatattacaaattaattaa

SEQ ID NO: 59035 - DNA, 432 bp, Acinetobacter baumannii
gtgccaaagttcaaaaaactaggttacggtgcaatcattaatgtggcttctgccgcgtcgtataccgcagcaccagaaatgagtgtctacaatgtaacgaaagcgggtgttttagcattatccgaaaccctttcagccgagcttcgcaaattcaatattaaagtcaatgtactttgcccgactttggtgccaaccaatatcattaaaaatggtcgtattccggggcgttattccaagcttgcagaccatgcactcatgaactatgccatgacgaccagcgatgcagttgcaactttaacattgaatcgattagatcgtgggcagctctacaccacgccacagatcgacgccaaattattctggcttatgaaaaggacatctccaacgctatatgcaaagttccttgggctttcgtatcagttatttaaataa

SEQ ID NO: 59036 - DNA, 1551 bp, Acinetobacter baumannii
atggtcactaaacctataacaaatacacgcacccgtaaaacccaagaagttgcacatatttatgacacttttattgtcggtgcgggtatttctggtcttgctgctgcaattaagctaaacgaagcaggcttaaccaattttaaaattattgaaaaagcaagccgcgttggtggtacttggcgtgaaaatacctatccgggctgtggttgtgatgtaccttcggctctgtactcttactcgtttgctccaagtgcaaaatggagccatttatttgcacgtcagccagaaattttaagttatttagaagatgttagtcgtgagtttgatattgagtccttaattgaattcaataccgaactattaaaagcggaatgggacaatgtaaaaaatgtctggaaactagagacaagctctggtttatatattactaaaacagttctatttgctacaggcccaattactgaggcgcagattccacgccttgaaggtttagatacctttactggtgaaatgttccattcggcgaaatggaaccatgattatgacttaactggaaaacgtattgctgtgattggtactggtgcatctgccatccagtttgtgccccaaattcaacctaaagccaaagaactgtttgtattccaacgtacagccccttgggtgctgccaaaaccggatacagacttaggtgagtttagtaaatcaattattgccaaatatccagcgattcaggcaggttggcgccagactgtagcaggcaccttaaatgtcatcaattttggtttacgcaacccaaaagctttaaagcctgtcaattttgctgcgaaacaattgttaaagttacaaattaaagatccggttttacgtaaaaacgtaacacctaattttgatattggttgtaaacgtattttatttgccaataactactatccagcgttacaggcatccaataccacgcttattccacatggcctggttaaagtcgaaggcaatacggtgattgcagctaatggcgaacgccacgaagtagatgtgattatttggggcactggatttgaagtgtctcatccacccattggtaaacgggtacataacgaaaaaggggaatgtctggcagaactttggaaagactcctcaccggaagcttacttaggaaccaatattgaaaatgtaccgaacgcatttcttatgttagggccaaatgtcttggtttatgactcattcattggtcttgctgaagcccaactgcaatatattgtagatggtttattgcaaatgaaagcgaaaggtattgctaaactttctgtaaaatcagaaataattaaaaagcataatgagcttgtacaaaagcatttacaaaccacagtattcaatagtggtggttgtaagagttattaccttgatgcaaatggtcgcaactttgcagcatggccatggtcattgaaaaagcttaaacagcgtttacatcatttaaatttagaagaatatgaggtcatctatgaagctgatcttgtaaaagtaaaacctaaagttgaagaagtcgcaggttaa

SEQ ID NO: 59037 - DNA, 813 bp, Acinetobacter baumannii
ttgactgaaaacgttactactgaagatagcagtgaagtagttgattcacgttttcgccaaggtgctgtagtaacggaagccgaagtaactggtcaactagagtttgaattatctctaggtacctttgacttattcttaaatgttctagcattcaacaactgggctggtaatgctttaagttttggtggtggagtccgtaagtcacttaccttagtaaaagtctttgaagatattggtcaagtctttatttatcgcggtattcaagtgaatacaggtgaaatgacgatccagaccacaggcaaaatcaccggtaactttggtcttgtaggtaactcatttacgcgacagcaggttaatcctgttaccaatcctattccagcatcgactcgccctctggtgagtatgccgaacgttgaaaagctacttattaatggtcagtcaattcaaggtaaagcttgtctgcagacactcaccatcaactttagtaataatctggaagcgatccgttgtatcggttcgggcaagtacacgcctgagttctacttagaaaaaatgatggatattggtgtaaatgccaatttcatgttttcagcaacatctgctgcttggatagatgccattaaaacccgtgatgtatttacattgacctttgatattacagacagcaaaggcagtaagtactcgtttaacttcccgcaacttgaagttaaggaagcaaatcacccggatggtggtggcgatgacatcattacaatagatatcaattttgcccaagtgcgtactagtccaacgattgtacgtgctcttgtgtaa

SEQ ID NO: 59038 - DNA, 828 bp, Acinetobacter baumannii
gtggctttcggaacagagggtggtactactgtaaatatcccattctggaatgatttaagtggggagtcagaagtactttcagattcaacccctttatctgtaaataacatcacatcaggcaaagatattgcgattcttcatgcacgtggtaaggcgtggggcgctaatgatttggctaaagcattatctggtgacgatccacttggtgcggttggtgatctggtcgcagattactggtcgcgtgagtttcaaggttttaccgtaaatacccttaaaggtgtgttcggtgcagccagcatggcaggtaatactcacgatatttctgctggaactggagctgccgctgtaattgatggcgtatcttttgttgatgcttcttataagttgggtgatgccgtagataaattaacggctattgcaatgcattcggcaaccatggctgcattagctaaacaaggtttgatcgaaaccgtacgtgatgctgatggtgtagtgctctataaaacctttatggatcgccgtgtgattgtcgatgacggtatgccagtggaaggtgatgtctttacttcattcctgtttggtcaaggtgcaattggtttccaagatattggggcaccggttggtgtagaaacagaccgtgatagccttgctggtactgacattcttattaaccgccgtcactttgtattgcaccctcgtggcattaagtgggcaggcgatacaggtatagctcctaataacgccggtcttgctacagccggtaactgggaacgtgtttacgatcctaaacagatccgtattgtggcattcaagcacaagatcaaataa

SEQ ID NO: 59039 - DNA, 609 bp, Acinetobacter baumannii
atgaatttagctatacctatgggcatttcattaggtattgttactttacaaagtaatataccccgcttatttttaggtcattatattggagttaaggctgtaggagtttttacagttcttagttactttattattgtcggtagtatattcatcaattctatttgtcagtatcttagtcctcgattaacaagagcttggaatagtaataaaaatgaatttagaaaaatattatttttagctataacgattgctggatctttaggagtaatagcaattattgtaagttacttctttggtgaatttttcttaaatttaatttatggagaaatttataaagaatatacatatgaatttaacctaataatggttgcaggttttattctttatgtttgtacagttttaggctatacattaacagctattggttttattaaaaaacaagcttttttgttttcaatagttttaatttttagtttattaatctcatatctatgtattcctgaatatggagtgctaggaggaatatacactttaataggtagttatagcatacaatgtatcctgtctatatttgttatattatttttatctaaagagaaattaaaatga

SEQ ID NO: 59040 - DNA, 2715 bp, Acinetobacter baumannii
atgagcgtatcggaaatccgaccgattgccattgaggacgaactcaagcattcatatttagattacgcgatgagtgtaattgtatctcgtgcattgccggatgtgagagacggtcttaaacctgttcaccgtcgtgtgctttatgccatgcacgaattgggcaatgactataacaaagcctacaagaaatctgctcgtgtcgttggggacgtaatcggtaaatatcacccgcatggtgacttagctgtttatgaaaccattgttcgtatggctcaagactttagcttacgttatttattggttgatggtcagggtaacttcggttcgatcgatggtgatagcgctgcggcaatgcgttataccgaagtccgtatgactaagctggcacatgagcttcttgcagatttagaaaaagacacagttgactgggaagataactacgacggttcggaacgtatccctgaagtacttccgacacgtgttccaaacttattaattaacggtgctgctggtattgctgtaggtatggcaactaacatggcaccacacaacatgacagaagttgtgaatgcttgtttggcttatgctgacaatccgaatatctcgattgaaggattgatggaatacattactggtcctgacttccctacaggcggtattatttacggtaaatcaggtattgttgatgcctaccgtaccggtaaaggtcgtttacacattcgtggtaaataccatttcgaagaagatgaaaagacaggtcgtacaaccatcgtctttactgaaattccatatcaagtaaacaaagcaagagttattgaacgtattgccgagttagtaaaagagaaaaagcttgaaggtatttcagaacttcgtgatgagtctgataaagaaggtatgcgtattgcaattgacttgaaacgcggtgaaaacgcagaagtcgttgtaaataacttattcttaaatacccagcttgaaaactcattcagcatcaacatggtttgtctagacaatggacaaccaaaattgatgaatctaaaagatattattgcggcatttattcgtcaccgccaagaagttgtgacacgccgtaccatgttcgaattacgtaaagcacgtgaacgtggtcatatcttggaaggcttgacagttgccttagccaatattgatgaaattattgaaaccatcaaaacttctgcaaaccctgctgaagcgcgtgagcgtttacttgcgggtgagtgggcaggtggtggcgttgttgcactacttgaaaaagctggtgcaatttctgttcgcccagatgaaattgaaggtgaagatccaaatcgtccatttggtttaagtgattcaatttatcgtctgtcaccaacacaagtaggcgcaattttagaattacgtttacaccgtttaactggtcttgaacaagacaagttacatgcggaatatactgaaattttaggtcaaattgctgaacttactgcaattttaaatgactttaacttgttaatgggtgttattcgcgaagagttggcacaagttttacaacaatatggcgatgcacgtcgtaccgaaattgttgaatctcgtgtggatttctgccgtgaagatttaattcctgaagagcaagtggtattaacggtttcgcaaacgggttatgcaaaaactcaacctctttcagactatcaggcacagcgccgtggtggacgtggtaagtctgcaacctcaatgaaagatgatgactttattcaacatctgattgtggcatcgaaccatgcgaccgtactttgctttaccaatgtgggtaaagtgtaccgtctgaaagtatttgaagttcctcaagcatcacgtggggcaaaaggccgtccaatcgtgaacttgttacctctagatgcaacagaaaccgtaaccgcaatcttgccgttaaccgagttcccggaaaaccactatgtgtttatggcgacagcttctggtacggttaagcgtgttgagttagagcaatttgcaaacattcgttcaaatggtctacgtgctattgaacttaatgaagaagatactttaattggtgttgcgattactgatggtaatcagcaaatcatgttgttctctaacgaaggtaaggcaattcgttttgctgaaactgacgtacgtgcaatgggtcgtacagcgaaaggtgtacgcggtatgcgcgtgagttttgcaagcagcaccttaagtgaagaagatgcagatgttgaaaatgatgattcagatgataatgatgattcaacagattcaagtctagtaagtcgcatcgtatcgcttgttgttgtacctgagacaggcgaagtactgtgtgcgagtgccaacggttatggtaaacgtactccagtaaatgacttcccgaccaagaaacgtggtggtaagggtgttattgcgatcaagacaagtgaacgtaacggtgagctagttggtgcagtttctattgatgaaaccaaagagttattattaatttctgatggtggtacgcttgttcgtacgcgtgctgcagaagttgcaatgacaggccgtaatgctcaaggtgttcgtctgatccgtttaagcgaagaagaaacgctcgttggcgtagtttcaattgaagctgtagaagacgaagaagaacttcttgaaggtgaagtagatacgactgaaactgatagcgaagaagctgtatctaataatgaagatacttctgaagagtaa

SEQ ID NO: 59041 - DNA, 213 bp, Acinetobacter baumannii
atggggtatttcattgtcggattattcattggatggcttatttgtaagtcatatacagaaaatagaattgctgaagaatgtgaacgtcttggcggattttttgttggtaaaaaaacctatgaatgcaaccaaataattgaccactcacaagagaaatctataccagaagcaattattgaagcagagacaggtggtaaaaatgaaattcaataa

SEQ ID NO: 59042 - DNA, 204 bp, Acinetobacter baumannii
atgctgatccttgcattttttgcagtatttattcttggtttatatcactgctttaaagaggctaaattggcgtggaccatccgaaataatactggcttaactatatttgaacgtcgctcttatgtattgaaagctggtgcatcagtatgtcttgctgtacttgcattaattggtctatttgatgctgctaaaggagtgttctga

SEQ ID NO: 59043 - DNA, 288 bp, Acinetobacter baumannii
atgaaaactatgagactaacagaggaagaagcacagataattttagaccgtcgtgctgaggcgcatcataaaaaggctacctttgcattccaagtaaagtcgattcaagttgcaaatgcatattttgaatggtgcaagcaggaaggattttatacacctaatcacggaacctttattaattcatttggctatcaagaacctgatgccaaagttatgtctgaagccgtacatcaaatatggaagcttgtattctcctttaaaattccgaaggagaagtcatcatgctga

SEQ ID NO: 59044 - DNA, 285 bp, Acinetobacter baumannii
atgagtaacacgcaagacaaaacagcatgtgcagatttggatgttgccaaacttgttgaagacacaattttttggtttgaacaacgtatggaaactttaaatgacatcgcagattctgaaggcaacgttgtattggctggtgaaggtggcgaaaaagaattaaatgatgagcagagccgtgcttttaaagctggcatctcaactgcaatcagcttaattggcaaattccctttaagcctagaccgctcagtaaaccctattgatcttgatgatttagaagcataa

SEQ ID NO: 59045 - DNA, 348 bp, Acinetobacter baumannii
atgagtcaatggaagcgaaatttccgacgtcagctagttaaaagtcaaaatggtttggtaaatcaaaataaaccaattgattcacaatatattcaaggtgttgcagtaaagctcaaaaagcgctggattgtagaaaattggcgtagtggttggttgtggttgtcgaactggttctttgcattaattgcatatattcaattatatggcgtgccaccagaattgattcaattactcccgttagcaactcagaaagatgtaacagctactttggctgtcttgggcttttttactcgttttattgatcaaaaccgtgccaagcctttgccaccagttgacgaggacaattaa

SEQ ID NO: 59046 - DNA, 816 bp, Acinetobacter baumannii
gtgcaaaactcaacaccaacaccaacaccaacaccaacaccaacaccaacaccaacaccaacaccaacaccaacaccaacaccaacaccaacaccgaaaatacctatttataaaacatgggctttttgggtagttgttttatatttgtctttcattattttatacaccctaatattttgcttaagtgagggggaaaacgttttactcccttcaaatgaattaggtgactttctagcaggtgcttttgcaccattagcttttttatttttaatcttgggatataagcaaaacaatgaatcaatcaggattcaaagtgaagagttaagagcaagtactgaagcgcttcaattacaagtcgctgaaatgaaggagtcagttgaccaacaaaaactaatgagtgagttgcagaaaacagagctagaagagcgacataatgccgctactccttttatttctgctcgcggaggtattcaggtatctggtgatggttttggtaaacaaacttttatgtttacaattatctttgaaaataaaagtgaccatgatgctaaaaatgtgatttttcaccttggggctgggccatcattaccaccttcgattttagctaaaaattctaatcgcacattcagtcctcatttaactaaagaagaaatagataaatacaagtctaatgtatcgtttgaaaggtccatttatttagatttagaaaatatatatggccgaaaatacagacatacattctttttaaagtgtgattttgtacttggttcacatcatgtacatattgaagacttaggcatgactagaaccagctaa

SEQ ID NO: 59047 - DNA, 1077 bp, Acinetobacter baumannii
atgaccgattcagttcttgtagctcaatgctcatttgatttagcagtatcgtccgatcaaacggaatatttggtattggttcctgaaggtgttttcgaaggccgtgatggacgtcctactgatgcacctcattgggttcttacaccagaacgaggtcgtgaaatcgttgctgcattgaatcaacacaaggttgatatggtcatcgactacgaacacgccacattaaaaagccagagtacaggtgaacctgcaccagctgctggctggttgaaatctgcaaacttcaggtatatcgatggagttggaatatgtagcactaaatttgaatggcttgataaagcaaaagcctttattgagtcgggtgaatacaaatatttatcgcctgtatttttctacaacaaacaaggcgaaatcctagccttaatcaatgtcgctttaacaaacaaccctgcattagaccagttgcccgaagccaagcttgccgcggcagctcagcaattttttgcccaaaacaatgatgaggattcaacaatgaatgagtttctaaagctcatgcttaaaaaactggggctggctgaaaccgcttcagaacaagaagtgttggcagctgccaatagtgttttcactaaacttgatggtgcttttggtacttcaactgctaatgatcagaccttattggctgctatcgataaagccattgaagtcaaggcggcagcaaacagtcaggctgttgttgatccgaccaagtttgtaccaatcgctgtataccaagaagccgttgcaaaagctgttactgccgaagccgctcaaaatacaaaagagattgatgacctcatccttgcagcttgtagtgatgggcgtttaacaggtgaagtaactattaactattacaaagaactggcaaagactaatcctgatgttgctaaagcccaaattgaagctttgccaaaaattgcagcattaacccaaaaacagaccacaactcaccaacataaccagcctaaccaacagtcagtttctgctgagaccttagctgttggtaacttgatgggtattgactggaacgaggttaaataa

SEQ ID NO: 59048 - DNA, 510 bp, Acinetobacter baumannii; identical to SEQ ID NO: 50811

SEQ ID NO: 59049 - DNA, 822 bp, Acinetobacter baumannii
atggtggttgagcatgcccatggcctccgtcagcgccgagggcccaatgccaaaagctctctccacaaggcgcacctcgcccctgatgccgggctgcaggcaccaggggcgagcctgtcctttgcgcagggctcgcatgacttcgaatcccttgatcgtggcataggccgtggggatcgatttgaaaccgcgcaccggcttgatcagtatcttgagctttccgtgatcggcctcgatcacgttattgagatacttcacctgccggtgggccgtctcccggtccagctttccttcgcgcttcaattcggtgatcgctgcaccatagctcggcgctttgtcggtattgagcgtggcaggcttttcccagtgcttcaggcctcgcagggccttgcccaggaaccgcttcgctgccttggcgctgcgggtcggcgacaggtagaaatcgatcgtgtcgccccgcttgtcgactgcccggtacaggtaggtccacttgccccgcaccttgacgtaggtttcatccaggcgccagctcggatcaaagccacgccgccagaaccagcgcagccgcttctccatctccggggcgtagcactggacccagcgatagatcgtcgtatggtcgaccgaaatgccgcgttccgccagcatttcctcaaggtcgcgatagctgatcggatagcgacaataccagcgcaccgcccacaggatcacatcaccctggaaatggcgccacttgaaatccgtcatcgttccgtccgtccaatctccgccaagcatgctcaagcttcacgatttttgcaacagagcccacacgagtattga

SEQ ID NO: 59050 - DNA, 378 bp, Acinetobacter baumannii; identical to SEQ ID NO: 16790

SEQ ID NO: 59051 - DNA, 261 bp, Acinetobacter baumannii
atgagcaaagccatcgcacctgttgctgcggaaatcattcctggtcttccacccacaaatgagatcacgactgcaatacagaatgaagcatatagcccgactttgggatcgacacctgcaataatagaaaaagcaattgcctctggaatgagtgctaaagcaacgacaatacccgaaagtacatcaccacggatattcgagaaccattgctctcgtacattggaaaacataaaaatagcctatttatatagttttagataa

SEQ ID NO: 59052 - DNA, 210 bp, Acinetobacter baumannii
atgtcaaaaacaatcctgtattgtcgacaaaatcgttgtaacaagaaatattacaaatattttttattttttaaaatcaaatcattaataaaaaatgaactcaagcttcactataaattattcaattttaaatttgcaaaatttacagagcttgaaattatcaaattgatcaatatatatacacatgaaaatcgtgattttactgaatag

SEQ ID NO: 59053 - DNA, 372 bp, Acinetobacter baumannii
atgggcgaaaaagtcaaaacttatgcagtcaggttagatccacaagtagcagaattctacgatcaattggctaattcagaaggaatcagaaccagtaaattattcagtaaaattttgaccaatgattttcaatctattgctgttaaacagcaagccgatcgtattgaggatctggtgaatcgattagaaaagcgaatagatgattttgaggaagataacaatttttctgaaaaatactatgaagacttttctggactatatttcatgatgttgtggctcttaatgaaaaatggcgcttctaaagatgaggttagaatgatacaagctaaaggttattcatatgcagatgataactataagagggtaaagtag

SEQ ID NO: 59054 - DNA, 207 bp, Acinetobacter baumannii
atgcgatataagcgttcaataggtgcaatgcgtaaagaggattggcagcaacttattgaaatattagatgaatatctgatttttgttcaacaagataatagttcaaccaatgataaaattaatgatgtaaaactattgattcataaactgcaacaacatgtagacggaccactacagcgaagttatagttttaatcggtggtcataa

SEQ ID NO: 59055 - DNA, 240 bp, Acinetobacter baumannii
atgaaaaaaataattctcgcaacattagttggtttaatattattcagtccaattgctttagctggtacatttaaaaagggtggtgtctgttgggcaggcaatgataggacgtttaactgcagttgcattgatgaaaaaggcttatctgttgatcaaatctatgctaaaggttttaaaattgtagctgtacatcctgaaagtactcgtggatcgacaacaatctatattgaacaacaataa

SEQ ID NO: 59056 - DNA, 135 bp, Acinetobacter baumannii
atggtcagttttaaacttagatttggtaaacatcactattcaacacgagtgaattttcataacttcctgcttattactttatttttgtatttatcatttgcacttggcgtttgtacttttttagattttatctaa

SEQ ID NO: 59057 - DNA, 1257 bp, Acinetobacter baumannii
atgtcattaaatttagtcactggtgttcctggtgcaagcaaaaccgcttatgttgtgacacaacttgattctattgagcgtcataataagatcaacttgcaaaaaaataagctaatcttccaacataatgaaaaactctttgaaaaatatgtagatgactttgcttattatgagattgaagttggttcaggacatgaattaaagaatgagattgagtttttacctgataattacttcagttttttaggagaagattttgatgacttgcgccctgattactattttcttcgttctgtccgatacaatgaaattatagaaagaatcgaagatagggaaggagaacaaggatttaaacgattccaacctgtccgaacgatctacagcaatattaaggctttaaaaatcgattatgttcgagccaatatctatgactggcgtgattgtcctgatggatcaatcattgttattgatgaggtgcagcttgtagaaccgtattcaaacaccaaagtcaaagatgaaatcgttatggaattgacaacacatcgacatcgtggttttgacttctattttattacccaagccccaagcttattacatccgactattaaagaactcataggttgtcatttccacatcacacgtccatacggacgtacaccaaaaatttatcgttttggatcttgtagacaatatcccaatacattagttaataagctgaactgcgaagccaaatttgatttcaagccccaacaacgaatttttaaactttataaatcaaccacaattgatacccataaaccaagatatccaaagggtttaattggttggggtttatttatcctagctgcatgttgtttgttcttgtattcttgctcaggtgcaagtaaatcatccttatcaccatttaagaaagaaaaagttgccaaggtggattcaactacaaataatatagagagtgaagttgcacaagaatctaatagtggttcagaaaaaaagatcgatattagtttagagcaacaagaattatctcgaattgcaatgattgttgaatcttcaactgactgttatgccaaaaactcctatggtgattttattgatatcactgttgaagaatgtaagagtttatctagaaaaaacaatagaatgtctttctcaaagataaaaaaagaacaaaacccacaagagagttattcagtaagcatgaatgaaaatgttgattataaacagcctgtatatcctgttgaaactacgttatag

SEQ ID NO: 59058 - DNA, 276 bp, Acinetobacter baumannii
atgagtagcctagcaacactattttcatctttacagaaaggttttcttaaaaatgtgcttactggtgcaggtattaccttaggaacaagtggaatgctcttaattgttcttaatacagcagttaccacatttaaaaactctttaggggctatttctgccacggttttaaatctagctggattagcaggctttgactatgccttttctatcatcttaggggcaattgtcaccaaatacgtccaaaactcatcaaaactaactctaagaaaaatgtag

SEQ ID NO: 59059 - DNA, 1218 bp, Acinetobacter baumannii
atgaaaatatttaaacgattcataattatttcattggtcttatccatgtctttaacaccaacaattatttttgctaattcagcttcttatacattaagtcattcattaccacagaaaattaatagttactttttaaaagcatcttatacattcaacaataaaattaccggtgcttccacgataattgcaaaacagctttcaaaaccccaagtagccaaattattaacttacgttatttcaaaaagatttgcagcatttgcagctttaggaacgattgctgctgaagctggcatgtcaacaattgatgtagatggcaaaactctaattgttcaaaaactacctgaaacagatattgttaatgttctcactactggaaataatgaatatgtccccttatcaggcaatgtattaagtctaaattactgtgtagcagcattggctcaattgaatcatctatatccagctatgcactatatcccagcgaacttggctaactggtgcgagttagttaatatttcttcaacttataaagaattaagtttgacaatatcaactgtagaagatccagtatcaacaacaaaagttacagttgcacctactcaagttgataaacaagtaattcctcaacctattccaaactatgcagttgttagtcctgaagtattgggtgaaactgtttttaataaagccaagcctgctgatttatctcctttatttgactataacgaactgtaccaatctccagcagcaattgaagcaatcaatgaatacaacaatacgaaaggggaagcatttcctttacatccagatattacaacacctgcattagatcaacctgtaacaaccaagccctcagacataaatattgaatttcccatattttgtacttgggctggcacaatctgcgaatcggttacttttatcaaggataaagtaggagaaatatcagactttttcagagctgaacctcaacaagatactcaattagattttccagtagatactccagtaaatattaatactgatattaaatttaatggtcagtgtccagcaccattaacatatgatttcacttacggtggacaatctcaatcatttggtatcaaagactttacgccattttgttcaatgctgaatgacatatttaaaccaattgttatagcggtatcgtcatttgttgctgtacttattattgctggagtaagaactaatgagtag

SEQ ID NO: 59060 - DNA, 273 bp, Acinetobacter baumannii
atggaaaaactaacagtaattgaaaaacgtggtgctttacaactggtacaacatccaacacttgctacacgtattaaacaaggtgcaattattgcaactggcacggctttagcaattcatgctaatgcagcaagttcaattgattcggcaggtcttactgatgaaattactggtgcaaaagatgtcgttttaggcttatttggcgtcgcacttgttgttctaggtgtttttgctggatggcgttatctcaaacgaggcgcaaattctgcgtaa

SEQ ID NO: 59061 - DNA, 204 bp, Acinetobacter baumannii
atgcacgtttgcaagactttatcacagccaaatgagtcgggtctgcaaacatgcgtggaatgggcaacctttacttaccttgaccttttccaatcggtagcgattacgaaaagtgaaatggtagttatcggtagctcattaatcggtatagctgctgtattcattgcctttgcagtgattgcaaaagctgtaaaacaactctaa

SEQ ID NO: 59062 - DNA, 123 bp, Acinetobacter baumannii
atgaaaatttactacggtaataagttttcaaaaattattcgaatttatgaaaaaactccttttaaaccgttgaacttggttcggatagaaatttatctcaagccaattaatgatggaatttaa

SEQ ID NO: 59063 - DNA, 288 bp, Acinetobacter baumannii
atgcagtttaaaacaactattaccgtacttggagcaaagagttcaaaaggtgagttcaacggtaaaccttatgactcaacaacaatttttttccaagctgaattacaagatggggacaactttgttggtcaagtgggagaacaaatccgttggggtacatctgccaattttgagaaattgaaagccttgaaattcccattgaatgctgaagcaacaatggagcaggtgagtaacggtaaatcaatggtcacaatcctaaaagaccttgtgccacaagtaccaaaatga

SEQ ID NO: 59064 - DNA, 1110 bp, Acinetobacter baumannii
atggggttaccgactgaatcactgcaatctgaacagtgggcttttccaagatatttagataaccacaagattatttctacagggaaaggcattttaccagtaccaatttctgcaaaagttgataacggtatagctggcatagattgggtaactttcagtattcctttatctcatttccatgaaaaatatttatctcttgatccattaattgaagaagaatctttaactgaattacttgaatccattgtcgatcaagaccttttcgaattatttggatttggtctaggtcaaaagcgtgataaaggcatgcatcataatcgatatgcatacaccttacaggatgatttaggtatggttctgtatggaaatcaacaaaagtacatttatattcaaatcaatggttcaggatgtgcacttgctcgtaaaggttggaatgaacaactttataagtatttgaaacaaatcaaaggtgcaaaactttctcgtgtagatatttgctttgatgattttgaaggcgaatacatcaccttagacgaagccgataaatgggatactgaagaaatgttttgggtgtcaggtcgagtacctgagtccagacaggctggtaattggaaacgtcctagtggaaaaggacgtactttatatatcggtgttcgtgaaagtggtaaatcttgtcgaatttatgaaaaaggtaaagaaaagggtgatccgctaagcgaatgggttcgtattgaaatcgaatttaaatctaaagatcggtacctagaattagaaatgttgctctcaccatcacaatattttgtcggtgcttatccagtatttgaaaaggttttattgccacgattggggcaatacatcatgcctgaaaagactgaaattattaaaaaacaatcacaaatcgagtggaaaaaagctatcgaaattaccaaaagtcaatttggtaaatacattcgacagttccgaaaagtctatgacgattctgaattacttaccatgctttcatcatccaaagatgaagttccaaaacgtctgaaattctcagcaattgcagcaatgcaagccgttcgtatcaatcaaccaatttatgaggaattagctcatgcagtttaa

SEQ ID NO: 59065 - DNA, 894 bp, Acinetobacter baumannii
atggttagtttaacacaaataaataatacgcaagtatccgttataaatttcaaatctattccagttgtaacgactgaaatgcttgcaggtttttatggtactgagtcagtgcgtatccgtcagaatcataatgaaaataaacaacgatttattgagggtaagcatttttttaaaattgttggtcaagaattaaaagattttgtgagtagtttaaaactacttgcaaactccccaacaatttcaaataaggttcggtccctaattctttggacagaacgtggtgcagcacgccatgccaagatgctcgatacagatcaagcatgggaagtatttgagcaactggaagattgctattttgttcgaaaggaaattttagccaaaacccataaatctgaacgcacaccattacatgatgctcatgctttacttgtggctaagactaagcacctcaactcgagtgatgcatggaaaatcattaatcaacgctttggaacaaatcatattgatgaaatcccatatgacatgattcctgtagctgttgaatatgtgcaccatttgattgctatgtacagtggtgcagaaaagaaagggcaaggttcattgtttgataaagatgcttatgaattggttcgcaaacttactgaagcagtcatcatagaaaatgatgaaatcgttccagttctgcttgctgtaaaaatgcttgatatgaagaagttcgcgtattactcacacttagtagtgaaagcgaatgaagcagcacgagatattgctcgattgttggatttcaggaacctacaaaatgagccgttgattgatgcagactgttcggtgatagccatgtctaatggacaaagatttctagcacgaccgaactggtttaactgcccagcttag

SEQ ID NO: 59066 - DNA, 717 bp, Acinetobacter baumannii
atggaaagttggcaagaggatttattatcagcatttttggtggtaaaaaatgaataccagttgtttgagatcgttaaatctaccgcatcaaggctcggatttgactattgcgcttatggtatgcaatcacccttatctattgctgaaccaaaaacaattatgttgaataattatccagaagcatggcagaaacgttatgtggaacggcaatatgtgaagatagatccaactgtgcagcattgtatggtatcactccaacctcttgtttggtcgagtcaatctgcaaagacacaggcagaaaaagatttttgggaggaggcgcgttcttatggtttaaatgtcggttgggctcagtcaagccgtgattttattgggacccgaggaatgctaacactggcaagatccaatgaccagttatcagaaaaagagcaaaaagcacaatatacgaatatgtactggttgactcaaacagtgcattccagcattgctaaaatagtaaatgatgtagagtttgctaaattcaatctttatttaacgaacagggaaaaagaggcgctacgttggactgccgaaggcaaaacgtcagcagaaatagctcagattcttggagtaactgaaagaaccgtaaatttccatctcagtaattccatgcaaaagttaaatgtaaataataaaatttcagcagctattcgagctgtaatgctagggcttttgtag

SEQ ID NO: 59067 - DNA, 717 bp, Acinetobacter baumannii; identical to SEQ ID NO: 59066

SEQ ID NO: 59068 - DNA, 522 bp, Acinetobacter baumannii; identical to SEQ ID NO: 46790

SEQ ID NO: 59069 - DNA, 738 bp, Acinetobacter baumannii
gtgagaactagttttattaaatttcataattttttattgatttttagcgtatgtattacttcaaatgctacagattataaaccagaacagttagatgagaaaacaatatatagtaatagtgagcatgaactgaatagtgtgtattcagatataaaaggctatatcagtgataataaaaatgaagttaaatatcttgttgatactcaacgtttttggttgaaaaatagaaatttaaaatgtaattttaatggaaaagaagcaaatagtggaaactataaatgtttaagtgattttaataattctaaaataaaagatttgaaaaattcatatttggaccttgataatttagaaggaaagctaataaaaccatttagatatacaaatggtatcatgaaagagttggaaacaggtggatgttattgtagtgaaagtacaattaagattttaaaagataaaatttatatatatcaagcttgtgatcaaggtttaaaggagccacgtatatataatattgttggtaagaaaaaagatagtttttctgtagaatatcaaattgacactaataataaagttccggaatttaatttagcatttgttactaacggtaaaaatgtttggaatatagttccgaaaatttttagaaaagaagatttaataaatttaaattttggaattaattatacaactgatatgaatataaaaaataagaaaaatgattgtcatgatgatgaagagtaa

SEQ ID NO: 59070 - DNA, 369 bp, Acinetobacter baumannii
atgggcttacgtgacgaaattcaggcagatattgctgaagcatttaatgatgatttagcggacgccgttcatacctttacttgtgagcggatctcaaaaactaactgggatcctaagacagaaacttatgttgaggttaaagaaaactattctggtcgtggcgttctgtttggctcatatagtcaatatgagattcagacgcttggagtactggccacagataagaaggctaccgtgcttcaaaatgaagtgtccatgacacctaaaattgaagatgaatggctaacagccttaggctcatttcgagttattcatatacagcaagaccctgcctcaactatttggaaatgccagttgagaaaagtttga

SEQ ID NO: 59071 - DNA, 363 bp, Acinetobacter baumannii
atgaagagtcacgatcatttgctcgataagcaatatgacgaggaacactacaactgtgttcacttcgcacatgaagctgcaatggatctatatgatattgatcgaggagaggcgcttgagttttttatgaagcccgtcaaagagaaggtatttctgccatcaagattgaagttactaaatccattgcccatgcccaaggaaggctgcatagtcgcctttcactctagataccgaaacaagcccccacatgtggggctttttcgtttggggcgtattttgcatttgcaggaatcaggcgtttcatggatgccaattcaagtcgttcaagcatttggatttaatcgtgtgagtttctatgattaa

SEQ ID NO: 59072 - DNA, 363 bp, Acinetobacter baumannii
atgaaaagtcatgatcatttgcttgataagcaatacgatgacgaacactacaactgtgttcactttgttcatgaagctgcaatggacctatacggcatagatcgggcggaagcgcttgaactctttatgcagcctaagggcaaaattacttttttatcttcacggttaaaacttttaaatccgctacccatgcccaaggaaggctgcatagtcgccttccatccgagacaaagaaataagcccccgcatgtggggctttttcgtgggcaaaagattcttcacctcatggaaagcggagtcacttatttgcctgaagaggttgtgatgggaatggggtttaatcgggtcagttattatgattaa

SEQ ID NO: 59073 - DNA, 693 bp, Acinetobacter baumannii; identical to SEQ ID NO: 59010

SEQ ID NO: 59074 - DNA, 399 bp, Acinetobacter baumannii
atgtacaagttaaagctaaatccccagaccagcggctatggcgtaacaccgggtgatgatgtgaaacgtcagcagatggacggcggtcgtgggcgctattacatcgatgtaaaacgtaatagccacattgttgatgtgaactggaacttaagtaaaaccgatttcaataaaatgatggcgttctggcgggtctaccagaataagccggcttcattttatgcggatctggtgattgatcagggagcacggcagcaatacctatgtaacttcattccgaactcgttcaagaccaatgaagtgaatggcaacctttaccgggtaaatgcacagctcgaagttgttcaaaaccagcctaaccttacggccgatatagctttgattaaggattgggaggtctaa

SEQ ID NO: 59075 - DNA, 762 bp, Acinetobacter baumannii; identical to SEQ ID NO: 57032
  misc_feature (14)..(43): n is a, c, g, or t

SEQ ID NO: 59076 - DNA, 162 bp, Acinetobacter baumannii
atgctaaaaattcttcattatcatgaagcaactcagcaatatggttatgatcagggttataaagaggtccacctatcgttaagtagttggccacaacccatttctttaggtctggagcgggtattaaacgaattgcttcctctttatcagcttgatcaataa

SEQ ID NO: 59077 - DNA, 1341 bp, Acinetobacter baumannii; identical to SEQ ID NO: 59033

SEQ ID NO: 59078 - DNA, 519 bp, Acinetobacter baumannii; identical to SEQ ID NO: 59005

SEQ ID NO: 59079 - DNA, 357 bp, Acinetobacter baumannii; identical to SEQ ID NO: 52973

SEQ ID NO: 59080 - DNA, 273 bp, Acinetobacter baumannii
gtggcagttgatgaaaacggggatgtggtcattggtaaagatggtcagacaccgatgactccaaaagagtgggttgagtctctacgcgagcaaaaaccgtattactggcctaagcctaatggcatgggcgcaactggtagcaacaattcaaaaggtcagccagacattctcaaatcggatggctcggtaaatatgaccaaattggcgcaattacgaaatgaaaatccgcaactagctaaagagctagcggcaaaacacggtattaaactttaa

SEQ ID NO: 59081 - DNA, 693 bp, Acinetobacter baumannii
ttgcatgcccgtggtaaggcatggggtgcaaatgatttatctaaagctttatctggtgatgacccattgggtgcgattgctgatcttgtagcagattactgggctcgtgaatttcaggggtttaccgtaaatacacttaaaggtgtatttgggtctgcaagcatggcaggtaatacccatgacatttcggctggtactggagcagcagccgtaattgatggtcattcatttatcgatgcatcttataaactgggtgatgctgttgataaattaacagcgatttcaatgcactctttcacaatggcagcactagccaagcaaggtttaattgaaactgtgcgtgatgctgatggtgtagtgctttacaaaacttttatggatcgccgtgtgattgtagatgacggcatgcctgttgaaggcgacgtatttacttcttacttgtttggttatggcgcgattggtttccaagatattggggcaccggttggtgtagagacagaccgtgacagtttagcgggtactgacattcttattaaccgccgtcactttgtactacatcctcgtggcattaaatgggcaggtgatacaggtattgcacctaataatgccggtctagcaacaccttcaaactgggaacgtgtctacgatcctaaacagatccgtattgtggcattcaagcacaagatcaaataa

SEQ ID NO: 59082 - DNA, 543 bp, Acinetobacter baumannii
ttggttactgttgagtcttctggcgaacttcgctccaaggggtttactgttgattcgaacggggtttacaaggcagcttcaccgattgcaagactatttgctgattcacttgaactcaatgaagatgcctcaaaacagccgattaactttgaaaagttaggtacaggtgactacctgattaaaggttctctgggatttgctaaagagggctggtacattgaaatgcctaaagatgcaaacggtaatgttcttgttgctgtgtcttatgagcagcatgaagatggggatattgcagtaaaaacctacaagaaaaaatttgatatcgaaacagcctcaattattcctgatttcgataatcctgtagatattccagaaactcgctggattgatattcgattacatgaagaacctgaaccagagcctgaagaaccgttgagtgaaacaccattggagttccagcctactaacttatctcaggcagtagctgcagccatgattggtgtggaaccgccagaaatctccgacacagatgcaatatcttaa

SEQ ID NO: 59083 - DNA, 219 bp, Acinetobacter baumannii; identical to SEQ ID NO: 53012

SEQ ID NO: 59084 - DNA, 327 bp, Acinetobacter baumannii; identical to SEQ ID NO: 57064

SEQ ID NO: 59085 - DNA, 297 bp, Acinetobacter baumannii
ttgccagtagaaatattcgtaaaaaaagattttgataagatttataaaatttctgcgggtattggttatcaaggtaaatttaatggaataatatctgttggagataaagcgaaagatatttttgggaaagatagtagcttttattataatgatttatatgaaagtatattaagtagaaattatgagggtataatcttggagttctctaatgaagagccatgggatgaaaatataagaattgagaacttgcgtgtgtgttttataactatatttaatcctcaggagactcctttttaa

SEQ ID NO: 59086 - DNA, 1239 bp, Acinetobacter baumannii
atgataaaacgaagtatcaaaaagtttattgccagtgataagcatccaatagtgatacttattgatgagaacagaattccattgttctatccaaatgtttatgcaatgacaaagtttagaactttaggacgtgcagctagtaccactgaaaaagtattaagatgtattggcactgctcatttatgggcatcactaaataaaatagccctagaagaaagtatcttgttttttgatttcttaaccatagagcaattacaagatttggcttttttccttagattaaaacgaaaccatcaagatcagatagcttctaaaaaggataagcaacaatctttaaatccccaaaaaatttcaaaaaaaattgaaaacatcatctacatccagtcaccaaaccaagaaaaaaaaagtgcgacttctgcggaagaaggtgcatttcagataaagacaatttttaactactttgaatttctacttcaaagatcaaaacatcgtctaaataaaaataaatttaatgacatagagcaacgtctaaattacttttactcattagcaccaaaagtctcaaataaaggtgatcaagatgcacctgaagggctttcaattgatgagcggaacactcttattgagatcattaacccaaagcacccagataacccattcagaaatgaatttctcaaacatagaaatcagttaatttacgaaatcatgttaagtacaggaatgcgaagaagtgaattaagatttctaaaaattgaagacgttaactacagtacccataccattaatattcgagtatctaaaacagtccaacgtgaagttaaatgttcctctaaggcttgtgaatattttcatattttccttaccaagtatttaaataaaattcctttcaaacatagaaagcatggctatctatttacaacagagaaaggtaaacatttatcaaatgatgctatcaatctaacatttagaacattaagacagcatgcagagataactacatgtctcaccccgcatacaatgagaagaacgtggaatgatatttttagcgaaatgatagatagcttgccaagcgatagcagaccagataaagagatagaaaagcaaatccgtaacagattaatgggatggagttcaatatctgaaatgagcaatcggtatgcacgtcgatctatcagagaaaaggccgatgaacttgctgaattattagctaatagtattcttattaggccagagtcataa

SEQ ID NO: 59087 - DNA, 1407 bp, Acinetobacter baumannii
atgcaaagtaatataattaaagaaatcactccacttacggaacgaacaattgttttactcgatgggagacatgtaactgttccactttacaaaaattttaaaatcgacaaccatgatggtatgacatttcttcttaatttcaatattttcagtaataataatatattacataaagtattatcgaattcagtgatagatttgcttactactcattcaatatcatatgcagcaacaaccacaagagctttaaaaaaatggtttgaatctgatgtttatttagctacaacattaggacttgaatgcttagattctttaaataatgtaagtattggatatcaaccatttattacaccattattaagaaaacttagtaaaaactttaaaaacttagtatcgaatgatttagccgattttttagcaaattcagagaaatgggaagaaagaaacccagtttatttcaaattaatagcaaatgatcccgaaaaaggcacttttactttacaagagctagatagtatacattctaatttgaactttgctttcagtaacgcttcattaagcttatttgactatactctctcttggtttttgatcgcaacaggagcacgaccagtccaattatcacgcttaaaatatgaagacatacaaatcattgataatgaagtaatgattaaaatgcctttagctaaaggagaaggaattgtcgagcaaggctattttctaaggaaagcaccgactattttggctgactgtataattaaatatatagagagttctcctcctcctgttgatgaacaaacaaatttctttaagttaaatcctatccaaattagtcacaaaactaaacaaattttcgaaaacttatctacttattcctcaagattagaagcgaaaattccagtaaatgcatatagattcagatacaccctagcaacaagagcattagctagtggcgcttcagatcaagaagtagcaagactactaactcatcgctccctaagttgtatacgttactatcgtgcctctatgcctgagttacagaaaccaatacaagatgctttagatgtggaaatgaacttttttgcaaaagcatttaaaggaaaaataatcccatctttagatgaagcaaaatttcaagaatcagcaatagcagattttttccgattagcaggaaaaactattggctcatgtgggacacaagctaaatgctatcaaaatgctcctatagcatgtttaacatgcccctattttgaaccattaatggatgcgccttgggataaacttttacaatatttactagaagatcaagctaaagaacaatcattaaggattaaagaaatcaatatacaggctatcagggcagttaaagatcttattagtcttatagaatcaaggaataacaaatga

SEQ ID NO: 59088 - DNA, 2073 bp, Acinetobacter baumannii
atgacaactattattgatttcagccaatctaaaaaaatagaagcacaagaaaatttaagtactttcattttaaataataaagctaattttatttttcaagagaataattgggatgacaatatatgggatattacgaattttttaaaaaataaaattagtgatagtaaatcaagaaaaatttatttccgctctgtaaatgataattcaatatctaaaagtaaaattagtattgctatatcagactcctttatagatttcgctaaagcagtattctgcgaaattatgcgaataaatagactatccgaatacaaacgtattatttacgctattcaagccttggaatttgctttattagaacaaaaatcaccagtgtgcataactgaaatagatgttgagactttgcatatagctgaatcctatcttagatctaaatacaaagacccatggagtattgcaaaaaaattagagtcaatcatcaataatatagtcataaaaaaacaactaaatacaataatatataaattttccacaactattacttataccccgccagctaggagcgatcgtacacagaaagaacatgtggaaggtagtaagtcgaaaataccacatttggaagaaattctggctctcgctgagatccatcattcaagcagccatatcccagataagatagtcacttgcttttctgctttagcaatgtttgcacctagtagagcctcagaaattttatctctccctatagattgcattgcaaaagccactcaaggaaatcatgaaatcatggggctaaaatggagaccattgaaaggtggagatccattaaccaaatttgctgtaaataaagaatatgaagaattagctactgatgctgttaactatttgattgaaattggcaaacccgcgcgtgaagctgcacgatggtatagagacaatccaaataaattatatctccctcctcagcttgaacatttgagaaatcagccaattactttatgggaggctgctcaaattctaggaaaggagaactcaattaaggcatgtgatgcttttggctatggattttctaaactactcggaaggactactgaaaaaagtagaatggtgaaaaaaagtccctccgtaggtctttataattttgaagaattagaacgctttataatttcaaaattacctcaaacattcccaatatttgatggcagatcacagcaatattgggatgaatcactatttgtttttcctaaacacatacttaaaccagatgcagactcacttctgtatgtacctgaaacaattgatattaacaaaattaataagcaattagggagtaatccagatggcaatacagttttcagtagaaataataagaaattggtcggtggaaaagcaatgtatgttacctctcaccaattcagacacctactaaataccttagcacaaactaaagcactccctcaggaactcattgcattttggtctggaagaaaaagcgttaaacagaatgatgtttacaatcacctatcccaagaagcaattattgaagcttttacaaatcttgagaatcaggttgaggcgattaaagaagtaggaaatttaggaaagaaatcacaagcaattgctaaaagaaataccattagttataacgaagctctaaaaatagaattaggttcaattcacataactcaatatggtatctgtcggcatgactattctctcaccccctgccctaaggataaagactgtggaaattgcggtgagttttcagttatgaaaggtaacgagaaacatagaaaagaggcttcttatcaagtacaaatacttgaaaaagctttaattgaggcaaaagaggcggaaaaagatgggcatacaggtgcaagaagatggattgaagtcaatgaaccaaaattagagcgttggcacaaaatcaaaggatttttagaagacgaaagtattccaaataatacaatgtttaccctagccgactcatccgactatcatcaaactaaagttggtttagctttcgcagtaagagaatcagagcaaaattcaaattttaaaaattttcaggattaa

SEQ ID NO: 59089 - DNA, 417 bp, Acinetobacter baumannii
atgaccactgcaccacgtttaactaatgaaagaattgatattgctttaaagctgctggatggctggactggaaaactaacttggtctcgttttttagccatacttgaattagatctgggccataagtatacaaaagctgctctattgagacacacaagattcaaaaatacttgggacaaaagaagatggatcgaaaaccccgacagaaatgaaaaaaacaatttcggtaattctgggttgcaaacggcttttgaaaaaattgaaaaactcgaaagaaccatagaacgattagaaaatgataacaacatactcactgaaaaatttgtagtatggtctacaaatgctgcaaataaaggaatatctctagaagaactaaacaggcccctccctacttattcaatcaaaaatacttcctag

SEQ ID NO: 59090 - DNA, 375 bp, Acinetobacter baumannii
atggttaaactgtatggcaaatataatttaatttttattatacagtatacgttctttgatatgaatggattaacttttataaacggtgcgattgttactgcgactgatgttcgcaaatcttggagcaaaattgttcaaggtctcaaagatagtcataaacctgtttttgtctgtaagaacaatactcccgaagctgttattctgagctttgaagaatttcaaaacatgcaggaaattgttcaagctgctcggcgtgaacaactaggacaacaaatggtttgtgatcttttagatattgctcagttaactgatcaaccgatcaaacacgtgcttttgaactcaaaaggtgtatttgaagaagcaaaagggcaataa

SEQ ID NO: 59091 - DNA, 219 bp, Acinetobacter baumannii
atggaaaaaatatacgagtctagaattattgatgaatttgaaggttgggatggtaataaaacctatgaactggataatggaagcatatggaaactagcatcttataaatatcaatatagctataaatatcgcccaaaagcagttatctatagaaataatggatcttattatttggaagttgaagggatgggagaggctttaagagtatatagattataa

SEQ ID NO: 59092 - DNA, 1464 bp, Acinetobacter baumannii
atgaagaatttagcaattttaattggtgtggctgactatcaatatataaataagctttcaccatgtgatagagatgttgatttaatatctaacattttggatatttcaggaaaataccaagatattttactattagaccgcagccctataagttcaatagctaaagatcaaatagcagagtttgtccgactccatcaagaagatgacattgatgagatttttatttattacacagggcatggtgcaagaattaaagatgattttttctatttatttgcggattttaatgagcaacgtttagaacaaacctcacttaggaatagtgagtttgatgcaatgctgaagtccttgaagcctaagcttacagtgaaagttattgatgcgtgtcaggctggtacggagtatataaaatcgaatcaagagttacagttgatctttgataaatcctctaaggaaagttttaataaagcatattttttattttcctcttcaagtgttgaaagttctgttgccttacaggattttagtgtatttacaaaaagtttcgcaaaatctctactaagcgttgagggtcaaaatattagatatagggatgtcatggcatatatatctgacgatccaaatgtcaaaaaacatcagactccattgtttattcagcaagcagataatacagaaatttttattaatatttcagaagaaataatagaagtggttagtaacctgttaaatcaaaatacatatcatgatgagttgaaagataaggaagatcaattaatggatgcatctactgatactgatgaaaatgattttttatcatcattagtaaaaaaggttaaaaatagaggagaagatttttgtaatgaagaagaggctcaagaatctattaatcaactcaaaatagcttttttgaattacgagtgggcaaaagacatatccgaacatctatttgatattgaattagaattcaatgcaaccactccttatttggaatctaaaacagaaatagcagattggatttctgaatctgaagaagactattttactaaattaaactatacacaagagtcatatgaagttgatgtccctgacactaatttatatagaatggtagcgggtggatatcgtacagttacaaaatatcgagatgttttgaatgggtatagattgacagccccatctccatttcaaacattgattattcactttaaacctaaagaacaaatattaaattggtacaagggtttcataacattaatcttctcaaagtcaaaattaactattttttataaatttgaacgagaaaaagaaaaaaattggagcgaacgttttatagaagaacaaaacgaatggaaaacagtcgattgctctctaaaaaagatagatgagattcatagtatagctttacaggtaatgaaagacattgaaactcaaattatttctgatattcaaagtctaatcgattaa

SEQ ID NO: 59093 - DNA, 372 bp, Acinetobacter baumannii
atgctcgcgctagatatacaacatgttcgaatgaaacaacacgccactgataaggcacaagcgttgcaatgtctagtcgatatcttggtcgaagaccaattggttacacctgattatattcatgggttgaccgtgcgcgaacaacaaagtgcaacgtatttaggacaaggaattgccattccgcatgggacgcctcagtctcgccaatatattttaaaaactgggattcgtctggcgcactttcctgaaggagttgtttgggacggtgaaaataaaatttatttagcagtagtgattgctgcgaaatcagatgagcatttgcaagtcttacaaattttgacgcgggctttaattaatgatgtcgctgattaa

SEQ ID NO: 59094 - DNA, 411 bp, Acinetobacter baumannii
gtgaaacatgctcaatccgcagagcaaattattgcattattacaagcccaacctgcatctttggcattgcatgaaaatttaatcgccactcaagttcccgcacttgatgtagaagatttaatttggcaggcaacacagctgctgaaacagcaaaaaatggtggagtgtggttttctgtcgggtttaaacctaaacagcatgattcatttaggggagggggtctggtcgatcacttctaaccagcatgttttgagcccagctgtgggcgtggatgagttgagtatgtcgagtaccagtattccattggtgaaggcgcaaattcgtggtttgaactatataaattgccaacaggtcgctcagcaagccttaagttgtgacagtgcaactgccgtacgtgcattggtggagtaa

SEQ ID NO: 59095 - DNA, 933 bp, Acinetobacter baumannii
atggctaagatattaagcattactctgaatcctgcaattgacctcaccgtgcaattggatcaactaaaagttggcgaggtcaatcgtcagttaacggcccaaagccatgcagcaggtaaaggcttaaacgtggcacaggtccttaaggatttgggacatgaactgattgtgagtggctttttggggcaagacaaccgtcaaatttttgaccatcatatccagcaagagcaatttgataaccaatttatttatgttgcaggtgaaacacgacaaaacattaaagttgcagaagcttctggtcagatgactgacatcaatggcaagggcttttttgtagatacctcagcaaaacaacaactatgtgaacgtttatctcaactgattttagaagttgatgtgattgtgattgctggcagtttgccacaagggttttctgcagaagagctttcgacactgattctatggttacagtctgctggtaaaaaagtcgcagtagataccagtggtgttgcgttgaaagcagcaattgctgcccatccttggttgattaagcctaatacagatgagttgacggaaacctaccatttgccagcagaaacgtttgcagaacagcagcatctttttgccagtttaaatagtcagatcgaacatattgtggtctcgatgggtgaaaacggagtgaactggcttcaccgcacgcaacccctgcatgctactgcaccgaaagtcaccgtccaaagtacggtgggtgcgggagattccttgctggcaggtatgattcatggcttgttgagttcaacttccccagaagaaacattgaaaacagcaaccgcaattgcgagcaacgctgtgacccaaattgggtttgcccttccagactttgctgttattgaagatttgaaatcgcaaatctcagtccaatcattgagttaa

SEQ ID NO: 59096 - DNA, 1683 bp, Acinetobacter baumannii
atgcaagagataaaacatattttatttgtgccacatagtcccgagcagccgattaatgcagtgattttggccaaaaaactctccaaagcagcgacagcacttggtatttccaatgatgtggcgacatcagtcgagcatctcgatttatcaaatgttattgatacagttgtttttgttggacagaagtcggtagatgcggatcaactgcgtgacaaggttgtgaaagtcattggtttgaataacgcacaacacgatgcgatcatgcttttgcaacaagttcttgagcattcagatgctttagatgaaactactgcagccaatgtagggattacacggtttgtcgccattacagcatgtccaactggtgttgcgcatacgtttatggcggccgaagccttacaacagggtgcagtaaagcacggttatcagattgatgttgaaacccaaggatcggttggggctaaaaatattttatcggcagaaagtattgccaaagcagatgtggtgatcttagcaacggatattgaggtcaatacagatcgctttgtaggcaaacgtgtatatcgctgcagtacaggatttgcccttaagcaaacggataagacttttgcaaatgcaattgctgaggccaaagtgcttgaaacgggtaagcaaacagccactaagacagaaaatgaaaacaaagaaaaaactggaatttataaacaccttttaacaggggtatctttcatgctgccgatggtggtggcgggcggtttgatcattgccatctcgtttatgtttggcctcaatcctgttgaaggaagctttgccgcatccttaaagcaaataggtgctgcagcatttactcttatggtacctatgctggcaggttacattgcttattctattgcggatcgtccgggtttaactccaggtttgattggcggtttacttgccacacaattagaggcaggctttctcggtggattagttgcaggttttattgcaggttatattgcgttatttttatcgaagcagcttaaactcccaagtagcttagaagcattaaaaccaatattgattattccactattggccagtttagctgttggtttaatcatgatttatgtggttggacagcctgttgcacaattgtttgaattactcacacacttccttgccaatatggggacgaccaatgccatgatcatggggattatccttgggagtatgatgtgtattgatgttggagggccaataaataaagcggcttatgcctttacggtgggcttacttacgtcacaaacatacggaccgatggcgattaccatggctgcgggtatggtaccgccattgggtatggcaattgcaacttttctggcaaagtataaatttaccaaacctgagcaagatgcagggaaggctgctgtagttctgggcctatgtttcatttcggaaggtgctattccgtttgctgccaaagacccgattcgagtgcttccatgcgcgatcgcaggtggtgctgtaactggggctttggttgcattatttaaatgtgaactagtcactccgcatggcggtgtaatggtgctgatcattccgaatgcgatgaattatccattaaaatatttattggcgattgcgattggaagtgtggtgactggtgtagcttatgccgtgataaaacaacggttagaataa

SEQ ID NO: 59097 - DNA, 2307 bp, Acinetobacter baumannii
atgaataagaaagtacataatgttgcaaaaggcgaaacactttggggtatatcaaagcattatgggattcctttaaagaatttagccgattggaataacttaactggacgattaatccataatataagtattgggcaaaaaatatacttatatccacctcaagaagagattgatacattcctaactattcgattattggatttagcatttaatccaattaatactgccacattaaatctagaatatgatggtttaaaaaaagaagttaaaatactaaatggaaattctcctgtaattgctattaaagatcacacaaagggaataaaagtatattttaaaagtaacttaaaaggcttttatttaattgctgaccataaaaaattgccattaggaaaaaagaaattagttttaacttctagaatgatgaaatcaactggtgtatatggttataaagagggtactgaaaatcaaaaagtaaaagatattaaaattgatttaaaaaataaaaataaagagttggtaaaggaaaaaattgaaaaatcgaccccagagcctgtaataactgaagataataatgagctaaaaaatcaaaaaggagttttaattgctacgggagagaataattcagttagtgggaattcacaaaaacagaaagaaacacaaccacaagttaatttacctgaaacaatagataaatcggttagaactgaaggaggagaaaaaacacatgctattgccaaggttggaattgaaggaaacttgagactggttgctgcaaatgaaatttatagaaaagatattcttgatgctgaaaaaaaatatggcataagtgcagcaacaatagcagctcttatttgtatcgaaacgggcggaggaaaagttgaaaataaatgggatccaaatgcagtaaatccgcaaggaacaggagttggtctaggccaattttttacccccacttggttggaactagcgacagataaaacaggtaaactgaatcaatatataattaagaagaaagggtataaggtacttgttggaagcggtcgttggaagagctatacactttctgacgaccagcgtactgaagaacagaaaaagaaaaaattacaacaacctatagttaagctgaatagcaaagatatcagctggataaactcgctaagaactgatgctggattatcaattgatacgatagctttatctgcaaaaaaaaatttagagggcttaaagcgtagattaaagaataatggtttagctactagtggggttgataatctaaatccattagaaatgagtaagcttatatatttttgtcatcatgaatcacctggaagtgcatacttgatcatgagaaacagtattgataaagatactgctaagactaattttgaagctaatgtaagtaaaaaagttcaagctaaatatttaaagcaaggtaataataactatattcaagcatataaaatttggatgtatgaaaatctgattgatacaaaaattcatactttagaatttatgttgaatacaaatggattacatgaatccaatatggtggatatagaaaagaaagttttaaattctaaagaagaaccaaaacaggaaccaaaacaggaaccaaaacaggaaccaaaacaggaaccaaaacaggaaccaaaacaggaaccaaaacaggaaccaaaacaggaaccaaagattggtggtgcaaatgtttggtttgatccattaaaagtaaatagaatgagatcagctggaaaatatgccgcggtcgcaaaatcttgtactttcggtatggtgcgaaatggtggaaaaagagcacatcaaggtattgatttagaagcaaaagttggtgatgagataagggcggttgcttcagggactttatatgccattaatagagatttcaacgctaagggagatagtagttttggggcaactattacattgcaagtaaaagtagatgatttacccgagaaacaaaaactttacatcagaaagcattacccagatataatatttgtttggtttttttatgcccatttgagccaaattaatagttttgaaagcgatgaagcttggattgaggctggaactccattagggaaaacaggatgtagtggaaacgcacatataatgccaacagttgaattaggcagccatttacattttgaagtttggtatttgaaagatcatgggaaaggtaataaatcattaccaacaaaggatcaagatggtagaggattggtgggtcgttttgatccataccctttgcttaacaacccattacctccaactaaagaaaagcgatga

SEQ ID NO: 59098 - DNA, 492 bp, Acinetobacter baumannii
atgtcaaacaataaattcccttcagctctggcagatgaaatgtttaggaacaacatcatatttcacaaaatccttcatgtaccaacgctaaatattgtcctagatgttagtgaagactttgaagaatttctgtgggctttagaaggccaaaatggtaatgatttaaaagagcaataccctaaattagaaggctttattaataatgttttacgaaatccgagtcatgaatggttcattgatcatgcaagcaatttagtcgcagatcattccgatttggagtttctggtaaatcttaaaatagccatcccatttaatttccgttttagaaccgaaggaacaaactattctatttctctcgggcattcataccgttgtcattggatctttgcgaccagcatgaaagatgcagcagaacaagcaattaaactttccttaaagtttcatgccgaagaagaacaaaaagctcgaattgagcaaggtctggagggctaa

SEQ ID NO: 59099 - DNA, 432 bp, Acinetobacter baumannii
atgcaaaacgattctaacgtagaaaccaatcaagcggaaattcctgcacatttaaagtgtgatccgcgtacatataaagtgagtttgaaagatgatcatggagagagctgtgagcttgtattcaaaatcattattaaatgcactgatgaagcacttcatgaacacaataagttttggtctcatcaccaagaaaggttagacgacaataatggcgatattgttgcagtagttttaaagcttattggtccaatggtgcatacagcttgccatgcaggtaaagactggattggtgtaagcaataaatatggaataaacactatttttaatgaggaaggttgggatcctgattgttttgagattactcaattatatttccaagattatatcaatgatgatgcctttgaagtttcaacagtagtagtggagggttga

SEQ ID NO: 59100 - DNA, 438 bp, Acinetobacter baumannii
atgaatgatctaaattatttatcgccagtcatttcattcttttctcagcaatatgtaattatcaaaggtcatcgctttggtcgtgcctcttggtacatggcagttttaatgcgaaagtggccagtacttgattggagttattcaaaagacctttgctttaacccaagaaagataaaaaaaattgcagatagaaaagcccgaagagctttttatcaatcattttcccaatataaaagatcatttaaaccgcgtcctgaaccaaaattaaagattctcaaaaatgaatggccatcattagaaaaatggcaagcttcaatgctggaggcaacgaaaacggttgctaaaaagtttagtgatatgacggatgcaatgtcttatgcatttcgtaccatcgaaaaaggttactggtgcgcttgggatccagcaaaagagctataa

SEQ ID NO: 59101 - DNA, 249 bp, Acinetobacter baumannii
atgactaaatttttaactgtaatatttataagcctagtgtttatagggtgttcttcatctaatgatgcaatcaaagctttaaaagcgaatggatttactgaaatagagacccatggtcgtgcattcttttcttgtagtgaagacgatacatttgcgaccaagtttacggctaaaaataaagatggccagatggtaaaaggtgccgtttgtagtggctggttgaaaggggcaactattcgttatgaatga

SEQ ID NO: 59102 - DNA, 2940 bp, Acinetobacter baumannii
atgaaacctttaaaactcgaagtcctttttggatctagagacaacttaagtcccgcacttaaactcatcattggcagtagtaatgctgctgccaatgcattaaaaaatgcacgtgatgaagtaaaaagactcaatgaacagcaaaagcaggttgatgggtttgttagacaaaaaaaagcgactgaagatagtgctaaggctttaaaagatgtgcaggagcgcattaaatctttacgccaagaaatgacgaccaatccttcagataaaattagcaaagattttgataaggctacaaaagaagcgaaaaagctcaaagatgcacattcacaaaatcaagccaagcttcaagagttgcgtaatgaattaaaacaaacaggtgtttctactagtaatttagccgatcatcagtcggaattatctagaaagataacaactgtcaacgcatctatcgataatcaaaaaaagaagcttgacagcctaaatcgcatccaaaaatcgcatagcaatatatctggcaatgtacgaactgcagcattatatggtgcgggtatgactgcaacaggtgcagctgccctttatcagatgcgtaaaccaattgaagaaaataaaaggatggatgttctggaaaatagaattggagcgcttggattgggagatacatcaacaaaagaggcaacagaatttgcaaaaaaaatgaaaacgtatgggactagcatgactgaaaatatgagcttaatgctagatgggacatcggcatttgctgatgttcaccatgcgaaaatggttactccaatgttagccaaaatgaagtttggcaatactgcgatgtatggtgatgaaaaaggggcagataacgaaaaaaaattcatggatatgcttaaagtcattgaaatgcgtaatggtttaaaaagtgaaaaggcgtttaaagaccaagctaatattattcagcaagtcattacagctacaggtggacgtgtacaagctgaagagtggttaaatgcaactaaaagaggtggaatagcagtccagggtcttacaaatgaggctttatattacaaaatggaacctatagtgcagatgatgggtggtcatggctatggtaatgctgcaatgtctgcatatcaaaacatatatcaaggacgaaccacccaaagagcagctaaaaatctcgataaatttggtcttatcggtgactattcaaaagttaagcataacaagaccggtgatttatcttatttagatattggagcaattaaaggttcagatttattcaaaaaagatcaatttgcttggatggaacaagtactcattccagcaattaatgcaaaaggaattaccagagatgatgatgtggtcgatgcaattggtagtctctttagtaaccgtactgcatccaaccttttttcacaaatgtatatgcaaagagagaatattcataaaaacataaaattgaataaaggtgctgcaaatatcgatcagttgagcgatagggcgcaaaacacagtttcaggtaaagagttagaagcgcaggcaaaacttaacgacgcatatttacagtttggccagactattttaccgatctatacccaagcacttgtcatggcatcaaatgctttgcaaggttttacaggctggatgcaacagaacccgactttggcaaaagcattaggtacaggtcttttattaatagctggggggttagtggctataggaggtttacttcttattttctcaccactcattttaagtatgttaagtctgcgacttatgatggtgacattgggtgtgcaaggtagtgcattaagttttgtatttaagatgctcacatctccatttaaagcccttggctcatctgtgatgtggttaggcagaatgctttttgctgctggtcaactcatgagagcaaatccaattatcttagcagtcacactacttgctacagctgcatactttatttatcaaaattgggcaccgattaaatctttctttatggatttatggactggtgttaaaaatgcattcaatacaggcgtatctttcataaaaggtattattcaaagtgtagatcaagtttttgcagataatcctcttttaaatctacttttcccgcttattggcatacctcgtttaattattgcgaattggtctggtattactggcttctttagctcagtttggaccagcattacaactggcgtagcgaatgtatggaattcaatagttagttatttaggacctattggcgattggtttgctgctaagtgggaaaatataaaactagttaccagtgttgtttggtcagggattaaatccgttgttactacagcatgggataatttgatttctgctattacgaatagtccactttttcagagaattgttgatggctggactaagatatttgactaccttggcagccttaaaaacaagatgctaagtattgggaaaaatatcattgatggtttagttaatggtatccaatcaggttttgatagccttaaaaccatttgggcgaaaattaatagttatatgcctagctttatgaagcaaaaaatggatatccattctccttcgcgagtcatggctggtctaggtggacatatcgtaggtggtattggcatgggtttaactcaagcctttccagagttaaagaacaaatataatcaagttcttaatttgttcaccaataaagctcaatcgccagctatggatcagattgatattgctgctccagttatttctaaaatacaaaccgcaccaaatttaacatcaagtcgtcagtcttcattggctgtggctggagacacttacacgattcatattcatgctgcaccaggacaaatggttcaggatcttgaacgtcaaattgaacaagtaattaatcgattacaacgcgataaattgtcacgtgtacgcacaatcatggcagatcaggagtaa

SEQ ID NO: 59103 - DNA, 336 bp, Acinetobacter baumannii
atgaaaactttagagcaagtagaaaacactgcaattattaaccctgatattcaaacagtagatttagaaaagcctttaatgatggggagtttagaaattccgtccttagagatccgtaagcctaatgtccaagcattacagggcgtaaaaatcgcagatcttctacaaggtgatgtaactgcggcttgtactgttcttccacgtatttgttcacccgaactcactaaaactcagattaaccaacttgagccagcggatctcgctcaaatttgcggagcaattattctttttttgcaaccgaagtcagcgcgtgttcaagtattacgccaacagtag

SEQ ID NO: 59104 - DNA, 387 bp, Acinetobacter baumannii
atgaaatattttagaaatcaaaacactggcgaagtatttgcatttgaagcagatttaattgaaatgacgagtgaagaaattgatcggcatcttaacccgaaaaaatatctttcagatgaagagaaagagcaactgcgacttgctgaatttaaaccacttacaagacgacaatttaagcttactctgcttcagtacgaattgttagaaacattagagcaggccattgctaatattgaagatcaagtacttaaaacacgcattcaaattgaatataacgaatctgaaaagttcgaacgctctaatgagtctgttaagtacatgcttacccttttaaaacgttctgacgatgaaattgatgaaatgtggcgttatgcaatgacagtttaa

SEQ ID NO: 59105 - DNA, 228 bp, Acinetobacter baumannii
atgaaaatttcatcagtagaagtacatcaccgcactcatcattatcgatttgaacaaaaagatttggagcgcttagctactgaaaaagtagcagcagaattagggttggatttatcaaaaaaaaacttaaaggttaattccagaattgttgttaattctggaggaattaatccaactacttatgactgtgaagtttcaattactgaagacttggactgtaaggattaa

SEQ ID NO: 59106 - DNA, 1191 bp, Acinetobacter baumannii
atggctttagttatgctttcatcattacaaattaaaaattttcgatctttacaaaatgtagagattccaaaattaggattgatcaatcttattgttggtaataataattcgggaaaaagctccttaatcgaatcattattaatttttgctaacaatgcagatgaagatgtcctgaatactcttgcttaccagcatggtgaaccaactcttacagatcgagatgaagatgatttttccgctccatttcagccttttgaaagtttttttacaaacagaaggtttcctacagaggatggagtcaaaattattatcggagagttagataacttaaatattcttactattgaacatgcatttgaaacagaattaattattaaattggaagatgaggacgggaatacattaagaagacttaaacgtgatataattccaaaatcagaaatcgaagaaaaattagaagatcctgattttaatttacaagttaatagcatcttaaaggttgagaataaaagttatattaaccgtatttctttggagccagatagacgtagaacatctactcttagtagaagttttgatgcaaaattaaatattccccatagttatattcctacatcattcttagatacagatgagttagccttagattgggataaactagttttaactccatatcaagattacatcattgaagctttacaaattatagaacctaatgtagaaaacattagttttattaaatcgattaattatcgcaggtctaaatatagaaattcacaaagaacacctattgttaaattaaagaaccatagtcaaccctttcccttaagtagtatgggagatggtattttaagaattctacaattagtactaaaacttcatagtgctagaggggggattctattaatcgatgaatttgataatggtttacaccatagcgttcaaacaaaagtatgggaattagtattttctttagctaaaaatcttaaaattcaagtttttgcgacaacacatagctcagattgtgttaaggctttttctaaagtttctaaagataaagaagatatcgaaggtattcttgttcagattggaaaaagtacacgaaaaagtaattttggtgatgttattgccaatgttttagatgaaaatcaattagcaacatttattaagtcagattttgaagtacgatga

SEQ ID NO: 59107 - DNA, 663 bp, Acinetobacter baumannii
atgaaacatttaattgtagaagggctaggggataaagccttttttgaaaaatattgtcaatattattcatacaatgttgatgtaaatgttcttacccctgaagatattaatcctgattattacaccactaaaaatggtgttatttcttcatctttagatgatttgataaaacaaataacattaggaatgattaagaatttagggattattattgatgcagaccatgttaaagaccaatctggtattgataaaactaaaacagatttaagtaataaactacaacctcatggctatacacttatagaaacgacagaaggaattatagcccagcataatgatggtttgattgatattggaatatggataatgcccgataatagggaagatggaaatatagaaaactggatagaagaattagtttgccaatcagaagctttattgtatgagaaagctaaaaaagtagtaaatgaactagaaaatgaaaatttgcaaaaatttaaaccatccagaatacaaaaagctcagttagcgacttggtttgcatggcaaaaaagtccaggtcatgggctagattttttctttcataccccattaattgacttaaaccatacaaaatatactgcattttgtaattggtttaaacgaacgttcgaaataagctaa

SEQ ID NO: 59108 - DNA, 372 bp, Acinetobacter baumannii
gtgcttaagcgctctaatcttaaatttaaatggattgatctgaaattgataagctcttttgatgatttttattatttctatttagtcgtaaaacacggcggctttagtgcggccagtgaagctgaaaatattagtaaatccaagctcagccgacgcattattgaccttgaaaataaatttaatgtcagcctgattcaaagaacaacccgccattttaaagtgaccgatttaggccaagagttctacgaagaatgctgcaaagttattgcccaagttgaatgcgcagaaaacgttttgttaaaacaaaaaagtgagcctcaaggactagtaaaagtcagctgcccacctttaatgatgcattttcaaatttga

SEQ ID NO: 59109 - DNA, 1257 bp, Acinetobacter baumannii
atgaatttacttaaaacaagtgtattaaatggagttgctgttttaatcaaaacagcaacgatgtttatactcaataaaattttagctatttatgttggtccagctggttatacggctattggccagttccaaaattttatacaaatggtgacaacctttgccggtagtgcaattaatactgcagttattaaatatacggcagagtattatgaagatgaaaccaaacagcggaatgtatggaaaacagcgggaagtattgtcttactttttagcttaattttttcattaattattctaatttttcgaaaacaaatttcactctatatttttcatactgatctttatcaaacggtttttgtttggtttgccgtattcttaacattatttacctttaatgcactttttttggccattttaaatgggaaaaaagaagttttaagattagttattgcaaatattgtaggcagtattttttctttagctgtcacaagccttttagcaataaaatatagtttatatggggctttagttgcgctttcaatttatcagtcgttagcttttttggcgaccctgttattatgttataaagctaattggtttagactttcatatttgtttggaaaaatagataagcccatcgcaaaaaactttgtagcttttgctttgatggcattagttagtgcagtttgtgttcctctttctcaaatagctattcgaagctatttaacgcatgagtatggtgtaacttatgcaggttattgggaagcaatgatacgtctgagtgcagcatatctaatgttagtgaccacaacattgggaatatattatttacctagactttcggaattatcaaaacttgaggaaatcaagtcagaagtgtacttaggttataaatttatattccctctagcaattgctggtgggttgattatttatggattacgtgactggattattactttactatttaccaaaagttttttgccaatgcgtgatttgtttttatggcaaatgactggagattctttaaaaattggtagttggatacttgcatacctcatgttaagcaaggcaatgaccaaactgtttattattacagaaattgtatttgcttttacctctattttatttacgattttctttacaaaagtaatgggttttaatggtgtgtcagtggctcaccttgtaaattatgctttgtattggggtgtcatgggcttattcatatttaagcttttgaaggaaaaaatgagttaa

SEQ ID NO: 59110 - DNA, 408 bp, Acinetobacter baumannii
atgctattaatttctgagtataaaataggaatgtttgcagagcttactaaaagcttttcagatgaagatatttatttatttgcaaaactttcaggagatataaatcctgttcacttagatgaaaattatgctgaaaaaacaatttttggagcacgtatagtacatggtgctttagtttcaagtattttctctacaatttttgcaaataatcttccaggagctggttgtatttatttgaagtctgaaaataaatttttgaaaccagtttatttaaatgaaccagttcactttaaagtagaaattactgatgttattaaagagaaaaaaagagtgatttttaaaacttcagcaatttccaaagatatggagtgtattgtcggtacagcagagctatatataccagagtga

SEQ ID NO: 59111 - DNA, 543 bp, Acinetobacter baumannii
atggtaaattttaatttaaaagcaaatacaacatatttaagattggtagaggaaaatgatgcagagtttatttgtacattaagaaataatgataaattaaatacatatatctcaaaatcaactgctgatataaaatcacaagcagaatggattagaaattataaaaatagagagaataatggtgaggaatattattttataatttgtaaatcggatgaccagtcaccaataggaacagttcgtttatatgatttccgagaaaatcctaaatctttctgttgggggagttggatcttaaatgaatataaaaccaaatatgctgcagtagaaagtgctttattggtttatgaggctggtttttcagctttagggtttgaacaaagtcattttgaagttatgaaaggtaatgataaagtccattcatttcatttgaaaatgggagctcaaaaagttagtgaagatgatgtaaatatatattacatatttcctaaatataagtataaagaaaacaaaatacaatatgctagatttttaggaaaataa

SEQ ID NO: 59112 - DNA, 576 bp, Acinetobacter baumannii
atgatgaaaactgtaggtaatgatttagttcgtaatcagctacatgctgatcgtaaatggtatctaatattaggctttgtgctcattattttcggtttggtgttatttagctcactgccatttgcaacattttcggttgttttcctatttggtattttaatgatgataggtggtgtgctgcacttgattgctgccataagtgtatttaagggcggtagccgatggctgtgggcactttttggtgtgctgtatttaatggcgggctattacgcattttctacgcctgtgactacggctgtggttttaactagcttattatcaattgccctgattattgccgggataattcgtactataaatgcatttttattgagaccaatcgctggatggggctggaccttattttccgggttactaacactcgctaccggtattttaattttagtttctaaagactcacctttttgggtgttgggaatgtttttagcagtagatattttatttcagggaatcaactttttaggacttgcttctgcaattaaacatttgccttctagctcaaaaacggtttcttaa

SEQ ID NO: 59113 - DNA, 912 bp, Acinetobacter baumannii
atgaatgagttttcacatttgcatgaaagtgtacggcagattatttctttgtcgaatcaagaaaggttgaagtacctttattcagataagtggataggatatgacagagcgaaaaatattttagatttactagatgatttattaaatcaacctataaggattcgtccacaaagtttattaattgtgggtgagcctaatattggaaaaacaacaatcataagaaaatttgtagaaagacatcctcaaacaaatatagaagatcaatttaataaaattattgaggtgaggaagcatcatcttttaatagatgcaccaattggtgctgatgaaaaaaagctttatattgctatcctagaacaatttttagtggcttttaaacacacgtcacctgctgttcagttgaaaaatcaagttgttcatttgtttagaaaatttcacatccgtatgctaattattgatgagatccataattttttaactggcacaccgttgaagcaacgtgagattatgaatgttttaaaaaacttaagtaatgagttaaatctatccattgttggtgtgggaactcaagaagctgtgcaaatactttattctgatcaacaacatgcgagtcgttttgatgttgctgaattaacgacatgggcattggatagtaatttcaggaagttgttagcaagttatgaaaaattattacccttaaggcaaccttcagggttggcggataaagaaaaagcaattgctatacatcaaataagtagtgggaatttgggagacattattcggttattaatggattgtacgaaggaagctatcgattctggaaaagaaaacattgatatttctataatcaatcagtttcgtgaacgcaagaccaatcaaagttatagatcaattcttagtattaatgtatga

SEQ ID NO: 59114 - DNA, 1902 bp, Acinetobacter baumannii
atgaaagagcaaattactcttgatagacgtctgctccaactcaaagttggagcaattgttcaatatcataaaaatgaataccaaatttcagatattgtgagttttgaagaagtcatcggagttcatttaaagactttcaaatctgaaatccttcgcatcgatgagctaagtttaagtgagttagaaactgatcaggataatcaccatattgaacactcagaaatatcagaagatgattggaaaactgccataaagcgatattccataattcaagaatttgttgataaatcgagtaaggctgaagtaatacaactagctgatcaagaggggttacactatacaaccatttataactggttatcggcatatagaaagtcgaagtcaatattggctttattaccgaataaaagaggttggaaagaatccaaaagccgtctcaacgatacgactgaagaaatcatacgtcaggcgattagagattattatttaacagaacaaaagcctacattaagtagtctagctgaaatggttaaagctttatgtctaaaaaataatattgagccaccccatccgaatacagttagatatagagtacgtcagattaatgagcaacttgtattaaaaagtcgagctggaaaaaaagctgcgaaagataaatttgaaccaactacagggcatttcccgaatgccaattatccattagctgttgttcaaattgaccatacacccatagatattattgttgttgatgaaacacatagattaccaataggcagaccatttttgactttagctattgatgtgtacagtcggatgattgttggtttttacctttccttggatcatcctagtgcaacatctgttgggttatgtattgtcaactctattttgcccaaaaatcgcattcttttagagcatgatatcaatactacttgggatgtatggggagtaatggatacgatacataccgataatggtgcagattttcgcacagaattcttgcaaagatcttgtttgaagtatgggattaactgggagttcagaccaattgggaaagcaaattttggaggacatattgagcgtttgattggcactgtaaataatgaaatacaccttttagaaggcacaactttttctaatatacaaatgaaaggaaactatcagtcagagaaaaaagctgccattactcttaaagaattagagaaatggttaattttctggatgacaaaaatatatcaccaacgaactcattctagcttaaacatgtccccaatgaaaaaatgggaacaaggaatatggggaacaaaagaccaagctggtacaggattaaagccaagagtgaatgatgaaataactttagcacttgatttcttacctgaatttaaaaggacaatacagcgttatgggattgagttagataaattacagtattattcagaagtgttacgaaaatggattggctgtagtgatcctgacaattataaggtcaaacgcaaattttcatttagacgtgatcctcgtgatgtcagttatatctggttttatgagcctgatttaaaaaaatattttaaagtacatacatcaaaaaaagagatccctcctattagcattgcagaatacgaaagtgtgcaaaaaaagctacaagagcaatcaaaagatacaactaatcaagattttatttatcaagcgatattggaatctaaagaaatgattaaagatgcttctagtaaaacaaaaaaggcaagaaaacaacatgagaaaaatttattacgtgataagcaggctttaaaaccacctaattcttccaaaagtcctgaacttgaattattaaaatcagcgaatccaattatacaagatgatttttggaatgaatcagtagagccatacaatgatattgagtga

SEQ ID NO: 59115 - DNA, 702 bp, Acinetobacter baumannii
atgccaattaaagatgattttaaatccgtccgaaaacctaagcctgtttatggcagtgtctcaggttattatgcttttagaggtgaagacacaatttggtttgaatcgacgttagagcgagatttattacaaaagttagaatttaatgcaaatgttatgcaagttgttagtcagcctgtagaaattccatatcttacaaatttaggcaatccttcaacgtatacacctgattttttagtgcaattttatgaaactaaatgccatcaaccacctttgttaattgaagtaaagcctatacagaaattgaaaaaagattggactattttaaagccaaaattaaaagctggtcttgaatatgctcatgatcagggctggaattttaaaatttatgatgaaaaacgtatccgagatcaattattagcaaatatccagtttcttaagcgttataagaatgcagattttcctaaggatgacactattcggatcctagaaaaattggaagaatttgaggtcaattgtgtaaatggcttagcaagtagtctttataaatctgatcaaaaagttttacaaatgatagcccatatctggtttttagttgaaaagaagttcatttgttgcgatctaacacaaccacttaaaccaacaactgtgatatgggtaaataataatctgaaaaattatataaattttgagggcttatga

SEQ ID NO: 59116 - DNA, 702 bp, Acinetobacter baumannii
atgaataagaaccgttatcgtattatttttagccatgctcgcggtatgtttattgctgttgctgaaattgtaaaaagtaaaaccaaacaagcagggcaaagtcagggacaaatcggaacagattcgaccatagattcggttctacctattcattataagaaactcaatccacttaattttgctgtaattggctgtttgggagcattggtgattagcttgccaatgagcagtgttgctgaaactcagattattgccgataaagggacatcgtggaatgatggtggatgttggcttttaaatttagattttgaaccaatcaaactatcaacaaatgttaaaaataaaattttgggtgagtctattcaaattgctttaaatgcagggaaaaatattcctcctgagaatgttaagaatattttattttctccggaattagacagcctaatgacggaaagagataaaaaattaatggcagagttcggttacaaatcaaaaaaagcattattcaaacatatgagaaaagtaagcataacgtatatcaatgatacctataaaatttcaccatcacatcaagatggactagattatagtttcacaggcttaagtaaagctgatgaaattattcttccaaatgatgcaacggatgaagaactagggcaagcagttcgcctagcttatgaaaagtgcacaagtatttattaa

SEQ ID NO: 59117 - DNA, 252 bp, Acinetobacter baumannii
gtgatgccagatgagttattgatcagccagcaagctcgtgatttaggaaatcaattgattaaagaaataaacatcaataagggttttggaatggcatgctttcttggtgtgaattcttgttatgataatcaccaagccgtacttgtttggacatttcaattattagaaaatgagcctcaattaacagaattagcagaaattaaaaaatattttctttcattctttccagatagcgtctatcaattagcctaa

SEQ ID NO: 59118 - DNA, 231 bp, Acinetobacter baumannii
atggcacgaactctactcaccgatgatatttggcaacaaatccagtctacgatgcaatttcatggttgttattgttcaaagaacagtagaaatatcatggaagccatcttatggaaattacgtacaggtgcaacatggcgtgatgttcctgaaaaattttgtctttgggaaatagcatataaccgttttaatcgttgggcaagcaagggcttatgggataaatttttttaa

SEQ ID NO: 59119 - DNA, 339 bp, Acinetobacter baumannii
ttggatcaagaatgggtattcattgacgaaagctacatacgcacgcatcagcatgcaagtagagctcggcatggtttcgagcgagcaattggacagtctagaggtgaaagaaccacaaaaatccatctggcaaccgacgcgaatggattgccgattgattttaaaatcactggaggtgaagtccatgacagccaagttgcggagcagttgattggtgagattgatccagcaaattatctgattgcagataaaggctatgattcggaaaaaattaggacgttggcaaaaaagcaaaatattgtgccgattttcccaattaaatcaaacagtaagatataa

SEQ ID NO: 59120 - DNA, 474 bp, Acinetobacter baumannii; identical to SEQ ID NO: 54904

SEQ ID NO: 59121 - DNA, 3279 bp, Acinetobacter baumannii
atgaataattctataaagtttcaagaaaagtattcttcacttatccctgctttaacattattgtctaatttgggatggtcatttttaccactatcacaggcactcgctgcacgtgatggaaaacaagaccaagtggtattacgccaaattttacgtcaagagctttctaaacgtacttttacatttgcgggtcaagaatatccactttcagcgaagtcagtagacaacttaattgccgaaatcagtagccctgctttgaatgaagggctactaactgccaacgaaaaaatgtataaccatttgttctacggcattcctgtaactgaatttgtgaacggaaagaaggtcagcccaacaattccattgattgattggcataacctcaataacaacgacttttcatatactgaagaatttgctgtcacgcgctcaggtggtgtagatacacgtagacccgatatcgtttgctttgtaaatggtattcctttagtagtgattgaagcaaaacgccctgatagtcaggcaaagaaaggcccaacgattaatgaaggcatttctcagacgcttcgtaatcaacgacctgatgaaattccacatttgtttgcatatagccaattgctactctctataaatggacatgaagggcgttacggcacatgtaataccccttcaaaattctgggcagcatggcgagaagaagatatttctgatgcagagatgtatgcgcttaaaaataagaaattaagtgctttacaaaaacagaatctattctcttatcgtccagtcgatgacctagagtggtatgagaacctaatttcaagtggagacttagctgttacaggtcaagatcaactgctgatcagtttattgaagcctgaacgactacttgaaatggttcgcctgtatacgcttttcgataaaaaagcaggaaaaattgttgctcgttatcagcaaatctttggtatcaagcgactcattgagcgtattagtactaagaacagcagaggtgggcgtgaaggtggtgtcatttggcatacaacgggctcgggtaaatcttttactatggtctttctcagtaaagcattgatcttgcatgaagctttaaagcaatgccgtattttggttgtcactgaccgtgtcgatttagaagatcaactcagtaaaacctttgtatcaggtggtgaactggcaggaaaaagagacaagcaaaatgctatggcgacttcaggcaaacgcttggctgaacaaattggcaaaggcacagagagaatcatgttttctttgattcagaaatttaactctgcaaccaaacttcctgaatgtgtcaatacaagttcagactttattgtcttgattgatgaagggcatcgaagccaaggtggtgaaaaccatgtgcgtatgaagctcgcattgccaaatgcggcattcgtggcatttacaggtacgccattgcttaaagatgaaaagaccgttaacaagttcggtcctattgtccatgcgtataccatgcagagagcggtagaagataaaaccgtaacacctttgctctatgaagaacgaatccctgatttagatgtaaatgagcgtgccattgatacttggtttgaacgcattacagaaggtttaaacgatcagcaaaaagcagatttaaaacgtaaatttgcgagaaaaggtgagatttatactgcggatgatcgtattcgcctgattgcgttagatattgccaatcactttgttaaaaatattgatgatggtttaaaaggacagcttgcttgcgatagtaaggcttcagcgattaagtataaaaagtacttagatgaagcaggcttgtttgagtcagccgtggtaatgagtccaccagacagtcgtgaggggaatacagacgttgatgaatcaacgacacctgaagtgactcaatggtggaaagagaatgtcggcacacaagatgagcaagcctacacaaaacaagtgattgagcgttttgaaaaagatgaatcacttaaattgctgattgtggtagataagttattaacaggttttgatgaaccaaaaaatactgttctttatattgataagaatctaaaacaacataacttaattcaagctattgctcgggtaaaccgactgcaccctaagaaaaagtttggtttattaattgattatcgaggtattttaaaagaattggattccacaattcttgattatcaagatctcgctgcccgtacccaaggtggctatgatattaatgatattacgggcttatatactcaaatgagttccgaatacaaacgtttacctcgtttgtataaagcactttgggcaatttttgctgatgtcaaaaataaaaatgatccagagcagttgcgccaagttttagtcccacgcattgaagaacgtgagggtgagttggttgatattcacttgaaagttcgtgatgatttttatgaagcacttacagaatttgccagttgtttaaaagttgcgttgcagtcagcaactttctttgaagataaaagcttttctgatgcagatcgtcagcactacaaagaaacagtcaaactatttacaagtttgcgtcagattgtgaaacgagatgctggagagacagtagactacgatcagtatgcagagcaagtcaaaaaactgattgataagcatgttgtgggcattgaagttaaggaccctgatggtgtttatgaagtcggcaagatgggtaagatagctcagcctgaagattggagtgaagagaaaacacgtaatgaaacggatatcattaaaactcgtgtaacgaagatgattgagcagcaattgcgtgatgatccctatgctcaggaggctttctctaagctgttacgtcaagtcattgaagaagcagagaaagaattcgatcatccattgaagcaacatatgctgtttagagagtttgaagagcaagtagaagctcgtcgtttagatgaaattcctgatgtgttcagtggtaataagcatgctcaagcttattatggtgtattcaaaaaactattacctgaagcattctcgataatagatcaacagaatcaaaataagtggattcaactcgcttttgaggttgatacttctgtcatgagctctgtagctgaaaactcaattaatccacaaaatattgaagcggatatccgtaaaaaactattaccgcagatgttccgtgaatgtaaatccattggtagtggtatggatcaagccaaaaaaattgtggaaatgattgtacaaattactcgggtcggtttgaatgggctctag

SEQ ID NO: 59122 - DNA, 753 bp, Acinetobacter baumannii
atgggctctaggatgaatacgctgccagagagaaagttaagcatcatttatggtgatgaagttgttgattttgaggtgcttgaaagtcctagccgtactgaaaagatactgattaaagtctatgctgattgtcgggtagttgtatcggcaccgttaaatgcagatgataaaacaatcattgaagctgtaaagcagcgtagtcgttggatctataaacaattacgagagttccgtgagcaaagcagatttatcacgcctcgccaatataaaagtggtgaaagccacttttatttgggtaaacagtatcaattaaaagtgattcatgatgataccaagccaaaaggtgtaaaacttctgaggggaagattggaggtaaacaccttagatacggatattgaaagtattaaatctcacttaaatgaatggtatagatcgcgagcaaaagtcatatttgacgtacgcttccaacgtattctagagcaagctttatgggttgaagataagcctagcattcgtttgatgagcatgcgtacacagtggggaaattgctccccatcaggtctacttacgctcaatcctcatctagttaaagcgcctacaatctgtattgattatgtgattctgcatgagttatgccatttagttgagcataaccatagtgaacgtttctaccaactattgaatcaagttatgcctgattgggaggtggtgaaagagagattagataacatggctgtgaagttttttgactag

SEQ ID NO: 59123 - DNA, 1386 bp, Acinetobacter baumannii
atgatgagctattctgaattcaaatatagtgattattttaaaactgaattaccttcgcactggcaagaaaagcggttgggctttctttctatgcaaacaaaaaatgcttttgtagacggaccttttggttcagatttaaaatcggatgattatttggatgaaggtatacctttaatccaattaaataacatacgagatggaaagcatattcttcgcaacatgaaatttatctcgcaaaataaaaaaatagatttgattcgacacttagcattacctcaagacatagtgatagctaaaatggctgagccagtggctagagcagccgttgtatcagatgaatatgatgaatacgtaattgttgcagactgtgtcaaattaagccctgacttagaattagtggatttaaattttttaatttgggcgattaattcagattgtgtaagggaaaacgctgaactcgtttcaacaggcacaacacgtattaggattaacttaggtgaattaaaaaaacttaaagtcccttatccttctttatctgaacaagtcaaaattagacaatatctcgaccatgaaaccgcaaaaattgatacccttattgccaaacaagaagagttgattgcactgcttaaagaaaaacgccaagcagtgattagtcatgctgtgactaaaggtttaaatccaaatgtaccgatgaaagattcaggtgtggaatggttaggggaagtgcctgagcattggactgtgagtaaatttggttatatttctcaagtagtccgtggtggttcgccacgtcctgctggtgatccagcattgtttaatggtgattattcaccatgggtaacagttgccgaaattacaaaggatgatgagctatatcttacaagtacagaaactttcctgacaaagaaaggtagtgagcagtgtcgagtttttcaatcaggcactttgttgctttcgaatagtggtgcaacacttggagttcctaaaatcttgtctatcaatgctaatgcaaacgatggtgtagttggatttgaggatttaaaaatagacatagagtatgcttatttttatttatccattttgacaaatgatttacgtgaaagagttaagcaaggttcagggcaaccaaacttaaatacagatatcgtcaaagctattccgatagcaattccacctgaaaatgaaattaagaaaattgttgtagacatcaaaaagaaaattgatcatttctctaagttaatgggatcggctgaaaaggctattcaactcatgcaagaacgccgtacagcccttatttcagcagtcgtaacaggtaaaattgacgttcgtaactggcaacatttgaataaaaataataatcaagataacatggagttaagtgcatga

SEQ ID NO: 59124 - DNA, 564 bp, Acinetobacter baumannii
atgccatattcagatctctcatttcgcgcgttaagcgtgcttcatacatctcgttatctttttaatgaccatggttttcacaacgttggtgtagaccgcattgtagaagaagcggaagtgaccaaaaccacgttttataaatattttcagtctaaagagcggcttattgaaatgagtttaaattttcaaaaagatgctttaaaagaaaaagtcttctcaattatttacacacaaaaagatttagtggtgcgtgaaaagttaaaggaaatattctttttacatgtcaatctggaagggcattattatttgccatttagagctatttttgaaattgaaaaaatttaccctacagcctatcaagtggttatacagtaccgtcaatggttaattgatgaagtttataaattgcttttaacagcgaagaacgatgctactaaaaaagatgctcatatgtttttatttgtaattgatggtgccattattcaactgctagatgaaacaaaggctgataatagagaactgttattgcaatatattttaaaaagtatttttcttagtgattaa

SEQ ID NO: 59125 - DNA, 603 bp, Acinetobacter baumannii
atggctagaggttctgttaataaggtcattttgattggctcattaggaaaagatccagaaactaaaacttttccgaatggcggatcgctaacacaattttctattgctactagtgattcatgggtagacaaaaatactggtgaacgtaaggaacaaactgaatggcatcgtattgtattgcataaccgtttaggtgaaatcgctcagcagttcttacgcaaaggttctaaagtatatattgaaggttcactgcgtacgcgtcagtggacagatcaaaatggacaagagcgttacagtacagaaattcgtggcgaccaaatgcaaatgctagactctgctcgttctcaaggcgaacaaggtcaaggtggttttgctaataatcaaggtggctatggtaataatccaagccaaggtggttatagcaataatccaaacccaggtggttatagtaataactcaaatcaaggcggttatggtaataactcgaatcaaggcggttatggcaacaataacccgagtagttttgcaccaagacagcagcctgcggcaacaccctcatctaccccagctcctgcggatttagatgatgatttaccattttaa

SEQ ID NO: 59126 - DNA, 606 bp, Acinetobacter baumannii
gtggcaaacagtaaagacaaatttcaaaaggcaataagacagtcacttgagcagcttcaaaatagtggtgaaaaaatcactaaaacaaaaattattaataatgctaaatttgaagatggctcatctgtaggtaagaccactttgtatgcgaaaaattctgtaacaaaattatatatccatgctgaactattaaaagaactagatgaaaaaattacagccataaccatagacaagtcaaaaggcgatcaaaaaaaatcatctaaggaaattattgaggaaaaaagtaaaataattaaagagcttgagttaaaaaatagtcgactgttagctcaatttgcccagctagaggatagcttggaaaatacagttcatcagaataatgaaaattgtatacaaaatcttgaactaaacttgtatatagtaacttctttattaaatctaaaaattggaggatataagaaattgaataatataataaaaaattttgaggttaagtatcatggaagtgaaagattgaaggaagcaaaagatcaaattcaaacaatgaaaaatgatatagaatattctaaaattatttccattacggaaggttttaaggatagctaa

SEQ ID NO: 59127 - DNA, 1806 bp, Acinetobacter baumannii
atgaatgaccattcaaagttgtacgattattctgagcaacagaatattgatacagaaaagcctgaaaacttcataaatcatgatatagagtggttgaaaaatagttatgaggacgatatctgggaattagaacctcatattattactgatgataagtcaaaatatacaattacatgggatttgtacgacttagaaaattataacggtgtctttcacagatgggattattggaagatggctgcaaaggaacttgcatattggataatggaggcctcggaaagcaaatgtaatactactagtaccttagctgtaaattgccgtaacattagggagttttatgagtggttgtgttttgagcgaaattgttttgatttatcagaagtaaaacaagaggatatagcttcattttgtgagcatatatcactaagggggttaacacaaaccactgttctgttgaaattaaaagtaatttcatacatctattctttaaaaaaatatttaaaagaatcattaagctttaatccatttaaaacaaaaaaaatatacttattagccaaagcctattcagttcaaaatggacatacccctacactttaccctaaagaaattttttctttgttaaatcatgctcttaaattagtaaaagaatcagaatatactttgaaattatttaaacagtatatggagatacatgcagatagctctatatatcatagatcaatgtacttgaaattttataagctaacgggtgttaaatcgagtgaactacaaagtaaggttcgtgctttatatggtgcggcagtaaccatcattttgactttattagcagaaagaaagcatgaattatcccttactaaagaagttgatgttttagacttattaaataaggaacttgatatccttattggattagagaaaaaaactgctagaacacaaacaggaaaacgcacggaacgggttgttatccaagaagttaaagatgcacttgtagttattctagaattaacttcatataatcgtaaaaaatcaaaaaatgaaacaatcttactaaaactaccttttggccattcagataatggaaaaggcgataaaactttttatctcactacaaatggcctatatgtcgttctagagcattttgcgcaatcagcgaaatttgaaaggatagaactaagaccacatatgtttagaagagcatacgcgatgttgtggacttggaggtttgagataggcgatcttgaagatttatcctcaatgttgaagcataatagtacagcttttacaaaaaaatatacggatgatgaagatgtttggcagtttatgggggaaacagagcaagatttagcattcgatctattaaatagggcttttcaaggaaaaattataataagtgggcaaatcagtgaaactcttgaaaggtatgctaggctaattcaagccaaatctaaattgttagactctagtgctattgctgactttgtggatgaatttattcaaaccaatgatatgcatatagttgctcattcagatgggtattgttttattaataataaaggagtagaaaatgctttatgtcggactgatggtataggcttagatccaataaagagaacagattctttatgtataaaatgtcctaattttgctattgataattcgcgtaaagctcactgggagaaaagaattaagttacatcaagatgttattgattctagtaagaatgaaaagcttgttgaacattccaaaatgttcattgttcacgcagagaaaatgctaagttcccttcgattatctgaaaaaacgtaa

SEQ ID NO: 59128 - DNA, 2070 bp, Acinetobacter baumannii
atgactaagctaaagcgtgaacctattgttataaattcttcaataaaagaatctattatagattttcctaaattagaaattactgttggagaaaaaacctatgatattagtgatctttctaatttagaaaatattcatgcaatagttacggtcttaaaaacatctttaaagggacagcgatctagcagagctgtctttctagaattaagaaattttcttagatttatttcaacatgtggtgaaaaaattgatgaaaaatcaattattaaatatagaaaattcttagatgctcagatcgacaatgatttatcaactaagtaccaaaaattctctagagcttctgcatttgttaaatgtttaattagggaagatattattgaagattttcctattcctcctaatttctcaaatattattaaagaacaaaaaaagtcttttggtgaaatagctagacgctacattgaagatgacagtaattttgatactcaagatatcaaaaatattatggatcactttgcattagagtacttgcaagcgaaaactctaagttattctttaggtgcaatagatattattcataaaaaagcaatcgctgatatatataaatgggaggaagattgggtaaaagtagagagaataatagaactactaaatgataaagaccttgaaaaactaagatgtgtgagtgattttacaaaagactttcctatgcgtgaaaggagcttggaagaagccattcaaatactttactcaaaatttggggataatattccagcagtgaaatattggcctaaaggaatggaagacttttttcgttcaaaaaattggaaaagtagtagggttaaaaacttattaaatgggatatccacaaatattgatgacatgactatcttgaataaaagtattaagaatctgtcattagaacaaaaggaaaaatttgataaagttgaaacttactatattgattcagatggaagagatcctaggactattgaactagcattgtcgattctttatgcaaattatggacgtattttaccagaatcaacaaaatggcctaaaggtataagcgactacctgaaatatagaaaatggattccttctcgggtgcactcagcattttttccaactccagaaacattaactcctttcattgtaggtttactatctcatattgaaattgcaccaaatgttgattgtgttgctttttatacatatttaacaagttttaagcctagttcgaaagaaggaaaaacaaatgtttttatggataaattcagatcaaataaaccaataaaaaaagatataagaacaaaagatcctatgatttcactatgtatcaagcattctgaaagaatgctttctgtattaaaaagtatccagactaatgaggcaaagaatctaattctacaaagtaaaacgcccttatttatacaatacaatactaatagtacaagaagggatatccatactttagatagctctacagtaataaatatcgttaagagatttttagctgatttagcaaaagaaaattcctcaattttacctctggtacaaggtggctgtactggacataactttagacccactatggtgttgataaaacaattgattggagaaagtacgacagcaattcagaaattactgaatcattcaaattcttcaactacaaaaatctatactgatcggttattaacgcaatcaatgatattcagtaaatctaaaagttttcagaaatacctcattgaaaatgcaatgaaaaatgattctattagtaatggaaatctatcaaataaaggaatggaaaatgctgtagatgaatggatcaattgtgatgctaaaagaatatggtttaaagattatgatgtaattgcagagtggcttgcatgggaaaaaatcataagagaatctgaggatggattaaagtttgaaaatccgattagatgggaaaaatactggttgccaagattagtcaaatatcaaagcttactagaaaatgtactggagaaagataaaaaatatgctttaacacttgctgccgatattaagcttcctcccttatcttaa

SEQ ID NO: 59129 - DNA, 1173 bp, Acinetobacter baumannii
atgttaagaaacatggttcatgcaaacaattacggtggatatatggcatatgttgattacgctgatgaagtaatctttgctggaaaacctcataaaaaatttcccttaattttaagcaaagaccatattgtaaatcgtcttaccctcaaatattttctttctcaacgaatcttgtgggatgccactactttaaatacttatacgaaacatatatgtgattttatttctcagttagaagttgagaataaagagtgttcatttgatcatatagatgattactggttagaagcctatgcaaatcaaatatggagtcggaatcccagttctgcagggggaagctacatttcacaattattatttagcgtaattaatttcttagtttggtgtgaaaacaataattattgtaaaaatctaatagggactacttctgcttttaaaataaaagtgcgtcagactaaaaattcttttactcatcatttggttaaatattatgaaaagctgaaaccatcgccaaaaattgcaccaagacatgagtggattgaggctgtattaaatgaagagcattttaagtctgatgatttagaaattcgctttaatttgatggtcgaatggggacgtaggtgcggattgcgggcacatgaaatatgtgcgttaagtattgatcaaataccatcaaggcaaactctagaacaagcaattatagagaaaaagaatatctttattgaattgactgtaactaagggaaagaagaaagcaagaattccagtgagtggaattttattaaaaaaaacgttggattatattgaatctgaacgcaatcaactaatcagaaaattcaagaataaagcacggttacagcgtaaggcgtatattcccccacaacaagtatttatttcgtctagaacaggccaagcacttcatcgtcgaacgttctcgaatcaactaaacgctaggtggcagcaagctgtggaaaatggcaatctggcaaaaaatcaacacgtatgggtacatggattaagacatagatttgctacagataaacttaaagaaatttcccagctcaaatatattcgtgatcctagtgaggttactaagactcttacaaggcatagtcattcttcaacattagatatatatactgccagtatttatttagaagatatacatgactaa

SEQ ID NO: 59130 - DNA, 1698 bp, Acinetobacter baumannii
atgaatacattacaaaaagaacaacgcctaaaagaattattggaaaataatataagaactgaaaaaaatggtacggtcattgcgattactgggtcttggggtattggtaaaactttcttctggagaagtttcttagataaacaattatctgatgagcgagtttataaaaaagataatgtattcaatcggaaatatgcttatgtatcactctttggattggagtccttaagcgatcttagaactcagatttatagcagtatagaaagttatcactcatcaatagaagttcctaaatggattaaaagcctaccttcaatttttaaagatactcttattacacaattgggaatcaatgcaccagttaagttgattgatagtttaatgtttgcgcaagtgaaagatgccattatttgctttgatgactttgagcgtatgtctaataaattagatgttaaagatgttatgggcttggcaaactatctaaagttagaaaagaattgtcagattattttgatcttagatgaagataaaacagaggctgaaaataagaataaatatggtgattacaaagagaagttagttgatgaaacaataatcttaaactctgttgaacctttgattcgggagaatactaaaggtatcgatgagaaattaattaacctaatgattgattttgctgaaaaattagaaattcataattttcgtttttttcaaaaagtgattaaattatttcgacactttcttactgagctaacaaaagatattgcctattcaacaaaagaaattatcttaattcggattttacaaggttacttaattcaagattttccaaactttgaatatagttgggatgattgtaaatatgttactgaaaaggagagagaagcttggagccctataaagaaacaaatttatgaaaaattacaaaatatatcttactcattcaatcgtgaggatgagtggtttatcgaatttaaaaaatggttcgagcagatagatgtaattaactttagtgaattgagtaagttagctaactcagaattaatttctgatgagaataatagaaaaaaagataatttccataaactatttgatgagttctggggattatcagtggatgagagcttcacagagaaactatataatgcttcaaagcaggttataggattagaaggactacataatttaagttttgctttacaagttttggagcaattgggagatgaaaaaaattctaaattactcgaaaaccaaataataaaatggatgagcttaaagttaaaagataatagacatacttttgataagatgaatatgtttggtgagataaatccagtatttctagatttttcatcaaattatcaagaagaaaataaattaaacgatttgccaaaactaattgaagtggtttatcgatatatttatgtcgagagttggagttcagaacatgttctggctttagaaaattccaaaaaggctgactgggaacaattgttatttaaagaaattcctcatgataagcgcttccaaaatataaatagcagccaagttattaaaaagatgatcagccaatatatgaagccagaaatgaattctaaaattaagcagatggttatcgatatttatctgaaaagaggtaaagaatcagttttttataaaaaatatatggattatttaatttcccgattagaagattaa

SEQ ID NO: 59131 - DNA, 405 bp, Acinetobacter baumannii
atgaagtattatatttttgcttctttaagtgtaattggattgctcagtcttagtccactagttcaagcaaaccctagccaaggttactgtcagacagttgatggtagtgtatgcggttgggggggaaatagcagtagttataagccacaatattggtatgctggtgttgcttacgacccgaaaaatggcatattttcgatctatacagccacatctcgtgaactagctatgcgctcggcagcaaaagagtgcaaacaaataaatgagaaccaaagaagatgctccgagcttatttctagtgtttctggatacacaaaagacaaagagcctggtacagtgattaccaaaggacaacttccagacggtacattccaactgaatcttagatatggtttaaatggttag

SEQ ID NO: 59132 - DNA, 891 bp, Acinetobacter baumannii
ttgattagcagagaaaattataatgatttacatgcttttctcatggtgacaagagaaggtagttttaccaaagcagcaggtaaacttggggtttcacaatctgccttgagccatagcattcgtggtctggaagaacgtctaggaatattattactgaatcgtactactcgtagcgtatcacctaccgaagcaggtgaacggctaagacaaacgattagtgtcagttttgaccaaattgacaatgaactgactctactcaatacctttagggatacaccagcaggcaagataaaaatcaatgctagtagtcatgcaatacaacatatcctaattccaaaattggcaaaaattgcccacctttatcctgatttcgaagtggagtttagcgccaatagtggcatggttgatattgttgcagagcagtttgatgcaggggtcagatttggtagccgagtcgctgatggtatggtcgctgtgagaattggcgatgatatacaaatggcagttgtggcaacacctgattattttcaacgttatggtatccctgatactccaagagatttagatcaatatccctgtattggattcaggttaatgactcagggggggatttatgcatgggaatttgaaaaagatgatcaggaatttaaagttaagataaatgctaaatgggtgtttaatgagagcttcgatattgttaaggcagtcaaatcaggtatgggattagcctatattccaaaggatatggtggaaaaggaaatccagcaaggtgaattagtccaagtcttggaagaatttagtatccagttttcaggctatcatctttactatccccatcgtagacaacaatcttcagctttaaagttggtgattgaaagcttaagagtgtaa

SEQ ID NO: 59133 - DNA, 642 bp, Acinetobacter baumannii
atgaaaaaggtcatcgtgattggtgcaagtggtcatacatcccaacagattattcctagactacttgagcaagctgatgtacggctcacgctattctctcgtaatatcaaaaaattgaaagcattagaagataaacgtgtacgtttgattgaaggtaatgcaaataatttagagagcttaacagatgcaatccaagatcaagatattgtcattagtacaatgggtgatatggacttggttgttaaaactgaaaatattgttcaggtaatgcaggaattacaagtacaacgcttaatcgctattagtgctggcggcatttatgatgagttgccagaagcatttaatgattgggataaccacatggttggctatactcgtccaatcaacctaagaacagcagaagtgattgaacaatcttcactgcaatatacgattttacgtcctgtctggcttacagataaaagtatagaagaatatgagctgacacaaaaaggagaaatttttaagggtacagaaacctcccgtgcaagtcttggacgctttattgctacgattgtagaaaatccgcaactacatattggtgagaatttagggattagccaaccaaataccgatggtgataaacctgttgcctatcgctag

SEQ ID NO: 59134 - DNA, 1047 bp, Acinetobacter baumannii
atgacttatgcttatggtgcaacggctgctacgaatcctttagaaaaactgactattcaacgtcgtgatgttgggcatcacgacgtaaaaattgatattgcctattgtggtgtctgccactctgatattcaccaagtccgttctgaatgggatggtacgcagtatccttgtgtgccaggtcatgaaattgttggacgagtgaccgaagttggaaagcatgtatccaagtttcatgttggtgatttagttggtgttgggtgtatcgtggatagttgtcgtcactgtactgattgtgaagaaggtcttgaaaactactgtgacaatatggtcggtacatataactttcccacacctgatgcacctggttatacattaggtggttattctcaacatatcgtagtagatgaaaactatgtattaaggattaaacacgatgaacagcaactcgctgctgtcgctcctttactatgtgcagggattacgacttactcgccattacgtcactggaatatagggaaaggtaaaaaagtcggtgtcgtgggtattggtggcttgggacacatgggtattaaactggctcatgcaatgggggcgtatgttgttgcctttacgacttctgaatcaaaaaaacaggaagctctctctttaggtgcagatgaagtagtcatttctaaagatgcaactgcaatggcagtccaccaaaaaagttttgatctgatcattaatacggtagctgcatctcacaatcttgacccatttttaaccctgctcaaacgtgatggaacattaactttagtcggtgtacctgaaacaccacaccaatcacctaatgtatttaatttggttggtaagcgtcgttcgattgcaggttcgatgatcggcagcattgccgaaacacaggaaatgctagacttctgtgccgagcataacattgtggctgatattgagttaatccgtgctgatgaaattaatacagcctatgaacgtatgctgaaaggtgatgtgaaatatcgttttgtaattgatagccaaactctaaaagattaa

SEQ ID NO: 59135 - DNA, 906 bp, Acinetobacter baumannii
atgacacctgcacatcaatctgccgagatcgaacagcagcctgcatattggagtggtgtatttgccatgactttatgtgtatttgcgctgattgcttctgaatttatgcctgtgagtttattgacacccattgccagtgatttaagtgtcactgagggactggcaggatatggtattgcgatttcaggtgcatttgccgttatgaccagtctgtcgatttctcgtctggcaggcgatatgaatcgtaaaacattactgcttggtttaaccgccttaatggcgatttcaggtgcagtggtggcacttgctccaaattactgggtctatatgtttggtcgggcgttgattggtgtcgtggttggtggtttttggtcaatgtccgcagcaaccgcaattcgtcttgtaccgacaacatctgttcctaaagccttagctatttttaatagtggtaatgctttagcgactgtggtggcaccacctctaggaagctatctaggtgcaatgattggctggcgtggagctttcttttgtttagtccccattgcaattttagcttttatttggcaatggattagtttgccatcattaaaaaatcaaaggtctgtatctacctcatcaggtggcatattccagttattaagtcagcgtagaatccaagcacttcgcccacaacttgaagcctatgaaaaactgtgtgctgaactgggtcacagaccagctttagttgcattggcatggttacttcacaatcctgctgtaacttctgtgattagtggtgttcgtaccgtagaacaattgcaggaaaatatcaaagcattggatatacagctttcagtaggaacactggcaaaacttgatgagatctggccgccttgtggcgaagcaccacaagcctatgcttggtaa

SEQ ID NO: 59136 - DNA, 492 bp, Acinetobacter baumannii
atgatgcaaaaaattaaaaatggtttttcaggtattggtcgtttaactctacttttcttaacctttggactcagtgcatgtacagaggctaaaaccaataccgaacaacattcttcgcaaaaggtttccagtatgaatattcgttttgatattgaaggctcaaatcaacctgtttttgttaccctacaaaattcacctacgacacaggattttcttaaacagcttccattaacgttagaactaacggattatgcgtcatctgaaaaaattgcatatctacctgaaaaactcacttcacaagatgcaccaacaggtcatccagctaaagcaggtgatattacctattatgctccttggggcaatcttgccattttttataaagactttaatggtgttgccaatagcctgatttatcttggcaaatttgaagatttaccaccacagtttcgtcaaaaaaatgccgtcaaagtcactatttcaaatgcctcataa

SEQ ID NO: 59137 - DNA, 1071 bp, Acinetobacter baumannii
atgacacatcacgcacttgcaacaccacccaattttcttaaaaaaacgttagctattcttacacttagtcttggagcattgacaatgagccaaaccacattggcagaacagaacttaaaacttacaacaaaatgggacaagacttttgctcaaagtgataaagttgaacataaaaaagtgacctttaaaaaccgctacggcattaccttggctgctgacttatatatccctaaaaatgccaaaggtaaactggctgcaatcgtgatcagtgggccgtttggtgcagtgaaagaacaatcatcaggactctatgctcaaacgatggcagaacgtggttttatcactttagcatttgatccatcttatacaggtgaaagtggcggtgaacctcgtaatgttgcttcaccagacattaataccgaagattttagtgcagcagtcgattttgttggtcttttgccaaatgtggatcagaacaaaatcggaattattggaatttgtggttggggcggtatggcattaaatgcaactgcaatcgacaaacgagtaaaagcagttgtgaccacaaccatgtacgatatgacccgtgtgatgtctaaaggttacaatgatagtgttacacctgaacagcgtactgcaacactggaacaactcagccagcaacgctggaaagatgctaaaaatggaactccagcttatcaaccaccttacaataagttaaatggtggtgaagcacagtttcaggtggactaccatgattactacatgacaccacgaggctatcaccctcgtgcagtaaactctggtaatgcgtggacagtgacgacaccaatctctttcatgaatatgccgattttgacctatatcaaggaaatttcacctagaccgattctattcattcatggtgaaaaagcccattcacgttattttagtgaaactgcttatgaagccgcagccgaaccaaaagagttgatgattattcctaatgccaatcacactgacctatatgacaaagtagatgtgattccatttgataaaatgactgcattttttcaggaaaatttaaagtag

SEQ ID NO: 59138 - DNA, 1122 bp, Acinetobacter baumannii
atgatgaaaaaaagatataaagttgccttgcttttccttgtacttggcattggggtactcgttactgcctgtgccacactaaatagtcctcaatttggtaaactgcctgaacaggcacgccttgaacgtatccagcaatcccccaattatatcaatgatgagtttgcttatcccgaaccaacaccaatgctacgtgaaggagaaagtacgcttaaaattttttgggacaacttttgggctgaaaaacaacagaagaaacctaatcaggcaattccaagcgtaaaaacagatttacatgcgttgaataaagatcaggatgtagtgatctggcttggacattcagcctactatatccagttggcaggtaaacggattctcatcgaccctgtactcagtgatcatgcagcaccattttcatttttaattaaagcctttgatggaacgacgatctatcaagcaaaggatattcctgaaattgattatttgttgatttcccacgaccattacgatcatcttgactatgcgactgtcactcaactcaaggacaaaattaagcatgtcattgtaccgcttggtgtcggttctcattttgaacactggggttatccattggaaaaaatcaatgaaaatgactggtttgataccttaacacttgatccaaatctgaaaatccacacattaccagcccgacattattcaggtcgattatttacccgaaataaagccttatgggcaagctacgctttggaaacaccaaagcaaaaaatatattttggtggtgacagtggctatggttctcactttaaaaccattggtgagaagtttggtggttttgatgtggtaatgttagatagtggtcaatatgaccctcgttggtcattgattcacatgacccctgaagaagccgtacaagcagccacagatttaaaagcaaaagccctgttacctatgcacattggtcgttttacactctcacctcatgcgtggaatgacccctttaaacgtgtcagtgctgccagtaaaactgcaccatttcaactattaaccccaattattgggcaacctgttctattagatcaaccgtttcaacaatactcctcttggtgggaggaaattaaataa

SEQ ID NO: 59139 - DNA, 312 bp, Acinetobacter baumannii
ttggcagcacgactacgctattaccatgcagcttcgggtgacctactttcatgtttgccattacaactcactttaagaggtaaaagcacaacgcaaagttatcgtacgccaatctactatgtggacctgacactacgtgatggaatcaatctacaggaagtaattattttagccaaacagattgatgaaacaagcaaagcagcaggattttatcaggaagctttggatcatgtagcacgacaaggctatggcaatgccaattacgaggtaggaggtgaggagggcttggatattgttgaagagtttatatag

SEQ ID NO: 59140 - DNA, 297 bp, Acinetobacter baumannii
atgcaacaaagccgttctcaatataaaagcgttgctggagtgagtaaagctacatcaacacgccacttaactgaacttctagagtgggatgtattacataaacttgaaggtggaggtcgtaatactcgttacgtgctaaaaatcgataaagaacaatttagtcaaacttgttctgacgttctgaaaaatgtaatagctgagcagctagggacggggttatgcgttgatcacagattgcctgcaagacctacaattgaaccgtaccgggtttgtcggagacttttttatttaagttag

SEQ ID NO: 59141 - DNA, 279 bp, Acinetobacter baumannii
atggttacgctagaagagtttattcctaaaaatcatcttatacgtaaactagacaaatcgattgatctcaataacattcatgaacgtgtcgcgcatctatattgtcccgataaggagactgttgaacgaattttgccgttgcaaaataattatacggtcactgttatgcaagtaacgcagcaatgtttactgtcagttacagtacaaaacttgaagaaaatcgccttgcacttatcgaagttaatttttattgtattttttagccatcaatatgcttaa

SEQ ID NO: 59142 - DNA, 912 bp, Acinetobacter baumannii
atggcaagcactaaagagcttttagctcaaaaattgaaacaaaatacagaaaaacatcagcaagcacagaaagacaatattaaagagctaaaggaatttagacgtaatgttcctattgaggatatcagtcgcagtcccaaccaaccgcgtaaagtatttgaagaatctgaattaaaagaactggcggattctattaatgaaatcggccttttgcagcccattacagtgcgcaaacttgataatcagaaatatgaactgatcgcaggcgagcgacgcttacgggcgcatcaattactcggcaagtcagtgattgaagccattatcattgatgctaataatgaagaagcatctttgttaacactagctgaaaatttaaagcgtcaagatctgacagattatgaaatttttattggtttgaactcacttgatgaaaaattgaagaagaacaagcaacgtttagctaattcattgggtttaaatcgcgaagatatgtacaaatatctatcgtatgaaaagctgcctaaagcaatgttgaatgacctggatttggagccaggtctagtcggccgtactgctgcaacagcgttcaagaaatttttgtcggatcatatagagcaactttcggaggcggaaacagctttactccgtgcttgggagaaattaaaagaaaaaaaactggagcaaagcaaagttacttcttatgctgaaaaaatattgagtcaggatccagaaaaagtaaccacgacatcagtggtaagaaaaatcgaatatgatggtaaggttgctggaaatatcaaactgaatcaaaaacagctcaagatctctcttaaaatttcagaaattgatgaagctagtcttttacaactagaagattttttaaaacagcttattcagaaaagtgaaaaagtgtag

SEQ ID NO: 59143 - DNA, 270 bp, Acinetobacter baumannii
ttggattttgatgctgtattgattgaatttaattgggaggatgatcatgttcatttattaattaattacccaccaaaagttgctatttcaaatttagtgaatagcttaaaaggtgtatctagtcgccaccttagaaaagactttcctgaaattaaaaacaaactttggggtggttctttatggtcgccaagttactttgcttcaagttgcggtggtgcgccattagaaattattaaacaatacatcgagcaacaacaatcacctcattag

SEQ ID NO: 59144 - DNA, 186 bp, Acinetobacter baumannii
atgcaaaaaacacaattaatccaactacttacagatttttctgcagcatggaatcaacatgatgtcgaacaactcatggcatgcatgcatccagaatgtcgttttgaaactgtagctggtgaggatgttcatggaacccgaattgaaggcttagatgcggttcgacaagcatttagccttcaataa

SEQ ID NO: 59145 - DNA, 1494 bp, Acinetobacter baumannii
gtgagtacagcgatttcatctactgtttggcaagcattgttttctaaaactgcgcaaagtggtttgaatttacagggtagaatttgtcgtatgatgttttctgctttagtgcaggggtatttaaagccaggtatggctgtcccttctagccgagatttagctgatcaactaggtgttggtagaaatacggtcacaattgcatatcaacaattggtcgctgagcgaattttggaatccaagcagcggagtggacattttgtctgtttaaatttccagattgatagtagcgagagtaaaactattcgtactacgtcaaaagcgacgacttgggggactcgcttttgtataagaccttcagcacaaaggcatttgacgaaaccaagtgattggatgaattattcctatccctttatttacggtcagccagatgcggaaagctttcctgctacagcttggcgggagtgtgcattacgtgccttatctgcaaaagacgcctcgatatggtcacgagatatgactcaacagggggacgatgcctatctcatcaatgcaatctgtcagcatattctgcctacaagaggcatcatggctcaagagaatgaaattttactgaccgtgggaagccagcatggcttatatatgttggcaacgttattaatgcggcagaatcatgtggtcggtgttgaggaacctggttatccagatgcgcgtaatatatttatgttacagactcagaatattgttcctttagccgtagatcatgagggggtaactttaactcgagcaaatgagtgtgattacttatttgttactccagggcggcaatgccctacaggtgtaacgttgtcaccacagcgccgacaaaatttattgcagttagcagaacaaaacgacagcattattattgaagatgaatatgacgcccaagtgttggtgcagaatacgacgattccagcgttaaaaagtttagaccgacatggacgagtcatttatcttggaagtctatctaagccattggcacctgggttacgactaggatatatcgttgctgcacctgaattaatacaagaattgcgacatttacgccgcctgatgttgcgacatccaaatgtgtttaatcaacgtgtctttgctttgtttattgatcaaggctattaccatagtatgttacgccgtcagtaccaattacaccgacaacgcggtgaaatactcaataaagctttaaaacaatatcttccgacttggaaaccttatgctatgaatggtggttccgcatgttgggttgatactgcagcagaaattgatactactgttcttactcactatgctgcaaatttgggtgtattgattgaatctgggcattctttctttttagatttcgataagcagaagcattttctacgtttaggtctgggttcaatcagcgctgatctaattaataaaggtgtttttaacttggcgagggcggttgaagagtattatttatacaactaa

SEQ ID NO: 59146 - DNA, 450 bp, Acinetobacter baumannii
atggggcaatttatcatgcccttttgctttggccgaccagatgttcagattgaaatggtgaaaatcaattcagaattattgaaaatcaaaaaaattaaacagagccagaaagtcgcagtacaagcaaagttcaaaataatttatgtgaatatatggcagaaaatcttgttattgatgcaaaaggagtcaggcttacgtgtgcattctaattatgttgcaatcttacagttgatacaaaatctggattattttatcgaaaaaacactgcaacattcatgctttgagagaaaaatccagaaagaactggatactaaattttttgctcgatttttcaagctgaccaaaaactcaataaaagatcaactcataccaaattgtgccgatttaaatgaattttacacatacaactcgataaaaaatttaagtgaaaatgaatatgcaaatgactga

SEQ ID NO: 59147 - DNA, 474 bp, Acinetobacter baumannii
ttggcgagcaacctaattgaatatgctgaaccaccctacaactttaaatacttaaaatcaattcatgcacagctttttggcgacttatacgactgggcaggaaagttaagacaaatcgatatttccaaaggtgacacccgtttttgtaatttttcccgtattgaaattaaaaccaataaattacttaaaccacttcaagaaaaaaaatactttcaaggcttagcaccacaacaactaattcctcaacttgccgacttgtattgtgagcttaatgtcatacacccattccgtgaaggtaatggatgcacacaacggattttctttgagtatctgattgctcattgtggttatggtattgattggtctctcattgactctcaacaacaatggattcaagccaatattgaaggtttttatggtaatttaaatccattaattcagatttttgaaatatgctttatccaaaatacctaa

SEQ ID NO: 59148 - DNA, 549 bp, Acinetobacter baumannii
atgaagatgcgatttaagtctgcttttgcagcgatagcactgtctatcatcagcttaagtacaacgactcaagcagaaactgctgcgcctcaggcagttgatcgggtagatatccagaagtatgctggtaaatggtatgaaattgcgcatttaccgatgtattttcagcgtaaatgtatagccaatatcacggcacaatatagtgtcaatgccgatcaaactatcggggtattgaatagctgccgaattgccaatggcgaaataattagctctgaaggtgttgcgtattcgcaaaatcaggggaacagcaaactgaaggtcagctttttgcctacaggtttaagatggataccatttagcaaaggcgattactgggtattgcgcgtagatccggaatataaggtagcgctggtgggtggaccgagtaataaatatctgtggattttatcgcgtgaaccgcaactggatgaagccacttatcaatcctatctcgacactgcaaaacattatggttatgacgtgacaaaactgatcaaattgccgcattaa

SEQ ID NO: 59149 - DNA, 774 bp, Acinetobacter baumannii
atgagcatgcactcaaaagcgtatatttttagacagcagcaattactggtggatgagcattttcagttgccgcaggttgaaagactgcagcacgacctaaacctgtcggaaaattgcgagatcattgctcgtgacctgaaagaagacgaattggtgccagaagattatcagctggttccaatccggcaactggtgcaagtctggagcagaccgcagtttgaacaggccagccgtgctgtgcagttactggaatggcgccgtaaccaccgcttttgcagtaaatgcggacacgccacccagcagcatgtcagccagtatgccatggtctgtccatcctgtagctataaccaatatccgcgggtgaatccctgtgtcattactatcattacccgaggtacagatgaaattctgctagcaaaaaatgctcgcaacaaaacccagatgtacagcctgattgcaggctttgttgaagttggagaaaccctagaagaggcagtacgccgtgaaacgctggaagaagtggggctgcaaatcaaaaatattcaatatctggccagtcagccgtggccgtttcccagcaatctgatgatggccttcaaggcagaatatcacggaggggaaattcagattcaagaaaatgaactcagcgatgcgcaatttttcaaatttgatcagttacccgagattccgttcaagggcagtatcgcctatgccatgattcagcatgtgatgcatggaacacctgttgcagatgacagcaaagaatggctttga

SEQ ID NO: 59150 - DNA, 1524 bp, Acinetobacter baumannii
atgcgtttcggtttaattctgggtgaccagcttcatcatcagcttgctacgctcaaagcgctagatcgtagcagggatgtgatcctgatggccgaagttgttgaggaagccacttatgtcgcccatcatccgcagaaaattgccctgatttttagcgccatgcgtcattttgccaaagagctcaaagcagaaggctggcgtgtacgttaccatgcttttaaatctgatagtccgattcgtagcctgctggatttcatagagtcacagcagcaactcttaccagtcacagaactggtcattacgcactgcggggaatatcgtttacagcagcagattgaacagtattggagccagcagctgcaattgccagtacaatgcctgaatgatgaacgttttttctgtagtccggagcagttccggcactgggccagccgctaccagacactgcgtatggaatatttttaccgggaaatgcgcaagcagaccggctatttaatgcagggccagcagcctcttggacaacagtggaactatgacagtgccaatcgcaaggcctggtcaggcagtccgccattgcctgtaccactctattttgaacgcgatcagattgatctggatgtgctggaactggttgaacgtgaattttcccctcaccccggcagccttgcctatttccgctgggccaccacacgtagcaatgcacttcttgcactggagcatttcattacccacagtttgccacattttggcgattatcaagatgccatggttcaagactcagacatgctgtttcacagcctgctctcaccttatctgaactgtggtctgctattacctaaagaagtctgtgatgcggcagaagctgcataccatgccggtcatgcaccactgaatgcagtggaaggctttatccgacagattctcggctggcgcgaatatgttcgcggaatttactggctgtacatgccagaatatgccagccgcaatgcactgcagcactcagcaccattgccacaattttactggactggccgcactcggatgaactgtatggctgagtgtttccgtaatacttttcagcatgcctatgcgcatcatatccagcgtttgatggtgactggaaattttgccttattaactggtgtagacccgcagcagatcagcgattggtatctggcagtctataccgatgcctatgaatgggtagaactaccgaacacgctgggtatggtgatgcatgccgacagcggcttgatggctagcaaaccctatgcgtcctcgggcaattacatccataagatgtccgattactgtaagcactgtagctacaatgtcaaaactcgcaccgagctagatagctgtccgttcaatagcctgtactggtattccatgatccggaatgaggcggaatttcgtactcatccacgtatgggcatgatctatcgacagctagataaacttaaagatcggcatcagattatcagccatgcccagcaacttcttagccagatcaatgagttataa

SEQ ID NO: 59151 - DNA, 255 bp, Acinetobacter baumannii
atgaatcaattttctgaagaagacttgtccagaattatcgaaatggcttgggaagatcgaaccccatttgaagccattcaacgtgaattcggtttgaatgaagcggcggtaatccgcttgatgcggcaaaatatgaaacccagtagctttaaaatgtggcgtgaacgcgtgactggtcgaaaaaccaaacatctacagctgcgttcacccgatgtaatacgggcctattgttcacggcaatacaagcgtttctaa

SEQ ID NO: 59152 - DNA, 1857 bp, Acinetobacter baumannii
atgtggagcgataatgaaacaacgcgagactatttaaattttggtgtagttgcaaaaacagtagcggaaatcattgatcagtcgaattcaagacctatatctattggtgtatctggtgcttggggggtagggaaatcctcaatgataaagctaattcaaaaagaattaatcaaaaagcaagaagaagatggtaatggagaactctccaaatatatatttgtcgaatttaatgcttggttatatcaaggttacgatgatgcacgagctgcgttaattgacgtagttgcttcaaaaattgcagatgaagcagcttcaagagaagggcttagagataaaattactgatctttttgaaagaattaagtggttccgattaatggctatgactgcggtaacgacagcatctgtagttacaggtattcctttaaatgggatagcaggaaaagcaattgatttttttacaggtaaagatgataaggcagacaaggatgggattagccctgatgaaatagaacaagaaggtaagaaatttattaaagaaggaatcgataaaacgccccccaaacagatccaagcattgagagacacctttgaggatattttatccgaaatgggggtaacactagtagttcttattgatgatttagatcgctgtttgccagagaccacaatttctactttggaggcaatacgcctacttttatttttacctcatacagcatttgttattgctgctgatgatcaaatgattaaacatgcagttaagaaacatttttcgggaattgaagatgacttagtcacgaattacttcgacaagttaatacaggttcctataagagtaccaccacttggaacacatgaagttcgtgcatacatgatgatgatgtttattgataacagcactattgctgaatcacataaagatcatcttcaaatgaaaatttgtgaacaactaggaaaagcatggcagggaagccgagttgatattaattttataaagagtgcctgtgcagttttgacgtcagaattagagactaagcttgaattggctgacagattagctatgttgatgacacaagctataggaattgctggaaatccacgactaataaagcgtttcatgaatactctatctatacgtttatcgatggcacgtagtcagggtataaccttaaaagaaagtgtattagttaaaactttattatttgaacgttgtgcccatcctaaagcttatacagagttagtagcatctgttatggcaaatgaaaatggtaaacctgaaatactacaaccatgggaagcagaggctatagctgggagagacattactgtaaaggatcactgggatgatccttttgtaaaagaatggttgaaattacagcctttattgtctgatgaagatatgagaggagttttatatgttagtcgtgaacatgctccatttataacgcaagaagatcgtttatcatcagaagctatttcattattagaggcgctattaaatcaagcttctatggcagggtcgttaatcgaaaacttaaaaatactcaatcgagctgaattaaatattttaatggacaaagttttagttagagcgcagcaagaagtggagtggggagcaccagaaattttggagtcagctttagtattagctaaagcagataatacattaggacagcgtttggccaattttttgaaagatcgtccttcaattcaaattaaacctagcattattcctaaaatatcagatcaatcttggtgtagtagtgtgtttgaacaatggacggatgacgatgaaatatccggtcctgttaagagtgcgataagaaatacgaaaataaatattaggagaagttga

SEQ ID NO: 59153 - DNA, 744 bp, Acinetobacter baumannii
gtgggaacatcgcagtcaagtaaagggtcaccatcaaatgtaccaatggttccctcatgggcagctcctaatgcacccatagcagaatcaggccggtttggtcctgcaagaagaaatattggtaactttatgggagatgggcaatcttcaactatgcgtaaaggagtggggcaatatgtaaaaaaaggatatggtgggagtaaaacagccgcgagccgtatggcgggaacagtacaaaaagcctccactttttttgatgctctaaatccttctgcacaaaatgggtcggtaatagatccagtgcttctagctggtaaatcagctgatgagattatggatgcaattgttgaggttgttgcacctattgatggaacacaagatactgaggctagtagggagtcagttaaaaatgcattatgtgaattattggaacaatttccaaatgctgatttagctaatttagatgatacgcaacgattatttgctttggaaaagtttgttgctgatgatgtatttagaagaatttatttagatttggggcaaataatacaaagtaaggcacctaatgtgactataggtctaagtcgtcttaaagagattaaagactacgtaaaagaaactgttgccgcatctttcagaaaaaatactcaaactggtataccaattgtttccaatcaaattaaaagcattgttaataatgcaatacaggaaacatttattgtttttgaggaatatgcagaatga

SEQ ID NO: 59154 - DNA, 1281 bp, Acinetobacter baumannii
atgaaaattacctgtgcattagaaaactttgacttttcaaagattaatagcgatttagatgtagaactttttgtatataacaatgatagatcaaaaggctgtattggtgccaaaattctaaaagaggtgcatgacagtaaactaattccacatgaaaaagcttgggatttattaagtatcgctttgtctgtgattgcatctgatcaagcagggcatcgacaaaaaagccctgatggctggacaagagaatttgatttaactatttcagttatagatgagttattttggaatacgcaaaaaaaactattagaaaaacttttgagttttcttacaactgatcgttggaatttaacttttatagaggggggagaatatcctgaattacatcctaaagctttttatcaacttgaagattgtgttgccttactgtcaggcggacttgatagctttattggagtaacaaacttagttaagcaaaattataaaccttatgtggttacacaaacagttaggggggatggagaaaatcaaaacagttttgcgaaaaagttaggtaatttggctcaatttaagacaaatcataatgttaaggtacccaaacccgaaactccagcctcccagagatcacgatcaataatatttttggcttatggtgtattgattgcatcctcgttagaaaaacatagacaaaatgaggaagtcactctttatgtatgtgaaaatggatatatttcgataaatcctcctataactccaggtcgtgtgggaagcttaagcacaagaacaacccatccagtagttttgaacatttttcaacagattttaataaattgcggtttaaacataactatctgtaacccatataggtttatgacaaaaggtgaaatgctgacaaaatgtttggatcaggatcttattgaggagtttgcacatctaacaacgagttgtggacgttatggagtttacaacaatactcattgtggtcgctgtgttccttgtttagttcgaagagcatcctttttttattggaaaggtaaggaatttgatcaaactgaatacaaatttaatgatttagctataaatgatgataatcatgcaaattttgatgatgttttttcaatgcgtatggctgtattgaatagagctgaaatgggaacatcaagatggattggggcatcattgagttcaaatctaatagaaagcaaaaagttgtatcagaatacagtcgaacgaggtttactagaaatgcaggaattcctagcagatttaggtttggtatga

SEQ ID NO: 59155 - DNA, 726 bp, Acinetobacter baumannii
atgatcgattttcatacacatttggatctttatcctaatgtggcagaagtaattaatgatatttcagcaagacagatgagaattttgtctgtcactaccactcctagtgcatgggaagggacttatgcgcttgcagctgatattccttatataaaaacagcgttaggtttacatcctcaaatagcacatgaaaggcatgtagagcttcaattatttgataagttgatacataagactaaatatataggtgaagttggtcttgatggaggtaaagaatttcaacaatattggaatatacaaacttcagtatttcaacatattttaaagtcttgtgaaaatttaggtggaaaaatattaagtatccatagtcgccacgcagtcgatgaagtattagactatttggaacaggctcctgaagctgggcaatttattttacattggtttactggcactaagactcaattgaggagagcaataaaactagggtgttggtttagtgtaggtccagcaatgttaaggagtaaaagagcaaaggaattaattttagaaatacctattactagattattaactgaaacagatggaccttttgtgaaaatcaataatagagttgttatgccatgggatgtgtccatagcggttgagcagctagcacttattttaaatatgtcctgtgatgatgtttataagatagttaatgataacgccaatattcttctaggctaa

SEQ ID NO: 59156 - DNA, 225 bp, Acinetobacter baumannii
atgaaaaaaattatttttttaagcttagttcttggtttggtagggattaatggttgctcaaaggtggaaaaagagtcaaaagaagctatcttaagcaccttaaaagatcctgattcagcccaattccaaaatataaaaggatattgcggagaggtaaattctaagaatagctaccgtggttattcaatttgcaataatttgggaagcacactgcactccaaataa

SEQ ID NO: 59157 - DNA, 237 bp, Acinetobacter baumannii
atgacaattaagatcgtggaccaaatacaaaagatcatgaaagggttttatgagaagaagggggaacaaaataataaaggtggtaattctgaagcgaaccaaactaaagctgaagtagaacttgagattaaaaaacttgaacttcagaagttacaacgtgaggtaaatccacctgaagaggattacaagcttgtgctgaatcctgatgaggagataccaaatgagccaattctttaa

SEQ ID NO: 59158 - DNA, 381 bp, Acinetobacter baumannii
atgagtttattgcttaaagttcgacagaatgttccacaagtgaagtcgattaaaacgtcacttaaaaagcgtgctggtcagaaaatacctcacatgctgaccaatgcatcagatctgttttttagaggccctcaaattgccttgtcaggaaaaacaccttttgatgtgatttataagcatgaaattatgagtttacgtcactataaaaatgaggctgaagctcctatagctaaacaccgcgtaccgttagtcatcgttccaccattagcagtcaacatgcttatttacgatttgttccctacacgcagccttatacgttactttttagctcaaggttttgatgtctatttaatcgactggggtgtaccaacccgacattag

SEQ ID NO: 59159 - DNA, 1266 bp, Acinetobacter baumannii
atggtgaatgatacagcgaattttatcgcagggtttgggattattccaaatgattggtcttgtaaaactgccaatgaaatttgcacaaaaatttctaaagggactactccgtctaaatcagagatttctaatgaaggcaatattccttttttacgagtaaataatttaactttatatggtcgtttagcactagattctgattttatatttgtatccaaggagtctcacgaaaattttctatcgcgttcaatggcatttcctaatgatattttgatgaatatcgtaggtcctcctttagggaaaacagctctacttgatgacagctatcctgaatataatatgaatcaggcgattgtattttaccgactacaaaaaaatcttgttgatagtaaatattttctagagtttttaaatagttttaaagctcaacaatggttacagtctagatctaaaaagacttctggtcagcagaatttaactattgagatatgtaaagatttaccaattattttgccaccattagttgagcaaaagaaaatagcccaaatcctttcaacttgggatcaagcgattttggctactgaaaagctgcttgaaaatagccaacagcagaaaaaagcattgatggaacagttgctaacgggtaaaaagcgtttgcttgatgagaatggcgtaagatttagtggggtgtggaaacatataaaattacgaagtttaatcaaggaaattaagagagataaagaggaaaatccaaataacatcgagcttttgacagtaaagcttcacaataaaggggctgtagcttctggaaagtttcccaattctacagaagggggtagaccctattataagagatttgcaggagaacttattataggacgccaaaacttgcataacggtggagttgcgattgtaccttctgaatgtaatggtctaattgcatctaatgcaatttcaagctttgaagctttaaatgattgtgacattaattttattttatcaattatgagtactagtcattttaggtatttaattgataacttaactggcggtacaggccaaaaagaagttagtgtccgtgaattactaaatgtatttgtgcttattccttctgtcgaagaacaacaaaaaattgctaaagttcttactattgcagatcaagaaattgagaccttacagaaaaaacttgattgcttaaagcaggagaaaaaagcacttatgcaacaacttttgacaggcaaaaaacgtgtcaaggtggctgcttaa

SEQ ID NO: 59160 - DNA, 255 bp, Acinetobacter baumannii
atgacaattgaaaacccaaagcacgaaggtgaaatagctaaagcagcagctcttgcacttcaaaaacgctttattgaagtttcacgtactagaaccgtactctatgtagagaatgatattgtatggagtaaagccccacatagcacacctgtattggtcaaaaagctatctggacgccaccctgatcttgcgaaaaggtttgctggtcgagggacatacaaaattaaaaaacgtgataatgatgctatcaattag

SEQ ID NO: 59161 - DNA, 213 bp, Acinetobacter baumannii
atgacagaattagcaagtttactaggtcaaaaaatacgtaaggctagaaaagaaaaaggcctttctcaagaaaagttagcccttatgtgtggtttagatcgtagttatatggggcggatagagagaggtgaggtaaatattactgtgctaaaactttatgagatcgcgaaaattcttaaagttgcaccacatgatttgctacctaaagactag

SEQ ID NO: 59162 - DNA, 930 bp, Acinetobacter baumannii
atgtcagatattaaatcacttgaagatatttttaacgatgatgatctaggattacttgatgatggtaaagatggggacatctttaaaattaagcatgtgcctgtccaacgagcagcagcagatgaagttgctaaacgtaaacgttgtaaggactttgatcagtttgagcatttatttaaaaatgttcacagagagcttcgagaagggaaacgtaagctcttaccctttaatgataagggttatcaactggttgaaggtaattactatgttttaaacggcttattagcttatttagcagatattaattttacttccgaagcgaaaacagttgatggtaaacgttttcgtaaagatggtcgaacacgtactatctttgagaatggaactgaatcaaccatgctgtaccgttcattggctaaagcattatataaagatggacgcattgtttcagagaccaacgaacaagaaaactctaacttttatactaattttggcggtatcactgaagatgatacatcgacaggttatatttatattctgaaatctctgagtaaagatccaaggattcagtcactagatcacctttataaaatcggattttcaacaactaaagttgaaaaacgtatcgctaatgcaaaaaaagaagcgacatatttgatggctgatgttgaaatcattgctgaatatcaagttttcaatattaatcctcaaaaatttgaatattacctacatgctttttttgatgaatcttgccttgatttattagttgcagacaaagatggtaagaatcatcaacctaaagagtggtttattgcaccgttagaagtaattcagcaagccgttgagttattagtaaatgggcagatcatgagttatcaatacaataagtttaagaaagagattgagttgagatgtaactattctttttaa

SEQ ID NO: 59163 - DNA, 3060 bp, Acinetobacter baumannii
atgcggtttaatgaggatgctcgcgtaaaaattccaacgattcttcatttaacaagactaggctataaatacctatctttgaaggagcatacatgggatatagactcaaatatttttccagatatttttattgattcaataagccgtattaacccatcttttgaaaaagatgacatacaaagagaatatcaagatttaaaactaacattagataatgatgatttaggaaaagcgttctttaataaactcattaaccgatcaggcatcaagtttattgattttgataatatggataataattcattccatgtggtaactgagctaacataccaaaatggggatgaggagtttcgtcctgatattacaatattggttaatggtattcctttagtttttattgaagttaagaaaccaaataataaagatggagttttggctgagcgagatagattaaataaacgattccaaaattctaagttcaaaagattcgtaaatatcactcaattcatgattttctccaataatatggattatgatgatggtgcaattcagccaatcatgggtgccttttacgctaccccttcatatcataaaccaaacttcaactactttagagaagaagaaatattcaacttaaccagtttattaaatcctttatatgaaacagaagaaatcaggatcttaaaagataataactttgaagttattaagaacagcccagaatttattactaataaagaccctaatagacctaccaatcgaatttgtacatctttacttagtcgagagcgtttagcattcatgcttcagtattcgattgcctatgtcgaaacagaaaatggtgtgcaaaagcatattatgcgatatccacaattgtttgctacaaaagcgatagaacgaaaactaaatgaaggaattcgaaaaggaattatttggcatacccaaggtagtggtaaaacggcactgacctattacaatatcaaatttttgacagactattaccaacaacaaaatgtaattcctaaattttatttcattgtggatcgcttagacttgcttcaacaggcacaaagtgagtttgctagccgtggactaattgttcataccatcaattctagagatgaatttacaaaagatattaaggcaacgaaggtcattcataataatagtggtaagccagagattaccgtaatcaatatccaaaagtttgctgatgacccatctgttatttctacaagagactataacattgatattcagcggatatatttcttagatgaggtacatcgtagctacaacccgaaaggtagtttcctggcaaacttagatgtatcagaccgtaatgcaatcaaaataggcctcacaggtactcctttacttggaacagactataactcacggtcgctatttggggactacattcacaaatattattacaacgcttctattgcggatggctatacactccgccttattcgcgaagatattcaaacgaactataaaattgccttacaggaagctctcgcacaggcagaagtgaaacaaggaaacatagataagaaaattatctatgcacatcccacttttgtagaaccaatgctcgattatattgttcaagattttgaaaatagccgtggagcttgtaatgaccctacaataggtgggatggttatctgtgatagttcagagcaggctaagcagatgtttgagatctttaatacaaaatataaaagagaaaatgatgaggttaagaaagacacttcatatacagagcatttaaaagaaaaaaataaagttaaatctgccatgctgattttgcatgatattggtacgaagcaagagcgtaaagatgggattgaggcttttaaagcaggaaaaattgatctcttatttgtatataacatgttgttaacaggtttcgatgcacctcgattaaaaaaactctatattggtcgagtgattcgagaacacaatttactccaagctctaactcgtgtgaatcgtgcttataaagattttcgatatggatatgtggttgattttgcggatatccgtaaagaatttgatgcaacgaataaagcatattttgaagaactacaatcagagttgggtgatgagatggatagttattctcaactctttaaatccaaagaagaaattgatcaggaaattaatcaattaaaagatttactattccggttcgatacagaaaatatggaaaatttctcggagcagatccaacaaattcaagatcgtaaaagtgttttggagcttaaaaaaagcttagctgatgcaaagagtttatataacctcatgcgtttgcagggagaatatgaacaactacgatctttagactttgaaaagatcaatattatgtttcgtgaaatcagtaatcatttagatacgctcaacttgaaagagagtatagaaagtggtgaagatactaccaatttattgaatttagcccttgaagatgtaatcttcaaatttcagaaaattgctgaagaagaattagttttagctgatcagctcaaagatacattgcgtaaaactcgagaagctttggcaagtaattttgatcagcaagatgaaaagtttattagtttaaaagaagaactagaacggctgttcaaaaagaagaaactaagtgaagtgactcaacaggaaatgatagccaacattggaactctcgaaaaaattcatgaacgaattaaagagctaaatcgtacgaacaaacaattaagtagtaagtataagggcgatattaagttcactcgagtacataaacgattacatgaacaaggtggtatttctaagtctgaaagacaaatttatgaagccttaattggactgaaacaggatgctgataaacgtgttttagacaatgaaaatgtactagataatgaagcttattttgctcgagtaatgatgcctaatattattaagcggtttaaaaatgaacagaatatttcattaaatccaaccacaacaaggtatattaacgagcttgtggtaaatgagtacctcaaagagtttaatggcggttcagggcaatggtag

SEQ ID NO: 59164 - DNA, 216 bp, Acinetobacter baumannii
atgtcagaactaacaatcactcttggtttgcgtgtacgagaacaaagaaaacttagaaaaatttcacaggaaaagcttgctcttctttgtaatatcgatcgtagttatatggggcgtatagaaagaggagaagtaaatttaactatagaaaaaatataccaattagctaaggctttaggcgtatcggcaaaagatttattaccagatgatgtatga

SEQ ID NO: 59165 - DNA, 1845 bp, Acinetobacter baumannii
atgaaactagtatcgataactttggaaaattttaggggttataaagaacctgcaacattattagttgataattctttcacaggaattacgggaaaaaatgatgctggaaagtctacagttttagaggcattagacatctttttcggtaattcaagtattgatagagaagacaaaaatattgatgcagatggaagcattaaaataacatgcacctttgataactatccgaagtttttgagtctagatagcggctcacagactagcttggaaagtgaatatttacttaataaaaacaaactactacaggtttgtaagacttttgattttagtgctagtcgagcaagcgagaaagtatctttaatttgtatgtatccttcgaacgaagggctgaatgacctcatttatttgaaacaaactgatcttaagaagcgaattacagctagaggactaaattcagaagaggttactgatctaaggtctaatgcatctattcgaaattttttatatgaatcagaaagtctaaatttttcagaacaagaaatcttgttaaataaagaagatgctaaagatatttggacaagcctattaaaacatttacctatttatgctttatttaagtcagatcgtaatagtaatgatcaagactcagaggttcaagatcccttaaaacttgctattaaattagctcttgcagacattcagccacaactggacgaaattcaaaatcatattaaaacaagagttgtgaatgtagcacaacgaacattgacgaagcttgctgaaatggactcttctctagctgaagatttaatacctgactttactaaggaacctgattggaagacgttatttaagttatccctttcttcagaaaaaggtattgctataaataaaaggggaagtggggtcaggcgtttaattttattaaatttttttagagctgaagctgaaagaaagatgagtgagtcatctggtaactctataatttatgctattgaagagcctgaaacctctcaacatccctccaaccaagaaatgttgataaaggcactaattaaactatcagaatttcctaaaactcaagttatggttacaacacatgtgcctgcattagctggtctaatgccgttagatagtttgagatatatttataaatcagatgaaacacatcgtattgatcatccaaatgatgacctttatgaatatatttcgcaagaattaggtatttatcctgttaaagagatccaaagcagtggtgcaaaaggttttgtatttgtagaaggtgtttcagatgttgtttttctaaaacatatctttctaaaattacatgaaagttctcaaataaaacggaattacattgaagataaaaatgtccacatattaataagtggtggaagtgggaatctaaagcattgggttaattacaagcttattgaatctttaggaaagccttggtgtgtattttttgattctgataatgatggagcagactgttcagactatctttcaaatattgaacttcaaaaaaaatacaatgaacaaggagttttgttctatttgactaaaaaaagggaatgcgaaaattatttgcatcctaatctaattaaacggatttctaatggagagttagactatgtagtagatccttatgaggatcaaaaggagaaactacaccccttaattgctccatataaatcgatcagaaagacgcaattagttgaaaaactgtggtctcagatgtcttcagaagaaattattgaggtaagtaatttagaaaatggtgaaaatgaatttgttaatttcattaattcattagaggagaagtttaatttaaattcgctctaa

SEQ ID NO: 59166 - DNA, 723 bp, Acinetobacter baumannii
atggtaggacgcaaagcgttagttctcacagcaaaagaaatcaacgaactcggcacgcatatcctcagtctaccgttcaaacgtcgagttgaagaacgttgcttgcacatgctcaaaaacaaaaaaagtcttcaggatctcagtgagcaagaccgacaactcatccagaaatgtcgctatgaacgcaatgcctacaacaaacgcatgcttcagctgcaactgatccaacagacagaatctaccaaacgcaatgcactgcaacaaaacatcctcaagctccatcaaaaacatgacatcgatgcctactttgccatgcacgatgcactggatgagatcctcaagacacaacgccaccaaaccgcagcgaaaaacctgaatcagaaaatagaaaaagccctgaatccagaacaacaaaaggaaaaacaaagccagaaacaacagaaaaaacgagaagaccagatcaagtactttatcggctcactctatctaggcgtttttgaacgagcaaagtttcaaatgacccactccaatcaggacttggacaacctgaaaaccctatttcgtatggccttgatcggtaaaaccatgcaacaaagcaacaaggatctacagacagtcacccaagaaattgccaactcaggccaatatcaagaaattgaacgatttatacaagaagccaaacaagacccaagaaacccattcaacaaaacaccagagcaatga

SEQ ID NO: 59167 - DNA, 432 bp, Acinetobacter baumannii
atgtttgttagattcgtcaatattttagaaaaaaaagaaattaatcagataattgtggatcaattttgttggctacattgggggcaacgtgcatctttaacaggatttatcaatcatctaaatatttattatgatttgaagctcatcattaaagataaaggcaaatttgtttttgaaaaaagaagagaatcgaaagtacgattggaacagcagataatctcaatgcttttaatcgctgaatcaactgttaaaaatcatctattacaaaaagtatttacttatatgcataatattgaatttcctgatgatttaaagaatgtggatgttgtcagattagtaagcgtaaaagattctgttaggttaaaaggtataaccttctacattggattaggtagcttgaactttacaaaattaaatgctactaatgattga

SEQ ID NO: 59168 - DNA, 1878 bp, Acinetobacter baumannii
atggttggtagagtgttagtagaagaatttccagatgatagaatcgaacgcatagtctacgctacaggatctattccgattacgagtgattatgtatccaatcctctagtcaatgtttttctagtaccagctccttggcactctaaaacacatgagccacaactaattcaaattccgattgctgagctggatgtagtaagaagagggactgtttggcgtggcaaagaaaaaatcctatataacagaaaagttggtgaaagtagacaacatcaagatttttttgaatttaataaatattcaaaggaaaaaggtagtgaggaaacagaagtagattttgaaataaaagtaatccccaatgaaagcaagatggtgaaatttgggtcgcaggataatgatggaaattatcttattccattttcttatttttctttacctctaaattataacggtcagcctagaactaaagaaaatgctaattatctaaatcaagtaaatgttaaaaatagtttttgtaatgtctttattgataatggcatcgagtatgttatcccatgtctagaaatttttaccgctttgtatgctccaatgagaaaagagctaaggcgtatgatcctgacacatacgaaagagcaaattatttcaaagtatgtagatagagatagtgaagattttaaaataggttctgatagtcaaataacgttgagactaaaagaaaatttgggggatagtagtgcaatatttcttgcacatttactattgtctgatcatacaaacaaagtatttgatgaatttaaaaacagtataacttcgaatgaaaatgatcatcttaacttaagacttgaaagctattttacaggtgagacaagtattgctggaagaggtatttggttaaatgaagaaaaaactagattattagtacttcgtatagagtcatttcaacttccatctgatattcaagtaaatattattgaaaaaaggaaactgaaaaagccaaaagacaaaggatcatcaaatggtagtaatcagggtgaagaagaaatagaggttgaaagaacgattgttaaaaaaaagaaaatcaatcttaccaataaacgtccaaatggtcagggtaatagaaaaaactatgtgctttcagaagttcagacttctgcattagatggaacattaataagaactgttgagatggaatacactgaaacagatgaagatggaaatgacaatgaatctacatatggtaaagaaaaaattacgattgaagatcctgataaagaagaactaataaatgtttcatcaggagaaaaatatacccatcaaggcgataaagtgtggtcaaatgaaattaaacagtccaatattttgaaagaccctcaaagagttcctattgacgtttttaatgcgataattgaattaaatcaagaaaaggattctttttttctaaaaatagctaacaaagatggaattgtttcaggtttaattgatgactttaaaattagttattctgattatcaaggtattgatgaaaatacttgggttctaaagaataatgaataccgagaaataatacttcttcaattgtattttttatataaaaagtttgaaaattttgattcaaatatgaattattatttagttgaaatattaagacgtgaaaattctttagatagtaatactggctatctaataaaactaccttataaattaagacgtaatcatcttcgagagctattaacagatttggctgatacacaaggtcggttagatgagaaaaaagatggttctctcaagtcttttaaacattcgaaaggtggtcttacttggagtgcgaaaatgaagaaaacaattcttgaaaagtttcaaatcaagttgctagatgattag

SEQ ID NO: 59169 - DNA, 2088 bp, Acinetobacter baumannii
gtgctattgactggatttcaagttgaaaattttagatcaattgataaaagtgaatggatagatgtagaagacgtcactgctttaattggtactaatgaatcaggaaaaactaatttactatgtgctttgtggaaacttaatcctgcgagtaaagatggagacattaatcttttaactgatgccccacgtaaattatatagtcagctgagggctagtgataaggatacagtatttatccgtactgaatttttattgaatgaagaagagtctgaacatgtttctaatttaagaaaaagaccaccaactgagataaaaaaagtttctatttcaagaaaatatgatggtggatactatgttagttttcctgatgaaaaatctcctactttaaatgcagatatttttcaggaatttatagaagaaagaatcaaaaatatacaagaactacaattgttaaagagtgaaaatgaagagaagcgggataatttctctgatgtttttaatcagcttaaagacttatttgaaagttcagtaattaataaggtacttattgataacgccagtttaattttatcaaatttacgtgatgagaaagaaccaaaaacaagtgagttaactaaaactttaaatgaaacagaaagctttttaaaagatcattcaactgaaattgatagacctagtgatgatgaattagctaattctagactctatatcattaataatcttcccacttttgtgtattactcaaattatgggaatttggattctgaaatttatttacctcatgttattgaaaatatgagtcgaacagatttgggggcaaaagagtctgccaaagtaaaaacattaaaagttctctttgattatgtgaaactcgaacctcaagatattctggatttaggacgttcagattcagatgatgaattgtcagatgaggaaattgaattaaaatccaaagagaaaaaagaacgtagtatccttctccaatcggcatctactgagttaactgcaaagtttagagattggtggaaacaaggtgaatatagatttagatttgaagccgatggaaatcattttagaatttgggtgtctgatgataaaagacctgaggatattgagctagaaggacgtagtacaggtttacaatggtttctgagcttttatttgacatttttagtagaaagtaaagattcccataaggattctatcttgctattagatgaaccaggtttatctttgcatccattagctcaaaaagatttatcattattttttagaaatttatctaaaacaaatttgatactctatacaactcattcaccttttttagtagactctaatcacttagatcgggtgaaagctgtatttattcaagatgatggaactacaaatgtatcatctaatttaagagcaaatgagtctaatccatcacagacaaaatcaatttatcctgtacacgctgcattaggtcttagtgtctctgagatgctatttaacaactgtacacctgttttggtagaaggaccttctgatcaaatatatctatcagcaataaaaaccttattaattgcatttggtgaattaacacctaagaaagatattatttttgttcctgctggtggtactagaggggtaaaaccaatagttagcttattaactggtaagaatgaggaactacctaaaattcttcttgactcagatagtcagggagatcagatggtacaagctttgagaaaagacctttacaaagataatcctgattacgtactagaagtctcaaaaattgtagatatagagcaagcagaaatagaggacttaattcctgtagatgtaataataaaaatggcaaggtatcaacttcgttcaaataatcctgatgtcgagtttgaagatgtatatgaagaaggtaaaccagtcttgaagcagttagagaagtttgctcaggataatgatattttcttggaaaaaggatggaaagtggactttgcaagattgataaagaataacttgttgaaaattaaaaaagaaaatttgaaagaaatatacatcaataaatggaaaaacttattttttcatatttctaatgattaa

SEQ ID NO: 59170 - DNA, 579 bp, Acinetobacter baumannii
gtgctgagctcctcgttctgcttggcatcgcgcttgtcggtctcggccagcttttcagcttttgcgatcgcggcttcggcccgtagcacgggcagaggaaaggcgaccgaggtcaccaccagggtgttcagtgctcgggcgagttccgctttggcgttgtcgatcttgccgctgtcgatgagcccggctcagcgcatcgacgaactgcgccccgatgccttggccgtcgaagatgtacgaagccagcgcgacgctgttccgcgcctattcgatggcagcgagcatggccgggtaggcctgctcgccatcgacgagcggctcgatgcggttgccgcgggtcagcgactggccggtggcgcgtcccaccaggtgggccagaccggcaagtggcggcgatacagcctcgggcatcgtgggcgagagatcctgccgaatagcaggatctgcccccgggaagagccgccgcgcccgccgctggtaacggttgatgccgaacagcacatacagcagcgaaccggccagcggcaacaaggcgatcagagtacccacagcgtggccgatcgagggtcacgcttgtag

SEQ ID NO: 59171 - DNA, 693 bp, Acinetobacter baumannii
ttgaaaactgcttgttttgttgatgggtataatttttattacggcttattaaataatacttcttataagtggctggatttacgaaaattaattgaacatattttatatattcaagatcagtcattttcactagttgaaacaacttacttcacatcaccaatcaaacctgatttggctcgtagaggtattgattctgatatagcccaaaaaacatatatccgagctcttaaaaatgcaaacattgaagttgttatgggccgacataaattagaaaaagctagggctcccgtctatgttgaagatcagaaagctgatcgaaataactcttgtgatatttggttactcgaagaaaaagaaactgacgtaaatattgcattatttatgtatagaacagccctattagaatctcaaaaatcactcgatgacccatcgaagatagaacagatccttttagtatcaggcgatacggatatgacacctgctctaagattaattcgtcaagattttccatctatgaaaattggtttaatttttcctcaaagagaaaatttaaaaaggactcctcccggatctctaatagaattagctgattggtcaagaaaagttgtaaaagaagatgaacttagacagagtcagtttccagaccggataccaactaggaagaagccaattttgaaaccaacttattggtga

SEQ ID NO: 59172 - DNA, 363 bp, Acinetobacter baumannii
atgaaatctaaaattttacttgcaatttttattgcatttagctcaatctctgcctattcaatgtcaccaaaagaattttcaaatacttttgatgagaaagtaaattctttagattatatggttgaacgtatagtagatatgagcaatagatacgactctatggattcggaacaaattcaaatttttaacttttctatatgcagtacatataaaaataatgttgaaattatgaatcttctacatagaaatcctgagtatgctcaatacatatcggataaaaaagtagaagaactaattgcaagtcgggatttcttagaaaagttaaaagatttagttaaccgaacagaaactccttgtagttaa

SEQ ID NO: 59173 - DNA, 687 bp, Acinetobacter baumannii
atgaatagattctacatttttttaagtacatttctgttttcaaattcgatatttgctctagataaactacctatgagtcacacaggtctagaaaaattaaaaatgcaagaaattgggtatgcaattaaaaattttttacctagctcaaatgtatctcgaattgattgggactataaatcaaatgatcaatcaataatttggcttcataagccttatttggaacaaagattaaatgatggatcttttgaaactgtccggaaaggtgtttttcgatcaaatgttttaggagtacagactacgtatctacaggatagaaaatatgaattaccttggtctgttatttataaaggtggtatggctaaatttggggtaacagaaattcaatttcatcctaatttaccagatattgatattattgattcatctcagtgttttggtaatgaatatcaaaattgtgacttcaatccaatacaatctctcaagcgtgttggtataaatagtaaaatggtttgccaagatagcatcggtagtggatcaaattttcaaaaagtatacttattaacagcaagtaataaaaagcccacttatgctatttactcaatgagtactggttctggagggtcatctactgattttactcttatactgcaagccacgaaaaatactgtatgtaacttagtaaaataa

SEQ ID NO: 59174 - DNA, 558 bp, Acinetobacter baumannii
atgaatacagctacaaaatacagtgttagtgatgctgcaaccctgtataaaaaatctagagctacgctatataaagatataaaaaacggtgtgttaagccgtgaccacgatggttttatagatttttcagaacttcttcgtgtctatggagaaccttttggagtaaaacaagtaaaacgtatcgatacgtctccaatacaaaatcaaaatacatctgaatacactgataaaacagttgtagaactcaaaaaccaaattgattttctaaaaaaacagttagaaaaagccgaagatcgtgaagccaaggcaaatgctcgtatagatacactgctgacactcattgaaatgaagcccccacaatccaatatgactacgtttaccgatcagaaatctgctccagatatagcaacagatcctcggtcagaacccgagccgaaagatgacggattgactactccagtcgaaacagaaaataagcgtattccagtgccagagcacgtagaaccagagcagccgaaaagaggctttctcagtcgctttttcttaccgaatgggtga

SEQ ID NO: 59175 - DNA, 627 bp, Acinetobacter baumannii
gtgtctctaagttatttaatccatgaggaagattttattgcacaacgctatgatcagccatttaatccattaattgatagatgctccaaaatacaaatatttgcaaaagaagaagatcttgattttgaaactcggctttggatcagagataagaaaaaatcttttgagagtttgaaggagcaaaccgaactagacttaattcagcataatgagttattaaatacttttattttttatgaaccgacaagaattatcgtgaattcaaaatttttagataagagaattggacagcagtcacctgaaccgaaaaaattacaaattacttttcaagatgagtttcaacaattcaacaatgctagatatttgttaactgcttttaaagatggaggaattcttgaatccaaagatggaaacattcaagaaattgttcaaatgaatctgaatgaaagcccagatgagctagaaatacaaatttatgatcatgaaaatcaaatgatttacgatcaaagatatttttacttaaaaaagattaatatcggagccacatataagcatgggtcggtaaagttagatgatggaagtactgttgaaaagtacattagacaacagttttcagtaggtgagtaa

SEQ ID NO: 59176 - DNA, 570 bp, Acinetobacter baumannii
atgtcttatttaaaagaacgatcgaaaaaaattaatgcgcaaattgtacagcacaaaaattgttttattccacaaattgaagcgattgaaacgaccgcttttaattatgttgtaaaacactttcagagctacttaatgtctaattatgaaatcaataaaatcatagtaattgatccttatatgaccgttgctgatttgcagaggctaactttactttttggtgggaattccaaaaatatattagaagtggtaactaaatttgaggcatatcgaagagaagaggttgacaaagaacagactatccaagagattgttaaaggaaaaaataaacttgtatcgaatggagtattcaagaatataaatatctatcattcacagtgttctatgcatgatcgatattttatttttggtcataatgagcgaataatctctattttcacaattggtggatcaattaatcaaaattttgaaaattatatcaatatacaggtggtttctgatatgtaccttttggattctataaaccattatcataatctattaaaagaaaatttaaaggctgaatattaa

SEQ ID NO: 59177 - DNA, 843 bp, Acinetobacter baumannii
atgagttcgactgtatttaatgcatttattgttcctagaaaggaaggtgaaacagagctttcatggttgttaaatactagaaagtatttaagatcttttgaaataatagaaatgtataaagaaattttaaaaagagaagaggtagaaaaagtttcagttgacgattgggtgaaagcaaaaaatatcaatgttaatagagatgtaattttatcactttttacttcagctccagattatgctccttctgatattgttacttatttagctaatgacgcaactaaagatctaggcttagccttagcaatacagttcgaagattttgaaaaattttatagatcaaatgttgaaatacctgacttaattctttatctagaaaataatattttaaatgaacatgatattaatctaataaaagataacaaagatattatagagaatgtgtttgatagaattattgataaagagaaagttatgtatcataatcttctcaacaattttttaaatattatccaaaatagtgtattgcaaaacttatctagtatttttagtaagaaaaaaataagtgcatatatagcacatgctaatttttatgatcatgatgcacttttagagtatattttaacaaactatcctgatagtcatccaaatttctctaaacttcctttcatgttttgggattcctttacgagatcacggtatttttcaagatggttaaaaacaagatctataatgtctgagatttctagatattatcttgagttggatattgaaaatgatattgttgaaattaataaaaattatatgagaggattcttagagtttaatgattctcttgaaaggtaa

SEQ ID NO: 59178 - DNA, 954 bp, Acinetobacter baumannii
atgatgaagaacaatgagcacctttctcattttaaaacaagcagaataaaattggatgaaccattttcctatagatttttgtataaagatagggaatacataattgactttcatgatcctagagttgaattcggattaggttattgtgtaaaaagtatagatgaaaaacctgttgaatttctgttgttgcaatggcttacagtatattttggagagagtgctacagcttcatatgctactcgaaataatacacactattatgaacgagggtatcaaacattcgattttaggcattttaaaaaatttattaaaaaagtatctacatttccatttgtttcatatgcaaattggcgaaatgaactaattagaaagtcgttagcggtgtattgtatgggagtagaactatcgattaatgcaatgcctattacagtaggtcaatttgctctttcaattgaaggtatttcaaatgcttatttaaatcatcgctcaaaatataaaacattaggagaaaagccatataaaaaacttttaaatatgcgtttactaaggcaaaaaagaagtaaaaaatatggagattatgctaaatacttttctaaatacattgatcaagaaatcgatgtaattactgaaataagaaataaatattgtggtcatagtcttgttcattctaaaaaagagcgaaatcaatttattgctgtaatgaatgcttgggcggtaaaacatggctgggatagcaaaaaatcacggagaaaatcatatagaactagtatcatggaacagaccatgcaaattcatagcaatagtttatttaaactttcaatgaatacaaatcggttattatttttttattatttaaatttaagtcctactatctttactgaatatgatttcactttatttggatttactggctataaagaattagtgattgaacatccgcctaggatatcttaa

SEQ ID NO: 59179 - DNA, 312 bp, Acinetobacter baumannii
atgaatacaagatctttgaaactctcctttattgcattgctgtgcattgcgcttgcaggctgcttgagttttggtcctttgaaatatcgtcaagtaaaaatgctaaaaaaagagggttttgtacttactaatgaaggttggactctaggtttaccagaacgcttattatttgattttaatgacgcaacattaaaacaaagtcatgaggcagagctcacacgtttagcaaatcaattgaataaatatgatttgaataaattaaaaattgttggtcacactgacgatgtagggactgttctaaattttgtgtaa

SEQ ID NO: 59180 - DNA, 384 bp, Acinetobacter baumannii
atgtcattaaatcaagtgagtaaagctgagcttcaattttatgaggcgtttattcgtctaaaagaaaataaacctattgttctgccgaagggaactagtgtttctcaaaacaatgtagcgaaagaagctggtgtggatccctctgctttgagaaaaagtcgctatcctaaacttattcaggaaattcaatcgtggatagaacaaaatgatcaaaagctaaaattaaaaaatcaagtgtcaaacagagcaacatctaaagttattgagttgcaaaaaagaattgaggttcttacagagcaaagagaccaagctgtatctaaacttttggcagcacaaataaaaataatagagctaaataataaaattgaacggttaacggaataa

SEQ ID NO: 59181 - DNA, 1584 bp, Acinetobacter baumannii
atgtgtataagagacaggaataaaaatgattggattttagagaaaatagctagtcaatatggtaagcatggtggaaggcttatttttatattgaagagtttatttgcaaaccataaagaaattggttttaaaatattagatagtgggcttataaatagaatctcaaattatctaattaaagataagactactcaaactccatatattccacctaggatttgggtttaccagaataaaaggttagaagagtgcttaactgatttcctcgaaaatcaagaaaaaattatatatttattcaattatatgttggatgtatataaatcaaataataatagaaaatataaaagagaggtttttttaagtttaatcacagagttgggtttaactgataatcttaataaatggattgtttttgatgaaaatggtatttcgattcgtaacttttcaagttatttaagcttaattagtttcgctgcaattgcttatattattaatttttctcttatgcggattgatgaagcatccaaattgcgatatggatgttttgtgtcaaaagtcattaataatgaaaaacattattttattcagggagaaacaagtaagacagttaaatccaaagaagctttttggatagttccccatattgctaaaaaggcagttgatgctatatctattatcagtcaattaagatttggtattctgcataaaaacgggtttatagaagaatgtatagatgattttaaaccacatttatatttaagctcttttgagccatggactacacgagcttttaattttgaaagaatttttttaataccaataatgcgaaaatacaatgaagcattgaccatgtggccaaaactttttaatttagaacaacttactattcaaaatactgatttgaaaatagcaaaacaaatgacatttggtttagatgaagaaaaatttaaagttggttgtatttggccacttgcatggcatcagttgcgtagaactggtgcagttaacatgatagcttcaggttttgttgaggatgcgagcttacagtatcagttgaagcatagtaataaatttatgagtctttactatgcaaataatgcttataagttgaattttaacttaaatgaacaaattggcgaattatatcttcaagaaagatttcataattatattgaaaaataccagaatcttgaagccagtgaatttgtatctcctcatggtatcaaacgaaaaatacaagtaatttcaacagttaagctgaaagatcatgcaacattattaagtctttctaagtctcaaaagctgaattatagggagacttttttgggtgcttgtactaaaagtggtgatccatgtccttatggaggtataactaatataactatgtgtatgggaactaatgatggtttagcttgtgattcagttatgttagataaaaataaattaaatcttatgtatgaattggaagatttttatcaaaagaaaatggataattatccatacgattcaattcctgctaaatctacccttaagcagctaatatctattaggaaagcaattgatgtcattaaatcaagtgagtaa

SEQ ID NO: 59182 - DNA, 435 bp, Acinetobacter baumannii
ttggttaatgtggttgttacagttactgctggtgcaaccgcatctactgtgccagttgatggtgctgacgggttacccgctgggtcagttgcaacaactgtaactttgtctccatctttaagatcacctgggtttggtactgtccacttaccatccgggcctgcaactacagtcgctgtcgtaccatccgggaaagtgaccttaactgttgaaccagcttctgctgtacctgttacaggattagttgcattgattggatcaattactggtgcatttggcgcagtggtatctacagttaccacagcattagttgtacctacattacctgccgggtcagttgctgtcacagtcacggtatgcggaccgtctgtcaacactggaagtgtattgtctgcaagggtccaggtgccatcaccattattggttgccgggtag

SEQ ID NO: 59183 - DNA, 300 bp, Acinetobacter baumannii
ttggttaatgtggttgttacagttactgctggtgcaaccgcatctactgtgccagttgatggtgctgacgggttacccgctgggtcagttgcaacaactgtaactttgtctccatctttaagatcacctgggtttggtactgtccacttaccatccgggcctgcaactacagtcgctgtcgtaccatccgggaaagtgaccttaactgttgaaccagcttctgctgtacctgttacaggattagttgcattgattggatcaattaccggtgcacttggcgcagtggtatctactgtataa

SEQ ID NO: 59184 - DNA, 531 bp, Acinetobacter baumannii
atgaaaaagacttttttttatttatcggcaattgctgtaggattattttcttttaatgcagcaaacgccgctacagcaacggggacattaactgttaaggcgacagtaacaaatagttgtgttctgaatacatctgcaacaggtacaaccacaaatgctgttttggactttggtactttaagctctctcgcaactaacgaagatgctgataccaccacgaccggaggtacctcaattaaagtcctttgtaacaatactgtaccatggactctagctttcgatggcggcaaaaatgctcaaacgacccaacgtcgtatgattggtggtgcaacaagtaatgaatatatcccttataacttatattcagatacaggacgtgctactgcaattggaattgctacaaccgcttatagtggtacagggagtggtgcggtacaaacagtaaacgtatatggtcgtattcctgctggctcagcgttgccaagtgcgggtagctatgttgatacggtgacaataacggtaacttattaa

SEQ ID NO: 59185 - DNA, 429 bp, Acinetobacter baumannii; identical to SEQ ID NO: 54115

SEQ ID NO: 59186 - DNA, 531 bp, Acinetobacter baumannii; identical to SEQ ID NO: 54270

SEQ ID NO: 59187 - DNA, 513 bp, Acinetobacter baumannii
atgaatagtgttcatgaaattatagaaaaaattcataatgaatgggagattgagcctaagaaagctattcatagaggtatggaatgtccctttcctttacattgttcattgaatctaaaaagcaaaatttacccacaaataccccaagtacttttaccaaaagcattaaaggatttttatacagtctctaatggtgcagatctatttaaagatcaagaatacggacaatggggcttaaaattatattctattgaggaggtaacttttgcttcaaaaatttataaaagtaatcgaaagaatgatgctcttcaaagtgacttaattattggagaattttatggagattcagacttattgttagttcgatgtgatcctaatagtgatgattacggctctattttggttgtcttacctgtagatcaacgacaagattggtatattattgccaatacttttgaagagttcattaacaaattttatgaatctcagggtgataaattctgggaacattaa

SEQ ID NO: 59188 - DNA, 519 bp, Acinetobacter baumannii
atggaaacatttgcagaacctgttttttctaatgatttattaaggaaagctgaaagtggagatactgttgcccagttagaattagctgagatttatttatatggtaatggtattgattcagatgaaaatcaagctgaactgtgggctattaaatcagctgaaaatggaaatgtagcagcaatgttttggttagctgatggatatgttacttatgctaaattaatggaagaagatgacaagaacgattcgttagaacattttcaaaaagcttttaagtggtttcaaaaagccgcagaaaatggtcattctgaatcaatggttgagttagctgaactatatactcgtgcagatagcggaatagaaattaatattaataaagctttagaacttcgtgaaaaggctgcaaagttaggtagtaagcaagcaatgcgaagtctttccattatgtatcgtgatggtatcggtgtccctaagaatcctgatttagctcaaagttggtgggataattctgaaaattag

SEQ ID NO: 59189 - DNA, 1284 bp, Acinetobacter baumannii
atgaaatttaaaaatctgaaagtaagagatatatgtgattttattggggggagtcaacctccaaaatctgaattttcaaatgaattattgccagattatattagattaattcagacacgggactataaaacaagtgagtatgtaacatatattcctaaaatttttgcaagaaaagtatgtgacgaaaacgatattatgattggtcgttatggtccaccaatttttcaaatatgtagagggttaaaaggagcatataatgtagctctaatgaaggctgttcctaaagatgggattgaccgtgaatttctttattattttttaaaacaaaaaacagtatttgaatatgttgataaattgtctgctagaactggtggacaaactggtgttgacctagtttctttaaataaatatcctgtacgtcttcctgagcagatatctgatcaaaaaaagatagtagaacccctagtattaatagataaaaaaattctaattaatcagcaattacatgcagaaattgagaaaaatataaagcttatatatgactattggtttctacaatatgaatttccgaaccagtctaatcacccttataaattatcagggggagatatggtctataatgagatattcaatagagaaattccatcagattggcgtataggaactcttaatgaacttggagaaatagtaggtggtagtactccgagtactgatgatccagacaatttcagtgaagatggttttccttggataagtccagtggacctatctaaaaacagtggaaaaaaatatgtctctagaggtgaacagagtgtttcagataaggggttaatatcagcctccttaaaaaaatatcctgctggtacagtattgctaagttcacgtgcaccaataggttatatggcaatagcacaaaattctttgacaacgaatcaaggttttaaatcttttataccttcgaaaaaatattcaactgaatttatttattatacgattctcagttgtatgaaaagaattattcagtattcttctggatcaacttttaaagaagtttcaggtagcgttttgaaatctatacctgtaattttacctccttatgaggttgttgatttatttacatcaaagattaagccattctttgacaaacaaaagcaacttgaaaatgagattaatgaattagagaattttagagattggttgctccctatgttgataaatggccaaatttctattaaagacgctgaagaaaaaattcaagaaaatcttcagtttaatttaatttga

SEQ ID NO: 59190 - DNA, 756 bp, Acinetobacter baumannii
atgaaaaaatatttaatcagtattgaatctacgaatagtgagcgcttaaaaaagttgttttctcaagcaacattttataaatatcgcgatgaatttaagcaatttggggttatagggaaaaatttaagtgttagtgagtattttgagcagggtgtagcgggcaagaagaaaccaatgacgcctggtgaactaggctgtgccatgtctcacattgctgcattaaaagattttttaagctctgatgaagaatatgccatcatttttgaagatgatgtaatcgaacgatttgaaattgatttccaagatttagaaaaacacatcctttctttgaatttaggtccttgctttttcttaagcttgggtggtattcaaatgaaaatttgcaaccgagttcgcggaaaacttttacctgaagaattatataaccagaaaattttgaaagttgattacgactatcttgaaaaacttgcctacgcttatgcctatgtggtagatcgtaaaatggcacagatgttggtcgattatcatcaaccgataaaaatttatgaccactggcaagacctcgttgggcgtggtgaatttagtttttatgtcagtttcttattcgatcatcccattattgagaacaatgatgctttaagctatttggaaaaagaaagaagtttgatcggttcgcattctcaagacgagagtgattttttgcgatacctcagagttaaattaaagaaatatatacttaataaatatataatttag

SEQ ID NO: 59191 - DNA, 243 bp, Acinetobacter baumannii
gtgactgggggcacagctggcagcaaccctatcggtgtcgtaacagatatcgtaggtagcttaactggtggcgtaactggtacaggtggcacagatgttatttctaacttattaggtggagtaactggtaacttaggcggagtaacttctacagtatctaacgcaacagacacggttcatactttagtacctcagtcactacttactgaccacttcttaaatatctctgtacatactgtttaa

SEQ ID NO: 59192 - DNA, 435 bp, Acinetobacter baumannii
ttgccgcaattttccggttcggcggcactgccttcaacactggacttatatgttaaccagcaaaagatttattcaggacttgttccgtcaggcccatttgacattaagcagctgccgtttatttcaggaaatgaagtcacactggtgacgactgatgccacaggtcagcaaatcattactaaaaaaccttactacttttcatcgaagattctggcaaaaggcataaatgagttttcagtagatgttggggttccacgctataactatgggctgtactcaaacgattatgatgatgccacctttgcctctggtgcaattcgttatggttatagcaattcactaaccttaagtgggggtgtggaagcctcaacagatggtctttccaacgtaggagcctgtaaattattttgtgtaagttccattttttataaatga

SEQ ID NO: 59193 - DNA, 927 bp, Acinetobacter baumannii
gtgagtgtgaacaatgggccgctaaaaaaattattagaattacaatctgaacaggctaatcctgagtctgaaaaaatccatatctccttctatgccctttttgaacagtactatcaagaagaaggcagaaaaatgaagagtgcccgcttaattgttcaaatacttaaatgcctaaagaaaaattgggggaaactagcagatgaatcaattcacgatctgacaccagcattagttaaacaatggcgtgacaaacgtttaaagcaagttaaaggtgcaacagtcattcgcgaaatggctatgtatagctctgtttttgactttgctcggaaagagctatttttaacgaaagaaaatccattcaaagaaatatcaaaacctactgcccctcctccacgtaaccagaggatttatcagaactatatagataaagttttagctgggcttgattatgaatggggaaaagtgcctgttcagccaagacaccgagttgcttggtcctttctattcgcacttgaaactgcaatacgcaaaggtgagatacttagtgtagaaaaatctttaatctttccagatttcattcgactattagacacgaaaaatggtactacccgtgatgttcctttaactaccaaagcaaaagaattactttcttggctaccagatgatcctgacgataaccgtatggttcctcttacatcgaatgcatttagattaatatggcaacgtaacttacgccgagttggcttagatggtgttattacgttccatgatacacgccatgaagctattacccgttttgttcatgactaccgtttaccagtagagatcttagccaagattactggccataaaacgattagtgttttagtgaatacttattacaatccgacagcttccgaaattgccaagatgttgacagctgcttag

SEQ ID NO: 59194 - DNA, 708 bp, Acinetobacter baumannii; identical to SEQ ID NO: 46630

SEQ ID NO: 59195 - DNA, 972 bp, Acinetobacter baumannii
atggagaaaccagcaacaattgtaggttttaaaattggccacgccttgattgatgaacttgatgttatggccaaggtcaaagctcaacaggcttggcgtaagatcatcgcacgtatgcgttataagcaagctggtttgctcaacggtattgatgtggccactacacctgaaggttttaagtttacatacgagcaatttgttaaagaggcaaataaatcagaggctaagcgtaagctatatggaatgattcaagcttcaacttatgacaatgaagctaatcttccagatgactacatatcatcactttatgagtcttatccgccgcaattaatttcagcttatttaagagggcagtttgtcaatttaaccagtggtgctgtttaccccgactttgatcgagttctaaaccacacggatgaagaaattaagaaaggtgagcctttactcattggtatggattttaacgtgcttaaaatggctgctgtggtttatgtcattagagaagggaagccaagagctttagatgaactggttggcgtgagagatacaccgacgatgtgtcaactgattaatgagcgctttccagatcacgatattactgtgattccagatgcttcaggtcaggcaacatcatcaaagaacttcagtgaatctgatcatgcaatcttaaagaaaaatggattcaaagttgaagttaatggtgtgaatcccggtattaaagatcgtatcactgcagttaatgcacaaattctgaatgctgagggtgaacgacacttaaaagtgaacacaaacaagtgtcctaactttacggctactttagaacagcaagtctatgatgattttggaatgccagataaaagcgctggtttggaccacgttggggacgctggtggatatccaatagctaagagattcccagtcatcattcagaaaatatttaaacggcgcgcaatcgctggtttttctcgttaa

SEQ ID NO: 59196 - DNA, 273 bp, Acinetobacter baumannii
gtggcagttgatgaaaacggggatgtggtcattggtaaagatggtcagacaccgatgactccaaaagaatgggttgaatctctacgcgagcaaaaaccgtattactggcctaagcctaatggcatgggcgcaactggtagcaacaattcaaaaggtcagccagacattctcaaatcggatggctcggtaaatatgaccaaattggcgcaattacgaaatgaaaacccgcaactagctaaagagctagcggcaaaacacggtattaaactttaa

SEQ ID NO: 59197 - DNA, 357 bp, Acinetobacter baumannii; identical to SEQ ID NO: 52973

SEQ ID NO: 59198 - DNA, 369 bp, Acinetobacter baumannii; identical to SEQ ID NO: 46793

SEQ ID NO: 59199 - DNA, 1347 bp, Acinetobacter baumannii
atggcagttactgataaacatccgcagtatattgctgcgcaaaaatgcttgttgattatgcgtgatgccgtagctggcgaagagcagattaaacaggcacagaccaaatacctttctaaatcggcagggatgatcgaggcagaaaagcagggtgataagactggagagatttataaggcctatctaagtcgagctcagtatccgctatgggttcaggacgcattacgcacaatgatcgggttagtttcaaagcttgagccgaatattgtgattgaaagttctctacttaaaggattgatagagaatgcaacaaatgacggttttgggcttaaacagctctttattcgcatttgttcagagttgctagagtttgggcgctgtgggctgcttgtcgatgttgatgctaacggagtgccatatttcgccttatatgatgcgttatctattatcaactggaaggaaaacagtatcggtggtcgaaaggatttaaaactgttagtgctcgaggagcaatttgataatagtgaagatgaattcgggcacgaaactaaaacggttcaccgcgttctatctatggatgatggagcattagcggtccgattgttcgatggttcaaatgtggaggataaaactcccgatctcggcggtaatcaactttctttcacaccatttgttttctgcggtgccactagtaattctccggatgtaggtaccataccgcttttgacaatggccaaggctgctctgaagtattaccagctcagtgcagattattaccagtcacttcaccatacagcccatccgcaaccttggattagtggccttgatgatgacgatgatgatgatattagcgttactggtgttatggctgtctggagtcttcctcaaaattcacaatgtggttatttagaaatttcaggtaacggcattgaactcactaaaaaggaaatggatgcgcaaaaaaattcagcattagaagctggggctaaagtagttgataccaatacacaggaatcaggtgaagcgcgccgtgcacggcaagacgatcagcaagcaagtcttcacagtatcgtgatgtgtgcagctgcagcaattgaacaagccattaagtatgcagcgcagtggttaaagcttgattcgacaaaatattcatttacggttgaacctgagtttattgtgcaggtcacggatattaatcttgcaaaacagctttatgagggtgctatttcagggaaaaactctttccgcacatattgggaatacctgatgacaggtaaattaccagctcacgactatcaggaagaagtgaagcgggtagaaatagagcgagataacactcctttgtag

SEQ ID NO: 59200 - DNA, 351 bp, Acinetobacter baumannii
atgagcaattttgtttttaagcgtggtgacacattcaacttaaatttgcagctcgttgatatggatgacgcgctgcaatatccagccaatgatgtgcgtcgagcgattgatttaacgggatatacctttacttctcaagttaaaactttggatggaaccgccgttgcaactttcacttgtacagctttaaatcagagtactcaaaaggggtggctaaatgttaagtctggagcaagtactgcagcgtggcctttgggtctgtgtcagatggatatcaaagctgtggtgagcggtactactcagcatacagaaactttgacttttcaggtaattgacggggtgactgcataa

SEQ ID NO: 59201 - DNA, 543 bp, Acinetobacter baumannii
ttggttactgttgagacttctggcgaacttcgctccaaggggttcactgttgattcgaacggggtttacaaggcagcttcaccgattgcaagactatttgctgattcacttgaactcaatgaagatgcctcaaaacagccgattaactttgaaaagttaggtacaggtgactacctgataaaaggttctctcggatttgctaaagagggctggtacattgaaatgcctaaagatgcaaacggtaatgttcttgttgctgtgtcttatgagcagcatgaagatggggatattgcagtaaaaacctacaagaaaaaatttgatatcgaaacagcctcaattattcctgatttcgataatcctgtagatattccagaaactcgctggattgatattcgattgcatgaagaacccgaaccagagcctgaagaaccgttgagtgaaacaccattggagttccagcctactaacttatctcaggcagtagctgcagccttgaatggtgtggaaccgccagtgatctccgacacagatgcaacacattaa

SEQ ID NO: 59202 - DNA, 543 bp, Acinetobacter baumannii
ttggttactgttgagacttctggcgaacttcgctccaaggggttcactgttgattcgaacggggtttacaaggcagcttcaccgattgcaagactatttgctgattcacttgaactcaatgaagatgcctcaaaacagccgattaactttgaaaagttaggtacaggtgactacctgattaaaggttctctgggatttgctaaagagggctggtacattgaaatgcctaaagatgcaaacggtaatgttcttgttgctgtgtcttatgagcagcatgaagatggggatattgcagtaaaaacctacaagaaaaaatttgatatcgaaacagcctcaattattcctgatttcgataatcctgtagatattccagaaactcgctggattgatattcgattgcatgaagaacccgaaccagagcctgaagaaccgttgagtgaaacaccattggagttccagcctactaacttatctcaggcagtagctgcagccatgattggtgtggaaccgccagaaatctccgacacagatgcaatatcttaa

SEQ ID NO: 59203 - DNA, 657 bp, Acinetobacter baumannii
ttggctaaagcattatctggtgacgatccacttggtgcggttggtgatctggtggcagattactggtcgcgtgagtttcaaggttttaccgtaaataccctcaaaggtgtattcggggcggccagcatggcaggtaatacccatgatatttcggcaggaactggagctgcagctgtaattgatggcgtatcttttgttgatgcttcttataagttgggtgatgccgtagataaattaacggctattgcaatgcactcggcaaccatggctgctttagctaagcaaggcttaattgaaactgttcgagatgctgatggtgtggttctctacaaaacctttatggaccgtcgtgtgatcgttgatgatggtatgccagtggagggtgatgtctttacttcattcctgtttggtcaaggagcaattggtttccaagatattggtgcaccggttggtgtagaaacagaccgtgatagtcttgctggtactgacattcttattaaccgccgtcactttgtgctacatcctcgtggcattaaatgggcaggtgatacaggtattgcacctaataatgccggtcttgctacagccggtaactgggaacgtgtctacgatcctaaacagatccgtattgtggcattcaagcacaagatcaaataa

SEQ ID NO: 59204 - DNA, 354 bp, Acinetobacter baumannii
ttgcagtctcttacgctttcaattaataacaatcttgaagcaatccgttgtatcggctcaggcaagtacacaccagagttctacattgaaaagatgatggatatcgaagcaaatgcttccttcatgttctcggcaactgcggcagggtggattgatgccattaaaacccgagatgtgtttacgctgacctttgatattaaagacagcaaaggcagtaaatactcgtttaacttccctcaattagaagtgatggaagccaatcacccagatggcgggggtgacgacatcattactttagatatcaactttgcccaagtccgtacagcaccaacgattgtacgtgctctcgtgtaa

SEQ ID NO: 59205 - DNA, 219 bp, Acinetobacter baumannii; identical to SEQ ID NO: 59014

SEQ ID NO: 59206 - DNA, 351 bp, Acinetobacter baumannii
atgagcaattttgtttttaagcgtggtgacacattcaacttaaatttgcagctcgttgatatggatgacgcgctgcaatatccagccaatgatgtgcgtcgagcgattgatttaacgggatatacctttacttctcaagttaaaactttggatggaaccgctgtagcaaccttgacttgtgcggcactaaaccagagcacacagaaagggtggctgaatattaaatctagtgcaagcactgcaacttggcccttaggtctgtgtcagatggatattaaggccgttgttagtggtactacacagcacactgaaactttgactttccaagtgattgacggggtaacagcataa

SEQ ID NO: 59207 - DNA, 516 bp, Acinetobacter baumannii; identical to SEQ ID NO: 44116

SEQ ID NO: 59208 - DNA, 219 bp, Acinetobacter baumannii
atgtaccctcaagctcatcgagtagttattaagtatagagaatggttaattaatacaatactagaaatattattaaacattaaaagcagtacttctattgaagaggcaagattatttatatatatcattgatagttctattattcagtcgcttataaatgatcagattgatcatagagaatatatatggaactatttctctagtaaaatttcattctaa

SEQ ID NO: 59209 - DNA, 162 bp, Acinetobacter baumannii
atgtctgcagagactgtgcctgtacctggcaatgatgtattgcctgcagggtcagttgctgttgcagttactgtatcaccatctaccaggttacctgggtttggtactgaccagctaccatctgtgcctgctaccacggttgcagttgtgccatcaggataa

SEQ ID NO: 59210 - DNA, 375 bp, Acinetobacter baumannii
atgatgcgtggtggtcaccttgatattgctgtgctcggtgcatttcaggtggcagccaatggtgacttagcgaactggcacacgggtgcacctgatgcgattcctgccgtaggtggtgcgatggatttagcggttggtgccaagaaagtatttatcactacagaccatgtgaccaaacaaggcgagccaaagattgtcgctgagctcacttatccggtaacgggtaaacactgtgttgaccgtatttacactgacctgtgtgtgattgatgtgaccaaagacggtttaaaggtgattgagaaagtggaaggtcttagctttgatgagttacaggctttaacaggtgcaactttgattgatgcgactcaagggtaa

SEQ ID NO: 59211 - DNA, 327 bp, Acinetobacter baumannii
gtgtctaaagcagcagaagaccaggtgaagcatattgttatggatactgtgcaatccttagttaatttaagtcctgttgatactggagcataccgtgcttcacatattgtttcggttggatctgctgatttcggcgtgcgtgaacctgaaacaaaccctattaacgacgcagcgattcaggcaatgaagattaagttaggtaatttggtttatatccagaacaataaagcttatggaccgcgcttagaaaacggctggtctgatcaagcaccacaaggtatttatggcctcacgtttaactttatttctcaaaagtacggtggctaa

SEQ ID NO: 59212 - DNA, 327 bp, Acinetobacter baumannii; identical to SEQ ID NO: 59211

SEQ ID NO: 59213 - DNA, 264 bp, Acinetobacter baumannii
atggttgtcaaagtaaccgatgctgaagctactgtgcctggtaaaggttatcgaacccaaaatgaccgttatggatcgccattgtccggtgatggtggaagctggggtcaactaggtaccgagtccaccaatgatggaacatggaactggcaataccatggcacaactgaaggccagccggggccgggtggacctgcaattgttggggtggcaccacttacaactcaattgatcaatggagggaaaattctacaaacactttaa

SEQ ID NO: 59214 - DNA, 132 bp, Acinetobacter baumannii; identical to SEQ ID NO: 53080

SEQ ID NO: 59215 - DNA, 882 bp, Acinetobacter baumannii
atgtcaattcataaagagctgcatattttaaaaacagatgaccatggcgagtttgctttatgggaagttgctaaaagcgagaataccctgataaaaaaagaagcaattttcttatctcatggtgctttttcagacaagactgtttgtatgggtattgcagattacttggcaaatcatggatatatctgttttattttagaatggcgagggcacggcacaagcccaaaaacagatattccatttaattttgaaactgttgcgttatatgaatataaaactgcatttcactatatttatcataattttaatatcgcctctttacactgtgtaacccatagtggcggaggtttatgcttaacaatgttcttgattaattatccagaatatttaaagaatatccaaagtattacttttatagcttgccaagcatttggagcagtaaataactcttttgactttattaaactcttttctgcaaaactcattgttaaaggtctaggccagataccagctaataaatttaaattaggacgagtaaatgaaagctactacaccatgcggccatggtttaactggaatttaaagcaaaattttattagtgaatttaaaaatattgattataaaaaacatatgagctctattagagtcccaatatattctattagcggaactggcgataaatttattgcaccagttaaaggatgttataaatatttaaaagcttttaaaaatcaagataacgtatttcgtgaatttggttgctctaataataacttggaaaattattcccatagccgaattgttttaagccaaaatgctgctaaggaagtctggcccactatattgcaatggatagataagaactcaaaagaagttctataa

SEQ ID NO: 59216 - DNA, 240 bp, Acinetobacter baumannii
atgactttaacggtaccgttaacagcaggaccttcttcatctgaagtaattaaaaaagcaattgaacctttatggtttgggtgttttgctacaaaacgttcagatgcaactaccattgcagctaatgcagttttcatatctgctgaaccacgaccatataatttgccatcgcgaatttctggtgcaaatgggtctgaattccaagcgtctaaacgtcctgttggtactacgtcggtatga

SEQ ID NO: 59217 - DNA, 516 bp, Acinetobacter baumannii; identical to SEQ ID NO: 44116

SEQ ID NO: 59218 - DNA, 561 bp, Acinetobacter baumannii
atgtcaaaaaaagaagatattataaatactgctttagaactttttaaccaaattggttacaatgctacaggggtagacaaaattattgctgaatcaaatgtagccaagatgactttctacaaatattttccctctaaagaaagtttaatcatggaatgcctacatcatcgaaatattaatatacaaaattcaatttatgaaaaattaagcttacatccagatgtgagtccaattgagaaaatacatctaatttttaattggtatattgactggattaatagtaagaattttaatggttgcctattcaaaaaggcttttattgaagtgtctaaacaatacacctcaattcgtgaaccatttcaagaacatacaaactggcttataaatttattaaatagtttattagtagagctagatattaaagaccctactccacttactcatatcatcatttcaattattgatggtattattattgatgggacaattgataaagatctgattgatccttctaagaaatggcaatatattgagtatttaattaaaactgaaaatctctaa

SEQ ID NO: 59219 - DNA, 4065 bp, Acinetobacter baumannii
gtgactggtcagattgtgattcatgctgaggctgtggatgcacaaggtaacgtagatgttgctgatgcagatgtaacggtaactttagatgttacaccacctgatatcactacaactgtgttagcaattgacccagttactgctgataacattctagatgcgacagaagcgggtggatcagtgaccttaacaggtacattgaccaacatccctacagatgcagtaacaacaggtgttgtggttactgtaaatggtattgactatacagccacagttgatgccgtagcaggtacttggacagttgatgtagctggtagtggtcttgcagcagattcagacttaactgttgatgctactgcgacattcacagacctcgcaggaaacgctagtacacttcaagatacacaaacttatactcttgcaagctctatcattgctttcgataacactgatacagctgtacttgctcctcaaccattgcttgtacaagatgatgcagcactaggtagtaatacttatctagcacttgtatcgcttgctggacttgatttgcagttaggatcagagtcaattggctttacagtgggtgctggtcaagaaggcaatgcgacctttacttatagtgctttaattggagtggatgcattatctgactactcattagttgttcagaaatttgatacagcaacaggtcaatggactgcaatttatggtggtggccaggctgatattcttgatcttactttactaggttcaacacctggtgtagtgattgatgggttagaagaaggtcaataccgtgcattcatgacttacaacggtcttgcaggtattggcttacttggtaccttaacaggcacaatggatgtttatgacacaacacaagtaggtggttactacactgaagttgctgaaggtaacgtcattacagaaataaatgatgcaggtgaggtagatgttgtaactccaacaacagttataagtgaggttaatggtcagcctgttgtagcagatggcacgagcatcactggtacttacggtacattagtgatcaacctggatggttcatacacttatacgcctactgctagtgcggcaggtgtaggacaaacagatcagtttacctataccttaactgatcctgtaactggtgatacggctcaagcaaacctcaatattcaattgagctctgtgaaagctgtggataatgttgtaactgcagaaatcaacccagaaccgttgctagttgcagatgatgttgctctaggcagttcaacttaccttgcagcagtatcgttagctggtctggacttacaattgcttggtaacgacgcaattgagtttactgttgatccaaaccgcgaaggtacagcaacgttcacattcgatgcggtaatcacagcagatttactcagtgattatgcgattgttgttcagaaatttgatgaagcaacaggccaatgggtatcgatcggtggtactaacccagaagcatcactcatcgatctatcactaatcggtggtacgccaacagctgtgcttgaaggattggatgctggtcagtaccgcgcgttcatcggatatgaaggcttgctaggtgtaggtttaggcggaacattaactggtacgatggatgtctacaatccatacatcgtggctggttactctgttgaaccgatctctggtaatgtcatcaaagatgcgagcctcactggtgaagttgatgcagcaagcagcagtgctgtgatctctcaagtgaatggtgttgcggttgacccagttgctggtgcaacaattactggtacatacggtacattggtgattgaccaagatggcaactacacttatacaccgactgtaaatggagcaaacctaggtcaggtagatcaatttacctacaccttgcttgatcctgtaacgggtaacacttctgaggcaacactttacgttcgtctcgatagtgacagtgtagatatgacttggaacgatgcagatccatctcaaccagctgtaattactagtccgcttccagtagacgcaatggataacgttgcttcggctgaaatagacatggtttatcctgtaacgactgaggtacttgataatgcgattagctataactggttactcggtgtcggtggtatcgttatcggttctaaagaaggtacagcgacatttacagttgatccaggtaatctgactgatgcgattattgcagtgaactttggttcggttgctacggttgtcgacggtttacatgtggtattaacacgagtaaatccagatggcactcgtactgtagttgcagatagttctgatactggtgtgattgacttgttaggtatctttggttctgaagttcaattcaagattgataacttaagtgctggtacttacgagttgttcatggaaagcaatacacttcttacagctctaggtagtgttactgcggatatcacgctaaatcatggtgatatcactcaaccgcctgtactggttgttgaccctgtaactggtaatgtactcgctgatgataactcggctgtttacggtacaaactatgtgccggattacattacaacaacttcagtagtaactgctgttacagctgaaaatggtaatacaactacagttgtagtgggtactccagcaacggttgtaggggtatatggaactctgactattaatgcagatggtacttatagctatcaggcaactgcggatatggcgaatgtaggtaaagttgatagcttcacttacacagtgtcagatcctgtaacaggtagaactgatactgctacattacatgttcaagtcggttcgccagatgttgatgtaacttggaatacagcagatccttcggcagatgctacacttccaacaccatcagtaacagctgatacagatgatgcaacaatcagcatggcaccagtggtagatccagttgtagatgttgcgagtggtaacgtgactattggtaacttggctggcttcccaccactacctgtattaagcagtaccgtaacttcaagtcagtttacagtagcggcaaatacagtaagtgatgtgcatgtacagttgaactatacagcctcattaagcttgtccgcccttccaacgactggatatacaattcaacagttagttggtacaacttgggtagatactgcatattctggttctgcaactgcattggcaggtgtactcggtgctccagcattctcggcagatgtgcctcatttgtcggaagggacttatcgagttgtgttcagtttatcaagtctgatttctcttggtaccgtaactctagattctgtagtgaccacgacagcgactcatctagaccaatacacaccagatggacaaacagactggataactggcaacgtacttactaatgatgttgtagaaggtactcagctctatgtaatgaactcaacaactggtacttacgaactagctgctggtcaaggagtgaatacaggcgaaggtacgttgtatctatacaatgatggctcttacttctacaaaccattagacagcgctgcaaatgcgacagttgatgtgattgactacaagttagtttcggtgattgatggtagtgaatacacttcttcattgacaattaacttgagtcaagagttgaatagccttgcagtgagtactgcggcaaatgatacatttgctcttggtaatggctcggataccttgatctacaacacattaacagctgcaagcgtaactaacgcaactggtggcaacactacagctggtggtgtagatgtatggactgacttccatgtaggtaatactgcaacggatgatcaagctgataagattgacttaagtaacttgttaattggttcacaaactaacttaacaatcggtcaatatgtgacagtaagttacgatgctgcgactcaaactgcgacaatcagcgtagaccgtgatggtggattactcgtagaaggtacttacactgaaacaccattgcttcaattgactaacctcactggtccagtcacattgaatgacttgatcaacaatggtcaaatcattttctaa

SEQ ID NO: 59220 - DNA, 327 bp, Acinetobacter baumannii; identical to SEQ ID NO: 59211

SEQ ID NO: 59221 - DNA, 219 bp, Acinetobacter baumannii; identical to SEQ ID NO: 53012

SEQ ID NO: 59222 - DNA, 351 bp, Acinetobacter baumannii
atgagcaattttgtttttaagcgtggtgacacattcaacttaaatttgcagctcgttgatatggatgacgcgctgcaatatccagccaatgatgtgcgtcgagcgattgatttaacgggatatacctttacttctcaagttaaaactttggatggaaccgctgtagcaaccttgacttgtgcagtattaaatcagagtactcaaaaggggtggctgaatgtgaaatcagaggcaagtactgcagcgtggcctttgggtctgtgtcagatggatatcaaagctgtggtgagcggtactactcagcatacagaaactttgacttttcaggtaattgacggggtgactgcataa

SEQ ID NO: 59223 - DNA, 1089 bp, Acinetobacter baumannii
atgaaagttgctactaatgcaacttcaccatgtatttgtaaacaatataatttggcttggggatctaaagttagttgcgaatttaggaaaagagttataaaaatagcacaaaatttgtggcctaatgattcagagaatatggcaagccaattaatggctgttatgcatttagagtctgccggaacttttagtccaaaaattggaacttttatcagcaaaaaattaacagatgatgctaaaggtggttatgttggtcttatccaattcggaaaatttgcttcaattgatttaaaagttaaaagatctgatttagcgaaaatgtcagctgtacaacaattagattatgtagaaaaatactataaattaaactctgctcatacaaagattaaaaatctaactggattatatttatgggttaattatcctaaaaatgtcaaagaaaaccgattagaagatgaagatattgtatatgcggcacccaaagacgcagaagtaacttctaaaaaatttttagaaagcccatatcaccaaaatcctagttttatgaaagagaatgaggaatataaacgggatggtaaaaaagttattagacaaggatttaaaaatggttcaactaaagtttgggaggttgaacaagaaattaaaaaacatttaaccgaaggtataaaaagtcaaaatttagagaaaaattataattgtgcatacataaatcatactgagataaaaaatactcagaaaattaatttggaaaaatttgctgaaattttgagaaagagagctaaagaaaaaagtcaacatcaatgtgcaaagtatgtaagaattgcattagaggcaggaggagccgacacttcaggacatcctgtcgcagcatcagattgggggccaactctcaaaaaaataggttataaagaaatacctgaagagtttaataaacctcaattaggtgatatttatatcatcaccaaaactgataagcatcaatatggccatattgcaggctatgatggtagccaatggatttctgattttaaacaaaaaggtcatagaatttatagcgatcatgttaactacagatattttagaatgtaa

SEQ ID NO: 59224 - DNA, 456 bp, Acinetobacter baumannii
atgatgatgtatgctatgactgaaaaattatgtgatgtacatacaaatgtaagttctaatgctgctactgcattaatgcatgctggagcagtaagaaaaagaaaaattaaagctgtttataatggtattaatataaaagactatcattttgatgaagtagaaaacaagtacttacataaagcgtttaacttgaaaaatgaagctaaaactatacttgcaataggaaggatagatactcctaaagattatccaaatttattaaaagctttcaaaataatttatgagatagacaatagtgttcatctatttatagctggaaatgggccaaaaaaagaagaaatcatgctattggctaataatttaggtattaatagcaatgttaaatttttaggcatacggaatgatattcctgtgatttatttatttcatcgtctgcatgggaaggatttggactag

SEQ ID NO: 59225 - DNA, 225 bp, Acinetobacter baumannii
atgatttgtaaaaaacctattgtagcaactgaaactgatggtgccaaagaattattaaataatgaaaatttggttgaaattggaaatccagagcttttggctaaaaaagctctgcaaaaacttaatagtaatttaggtttaattgaatatagtgggattgagagctttgattggaatgaaatatctaaaacttggctatctttatatgaaggaaaagatttttaa

SEQ ID NO: 59226 - DNA, 294 bp, Acinetobacter baumannii
atggccgaggcatatctattagcacgtaacgttaagccttacgaggatgctacccaagtacctgaacctttaaaaacagcctcatatcaaatcatcaagggaattatcaagggtgatctatatcaaggacaggaacaggtactaaaacgcaagaaagtcaaagctgatacggttgaaactgaaaaagaatatcaggacggatcagtaaagcttagtgcgattgagcaattcattcttgatttgattaagccttacagcaaacgaaaagctgtattttttgtcaggaaaatctaa

SEQ ID NO: 59227 - DNA, 1335 bp, Acinetobacter baumannii; identical to SEQ ID NO: 46968

SEQ ID NO: 59228 - DNA, 126 bp, Acinetobacter baumannii
atggtaagaatcgtttgtgcagtaagtatggtgttggcaattgctatatttattttgtttttacaatttggagaatttgttgttaccgttttgttgcaatcttcagttaccgtttcaaaaagttaa

SEQ ID NO: 59229 - DNA, 597 bp, Acinetobacter baumannii
atggctatcactgaaacagttggctcactattgtttggtggtcatcgttcaataatgggtttatttgctgacgttgttattgaagaaaaccactctgatgagcttgtaataacagagcatccagtagaaaagggttcaccgatttctgaccactgctataaagcaccaccagaagtaacaatgaaaattggctggtctgagagtgctggcagaatgaacgggctaataggtaatacatttatcggggcagatttgtcacttcttggtatttatcaggggttgcaggccttacaaggtcaacgacttattatttctaatggtaaacgcctttatacggacatgttgattaagtcattaaagaatgtcactgatgaaacgtccgaaaatgctttgatgatcgatattgtgtttaaaaaagtctttattgtttccacaaaagaaacgctggtttcaatcgttgatcaaaagaaccccgaagtaacttctgatgttgttgattctggtaccaagcaaccgaaacaagttaactcttcagtattgaatactgttttagggccagctgtagatgcttttagttcattaatgagtggtaagtaa

SEQ ID NO: 59230 - DNA, 318 bp, Acinetobacter baumannii
atgactgcgggattacaagtttataatattaacggcgagcttgtattcgattcaacggttcacactgtaatctcaagaatcaaaatatctactagatcatttactaaagtcagtggaagcaactttgcatatgagacttctatatcagatataactaatgcaaacatgagagattatttttttaaagtaatttctcatacatattattcggttgaatcttgttggattgatgaggtgactgggaaacttaaaattaatttgtcaaatccatcaagcgcaacttcaattgattttgtagttaaagtttataggtgctaa

SEQ ID NO: 59231 - DNA, 258 bp, Acinetobacter baumannii
atgagtggattaaaagttaaaacatgtaatttttgtgatgacgggaacggtgaatgcattttcccctattacggccttgcccctcatattcatacgaagccaattggcggtactgaatttatagatgtttcattacctgaaaactttagtcctgatggggatggtttaggcatatatacacactgtctgaattgtgggggtgatggcacatatgaaggcatccagttagaagttaaagcggaaagtaaggaggagtaa

SEQ ID NO: 59232 - DNA, 456 bp, Acinetobacter baumannii
atgaacgtaaacaagctactgggtaatgtttcgctatttttggtgatttctgttgccgtagcctctgctacttcaaaagttcctaatccttcatttttaaatactatttataccgtatcaggtataatgttttctattggaatgggtgttttatgcacccttaatcctgataaagtaaaaaatgattcaatttacaaagcaattaagtctaatatattagatgttagaaattcttatttagcatattttttcattatatctttcatttatttaatctatcagatttatcctgatttaaactatgttaaggtcatctggaaaataaaaataacacttgatcttgcttgtgcaactttattcttaaatattcttggtattttgtatttcatttcaaatttcatacaaatacaaaagttgggaatggatatttcagatcgagttcgagaatctgattaa

SEQ ID NO: 59233 - DNA, 507 bp, Acinetobacter baumannii
atgattgatagaatatttttattagcattcttttctttaaccctattttcaataatatactttacaagtattgagccaatttattatataaatttaaaagattttttaaaactaactccagaatattttcttcctacactattaatttccttactagctttatatgtaactgctagaaattatttaagaaagtctggaaatagtattgcagcaacttttacacttcgtagtgatttctcatccactgaaagatacatttcttcaatcattttagttaataaaaaagataagcctgtcataattaataaaatatttattagagttggtcataatatttatattcaattaatcgatggttatgatgaaacttttgtacttaagccctatgaaaccttaaaccaaaaacttgaaccacatttcgtgtatatggcgggcgtaaaaagaattgttaatcttccagatattattaataataaaaaaataaagaaaaaatgtattcatctataa

SEQ ID NO: 59234 - DNA, 177 bp, Acinetobacter baumannii
atgggggggcaggctatagcagttcgccgtctcatggaagatgggcacaagctaattcaggtgaaagaaaaatctcgtactcgttacaaaatcaacaacgagtttattcctccaagaattattcgccagttggaaatgcgcggtcttgtaaaattggagacaaaatcacatgagtaa

SEQ ID NO: 59235 - DNA, 1821 bp, Acinetobacter baumannii; identical to SEQ ID NO: 47177

SEQ ID NO: 59236 - DNA, 522 bp, Acinetobacter baumannii
atgaaaaaatcaactttaggctggggtgccgcaggattagtagctttagggatttttggttcaggcaatgataactctccaaaacaaacttcagactcagaaaatgcgcagagtgcagtagaggaagttatcgaatcaaaatatatcaacactaattctttaaatattagagataaaccaaacggtcacgtagtaggaaagttaggacgtggagaaaaagttgatatttatgagacgaaaggaaactgggcacgtatttccttaaattcctcatcacctcagtggttatcaacaaagctattatgtgaaacggatggttgctttaaacaaaagtctcgatcaaccacgtcaaataattatcaggccttaaaatctcatcctcatcattctgaaagaaaacagaaaaaaacttactacgatagtgattgttcatgtgctgtggtggattattgcgtgggtcctagaggtgggcactactgtattacgagtggaggaaacaagagatataaacctagatattaa

SEQ ID NO: 59237 - DNA, 1122 bp, Acinetobacter baumannii
atggcgttaccgattattactgctgaccaaactttattggttcaagcaattattgtgtacctatacgctgatccgggtttaggtaaatcatcgatgggctttactgcggaaaaagcaatttcttttgactttgaccgtggtgctcaccgtactggtgaattacgtcgtggtgcggttgtacaggttcaacaatggagtgatgttgcaaaccttactccgcaggacttagcaccatataaaaccgtagtcattgataccgtgggtgcaatgcttgaatgcattaaaacccacctgttacttacggcaaataaccgtcaaaaagatggttctttaaagttaaaggctcaaggtttagcgaaccaaacgttcaagcaatacatcaatactttgatcagtttaggtaaagatgttgttttcattgcacacgcatcagaagatcaaaacggtgatcaaattatttaccgaccagatctaggtggtaaaaaccgcaacgagctttaccgtatcgcagatgtcatgggttatctaacaactgttactactggtgaaggtaaaaatgcccgcgttattaatttcaaaccttcgcctacacatcatgcgaaaaactctggtgctttaggcggtgaaaccggtgaagtatgggtacctgatcttaaagcacaccctactttcttggctgacctgattactcaagctaaagatcacattaacaccttaacgcctgcacaacttgcagcagctaaagcccaagaagagctagaaaactggaaacaaagctgtgaagaagctgagcatgcaggtgaccttaatcaattaactgagtcgcttgataaagaacacatgtattaccagaacatgcgacaagcaatgttaatgagagctaaagcattgaattgcacgtttgataagcaacgtggcacttggattagtccaccagaatttaacggtatctcagatcaacaaagagatgaacttcaaaactttattgctgaacgtggcctcgatgtaaaaacagtttgtgagcacttaggtatagatgccctcattcaaatagaagcggcaaaactaactgcagttaaacaagaaattgaaaccttagcgaaaacggggatgacagcatga

SEQ ID NO: 59238 - DNA, 570 bp, Acinetobacter baumannii; identical to SEQ ID NO: 13730

SEQ ID NO: 59239 - DNA, 399 bp, Acinetobacter baumannii
atgctcatcggtatcaatcacaacagcctcacccttacgctgagggatttcaactgccacgatttctttagaaaaaaagcctttggtttgcgcgcttgcggtgcgttgttggcttaccaaggcaaactggtcctgatctgcacgattgacgttaaactgttcagcgacgttttcggcagtctgcggcatggtgtctacaccatacaattctttaagtttagggttaatgaagcgccagcccatggtggtgtcttcaatcttctggctacggccaaaagcactgtcagacttacccatcacatacggtgcacggctcatgctttctacaccacctgcaatcaccaagttcgcttcacctgctttaatggcacgggcagcaatagcaatggcatcgagtga

SEQ ID NO: 59240 - DNA, 531 bp, Acinetobacter baumannii
atgcggaccatctgccaacactggaagtgtattgtctgcaagcgtccaggtaccgtcaccattgttcactgccggataatccacgccatccacagtcactacaactgtcgcagtaggatcatcaatcgtaccggtcaatgcaggagttgtatcgttagtcgatacatccgcgaaagttactaccggtgctacaagatcaacgataaagccgtctgtaccgtcaagtacatcgcctgtaccaaggttacccacaacatctgtgtagctgccatcagccacggcaatgcttggtgctgtgcctgtaccatccggtgtgaacactgctgtccaggtgatgttgtccgttgtagtcaggccagtcaatgtaccgcctacaaccgtgatgtcgcttacatcaaagcctgcaactgcctcactgaacgtgaaggtaatgttggcatcttcacctgccgcaagtgcaaggtcatctgttgtgatcgcaagtgttggtgctgtcgcatcaacagtcactgtacctgttaccggagttga

SEQ ID NO: 59241 - DNA, 297 bp, Acinetobacter baumannii
atgaacagctttacacaacaaatcaaagattctcgtcagcaaagtgaaatccaatctttttatgagcctgcattgcgagtgcttgggcacctatttgaggtgaaaaagcaaaatttacgtaacaaaggttatgacgaaaataatgcggcggtaaccaaagttgaattttcagaggctatggctcgtcaatttcgcataacgcagtggttggcacagcagattgtaaccagcttaaccaaggcgtgtttggttgattcttttggaggctatgttaagccaaagggtggtgaaaagtga

SEQ ID NO: 59242 - DNA, 162 bp, Acinetobacter baumannii
atgctaaaaactcgtcattatcatcaagtaactcagcaatatggttatgatctggattataaagaggcccacctatcgttaagtagttggccacaacccatttctttaggtctggtgccggtattaaacggattgcttcctcttcttcagcttggtcaataa

SEQ ID NO: 59243 - DNA, 336 bp, Acinetobacter baumannii
atgggactttcatcatttaaccgtgcacgggaaagacaacaaatgacagaaacaaaaattgctgaactcgaaaaacaactggcaactttgaaaggtgaattcattgccttccaaaatgatcctgaggcaatgaaagcacgtatttctgaactggaagcaggtgaaggtggtcaaacacctgaagacggccaaaaaccaagtgatactcaaccacaaccaattaactatgcagggcttaaagttgatgaacttcgagctgtgttaactgaaaaaggtattgcatttgaatcaggtgctaaaaaagaagaacttttagcattaattccaaaggaataa

SEQ ID NO: 59244 - DNA, 399 bp, Acinetobacter baumannii
atggcaatgactttagagcaaacaaggcaagctattattgatcgcatgcaaagctttagaggtattactcaagacagaatccagtatccaaatttaccaggctttacggtgcctaaggaaggtttgtggtgtcgcttaacgattgcaggcggtccaagttttatttcaggtattgcagataaaccatgtacccggcgtaccggtaatatcatgattcaatgctttgctcgtcccaattcaggaataatggaaatcacaaaactgagtgatgctttgcttgcccattttgaatattactcaatcgatcatctagaatgtttgcaaggacaatcaatttttgtcggccaagatgctgatttcattcagtataatgtgaccattgggtataaggtgaattga

SEQ ID NO: 59245 - DNA, 324 bp, Acinetobacter baumannii; identical to SEQ ID NO: 50149

SEQ ID NO: 59246 - DNA, 288 bp, Acinetobacter baumannii
atgccagtggatggtgatgtatttacctctttcttgtttggccaaggtgcgattggtttccaagatattggtgcaccagttggtgtagagactgaccgagacagcctagcaggtacagatattcttattaaccgccgtcactttgtattgcatcctcgtggcattaagtgggcaggtgatacaggtattgcacctaataatgctggtctagcaacagccgcaaactgggaacgtgtctacgatcctaaacagatccgtattgtggcattcaagcacaagatcaaataa

SEQ ID NO: 59247 - DNA, 288 bp, Acinetobacter baumannii
atgcctgttgaaggcgatgtctttacttcttacttgtttggttatggcgcgattggtttccaagatattggggcaccggttggtgtagaaacagaccgtgacagtttagcgggtactgacattcttattaaccgccgtcactttgtcttgcaccctcgcggcattaagtgggcaggcgatacaggtattgctcctaataacgctggtctagcaacagctgcaaactgggaacgtgtttacgatccaaaacagatccgcattgtggcattcaagcacaagatcaaataa

SEQ ID NO: 59248 - DNA, 144 bp, Acinetobacter baumannii
atgaagattaagctaggcaatctggtttatatccagaacaataaagcttatgcactccgcttagaaaatggttggtctgatcaagcgccacaaggtatttatggcctcacttttaattttatttctcaaaagtatggtggctaa

SEQ ID NO: 59249 - DNA, 288 bp, Acinetobacter baumannii
ttgcaagttggaaaggattctataaatacaattcatgtatatccatcaacacatttttgcttagacttacctaaaaattttgctacgcatcatttttatggttcttggttaccagatagaactaagagttataaagaaaatgcagtagagatatattttaatgaacaattagaatctttagaaaatattactcacagtaaaaactttctaaagactctagctactcgtattaaaattaaagatttatttaaacttatacgttattttatacaatataaactaaagtaa

SEQ ID NO: 59250 - DNA, 1122 bp, Acinetobacter baumannii
atggcgttaccgattattactgctgatcaaactttattggttcaagcaattattgtgtacctatacgcggatccgggtttaggtaaatcatccatgggctttactgcggaaaaagcaatttcttttgactttgaccgtggtgctcaccgtactggtgaattacgtcgtggcgcggttgtacaggttcaacaatggagtgatgtagcaaacctaactcctcaagacttagcaccttataaaactgtaatcattgataccgttggcgcaatgcttgaatgcattaaaacccatctattgctaactgctaataaccgtcaaaaagatggctctttaaagttaaaggctcaaggtttagcgaatcaaaccttcaagcagtacatcaacactttaatcagtctaggcaaagatgttgttttcattgcgcatgcttcagaagatcaaaacggtgatcaaattatttaccgaccagatctaggtggtaaaaaccgtaacgagctttaccgtatcgcagatgtcatgggttatctaacaactgttactactggtgaaggtaaaaatgcccgcgttattaatttcaaaccttcgcctacacatcatgcgaaaaactcaggtgctttaggcggtgaaaccggtgaagtatgggtacctgatcttaaagcacaccctactttcttggctgacctgattactcaagctaaagatcacattaacaccttaacgcctgcacaacttgcagcagctaaagcccaagaagagctagaaaactggaaacaaagctgtgaagaagcagagcatgcaggtgaccttaatcaattaactgagtcgcttgataaagaacatatgtattaccagaacatgcgccaagcaatgttaatgagggctaaagcattgaattgcacgtttgataagcaacgtggcacttggattagtccacctgaatttaacggtatctcagatcaacaaagagatgaacttcaaaactttattgctgaacgtggcctcgatgtaaaaacagtttgtgagcacttaggtatcgatgcccttatccaaattgaagcggcaaaacttaaggcagttaaacaagaaattgaaaccttagcgaaaacggggatgacagcatga

SEQ ID NO: 59251 - DNA, 1092 bp, Acinetobacter baumannii
atgtcccaagcagtagatatcattttctatgatggcatagtgtctaaaccataccatgctcagatttcagctcaatctgaaactgaagttctgattcgatatggtgagcaattagaacaacagcgtcattatcaatacactgatatgaaattgattggtgctctgggacagttacatccagtaattgaattagacgatgatgcacgaattgaatttcatggtgcattacctgaatggtttaattattcaactaaaaagattcaacattcgatttggaaatttgaacgttctccaagtcttattttttttagtttaatttttgtgattactttcggaatcagtttagtaaaatggggagttcccgccacttcccattatgttgcttttaaattaccagagaatagtttaaagaaactaggagatgaagccgagaattatgtactaaataattggactgcacccagccaattagctcaaactcaaaaagaccaaattactaaacaatatttgaatactgttgctgaaaacaaaccagccaaattagtgttccgtaaaggtaatcgattaggggcaaatgctgtagcactacccaataatacaattatcattacagatgaactgattcaaatagcccataataatcaagaaatattgggagtattagcccatgaacaaggacatttagtttatcgccatagtttacaacaaggattaactagtttaggactaagtgtattatacattgcaatgacaggtgataattcagatttatttacgtcattacctgctgctatgcttggtgcaaattactcacgtaaatttgagtccgaagccgatctatatgcattacagctgatggataggaaaaatatagaagtctcacactttgcaaatttcttacaacgtttaaacgataaaacagaagaagatctaaataaagcgagtcagtccacctcaccaacctctcaaaaagaatcttcagataataagctatctatagctgttgttgatgctttatcttctcatcctgcaactgaagaacgtattcgaatggttcatgattttgagaaaaaacaacacgctaaatattaa

SEQ ID NO: 59252 - DNA, 348 bp, Acinetobacter baumannii; identical to SEQ ID NO: 57134

SEQ ID NO: 59253 - DNA, 2442 bp, Acinetobacter baumannii; identical to SEQ ID NO: 57316

SEQ ID NO: 59254 - DNA, 459 bp, Acinetobacter baumannii; identical to SEQ ID NO: 45472

SEQ ID NO: 59255 - DNA, 882 bp, Acinetobacter baumannii; identical to SEQ ID NO: 45473

SEQ ID NO: 59256 - DNA, 705 bp, Acinetobacter baumannii
atgaataaagtttatgccaacgcagaggcagcactgaaagatgtaattgcagacaatcaaacacttgctgttggtggttttggtttgtgtggaattccggaaaaactaattgttgcagttaagcaaagtggtgtgactggtctcacatgtatttcgaataacgcaggtgtagatgatttcggtttaggtatattgcttcaaaccaaacagatcaaaaaaatgatctcttcatatgtgggtgaaaataaagaattcgagcgccaatatttaaatggtgaattagaagttgaactaaccccacaaggcaccttagctgaaaagttacgtgctggaggtgctggaattccagcattttacacacaaactggtgtaggtacactcattgctgaaggtaaagaagaacgtatttttaacggcaaaaattacattttagaagaatctttaacagccgatgtagctcttgttaaagcatataaggcagacaaggcaggtaatttagtatttcgtaaaactgctcagaattttaatcccgaatgcgcaatggctggaaaaattacaattgcagaagttgaacaggtggttgaaattggtgaattggatccggatgaaatccatttaccaggtatatatgtgaaccgcattgtattaaatgcatcacctgaaaaacgcattgagcataaaactttaagcacggaggcagtataa

SEQ ID NO: 59257 - DNA, 429 bp, Acinetobacter baumannii
gtgactcaaccgacacaacgtcttgcaatacttacagccttgggttcagcaaatcaagaagcaacacgccaacaagcccgtcagttgattttaaacccgcgtgttaaagttggtgaagttcgtaccgtggtcaactcaatcaataattatggagatgaacaaggtggcttatggtcttggtttaaggtaaatcatgacgctgtgtttgatcgtttaggtaaatcttcagctgggcgtttccctgcaatgtttagtggggcagcatgtacccaacaacaagcggcacagttaaatgacttttttgcaccacgaactaaagaattggttggggtagaaagaggattgaaacagactaaagagcgtattcaactctgcgaatcgctggtagcaaaacaagatggatcgattgtgcaacagttaaagttgtaa

SEQ ID NO: 59258 - DNA, 294 bp, Acinetobacter baumannii
  misc_feature (236)..(245): n is a, c, g, or t
atgaatttattggaagttatagctaaaaattgtggattggcagtggtggactccgtaactttagggctaggttcagctgtaaagaattccttttatgaaattaaagatcatgtaagtcaatgtaatgatgcactgtatctaatgcaaattaaaacatttattgagacaatcgatttagatgaaggggaagtgaaagatttttttagcaaaaatccagataacaatcgactaggaannnnnnnnnnttttagaaagtacatacatagaaaagcaagcaaatttgttagccattaa

SEQ ID NO: 59259 - DNA, 765 bp, Acinetobacter baumannii
atgaacactcttgctgaacgacttagatatgccatggaagtattgccacctaaaaagatcaaaggtgtcgaacttgctcgtgcagtcggagtaaaacctccttctgtgagtgattggctatctggtaaatccaaaacaatggaaggagaaaatttattacgtgcttcaaaatttttgaatgttaatccttcatggctagcatctggaacaggagagattcaaacaagcactaaggataaatttaagcaacttgatatcgagaaatttaaaaagaaatacaatattagtgatagtgatgaagcacttttattttcaacaattatcgaaaaaccgtttatcccatcatctaagcgttgggttcctgtaaaagcttactccaagatgggcatggatggctatttcacagatatgggttatgaaggcaatgctggagatgggtatgttccaactcactcagcaggaccaagagcctatggcattaaaggcactggcgactcaatgtttccagcaattcgtaatggctggtatgttgtatgcgaccctgatgcagatcttgtgccaaatgagtttgttcaggtatgcttgaaggatggaagatgcacaattaaagaatttgtcggcatcaatggtggggttttaagtttgctttctgtgaatggtggtgagcgatttttctttgaaatggacgaggttgaaagtattaccgctattacagatatcgtgccgccaagtcagcatagacaagaacatccttattcgcattaa

SEQ ID NO: 59260 - DNA, 417 bp, Acinetobacter baumannii
atgtattttgtttatgaaggtcaagagattcaccttgacccaaataagattcaacaatttggcaatgacttggtttatgcagataccctactctgtaatacaaatgaattaattgttcgtaaacacaaaggtcaagaaatatcaatttccaccaaaaaatttactccctttttcaatgctacttttcctcaaatgaatgttcaaatccaatggttaaatattcaaaggactgctgaattaaacacgttaattgacatcgataactctcttgttagtaacaagaacgataagattccattgacgcttgctcaacagaaagttctaaatgtgaagaatccaaaaacttttgattttcgctatgaaagggaaataattattaagaatttgtcaaaagcaattcaagtttttgtgaagtga

SEQ ID NO: 59261 - DNA, 870 bp, Acinetobacter baumannii
  misc_feature (372)..(381): n is a, c, g, or t
atgaattttaatagtgaaaatatcgaacttttcttaaccgtattagatactggatctttctcggccgcggcacgaaagttaaatcgagtgccatcagcagtgagtatggcaattgccaatattgaagcagaacttggttatcacttatttgaacgtacacaccgcaaagttattcctaccgcggcggctttagcattggaacctcaagcccgtattattgctgaacagcttaggctattagctacgcatgcttatgaactttcacttggtcttgaaagtaaattaaaaataggtgtggtttcagatgcgaatactgaattactttttaaagccataaagcaactagcagagaagtttccccttcttaacctnnnnnnnnnnctttatacagaaaatattagcctttgccttgcaggttcaaatctcaatataaaaatgcgtgaaagcttacaattagtaatgacagaaacagttgttgctactatctctgctcatcatccgtttttaaaagaacagaataagttaaacacgattgaagagttaattaatattcggcaaattgtggtcgcgagtagtgagctggatatggaagactcacgttcaatcattggagcaatgtactggaaaacgaatagcttacaaacagcaattaatatggtcgaagctggcttaggatggggaaattttcccttatctttggtaaaagaaaagattgaacaaggccacttagttcaattagattttaaaaatacgaaaaatcatttgcctttatctatttatcttatttggcttcaagataaaccgttatcgaaagcagccagagagcttgtccagattgttcaagcaaacttatctcaaaattgtcgttaa

SEQ ID NO: 59262 - DNA, 1452 bp, Acinetobacter baumannii
atgagtgatgtaacttttcaacatgctgaatatgttaagaacttgccatactggcaaaaacttgatgatgtttgtgaaggtgaagatgcagttaaggctaaaggtgaaaaatatttgccgatgccaaatgcacatgataaatcacctgcaaataaaagcgcttatgaggcttatcttacccgtgcagtcttttatgaagtaacagggactacatcaaatagtttagttggagcagcttttgcaacagatccaagttttaaatttcctcccgagcttgctcatttagaacgtaatgcgaatggagccggtttaagtacttatcaattggctcaaaatggaattcgccacttattgaagcattatcgttgcgctttatatgttgattatcccgatgtgccaccagctcgtaatctagcggaatttaaagcgcaaaaagcctatccaatgattcatttattgaatgccatagatgtagtgaattgggattcagtaatggtcgataaccagaaaaaactttgtctcgtagttatccgtgaatttaggtctgagcgcggtgctgatggatttagtaaaaccgaacaagagcaatatcgtgtacttcgtttagagcaagagggtaatggggaatatatttattccgttcaggtgtatacaaagggtgaaaagggtaactgggttggcggagataagaagtttccaacagattacaacgggaatttctggacttatataccttttacatttgtaggtgcaattgataattcagaagagattaaaaagcctccattacttcctttggctaatctcaatttagcccattacagagacagcgcggactttcaagagtccgttttttatatgggtcaacctcaatactatgcgaaaggtgttaattgggagtggtacgaccaagcgaagaaacgtggcatctacattggcgcgaaagtacttttgcctttaccagaaaatggtggtctaggtattgttcaagctgatcctaatactcttgcccgggaagcgatgaaagataagtgggaaaaaatgaaggagatgggagcgcgtttaattgagaagggctcgggaagtaaaaagaccgctaccgaagcgaatagtgatgacgccgttcagcattcagttctttcgctctgtgtcgttaatatgaatgaagccttgtcagcagcattacgatgggcagcaaagtttgtaacgcctaatgtggatgttctaactaaagatgatttgatgttcgaaatcagtcaagaatttaacaaacagggttatttagctgagttagctcgacagttatttgaagcagctctacaaggccgatcttcatttaaatcatggtgggaatacaaccaaacaggtatgttccctaaacaaaaatatgaagaagagcttcagaatgttgaagcagagcaagatgggactttaaatcaaaaggtagagtga

SEQ ID NO: 59263 - DNA, 1104 bp, Acinetobacter baumannii
atggctaaagataataaaaatcttttggaagtactcactcaacaccaggcttatctttatcggacttcttctcaatcagtaaatgaattattgggtttgttcaatgatgatacgagtgcgatgctatcaaagcttcgtgatttactggatgagcttagtgattcagaaaagattgctttagctggaggcaaatacacaacttcaaatctaaaggaaattagagatttaattacccaatggtttggcagtttaaatacaagcctacctgaagtattcgccgtttcagctacggcaatggccgtttatgaagccagttatatggccaagttgttcggcggaaagataaataaacctgatggagaaaagctttactctgcagctaaaaaggttccacttacaggcggtgcacttgttgatgatcttctatcaagaattgctgagagtgcccgtcaaaaagttgaatatgcaattcgtgacggaatcaataccggtaaaacgaatcaggaaattgttcagcgtattcgcggtaccaagcggcttaattatgaagatggaatcttaaatggtaccaagacagatattgatcgcactgttaggactgtacgaagtcatgtggccaatcaagcttatctgaaaagctttaatcaattaggctttgaatatgtgcgctttgttagtgttctagatggaagaacatcgaagctatgtgcatcactagatggttcaatttgggaaataaacgaccctgccaaacgtgtaccgccgttgcatcctcattgccgcagtattctggtaccagttgaaaaagaagggaagcttccgggggagcgtccgtttgtgatggatgagcgcaaagtcaaggatattccaaaagatgagcgtagtcagttaatcgggcagttggatgcaaacactacatttaaagaattctttaaaaagaccgatgacttttttcagaaagagtggctagggccaaatcgttataagctcttcaaagaaggaaagcttgattttgaaaagtttttcgatccagaagggcgactttacacactcgaccaacttcggaagttggatgaacaaatgtttaagaggttgggattatga

SEQ ID NO: 59264 - DNA, 546 bp, Acinetobacter baumannii
atgaacatcgaacaataccttgaagaattgatcaaacgtgaaggcggttatgtaaataacccggcagatcggggcggtgcaaccaaatacggtattactgaagcagttgctcgagcaaacggatttaaaggaaacatgaaagatttgccgcttgatgtcgccaagtctatttatcgcaaaaactattggacagctccgcgttttgatcaggtgaataccgtttcttcagcggtagcggaggagttattagacacaggagtaaattgtggtactggctttgcaaaacctcttttacagcgtgcactaaacttattgaataaccaggttaaagcaggttggccagatcttacggtcgacggaatttatggacctgctacattaaatgctcttaaaatttatatggccaaacgtggaaaagatggcgagaaagtattagtgcgagttcttaatatcatgcaaggccagcgttacattgaaatttgtgagcacaatccaagccaagagcagtttttctatggttggatcgccaatcgagttgttatatga

SEQ ID NO: 59265 - DNA, 591 bp, Acinetobacter baumannii
  misc_feature (560)..(569): n is a, c, g, or t
atgaaacctttggcagctttaccgttaatttttatagcaattcagcaagtgcaagctgaggagagaattgcaattttaaagcctcttgtttttaaggcaaatgcattaaaggaaaaaaattatgtggtggacaaagaaaaagtagaaagttccaatacaataggtgatgctcttaaaaatataacaggtatacaaagtacttcatttggacccaatgcaggtgcaccagttatacgtagtttgagtggaaatcgggttggagtaattgaaaatggagaatttattaatggaatgaatgcatttagtggaaatattaatataccattcgatccaatttttatagaaaaagtgatagtgaacaaaaatacagataatattcgttatggcggaaatgcaataggcgggagtgttcaaatagaatcgggtttaattcctaaaaaaattgaagaaaagccaaacaaattagatattgtctttcggaaaggatttaatgattttgatgtaaaggggttcaattttaacatcaatgatcaaaaaaactggtctacaaatataagatnnnnnnnnnnatataagatattcagaatatga

SEQ ID NO: 59266 - DNA, 255 bp, Acinetobacter baumannii; identical to SEQ ID NO: 44740

SEQ ID NO: 59267 - DNA, 333 bp, Acinetobacter baumannii
atgagtacactacgctctacagattgcgaagaatttattaatgacatcgatggcggtgcctttgcaaaacaacttggctatgcagttagtaaggttgcaagtgctgctgttgatacacaaaaagtcggcgagatcacaattaaattaaagttctctaaaggcgttggtcacaacaacgtaactgtagagcacaaactaatttcgaatgctccacttcctaaagggaaatgtgtagaagagcatagagataaaacacctatgtatgtaaatacaggtggtgatgtatctctttttgcgaaacatacagaacaactttttgaagtaaaagcatag

SEQ ID NO: 59268 - DNA, 393 bp, Acinetobacter baumannii
atgatcaatctggcggctaaaggaattcctttgcctgttggatgcctcgataataaaagaagtatggtcagtatttataatttaagcgatttcattaatatttgtttatcacatcctttagcaaaaaatcaggcttttttaattagtgatcaagacgatataacagttaaagaattatttacgaagttagctaaagttcagggtagaaatcttattgctgtgcctatacctaaagtattaattaattttttaactaaacttcttaataagagtgctgtcgcttcaagactttgttctgtattgatcgttgacacctcaaagaatatagaactattaggatggagagctccttttagctttgatgagagcttaaaattgatgttcaaaaagtaa

SEQ ID NO: 59269 - DNA, 324 bp, Acinetobacter baumannii
atgaatatcttgattacaggaagtagtggttttgttggttcatacttatgtgaatattttacgacaatgccagaatatagtgttctggctcaaactcgtaaaaatacacaaaagttaagtaatgatataaagactataacttttgatataaatgatgatctaacttctttggacttgagctcattagatgtcattgtgcattgtgctgggcgtgctcatattatgaaggaagttgaaagtgatccactatctatttatagaaaagtaaatgtagaaggaacactgaatttagctaaaaaagcagctaaagctggtgtaaaatga

SEQ ID NO: 59270 - DNA, 156 bp, Acinetobacter baumannii
atgcctttgagttttgaaagtacttacttcaattcatcagcatgggaaaaccgcaagaagtatttagaaaatgaaattgaacgtcataacgtattcttaaaattaggtcaagaagtcattaagggattaaatgccctagcaagtagaggccgatag

SEQ ID NO: 59271 - DNA, 201 bp, Acinetobacter baumannii; identical to SEQ ID NO: 57298

SEQ ID NO: 59272 - DNA, 804 bp, Acinetobacter baumannii
atgaattaccccaacgattcgcttaaatgcatccaaaacgcttggtataagcagcttgtcaattttcgtgcttggtatatgcctgagacacaattaacggctgactggaagttgagagccatcggcaacgctattaaagcatgtccgtcacggatgatggacgattcagaagcaatgctttctgaatatagaaaaagccagaagcatgtggaagagtccaaagtgcttttacctgtaatgcttactgcaacagcgttaactgaccaacccccagatgtaagtcaattattaccagtacccgattttgttgaaactgtcattgatgagaaacgtgtaaaagttcgtctggtaccaacaacagtaagagctcaaatcgcattctttgccaacaatcctaacgatctgcgttcagtcattgggcaattttgcacgtacatgtctagcagtgataaccgccgttttaatgtgccatttcagcaatggaatgatcatgttgttaattcaacattcactgtttttgaaaatgaactttttccatcaccagtcccaagcgaagcaatcaatctttctatctcaactgtagatattcaacttgtgggttacacacctaacgttatcggtttcggtggtcctttcgaccaaaacacgggtaatggctatgaacctgacggctcagcaacggaacagcccgcaatcaacgacaaagttgtagtgcaagctgatcagtacacgccactcgaccatcaacgtgtgaagggtgacagagaaacaggtgaaattacagttgagcgtatagatgactga

SEQ ID NO: 59273 - DNA, 948 bp, Acinetobacter baumannii
atgactacaacagtaaattcagacatgatcatctacaaccaattggctcaaactgcttatttagagcgtttgcaagacaatttgaatgtctttaacgaggcatcagctggagcgattgtttatcgcaatgaaatcattgaaggtgattttagcaaagattccttttaccgagtgggagggagcatcaaacatcgtgatgtgaactcaaatgctaaggttaaccctgaaaaaattggtgctggtgaatctgtaggggtgaaaattccctataaatatggtccttatgcttctactgaagaggcattcaagcgccgtgctcgtacacctgaagagtttgcaatgattcttggctatgatttggcagatgctttagttgcagggcgtttacagtacagcttggcttcattgaaagcagcaattacaagcaatcctgatatggttgcaaaaggcagtatcgcagtagacggtcgtaaagctttaaccaaaggaatgcgtaagtttggcgataagtttggccgtattagtttgtgggtaatgaactcagacacctatttcgatattgttgatgatgcaatcactaagcagatttatggcgaatctgaaatcgttatctatggtggtttaccaggtactttaggtaagccggtattggttactgatgccgtgggcgatgatgatgcatttggtttgcaagtgggagctgttactgtcactgaatcacaagtaccaggcttccgagcttacgacattaatgatgaagaaaacttaggaattggtatgcgtgctgaaggtacctttaacatggatcttcttggttatagctgggatacaaccaaaggtattaatcctgatctttctttactgggttcaagtgcaaactggctgaaacatgcaaccagcaacaaaatgactgctggtacattgttggatttgtctggtacgccttaa

SEQ ID NO: 59274 - DNA, 909 bp, Acinetobacter baumannii
ttgcagcagttaatcgatttcaagaaaaacttagatgctcaatatccaaaattaattggagcaggtgtaaatattggtagctcagccacagttgaactaggtggcaaagttactgatttacgtgattcaaagtatgcaatctatttaacaccagaaagcccacatgaagcatggaagcttacccgtgctgaaaagggtttttcatatgaagtttgggaccgctcaggtcaaaaccggatagggtattcaggtactgtgaattggtccgttgttcaggtagctgcagaaacactaaacgatggtaatggcgattacacagtcccaggtgtttatatcattccaattcaaccaaaagaacaaaaagaattcatattggttggtgctggtggtgctggtggtggcagtgtctgggagttaggagcattggcacatgggaccagtggtacagatacacgcttacgtttaaatgaacttgatttggcggttgttggcggcggtaaaggcggtaccagtggtcagtggtcgaatggtagtgctttctcaaatggtgctggtggtttagcaggtgtaatcactgtgacatcaaacataaccgaaatttcacgcaagcttggtaacgctggtacagctgcaaaccaaacaaaccacaaaggcggcgcatcagtaagtccagtatcaaactggggtgctggtggtgatggtgctaatggtgtaggtgatgatggctgggcacttggtggtggtggtgcaagtggtggtttactcatttgccgatatgtgaattcaaccgaaaaaactcagtatatgactttagttgttggtgaacctggtgttgcaaccgaaagtaatggtaacactggtaaagcaggtactggtggctttgctcgtgtaagtactgttaaagcttaa

SEQ ID NO: 59275 - DNA, 279 bp, Acinetobacter baumannii; identical to SEQ ID NO: 57302

SEQ ID NO: 59276 - DNA, 273 bp, Acinetobacter baumannii; identical to SEQ ID NO: 57287

SEQ ID NO: 59277 - DNA, 804 bp, Acinetobacter baumannii
atgaattaccccaacgattcgcttaaatgcatccaaaacgcttggtataagcagcttgtcaattttcgtgcttggtatatgcctgagacccaattaacggctgactggaagttgagagccattggtaacgctataaaagcatgtccgtcacggatgatggacgattcagaagcaatgctttctgaatatagaaaaagccagaagcatgaggaagaatccaaagtgattttacctgtaatgcttactgcaacagcgttaactgaccaaccccctgatgtaaatcaattactaccagtgcctgattttattgaaacggtcattgatgagaaacgggtgaaggttcgtctggtgccaacaactgtacgtgctcaaatcgctttctttgccaccaatcctaatgatctgcgttcagtcattgggcagttttgcgcgtacatgtctagcagcgataaccgccgttttaatgtgccatttcagcaatggaatgatcatgttgttaattcaacattcactgtttttgaaaatgaactttttccatcaccagtcccaagcgaagcaatcaatctttctatctcaactgtagatattcagcttgtgggttatacacctaacgttatcggtttcggtggtccattcgacaacaacacaggtaatggctatgaacctgacggctcagcaacggaacagcccgcaatcaacgacaaagttgtagtgcaagctgatcagtacacatcactcgatcaccagcgtgtgaagggtgatagagaaacaggtgaaattacagttgagcgtatagatgactga

SEQ ID NO: 59278 - DNA, 471 bp, Acinetobacter baumannii
atggcgacactaaaagagcctgtgaaaatctttatagttcagtctcttgcttgtcgtgatacacctcaagaagtggctgaactcgtaaaacaagagtttggcgttgatatagatcgtgttcaagttgcaacttatgaccctacaaaggttgctggtaagaacttaagcaaaaagtatgtcgaactatttgaaaaaaccagagatgagtttgataaaggcttaattgatattccaattgctaataagtactaccgattgaagcaataccaaagacaacttgagaagactagaaacatcaaaacagccttaaaaattcttgagcaagccgctaaagacattggtggtcagtttactaatcgccaagaaataacaggtaaggacggcggaccagtccaaacagttaattcagaaattccagttccaatggaagattacttaaaagcgcggagggaagtcttagatgagtactga

SEQ ID NO: 59279 - DNA, 639 bp, Acinetobacter baumannii
gtggttggaagtgttactgatgttattggtggcgtaactggtggtgttgatggcaacccacttgaagtgattacagatattatcggtggtgtaactggcggtgttgatggcaacccacttgaagtgattacagatattattggcggtgtaaccggtggcattattggtggcggtacatctcctatttctccagttattgatgttgttcaaggcggtatcgatattcttcaaggcgttgaaagcctaaaaactgaaattattaacactggtattgatacagtagccgacactattattggtgtattacctcaagctgagcatccagtttctgaaattgcagaccttggcacattaactttcgaaacgtctcgtgacacggtcaatggtgctcttgaagttgtttctgatttagtcggtggcgatattcaaggtgctactgaaaatgcaaccggtattctaggaacacttattcagaatggttcaacagcgactggtattgtgactgatatccttggtggcgtgacaggtactatcggcggcgtaactggcggtatcggcggtgacaatcctcttggcgtagtaactgatattatggtggtgttactggtggtatcggtggtgataatcctcttggcgtag

SEQ ID NO: 59280 - DNA, 279 bp, Acinetobacter baumannii; identical to SEQ ID NO: 53681

SEQ ID NO: 59281 - DNA, 909 bp, Acinetobacter baumannii
ttgcagcagttaatcgatttcaagaaaaacttagatgctcaatatccaaaattaattggagcaggtgtaaatattggtagctcagccacagttgaactaggtggcaaagttactgatttacgtgattcaaagtatgcaatctatttaacaccagaaagcccacatgaagcatggaagcttacccgtgctgaaaagggtttttcatatgaagtttgggaccgctcaggtcaaaaccggatagggtattcaggtactgtgaattggtccgttgttcaggtagctgcagaaacactaaacgatggaaacggcgattacacagtcccaggtgtttatatcattccaattcaaccgaaagaacaaaaagaattcattttggttggtgctggtggtgctggtggtggcagtgtctgggagttaggagcattggcacatgggaccagtggaacagatacacgcttacgtttaaatgaacttgatttggcggttgttggcggcggtaaaggcggtaccagtggtcagtggtcgaatggtagtgctttctcaaatggtgctggtggtttagcaggtgtaatcactgtgacatcaaacataaccgaaatttcacgcaagcttggtaacgctggtacagctgcaaaccaaacaaaccacaaaggcggcgcatcagtaagtccagtatcaaactggggtgctggtggtgatggtgctaatggtgtaggtgatgatggctgggcacttggtggtggtggtgcaagtggtggtttactcatttgccgatatgtgaattcaaccgaaaaaactcagtatatgactttagttgttggtgaacctggtgttgcaaccgaaagtaatggtaacactggtaaagcaggtactggtggctttgctcgtgtaagtactgttaaaacttaa

SEQ ID NO: 59282 - DNA, 273 bp, Acinetobacter baumannii; identical to SEQ ID NO: 57287

SEQ ID NO: 59283 - DNA, 810 bp, Acinetobacter baumannii
  misc_feature (157)..(166): n is a, c, g, or t
ttggaaattaaaacgaatttatctgatggtactattcaaaatattggtacagacttactgacatttggcattgcagtaagggagaatagccaatattcattgtcagaggaaatattagctacagggaattccatggaaagtattctctcattaatgnnnnnnnnnngagaaaaatttaaaaaacatattattactttaagtttaaaggacttacctaacggtacaaatattactttggctttctttatagacttaatgaaaagtatttactctaacaatgattatgcagataaaacatggagatactatgctatcagaatgtgtaaatggctagaaattacgggctttttatctcggtcaattgaaacatacacatggttttataaagatataggttctgtaaaaacatctgtcagtaacgttagacgccagcaatcttcttttttcataccaagaaatagtcctcaattaactataaatatttataatgaacttaagggtaagaaaatttctgaatacaaaaatggtagtagtaatgccaaagctgtggaaattttcaagagatataatttagttgatgatgataataaaattagagatgttgaagatatcgaatcttatctttacgatgcgatttcaaatgagttaagtatccaagaaaccatattaataaagaaactgtattcaggaactaaaaaattaactgcatcattcgttgggcagctcctgagggataagcatgatattaagtgggctgaaggtactgtggagtatgcaggtaaaaagctaaacagttgggctagctggtag

SEQ ID NO: 59284 - DNA, 813 bp, Acinetobacter baumannii; identical to SEQ ID NO: 57346

SEQ ID NO: 59285 - DNA, 726 bp, Acinetobacter baumannii
atgtatgttggcgcgagtatttttgatgaccatcaattcggttatgtcattactgttgatgttggtggtggtgttggccgggacgattctgtaattgttgtttctaaagtttggggtgaagcgcaatggggagagcgcgcacgccgtgtagaagttgtagatattccattatgcaaaaacagagatgatatcttagaactatttgcaaagattaatgagctacttttacagtacccaaatgctaacttggttgtagatgataacggggcgggtaaaggtttaggccaataccttaaaaagcaaggtattttctacgttccagtttattggggctcacaatgttttagtaatgacaatagaaaagagttcacgaataagcggtcattggcttatgtgggcttggctcgagcaatcgcaagtggtcgttttaaaataaaaacaaagaaacacaatgtgaaaattaaagatcagttaatccacgttccataccgttttgatgactttgcacgatacaaaatcttgagtaaagatgaaatgaaacggatgggaattaaatcaccggatatgggtgatgcttttgctttcttattcttggaaaacgttcactacactgaagcttacgaaactgtaaatgtcactgacgatacaccggaaggccgtgaacaagctgaacgtaagtcaagattcagtgctttaagagaagcagctgaaaaagaaaatgattag

SEQ ID NO: 59286 - DNA, 279 bp, Acinetobacter baumannii; identical to SEQ ID NO: 53681

SEQ ID NO: 59287 - DNA, 459 bp, Acinetobacter baumannii
atgcaacaagctcaagacaatgttttagtaggaatcgcagaacctatcaatggtcagggagaaaacttattaattgatcatttcttaggatatgctagccatgaattagaaccacaagaaattgataaagttattaaaggggaagtggttgaaggcatcacggaatatgctcagggccattactataagatttcagcaaatcctgaaaaccaaaatgcaaaagattttgaaatcagtattcattttcaggatggcccaattccagaacatggtgtgaatggggttaccagtgaagcattgttaaaagtacttattcaccgtactaaaaccttggatgaaaaatttccgagtgagttcaacaaacaagccattatttatatggaaagtgcgctagaagaatttaataagcgtacagctgaacgccgtgctcgtggtgttgaaggcacacttgttaagtaa

SEQ ID NO: 59288 - DNA, 279 bp, Acinetobacter baumannii; identical to SEQ ID NO: 57302

SEQ ID NO: 59289 - DNA, 459 bp, Acinetobacter baumannii; identical to SEQ ID NO: 57347

SEQ ID NO: 59290 - DNA, 459 bp, Acinetobacter baumannii
atgcaacaagctcaagataatgttttagtaggaatcgcagaaccaatcaatgatcaaggagaaaacctattaattgatcatttcttaggttacgcaaaccgtgaattaaaaccacaagaaattgataaagttgttaatggggaagtggttgaaggcattacagcttatgctcagggccattactataaaatttcagcaaatccagaaactcagaacgcaaaagattttgaaatcagtcttcattttcaggatggcccaattcctgcacatggggtgaatggagttactagtgaagcattgttacaagtgcttattcaccgtaataaaactttagatgaaaaattcccaagcgaattcaataaacaagccattatttatatggaaagtgcgctagaagaatttaataagcgtacagcagagcgccgtgctcgtggtgttgaaggcacacttgtaaagtaa

SEQ ID NO: 59291 - DNA, 333 bp, Acinetobacter baumannii
gtgacatcaaacataaccgaaatttcacgcaagcttggtaacgctggtacagctgcaaaccaaacaaaccacaaaggcggcgcatcagttagtccagtatcaaactggggtgctggtggtgatggtgctaatggtgtaggagatgatggctgggcacttggtggtggtggtgcaagtggtggtttactcatttgccgatatgtgaattcaaccgaaaaaactcagtatatgactttaattgttggcgaagctggtcacactactgaaagtaatggcaacagcggtaaagccggtattggtggctttgctcgtgtaagtactgttaaagcttaa

SEQ ID NO: 59292 - DNA, 279 bp, Acinetobacter baumannii; identical to SEQ ID NO: 57302

SEQ ID NO: 59293 - DNA, 408 bp, Acinetobacter baumannii; identical to SEQ ID NO: 57301

SEQ ID NO: 59294 - DNA, 402 bp, Acinetobacter baumannii
atggcttgggtttcagatcgccgtggtgaattcttaaaaaactggaatggggccgaaggttcacaagaatatttaacagcattttatgaatattcaagagcatgggcagatgaacatttagcggatcgcctcagtaataaagagccagcccaaaattcagataatgatgaatctaaagaactaaatgctccgacagaagttgaagatcttcagcctagtacgacaaatgatgaaggtaatcaactttaccgttcagtaattgaagggcaggttaaagttaatcttgagttattagagcaaattcgggacgaagcagaaaaagatttaaatgatccacttcttattccagcagtgacagagcttttgaatcaagtacagaaaatggaagcggagaatatctaa

SEQ ID NO: 59295 - DNA, 321 bp, Acinetobacter baumannii
atggttcaggcaacctttggtcatcacttcaaaatcgaagaaggcaaggtggttgcatatgatccgaacggcgaaaagatttattcacgtgtccgcccgggtgaacttgcaaatgttgatgaagctttagagtcattggttggtggataccagcataaagacttaattcttaaaggtggtaaaggaactggtggtggttttcaaggtgggggcaaaggtggagcacctactggaatgaaacgcagtgaaatgtctgtttctcagaaagcagattacatcaaagaacatggcaatgatgccttcctaaaactaccgaactaa

SEQ ID NO: 59296 - DNA, 321 bp, Acinetobacter baumannii; identical to SEQ ID NO: 57247

SEQ ID NO: 59297 - DNA, 279 bp, Acinetobacter baumannii; identical to SEQ ID NO: 53681

SEQ ID NO: 59298 - DNA, 279 bp, Acinetobacter baumannii; identical to SEQ ID NO: 57302

SEQ ID NO: 59299 - DNA, 279 bp, Acinetobacter baumannii; identical to SEQ ID NO: 53681

SEQ ID NO: 59300 - DNA, 279 bp, Acinetobacter baumannii; identical to SEQ ID NO: 57302

SEQ ID NO: 59301 - DNA, 246 bp, Acinetobacter baumannii
ttggaaagttggtgtaaatctttagatctggatgttatctgtaatcaacttgaaatagataatggtattttgacaggttattttattgatggtgattgtggttatttagaaaaagtaaatagaataaaaaataaatatgacttaactcaatatcctataatctatgcttatggtgatacacctaatgattatgcaatgttggagttagctcatagaaaatattataaatggcaagagattaattaa

SEQ ID NO: 59302 - DNA, 315 bp, Acinetobacter baumannii; identical to SEQ ID NO: 44769

SEQ ID NO: 59303 - DNA, 348 bp, Acinetobacter baumannii; identical to SEQ ID NO: 57134

SEQ ID NO: 59304 - DNA, 372 bp, Acinetobacter baumannii
atgcagtccattagtctcattattcaaatttttcttgtattagcatttggttattttctaggtcctaaactttcactaaatattcggcattttatttttaaaatcctgccttatttttcttatattttactaaccagtgtagctttagaactaacactcgcccttgaccaaattgataatccttctactatacttccacctgctctattaattgcattaaccacttctcttggttctttttttacttgcttattcgcctatacaatttttgataaagaaagtgttaaatattgccaaggcatttttagctttaacaataggcgtgattttaggaattcttcttacccaattacatatccatattccctttaa

SEQ ID NO: 59305 - DNA, 393 bp, Acinetobacter baumannii
atggccttaagtgcttggggctttactgatttaccttcttataaagataaatatgatcctaatgagaaagatatagtgataaagacaaataattggttgaatgatgaggcagcagaggaaaaaactcagcaaggtcttactgcctttgtagctcttgatgacgcattcatgagtattgcatcacggatttatttaattagaaatgccaaggaaacgattgatctacaatactacatttggaccaatgattttgtggggaaccttattttacatgagctgctcaaggcagcggatcgtggcatcaaagttcgcttattaattgatgatcaaaacggtataaagcttgatggtatatcaataagctcattattgcagatggatcgattgcagtaa

SEQ ID NO: 59306 - DNA, 2442 bp, Acinetobacter baumannii; identical to SEQ ID NO: 57316

SEQ ID NO: 59307 - DNA, 672 bp, Acinetobacter baumannii; identical to SEQ ID NO: 57210

SEQ ID NO: 59308 - DNA, 168 bp, Acinetobacter baumannii
atgcttaagcctataattattttagttgctataggggcaattggtttggttggatacaaagtatttgcccaaaaggatgaaccgacagaaaaagcgaatgcctcttttcagaaaattcctttaaatgaatataaacccgacaatagcaccctccaagcttcgcagtag

SEQ ID NO: 59309 - DNA, 339 bp, Acinetobacter baumannii; identical to SEQ ID NO: 57277

SEQ ID NO: 59310 - DNA, 357 bp, Acinetobacter baumannii; identical to SEQ ID NO: 57331

SEQ ID NO: 59311 - DNA, 1392 bp, Acinetobacter baumannii; identical to SEQ ID NO: 57239

SEQ ID NO: 59312 - DNA, 375 bp, Acinetobacter baumannii
atggctgaaaaacttttagcaaatgcttcatcaaaattaactttagaagaaaaagcaaagatggaatggattgccaaactagaaggcaagaattccttatctaatctcatccgttctatgtgtaagaaaaagatttcagaagtagaaggtgagatggcaggtaaaagctctctcgaggtaattaaaaacatttgcactagaaaagtctcagaagctgaatctgaatatcagtttctcagaaatgttttttgtgggtcaaaagataacgggtataccagagataccttcgaattagtgcctttacgggccgaaaaatcgcggcatacaaatgctagtgataaatcagtccagcttgatctacttagctggaaataa

SEQ ID NO: 59313 - DNA, 201 bp, Acinetobacter baumannii
atggctgttcaaacccttggaagaatgaacgtgagtaatttagcaaatcatccctgctcaggcaaatgcactgattttaaagaagaacagtgctcaacttgtcttattaatcaagatgccccgcatcaaatcgtaaacactcaaaccgatgaagagaaatttctaaatcgtgcattcaatgcacaaaaggagatttcatga

SEQ ID NO: 59314 - DNA, 1299 bp, Acinetobacter baumannii
atgaaacatgagaacaaagtattttttctcatcgatgtaaataacatgtacgtttcatgtgagcgagtctttgacccatctttgaataataaaccagttattgttttgtcaaataacgatgggtgcgccgtggcgcgtagcaatgagtctaaagctttaggcattaaaatgggtgtgccgctttttcaaattaaagacattgttcagcaacataacgtaatcgttctttcaagcaactatgcaatgtatgctgaaatgtcacggcgctttcatacgatccttgcttcgtatgttacagatgaagaagttgaaccatactcgattgatgagtgctttgttgatttctcagcttatgaaaagaattttgacttagaaaaagtcgggcaacaaatgcgccaacaaatttggaaatggcttggtttgcccgtgtgcgtaggaataggtcgcagcaagacggaggcaaagatatccaaccatatagctaagaaaaatcaagggtttaacggtgtgtgtgatctcgtaaatatggatccgtgcaacaaagaatattactttgctcaaatagatgtgagtgaagtctggggcgtcggtcgtaagcattcaaaaaagttgcaaagcatgggaataaatacggtgcttgatctggcatgtgctgaaccacgggaaatgcagaaaaaattctcgattgttatggctcgtactatctatgaactgcaaggcatctcatgcattgagattgagcacaccccaccctcaaaaaagcaaatagttgcaagccggtctttcggtggtcgtgtaactgaactaacggatctaaaagaagctatctctatgtatgctcaagatgctcgtaagagattgcgcgatgaagggcttttgtgcggatgtatgattgcttttgtacagtcaaaccctttcgacccaaatgtccctttttataacaaatcaattacaggtttgttttctgaaccgactgactgtgcagtagattttgtcaaagcagcgacaaggatgttaaacgatatctacaaagaaggaattaaatataagaagtgcggcgtagtactgacatgtttagagccgaagtctggccatacttatgacctactaactgactttaaacaaatagagaaaaaggaatgtttgatgcaggctatggatggtattcacagcaaatttggaaagaaaaagattggtgtcggtccatgttttgtaccaagtcgtaactggtcaatgtgcaggaataaattaagtaggaatccatttaagtgggatgagttattagaaataaaaaattaa

SEQ ID NO: 59315 - DNA, 513 bp, Acinetobacter baumannii
atgtctggaattatacgtattgacagccgtgttgctgggttttctgatcaaccgattcgtctcattggagccgcatttgcggatactggtgagcttgttattcaaaaaactgccgtttattcaaatttacccgtaccaagtgatttaagagatcaaacagtagttgtcactgactcacctgaccaagtacagaactggcaattaagtttcaatgctaaagaccacttagaggaggtgatttcaatttatcaagctcgttacaaagcaaagttaattgaaattgagccgaagttaaaccagtacaaccctaagaacgtacttgaaatccgtaaggtcgataaaaacggccttcagcaagaatttgatagcagcagcttaaacaacggccatattgcaatcctattagcggtttgggctagtacaaaaattgccaaaggcttttcaattactgaaggcaatcagtttgaagaagatgctgtagatccaacaatgcttcctttttcaatcttttaa

SEQ ID NO: 59316 - DNA, 435 bp, Acinetobacter baumannii; identical to SEQ ID NO: 57281

SEQ ID NO: 59317 - DNA, 942 bp, Acinetobacter baumannii
atgaataatctaatcactgcagctgaagcatttgcagctcttcaaaaaggtaaaactgttctttgtcgtcctattggagacatgttggacttttctgacttagatcaattccccgcttctgtttttggtaaaccgggttttgaattctgcatcaaaatcgaaactattgagctggctggcattacattcacaaagccattaactattgatgagtatgaagagggtcaggaagtttatgtaatcagtacatattcaccttccatttataacgttggatttaaaactcctgcactcattgaagcaattaatagtggttttgttcagcgtgatgctgaaaatgccaagcttcaattaaaagctttttcaaaagcactcggtattgaaatcaacaatgatttaagtgttattcgtcttggtgaggaacctaaaaaacagagaggcaaaaaatcaaaagcagaaaagcctattgaagttatttctgcagaaattcaaccaacaattgttattaccgaacaaactaacgtcaccacatctgaggatctgttagttccagaaactaacgagcctaaagtagatcctgaatatcagaaggcattagatgctcttcttcagcgtgtaaaagaatcaaaaacacctgaagaggtaaatgcggtttatcgatatacccgtacgtggaatgacaaacaaatggaaccactcctccttgccactcacaaacgacttgaagagctcgaaaaatctaaggcacctgcaaatgaaccaccttcactaatggtccagatccaaaatgcgcccgacttaacaacattagatgctttggaaatagatgtggccgcacgagatccacagattcaatcacgactctctaaaggattagcaacattctttaatttgataggcttttcaaattcattgtttgaaattttcgccaaaatcatctga

SEQ ID NO: 59318 - DNA, 495 bp, Acinetobacter baumannii
atgagcgaaattgcaccatctatcatccagataaaaccgtacctcacacaagccgctgttttatctgaagccttatcaatcaagcaagttataccaaccactcacttgcttgttccctatgctctagagaagatttcagcaggttttcccagcccagctcaagattacatagataaagcgctcgatatgaacgagcacttaataaaaaatgaaaccgctactttcattgtgaaagttgcttcactctccatgttaaatgcaggaatcgacattaatgacgagctcattgtcgatcgtagtttagatgctaagcatggcgatatcgttgtagcactgatcgataatgatttcacagtgaagcggttgatgattgaagagtctaggaaatggctcaaagcagaaaatccagaatataaaaatatctatttagcagatggccaagaattaataatttggggtgttgttactcatatcattaagatgacacggcattaa

SEQ ID NO: 59319 - DNA, 1272 bp, Acinetobacter baumannii
ttgattgacgtcaataacatgtacgtttcatgtgagagagtctttgatcctagtttgaacaataagcctgtgattgttctcagtaacaatgatgggtgcgccgtggcgcgcagcaatgaatcgaaatctttaaatataaagatgggtgtgccactttttcaaattaaagacattgttcagcagcataacgtaatcgtactttcaagcaactatgcaatgtatgcagaaatgtcgaagcgttttcataagattctgagttcgtacgtaactgatgaagaggttgagccttactcaatagatgagtgcttcgttgattttaccgcttatgagaaaaactttgatttagaaaaagttggccaagagatgcgacaacaaatatggaaatggcttggcttaccagtttgcgttggtattggaagaagtaagacagaatctaagatagccaaccatattgctaaaaagaattccggctttaacagtgtgtgcgatctcgtaaatatggatccttgcaacaaagaatattatttctcattaattgaagtatctgaagtttggggcgttggccgtaagcattcaaaaaagctgcagagcatgggaattaacacagtacttgatttagcctgtgctgaacctcgagagatgcaaaagaaattttcgattgtcatggctcgtactatctatgaactgcaaggtatttcatgcattgagatcgagcacactcccccgtctaaaaagcaaattgttgccagccgatcttttggtggtcgtgtaactgaattgacagatctaaaagaagctatctccatgtatgctcaggatgcttgtaaaagattacgtgatgaagaattgttatgcggatgtatgattgcatttgttcaatccaatcctttcgacccaaatgttccgttctacaataaatcaatcacaggttcattttctgaacccacggattgcgctactgattttgtaaaagctgcagtacgcatgattgatgaaatctataaagaaggtatcaaatataaaaaatgcggcgtaatacttacaggtcttgagccaaagtctggtcacacatatgacctattaactgactttgaactcattgataagaaagaacaattaatgaaaacacttgataacgtgcaaactaaatttggtaagaagaaattaggagtgggcgcttgctttatacctggtcggaactggtcgatgagtagggataaattgagtagaaatccgtttaaatgggatgaattattagttatattcaaatag

SEQ ID NO: 59320 - DNA, 1344 bp, Acinetobacter baumannii
atgttcttactgaaaaatctcgtctcttcaatatcaaaagttactcaggacctgggtaatattgtatcgataacccctgtagtaaacacaggttcctctgttaatgtaaatgtttctgatatcaacattgctaatgtttcaacaacaggcttactttctaatgttatttcaactgtaaccgatacagtttcacatacaaccacagacttagtttctaatgtagttggtaccgtaacaggtactgtagggtctacaaacccaattgatactgtaaccaatattattggcggcgtaacgggtggcgttacaggtaaccctcttgaagttgttactgacattatcggcggagtaacgggtggtgttgtcggtggaacttctccaatctctccagttattgatgttgttcaaggcggcattgatattcttcaaggcgttgaaagcttaaaaactgaaattattaatacaggcattgaaactgtagctgatgcagttattggtgtattacctcaagctgagcatccagtttctgaaattgcagaccttggcacattaacttttgaaacttctcgtgacacagtcaatggtgctcttgaagttgtttctgatttagtcggtggtgatattcaaggcgctactgaatcagcgaccggtattctcgatacgcttattacaaatggcacaactgctacaggtattgtcactggtgtggttggaagtgttactgatgttattggtggcgtaactggtggtgttgatggcaacccacttgaagtgattacagatattatcggtggtgtaactggcggtgttgatggcaacccacttgaagtgattacagatattattggcggtgtaaccggtggcattattggtggcggtacatctcctatttctccagttattgatgttgttcaaggcggtatcgatattcttcaaggcgttgaaagcctaaaaactgaaattattaacactggtattgatacagtagccgacactattattggtgtattacctcaagctgagcatccagtttctgaaattgcagaccttggcacattaactttcgaaacgtctcgtgacacggtcaatggtgctcttgaagttgtttctgatttagtcggtggcgatattcaaggtgctactgaaaatgcaaccggtattctaggaacacttattcagaatggttcaacagcgactggtattgtgactgatatccttggtggcgtgacaggtactatcggcggcgtaactggcggtatcggcggtgacaatcctcttggcgtagtaactgatattatggtggtgttactggtggtatcggtggtgataatcctcttggcgtag

SEQ ID NO: 59321 - DNA, 1299 bp, Acinetobacter baumannii
atgatgtttactgctccgcagattgggcagttaaagaaacaagtctggaaagaaatcagtatcaatctagcacgattgaagcaagggcctttggcttggcttgctgattatgttgggtaccagtctgaactcgtatacatcaaaggctataaagaaaaatggtatgtctttgcgaagacagcaccaaaacatcaacctacaaacttagctggtaaccacggcgataactacatggtctgggtcgatgaggccagtggtgtagatgatgctgtccttgatgtagcttttggtgccttaacgcatgaagacaaccgtgcagtaatgacctcacagcctacccgtaacgcgggtatgttctatgagactcatcacaagttaagtcatcgagctggtggtgtttggattgcactcacatttaacggggaagagtcaccactagttagtgaacaatccttacaggaacaacggcaaaaatacggcagcagggaagatgctcagtataagattcgtgtactaggtgaattcccagacttatcagatgagttcttaatcacgaagcgtcaaaccgaagaaatgtatgttggcgcgagtatttttgatgaccatcaattcggttatgtcattactgttgacgttggtggtggtgttggccgtgacgattcagtaattgttgtttctaaagtttggggtgaagcgcaatggggagagcgcgcacgccgtgtagaagttgtagatattccattatgcaaaaacagagatgatatcttagaactatttgcaaagattaatgagctacttttacagtacccaaatgctaacttggttgtagatgataacggggcgggtaaaggtttaggccaataccttaaaaagcaaggtattttctacgttcctgtttattggggctcacaatgttttagtaatgacaatagaaaagagtttacaaataaacggtcattagcttatgtgggcttagctcgagcaatcgcaaatggccgttttaaaataaaaacgaagaaacacaatgtgaaaattaaagatcagttaatccacgttccataccgttttgatgactttgctcgttataaaatcttaagcaaagacgaaatgaaacggatgggaattaaatcaccggatatcggtgatgcttttgctttcttattcttggaaaacgttcactacactgaagcttacgaaactgtaaatgtcactgacgatacaccggaaggccgtgaacaagctgaacgtaagtcaagattcagtgctttaagagaagcagctgaaaaagaaaatgattag

SEQ ID NO: 59322 - DNA, 1569 bp, Acinetobacter baumannii
atggctgttggcacaacacttacggttgcaggtgtgcctattgaccctaaagctattgagggtgcatttaaagacgctcttaataagttagagagtttaaaagaagacttaaaagaacaaggcgaaaaaattgatgaaaacaaagatcagataagccaagaaattgatgaaaaaataaaagaagtagaagagttaattgataatattaaagattctgatgcctataaattgcttgaagaaggtattaatcacattgatgaagaggtgcaaaaaatacatgaccaagtaaaagaagtaggtcagattgcacaaaataaagttgatgaaattcgggcttatattgatcaagaaattatcgatacaaaactgattgttgaacagcatgcaaatgatgcaaatattcgtttggatgaagccaataaacgtattgatcaatcaattctggcaaatgaagagttggtagctgatgctcaacaacgggcaatccgcgctgagaaagaactcgatgacaaaattggtttcatcaagagagaaacggattctattattgctgatgttagaagtgattctgatgaaattcgcttggtcgcagaaaacgcgaaaaaagttgcagaccaagaagttctagaccgtaaaaagcaagcagctgacactcttattgttattgatcaaacaaaggccgctttaaaacaagatattgatcaaaacttagttaaagctggtcaaatgattgatgatgctaaattagcattaggtgaagaaactaataccctcattaatcaaaaaattgaaccaatagttagcaaaactgaagctgcagttaaaaaagtagatgaatttgcagctcagtatgttgagcttgataagaaagtcgattctggttttctagctgaagctgaagcacgtgcaaatgataaagaggctttaactcaaagttttgagcttaagtttgctgaaatgcaaaacgaattgggtaaatcaaatgccttaatttcagaagaatctaaaactcgtgcagctcaagacaaagcaattactgaacaaattagtattgctcaatctcaaattggtgataacaaagctgccattaatagtgttgaacgaactgtagttgaccttaccaaatctgtggctgaaaaaactgaccaaatacaggccagtttagacacaacaaatgcaagtttattaagtgctaatgagttagcgcggatgcaatcacttggtaaacctttacgtgatgatccgacgtttctttctggtaatgggggattaagtgcctatgtggtaccagcaggctcaacactaactcgacaagccaaatctacggataaccccgtaaatagtacccatgagatgcttttaagatctacatcatctttaggtggtggttggtatccaactgttcctacacttgtagctgcgcctaataaaacctttttaataaaacaaattattaaaatgccaaaagggacttatttattaccagttggcaatgctacaggtacaggtggttatttacgagtacttggaaataaagaaggtacagggactgttctaaattttgtgtaa

SEQ ID NO: 59323 - DNA, 201 bp, Acinetobacter baumannii; identical to SEQ ID NO: 57296

SEQ ID NO: 59324 - DNA, 804 bp, Acinetobacter baumannii
atgaattaccccaacgattcgcttaaatgcatccaaaacgcttggtataagcagcttgtcaattttcgtgcttggtatatgcctgagacacaattaacggctgactggaagttgagagccattggtaacgctataaaagcatgtccgtcacggatgatggacgattcagaagcaatgctttctgaatatagaaaaagccagaagcatgtggaagaatccaaagtgattttacctgtaatgcttactgcaacagcgttaactgaccaaccccctgatgtaaatcaattactaccagtgcctgattttattgaaacggtcattgatgagaaacgggtgaaggttcgtctggtgccaacaactgtacgtgctcaaatcgctttctttgccaccaatcctaatgatctgcgttcagtcattgggcagttttgcgcatacatgtctagcagcgataaccgccgttttaatgtgccatttcagcaatggaatgatcatgttgttaattcaacattcactgtttttgaaaatgaactttttccatcaccagtcccaagcgaagcaatcaatctttctatctcaactgtagatattcagcttgtgggttatacacctaacgttatcggtttcggtggtccattcgacaacaacacaggtaatggctatgaacctgacggctcagcaacggaacagcccgcaatcaacgacaaagttgtagtgcaagctgatcagtacacatcactcgatcaccagcgtgtgaagggtgatagagaaacaggtgaaattacagttgagcgtatagatgactga

SEQ ID NO: 59325 - DNA, 765 bp, Acinetobacter baumannii; identical to SEQ ID NO: 57243

SEQ ID NO: 59326 - DNA, 336 bp, Acinetobacter baumannii
ttgaaaaaaaatggtgtacctgagaaagacgctgctgagttcttacaagttcgtaaagccaagaaagctcaaaacaccgaaaacgcttttgacgcacttttgaatgaagcccaaaaagcaggaatcacactgcagcaagccgtcgaatattgtttgaaaagacaaaatccttggggtgccttcaaagcatcttggtacctaaacgaaaaacccgaaatgactaccggtcaacagtcaaaccatcaatcgttaccacgcaatgtaaatgatcaatggggcgcgccaaagaaatatgaaccggttgctcacacagctgtgaagggtgagttgatatga

SEQ ID NO: 59327 - DNA, 273 bp, Acinetobacter baumannii; identical to SEQ ID NO: 57287

SEQ ID NO: 59328 - DNA, 273 bp, Acinetobacter baumannii
gtgaaaattaaagatcagttaatccacgttccataccgttttgatgactttgctcgttataaaatcttaagcaaagacgaaatgaaacggatgggaattaaatcaccggatatgggtgatgcttttgctttcttattcttggaaaacgttcactacactgaagcttacgaaactgtaaatgtcactgacgatacaccggaaggccgtgaacaagctgaacgtaagtcaagattcagtgctttaagagaagcagctgaaaaagaaaatgattag

SEQ ID NO: 59329 - DNA, 279 bp, Acinetobacter baumannii; identical to SEQ ID NO: 53681

SEQ ID NO: 59330 - DNA, 912 bp, Acinetobacter baumannii
ttgttgcagcagttaatcgatttcaagaaaaacttagatgctcaatatccaaaattaattggagcaggtgtaaatattggtagctcagccacagttgaactaggtggcaaagttactgatttacgtgattcaaagtatgcaatctatttaacaccagaaagcacacatgaagcatgggagcttacccgtgctgaaaagggtttttcatatgaagtttgggaccgctcaggtcaaaaccggatagggtattcaggtactgtgaattggtccgttgttcaggtagctgcagaaacactaaacgatggtaatggcgattacacagtaccaggtgtttatatcattccaattcaaccaaaagaacaaaaagaattcatattggttggtgctggtggtgctggtggtggcagtgtctgggagttaggagcattggcacatgggaccagtggtacagatacacgcttacgtttaaatgaacttgatttggcggttgttggtggcggtaagggcggtaccagtggtcagtggtcgaatggtagtgctttctcaaatggtgctggtggtttagcaggtgtaatcactgtgacatcaaacataaccgaaatttcacgcaagcttggtaacgctggtacagctgcaaaccaaacaaaccacaaaggcggcgcatcagtaagtccagtatcaaactggggtgctggtggtgatggtgctaatggtgtaggtgatgatggctgggcacttggtggtggtggtgcaagtggtggtttactcatttgccgatatgtgaattcaaccgaaaaaactcagtatatgactttaattgttggcgaagctggtcacactactgaaagtaatggcaacagcggtaaagccggtattggtggctttgctcgtgtaagtactgttaaaacttaa

SEQ ID NO: 59331 - DNA, 948 bp, Acinetobacter baumannii
atgttctatgagactcatcacaagttaagtcatagagctggtggcgtttggatagctctcacatttaatggggaagagtcaccactagttagtaagcaatccttagaggaacaacggcaaaagtatggaagccgtgaagatgctcagtacaagatccgtgttctaggtgaattcccagacttatcagatgagttcttaatcacaaagcgtcaaactgaagaaatgtatgttggcgcgagtatttttgatgaccatcaattcggttatgtcattacggttgacgttggtggtggtgttggccgtgacgattcagtaattgttgtttctaaagtttggggtgaatcgcaatggggagagcgcgcacgccgtgtagaagttgtagatattccattatgcaaaaacagagatgatatcttagaactatttgcaaagattaatgagctacttttacagtacccaaatgctaacttggttgtagatgataacggggcgggtaaaggtttaggccaataccttaaaaagcaaggcattttctacgttcctgtttattggggctcacaatgttttagtaatgacaatagaaaagagttcacgaataagcggtcattggcttatgtgggcttggctcgagcaatcgcaagtggtcgttttaaaataaaaacaaagaaacacaatgtgaaaattaaagatcagttaatccacgttccataccgttttgatgactttgcacgatacaaaatcttgagtaaagatgaaatgaaacggatgggaattaaatcaccggatatgggtgatgcttttgctttcttattcttggaaaacgttcactacactgaagcttacgaaactgtaaatgtcactgacgatacaccggaaggccgtgaacaagctgaacgtaagtcaagattcagtgctttaagagaagcagctgaaaaagaaaatgattag

SEQ ID NO: 59332 - DNA, 687 bp, Acinetobacter baumannii
gtgcgttttaaagctggtggactgattagagagggggtagatccgttagctgtatcggaattacgcttattatcaagctatccatcgctatacgatgaagatgcggtctttcttggtaactttgactatgcggtacgtaaaaagttcatgaaacgtgctcagtttgtctctgtctggaatgaaacgctgcaagagcaacactttgctatcacataccgcgacattaatcatttaaaccttgtggtagttgcgaagaacccagctgaacaagcaacattagaacaagatatctgtcggtatattggttattgcgataacttgtatgaaggtaaagtgaatgtacatgaagttgtagaaaagcctattgaagtaaaaattaaaggctctttggcttctgttcataatacggatatggttaaaacacagatcaaagaattacttgttgaacgttacggacgtgaatcacttagctctagcagatggataatgtatggatttaataaacaagaaatgtcaaagcttatcaatgacaatatagtggcattccaagaccggatgagtgactttactattatgctttcaaatgagttgaataagcctaatgagtgggtgtatgtgacaaaagacagcattactgttgaattggaacgcacggctgatatttcgggggctacatggaccctataa

SEQ ID NO: 59333 - DNA, 879 bp, Acinetobacter baumannii
ttgtgcaacaaagccaaactgtataattataaggatcgcaagctgcctcgcgctgttgtacgtaataacattacaaatagtactgtaactaatgacagtagaaatgttactcatcctgttatttatctaagtttgaatcgccttatacctattgttaacagacataaatatgaaacaaaggacttagaatttttaaataatcataaggatgagtttattcgtataaataatcagctattatgtaaaacatctggtagtttatttactccgacaacaggatctattgaatcagtcgcagttcactctacagcttatgaccatgaatcggtttctgcaggtgaagacaatgccgggcagataatacaggctatattttcttttaagaaattaaaggaagaatatggtaattaccatggcggtttacttctgattgatgaggctgatgctggcttgtttcccggggcacagtatcaattaaaagaaatacttaatcgttatgctaaggaattaaacatacaagtagtttttacaacacactcgcctattttaatagaagaatattataaactttcgcaaagggatcataagaacttcaagactatttatctatctaataaattaggcaaaatccaaatctttgaaaactattcttggactgatatttatgctgacataagtgtaaaaatgaaagaagtaagtccagagttatcatttcctgaaactaatgtatattttgaagatgatgaagcaagagctttttttaatgcacttgttactcaaagaaaagtaaaaaaacctttgaaattgatgaaagatatttcaatgggttgtggtaattatttggaatacgccaaaaagtacctgaattcgataaactaa

SEQ ID NO: 59334 - DNA, 459 bp, Acinetobacter baumannii; identical to SEQ ID NO: 57347

SEQ ID NO: 59335 - DNA, 555 bp, Acinetobacter baumannii
  misc_feature (532)..(541): n is a, c, g, or t
atggcagtattacttgcaaaacgtcgtaaaattccaactttccacatggaagctggaaaccgttgttttgatatgcgagttcctgaagaaattaaccgccgaattgtcgatcatacggctgatattaatttaacttacagtacgattgcccgcgattatttattggcagaaggtttaccagctgacttagtaatcaaaacgggtagtccaatgtttgaggtacttcaccattacaaagcaaaaatagaagcttctgatgttcttgagcgtttaaatttaaaagagcatgaatactttattgttagtgctcatcgtgaagaaaacattaactcagatcagaacttcttagatttggttgaaatgttaaatgcagttgcagagcgatatcagtaccctgtgattgtatcgacacatcctcgtacgcgtaaacgtattgaagagttaaatattgattttcatcctttgattcaattattaaaaccactcggttttagtgactacaacaagttacagctttcagcaaaagcggcannnnnnnnnngcggcattgtctga

SEQ ID NO: 59336 - DNA, 351 bp, Acinetobacter baumannii
  misc_feature (39)..(48): n is a, c, g, or t
gtgactacaacaagttacagctttcagcaaaagcggcannnnnnnnnngcggcattgtctgatagtggaacgattaacgaagaatcatcaatcttgaatttccctgcacttaatttgcgtcaagcacatgagcgtccagaaggaatggaagaagcggctgtaatgatggtaggtttgaaagccgaacgcattttacaaggtttggcaattttagaaggtcaaactagaggcgaaaatcgtcttttgcgtttagttgaagactacagtatgccaaatgtgagtgaaaaagttgtgcgtatcattatgagttacacagattatgtaaatcgagtgatttggaagaagtattga

SEQ ID NO: 59337 - DNA, 573 bp, Acinetobacter baumannii
atgcctatgttgatggctaacttgcaaactgggcaaatgcttcaagctgcagctactctaggagaaaactcaccctttatttctgcattaagcgatatggcatcaggacctttagcaacggctgaaaatgcgcttaagagcgttgaagggcgaactaatttaaccaaagtaaatacaactcaagtattcctttcaacatcatcagtacgtcttaatttatcaatctttttcttggcctttagtgatgcaaaatccgaagttgaagacaagatcatgcagttggaggcttggagcgtaccagtatcattatcttctgagtctacactgcagaatgttgtcaatgattcaaatactactttagaaggcttgttttcaggtgtcattccaccgtttgtatctcttactactcacggcaaaacttataagcctttcattattgaaagcgtttccgcgccaattgtcgcgcccattgatgaaaaggggaaccggttaagtttggccgtcaatattagtttgttgagtcgaactgcatgggattcgaaagatatttactcattgtatggagtcaaataa

SEQ ID NO: 59338 - DNA, 672 bp, Acinetobacter baumannii
atgattgacaaaagtaagtcctcactaagcgaggttctatcgcagattaaagatggtgcaaccattctgattggtggttttggtaccgcaggacaacccgctgaactcattgatggtctgattgaacttggcgttaaggacctgaccattgtcagcaacaatgccggtaatggcgattatggtctcgctaagctgctcaaagccggttcaattaaaaaagtgatttgctctttcccacgtcagtctgactcttatgtatttgatgaactgtaccgtgccggaaaggttgagcttgaactggtaccgcaaggcaatctggcgtgccgtattcaggcagcaggtatggggcttggggcggtgtttacacctactggctttggaacacttttagctgaaggcaaagaaacccgtcatattgatggtaaagactatgtgcttgagtatccgatcaaggctgactttgccctgattaaagcttacaagggcgaccgctggggtaatctggtttaccgtaaatctgcacgtaactttggcccgatcatggccatggctgctgatgtcaccattgcccaggtttctgaagtggttgagctgggtggattagatccggaacacatcattaccccaggtatctttgtacagcatgttgtacaagtacagcccgcacagtaa

SEQ ID NO: 59339 - DNA, 333 bp, Acinetobacter baumannii
atgtcaagcgtaactagtatttataatgccttatctttacctcatcaaccaagtgaatctttttcacttaaagcatttattgataactaccgttatcctgaaaatgaaatggaaaggcttcgggcattatttaaaaatttctttaaatccgttgaaatccaagctcttattaagaatgcaaactctctcaatccttatcggtatttagtttcaaaaaatccttcattaaaagaaaactttactaaggatcttatttttgctacaaaacacgtccttacaaaaagtaaaggcatatcttctcacttggtggaaacatggtatgaaaacgtttag

SEQ ID NO: 59340 - DNA, 273 bp, Acinetobacter baumannii; identical to SEQ ID NO: 57287

SEQ ID NO: 59341 - DNA, 447 bp, Acinetobacter baumannii
gtggtagttgcgaagaacccagctgaacaagcaacgttagaacaagatatctgtcggtatattggttattgcgataacttgtatgaaggtaaagtgaatgtacatgaagttgtagaaaagcctattgaagtaaaaattaaaggctctttggcttctgttcataatacggatatggttaaaacacagatcaaagaattacttgttgaacgttacggacgtgaatcacttagctctagcagatggataatgtatggatttaataaacaagaaatgtcaaagcttatcaatgacaatatagtggcattccaagaccggatgagtgactttaccattatgctttcaaatgagttgaataagcctaatgagtgggtgtatgtgacaaaagacagcattactgttgagttggaacgcaccgctgatatttcgggggctacatggaccctataa

SEQ ID NO: 59342 - DNA, 273 bp, Acinetobacter baumannii; identical to SEQ ID NO: 57287

SEQ ID NO: 59343 - DNA, 273 bp, Acinetobacter baumannii; identical to SEQ ID NO: 57287

SEQ ID NO: 59344 - DNA, 273 bp, Acinetobacter baumannii; identical to SEQ ID NO: 57287

SEQ ID NO: 59345 - DNA, 273 bp, Acinetobacter baumannii; identical to SEQ ID NO: 57287

SEQ ID NO: 59346 - DNA, 249 bp, Acinetobacter baumannii
atgccggatgagtttgaacgggtaatcgaaggccaatatcccgatgtaaagccaaccgtaaattaccggatttacagttcagacaatctgaattctccaatgttttacttactcggactacaactctcaagtgttgccatgaaccataaagctgtgacattcaaggctgaatcaccacgattaaataccactaaaactggggacatttttgcactggatcgctttagtggtttgaagggggctatatga

SEQ ID NO: 59347 - DNA, 279 bp, Acinetobacter baumannii; identical to SEQ ID NO: 53681

SEQ ID NO: 59348 - DNA, 279 bp, Acinetobacter baumannii; identical to SEQ ID NO: 53681

SEQ ID NO: 59349 - DNA, 279 bp, Acinetobacter baumannii; identical to SEQ ID NO: 57302

SEQ ID NO: 59350 - DNA, 369 bp, Acinetobacter baumannii
atggaagcggaattcttagaggcaaattgtaagaatgtcgctgaatggattgcctgcatgatggcatttcagttgagttattctaatcatgagcacttagctttattgccggatagaacaaatcctcaattatttgaagaacaatttaagcagcggctagatttcattaagaaaatgccagccagtgaatttgatttgtgctatcaagatttcaataacttaaataacgagctattttcacatttacgtttaagtgttgataaccacggtattttagtggaaagaggtgcagatgacgcgcctgcacgatttcgcaccgcttccatctttacaggaatcatcaaagagttggaccgatcttttgcttga

SEQ ID NO: 59351 - DNA, 417 bp, Acinetobacter baumannii; identical to SEQ ID NO: 57624

SEQ ID NO: 59352 - DNA, 2397 bp, Acinetobacter baumannii
atgaaaaatggtaaatctataaatcaaaaatcatatccgttaacgcgttatggatttatttgtgctgtttcaagaatggaatcttcatcagatttaagtttacccttaacggcaccggtaaacattagagcaagccaaaataaaaattctcggggttatattggtttttttcagtttggggaagctgcactgattgatcttggttattataagcattggaatgataattctgataaaaccaaagcaaacgattggaccgggagttgggttggacataatggtgttaattctttatcagattttttgaaatcccctgctaagcaaattcagatcattggagaatggatagatcttctttgcaaacgattaagaaatagaagtttcaatgaatactatgggaaaataataaatggaattgaaattactgaatcaggtgctattgcaggtgctcatttagttggggaaggaggattaggttcttttttaggtatatcaggttttaaaggaaattataaagaagtagatggaaataatgttcacattagtagatatattgagatgtttaaccattatgacttagaaagctgttgtagtagaaaaatatatataatattaaaaaaccaaataggacaaatagcaaaaaataaaaaagtaactattgaatctgaatatagtggtaagtttaaacaatctaagtttattgtaagtgctgagtcagatgagcaaggattattacctgttattattagacatccaggcagtaaaattataattaaagtagatggcaaacaatctgctgtcatcacacaagcctctgataaaaaacaatctattgaattaagtgtaagtgaagatattaaaattcaatctgtcttacaaaaacctgctgaaccagagccaaaacaagaaaaagttgttgtggtggaacagaaaactgttgatttgaagaaagatgaggtgaaaacgaatgctcctaaagatataaaatttgatatagcgataattgaaagtgacacaaatagaaaaataacgaatatgaggttttttataagatataaaggtaagatcaaagagcatacttctgatagttcaggaataaaaactggtataattgcagaagagggggaaaatttagatatattggtaaatggaagtaaaggttatcaaaaactaaaaacaatatctataactaaaggaatggaaaatagctgtatatcagtcccattaggactagtcagtgtaaaattgaagatacatgatagtaaaggtaaaattttaaaaaataataagttttttgtttcatatagaggtagagaaatagaaaaaataacggatagtaatggctttattcaattaaaaatgttgaatgcatttgtttataaattgcttctttcaaataagaaacctattttgacattaagaaatgatccaagtatttccgtaatcaatgttaacttaaattctgcagctacaacaatacagatgcctcgagtagcttcaaatcccccaagtaagacagtgccagcaaaaacaaaaccagcgaaagaaacgtcatctaagagagaagagagctttgttgattacttaattgattttattccttcattaggaaaaacagagaatgttcatacagaaaaaaatggtaatcctttaaccaaacagtatggtagtgatgtcgtttttactattaaaacaatcaataaagagacaggtaaggaagaaaatctagcttattcaattaagtataatggtgcaaaaagaacacattatactggacaagatgggattggattaaaaaaacatcggggtgaagagggaaagaaaattgaaattgttgtagatgttgatagtaaagaacaagtactttataccgctatattgaagaatcctatgccggttattgaaataagaatggataagccaaaagatgatgactcatatttattccctttaaaggcacggacaaattcatataaaaatggatttgctcgatttggttctaatcgtagtggtggaaaacgtaaacacgcaggttgtgatctgtatgcaccaacaggaactgaaattagagcgatggctgatggaaaagtccgtgtagtaaaaggtttttattctggtactgatgtaattgaaattgtacataaaaaacatattatacgctatggcgaggttctggcaggaaagtccttagtaaaagttggagatgatgtaaaacgcgggcaaactattggctatgtcggtaaactcacagtacaagttccaagtatgatgttacatttggagatgtattctaatcctaaagatactagtccattaacagttcgtggcaataatgcctatcaacgacgctctgatctaatagatcctactacttttttagataattcaacattatga

SEQ ID NO: 59353 - DNA, 2967 bp, Acinetobacter baumannii
atgccacgtcgttccatcctgtccgccgccgagcgggaaagcctgctggcgttgccggactccaaggacgacctgatccgacattacacattcaacgataccgacctctcgatcatccgacagcggcgcgggccagccaatcggctgggcttcgcggtgcagctctgttacctgcgctttcccggcgtcatcctgggcgtcgatgaactaccgttcccgcccttgttgaagctggtcgccgaccagctcaaggtcggcgtcgaaagctggaacgagtacggccagcgggagcagacccggcgcgagcacctgagcgagctgcaaaccgtgttcggtttccggcccttcaccatgagccattaccggcaggccgtccagatgctgaccgagctggcgatgcaaaccgacaaaggcatcgtgctggccagcgccttgatcgggcacctgcggcggcagtcggtcattctgcccgccctcaacgccgtcgagcgggcgagtgccgaggcgatcacccgtgctaaccggcgcatctacgacgccttggccgaaccactggcggacgcgcatcgccgccgcctcgacgatctgctcaagcgccgggacaacggcaagacgacctggttggcttggttgcgccagtctccggccaagccaaattcgcggcatatgctggaacacatcgaacgcctcaaggcatggcaggcactcgatctgcctaccggcatcgagcggctggttcaccagaaccgcctgctcaagattgcccgcgagggcggccagatgacacccgccgacctggccaaattcgagccgcaacggcgctacgccactctcgtggcgctggccaccgagggcatggccaccgtcaccgacgaaatcatcgacctgcacgaccgcatcctgggtaagctgtttaacgctgccaagaataagcatcagcagcagttccaggcgtcaggcaaggccatcaacgccaaggtacgtctgtacgggcgcatcggtcaggcgctgatcgacgccaagcaatcaggccgcgatgcgtttgccgccatcgaggccgtcatgtcctgggattcctttgccgagagcgtcaccgaggcgcagaagctcgcgcaacccgatgacttcgatttcctgcatcgcatcggcgagagctacgccaccctgcgccgctatgcaccggaattccttgccgtgctcaagctgcgggccgcgcccgccgccaaaaacgtgcttgatgccattgaggtgctgcgcggcatgaacaccgacaacgcccgcaagctgccagccgatgcaccgaccggcttcatcaagccgcgctggcagaaactggtgatgaccgacgccggcatcgaccggcgctactacgaactgtgcgcgctgtccgagttgaagaactccctgcgctcgggcgacatctgggtgcagggttcacgccagttcaaggacttcgaggactacctggtaccgcccgagaagttcaccagcctcaagcagtccagcgaattgccgctggccgtggccaccgactgcgaacaatatctgcatgagcggctgacgctgctggaagcacaacttgccaccgtcaaccgcatggcggcagccaacgacctgccggatgccatcatcaccgagtcgggcttgaagatcacgccgctggatgcggcggtgcccgacaccgcgcaggcgctgatagaccagacagccatggtcctgccgcacgtcaagatcaccgaactgctgctcgaagtcgatgagtggacgggcttcacccggcacttcacgcacttgaaatcgggcgatctggccaaggacaagaacctgttgttgaccacgatcctggccgacgcgatcaacctgggcctgaccaagatggccgagtcctgccccggcacgacctacgcgaagctcgcttggctgcaagcctggcatacccgcgacgaaacgtactcgacagcgttggctgaactggtcaacgctcagtttcggcatccctttgccgggcactggggcgatggcaccacatcatcatcggacggacagaatttccgaaccgctagcaaggcaaagagcacggggcacatcaacccaaaatatggcagcagcccaggacggactttctacacccacatctccgaccaatacgcgccattccacaccaaggtggtcaatgtcggcctgcgcgactcaacctacgtgctcgacggcctgctgtaccacgaatccgacctgcggatcgaggagcactacaccgacacggcgggcttcaccgatcacgtcttcgccctgatgcacctcttgggcttccgcttcgcgccgcgcatccgcgacctgggcgacaccaagctctacatcccgaagggcgatgccgcctatgacgcgctcaagccgatgatcggcggcacgctcaacatcaagcacgtccgcgcccattgggacgaaatcctgcggctggccacctcgatcaagcagggcacggtgacggcctcgctgatgctcaggaaactcggcagctacccgcgccagaacggcttggccgtcgcgctgcgcgagttgggccgcatcgagcgcacgctgttcatcctcgactggctgcaaagcgtcgagctacgccgccgcgtgcatgccgggctgaacaagggcgaggcgcgcaatgcgctggcccgtgccgtgttcttcaaccgccttggtgaaatccgtgaccgcagtttcgagcagcagcgctaccgggccagcggcctcaacctggtgacggcggccatcgtgctgtggaacacggtctacctggagcgtgcggcgcatgcgttgcgcggcaatggtcatgccgtcgatgactcgctattgcagtacctgtcgccactcggctgggagcacatcaacctgaccggtgattacctatggcgcagcagcgccaagatcggcgcggggaagttcaggccgctacggcctctgcaaccggcttag

SEQ ID NO: 59354 - DNA, 228 bp, Acinetobacter baumannii; identical to SEQ ID NO: 52570

SEQ ID NO: 59355 - DNA, 1308 bp, Acinetobacter baumannii
atgaaaaagtatgattatgatatagcagtaattggcgctggatgtgcaggtgttgttgcagcacgggatttaagtaatgcaggtcataaggttgttttattagaggcacgtgaccgtattggtggccgaacctatacaggtgaagcatttggccgacaagttgaatttggtggtggttactcacactggactcaaccttatatttggagagaactacaacgctacggaattggcttaaatcctcctacagaagttgataaaacggtttggtttgcagacgggaaactacacacgggaactcaagctgaatatgctgctattgctgaaccattattaacagctttctttaatgacgctcgtcagtggttccctcttccttatgatgtaaatgctatcgatacgagtgatattgaaaaacaaacattaagagatcgtcttgataccttaaatttatcaacttatgaacgtgacgttttagacggcctattatcaacacttgttcactcttgggatgagcaaggagtcgcacagctcttattctgggcagctacctattttggaaattggggtgcgttctttgaagtagcagggtcttggccaattgccggtggaacacaaaaactcgtaagagctatttataatgattcaggtgctgaattacgacttacaactccagttgcagccattgatgatcaaggtgaacaggttgttattacgactcaatctggtgaaaagattttgacaaaaaaagcccttgttgctgttccattaaatgttttatctgacatcaaaattacacctgaggttaataaacctgctcgggatatgattgttgcaaaacatccaatgcgtactgctaaattatgggcacgtgtacgtggaaaaatcgagccatttattgcatttgtgccagttgagcaaaacccaatcaataccgttcgagttgaatatgaacatggagatgactcaattttagtctgttttatttctgacgagtcaactatagatgtgaacgatattgaaggtgttcaaaaagctttacagatgtttaagcccgacattgaagtgcttgacatcgcatcacataactgggctaaagatccttatgcacaaggcacatgggtacactatcgccctgggcatttgtccgatgctgctccactcatgcgtaaacctcatgggaatatctatttcgcaggaggagatattgcaacaatgagcatgggcggtatcgaaggtgctctagagtctggtattgaaactgctgcaagcatcacacatgcattagctcaaaaattagcagggtga

SEQ ID NO: 59356 - DNA, 3120 bp, Acinetobacter baumannii
atgtttaataatatttttcagatcttagagagttttggttttctctcacagcatcgttcggtgtatctccagttttcagatgcatccctgaatagtcaggtttttttacaacgtatagatgggcaacattatcttaatcagggcatgacagccgagctgatttgtttatcaaccaatgctcatattccactcaaaacatttattggggtgcaggttgctgttgatcaagtaacagatcgaggaagttttttccgtactacaggtattattactggagcatcacaagggcaaagtgatggtgctttaactttatataaacttgctataagtgatccaacttatctctggcataaacgcagaaatagccgtgtgtttatgaacaagagtgtgaaagaaattagtgaaattctgtttcaagagtggcaaggaaaaagcccattatttgcttctagtctgactctagatttgagcggcttgaaacagacctacgatgtccgtccttttgttatgcagctcaatgaaagcgactatgactttttaactcgcttatggcgtagtgaaggtattagctggctcattgatgaagcagagcttaccgtggcgagcaatatggacaatattcagccacaaaaattacgtcttattgatgataataaccaatatcaagctctgacaagaagagcgattcgttaccaccgcagtagtgcaactgaacaatttgatagcatgaccagcctaatggctgatcgcagtttacagccgacttctatatttgtgcagcgttggcagccagacgtattacaacaaacagatggggcaggtagtgtccaaagtaaacatcagcatagtactaactacgacaatcaaagcttaagtcttgaagaagcatggcactttagtccggcatggatgcaggatttaaatggcgaagatggggcaacctcagcaagtaatcaacaactagaaaagtttaaccagaacctaagtgcttattatgatgctcagtctaagcagtttattgcaaaaaccacagtacgagatacacaagttggctattggtttgaactcaatgaacaccctgaaattgatcagcatgaaagcacagataaagagtttttaatcataggtaagaattattataaccaaaataatttacccaaagatttaaaccagcaaatccaaactttagttcaacaaagcgattggcaagcgagtaataccgacgagcgtcaagcgaatcagttaattttacaacgtcgttatattccaacaacaccagcttataacccacagactcatagccccgttgctcatccacaacgcgcaaaagtggtggggcctgaaggtgaagaaatctatgtagatgaatggggtcgtattaaagtccgcttcctgtttacgcgtagtgatgaccatagtcatgatgggggcgcagggaccaataataatgacaccgattcagcttggattgacgttctaacgccgtgggctggagaaggttacggtgcgcgttttttaccgcgtattggtgaaattgtcgttattgacttctttaatggcgatatcgaccgaccgtttgtgatgggtcgaattcatgaggcacagcgccaaccaaccaaatttgataacaaaggaaagcttcctgatactaaaaagctcagtggtatccgttctaaagaagtgtcaggtggtggttttggacaactcaggtttgatgatacatcgggacaaattagtacccaactccaaagcagtcatggtgcaagccagttaaatctggggaaactcagtcaccctaaagataaagcagaaagtgaagaccgcggagaaggttttgaactacgtacggatcaatggggagctttacgcgcggggcaaggtctattggtgtccacccataaacaggataatgccaaaggagaccacctagatgccgaagttgcgaaaaagcaacttgaaggtagtcaaactaacagtaaagcgctaagtgacattgctaaaaaccagaaaaccgatgaaatagaatcgattgaacagttaaaagattttgcctcacaaattcagcagcaaatcgctaaatttgaaaaagctttacttcttttgagttcaccggatggtatagctctaagtagttcagaagatattcacatctcggctgatgcacaaattaatcagattgctggagacagcattaatataagtactcaaaagaatgtgattgcccatgcccaaaataggctcagcctttttgctgctcagagtggactaaaagctgttgctgcacaaggtaaggtagaaatacaagctcaggcagatgcactggatgtactgagtaaacttgggattactatttcatcaactgatgataaggtcatcattagtagcccaaaagaagtcaaaatcacgggcggctcatcgcaaattactctaaatggttcaggaatctttccgaaaactggtgggaaattccaggtcaatgcaggtcagcatttgtttatggcaggagcaagtgcaaacgccagtgctcctgagttgcctaaagctaaacctatgcagggagcattggagctacttcggagttatggtggagataacttcttcaagcaaaatagctataaagtcattgattcattaggtaagcaaattacgggcaaactcgatggaaatggttttgcacaagtaacaggtattgcacccggaccagctaaagtagtttttgagaaggataatacaagtgcatggctacaaagcagtgattttaaacgtaattatacgtgggctgaaccagtcaaaagtgttcaaggattaatgaaaaatgctctagaagcagtggggcaaaatacgatgtctcagttgcaaaataatcttctttcaacggataaaaatagtttcaaaaacttaggtaagaatactttagctaatttagctggccaaacagtaggccagattaaaaatcaggtaactaatactgcccttaatactgtttcaaaacaacttaatctcaatttatcggccgatcaaatgaaaagtcttggccaaatggcgacaaatccaagtcaatctcttgaaatgcttaaagagcagggcgatttagatacttttgtacggtcaaaaaagtag

SEQ ID NO: 59357 - DNA, 3183 bp, Acinetobacter baumannii
atgttgaacagtattcatcaagttttagatagtttgggtattagcccgcagaaacgtgctattcatgttcaatttacgtctccgatattgaatgaccaagtatttctgcaaagaattgatggtgtacatgcactcaatgatggtttaaaagcagaacttttatgcctatcgacaaatgcaacgattcaacttaaatcttttattggtgttcaggctgctgtagatattgtgacggagcgaggtgaattaactcgcgttacaggcattattactcatgctcaacagggccaatcagatggaagtctaactttatataagctgaccttagaagatccaaccgcattatggaaatatcgccgtaattcacgtgtatttatgaataaaagcgtggttgagatatgggaaatattatttaaagaatggcaaactaaaaatccgctatttgctgcaagtttaagtttagatttaagcggtctaacacaaacttatgaagtgcgtccttttgtgatgcaacataacgaaagtgactggaatttccttacacgcttacttcgtagtgaaaatatcagttggctcattgatgaagctcagcatattgttccaagtaccgatacacctattcaagctcagaaactcaggttaattgatgccaatagtcaatatcagcctttagaccgtaaaacgattcgttaccaccgtagtagtgcggtcgaacaatatgacagtatgactcgcttaactgctgagcgttcccttcaacccaatgttatgcatatacaacgttggcaagcagaaatattagatcaagaagaagggattggaagtgttcaaagtaagcatcagcatagtgaacattatgacaatgctacacttggcttggagcaagcttggaactatgcgcctgcatggattggtgacttaaagggtgaggatggggttactaaatctggaaatcaacaagttgaacgattaaaccagaacctccacaattactacgaggcacaggcgaaacgctttattgcacaaacaacagtccgcgatgcctatgtgggttactatttcgaattaaatgaacacccagaaatagaccagcatgaaagctcagataaaagctttttgattgtttctaaaaacttctttaatcagaataatttacctaaagatttaaatgatcaaatcaatggtttattggcgcaaagtaactgggcaattcaaaaccccgagaacagtgatgaacgccaagcgaatcaactgattttacaacgtcgtcatattccaacaacaccagcttataacccgcaaattcatagtccagtcactcatccacaacgcgcaaaagtggtgggtcctgaaggtgaagaaatctatgtagatgagtgggggcgtattaaagtccgcttcctatttacgcgtagtgatgaccatagccatgatggtggagcaggaaccaacaacaatgacaccgattcagcttggattgacgttctaacgccgtgggctggagaaggttatggtgcgcggtttttaccgcgtatcggtgagatcgtcgttattgacttctttaatggcgatatcgaccgaccatttgtaatgggccgaattcatgaggcccagcgccatccaaccaaatttgataacaaaggtaagcttcctgatactaaaaagctcagtggtatccgttctaaagaagtgtcaggtggtgggtttgggcaactcagatttgatgatacaccgggacaaattagtacccagctacaaagcagccatggtgcaagccagttaaatctcgggaaactgagtcatcctaaagataaagcggaaagtgaagaccgtggagaaggctttgaactgcgtacggaccaatggggagctttgcgcgcggggcaaggtttattggtatccacccataaacaggataatgccaaaggagaccaccttgacgccgaagttgcgaaaaagcaacttgaaggtagtcaaactaacagtaaagcgctaagtgacattgctaaaaaccagaaaaccgatgaaatcgaatcgattgaacagttaaaagattttgcctcacaaattcagcagcaaatcgctaaatttgaaaaagctttacttcttttgagttcaccggatggtatagctctaagtagttcagaagatattcacatctcggctgatgcacaaattaatcagattgctggagacagcattaatataagtactcaaaagaatgtgattgcccatgcccaaaataggctcagcctttttgctgctcagagtggactaaaagctgttgctgcacaaggcaaggtagaaatacaagcccagtcagatgctttagatgtgcttgctaataaaggtattacgatttcttcgacagaagactgcattgaaattagtagtcctaaagaaattgtaattactggtgcaagttcacaaattaccttaaatggttcaggaatctttccgaaaactggcgggaaattccaagtcaatgccggacagcatgtgttccaaggcggcgcatcggcaagtgttcaatctagtttgccaccaccaccaaaacgtgggcagggtgtacttgagttgttccatgaatatgcacatggtgagtttgttaaacaaggcggttatacagtgactgattcgttagggaaacagttcaaaggacaactggatgataaaggttttgttcgtgtttcgggtttagctacaggttcagccaaaattgtatttgaagaggataagcgtaatccttgggatgaagcgagtgattttaaacgtcctcctatgtggccaagtgataatgatacgagtgctcaaactttaatgggtaaagcagatagtgttttgaaaggtgcagtgacagaagctaaaaaagctttaggtcaaactttcacaaatccaagttcgattatgagaacaatcgatactgcaaagcaattaaaagaaaatggtgcaagtgcattgttgccgatggtgcaacaaggtgttgaatcacatttaacgagtcaattgactaattttacctctaaggttttaagccaaagttcgacagggcaaggatggatgcatgggaaaactaaccccgttgctccagttaccagcggattaaatgtaaatccattaagggctcaagactcgaaaaatacagagactgctcttaatcctatgagttttaagtttaaataa

SEQ ID NO: 59358 - DNA, 1410 bp, Acinetobacter baumannii; identical to SEQ ID NO: 49088

SEQ ID NO: 59359 - DNA, 231 bp, Acinetobacter baumannii
atgatttttgagaatactttggagaatattaaattattctgcccagaaatggctcctgtaattgataatcgaaacttaacgattgatgtaatgagccttcttccaccaagaattgagttgctagtaagtaagaatagtgtagaagctttaaggggttacaacactcaggttgtatatcaatgtcatacccacttctttagcgcatctactacttttctactaaataattaa

SEQ ID NO: 59360 - DNA, 870 bp, Acinetobacter baumannii; identical to SEQ ID NO: 49028

SEQ ID NO: 59361 - DNA, 951 bp, Acinetobacter baumannii
atggaacgaattaaaacaatcggtgtggttggtgtcggtgtcattggtgcaagctggacagcattatttttatataaaggctttaaggtaaaggtgtatgacccttatccaatagacgaagaattatttaaaaagagaatacaggcaaatcttagtgatttactcgctttagatcagcaaacagattcaagtcatcatttacaagatattttcctaaatttagagctttacaacaacttaaaagatgctgtgattgatactgattttattcaagaaaatgcaccggaacggttagatttaaagcaaaatttatatcaagaaatcacttcatattgccctgaaaaaacactaattgcttcaagctcttcaggtctaaaagtttctgactttcaaaaaaatgcaactcatcccgagcgtatttttttaggtcatccatttaacccacctcatctattacctttggttgaaattgtgggtggaaaattaacagatccgcaaattttaaagaaagcttccgagttttatcaaagtttgggtaagcatccgattgttttaaaaaaagaagttaaaggacatgtagcaaatcgtttacaagctgctttgtggcgagaggcattttcactggttaaagaaggggtgtgttcagcagaagatgttgatatcgcaatcactagtgggcctgggctgagatgggctttatttggcccctacataaatatggaacttgccaatcagaagggatttaaagaggcaattcaccatttaggaccgcctatgaccgaatggtggaatgatatgcaaaattttcagcactctgaagaaactactgagttgctagaagaacaaactaaagaacttttaacacattataaagatgtcaatttatctcagaaaagggataaaggattggtcgatattttaaaattgagacaaaaattagagttggattaa

SEQ ID NO: 59362 - DNA, 1122 bp, Acinetobacter baumannii; identical to SEQ ID NO: 52538

SEQ ID NO: 59363 - DNA, 327 bp, Acinetobacter baumannii
atgtctaatttcaaaaagcaccctgacggctataagtcttttttaggtcttgaccgttcaacgagcctctactctgtccgcattggctggcaagtgtacgcatctaatgctaatggctcagttctttacaaagttaaagacggagttaagacgcctttaaatgtgttcaggttccaaacttcttatccaaaagtttggaatgaactcacccaagaaatcgattttcagcgcagaaagcagctcgctataaaactgcgtgaaacaaacatccctacttatgaccgcaaagcttataaaactaagcgcggcttcactggctcaagataa

SEQ ID NO: 59364 - DNA, 354 bp, Acinetobacter baumannii; identical to SEQ ID NO: 49134

SEQ ID NO: 59365 - DNA, 573 bp, Acinetobacter baumannii
atgattgaatctcggcataagctcactacagaattaaaagaaaataatatagcaaatcgtttaattctttctgaaaactttacttttaatggtgaagaactctctattgaatttgatccagattttgatcttataacaaaaaacaacttagaagattttgaaaaatttaaaaagaaagaagagctattgattcgtctttcaaatgaaactataggtaaaaagagatggctaaattttacaaagctagaaaaaaattgctggttagattttgcttattttagaatgaacgaaagaggggaacctttatcattaaatataacagttgatggtaaatacctactgtgtgaagaagatgtgtattgttattttggagaggaggtttatggggtattaggatacttaggttataactttaatgcatttgctgatgtactgcgggatttgcctttaaaagttaaatggataaattttcagtactctaaagataattttgagtcgaaagaagatttttatcatttagatgattttattgaagtgttaaaaaaatactcgtcattagaaatttcatattag

SEQ ID NO: 59366 - DNA, 285 bp, Acinetobacter baumannii
atggttggtgctgtgcctgtaccatccggtgtgaacactgctgtccaggtgatgttatcaattgtagtcaatgcacctaatgtaccacctacaactgcgatgtcacttacatcaaagcctgtaactgcttcactgaatgtgaaggtaatgttggctgattcacctgctgcaagcgcaaggtcatcagttgtaattgcaagtgttggtggaacaatgtctacaacaaaaccatcagttccatcaagtacatcacctgtacccaagttacctgcaaggtctgtgtaa

SEQ ID NO: 59367 - DNA, 474 bp, Acinetobacter baumannii
gtgaaagataataaattgatattaaatttatgcgaagaggagacttattttgatgagtttaaatttgatttaattaagaaatatcgaaaaaatcagcttagattacaagattggtgtaatttaaacgaagaagagaaaaagaagtggatagaagtttcgcattgggttcaacagtacaagcctctagacctagtaagttcaatagttatagatggtagaaatattaagtcatttaatgatttcttatgctgtataggtgaggaagtgaatggattgatgggctactttggttctagttttggtggtttgtcggatagtctcactggtgggattggttgtataactgtacctttaaacattacttggaagtactttgaagaaacaaagtattcttttaataactatgataaccctgatgattttgaatacttaattgaacttttaaacgaaaaatctactttaaatattacgtaa

SEQ ID NO: 59368 - DNA, 2145 bp, Acinetobacter baumannii
atggctagtcaaaatgatatttcagcccgtatcgcaactgcaaaaaaagaaggcttcacagatgaacagatctattcaagcctagcttcaaatgctggatttggtaagcgcatctcgatggcaaaaaaagaaggctattctgatagtgatatagctaaaacacttgggcttaatcttcagaaagatcttggtgttcaacaacccattaaagtttcagctactcgccagccttttgattggaaagcagcacaacagaagtctatgcaagatcaagcaaaagcagcagggccaacctcatttgcagaagatgttttatttggcttttcaaaattaggtgcaggtattaatcaaggctttgcatatgcaggcgataagcttggtcaagggttaaattccttattaggtacgaactttgataccggctcttatgatcgattcaccaaccaacgtaaagaagttgaagaattccggaacctacagaacagccagaatgggaaaagctcagccgttggcgagtttttaggagaagctgctggaaccgcaccatttgcacttctggggcgtgggtatcaaggggcaaagatactttccaaagttggtggcaaagtagcagctcaaaatgctggagctggagcactggcaggggccgctacttttgctccagatgcacagacacgtaaacagaatacattaatgggtggtgttggtggtgcagtaggcggtgcggtaggggaaaaagtaggtcaaggcgtaactaaagcagtaaacgtagctaaaggtcgattgcgccctgaagctgtagagatcaataaccttggcaaacagtttaatgttcggacaacggttggcgatatttcaagaggacctatctcacaaaaaactgaagtagcattagagcaaataccagttgtagggactgctagctttagacaagctcaacatgatgaggcgaaagctgcttcaaataagctagtaaatagcttacaagagaaatttaagagtacagagtttaaggccattcctgagttagaagcagctgcgtcaagcggagaccgaaatgctaatcgtatattaggcatagtatcaaacgctggtgatgactcatctaaagctcttcaagcaagtgcagagataaaagcatggagagagaacaaaattgctgggaaaatgtatgatgaggttggcgctcttgcaagaaaacaaggaggaacagtaaatccatcaaatacaacagcggtgttgaagcagaaaattgacagtgaacttgcatcacttgctccagacgacacacttcttaaagatctccaatcaattcaatcaaggttgaatgatgctaatgtagttaaagacttctcaaatatgcgccttctaagaactcaattaggagatttggctgaaggatatgcaagcgggaccaatccaaataaaacagcagcaaagttctttggcgatttaagatcagcagtagatgaggacatagcacaatatgccaattcctctggtagtgatgagctgaagcgagcatataaacgtgcagacatgttctataagaacattatgaaaaataaagactcttcaattgctaaggcaatgaaaagtagtactccagatgaaatctataaccaatttatcaaaattggaaaaggggatagggctgcaaatttttatagaaacttagataaaaaggggcaagcagctttacgttatgagatggcaaatgaggcacttgataaagctaccaatgttagcactggcgctttcagtccagccaagtttgctcttgaatttgagcgccttcatgaaccctataaaaacatctttaacggtgcggaacgtgctgaaatggatggatttataaaactcatgaggcatattgaaagatctggacagtttatggagaacccacctactggaaatagacttgcaggatttctaataggtgggactgcaatagctaacgccccactggctgcaaaagctgctggtctgtctgccactgcgaaatttctattaacgacagaaccgggtaagagaattctgttagctgcaaaagatttgccaccaaactcaccaaagctcaacaatcttttaaagatgattgagaagttaagtgtgacaactggtactgccaccacaacccaataa

SEQ ID NO: 59369 - DNA, 2859 bp, Acinetobacter baumannii
atgctagcactagagcctcaacatattcatatgaatcaacatgctgttgataaaacacatgcattaaagtgtctagtagatatattagaaaaagatgggttagttacgcctgaatatataacgggactcatcaatcgtgaacaacaaagcgcgacttatttaggccaaggcattgccattcctcacggtactcctcaatcacgtgaatatattttaaaaacaggtatccgcttagcccatttccccgaaggtgtaatctgggatggagaaaataaaatttatttagctgtagtgattgcagcaaaatctgatgaacatttgcaagttttgcaaattcttactcgtgcattaatgcatgacgtcagcgaacaagtaaagaatgcttctaaacctgagcagattatcgaattactacaagctcagccattatctttagcgcttcatgaaaatcttattcaaaccgaaatcgacgcacaagatatcgaagatttattttgggcagcttctcaaacactcaaaaaacataattttgtaaaatgtggttttctaagttcacttgatccagaacaagccattcaactgcaagatcaaatctggtccatttctagcgatcactttgttcagcaaccagctattagcattactaaaccatcacaggctttagagctaaatggtaaaaagctgaacaccctcgtttgtatagcagccaatgaccaactcgataatgaaagatttaatcgtttaattgatattttatttaaccctgagcaagttgccgagctagataaaactcaaactccaaacgaaattgcaaaaattattggagctgacgttgttcctgactggcctcaacgttcagtagtgctggcaaatgcacacggcttacatgcccgaccagctacacaccttgtcaatcttacaaaaatctttcaaggcgacatccaagttgcagtagacgatggtagctttgtttctgccaaaagtttaactcgtcttttagcgttaggttgtaagcgtggccaaactctacgttttatcgctgagccagaaaccgatgccgtagaggctttagatcaagttattttggcagtgcagcaaggcttaggtgaagaagttgaagcgctacctgtaaccagtgaaactcctgaccagctccctgctcaaacggcaatatcaaatgctacgacattaggtaacaatacgggcattgcagcatcaagtggcttagcttttggacctatccatgtgattaaaccaaaggtttatcaatatgaacgtatgggttcaggcgtaaaagtcgagaaagaaaatttagatattgccctacatgcagtaaaaaacaatattcaccaagtcatagccaaagctgatgcctctgaaattaaacaaatctttcgagctcacctagaaatgcttgatgatcctgatttaattaatggtgtatatcaaaaaatttatcaaaatttatcagcaccagctgcatggcatgaacatattgaagctgcagctaaagcacaggaagctctaccagatcgtttactcgctgaacgcgcaacagacctacgcgacattggcgacagagttttaacccaattatgtggtgaagtggttattgaagagcctaaagagccttatattctaatcatgcatgacgttgggccaagtgatgtcgctcgtctcaacaaagaccgtgtcgcaggtattttaactgctataggcggtgcaagtgcgcatagtgcaattgtcgcacgtgctttaggcattccagctattgttggtgctggtgaacaagtcctagaaattgatccgaaaagcactttacttattaatggtgatacgggaacttttgttttagatccggatgcggcacaaatcgaacaggctaagcaagagcgtgagcaacagcgtcaaattcgtgaagaagctgaacgtcatagccacgagccagcaattaccttagatcaacaccaaatcgaaattgcagccaatttgggtaaagttcaagcgacagcacaagcagtagaatgtggtgctgaagcaattggcctccttagaaccgagcttgtttttatgtctcatagcagtgcacctaacgaggctgttcaagaagctgattaccgagttgtattagatgcacttgcaggtcggccgcttgtggtacgtacattagatgtaggcggtgataagcctttaccttacttaccaattgctgaagaagaaaatccattcttaggtttaagaggaatccgtttaactttaagacggcctgagcttttaaaacagcaattaaccgctctactaaaagcatctgataatcgtccgttacgaattatgtttcctatgattggacgcgttgaagaatggcgtgcagccaaagcaattcttgacgaagtaagagcccaacatccatgtgacaatttacaagttggtattatgattgaggttccgtctgctgctttacttgcaccggttcttgcacaagaagtcgactttttcagtatcggcacaaatgacctgacccaatatacgttagcgattgaccgaggccacccaatactctcagcggaagcagacggattacatccaagtattcttaatttgattgatcaaacagtgaaagctgcccacaaacatggcaaatgggtaggaatctgtggtgagcttgcagcagacccgaaagctgtccctattctcatgggattaggcgtagacgaactgagtatgtccccaaatagcattcctttagtaaaagctcaaatccgcacactaagctatagccatgctcaaaagcttgcgcaacaagctttactatgcgatagcgcccctgctgtgcgccagctatctgaacaagacttataa

SEQ ID NO: 59370 - DNA, 759 bp, Acinetobacter baumannii
atgcgccgagttttgattgcaattgcaagtctggttgttattacgagtattgttttttttacctatcaacatataaaacagcagcaagccaaagatagcagtcaaatgtttgatgtggtaatgactgaaaaaatgaatcagctttatgatcaggcccaagactggactaaacctgtacaacttgatattcacgataaacggctggcaggacactacaaacaagtctcagagtttcttttgagttattgggtccaaaatgtaaatgcacgtaatgaatatttaagagaattaaaagctgcgaaatgggatacgtttttaaatgttgaccgtttagatcatgataaaaaacaaaaatatgctgaaaccgaaaaaatgctagccgatgttcgcagagcttcagataagtatcaatccgaatatgaaaaaattcataaaaccttcttggcaaaaattcaggaactgtctgttgataaagagatgagacaaatcctcgaaataaaattaggagctcagcaaaaagccgatcaggaccatgcaatttttatgattgagctacaaattttagataaagcagaagaaatgtttaagcttttaaaaacttatccatggcaaaagaaagatcagatgatacttttccatgaaaatgctcaggtcaaaaagtttaatgcactgtatcaagacgttttaaaacttaatgcaaaaattgaaaaaattaagaaaaagaatgtagctgccttggaaggggagttaaaagaatag

SEQ ID NO: 59371 - DNA, 2076 bp, Acinetobacter baumannii
atgaacgatatcctttggcttgaccttgaaacctattgccctgtgccaattaaaaacggcacacacgcttatgcagaacaagttgaaattaccgtatttgcttgggctttaaatgacggccctgttcatgttgaagatgctgcatctaatcctttatcaaatgatctttgcaaattactgaatgaccaaagcgtaaagctaattgcacataactcgcattttgaccgtactgttttgcgtcatgctttgccaaaaatgggccttgatattcaattaccaatcgaacgttgggaagacacaatggtccaagctttgagccattcgttacccggctctctcgatgcgctttgtgaaattttcaagattgataaggacaaggcaaaagacaaagcaggtaaacaacttattcagcttttctgtaagccccgccccgcaaatcaaaaattacgccgcgcaactggtgaaacacatccgcttgagtgggcgcgtttccttgaatacgcgaaaaacgatattttagctatgcgcgaattgcgcaataaaattcctaaatggaattatcgcggggctgaattagcgctttggcatcttgatcaaaaaattaatgaccgcggtgtttgcattgatcttgatctagtttcagctgcaattgaagccgtagacaaagcccaagtaggcttggctaaacgcacggttgccttaacagatggtcaagtacaagccgctactcaacgcgacgcaatgcttaagcatatccttgaagcgcacggtgtttcactgccagatatgcaaaagtcaactttagagcgtcgtattaatgatgatgctttgccacttgcggttcgcgaattgcttgctatccgtttacaggcttcaactaccagtacagcaaaatacacagcacttgctaaaggtgttagctcagacggtcgattacgcggaactttacaatttaacggtgcatcacgcacaggacgatgggcgggccgattattccaaccgcaaaatttaccacgtcctacgctcaagcaagaggtaattgacgaaggcattgaggctttaaaaatcggctgtgcggatatgttctatgaaaatgtcatggaactaacaagctctgcaattcgcggttgtatctgcgcgcctgaaggtaaaaagctcgttgtagccgatttatcgaacatcgaaggccgtgcgctagcttggcttgcaggtgaatcatggaaaatcaaagcgttctatgactttgatgcaggcaaaggccacgacctttataaattggcgtatgcaaagtcttttggcgtatcacctgaagacgtagacaaagagcaacgccaagtcggtaaggttcaagaattagcgctaggttacgaaggcggtgtaggcgcatttttaacgttcgccgcggcttatggtctggaccttgacgacatggccgcacaagcatttgacagtattgacccaagcataatgaacgaagcaatccgcgcttgggaatggcacaagaaagaaaaacgcaccacgttcggcttaaagaaaaatacatggttagtgtgcgactcgttcaaacgctcttggcgttatgcgcatccgaatatttctgcttggtggaatgaacttcgtgtggcagcaatcaatgccatcaacaaccctgacaaagcttttccatgtcgcaaagtgacattcattaaaaaaggctcttggctttacatcaaattgccaagtggtcgtttcctttgttatccgggagcaaaagcggacgacaacagaatttcttacatgggcaataaccaatacacacgtaaatgggaacgcctttacacctatggcggcaagtttgccgagaacattacgcaggcagttgcccgtgatgttctcggccacaacatgccattaatcgaaatttcaggctacgaaattgatttaactgtacacgatgaagtgattacagaagccgatgacgtaccggaatacaaccacgaacatttatcaagcctgcttgctaccaatcccgaatgggcacttgatttgcctttagcggcagcaggctttgagtcatatcgctataagaaggattaa

SEQ ID NO: 59372 - DNA, 846 bp, Acinetobacter baumannii; identical to SEQ ID NO: 57570

SEQ ID NO: 59373 - DNA, 444 bp, Acinetobacter baumannii
atgagttatcaccatattttagttccggtcgatggttctcctacttcacttattgctgttaatcatgctgcaagtcttgctaaagcctttagtagtaaagttactttggtatatgcgctcactattgatccatttatttcagttgaaattattgatagtacagaaattgcgcaagattattttaataaagcgagagcttcgattcagagcattttagatcaagctaaagaacaatttagccaacatggaatttctgttgaaaccaaaattgttgaaggtcaaacaattcatacagaaatcatcaaagcagcaactgagctgaaagctgatttattagtgattggttctcatgggcgaaaaggttttaaaaagttcttcttaggaagtgtaactcaagcactcttaggagaaattcatgtgccagtattggtcgtaaccgaataa

SEQ ID NO: 59374 - DNA, 1572 bp, Acinetobacter baumannii
ttgcaagttgttgctaaagaagcgggcaaggtagcgggtagcgatttggcattacgtactgagctatcaggcttattacgccaacgcttcaagcaattaaccaaaatcagtatttcagcgcgtgaagtaaatatcgctatgggcggtcgcaaagtgcaaattgcactagacgatgcccaaaagcgcccgatgactgaatttggtaatgcttcaagaatgctagacgcttacggcaacgaaattatgttcgtggccgaaacaaatacctggtaccgatggaacggcgtttattgggaatcatgtgtaaacatggtcatcgagcagtttgcaaaacaaactgttttggctatgggtgacgaagctaaaaagattgatgacgactcgcaacgtgccgagttctatcagttctgtgcaatgtcacaaaaggcgttcatggttaaaaacatggtaacgcttgcccaatcagacccgcgtgtacttgtaccaattaaagaactagacagtgatatttatttactgggctgtgcaaacggcgcggtgaatttgcgtgatggtgaattggttaagccaagtcaagaattgctaatcacatatagcactggtgttgaatacaaccctaaagccaaatgtcctctatttgaaaagactgttcttgatgccttttttggcgatgaagaaatggctaattttttccgtcgtttaatgggctacgcaattttaggtaatccaaaagaaaaccttatggtcatcccgttcggtgatggctctaacggtaaatcaactgtactcacaaccattttcaaagcgcttggcgattacgccaagatgacgcctgctgagactttcttaggtgaaggtcgaagtaatgcaggtggtgcgcgtgaggacttattgcgtctacgtggtgcccgttttgtctatgtcggtgaaccggaagaaaacaaggaattaaaagaaggcttggttaaatccatgacaggcggtgaatccatcacggcccgcggtctttattcgcgagtttctgttgagttcaagccaacgtggaccgttgtaatgccaacgaaccataagccaatcattaaaggcggtgaccatggtatttggcgtcgcttaatgatgattcctttccaaagaaattatgacgctgacaagtcccttgttaaagacccaaaccgatctgaaaagttgttaggtgaacttgagggcgttttagcttggcttgtgcgtggggcacttgaatatcagcaatacggcttgaacgagccgaacaagacgaaagaagcacgtgacgaatatcgcgatgaaatggaccttttgaaggactggatcagtgaatgctgcgagcttggtgactatcgcgaaacgtctcaaaacctttgggtgagttgggagacttacgcaaaagcacgtaacgaattgcgctatatcccttcatcaagggcgctaggtcgtcggcttagtagcagatttcagttaatccgtagtacaggcggcaaaaggctttttgcaggtattagggtttccgtaactcctgattccgaattatttgcggatgagagcagtaagcaatga

SEQ ID NO: 59375 - DNA, 1692 bp, Acinetobacter baumannii; identical to SEQ ID NO: 57568

SEQ ID NO: 59376 - DNA, 537 bp, Acinetobacter baumannii
atgaaaaaatttatttttattgcggctagttctctttttaatattacagcagcacaagcagctgatggtacgatcactattaatggtttagtaactgataatacgtgtacgattgatactggtgataaaaatctcactgtaaatttaccaacagtatcatctcaatctttgaaaaatgcgggcgatgttgctggtcgtacaccttttcaaatcaatttaacgaattgtgcttcagttggtaaagtcgcgacttattttgaaccaggcgcaacagttgattttaatactggtcgactattgaaccaagctacctctggtgcagctgccaatgtcaacatccaattattgggtagcaacaatgcagtaattcctgtaattgcgaaaggtgcttctggtgcacaagataactcacaatgggtaaatgtttctgctggggggaatgccgatcttaattattatgctgaatattatgcaactggagcatctacagcaggtactgtaacatcacaagtgaaatacacaattatttatcaataa

SEQ ID NO: 59377 - DNA, 213 bp, Acinetobacter baumannii; identical to SEQ ID NO: 57583

SEQ ID NO: 59378 - DNA, 1020 bp, Acinetobacter baumannii; identical to SEQ ID NO: 53334

SEQ ID NO: 59379 - DNA, 342 bp, Acinetobacter baumannii; identical to SEQ ID NO: 57584

SEQ ID NO: 59380 - DNA, 324 bp, Acinetobacter baumannii; identical to SEQ ID NO: 57599

SEQ ID NO: 59381 - DNA, 246 bp, Acinetobacter baumannii
atgatagatactaaacctcttatagcaattgatcttggaaccagtaactcactagttggtatttttgaaaatggtcagtccaaacttattaataatccttatggtatgaaaactacgccctcagctattgcattcgatgagcaagggcaaatcttaattggacaagctgcattagagttaagaagtcgtggtaaagaggggctttgttgcacaaacctatctctaaaggcttattccacaatataa

SEQ ID NO: 59382 - DNA, 840 bp, Acinetobacter baumannii
atgattcgccctaatctttttcatattattttttttgatatgtggttggggaaaatggaaataaaaccaaaaaaattggcagttttaatagatgctgataattcatcagtaaactcaatccaatttgttttagaagagattgccaagtatggtattgcaagtgtcaaacgtgtgtatggcgattggagtagtgaaactcttaaaaattggcgtgaagttttattaccccatgccattacgccagtacagcaatttgcctatacgaaaggtaaagacgctaccgatatgatattaatcattgatgcaatggatttactctatagtaatgctttagaaggtttttgtatcgtttcaagtgatagtgactttactccacttgcttctagaattcgtgaaagtggtttaactgtttatggttttggtcgaagcaaaacacctgaagcatttgtacaggcttgtgataaatttatatatgttgaaaaccttgaaattgaagaaaaagaagaagtaaagcaagaaactggatcaaaaaagaaagagattatgactgatgctgttaaagctgatacaaatgaaaagcaggaggttttgaagcagctacaattagatcgagctacgttgaatttgatatataaagctgtaaaagataattctgatgataatggttgggcaaatctttccacagtaggctcgtatttgacagcaataaaaccagattttgattctcgtaattatgggcgtgcaaagctttcgggattaataaaaatgttgaatttatttgatacgaagatagaggggagtcaaatgtatttaaagaaaactaagaataaagtgaattag

SEQ ID NO: 59383 - DNA, 2070 bp, Acinetobacter baumannii
gtgactaaaaaagaacaacttgcgaccattcacgcccgtgcaaaacttcaattcgacaaaatccagagtgctgttcgtgaagaacgcttacagtgcttagaggatcgtcgtttttattcaatcgctggggcgcaatgggaaggcaagctaggcgagcaattcgcaaataagccgaagtttgaagtcaataaaatccacttggctgtcattcgaattattaatgaatatcgaaataaccgaatcacagtagatttcgtttctaaagacggtacaaagaatgatgatttagcagatacatgtgatggtctgtaccgggcagatgaacaggattcaggtgcagaagaagcatatgataatgcctttgaagaagctgtaggcggtggctttggtgctttccgcttacgtgcttgcgaagaggatgaagaagacgaagaaaatgaacgccaacgcatcaagattgagccaatttttgatgctgactcgtgtgtattctttgatctagatgccaaacgtcaagacaaagcagatgcaaatcattgctttgtgctgacttcaatgactcatgatgcctacaaagaagaatatggtgatgatcctgcaagttgggataaaaacattactaattcagagtttgattggtgcacgcccgacattgtctttgtcgctgaatattacgttgtagagaaggttaaagagaaacagcacatctttgtactaatcgatggaactgaacagcgtcacatggctgatgagcttgaagatgatccttctattctggagcgccttaatgcaactggtgcacaggaactaagagttaaaacgcttgagcgtcgcaaagtgcataagtacatgatgagtggctcagaagttcttgaagattgtgggtacattgcaggtcgctatattccgattgttcctgtttatggaaaacgttggttcattgacaatattgagcgctgcatgggccatgtgcgcctttgtaaagatgcacagcgactaaagaatatgcagcttagccgtttaggtgaaatagcagcattatcgccaattgaaaagccaatcatggcacctgaacaggtagctggattggagcatatgtgggcaaatgacaacattgacaataatccatatttacttgccaacccattaactgatgtgaatgggcagattattgctcaaggcccaatgtcttatacgaagccacctcaggttccaccttcattggcagccttgcttcaactcacagatgcagacattagagagcttttaggaaaccaagaacaaggtgaaaagatcaatgccaatgtgagtgcagaggcaattgatttggttcaaaaccagcttggcatgcagtcatatatctacattgataactttgcgaaggcaattaagcgctgtggtgctatttggctctcgatggccaaagaactttatgttgaagaaggtcgtcgcatgaagacgattggcaagcaggatgaagtagatagtgcagagctttcaagacctgtaattggtgaaagtggcattgaatatgaaaacgacttaaccaaagcatcattcgatgtcggtgtagatgttggtccaacttcatcaagcaagaaatccgcaatcgtacgtcaattacaagccttacttccattcactaatgatcctgaagacatgaaagtccttctcgcaatgatctacatgaatatggaaggcgaaggtatcaaagatttccgtaattactatcggaagtacttagtcaagattggtgttgttgaacctacagaagaagagcaacaggaaatgattgctgcagcacagaatcaaccgcctgatccaaatgctcaatatctcgaagcagccgcagcagaagcctctgcaaaagctcagaaggctaaagcagacacaatcaaagtggttgctgatgcagagaaaacccgtgctgataccgcagctacgttagccaaaatgaatcgagatgatcaacaggcaacgttagatatggttcagcaaataaaccaagcaacacagcaaaatatggcgtccgctcagcctatgagtgagggagtgcaacaaaatgtctga

SEQ ID NO: 59384 - DNA, 888 bp, Acinetobacter baumannii
atgtctgaacaagatctagagaaacaaaacgaaattcaagatgacgaaaatcttgatattgaaacaccagaagatgatcaagatcgagatgatccagaatcaaatgaaggtgaagatcctcaagaagaaggcgaagaattcgacattgttgtaggtgatgaaaagcctaaagagcaggatgaagatgactttcatgggaagcctgcacctaagtgggttaaggaacttcgcagagaaaagaaagagtctgatcgtcgaatcaaagagcttgaagccaagcttaatgagcagaacaaaccagaaactattgagttaggcgagaagcctaaattagaagattatggctacgacgaagataatcctgaatatatcgaagctttagaaaactgggttgatcgtaagtttcagctaaaagagcaagaacgcaagaagcaagaagagcaggagaaagctcagaaggtttggcaggacaagctcaatagctatgaatccaaaaagactgcaattaaatcaaaagtaagagactttgacgaggcagaagagcttgcgcgagatgcgctatctcgaactcaacaaggtattttgattcacgcagcagaaaagcccgagctccttatatatcacctaggtaaaaaccctcaaaaagcaaaagaattgacagcaattactgacccgattctattcgcatttgcagcagcaaaaattgacgctcagatcaagatgacagcacgaaaaccttcaactagtccagaacgtaagccaagcggctctgctgctttaagtggctcagtggacaacacgcttgcaaaactccgcgcagacgctgagaagacaggcgattacaccaaagttaatgaatacaagcgaaagcttaaacaaaatcaataa

SEQ ID NO: 59385 - DNA, 1257 bp, Acinetobacter baumannii
atgtctaatagtttctctaaagaagaacgcgttgcctttgaggacatgttggaaggtttccaagaccaacttgttttatcaaagttagttaataaataccgcatgagtgatgtagaagctgagcgctctaataacaccatctggcgcccaatgccttacattgccacctcttatgatggcatggaccaaactgttaactttaaagacaaaacacagttatctgtgccggctaccattggctataaaaaatctagtccttggattcttgatgctcaagaacttcgtgaccaattgcaagaaaaccgtttaggagatgcagctaagcaaaaacttgcttcagatatcaacttggctgtttctaaagttgcatcattacaaggtactttagttgttaagcgtacaggtgcagcaactggctttgatgatgtggcgcttgctgatgcaatcatgaatgagcaaggcatcccaatgaatgatcgtcgtattgctttggcaactcgcgactacaactcaatggctggtgacttggctaagcgtcaaaatgttgttggtaaggttcagactgcttatgaccgcgcttttattggtgacgtggctggatttgatgcattcaagcttgattactctgagcgtattggtgctgcaacagcaacaggtgtgacgataggtgctgctaaccaattctatgtacctaaagcaacatctacagctgctacaggcgaagtttccaatgtagataaccgttatcaaacaatcactgttgcagtgactggtggcgcattgaaggaaggtgatgcattcactatcactggcgttgaatcagttcaccaaattactaaacaagccactggtcagttaaagaccttccgggttgttaaagtgaacagtgcaacatcgattgtaatttcacctccaatcatttctgctcaaggtgcttcggaagctgaaaagcaataccagaatgtaagtgctacacctgcaaatggtgcggtaattaccatgcttaacacagcaacagcttatgcgaaccctttctggcatcgtgatgcaattgaattgattccagctcgctatgcagttcctacaaatgcaggtgctgctgtattacgcgcaactacagaccaaggtattgagctggtattccagaagcaatatgacatcaatacaatgaagactaagtatcgtctagataccatgtttggtgttgtaatggtgaatccagagatggctggtattgagttattcaaccaaacctaa

SEQ ID NO: 59386 - DNA, 441 bp, Acinetobacter baumannii
atgtcagatgaatatcctaaagctttatatcgtggcgacactaaatcatatgaacatgtgattgcagatggtgaagatcacgaacagcatttgcgtgaagaaggttacgttcattactcagaactaaaagaacctgaaattgaagttgttggaaaggtggctggttcaagtggtgaacttaaaaaggttcaagaagaactccttgaagctttaaagaaaaaccaatttcttgaagagcaacttgccactgcacaaggtgagtatatctcgcaaattaatgcccttaaaaaagaaaacgacatctacaaatattcagcaatggatgcaggtgagttaaaagcaattcttgatgagaagggtattaagtatggctcacgtgatggcaaagaagttcttgtgagttatgtgcttgaagacctttacccaacagaaggtgagtaa

SEQ ID NO: 59387 - DNA, 480 bp, Acinetobacter baumannii
atgtcatggactaagcgggaaattatcgaaaaagcttttgaggaaatcggaatggctgcttatgtctttgatttgcagccagagaaagttgaaagtgccagacgtaccatggatgcaatggctgcaatgtggtcctctaaaagaattcaacttggctatccactgccaagcgaagcagatagtagtgatcttgatcaagactgcaatattccagattatgcctatgaaactttctacttgaatttagctaaacgccttgcttcgacagttggcaaaacacttgcagcagaaaaagtcacacttgcgagagaaggttatgaaaacctcttgcggattgcagtttctaatccgcctcaaatgaaatttgcctgctctatgccatctggtgcagggaataaacgatgtgatccgttcattgttaatacacaagacaatgcagttttaacacctaaacaagatgcggagttcttcaatgagtag

SEQ ID NO: 59388 - DNA, 453 bp, Acinetobacter baumannii
atgagtagacgacttaatgaaactgatgctttaggtgttggtgatcaatttgttttgtataaaggaaattgcacagattttcgttcggttccacaagatgtaattatggagtggattttatcaaatttgccagacaccaagccaatttctgcagttattcaattatttaatccaaacgctgattttaatgttttagttgataacaatgtttcgggcacctatttggtaattaatccttctgttcaaattacaaatggaataattactcttccaccaatattggacataacagatggtcaggaagtatttgtgactagttccaagcaaatcaccaatttaactattgcaggaaatggtgctgcacttattggtatgcctataaccattgggttatctgggttctttaaacttcgttttgataagacatcacaaacgtggtatcgagtggggtag

SEQ ID NO: 59389 - DNA, 1401 bp, Acinetobacter baumannii
atgcaaatccctattttaagtggaatatttacagataataattctgacttccgtacctcatatcctcgaaatttaatacctgtgccaaaagaaaatgggctatcaaatgggtatctcagaccggctgagggcataattcaatatgctgaagtgtctggtgtagatcggggtggaatcaattggaatggtatttgctatagagtttgtggatctaaattagttcgaattaacaaagatggcacaataagtgatttgggatcagtattaggttctggttactgtaactttgattattcatttgattatttagctataaactcaagcccttatctgtatttgtattcgccagaaaagggattaaaacaagttacggatggtgaccttggtaaagtaaaagatgtagtttggatcgatggttattttatgtctacggatggtgaattcttggtagtgacagaattaactgatccattcgcagtaaacccattgaaatatggctcttcagaggctgatccagaccctattaatgcgttatttaagcttcgtaacgaagtgtatgcactaaaccgctataccattgaagtatttgataatgttgggggtgaaaactttccatttagccgtattgaaggagctatgacgactcggggtacattatctgcctgcacttgtagtgtgttcatggacacaatagctttccttggaagtggcaaaaatgagccaatttctatttatttaaatgcaaatggatcaagtcagaagattgctacgcgagaaattgaccagattttgagggaatattcggaaagtattctttcagagtgcttagttgagtcgaggatcgttgatgggcatcaatggctgtatgtccatcttcctgataaaacacttgtatatgatgccgcggcatcacaagccacaaaccagcaagtctggttttttttatgctcaggatttggtgagaatcaatatttagccagaaatcatgtctggtgttatgaccaatggatagtaggtcatcctaagcaaaataaactaggggttttgaccacctcaactggtgagcattgggaagaaaataccgagtgggaattctcgacgtccattatttataacgaatcccatggcgccatttttcatcaagtggaactcattgttttagctggaagaaccttatttggagaagatccaaaggtatgtacacagtactcagttaatggaattgattggtccaatcaaaaatacatatctgctggtaaaactgggcaaagagataaaaggctagtttggtttcaacaaggacatatgaataactggcgtattcagcgcttcacaggtacatctgagagccgcttggcaatagcaaggctggaagttcaggttgagccacttggagtttaa

SEQ ID NO: 59390 - DNA, 366 bp, Acinetobacter baumannii
atgtcaattgttaatcctattccaccacttcgcaaagatcttgaaatcatgtgtggtgggaatttgcgacttgttaaagcttttgaggctgtatttagactaatacctaatgaacttaataatcttgatggttcaagttcagatgctcaaataagtgcagatagcgctgcaacacaggcttctttggctatttcacaaattgaagaattaaagcaattattggaaatggtgttgcttcaatcaagtgcttgtaactgtcaatgctatcaagacataccaattcgatctgaacatgttcaagaaaatttaatattaagtcctgcccaacttattgagccagacaatctttatttagaggttaattaa

SEQ ID NO: 59391 - DNA, 333 bp, Acinetobacter baumannii
atggcagtaaaagcaaaagaaatcattccttcaaaattcgctgaaaattcacaaacgacacaatacacagcgagtgctccaacaatgattgacaagtttacagtctgtaatacaacagcctcagttgctactttcagctgcaatcttgttccagtgagcggtacagcttcttcaggcaaccttgtaattaaagataagcaaattgcagcaggagaaacctatgtctgtcctgaattggtgggccacactttgggtactggtagctttattagtactgtagcaagtgcatcttctgctttatcaatccgtgcttcaggaaaagaaatcacgtga

SEQ ID NO: 59392 - DNA, 465 bp, Acinetobacter baumannii
atgcacctagttaaactcgatgatcttgaagaaataaataagatcattttaaacgaacacattcaaaaagatatttgtgacgatccaacagagaaccaaaaaataattgatctaggcccttatgagtggattggtgtagttgaagaagaagttcttcaaggattttttatgctagccagacacaattctctatctgtagaaatacatacctgtttacttccatcacttcggggctctaaggcctttgatgctgggagattaatccttaactatatctttgaaaagaatttaaaggtcatttcttggattcctgaaaataaccggaaagcaaagctatttgcacaaatgttgggttttcatgttgaagggattaatagggcttcatttttaaaagatgggaaattgctagatcaattccttgttggactaacgaaaggagaattcctatgccagtggcagcagtag

SEQ ID NO: 59393 - DNA, 651 bp, Acinetobacter baumannii
atgccagtggcagcagtagcagcaggtacaattggcgttggtctgatttctgctaataaagcagctaaagcccaaaagaatgcagctaatcaagcagcagatgcacagattcagtctaaccaagcagccattgatgaacaaaagcgtcagtttgatgccattcaagagttaatgaagccgtatgtgaatgctgggacaggagcattagctgggcagcaagatttacttggtctcaatggtgccagtaagcaacaagctgcaatcgatgcaattaataatagccaagctatgcagacttatatgcaacaaggtgagaatgctattttacaaaatgcctcagctacaggtggtttgcgtggcggcaatacccaatctgcactttcccaatttagaccacagcttctaaaccaattaatcaaccagcaatatcaaaatttaggtggcttaacctcaattggtcagaatgcagcagcaggggttggtaatgctgggatgcagtccgctaataatattgggaatttattgcagcaatcaggtgcagcgcaagcgggtaacgccctagctcaaggtcaagctactgcgaatcaatgggctggtattgggaatcttgttggtcaattaggtggcgcattcatcggaaggaagttttag

SEQ ID NO: 59394 - DNA, 1284 bp, Acinetobacter baumannii
atggtacagcctattaattatatgcttgatgtagctaatccggttcaaactacattacaagggttcaatggcggtttacagttaggtgtagcatatgccgatcgtcagcgtgctttaaagcaagctgagcaagagcaacttgccaagcagcagatgcaacaagacttatccaatttagccaccaacccttcttatgaaggttttactaatgtaatgactaaataccctcagctttctgaaaaccttaaacgtgcttatgacactatggatgatgggcagcgaaagaatacattaagtttagcttctcaatcttatgcagctctagctaataatcagcctgatattgccaaacaagtgcttggtgatgctgcaactgcctttgaaaatagtggtaataaaaaggatgctaatacagctaaaggttatatcaagatgattgaaaacaatccatctgctgctcaagtagttttgggtagtttgtggcaaacttcagataatgaggggtttaaaacatttagcgaacagaaacgcgcaaatgaaatgcagccttatcagattggtcaaatttctgctaacactgccaaaacagtagcagaaacaaatgatattcctttagcagcagaagaccgtcgaactggcatagataatcaaaacaaaaagattgaatatgacaatcaatttaattatgacaagctgcgtcaggatcaggaacaatattttgctggattggataaatcagagcgaattgaggcagcaaaattaaaagcaaacaaggcagaaacgcctgttcaaagagtagagcgtcttgagaaagttgaaaactattctaatgccgcgaaacaggctgccgatgcatctaaccttgcagccaaacttactctccaagccaaagagaacagtggagcgtattgggatcggctcgtgcgtcaagtgcctggaacatcagaaaacacttttgcgaaagatattgaaactctaaagtctcaagtcttccttgctcaagtagaaaagatgcgtgggttaggtgcgttaactgataaagagggtgatgctattcgatcatctattgcttcccttgatatcaatcaggggccaaaagcagtacagcaaaacctttctaaaatcgctcaacaaatgtcagcagcagctaagagtgccaatcgaaaggctcagctctatgcaacaaaaggggaaggctattctcctgctgttataagtgccgcaaagacccttggtatttctcccgcagaagctcagaagttcgttaacgagaatggattgtaa

SEQ ID NO: 59395 - DNA, 417 bp, Acinetobacter baumannii
atgaaaaaactattaacagtacttgctttgttatctatttcatcaatttctagggcaagtgaatggctgtatttatttagctctgatactaaaaaatactatgctgatcttgaaagttttgagcgggttaacagttataatgaaaacctaattaaggcttggtttaaattggaaatattcaatgatatagaaaaagacggtatgggtgttggggatgagactctcgtactatacaattttgattgtaaaaataaaaagatgggttttacacaagtcattaactataaaaagaataaacctttaggaaattcttacaacgcaccctctgcaataatgaaagatattatccctgatacgataggtgcagaaagcctaaaacgcgcatgctctatatacagaattcagaatgaaggttag

SEQ ID NO: 59396 - DNA, 483 bp, Acinetobacter baumannii
atgaaagattcttttggtgctcgtcttaaattttttagatcaaaggccggtctttctcagcaacaacttgcagacaaaacaggtttaagtagaaaaataatttcagattatgaggttaagcttgatgtcatcccgagagattctaacctttacaaattagctgatgcgttaggaattgattcttcaaatctaattccaaaaacacgtggtgaagcaaaagaacaacctgatggtaatttttcaataacctataatattcatgagtttccccgaaaaatcgttgaatttctcgaatatgaagctcaaaaaaataatcgctctctccaggagcagtttgaagtgtttatgtctggtgttgtcgaaaagtttttaaatatgtctgaaaatgagagaaactctaaactcgataatcagcaaaatagtaaattggaattggatgaaaaggccttcgaagaataccttggaaataacatcaaaaattag

SEQ ID NO: 59397 - DNA, 960 bp, Acinetobacter baumannii
atgacaagtttagcacaaaactttttaaacccaaacaataagcctttagttattggtgattttacaattcgccaagatcagaatggtcttttcagtctcaatgatctgcataaagccagtggaaatgataaaaaacattttccggcttattttcttcgcaatcaacaaactaaagatttgattgtggaaatagagcgatcctcaaatttgcatatcgataaaactgaaggtcatggggcatgtgcaaattcgcatacgccccctgtgttgaaaattaatgatggtgtaaacaacggcacttacgttgtcaaagaactagtctacgcctatgcaatgtggattagtccaaaatttcatttgatggtgattcgtgcctatgactcacttgttatggaatgggttttaaatggcaaacaaacaatttcaccagaacaagcaggggttctttacaacatcgttcatacgcgagcgaatggtaataagaatttaattgttcaaatgtggagtcgattgaagaaccactttaaatactcagcaagctaccgagaattacgagctattcattttgaagatgctaagcattatctagaagtcatggatttaaatgctaaacctgaaaagcatgattctcctgatgttgtggcgcaattagatgaatatctaaaaacattagatagtcggttccctgctttaagcaatccaatcgcttatgaaattgggcagaagatatctcagtttcttcaatatcaagatttatctgatgaacgtttattttatacagttagcattaacagtgggcaggttgttgttatgccacaatcagctcaccattgttcattagatatagtaaagctttcagatgcatttgcccctttatgggagtttatgcaaggttatgaagttagacatcgtgctaaccacttaagaaagctaccactaaaaagaattccaaataaataa

SEQ ID NO: 59398 - DNA, 2499 bp, Acinetobacter baumannii
atggcaacaagagaaaacttcgaaaagctattaggctccccaaatgtgcagaagatgcttgacctgattgccaatgctgaaggcgtccaacatggctataacacattgtttggcaatgaacgttttgatgacttatcaagacatcctaatatttcaaaagagtttactcaaactgatggtaaaaagaacaggactaatgcggctggtcgatatcagtttatgaaggatacatgggatgatgtgtcaaaacagcttggcttaaaagacttctctcctaaaaatcaagatattgcagccgttgcattattagctagaaacggagcattgccttctgtattgaagggtgatttaaagaccgctgtccaaaaatctggtggcacatgggcatctctgccatcatccaattatcctcagaaaaaaagaacatggagtgatttaggaatagctaatcctgcacgagatcaatatcaatcacaggcttcaaaaatcgttgctgcatacaagcaaaaacaaaaagaacaagaagcaaaagcacagccaccagtagacacaggccgtgctcaacgaattgtagaagcataccaaaaggcacaaataaacaatgccgctaatcaaccacaaggacttccagatttcgatgcaaatggtgtgattacatatgatcaaccacaagcagcacctccatctcctgaaccatctttagccgataaagctctaggtttaggcgaaactgctttgtctgcagctactggtgcaacaggtggtacgcttggaatgattggtggaacaattggtcaagcagggcgtgaaatccttgctggtaattttggtacgccagaagcagcacaacgtatttcacaaaatgcggcagaaggagcagcggacttaacctatgcgccacggactcaaacagggcaagaatatactcaagctttgggtgaaatctctgagcctctagcggctttaactcctgcattaagtgaattggctttagctggacaagctgcacgtgctactgctccgattgcacaagggcaagctatccgtaccgctcaagcagttgcgccagtagtagagcgggcaggacaaattgcagcaaggccagttcaagcagtgacaaatgccactcgttcaggtgttcagagtttggggaaaatggttggattgagaacaccagaagcagaaggtccagcacctgcaaatgtaggcgcagcacaagtagaccaggcaacaattcgtcaagcactttctcaagatttgccgtatccagttcaactaactgaagggcagatgacccgtgatccggcacagctaaaatttgaagttgagacggctaaagattcagacttaggtgctccactacgtcagcgccaagaagaacagcatcaagttatgcagcataacttagatgccttcattgatatgactggagctcaggcaacgaatatgcgtgaagctggtttatcagtcgataaagctcttcaaaagcagttacaggctgataaaaaccgcgttcgcgtagcttatgcgaaagcagataagtcaaaagaagcgaagatccctgtagatttaacccaacccgtaaaagttggtgaaaatgatccaatgtcagtgattgattatttgaattcacagcctgatttaccaaccacgccaattttaacaagtgctaaacgtactgctgaatctcttgggatagcaagccgtggagaaaatggcgaactaattccaaataacccgactatcaaacaaatggagaagtggcggcaagagattaacgccaatactaatcaggaagctcccaacattcgtcagtcagcaattcttaaagacatgattgatcaacatgttgagccagtagtaggcaacctttataaagctgctcgcaatgaaagaaagcgcatggccgaccattgggaaaatcgcaccattattaaagatttaaccacgaataagactggtacagatgaccgtcgtgttgcactggaagatattcagaaacgtatcattcatgacgggtcacttgacgacttgcgcgtagcgaagcgtactctcttaacctcaggtgaagaagggaagcaagcatggcgtgatatccaaggtcaaacgcttcaagaaatcaagaatgctgctacagctggcgttgcaccggatgggcagggcaatcaaatggtaagtgcagctgccttgaataaagcgattaaacgtttagatgacgcagggaaacttgattatgtctttggtccacaaggtgcagaaaagcttcgagcaattaacgaaatatctaaaacgttatttaccacgccaacatctgctgcaatcaaccacagcaatactgctgcaactcttgctgctgcaatggatattgctatgtctggcctttctgggttccctgcaccagtagctacagcattacgacttgccactaagcatattaaggacaacaaggtcagagcacgtgtaactcaagctcttaatccatcccgtcctaattcctaa

SEQ ID NO: 59399 - DNA, 2022 bp, Acinetobacter baumannii
atgacattgtcaatttcaaatcagtacaccatattgaatgatctagacggcaagccattagattcaggttgtttgtacattggagaagctggtaaaaatcctgaagtttatccgatccctgttttttgggatgaagaattcacgaggccagcacatcaaccaattacaactagaaatggctacatttataacaatggtggaccatccaagctttatgcaaatgtgggtagctgctctattgttgtaaagaataaaagaaagattaccgtttatactgacttaaatgtaactgcaacaagctcttcgtcaattttcgatggtgatgaaagtcaaaaaaccatcaatgataagaccacgcaatatgtagatactattgttgacttatcaaatttgcttgttcggaaaaacaatcaaaaagttattgtgaataaccgttatacctatcaatacgataaagactcagtagagccaattgatggtatttattcagttgaggctagtaactcaatcggccggtggatacttcaaaaacctacaaatctatatgcttcagattttgcgaagacttccgctcaatctctagaaagccaatcagttaagttgcagcaaaccaatgatgttgcagtgaagcttggtgttccttttattgtggatgccgagtttatggttttgccggtagaaaatgttcaagggatttgtttttctgtacgcagtaacaatgacataactttcacccctaaaggcaaatttaagattgtcccaaataatcttgaaacctactcaattgttcatgttgaaaatattgaaaactataagttagtttttccacgtgttcagggtgatagagatgagcacttaggtactgcaggtgaatggggatatggcctaactgtatatcagtcgaagaagggctatatatatagaccagaggttaataatacatggggcgatggaatctatgttggtcgtcgctggggattgataaccgatgatactccaactgatattactatctcagaaccaacggtattaaatgcaggtcgcaatggtatctcactcagtgctggtacacgtgtaaatatccttctgccatatgtttatggtactaaaggtaaagcgcctgaggctggcattgacattgaaccagaggctgctgatggattgccaaaatctcacttaagagattgtattatttcatcacctacgattgagtcttgtaagctcggacttgtctgttatttctttccaaatgattccacttatgaagttgaattctctggtgttacaacaattaaggattgcgaacaaccacttgtaatatgtgcgggtggcaataataacagtggataccttgacctaaacaagattcaggtaacgaagctgcgtggtaatacgttactgcaaaatgcttggcatagaagcggtgactttagatgtactatcaaagagttggtaactgataagtcattaccaattgtcatgacaatgaatggggcttttagcactggtaagcttggtcattttgatattcgtaaaatcattaacaatgatccgaccggtaaaattggctattacgttccaacctcagtgcagaactatgaagataactcatcttatatgttcgaagatccgaaccgggcatatcttgattttgactttactacgcatttttttggtaaagattttctatccaacatcataacccttcattccggatggacagcatcgtcacggaacatggcaaactatatctggcaagatccttcgatagatacatctggagcttcggcaatttatattgcaacagccaatgattaccgccggttaaagattgggttggcaaacacaacaaccatcgtaggccaaggttgtaatatttcgggtcttcgtattcgtaaagcggatggctcttattacactgaagcacacacgcaatttattggcgcatggttggattttcaaaacaatttaaacggcaatacagaagtgtttggctcttatggcaactggactttcacctag

SEQ ID NO: 59400 - DNA, 2124 bp, Acinetobacter baumannii
atggataatttaatatattttccatcagacaaaatccagtctccttacttcgaaattaagcggtttattgattttgttaaacagttatcagaattaaatgaagatattagatttgatgagaattattggaaaggcgaagtaaactttgtcaaatcaggtgtgccatcacaagacagacgacctgaaaatctcttggatcattcaattctagaatttgccaaggcgtatgttaagtatcaaagaattaatagtaagttaaaaacccaagatacgattttgggaattcgggtattagaaaaaatatgcttagatcgatatggtgaagtggatttatctaaattagttattgctgattttgatttagcggctgagaatgcaaagaaaagttataaagcaagttctgcttatcatgtgggaagacacttaaagattctcttggattttattcgccaattaaaaatagtgaatttaccagagtggaaaaatccaattaaaaagcctgctgataaggtaattctgctagataaagagtcagaagaatatagatcatctaagcttccagatgaagatgctatttttgcattggctgatattttctcacgaaaagattcagagttgtcaaatagagatatttttgtcaccagtgctgtgagtttgcttctagctgcgcctgaacgtgcatcagagctgtttttcttaaagcataattgtatctacgaggaagaagtcccaaggcgttctaagagcagtttagagcttgcagaagatggttcgaatattgagaaagtattaggtattagatggtatgcacagaaaaattatgggtatgatattaaatatattccgagtgtcatgattccaacggttaaacgggctattgaacgtttgattaagatgtcagaacagcctagacatttagcatatttgcttgagacaagcgataagtttccgagacataagttctgtcctaaagtgcctgatgatcaattattaaaacgtagtgaagtattgtcggcaatgggatttgatgtgtcgctatatgatgagactagtaaagaaaaaaatagtggcaaaagttttttaataactcgtgagattcctattagtgattacgcagtctgcctgaatgatttaaatattattctgcgtaatagactgcctcagggctttccttatataccttttagaactggtaatggagttcagattaagtggtcagaagctctatttgcatcttttcataatcaatttcattcaaataagataactatcttttcagaattatggattccaacaattaataacttaaatgaagatttatcgcccacaagaagaaatttaaaaggaaaacgccaattatgtaatatgaaatctatttttcagcggtggggacatggtaattatagtatgacaactcatcaattccgacatttattgaataccatagcaaatacgaatggaatggatagcttgttacttgctaaatggtcgggacgagctgatatgaagcaaaatcgagtatatgaccataccacggttgaagatcgtaattatggcttaattgagatgcagaaaaatgaggttggtatagtaaatactgatagtacatttacatttcagaccgctacacctcgaactctacaggagttaaataccaaaaccacgttgtctatgcacactacggaatttggactttgtacacattcgtatattgatgaaccctgcttaaagtatagaaactgtttgaattgcactgagcatgtttgtattaaaggtgatgtagaaaagaaaaaacggcttcaagatagactaaaaaaagaaaaaatcttatgggcaaaggataaagagtctgttagtaagaatgttactggtgcaacggtgtggttggagatgagagaattaacgattaaacgttgtgaacagatgattgcactattgaacgatccaaacattcctgatggtacacctttgagccttccatcttctgaagatatccctcatcttgatttagcgtatcaaaaggcaggtcgtaaacgcattcctactattgagaatactcaacgtaaacagattgaaaaacagcaagttttgcatgaatctttgttaatggatttatggagttaa

SEQ ID NO: 59401 - DNA, 963 bp, Acinetobacter baumannii
atgtctaagttatcacaaacgcaaaaagtcgcagaattcttaaaaacgtatccaaataaaaaatttaatgcacgagagattgccgaattcatcattcaaaaatatccagaagattatgaccaaaaaaggaaaaataatcgttttgaatcagaagcagagtttttacaacaaattgtccgtgaaattagtagcggagcaaaaaccaatattctaaaagtatcccctcatattcacatacaagatcaaccccgtcccagacaattctggtttgatccccacacaatttatgaagtagaccataatataaattcagacattagcgaatctcttttagacagtttagaacctgaaattaacttgccaattataaagtctgggaatttatctgagcatgacttataccctattcttaccgaatttctaaaatcagaactcaatttatattgcctcagaattgatgaaaaacgatctaagaattctcgaggacaaaatggtaatcaatggttgcatcccgatattgttgccatgcaacctttagacaaacactggaatgaactagttaaaagttgcgttaaacacagttctggacaaaatgttcgcttatggtcatttgaagtaaaaaaagaactcaatagctcgaatattcgtagtagcttctttcaagctgtaagtaactcaagctgggcaaatgaaggatatttagttgcaacctcgatttctacaagtgatgttgaagatgaactccgtatgttatctgcattacacggtattggtgtgattttattaacaccagaaaacccaactgaaagtgaaattttattgcccgcacgcagacgaacagaagttgattggcaatctattaatcgtattgtgaatgaaaatgctgacttcaaaaattttattgagctagtatctatctattatcaaactggtcgtattcgtacacaggattggaaccattaa

SEQ ID NO: 59402 - DNA, 423 bp, Acinetobacter baumannii
atgaatcaaatagaattaattctaaaaacctttaatgagtatgagtttaaagaaggcttagatgatttattctatttatctggagagtttctaaaagaaatttatccaacgactatactcgaatatgaacaagatatagcattcttcatggctttaaaaagcttgttagatagtggaaatatttctctattttataatctgaactatgaagattcatctaaagatggaaaattgctaattggaactacagaggaacaaattaagcagttacaacaagtttggattggtagtgatgctatcaataaaatggatgaggaaaatgactatataggatggtacttcttaacacattgcccttatgcattagctcataaaatttatgataaaaatggaaacttcgagcgttggttttgtgcgggataa

SEQ ID NO: 59403 - DNA, 123 bp, Acinetobacter baumannii
atggcacgtgcactcttgagtaaacaagtcgatgatgaggttgaagtgcacactcctttaggtaaaaagctttggtatatcaatgcaattcgttatgaaaagcctaaaaatgatgaaatttaa

SEQ ID NO: 59404 - DNA, 1311 bp, Acinetobacter baumannii
atggcttatgttaagaaaatttatgtaaattacaaagattgctccacacaaactactttggtcttaccatgtatcttgactgagaaaggaatcattatttctcatttacgttatttggcatggttcaattcaaaaagtgaagcatggaaagaaagatcttgttacgcgcttaaacttttactgaagtatataaatgctgttccacaaattgagaatgcaacaaaattactcaaagctttcactgaggctttaatcacaggcacagttgatccaactgcccgtacagattctcttgatctttattggcgaccacgcacagtcagagataccaataatctattatttcatattacgcattacactgattttctgatgttgcaggatgaacattcaacaattcgtgtaaatccatttcgtaaagctacaagctatgaagagcgtctaaattggtgtgcttactaccacaaacaagcacacgtctttctgaatcatttaactaaaaaagacttatcacaacagcaagttcgtttggttggctcctttaatgaagagctgattgactttgaatatgcagtccgttttcctgaagatcaaattgaaaggctgatttacttagggtttgaaagaaatggaaaatatgactataaatcccaagcgattacaatgttgatgaattatggtgggcttaggaaaagtgaaatttttcatattttcacctcagatatcactttaaatccgaatagacccaaagaagcattggttcgagtctatcatcctgagctaggcacctctcctgatccccaattcaaaaacagacgtgaatttcttttatccaaaacatcattcaaacctagaaataattacctatttaccgaacgtttatatgcagggtggaaaagcccattacttacttctaaacaaggctatttagaagtggtgtttaatccaccagaaaaggctaaagagtttttggtaatttgggcaaactatttaaaatttcaaagagtagagcctttaaaaagcaatcctcacccttttgctttcaccaatacactaggtgagcctgaaaccattaaaaattttcaaagactgcataaaaatgcggtagagcgtattggactcatttgtaagaaagatcatggaacaactgaacacggacatcgacacgcttatggttttcgagcacgtcaggctggcttaaatcaagtcgaaattcaaaaagcaatgcatcataaaagtccaacatcgtgccttgtttacatcaagccgacacttgaagaagtgcaagaaaaattgagagagattcaatga

SEQ ID NO: 59405 - DNA, 2769 bp, Acinetobacter baumannii
atgataaaacctcaagcaattcgacaaatcgaaaacaagagatttaataaagaattttcaacttttccagacttggattctttaaagcaattttgtaaaaatgctgacattaccaattctgtatcgtataaacaaaattatagaaagtatggactacctgcccatccagaaagaatttatgatgagtggatcagctataaagatttttttgatatacctaaatttatttcttataccgatttaaaagaactcattatagaccaaagtttaaaaactatggctgaatacaaaaggttcataaataaacaaaatgatgcatctcttcctcttgaccctcagggtgtttatgccgatgaatgggaaaattggtacaaatttttaggtaaaattgaaccatttaaacccgattttatttcaccagactatgtcacttgggcagttaagattaaagagtttatgactaaagctcgtggtggtggaacgaaagaaactcagttatgtcgtttcgtccgtctttatatcgaacaatttgataaaagcaaaacaccacacgcttttctcatacaagaaaaattcgatataaagccctttcgagatttacttgaaaatatagaatctgaaccaatgaggcgaaaactcgttgtctatgtcaatgaattcttagattacatcattgataatgatttaacgattgaagatgatgaaacaggtgagattgtacgagtcgataatgctcgaaatccgttttcccttttactcaaccaacagaatatatcatctagctcaatccgttatgaaacgacaaaaccatgcttacaatatcattttgtcaaaaaagctcaggaatggattattccatcaagtgcaaaatgcttccaagatttagagcatcttcataaatttgatgccgattgggtaaaagtcaactttgatcaattagacttatatgaccctgattgtgtttatcgtatcgttgataatcaagcatatttatggtgtccaatagattggattcatacttatgcacttaccaaagttcccttaagaggacggcaaatcgcctataatgattctggcgaagctgatgaatatattgctgatttagatcaacaaaacaaaatcatttggctaaaaaataattccccactttcacgattaaccaaagaacaatcgttcatcaaaagaatgcctgatggtcaaacaggtatgtttaccactacaaataaaacaaataacaatgggcaaggctacacaattccgtggatacccgaagacttagcatattggcttattaggctaaggaaatggcaacaaaaatataatcctatctcatatccgagtgcttggattgattgtcaaagaacaaatttaaatgaggtacaaagaaaaggcaaaggcttgaattgttttctttttaggcgctttaatgattttgaggcagcgaatgtcggaaatgcattaaccccgagattagcagctgctctttataatatacagccctcaaatctttgcttaactacacttgaaggaaatagagcagttttaggtgcatataagtctaaatatacaccccatagcatgcgtgttagcctcattacagcctatgttcttgaaatgggcatgccaattgaaattgtgatgaaaatcgttggtcatagctccgtaattatgtcgatctattattgcaaagtttccaatcatgacattagaactcgattagaagaaggtgagaaaattgccttaaaatctgaagtagaatctattcaaagaaccattgaacaaaataaaattgaaagtgttaaaaaccaattggttggcaataatttggaattactgcaagctttgtctaatgaggttcctgcaggtaattttatttttagagattatggtatttgcccttttgccgcttcaagatgtgaggatggcggtgagttaataaaaagtagttcattctatacccctacacctcaaggttatttaggaactcagaattgtatacgttgtagacatttcattactggacccgcctttcttggtggtctattggcaattacaaatgagatattactccaatccaatgatcaatctgaaatatgttccaagctacaacttaaaatcaatcagattaatcaagatatagagaatattgaaaaagaagaatacatagccaatttgaagaaagaaaaatttgaaggcacagcaaacagatccaagcttgagactgaacttcgaaatttcgaatctgaatatgaaacagccgctaaaaaattggatatgcttttatgcgatatccaatcggcttatagtcatattacgaaatgccacaagctcatcaacaacaatccccttatagagagcgatgaaaaactttccttaattacagcccctaatgctgaattgatattagaaatggaagaagtgagccattatcaacaattacaagaagtctgtgaaaatgcagccatttataaatcttgtaatgcagatcaagctatttatccaagaactcagctcattgataaaatggcaatgtttaatgaaattatgcccgctttattcatgttatctaaagaacagcaactttcagcaggcaatcaaattttcaagttattgatgagtcgtctcaaatcttgggataaagtgcaaagtgttatagatggaaagcttaaactaatagaactttctgaaactgaacaaatttcaaaatcagagattgaactcattctacataattcacaaaatttaattgaggtaaatcgtgaatcctga

SEQ ID NO: 59406 - DNA, 609 bp, Acinetobacter baumannii
gtgaatcctgaagagttattacataagttaaaacatggatcatcacttaaaatccaacagtcactcgatgcaatctatgaagtatgtatggagcaacaggaacgtggaattcaggatttttctgtaagtacgattgctaatttaggatttaatcgaggtgtccctaaagcgcaaagcatcagaaataagacaggtgaaaaatatagagcactgattcaatgttttgcagattcatcccagacgactaaattaacaaaaccatctccaacagataatgcatggattgaagaaattcaaaatcccaagcatcaattgcttgtacggattatggcatctgagttaaaagaagctcaacaaatgatccgtgaaatcattcctcctaaacaaaggattgatatttatgatcataagaatatgatacctgatgaatcttttaagctttctgatcaagaagtacgagcattacagtatttattgtctatagatttccaaaaaaaatggaatttaaagcccactcattatggtgagcttgtagatgagtcgaataagccagtttttaaagtgtcaacattagatgccttacggaaggctttggagtatttgtcttga

SEQ ID NO: 59407 - DNA, 240 bp, Acinetobacter baumannii
atgatttatttagtaattaaagatttaggacatggtttttatctaggtaaaaacaacctgaagcaaggtggtaaagagttcattgtctttaaaagcgataaagaaatgtttataggtgtagagtcgtacaaatatgatgaagcaaataacagattgctttgggaaggaatagaggatttggggtttattatcgttggttttgcagatacagaagaagaagctttagatttggccttttaa

SEQ ID NO: 59408 - DNA, 435 bp, Acinetobacter baumannii
atgacaaacaaattaatagcattatctttgtgtgcatacattggcactaagtctgttttagcggccacaatgacccgtggcgaatacaacgattaccgtggttggcaaattcctgaaaatgaagacccgaccgaacaaggttatctagttgaatatgttgatggcggtaagcctaacgatgatcgtcacaacgggtatatttcttggtcaccacgtgatgtatttgaaaagtcctaccatcaatcacaaacaccccaagatcgagttcgtttagagcagattgaactaaatagcaaactagatgccttggaaaactttttagataaaggtcagcctaagtttatcgatgatgagcaatgggctttgctgcatgaacaacaaaagcatatggatgcgtatagcgatgttctagcaaaacgtatcgctctgttttaa

SEQ ID NO: 59409 - DNA, 672 bp, Acinetobacter baumannii
atgagcgaagcagcgacaactacgacagcatctaataccgcatctactccagctgcggcaacgactgatacaactacgtcaaccgcaccgactgagaatacgactactacagcggtaacaacgcctgcggctgaaacaactacaaccgataaccaagaaggtaaaccagatgttttgttaggaggcgaacaacctcccgcagaacaaccgcctgctgagcaaccaattcaatacaccgatttcacaatgcctgaagggtattcattaagcgctgaagattcaaaggtgcttcaagaattaggtcaagagttcaagatgcctcaagaatcggttcaaaaacttgttgatttgggcgttcaaatgcagcaacgacaagttcaagaacagcaaaaagttattgcttcttggcttgatgcagccaaggcagacccggaatacggcggggataaattaaaggacagcctgttgacagcacaacgtgcctttagcttaccgagaggtgatgaaatctctaagattctctttaagagcggactaggaaatcatccggctgtcattggctttatggctgaagttggcaagttgttagaagctgacaacatgacacatggcaaaggcacaaatacaactggaaccagtctcggcaaactttggtatggcgatgataaataa

SEQ ID NO: 59410 - DNA, 333 bp, Acinetobacter baumannii
atgagtgatttagacaagaaaaccagtgacaacaaaaagcagcgcgacaaggagcttaatgaccttcgtgccttacttaataccgaaagcggtaaacgttttttaatgcgcttaatcaataggtcgaattatttacaacctacctacggaactggcgcacaaatcagtgattttgcatttcatgaagggcgaagagatttcggactattcattattggtgaaattacacaagcaaattcagatgcatggctagacatgcaaaaagaacatttcaaagaaacaaatgagaaggtgagccatgagcgaagcagcgacaactacgacagcatctaa

SEQ ID NO: 59411 - DNA, 1692 bp, Acinetobacter baumannii
atgactgaagacgatatcagagcgctaaaaaaacgatttgatgccgtttggcagatacgtgttagtgatatggacgactattgtgctgaattggccttacacgttttgccttctgctatcaaaacaatcaagaaccaacaaaagcatgaacgatctgcttggtctaaaatcgttgataacactggtaaagattcattaaaaactcttgctgcgggaatggtctcaggcacttgttcgccaagtcgtaagtggttcactttgcaagctgcggatgagtctttgcaaaaagatattgaagtgcgccaatggctaaaagctgttgaggatgcttgctatgttgcttttgcaagaagcaatgtttatcgatcagttcaccatatttacatgcaagagggcgctttcggtattggtgcagcactagcgcctgatcatgggcgtaattcaaaagctgaattaatggatttaatcccgcttacatttggcgaatatgcaattacaacggatgagtttaataaaccaaacggcgtatatcgtaagttcaaattgaccacgatcaatatggtcaaccagtttggcaaagaaaacgtatctgattcggtgaaaagtgcatatgaaaataataactttgaacaagagtttgaagtttgtcatgcaatttatgagcgaccagatgcaaaaggctttggccctaaaaacatgccttttgcatcaatctactatgaacctaatgcaaatggaaaattgctacgtgaaagcgggcttatgagctttcaagtaatttgtgggcgttggacagtttcaagtagtgatatatacggtgaaggccctgcaagcgattgcataggggatttacgcgcattgcaaaaaggccatcaacaaattgctgttggtgtggattatcaagttcgaccacctctgcttttacctgattatcttaaggggcatgagcgcgagacattaccaaatggtattgcgttctaccaagcatcaccaacaggtcaggtggcacaagttcaatcgatgctgaatgtacagttcgatttaaacggtgtgatgatgcagattgcacagtgccaagagcgcgttaagcgttcatttcacactgatctattcatgatgctcgatgcttttgacaagggaaaaatgacagcaacagaagtgtatgagcgtaagtctgaaaagatgctcatgcttggaccagtagttgaacgccagattgatgagctattgcgtccacttgttgaaatctgcgttgaccgtgttttagcagataacgaatacctacgccaaattgcacctgaagctattcaaaatgctgatgtagaaatcaacttcgtatccattcttgcacttgcacaaaaatcttcaggttcagcgattcttgaacgtgctcttgccatgattggacaagttgcacaggttgaccctcaagtactcgataactttgatacagataaattcttagcagaatacgttgaaattaacggcgtatcacctgacgttttccgtcctaaacgtgttgttgagcagatacgcaaccaacgtgcacagcaacagcaaattgcacaacagcaagcaattgcagctcaacaagcccaaactcaaaacacaaacgccaatactctgcaaacagtaagtaatacggatgctgaaaccttatcagatatgttcttgcaaggcggtgggcaatga

SEQ ID NO: 59412 - DNA, 285 bp, Acinetobacter baumannii
atgtgcgtaaacaaagcattagattttttaacaggtggaatgattggaggtcagcttggtgaagcaatggggctaagtaaacagccaactgtacaaatacaagcacctccaaaacagccaacacgacaagattctaaatcgcctgattcatcggcaactattgaccgtgtacagcaagcacaaaactcaatgtctggtggccttgctaatacgctttatacagatgctcaaggtgttaataccgacaagttgcgcctaggccaaaaaactttattaggcggttaa

SEQ ID NO: 59413 - DNA, 276 bp, Acinetobacter baumannii
atgattacagttgccataattctgtcactcgttttcatgatctttatttcaggggcattgaccttgttaatgcttaagatgaaatgcattagcaagaaaaaatcattctcgtatttcacatggttgtttttcatttttgccgttggtctttatttcaaattatttggtaatcaacatttcaaggacctttcagacgtttggtttattttcgcaatgggttacagcaatgtgtatggccctgaagattgggggatgtatgaccaaaacagcggatga

SEQ ID NO: 59414 - DNA, 735 bp, Acinetobacter baumannii
atgtctctaagtgggaaacagcaacgctttgttgatgaatacctgatagatcgcaacggagcacaggcttatatcagagcaggctacaaggttaagaatgaagatgtagctgctgtaatggcatctcgtctgttaaggattgataaggttaaggaagcaattgagaagggtgaaaaagagcttgcagaacgaaacaagatcactcaagacaaggttttaaatagactttgggaaatggcaacggctgatcctaacgagctaatcaaatatgtacgtgtgaattgccgctactgttggggtgacgatcattattaccaatggaccaagggggagtatcacaacgcttgttacaacgcgatagcaaaccagaaacctaaacctgattgtgatggcggttttgacttcgataagaccaaagcgcctaaccctgattgccctgagtgtaaaggtgagggcaacggttatgtaacagttgcagataccacacgtgtaagtgctcaagccaaaatgctttatgcaggtattaaagaatctcaacacggcattgaaatcaaaatgaatgaccaagtggctgctttgattaaagcaggtcagcacattggcatgtttaaagaacgcattgagcatggcaatgaccccgacaacccgcttactgataccaaggcatcaagcaaaaaactatctgcacttgcaaaactgatcaaggctaaaaagaaggcgaaagacgatgcgtga

SEQ ID NO: 59415 - DNA, 210 bp, Acinetobacter baumannii
atgccagtacttgcgtttctacctgagttcatcgtgaaagataaagtcaaacgcgattcaacgccaaaggtaacagaatcagacgtaaaaaatattagaaccttgcatacacaaggcttgtcttatcgccagttagcgaacaagtacgatatttctcatgagatgtgtagacgtatttgcaccaaggtttgctacaaggaggtgatttga

SEQ ID NO: 59416 - DNA, 786 bp, Acinetobacter baumannii
atgaatgcgatggtgaatcttttaaacggcttcaaattagctgaaggattttgcgaaatacaccaggtgcaaaaagtacaggcgggaccgcatcaaatttgcccaagctgtgcaatcaatcatgttcatgactcaaagcaaggtgaacaagcacgtgttgatcaaatggtacgtgacaaacactttggtggtgcaatgcttcctgaacgtcatgctcaatctgcatttgataactacaaaacacttactcatgcacaagcaaatacgcttactgaatgcatcgaatatgcacaagaattacttgcagcttatgctgaggacaaaaaaaatcctaaacctacaagtaaatccaatttcattatggttggttcaactggtacgggtaaaacccatctaggttgtgcaactgcaaaaacacttctcaaaaaaggcctgtacgttcgatacatcacaagtgaagaacttgctcagcgtgtcatgaatgcatgggataaggacacaaaagatcaatcagaagcatctgtaatctatgagttcactacatacgatttattgatcttagatgaatacggtttacatgaccgtggtaccagacttgaaattattcatttggttttgacagcacgttatgaccgcaaaaaaccaacgatgctcatttcaaatttttccatgaataagctcaaggcagatttgggcgaccgtctatggtcacgctttcagcatgatggtttacgaactgttgaatgcaactggtctgatgctcgtgtaggtggtgcctatgtctaa

SEQ ID NO: 59417 - DNA, 885 bp, Acinetobacter baumannii
atgagcaaccaagacgtagatatttggatgccaatttatattggcgacatgcttgctaagaccactcgaatgaccaccgagcaaatcggtgcgtcatttttactcatgatggattattggcgcaatggtgcaataccagatgacaacaacgttattgcaagcgtaattcgttcaaatttgagtaaggcgaaggctttaaaaactatcttgataaattcaaatttatttgaagtaaaagacagtgaattatcttcaaaatatttggatgatttaaagtctcaagctgaaagtaataagtcttcaaagtcagagcgtgcaaagaaagcagcggaagcacgatggaataaagagcaagacactagcaacactaatgcatctactgagcatcaatctagcaatgctaatgcatatgcacaagcaatgcataagcatgaggcaagcaatgctcaaggtatgcttgagacatgcccttcatcgtcaccttcatctatatatatacatacacaatcagaaacgccgaattccctcgatgaggacctgagtttgtggaagccttcacttcatgaaattaactcatggagacaaagagcagggctacctaaaacgactcaggaagagtttgacaccttcatgattaccttcctaccgcattacgcacctgaaatacgttcaggtcgtctcattgaaaacaagatttacgcgaaatacatccagtgggtgaaagacgatgctttgaaagtaagtcggcttgctaaagcaaaacccgctgcaaaaacaaattcggctaacgattcaagaaacgtcaatgacgcttggaaagacgagcctaaatcagatgatcgcccgttcacaggaactgtgcatataccggaggatttaatatga

SEQ ID NO: 59418 - DNA, 828 bp, Acinetobacter baumannii
atgagcttaaagcaccctcttattcgatatcacggcggtaaatttcgaatggccgattggattattcgtcatttcccaagtcatgaaacatacgtggaaccttttggtggtggtgcatctgtactacttcaaaagaatccaagccgtgttgaggtctataacgaccttgatgatgatgttgtcaatttctttgaagtattacgtgatcagcagcttgctgaacaacttgcaattcaaattgagcatacaccttattcacgtactgaattttttaatgctcgagctgatacaaacgacaaagttgagcgagcacgtcgcttagttgtccgcgctcaaatgggttttggtagtgcaggcgctacaaagggaaatacaggtttccgtttagacacagctcgaggcggtagtgacatcgttactatttggcaacgtcaaccggaattaataattcaagctgctgcgcgtttgaagaaagtacttattgagaatagagacgctatcaaggtcatccaagaccatgacagagcagagacattatttttcgtagacccgccttatgtgatggatacaaggtcaatcggctgtaacgcttatcgatttgaaatgtcgaatgatgaccatgaaaacctaatttcagttttaaaaaatgtaaaaggcaaagtcattctttgtggttttgagcatccaatttacgaagcattaagttggaaaaaaattactaaaactgttgcagcttccggacaatctggctctgttccaagagaagaagttctatggattaacccccaagctgaaaaacagaatgatttatttagtgaggtggtatga

SEQ ID NO: 59419 - DNA, 636 bp, Acinetobacter baumannii
atgaaagaacgccctattatttttaataccaatatggttaaggctattttagaagggcgcaagacgcaaactcgtcgccctgttaaacctcaaccattaggccatagcctagaaagtattcttgatggcaaatggcttactaaaagttttgatggccttttatctccgaaaattaaagaccttccaatgcactgcccatttggtcaaatcggtgaccgtctttgggtgcgtgaaacgtggtaccaaaaaggcagaataggtcgtacttatccagatgcagaagatgaatttaagtttttcccagaaaaacaagctgcctactatgctgatggtttattcgcaccttggacatcaataaaacgcccatctatccacatgccacgttgggcatctcgtattttgcttgaaattactgacattcgtgttgaacgtttaaatgaactttctgaagcagatgcgaaagcagagggtttggataattctagaagtgaagctgctattcaaattggttggtatgaactaccagtacctgctttcagacgtgcttgggagtggatttacggtcaaggttcatggaaacaaaatccgtgggtgtgggtagtcgaatttaaggttatccaaggcggtgaatcatga

SEQ ID NO: 59420 - DNA, 579 bp, Acinetobacter baumannii
atgatcgaaaaatttaccttcaataaccttggtgaaaaccataatggttgggcagctatctatattgagcctaataacaactacagtaaatgtggtggtcgtattacggtgatatttgaggattacataggtacggcttttttcagtcactgtggaacaaatacttttattgagttcattgctaaaactagctctggctacttgatgaataaattattcaatcagaataatcaaattccagattctatttttatagaagatggtgacgaaattattgaacttattgaccgtgaaaagaaagaagaaatcaagcttggccgtgaatatggtgatatttctttatcaaaagatgctttaagaagtcttcgaaatgctttatctggtgaacaatttgatacagcaggtgagctatatcgccacttagatggtgatgagcaagaaacaatggatagcttgtttggtgaagagtggggatttgacagttcgctaaaaaaagaaaatccgaaatatattcacgtcaaatcaatggtggattcaatcattgccgagtttaagaaattaagcgaggtgcagtcatga

SEQ ID NO: 59421 - DNA, 222 bp, Acinetobacter baumannii
atgactaatttaacagaacataagtgcaaaaacaaatgtcctgagtttaaaggagagcagtgtaaccactgtttagttcaaccagtagaacagcgaaaaattgaagatatgggcgatgaccgtcacattgaaaatcatgtttctaaaaactgtcacgttacttcgtgcgatgtattgatgcatctcaaccgtgctcatcaagcaatgggagaggtgtcatga

SEQ ID NO: 59422 - DNA, 819 bp, Acinetobacter baumannii
atgaaaactgaatacttaagacgcattaacttgcgcaaagcgatagacacgatacggcttagagataagttaaaatcagatgcagctttttgtgatcaatttggattaacaccaagtcatatttcccagatgattcgtgggaaaggtagctttggtgaaaaagttgcacgcgacttagaaaaccaaattggtttagcagagtattatcttgatcaaaatcatagttttccgatggatgatgattttcttgaaaaagtttttggtaaagaatataaagaaataaagttaaacgagacttctaatcaaagtgatagtaataactctatagaactcatgatctatgaagatggtgatccggtacctgaaggatatacagctattgattactatgatgatgtttttgtaagtgcaggaaatggatatttgaatttaatgcagccaagcgctaaaaaattctttgttccgacatatttaatgcgtgaatgtaatgttcaaccttcaacagccaaagttgttaaagtccgtggggacagcatgtttccagtgctacaggatggacaacctatttcagttgatatgtcagcaaagagaattattgacggtgaaatttacgctttccaagtaggtgatgaaacaaaaattaagtatttatctgtatggaatgatgaaggaaaaggtggctttaaggctacatctgcgaaccaggataaaaaccgatatccagatgaatattactcacctgcaagaattgcttctgaaggggttgagataattgggcagtattggatgaagttggatacaaaaaaaattaaaagataa

SEQ ID NO: 59423 - DNA, 879 bp, Acinetobacter baumannii
atgagcgaacttaacaatattgctgaaaccaattacaagcttggtcaaacaagcctgcaaaatgtaactcaatcaacaggtgtattgccttttgttgtagtacctgaaggtagtaatgttcatgcattcactagcttattagctcgtccccttaatttagagcaaagtgttgcattacacacggctaaagactttattgcctacgttacacgctatgcagataaaaactctttagttttcgttgatgtattgaaaggcaaatttaaagctgtgctcgattatcacgaggttgaaaaagaaactaatgcaggcgcagtacttgcaccacgtcacggcaaacatgcggcacattttattgctgaaaaaacacctgagtttaaaaagattgaagaaaaatcaggtgaaaaattcagtcaaacaaactttgctttgttcttagaagatgtaatgccttacatcaatcaaccagatgcagcagttttgtatgaaatcgtacaaacactgaatgcaaaaactaacgttgattttaaatctggtatccgtaccgataacggtcaagttcaattgacttataacgaaacaattgaagcacgtgccggcactgcgggcaatttaactatccctgaacaaatcgttttcggcatccaagtacatcgtggcggcaatcactatgcccttcctgctcgtttccgctatcgcattaaagaaggcgtgattgtgttctggtacgacttggaccaactagaaaaagcaatcgaaaaatcaatggaagacaccgttgaatacattcgtgacggtaaaacaattgaaaaagacggcaaagaaattgaattaaagggtctacctaaatacgtgcagattttggaaggttcagtttaa

SEQ ID NO: 59424 - DNA, 300 bp, Acinetobacter baumannii
atgagtacaaatgaacgtgaagcatttgaagaagcctatttgaatgtaggcggcaagcaacatgagcttgaattagaagatggtgaatatacaaattctaagtctcagctaggttgggaattatggcagatcaagactcaggccataccaaatcaaatcatcaatgaaattcaaagttgggtagctgttaaatcttttcctgtagaggatgcacacccagacttaccaattattgatgctaatgaattggctgaatttatcgaccaattagttaaaggtgaatcgggagctaaaggatga

SEQ ID NO: 59425 - DNA, 312 bp, Acinetobacter baumannii
atgaaagacggcttcaacaaaataaaaaagttagctgaaaatgctaaaaaacttgatggtgaacagaaggtatctttaggtactttatttaatgaggggtttcttcaggctaatactgattttgaaagtattgacgatctgtttgaaaaggcggggtacaatgtagaaaacgaagatgattttgcagctatacctcaagaaggaattgatgcttttattcgagagaatactaaatttgagagtttcaatgcgatgcatcgacaagcaacaacggaatatgtgcgtaagcaattactaaaaggtttaaaataa

SEQ ID NO: 59426 - DNA, 1200 bp, Acinetobacter baumannii
gtgagtttagtttttaaagagttgggggaattagttgattttaaaggtggtggtacacctagcagaaatgttgaagaatattggggtaattcgattccgtgggcaacagtcaaagatttaaatgaaggtattactttgacagaaacccaagagtttattagtgaattaggtttaaaaaatagtgcttccaacttgatcgctaaaggcacaataattattccaactcgaatggctttaggtaaggttgtgatttcagaaattgatgttgcaatcaatcaagatttgaaggctgtttttgttaaagataaagaaacattagatgtaaaatatcttttacgattcttagagtcgaataaagaaaatattgcttctatgggcaaaggagcaactgttaaaggcattactttagaccaattaaaagctattaaaatcccactccaaccacttgcagaacaacgccgaattgcttctattttagatcaagcggatgagctacgccaaaagcgtcagcaagcgattgaaaagttagatcagcttttacaagccacgtttattgatatgtttggcgatcctgtaagtaatcctaaagggtgggatattagaaaactttctgatctatcaacaaaaattcatagtgggaatacgcctaaaggtggatctgaaaattatgttgataaaggtataattttcttaagaagtcaaaatgtttggaaaaataaagttattcttgatgatgttgcctatattgatgcagctacgcacgctaaaatgattaaaagtagtgttaaacacgaagatcttttaatgaccaaaacaggacgaattaacactgaaaatagtagtttaggtcgagcagcaatttatttgggtgaagatgatagtgcaaatattaatgggcacgtttatttaattcgtattaaagaaggtttcaataaatactttattttaaggatccttacactgcctaattactatgaatatattcgttcaatttgtgttggtggaattgacaaacggcaactgaataaagagcatcttgaaaactttccaattatccagcctcctattgagttgcaaaataagttttctgatattgtaaaggtaattgaaagtcaaaaacctaaattaatcgaacaactagcattgcaagaaaatttatttaaaacattacaaaacaaagcatttagtggaactttataa

SEQ ID NO: 59427 - DNA, 708 bp, Acinetobacter baumannii
atggtagatgatcaaggtaaattgcctaatgaaataaaaaaaatgtttgaagaaaaaggaatagagttacctaattttaaaaatgaatatgattcttggtacacagaagcgctgttggttattaagcaaattattcctgatcgtttaactgacttcataaaacagtataaagatgaaaaaagaaaagaggttgattatttgacttatggaatatcagattatttactagggttacaaacttctagagctggtagagttattgttgatcaaaatgccgcatttactaaaatgcaaaatcaaaattctattttagcttctgttgaaaaaaggtttagcagttctttatttgatctacaggaagttatccaagcagatctttatgattcagaacttcatgctgcaaaagatttagctaaaaaaggttttacacgaggagctggtgcaatcgcgggagtagttttagaaaaacatttaggtcatatttgcgacttacatggactaagttcacgtaagaagcacccttcaatttcagattattatcaaatacttaaagaaaatgatattattgatacaattaaatggcgctttattcaacggctaggtgatattagaaatttatgtgatcataataaagaaagagagccaactaaagacgaagtaatagagttagttgaaggtgtagaaaaagtgataaaaacggtatattaa

SEQ ID NO: 59428 - DNA, 276 bp, Acinetobacter baumannii
  misc_feature (194)..(203): n is a, c, g, or t
atggaatttaaagttattcgtacaagagagcagtatcaagcttatcttgacgaagtgcattctttaattatgctaaatccggctataggaagtcctgagagtgatcggttggaattattatcggttttaatagaagattatgaaaataaacaatatccgatagaggcgcctgatcctattgatgcaattctatnnnnnnnnnncaagctgatttggccccatattttggtactactagtagagtttctgaagttcttaatcgaaaaagagctttaa

SEQ ID NO: 59429 - DNA, 519 bp, Acinetobacter baumannii
atgggaagtgccttaataggattaattggtgtagtaattggaattttatgtaatgaatattttagaagagaaaatcgtatcgaaaaatattcggaaaaaatttttgaaaaaagattgcaaatccatgaaagtttatttgaaaagattaaagaagattatgaagcgattaataatttaattaatgatagggagttaacgctagaggagaggcataatattgtcagtaaagttattttagaattagctgattttatagatgtaatagaattttatttagatgaaaggcttgtagttcaagtgatgacactatttatgggaacagaagagatattaccagatagtgcggatagagaagaaaaaataagtacctttcgaaaagatttaaaacttactaaaaaaatgattattgatgaatcaggagtaacacaagcagtaaatagttttaggaaggttagtaagtctaaacctacttcatccataattagttattttgaaagtttaaaaaaaacaaatgagtaa

SEQ ID NO: 59430 - DNA, 834 bp, Acinetobacter baumannii
atgaagaatattcctgtatataaaaaaggggatgaatttatatttattcctgtaagtgataaaaaaagtaaaggtggtgcaagagcatttttgccttgtaatgaaagttgtaaatatgaggtaggttataaagctgaagcaataattaaggagaattattttgaagcacttacttttatacaagatagctataatagggatgatagaaaactatttttagtaaataatggaagaaaaaaagaaaaacaaaaatcatataaatggagggagaaaggaaatcagttaactcctttcaattggattaaattaccagtttcagagctttataatgtaaataataaaatgttaagtgagttggtggtggatattgagaaaggtggtattggtgaatatatccctttagtagaaatagaacctgttatctgtatatcggaggaggaatggattttaaaggcagatatactgaagaaaacgttgggtaataataaattaccaaaaggtttaaaatcacctaaaaagacttctaaaagttcgactatttattatagagatgctgctgttagagcatatattttattaaatgcaaatggtatttgtgaattgtgtgataaagaagcgccttttagagataagaatggtgatccttatttagaaatacatcatgtattacctctatcttgcaatgggtctgatacaattacaaatactgtagctctttgccctaattgtcataaaagtattcatttttcaaataaaaagatagaattatatgaaaatttatttaaaaagaatcaaagattaattagagagggcgaattatgggaagtgccttaa

SEQ ID NO: 59431 - DNA, 729 bp, Acinetobacter baumannii
  misc_feature (664)..(673): n is a, c, g, or t
atgaaaatcgcggtatttggaaccactttgcacgctggtgtaatggcagcgttactagctgaatatggtaatcagatctattggtgtacaagtgtcacctgtgaagaaaatatatctgtactttcatatcaagatcaagaagttaattattatttaaataaacaaagaaaggcaggttttttaacagaaagtcctttttctcaaattcctctagatattgaagtttattttgagaagttaagtgaacgtccaattgttcatccaaggttaatggttaatggctcaacttttggtttacatggtacagaaaaattaaagcaacatttacctaaagacgagtgggtctattttcctgacgtgattcaggagggtaatgcgattaatagtgtactcaatgtaaaacatgtcattgttggtgttgaatcaagctatgctcaagacataatgcaagagttattacgaccattctttcgttttagctatcaatatttattcatgccgattttagatgccgaatttaccaaactcagtatttcaggcatgttggcaactcgcattagctacatgaatgatcttgctctagttgctgaaaagttgggcattgatattgccaacataaaacatggacttgctgctgatactcgtattggtgcagcatacttannnnnnnnnnatacttatctgcaggggtgggttttggtggtgaaaatttttcacatgatattttaa

SEQ ID NO: 59432 - DNA, 594 bp, Acinetobacter baumannii
atggaaatttttgaagcaaataagctatttctttttattgtttttgctataccgggtttcattgcaataaaaacttactctttactttgtcctaatcaagaaaaagaaagtactaaattaataatcgatgcaatcacttatagttgtttaaattatgcaattttaggaccttttatttacatgatgttatttagtaaaaagtgggagtttgtgtgctcatttttcacttttttattttattcttttgtaatgcttatttttccagcattacttgcttggttctggttaaaacttcgaaatatgaagttttttcaaaaaaatgcgcctcatccgactccgcgagcatgggattatgtttttgctcaaaaaaaaccatatttcatattggtaacattagcagacggtaaacaattagccggagaatattctgatgcatcttttacatctagttatccagaagagtctcaaatatttttagagaaagcatggatcattaattctgatggagggtttgatagagaaaggaatcagtcagcaggaatcttaatattggctaaagatatacaaagtattgagttttttgatcattcgtaa

SEQ ID NO: 59433 - DNA, 144 bp, Acinetobacter baumannii
atgtcaaagaatttaccagcaatggatggttatcaacctatgataaaaactccacaagatttacaaaccaagggatatcaacctcaacaacaagtagcaaatagcactaatacaccaaagaaaagccccccgaagaaaccataa

SEQ ID NO: 59434 - DNA, 159 bp, Acinetobacter baumannii
atgagtgataaaaataatcgttttccaacccgtgatggttacagcccttcatcaggtaaaccaaataatccccatccaggtgcaggatatcaacccgagaaatctagaggaactaatcccagcaatccccaaccaacttcgccaccaaaaaaaccttaa

SEQ ID NO: 59435 - DNA, 168 bp, Acinetobacter baumannii
atgtcagataaaaataagttaattgatttaaatgagggttatcaacctaatattgcgccaagaccgacagaaggtaatattaatttaggttaccaacctgctagatcaacaggaacgaatcctactaatcttccaccgaaaacatcttcaccccccaaaaaaccttaa

SEQ ID NO: 59436 - DNA, 510 bp, Acinetobacter baumannii
atgtctaatttaaaaaatctaacagatacagaacgcttaattcttgcaaatcaatatgaacttcttagcaaactagctgaaagtgaatatgaaacagaatattttcttagagtttcaaaacaacttaaagacggtcacaaatggttatatcaacaaatatttgattctattggtgaaaatttagatgatgaaagtgctaattttgttgtaaatgttctttcgctacacagagctttgctcaatagttatgaacaattaaaagtaaagaatcaattaaagaaagcagacgttacatttaaaggatttgacggaaataatgaaggtgaactcatgtattttgcggaagctcttggcgatgctggaagattcagtgaagttatcgaaagtggagaattaaactcacattttcctatgacttcaaaatatcaaaaaatgctaactaaatggaaagagttagaacaagagtatgaattatcggaagatcaaattttacaaattattggagattaa

SEQ ID NO: 59437 - DNA, 756 bp, Acinetobacter baumannii
atggaaattggttcaggatttgtagtgactgcaaatgggctaattagtactcagtgtgacattatcatatatgataagacagtgacgcccttaataaagaatgaaaaaaatcagaggtttttcccaatagagtcggttgtagccattggggaagttaaatcaaaattaactttatcagatttgaaggatgctttattaaagttagctaaatcaaaaggtttaagagatgttttatattctccagcttatgtatatagtataagaaataaaaaatctactgatgattacaaacctgaaaatgatgagtttgatcaaattgttacatttttaatttgtgagaaatttttgtttcctatagaagatacacctttaactaatattatacggtgctatggtgattctttacctcataggccattttgtcatagacataatatggttttaagtattgaagatggtttattaacgtatgttttagatggatatactatatatccatttccatctaaattaacatcaatctttaaatttgatgaggaaaataatataactgaagagattaaaaaggttgagcgtcttaattacagatttattaagcctattaataaagaatcaattgaacatattcgtcatttcacaagcatattacatacaggactgattagtgtttctgttttatttccagacttagcaagatatattccagatgaggaagatgtacaaatgtttgactgtgttcaaaattataagttttaa

SEQ ID NO: 59438 - DNA, 765 bp, Acinetobacter baumannii
atgactacatcaatccgtgcagaagatattatcagccctattactgatactataaaagcgaataaaaactcaccaaaagaagcaaaaaatctaggtttatttgcttacgataaaccaaccccagaaaatacagttttattacttattgatcatcaagttggtttaatggcgagcgttcgtgatatgtcgagcctcgctgaattaaaaagtaatgttcttgggttagctcgtacggctaaagctcttaatattccaacactgattacatcatcaaacgcacaatggcaaaacggcgatactctcccagaaattaagtcattgttccctaataattcaatttatcgacgtacagggatcattaatgcatatgaagatccgacttttcgtaaagcacttattaatttgctagaagcaacaggtcgcacccatattattattgctggcgtaaccattggtacttgctgtactttcccgacactatcgctattaaatgatggatataaagtctacccagtcattgatgcatgtggcgcatggaatcaatacgaagttcaggccgctacattacgcatggcaaatgcaggtgcagaaccagtaacaacctttagtctagcttgtgaattacaggctgactggaaaaagccttcagcagatcaaatgcttgagcctttcaaagaaaacttatcggaatatggatttgtactacaaaacttctgggataatgtcggcaccccagcagttgaagatccttttaaaatcaaataa

SEQ ID NO: 59439 - DNA, 600 bp, Acinetobacter baumannii
atgaaagatctatttataattttattacacggcgtaggtagtaatggtgaagacttagaagcagttggagaattttttaaagccaatcattctaatgtgaattttgtcgcacccaatgctccttttagctttatgaacagtaaagaggcctatcagtggtttagcatcgctggggttaatgatgagaatcgctttagtcggattaaagaagccagagctcattttgaccagaaaatccaagaaatcattaccaaaaaccaattggaaaaccacctagataaagtcgttttcttaggattttctcaaggttcaataatggctttagatgcagtcgtttcagggcgttggcctattgcggggctgattagcatcgctggaagattagcaagtccaatcaataatgaaattaataaaaacacgaaaattttattaattcatggtgaatcagacgccgttatttctccaactgaaagccaaagtacatatcaacaaatgcgtgcagcaaacttaaatgttgagttgaatattttacccgctacgggacataccatttcgcattcagcgcttcagttaagccttgattttttaaacactatttaa

SEQ ID NO: 59440 - DNA, 405 bp, Acinetobacter baumannii
atgaatacatcaaacacagctccttatgcggcattactactccgtataaccctagcactttatttctttgcccatgctggtctcaaactgtttgtatttacaccagcaggtacagcacaatttttccaatctgttggagttccgggatggatggcatatgtgactattctctgggagattttaggagcaatattattattcgttggttttaaacctcgaattgttgcggttgcgctgattccagtcttattaggtgcgatatttactgtacatggtgctgctggtttcttttttacaaaccctaatggtggctgggaattcccatttatgtggattatttctttagttgctctcgcactcattggtgatggaccgttttctctaagtcaatcttttaaaaactaa

SEQ ID NO: 59441 - DNA, 918 bp, Acinetobacter baumannii
atgaatagacttgaatgtaatcgcatgtttatttcgatcattgagcaaggtagttttgttaaagctgccgaaaatttaaatacaagcgtcgcacaagcatccaagcttatttcaaaactagagaatgaattaggcgtacagctgctaaagagatcgacacgctcattaaaacccacagaactcggattagcttattaccaccgaattaagcaacttatggcagagtttgatgaaattgaaattagtattaaaaatcaatctcgcgccccagtaggtaaactaaaaataagtgctcctaactcttttggaaccgtgcaattaagcaaaaccctggttaactttgcccagaaatatagtcaaattgaattagacgtgagttttaccgaccgtacggtgaatgtcattgaagaaggatttgatattgccattcgaattggagagcttaaagataataatttaattgcgactccattatctcaaattagatttgtattggtcgcatctcccctttatttagaaaaatttggctatcctcaaagcctacaagacctagaatctcattcctgcatcatcgatacaaactttaaagatccatatgaatgggctttttttgaaaaatcaccttcgaatgtattacataccattaatgtgaatggtcggattcattttgctaatacagaagcctgtttagcggcaaccatagccggactcggcatcgccagattacccatgtttattttgaaagatgcacttatcgacaaaaagattattcctattttagaaaactatgaattaccgcgaagaggtctctatgcggtctacccaccagcaaaacacctagccaacaaggtgagaaccctaattgattatttaaaagagcaatatgcatatcctgccgaatgggaaatttacgagtaa

SEQ ID NO: 59442 - DNA, 321 bp, Acinetobacter baumannii; identical to SEQ ID NO: 58483

SEQ ID NO: 59443 - DNA, 1215 bp, Acinetobacter baumannii; identical to SEQ ID NO: 58478

SEQ ID NO: 59444 - DNA, 300 bp, Acinetobacter baumannii
atgcaagtatcatttaacaaacgcacaattttcccaaccgtttaccgtggtcaaaataaaaaaggtgaagatgtaacttatctttcaacaactgttttatcaccacagaaattcaacttaactgcaatgccgggaatgatgccagtcgaacagatccaagcgattcttgaagaatgtgccgacaacgctcaggaagtagaaattgaattcacagagcaacaaactaagtttggtgcacagatgcaggtgtttagtgtgaggccagttcccaagaaaaacccaatggaatcaaaggcttaa

SEQ ID NO: 59445 - DNA, 375 bp, Acinetobacter baumannii
atggatattctagaaatagaagaaaaaataggaaaagtatttaataaaacgactcctactgggagactgtcgaaagtaaagacacgaaatttaacaagttttttatgcgtgctcgtcatgattggaatagaaaaaataaaaaaagatcatgatgaaaaaacattcaaaaaatatatggaagaattaaaaagatgtggaataacagaagaatacataagaaaagagcatcaaaaagaaagatttaaaagaaaaaatcaaaaagtagaatatgtcgaattaatatttgatctaaacaatcaagtcccagcaggatatgaaccaccaaagagccaatacaatatagaagaaatgataggtaaaaagctcaaaatataa

SEQ ID NO: 59446 - DNA, 300 bp, Acinetobacter baumannii; identical to SEQ ID NO: 59444

SEQ ID NO: 59447 - DNA, 1224 bp, Acinetobacter baumannii
atgctagattttctgcggttagcgattccgatcattcctacgtatgtacgtagtcttgataatcatcattggtttaatggtgatattcgtgattatggtattcctgctgcgactcgtcatgtttctaagaccgatgatggtcaaacgataacaggggagctttaccatccgtatgagtcactcccaagtgattacacggatatggctgttaagttttatacaaatacaatgaatacaccgccttatgttgagattaaggcgtctccgttgaaattgttacaaggtcacaatgtgtatggttttgagtcgatagaacttggctcagatcatatgcttggcatgttactcgaagcctttccccagctagccccaattttggatttaccaaatactgaggttttacatctagatacgacttatttatttagattgccacatcagaatatggttcaaccaacgctggattacatggctagcttggcttcgggtcatcgtaaagctcgtgaagttaaatacgacaactacatctcttggggtaatgatggtgccagtgtcagacctaaagcctatggcaaatttgaagaagtaaaaagccaattaaataagattcaaaagcaagcagataagggctgtatgcgctctaaatcgcttgttattgctatgaatggtgttttgcaatttgctaatgccattcttcgtttagaagcccgtatttgtaaaacatatttaaccaagaatggttatccatctaatttatttcagcttattaagctgcaacatgaacagccagaattattgctgcgactctggcacgtagcgtttgacccaatccttaagacaatggagggtaaatatatgaacttcgcaaatgatgacgaattattatccgttttaatgtctcaattggtgacttacaccaagaaaggcaatcctagttataccaaggcttataacgctttagatttttatcgttcattacgaattgatggatataaaaaagtaaagtccagacatttggaatcacgtttttataagcgtgaaagagagcttcttggctgtggtattagccgttcgcatcttcagaatttacataaaaatcctgatgggaaagtcatcccatttgtccgtttatttgaactcaagatggctgaccaattgccaccagattacgttcaaccagtttcacaatacacacccaaacgtgggttacatctagttgcctga

SEQ ID NO: 59448 - DNA, 375 bp, Acinetobacter baumannii
atgagaaataattgttataaaattgacgaaagtgaaaaaggtcatgaaatgaacagtataggcgaacgtatagaaaaaaaatgtaaggaactgaatatcagtattcctgaactagcaaacatcgctggagtaaactacaagaccctaaaaagaaacatgaccgcagaagatccaaatcctacattgcaacacttaaaaagactaagcatagctctgggtatgagtatagataatctcgcatttggcgaagacggaagcacagatgaagaaatagctataattctcaacgacctaaaaaatatagaaaaagaagataaaaaaagaatcctatatatggttcgaatgatgattgctgaaagtaaaaataggaaataa

SEQ ID NO: 59449 - DNA, 375 bp, Acinetobacter baumannii; identical to SEQ ID NO: 59445

SEQ ID NO: 59450 - DNA, 324 bp, Acinetobacter baumannii
atgaacaattcacaacatccaattatgacagttacaggcatccgtaaggctgctggagactttacagacgataaaggtaaaacaatcgagttttcaaacacggttgtaactgtgctgcaagaatattcagatcgtgagaaagaacaaggcgcaatcggttttaaatcgactgactacaagattaaaggcgctcagtttttcaatgattatctgcatcaggaattaccgagcaaagctaaattgatctttgattgggatttcacaggtaaagcgcctaaagctgtattggtggctttggactttgatggtgtggaagcagcgtaa

SEQ ID NO: 59451 - DNA, 1218 bp, Acinetobacter baumannii
atgctagatcatatttgcataaatgcgccttttgaatccagcttctactcggtagatgcggaagggcgttatttttttgtagatattgatcttcatactatcgaaataccacttgcatcacgttcagttcataaaaatgatgatggctcaatttctgctgctgctttattccatccttatgaatctgtgccaactcactatacgggtatggctatgaaagtgtttttcgatactagttatgaaccgtatgtccagatcaaagcatcaccagctaagttgcttcaaggtcataatgtttttggctcggatgacatagagcagggtgctgatgaaatgatcggcttcttgcatatggcatatccagtattgactaagatgcttgattggactcgcgcttgggtttctcacatagatgtaacgtactcggccaaattgtcggatcagacaacggctaaaaaggttctggattttctggccaatgtcagcaatggtcaaactagactttctaataagcggtttgatagctcggtatattggggtggtcagacttccagactcgtaaatcataaatgctatttaaagcatgatgaatttctttctcagtttgaagaacttaagcaactggcaaagaagaatgacaagtcagctcaacgagttgtcgatgtcatgtctgactcacggttaattaactggacagtcggacttttacgatttgagtcacgtttaaaaaaacgttggcttgaacgtaatggagttccaacgaacctttatgaactcatagcatttcaaaaggcaaatcccgatttacttcaaacactttggacaaaagcaacgcacagcatatttgatgccatgagaggtcaaactgtgaaattgattaatgatgaaagtgttttggaagccatatcaaactcgccagttgtcgttaccaatagcggtaaggtttctcaaacacgtatccgaaatatttattctacgtactgtttagtacgtgaacatggcttagagaaattagctcaaatgcttcctaagcctacgttttatagacatttatctgaactttgcgaatgtggcttttcaaaagcatttttgcagaacttgcatgacaacaaggctaaaaatgtcattccatttatgaagctcgtagaaatcgacttttcccaacaattgcctgagtggtacgagccaccagtatcgcaatttaaatcagtagcttaa

SEQ ID NO: 59452 - DNA, 204 bp, Acinetobacter baumannii
atggcagtaacagttcgtttaaatgacaaagagcaagaatctctacgaaagaagtgtgtagagctcaataaaattctgatcaataaaaatctccagcccataaaggatagtgagctagtacatatcattcttgatcaggctatagataacgttgagatttcagccaatggaaaagtcgttgtaagaaacgcgaaagatttataa

SEQ ID NO: 59453 - DNA, 501 bp, Acinetobacter baumannii
atgaaatcattaagcaactatcaaagaatttcattaatcaatcaatttaaaattttagatcacatttcacctgattctatatacaaacaacatatagaagtattaagaaatggatttacaaatttttatgatgaaatttttgaaaccctttcaaaggaagtacctgaagaagtatctacttttgtgcatgaagtattaaacatgtatcgttcgatgcatacatttgctcgtaaaaataactactctgacctattagagcaaatggtatttgaaggttttgatggtactacagaatttcaatattgggattatactgagtttctcttaaattttttaaatagatataaagaattaaaagataataagggaaataatgattttaatagtcctataggaaatatttatcattatgaaaatcaattaaaaatatggaaaaaatataatagtccaaattttgaatcaataaataaagatataattattgaaattttagcaacttaa

SEQ ID NO: 59454 - DNA, 969 bp, Acinetobacter baumannii
atgagatggcgtgatgtaattatcggtgccttggcatctttgtttgttacggtagttgggggagttactgtatactacgcaacaaaagaacctgatgaaaagaagaatgaaaaattagtatatgaaattagtaaatcagcagagtttattagtcaagagaagcaaatatcattcagtacagtaactattaggaatctaggaggggtggttgccaaaaatgttgtaatttctgttaatttaaaagaagctgatattaatgatgttgctattaatactaatattggattaaaagaaacaactcaagaaattaagaaaaaatcattaaaagttacctatgctaactttatgcctaatgaaaaagtcactattaatttaattatttcaaaagcagagaaagtagaagttgatgtgagaagtgaatcatcacttgggcaagatagtagtcagttattgcaagataatagttttgcagaaaatacctctaaaaaaaatattctgctttactctttattaataatacttcttttgttgtggtatctagtagtgtttaagtttgtgaagcatcgaaaatttaaatcacaaaataatgctggatttgtactacttcatagcggtttaactgatcaagctgaaaaattatttctactagcaattgataatggagactactgtgagtttacactttcgaatcttgctctttgtcaagctattaaaggaaattatgataaagctgaagctttacttaaagctactaattttgctacaaaatctaagcatggtagagctgttgtattatttaataagtcattaattaaattaattgaaagtaataaagatgaagcattaaattgccttcgtcaagcgattcaattatctcctaaagaaataagaaaatattgtcagttatcaatattattagatgttgttcgaaatgagcctgcttactatgatcttttgaaagataattaa

SEQ ID NO: 59455 - DNA, 354 bp, Acinetobacter baumannii
atggaagtgaataattttaaaccttattctagtattattttgccaacagggttcaagtaccctgctaaatatttagctctatcgagtgatataagccttcttaatttaattcctaattttcaatggtggtttattgatgctgatagtgaggcgggtgaactagcttatgagttaagaaaaaagaatggtctgaatttaattccatttgcacaattatttgattgggcagcattttttgatggagatgatttgactggtaacccaatggtttatgtatttgatttgggagatatgccacatcatgtaacttttaaaaatttttcagaatggctagaaaatgcttccactttttag

SEQ ID NO: 59456 - DNA, 507 bp, Acinetobacter baumannii
atgatagatgttagcccagaacatatagaacggataattgaaggagcatggcatcctgataccgtggaattttataattttgagaatgaattttatcgtttggatttttcaaaagaagaggatgctcgctatgcaatcaataaatggctaagcatagataaatggcattctatagaatctatgctgcaacataaggaagatttaagatattgtattactaagaaaaaatatccacttagtaatgttgatttaaacaatttggatggagatgcaactcatgtgcagaagcccaatattagcaatgaatattgggacagttgggatggttgggatagttgggacaagaatttttttaattttttattaattttatgggatgagtggttccatgagtcttttattcccgccaatttatctcaataccgtgaaagaatagatagagaatttgttgaatttcctcatatgcctgaattatggggaaaaccaaaatataaggtgggagcttaa

SEQ ID NO: 59457 - DNA, 654 bp, Acinetobacter baumannii
atgaataatttcattttgacaacttttgactgggttccagaattaccacgaggttttgtaagagatataaggataagatgggccttagaagaagcaaaaatgccctataaaataaatagcgtatctttttatgaacgaggagatgatcatttttctcaccagccttttgggcaagttccgtggctaatagatgatgatatttcaatttttgaaagtggtgctattctattgtatttgggtgaacgtagtagtgtacttttacctacaaatccgaaacagcgtaatgaagttatagaatggttatttgcagcacttaattcagtagaaatggcgagccttccttgggctttattaaaattttctaatactcaggcagatactcccgtgcataaacaatttgatgcatttcttctctctcgactccaacatatggaatcaattctttctaagcgagaatggttaacggagtcattttctattgctgacattgttatggctgacgtattacgtttggtgaatagatttgatgggttaacagagttcccccattgtctcgcatatgttcagagagcgactagacgcccttcttttcaaaaagcgtatactgaccaaatggctcattttgcagcggcagacaccaagaaaaatgcctaa

SEQ ID NO: 59458 - DNA, 1956 bp, Acinetobacter baumannii
atgtttttaactaatcctagggatgagcgttggaaagatattgttcacttagtacaacatgatggtgagataggtcaggaggttcgtaacgtagcactgccttttactagaggtaatataaaagataagctatggttagagcaaatttctattagacaactagataattgggaaattaaaaataatttacgtaaacaaaagctagaaaagaaacaagaagaacttcaagctaaagaaataaaattttattctgaaaatagtgagttgctacgtaaaggtcactttgaggtaattttactacctgctcaagcatatttaaaaatggttaatgatattgatagagaacctgcacctcatcaatgtattgcagcatggctaggggatgaaatatcaaatatttgtatggaagggtttgaaaattttctaacaaatagggtacccgaagtaaaggctgaagatattctcgaaattagaaaagaaggcaggatttataatgaagtttttattctaatagccgcattagcggagcgtgttcgaaaaaatattggcttaaatgatttacctgatgaacgcttatttgctggttattttaccttaataaattgtcgatatgaccaagaggcaaaaattcctgaagtattcgaagaaattgaaaatgagttgctcagacgaggttgtttagaagaagcactacaattattttatgaaccactatttgaaagcagatttgctgatattcatggtttatataatgttatgaatggagcaaaatataaaagtttcaatattgaattagctaaaagatggatggataaatttccacttattgcgtttaaaccagaatcagaattaatagatagtttgctttatgcaggccagtttgattttcttaaaaaatttctatcacaacgtataaaccttgaaaatattgaacagaagaaaaattggattggtataggcttaattatagattttgaagaaacgattaaaaaatttcaaaaagagttatccgatagagattttatttggactattagagataggttaaatggaagataccgagaaaataaagcgaaccttcaactaagtgttaatttattagaatggataatgaatacatttcgatctgaatatcctgatacaggttatcctaggggagtgtattcaggggataggcaaccttgggatgctgctgatttccttaaggggattgttgctcagttagctaaaaaccctagtgatgaagcatctagagcattagagcgacttaagaatgcagagcaagatagttatacagatttaattaagactttacagtatgaacaaaagcagatacgagttgagagtttatatactcctcctataattgaacaaattaaagcaatttcagaagatttagcccctcagtctatctttgatttacaagcttttattctagaagaactaactatagttcaagctaaaatcagaagtgatgatgcagagtcttggcgtggtttttatgatgataatgctaaaccatataaagaagagcgctgtcgagatcatctgataggattgctccgacaaggaagtaacgaagttgtttatgaggtggaagttcatgaagctgatgataaagaagctgatataggatgcactatagggcaattacgtttgccaattgaagtaaaaggacaatggcatcctgaattgtggataggtgcagataatcagctcaataaactatatgcacaagactggcgtgccgagggtagaggtatttatcttgtgctatggtttggctcaagaactgataataagaagttaaaaagccgaggtaggggacaacttatccctaccaccgctgatcagctaaaggaaatgttgattgaaagtagtcaagcagcaaaaactggtcaaattgaaatagtagttttagatattgaaagattaaatatatctattaataaatag

SEQ ID NO: 59459 - DNA, 963 bp, Acinetobacter baumannii
atgcaaaataaaattttttattcttggcaatctgattgtccatctaatacaaatagaagtttgatcaatacagctttagataaagccattgaagaactgcaaaaagataaaactactaccattaatcctgtgatggatagagatactttaggactatctggttctcctgatattactcattctattttttcaaaaattgataattcttttgcttttgtatgtgacgtgtcaattatcgactctactacatctcgtccgacaccaaatccaaatgtgttagttgagcttgggtatgctataaaaactttagggtggagtagaattattatggttatgaatactcaatatggggaaccagataaactaccttttgatcttagatcaaaacgtgtcttaacttataaaattgcaactgaagagcaagaaaaggcacctatcagaaatagtctttcaaaaaccttcgcaattgcattaaaaatgatttttgataatcatgaaccaaatttactctcggaaacattattaaaaaaacctgaatcaattaacttccgtgaatccgatttacagttattcaatcaatttaaagaaacacttccgtcaaaaggtagtattagttttattgatgaacaaaatatggctggattttcatggccaagttcggctttaaatcaattagatgatttctatcatgattggggagatgctgaacatgaatttattgatacagaattagaaaccattagatctaaactatatgagttagtaggaaactatcttggacagattgcaatcaacacttttcctgctaatacctcagggcgacagacggttcctcctgaatgggaagaaacaaatccaaagcatttctttgaagtcgttaataaactacatgaaactgctgggcaaattgtgaaaactcatcaagatcttataagattaggccgtcaaaaactggctccttag

SEQ ID NO: 59460 - DNA, 1011 bp, Acinetobacter baumannii
atggtactaaaacatcaaatggaaatgacacctaaacaattagaactaaaaagagaaaatcactacgtatgggccaaatacttaaaaaattggtctttaaataactcagatgtatggtatacaacaaagaaacttaaaatagcatgtgacagtgttaaagcaattcttaaggaaaaagacttctacaaataccagtttattacaaaacaacatttggacctaatcaactttatatccaataaatcaccagtagaactacaaaaaaaacataaattttgtctaaattcatttctaatattacaaaacattgaatctgcatatataaaatcaggaaaaaaagatgagaaattacaagcgtgcattgaagcatttaagagcaatacaatagaaaatattcatacagatcatgaaaaaggtgtagatgttattctaaaaagcttacaaaaccatgatttatcaattttagatgataccctaaatatgtgtaaatttatgagctattggggacaccaaattgccagaactaaacctttcaaagataaaatattagctgctcagacagaccaagaattacagaaaacttataaagaatcttggtggtttattagttatatgcttggtatgaatttaggaaaaagtttttttgaaacacgaaaaattgatatacattgtttattaatcaacgaaacgaatgaagattttataacatcagatcacccaattattaatatacatgaagcaatgaatgaagatgatatgactgttccttctgagaatgaggcggactttttttatgcaatttcccccaaattaggctatatgatcaataaatctaaacgctttaaaaaaggtataaattacgtatcaatagatttcgttagggaagttaatacaaaattagctttttatgccgatcaatacattattggcacgaccgaagatcaattgaaaatttacaaaaagtcggttgaaaaaagattaaaaattataaaagaaattaaggagagttga

SEQ ID NO: 59461 - DNA, 642 bp, Acinetobacter baumannii
atgattaaatataaaaaaattcgtggagaaaaaagacgtattagaaaaattaaacagtggattgatgatcatcttgaccttgatattgcatatttaaagcgatatcagtgtgaatatgtaaagttttgggtagacccatgggataggttatctctgacaaatagtcagtatccacagcctcaaggtatatataaggaattattttttaatggtttgctccaaatatacatgtcatggaaagaacaattagatttcttagatcaagcttattatttaaaaatatggttatttgaaaatgatttgaagcggtcacaggttgtttgcgtaattggtgaaaaaattgaacattatcaaaatctttttgaaaaaccattagatgaaacttctttaagtatagtcgagtggcaagaagtgaacgatatgatggagaaagtcaattgggagaaaaaagtagaaataacgttatatgagaaagattggcttggtagtcctgatgactataagactcaaaaaaattatcaagatacaaaaaaatggtttaataacaatgtaattgagaaatgtcgagaagtaaaaagaattgatggggatgaatattatattgttgaaacagataaagtttggataggctatattttataa

SEQ ID NO: 59462 - DNA, 1071 bp, Acinetobacter baumannii
atgtacagatctatttatcagaccaagaacggtaaatggcgtgttgagattggctttgataaaaatacaaggcctacaaaaatttgtgagactgaagctgcagctaaacgctgggctaaagaaaaagaacgagatctaattttaaatgatgcaacccaaaaggctattaaaaacaaaatagttataactatgcgtgaagctctggggcgttactcagaagaaatatccagatttaaggctaccggaaaaaaagaaatgcaaaggatccgttattaccaggataatttgcccaacacagattggccattaagtgcttacaaaggtgagtttttaaaacagtgggagagtgctgtcactcaacgcacgattaaacctttaaaagcatctaccatattgcgtgactattcgacgttatctgctttctttaactggtgccggaaagataaaggttggatagaaataaaccctgtagagaacatccggaagcccaaaaagccagctcaccgtgaacgccggacagaagtggaagagctacaagctattttaacggctttaaaatataagcctggaactgtgccaactacaaaaatgcaagaagtgggtttaatttggcttattgctatggctacgggcatgaggtctggagagattgtaaaccgtttacctgagcatgtttttctgtctaaacgttatgtccagttagataaaactaaaaatgggatggctagaaaggtacctttggatgatttcgcactacaattatggacattagctttgaaaattaatcggaagggcagtccaaaagtatttacagtgtcagactcttcacgagatgcactgtttagaaaagcacgaaaacaagcaggcttggaaaatgcagatttaacttttcatgattcaagacatgaagcagcttcacttatggccaaacgcattaaaaatgcgctgaccttatgtaagatatttggttggaaggatcctaagcaagctctgacctattacaacccaaccaatgacgagattttagaggaactcaatgcatctgctggtttgagttccttacttaattaa

SEQ ID NO: 59463 - DNA, 1005 bp, Acinetobacter baumannii
atgtcttcaaaattccgtataaaaaatatacctacattaattactgctctaacagccatattttttctttcacctttagtttactggacaattaaagaaaatatattttatttaaatttagacttgttacgttttttattcgaacaatacaatgtcatattactactattgatcatattaactatttcaatcaaatcaatgcaatacctaaataatgataaaaaaacaaataataatattaataatattactgaagaaaaaattgaagaattaaaaaacaacttagaagttaaaatagaacaacaaattgatcaaaagttaaatcaaaataaaataacagaagaagatagattaaccctattaaatgaattaaagctaaaaattgaaaatgaaacaaatgaagcatacttaaaagaacttaaagaaaaaattatcattcaaaattcgcatgatggtattaactcgttaatggaagtaacattaagtaggattaacagtgaaatacattctttagttcgtagaagtaactttaatctggttataggaatgagcctgagtatgctggggattatggcattattttcctcattactcctagacaacacattttttatgttttttgaatcaaactttaaaatagatcctccccctaaaaatctagaagaactattgattagaattttacccaaagctatgttcgtaataatggtagaattattttcatatttctttttgaacttgtataaaaagagtttaaacgaaattaaatattatcaaaatgaattgacaaatgtagaaagtaaattacttgcactaaaatgtgcaaaacaaattaacaatcataaacttatgtccattattattgaagagttagtcaaaaccgaaagaaatttcatacttcaacctggacattcaacaattgaaattgaaaaagaaaaaatttcttcaactaattcaagtaatgtcttaaaagctgccacagagctgttaaattttaagaaataa

SEQ ID NO: 59464 - DNA, 306 bp, Acinetobacter baumannii
atggatgtagaggtgttattagaaaaagttctacgtaaaattttaaagcagattgacgctaaaccaatcattccgattgaatgccaactgtgggatgaacaagacattgctagttattttaaatattctttggattacacaaagcgccatattattagcaacgcaaactttccaccaagccgtgagttaccgacctctgcaaccagtgatagaacagtaccgcgctggaaagccacagatgtcataagctttggaatggcatttgataagacgaatatactttattcacaaaaaaacattcattag

SEQ ID NO: 59465 - DNA, 270 bp, Acinetobacter baumannii
atgaatatagaactaagcccaaatgctttaccgtttgtagatgaagaagaaaatgacctacttgtcgttaccccaacacatccgatcgcacatgaagcctattcagctattaaagcaatgcgatgtgattttgtcagaatcattgcttcaagctaccaaaaatcaccttcagaaacgggttacttcatttcaggcatattcccaagcgatgctgaccgaggcttaaaccgtgaagaatggatttcaacttttgaaaatttgaaggggtaa

SEQ ID NO: 59466 - DNA, 2730 bp, Acinetobacter baumannii
atgtcagtattacaaagacgcattgatgacagactcaaccagttattcaactttaaaaaggttggtgactggtaccgtgaaggtctatgtcctcaatgtgggaaaaaggaactctttacccatgctgaaacaccacgtgtagtgaaatgtggtcgtttaaacaaatgtggctatgaagagcatgtaaaggaaatttgtgaggacctttttaaagactggtctaaagacttccctcgcacacctgaaaaccctcatgcagcagcagatgcttatttagtaaatgctcgtggctttgacgtttccaaactaaaaggtacctacactcaagaacttttcagaaacgatcgtaaataccccgacctaattacagcgaccgtacgttttaaacttgctgaaggtgtttactgggaacgttttatagaccgtcctgaacgctttggccgtcaaaaagctaactttatgggggactataaaggcctagcttggtcactagatgatttagataagctctgtaatgcccaatcaatttgggttactgaaggcatttttaacgcgattgccctatccctttctggacaaccttctatagccaccatgtctacagaaaactatccggaaaaaatgctcaagcaaattgccgaccgttgtcatgagttagggcgtcaaaagccacgtatacgctgggcatttgataatgacaaagccggcaaaaagtctatccgtaagttccatttaagagcagttcaaaaccattgggactcaactgctgcccttccaccttcaggtggtctggactggaacgatctttacatgcgtgatcagctgcacagtgaaaaccgtaagacctataaacactacggagagctacacattgcagaaactccggagcaagctggcttactcatctacaacttcaatgatggtcgtcgtagaacgttttatttcaaccataactatcggttgtattggttcaatttagatatggacaaatacagcaaagaactcgaacgcattgaagccgatccagaccgagactttttgctcgatagccaaaaacgtgaactcgctcttcagcaatgttcagcagtttcagaaatatgtaatcgtcagctcaaccctctgtatttccaacgaaacgaaataacagacgagtcctggtattacttccaaatctctactccagacgacgaaatgaaagcaacttttaccgccgatcatatttctgcaccgggtaaatttggcccacgtttgctgtctgtacatgtaggcgcttggtggacgggcaacaaccatcaacttttaacgtttatgaagcaaaacaccgaaaggttacgagaagtgaaaacagtagattttatgggttacaccaaagaatatggagcctacatatttgaaaaacatgctgtgtataagggaaacgttatccacataaatgatcatgatttctacaggcttggtcggctagagctaaaaactttagctagcagcccttctatcaaactcaacccaaaacaagagtttaagccgacttggtggaaagacttttaccgagtacgtggggcaaaaggcttaatcgctctggcatggtggacaggctcatactttgcagagcagatccgcgcaatgcatagctcatttccatttattgaaatcgtaggtgaagccggtgcaggtaaatcacgattaatcgagtttatgtggaagctgtctggccgtgcagattacgaaggctttgatgcaaacaaatctactaacgtagcgatttaccgtaacttcgcacaaatttcaaatttgcctgtggtactcatcgagggtgaccgtaacgaccaaaatggtaatgcagtcgctaaagccaagtttagttgggatgaattaaaagacgcctacaacggccgtgcaatccgctctaagggcctgaaaacagctggtaacgaaacatatgagccacctttccgtggtgccatcatgatttcccaaaacacgcaaattcaggcatctgaggcgattctgacacgtactttacatatctacttcgaccgtaaaggccaaacgttagaaactaaacgaattgtcgatgaactcgaccgtttagatatcgaagacacatgcacatacatgacacattgcctagtaaatgaaaaagagattttagaaacatacgctcgaaagctcgaggagctagaaaccgagttccataacaacggtattacccatacacgtattgcgctttgtcatgcacaagtttcggctctagtcgatgctttggccaaacatgttctacaagatgttatcgatattgatgaagtcgtagcagcaaaagaaatgttgttagcaatggctgaagaacgagtaaatcaactcaatggcgaccaccctcttgttgaacagttttgggatgcatacgaatacctcaacagtagccgtagccctgctttcagccttaaccattacgaggtcgatgcccaacaagtagccataaatttaaacgaggtttacaaggtcgcagcgcgaaattaccagatacttcctgacataaaagaaatgaaaaacttattacgtaacagccgtcgctacaagttcatcgaaatgaacaaaacagtacggtcaaacaaatatccagccgatgaagtaaagaatgttactggcgatgatccaagcagcttagaacgttctcacacagtgaaatgctggatctttaccaatcctagctatggagcaccacaagcatga

SEQ ID NO: 59467 - DNA, 192 bp, Acinetobacter baumannii
atgactacatcaaatgttcaaactaaacctaaacacactgaactcactcaagtccgctggaccaaagctcagttaaaagtcctcaagaaaattgcgtatgaaaaggacacaaaaattgccatctacatccgtgattttatggtgaaacatcaccccgagttacaagaaccgcgcaaagacgagcaattgtaa

SEQ ID NO: 59468 - DNA, 342 bp, Acinetobacter baumannii
atgaaaaatggtgatttttctaatcgtggtgaacgtttaaaagaagaacgtaagcgcttgggcataggtacgcaagatgagttagccgagatcttaaatgttaaaaagaactcagttgtgcgttatgaaaagcacaatgcacctttagacactgaccagttagacttacttgaagatcatggttttaatattgcttatattctatggggcgcttcagaactcaaaagcagtgaactgacagaagatgaggcgaagctgattcagttgtatcgtcaaacacgtgaagaaatgcgttcggggttagtctctttagctgagacttatgcaaatcaatttaaataa

SEQ ID NO: 59469 - DNA, 954 bp, Acinetobacter baumannii
atggggataaataaaagccaaaagtttgtttttgttctcgtcatgattattttattaatttttatttggggattatttcctcttttctttaaatggttaatgataggaattggaactgataaaacaaacttagaggattttggcgcattaggagacatttacggtagtttaaacactctatttacttcggcaactttaattattgtgatttactcagcttacttgcaaagacaagcaaataaagatgctagagaagcaatggctaaacagcttgaaatggctagagtttcaatggtagagcaaattaaacaagctagaacatctactgcagagcaattaaaccaagccaaatcttctacagcccaacagttagcattagctagatcaagtcacgatgctcaaatgcaagaatccaaatatgctattttttcaagtatgtttaatatattactcaatcaaaaagatgctgttttagaaaaatgtgggtgggggaaagaaaaatttgaacctaataaatatttttcatttattgctcaagactttgaacggttattacagggcgaactgaaggattacgatattcatgatgaatctacggaagaacagattaattatgatttaattttaactatgaataaaataacggacttattcagttttgatgagttaacaagttatttttatatgcttgtacctttaattaatttgataaaaaattcgactataaaaagttcagataaagctacttatttctctgttataagtaattcaatgacatatagtgaacaagtaactttattgtggtttacggccatttctcatgattttcaagaattattaaaagatacacatctattaaacgctcacttcgatgagggttttgctgagtttataaaaaacaattttgatcaatctatttttggacatccacgcacattggcctattgggattaa

SEQ ID NO: 59470 - DNA, 216 bp, Acinetobacter baumannii
atgcactcaacactagacgttaaaagccataagaaaatgacggccgaagaaatactggaagaaattgaatatccacttgagaaccttcaaaacttactttttgccttttcaaaaatgaaagtcgatgatggtttaaaagaacaagaatttagcgccatcatcaacacgctacaccaccaagtggtcaatattaaccgcgcgcttcatgctaaatga

SEQ ID NO: 59471 - DNA, 885 bp, Acinetobacter baumannii
atgaaaacattcgctttaaagaactcccctactcaaattgggagtacagccatgaacgctattgcacacattgatgacgctgtatttgttcaaaacgaccaagttaaaaccactagcctcaaagtggccgagctttttggcaaacaacataaaaatgtaattcaaaaaattgaatctttagaatgttcgcctgaatttacatcagctaacttttcagcccatgttcaaatcgttgaaattggcaatggcgctatccgtgaatctaaatattatgaaatgaccaaagacggttttattttcttggttatgggttttacaggtgccaaagcagcacaaatcaaagaagcttacatcaacacctttaaccacatggcagccatgctctacaacacgcaaggcaaccatgaccaaatacatgtaggcgctgtggttcagctcaagtcaggtgggccactctacacggtcagtaaaatcttttatggccaaaacggttacatggaaagtgctgaagtcatttggcacaacaaatctaatttgtgccgtgaaactttacccattaactgcttaacatttgagtctaataacctcatccaaaataaaaccctagaagacttctgggcctctgtttatgcctacggcatccataagctcaaccacagccggaaaccaaacttactagcgtttaatctgggccagatctacgagtgcattgagggtttaccacccaaaagccaactgtctagcatcctcatgcaaagccgtgctcccttccctatttttatgcaacataaccaccctgtgcagagtgggattatcaataaaacggtgagatgcatggttttcgacattaaaaagctcgctatatcagcaattgaaagggcttaa

SEQ ID NO: 59472 - DNA, 972 bp, Acinetobacter baumannii
atggcttcagatagtacgaaaaaaggattaattatttatagtattgtcgaaaatttaaaaacaaaaaaggaagagttaatccaattaaactctgttgactatatagaagcaagagatttaattgttgttaatgaaattataagtatttttgatgaaattataataactctagagtcaaacattttaagtaataaatcttcagaaattcctttagattttgatgaaaaatatattgcttttattgctaatagtattgatattcgtaaagtaaatgcagatgttaaagctgttgattttaaaggtaatttatatgagattttagatttaataagcaaaataaaatcttatttgacagctttcttttcgaataaaaaaataattgctgagaaaaatgccgctgcagaattaataaaagatattgaaggtaaagtgaatgatgttaaagggcttgttgatcaaaataaattgcttagtgaagatttaagaaatagaacaatccatcaaatttatgatgaagacagcaagaaatttaaaaaaaccgcaagattatatgaaatcgcgttttatatattgttgttattgctggcattctatttgtttggttatcattttgaaattaatacacactatataactattcagaaaatttctttaattattttatcttcgactctagcagcctttttattaaaaagatcttttatgaatcgacgtcttgcagatgaggcctaccgaactgcaaaagaaattgacggcttaccacgctatatggttggtctgcctgaagaaatgaaagaaaaaataagatttgatctggcttacaagtattttggtaatggaattcatcatgaaagttactcaggtggtgaaaatctgatgcatgaaaatatgaaagcaaatactgattttattatggcggtaaaagacctaaacaagccaagtgatgataaagctaattctgaaggtaaatag

SEQ ID NO: 59473 - DNA, 3147 bp, Acinetobacter baumannii
atgttgaacagtattcatcaagttttagatagtttgggcattagcccacagaaacgtgctattcacattcaatttacttctccgatattgaatgaccaagtatttctgcaaagaattgatggtgtacatgcactcaatgatggtttaaaagcagaacttttatgcctatcaactaatgcaacgattcaactaaaatctttcattggcagtcaggccgctgtagatatagtgacggagcgaggtgaattaactcgcgttacaggcattattactcatgctcaacagggccagtcagatggcagtctaactttatataagctgaccttagaagacccaaccgcattatggaaatatcgtcgcaattcgcgcgtatttatgaataaaagcgtcgttgaaatatgggaaatactctttaaagaatggcaagttaaaaatccgctatttgctgcaagtttaagtttagatttaagtggtttaacaaaaacttatgatgttcgtccttttgttatgcaacataacgaaagtgattgggactttctcacacgcttacttcgtagtgaagggattaactggctgattgatgaagctcagcatattgttccaagtaccgatacatctattcaagctcagaaactcaggttgattgatgccaatagtgaatatcagcccttagaccgtaaaacgattcgttaccatcgtagtagtgcagtggagcaatacgacagtatgactcgcctaactgccgaacgttctcttcaaccgaacgttatgcatatacaacgttggcaagcagaaatattagaacaagaagaaggagttggaagcgttcaaagtaagcatcagcatagtgaacaatatgacaatgctacacttggcttagagcaagcttggaactatgcgcctgcatggactggtgacttaaagggtgaggatggtgtaactaaatctggaaatcaacaagttgaacgcttaaaccagaacctcaacaattattacgatgcacagtctaaacgctttattgcgcaaacgacagtccgcgatgcctatgtgggttactatttcgaactcaatgaacacccagaaatagaccagcatgaaggctcagataaaagctttttgattgtttctaaaaatttctttaatcagaataacttacctaaagacttaaatgaccaaattaatggtctattggcgaaaagtaactggtcaatacaaaaccccgagaacagtgatgaacgccaagcgaatcagttgattttacaacgtcgtcatattccaacaacgccagcttataacccacaaactcatagtccggttactcatccacaacgcgcaaaagtggtgggtcctgaaggtgaagaaatttatgtagatgaatggggacgtattaaagtccgtttcctgtttacccgtagtgatgatcatagccatgatgggggtgcaggagccaataataatgacaccgattcagcttggattgacgttttaacgccgtgggctggagaaggttacggtgcgcgttttttaccgcgtgttggtgaaattgtcgttattgacttctttaatggtgatatagaccgaccatttgtgatgggccgaattcatgaggcacagcgtcatccaaccaagtttgataacaaaggtaaacttcccgatactaaaaagctgagtggtatccgttccaaagaagtgtcgggtggtggttttggacaactcagatttgatgataccccgggccaaattagtacccagctacaaagcagtcatggtgcaagccagttaaatctggggaaactcagtcatcctaaagataaagcggaaagtgaagaccgcggagagggttttgaactgcgtacggaccaatggggagctttgcgcgcgggacaaggtttattggtgtccacccataaacaggataatgccaaaggcgaacaccttgatgccgaagttgcgaaaaagcaacttgaaggtagtcagactaacagtaaagcactgagtgacatcgctaaaaaccagaaaaccgatgaaatagaatcgattgagcagttaaaagattttgcctcacaaattcagcaacaaatcgctaaatttgaaaaagctttactccttttaagttcaccagatggcatagccttaagtacttccgaggatattcatatctcggctgatgcacaaatcaatcagattgctggagacagcatcaatataagtactcaaaagaatgtgattgcacatgctcaaaataggctgagcctttttgccgttcagagcgggctaaaagcagtagctgcgcaaggcaaggtagaaatacaagcccagtcagatgctttagatgtgcttgctaataaaggtattaccatttcttcgacagaagatcggattgaaattagtagtcctaaagaaattgtaattactggtgcaagttcacaaattaccttaaatggttcaggcatctttccgaaaactggcgggaaatttcaggtcaatgctggacagcatgtgttccaaggcggcgcatcggcaagtgttaaatctagtttgccaccaccaccaaaacgtgcacaaggcgttttagagttacgtcatgattatgtacatggagaatttgtcaaaggtgctggctatacagtgacagacactttaggaaaagtctttaaaggaaagttagacgataaaggtttcgctcgtgtttctggtttggcaacaggttcagtaaaggttctttttgatccagacccgcgtaatccttgggatgaggcaagtgattttaaacgcaaggtagagtggccaaatcaaaatgacgtagaaggcagcattggcattgcatctggcagtaaagggttaactgaaacattaaaaaatgactttaaaaagttgagtcaacttgcgggcaatgtgaaatctgtgcagcagaagattgaatcagttaaaaaaatcaaagatcaaggtgctaaagcattgctaccaatggagatggaacaggttttaggggggagtgatggatctaagttaagtcaatcatttgttagtcaaaatagctttatgccttcaagtcagcagagtaattcactccgaatgttgactcaagcaagccctgacaaaacagcaataacaaaaatccaatcaccttttgaaacgtttgtataa

SEQ ID NO: 59474 - DNA, 4833 bp, Acinetobacter baumannii
atggcacaaaattcagtcgttgctcctttaaatacttttagtcccaaagatttaacaacaaaaaaggcagaagttgataaatggtttagggaatatacagatggtattgttactgttgaccgactagagacaatctgtagaaatgtacctgttttaggtagtgcctttgctgttggtgatatcattattgatatcataagtatgattaataaaggtattgataaagttgaaatttttgattggttaaatttaggaattgatgtgattggattggcaccgatcccatctattagtctgggtattcgtggtgtagcacgaccagcattattttatgtaaagaatgaatcagaacaaattatcaaagcacaagcaaagaaattaggtaaacaaacgttaacttctcaagaagtaaaaaaagctttaagtaccggttttaaagacagtgcaagtgtatttttaacaactatcattgctgaaaatgtagcagggactttagaaaaatttgctaaagaaggacaaagtttacttaatcaggttctaaaagaggttggcaactggattatcacattaacaaatgccattgatactggcttaaaaaaactagtcagtggttcattagatggtcttccaaaccttaagcgtgcaggccagcagtctttaggagttataaaaggaatatttgaacttgatggaacccgtgtagtaaataatgcaaaatatgctaccgaaaacgttgcaaagactgtgggtaaaggatatgtcaacctagccaatttaggaatttccaccgaaacacgagctaaaattttagctttaggtacaaaaataagatctatcggacaagttgctcaaggaaaagtaaatggtttaagtgaccctaatactttatggactattggttggctatttagcattatgggaatggttgccgcaaaacatcggcaaaagaaagcgcagattaaggccaaagaaacgacaaaggccaatgcaactcatccatcaactgcgactgacaaatcaaataaacaagctcatgccgagaataatgccaatcagtgtaaaaactgtatgggcggaactggtggttcaattacctttgcaatgggtaccgagttctttacccatgtcgatgcacaacttggtggaataattcaggacagcattagccgtacctatgtttcaaacctttaccagatggatgacgctatatttggagcacgttgggttactccatttaccacaaaaatttctcgtaaatttaaatatagtccagagaaaaaagaccataaagactatttaaatgggcttgaatacattggtttagatggtcgggcaatcaatctgcctgacctaaagaagggtcaaagtatttatgatccgattgagcaatacacttatacagttttatcagatgagcttcatttaattgcctacggtgaagacgaaaaacgctattatgaaaaatacggtgaggactatcgtctatcctatatagaacgtaaaaatggtttcaaagtcgctttacgttatgaccatgtttctatcgataataaaacaattttatcggacattttatttaaacaggacgagagtttgctggctcatttagctttgcaattaactccccaaggtttggtttccgatatttggaccatcaaaaatggccaattagatcgtgttttggcaagttataactatgatcaacaaggtgatttggttcaggcaacaaatgagtttgcagcttcttattattatcaatatacccatcacttaattacacgttatacagatcttacacatcgtgggatgaacctaaaatgggatggtattttacctacttcaaaagccattgaagaatgggccgacaatgctagtcgtgcttcaaagctggagtgggataaaaatatccgaaaaacgacagtgttagacgttgaagggaatagcactgaacattactacgatatagatggctatacttaccgtattgtttatcctgataattttgaagagtggttctttcgagatgatgcgaaaaatataacgctccatattgctaaagacggttcgaaaacttcttacacttatgatgagcgcggtaatgtcttgactacaactcaagatgatggtgcgacaagttattttgaatatgatgaaaaaaatcaactcactggtatggttgatgccgaacagggacgttggtttaagcaatatgatggttctggaaacctgatcaaagaaattgatccacttaagcatgaaactgcttatgcttacaatgccatgggcttagtcacttccattacagatgctaaaggtggaagtaagtcactcaaatatgatgatcaagggaatttaattagttatacagattgctcaggtaaagagactaagtggcaatatgatgagcgtggtcgtgtaataagcattgaaaatgcattaaaacaaaaagttgagtacttttatactgaacttactttagaaaatcgggaaccaattataaagggtttacctctgaatgcttttggtcaacttgaaaagatcaaacatgctgatgacacagaagaacacttcattcatgatgcggaagggcgtttactggcacatgtagatcctaaacagaacatcactcgctatgaatatgatgaggcgggtttaattctgtctcgtacagacgctttaaaccacaaattaaaatataaatgggatcgattgggacgtctaacccgactcattaatgaaaatggtgcaagttatcaatttttttatgaccttggtgggcgtttaattaaagaaatcgactttgatggtaaggaaacggtataccactatgatgaaaactcgggccaactggcaaccagtattgaagttgcatctgcttatggacaagacctcaaagaccgagctgcaccgaaagaccgaattcaacaatttatttttgacagtatggggcgtttagaacagcgtactgcgggttatggtcactatggtttagaactcgaagaaaaacagactgaagaatttgcctatgattatatggggcgaatcattcaagctaaaaatactcaaagcaatttacaatggttttatgatgcggctggcaatttagtacgggaacatcagcaagactataaaatcaataaaaccgcggtgtggaaacaccaatatgacgaaattaatgatcgaatcaaaacaactcgtccagatgggcaggttattgactggttgacctatggtagcggtcatgtacaaagtttaatcgtgaatggtcaagaccttattagctttgagcgtgatgatttacaccgagaaattgcacgtcactatgccaatggagtgagtcaggaacagcaatatgacttagcaggtcgtttgaaaagccaaatcatgttaagtgaacatgaaaatggctatcaaaaccaatataagccgcacaacaatgcattagagcagaccagtcaactggtacagcgactttatcaatatgataaaacaggagagctaacggcaattagagatacacgccgtggcaatattgcctataagtacgatcctgtagggcgtttacttgaagcgagcagtaaacttggaaaagaaacgtttaactttgaccctgctagtaacattctagattcgtatcatagtcagaaggctcaaagccactcacaaaagctagatgaaacaggctatggttataatcgtttggttaataacgtagttaaagaatatttagatcaacaataccaatatgatgcttatggacaactcgtaagacagaaaacgagccaaggtgatttaaaccttgaatgggatgtctatggccgtatggtgaagagccgtaatagtcaatatacggcagaatatcgctatgatgcattaggccgccgtattcaaaagcggagtaaacatcaccatacaggtcaagagcagaacatcatttatggatgggatggcgatacgcttgcttatgagtccacagagcaattgaccaagcattacatctatgaaaaagatagttttgtaccgatgctacaagctgtttatttaagtccaatagaattgcaccaaactccagattggtcagatagagcttataacatacaccgagacccgctttggaaaactgaaaaacagggtaaagagtttgatgatgtatggttctatcactgcgaccacttaggtacgccgcaggaaatgaccgaccatacaggtgcaattatttggaaagccgaatataaagcatggggtgagtgtaaagctgaaaaagctaagtcaaacttcttcgaaaatagtgaaattatttcaaataatatccgttttcaaggacagtattttgatgaagagacaggattacattacaatcgctatcgttattattccccatatgtaggcaggtttgtaagtaaagacccaattggattgttgggtggatttaatgtttatgaatatgcaccgaatcctaataattgggttgatccattagggttatccccaaaaaaagattgtaatgtccctaaaagagaaccagaaatagttgaaaattttagatcatttgaagctgcacgaactcgtgcattacagttaattggccctttagtcccgggtacgcgacaggaacagattggtagtctaggtcaaggaaaagggaaaaaggttggattttatgggattagtgctgcaaaaaaagaatacgttcgatatagattggattatgatccacttaaaggccctcatattaatgtagatgtaggtaaaggtatttgtggaaagcgctatgctataaaattcccaggtaatgaaaaaacatttgtaacacttttaaaaaggaatacttaa

SEQ ID NO: 59475 - DNA, 399 bp, Acinetobacter baumannii
atgattatcccttcatttcttaatgaagctctattaaatagagtttcattaagttcaattgatttagaaaatacaattaaaagtttaggtctggatgttttaaactacggagtaatagataaagagacagataaggtggaattaatagttcaggatgatagagaatccttgctgaatatgatacgaaaatatttaatgaagaagccgattcatgaggaagttcatgtattctggtcaaatttaaataaatattcaattctttgtgatattaagtttgtattagaaaatttagataatatttttgatgaggattgggatttttggattattggcggaaataaaaaatgggttattgaaaactatcatgaggaagaattgtcaatatttttattgaattga

SEQ ID NO: 59476 - DNA, 2241 bp, Acinetobacter baumannii
atgactaaagaaaaagatcaagattctatcttggatgagattaagaaaaatctcagatatgccgaagattattggcatgataactacgaacgtggtgttgaagacaaagagtttgttacggtaaaaggtgcacagtgggaagatggcgcggttgcaagacgaacagcggaaggtaaaccaagtttagaattcaacctttgccgtgcttactgccgtcaacagatcaacacacaacgtcaaaaccgtgcacaagttaaagtcgttccggttgacaatggtgctgatgcggataaagcaaacatcattgaaggtctaatcaaagacactgaagaatcgagtgacgcagaatcagcatatgatcaggccgcagaaaatgctgtatatggcgcaattggctttttccggatagtgaccgattacgttagtgagctttcattcaatcaagagccaagattcatgacggttcacaaccctcatgcttggtacattgacccacagtctaaagcgctagatggttctgatgcgcggtgggcagtaggtggtgaatgggttgataaagacataatcgaagataaatatggtaccaatgctgtagttgactttgctatgtctgagtattccgactggtgcaatactgaagacaaaacagtcctgattgttgagtacttcaagatagaagaagtttcagatgagctttggatgcttgaagatggaacgaccaactataagtccgcgttacttgatgaatttggcgtaagtgaagatgagttaaagtcgcttgttacaaatttccggccaaccacgagaactgaagttaagtggtacaaagcttcgggttcagaggtacttgaggaaaccgtatttccaggtaaatatattccagtaattccagtttatggcgaagtgacttacattggtgaagagcgctatttacactcacttgtacacttcgcaaaggatccacaacgtctttataactattggaaatcaacagaagcgcaaatcttgcaaaagaatcaagacgatattcttgttgttgatccaaaaggtgtgtcgggacatgaagaagaatggcgcgatccttctaagtttgctgctgtacattacaagcatattgatgacagtcaacaggcaatcccagcaccttatcgaatcggagcagcacagccaccagttggtgttttgaatgccgcagaatctgcaaaagttgcaattacagacatcttgaatatgcatgcacctattatgggtggggatagtcaagaagtctccggtgttgcgatcggaatgcgtcaacgacaatcagagacggcacaattccatttgcaagacaatctaaacaagtccattcgtcatgctggacgcattttacttgggttatatcaagcactttacacagtccctatggtgcgacgaatcattggtgcagatggtgaggcaaaacaaatcaacctgtttgataaaacggctgatggtattttggctgatgtaaccattggccgttatgacgttcgcatggatacaggcccaagctttaatactcaacgtgagcaaaactttgcattgatgatgcagttgttgagcatgaatcctcagttattcagcttaattggcgatatcttgcttcaaaactcaccacttcttaatgctaaagaaatatctgaacgcattcgctctactatgccgcctcaagtgcttggcaaaggtgaacagattgatcctgaacaagccaaagcacaaatccagcaacttgatcagctagttcagaaaatgacggctgacattgaaatgctgcaaaaagaagtaaacgacaaagataaagagcaccagcttgaaatgttcaaagctcaattgcagtatgaaaaagatatccaagttgcacagattaatgcagcaagccgtgctgacgtgcaagagcttaaaggtgcggttgatttgatgaaacagcaagtagcatcaattggtcaaatgcctgcaaaatggatgcaaacaggagagggtgtagataattatgcgccttcaccaccaacagatttaccttcgcagcctatggaggaagagcaacccatagagccagcgcaaagcatacaaaaccctgacattgatcagggttttttaatgcctgaacaaaatgctcaacccctcgctctcgatcctgatcagattggggaaagcgcaatgatcaacgaaggcaatttattgccacagatggagcaggacaatggatccgaacaactctga

SEQ ID NO: 59477 - DNA, 792 bp, Acinetobacter baumannii
atggatccgaacaactctgatactcaagacatcgtagaaccagctactacggaaaataacagcgaagtgagtcaagagccagaaggccagcaggaacctgagcaaacctcagaagttgaacaaactgaagaggaaaaagcaaaggcagcagcagaagccgaggaaaagaagcgaagtcgagctaaagagcgaattgagcgcttagcacgtgaaaatgctgagctacgaaagttcaaagaagaagccgaagctaaagctaaacagccagctcagactgatgaagcgccaagggttgaggactttgaggattactcagagtttcaacaagctcaacaagagtggttcatcaagcaggctgaacaacgtgttctagacagactaaaccaagagaaatcatcacagcaaaaagttcaggccgaagctgaataccaaactgcagttgcagagcttgaaagtgaaggcgtggatgtgaatgggttaattgagaaagcaaatagcttacctccattgcccgtaactcttgatcaatttggtttgccaattaaagacactttgggtttagccaaaaagattattgaagatgaggatctttattacgaactaactcgtatgaacccttatcaagctgcaatgaaaatcgggcaaatcattggttctcaaaaacctgcaccaaaggctccaaaagttcctaatgctccaaaaccaattaatccaacgtctgctaatgcgcctgtcaaacgtgacatggacaagatgtcagataacgaattccttaaatcacggggtttataa

SEQ ID NO: 59478 - DNA, 1233 bp, Acinetobacter baumannii
atgtcaaacaacattttaacgcatgcaaagattgccaaagaagctgctgcaatgctattggaaaagtctatctttatccgttctatcagtcgtagccgcgaaaaagaatttgcaaaagaactcgatggttacaaaattggtaactcagtaaaaattaaaattccaccagtgcctgtggtaactgatggcaatgtcttaaatccagatcatcaaagcattaacgcgcaggaagaagaagtagttcttactgtagatactcataagcatgtcggcttaaagttcggtgtttatgagcgtgagcttgacattgctgactataaagaacgcttcttaaagccagcagtaaactcgttagcatcagtggttgatgcagacattcttaagcgagctattaacactgttaacaactttacgcttcagacaaattcagaaccacatcctttagctgcatttggccgtgtgcgcggtatgatgaaccgagcattatcgccagatactgaccgcaaagctttactgtcaagcgacttcacaaatactcttgtagataacagcgggactttatttaatccaaatgctgaaattgctaaacagtataaagaaggctatgtaggtcgtgctcgtggctttgatttctttgaatcagaacatatctggaccttaaccaatggtagcaaagtaacgggtattactgttaatggtgcagggcaatcaggtggcctgttggcaattggtgggcttactgctggggatactattaaagcaggtcaggtatttacaattgctggtgtaaatatgattcatccacttactcgtcaaacctatgggaagccaatgcaatttgttgtccttgaagacttcactgcggctggtgctactggggcaatcaaaatttaccctgaaattaaaccaaacatgattggttcagtcttagcggcaaacgccaacgtaactgatcgtccagataattcagcagctttaacattcgttggtgctgcaggtgcagttgtagatcaagctttatgttttgacccacatgcatttgctgctgcattcgtaccgattggtgtaattccaagtgctgaaggctatatgttcaaagcagacaacttcgctttaacaatccaaacaggtggcaacattaccaacttagacacagatacacgtctagatgtgttgtatgggtttaaaacggttcgtggcaatcatgctggccgtgtgggtattgttcagtaa

SEQ ID NO: 59479 - DNA, 489 bp, Acinetobacter baumannii
atgaattatccaaagatgctctacaagggtgacttaattaaatttgaattcaccacagcagtttcagaagaacatgaagaagaattgaaagcggtaggttggatcgagcattcagagcttggtgaaccagaagctgtgagtgaaattaagcatgcagaagtggggacagatgaaagctttgttccagttgagcaatttgattctttagcagaaaagctagctaaaacagaagaacaacttgctactgcagaagccgaatatattcgtcaggttaatgaaaaacaaactgagattaacgagctcaaatcagtaattgaaaaaggtttagccgaaaatatcgaattgcatcgccaactacgtacaaaagagttagaaggccaatcagcagatgaacttaaggcaatcctgaatgagcgtggcgtgacatttggtgcccgtgactcaaagcctgaattggttcaactcgtcctaaaatctgagcaggaataa

SEQ ID NO: 59480 - DNA, 636 bp, Acinetobacter baumannii
atgaacgtcagtgagattgtgaccggagcaatgaaacgtgcaggcattttagctacaggtgaaaatgcatcggcacaggatcttgcagacggaattgatgctctaaaagatcttttagcacagtgggcaacagataatcttctagtttacaaggtcgaagatttaaccctgaatctcaatgggatctttaaagtttcaccagatccattagatagtccggacctattagcagcaatatcacgtattccccaaatggggacgctagacaatcggcctgttgagattgtgagagatctaaatatcagtgctgattatccacaagttacatacaaggttttagggcaattatgggagtttagtggaaaaggtgttctatgcttcaaagcatttactatgccttttgaactaaaaccccatgatgagttaaacattccgccagtatacgagcgagcattaaagctcacacttgcagttgaaatctgcccaatgtttggtgttgagccactaccgagcttacagctcaagcagactgaagcattcaatatgcttaagaacagcaacgttacgccattgtatgtaaaaaacgatttacctgttggggtaggagctcagtactgttatggcgactattattga

SEQ ID NO: 59481 - DNA, 1365 bp, Acinetobacter baumannii
atggctattgatccaagcatcattacgaatgcaactctacaacagcaagcacagcaaaatgaaattggcaataagcttgcagggctaacaggtgctcttgggcaactggtgcttggtcgcaaagctcaacaaatgagccagctagccactccacaagaacagcaagcctttgccaatgattctattttttcaccatatttgaatagggttttaaaggctaatcaacttacagcgcaaaaaaatgcaattgatgtgcttaaggctcaggcagaaattggaaaaactaatagtgaagcaaccaaaaacaatgctcaagcaggtggttttactttagataactctcagaagaaatatggagctattcaaggagccttccagcaaggagctttaaatggagataaaggacaagtcctgttagcactagatgctatgaaaagaacagggataatctcacctgaggattatgatcacaacgcaagcattgttagtgtgatgaaacctgaagaaattaagcaatatggaatgaatagcggcttgttgaataaagagcttgctccattcctatatcaaactaaaaacaatgaagctgacaatgctactagccgtgaaaataatcaggcaactgtaaatgccactttaacaggtcaaaagctcaattatcaacttggaaaggagaagcttgatcaagataaaataattgaagaccagaaacgcgcttttgaaagtggtgaggttaaggaaacaattgtaggtactgatggcaaagcttatattctttacaaagatggtagagtagagctttcgaaattacctaatggccaggctattacacctcagtctaaacgtgatggcaaacctcaaatcagtgataaagcattagagtcagttaatggcattaatattaatctttctaatgcaacacaaaatactaataagattaatggccttatctctgatattcagagtggaaaactggatttgagtgctgcaaatcagttaggagcaaaagcgaaaaactttgtaggaatgtctgatgaaaacagtcgtggtgttgaaaactttcatactgctattaaccaagctgctaatgacattttaatgatggcaaaaggtactcaaactgaaggtgatgctaaaagggcgctcgaagtaattgcagcaaatccaccacgtgataatgcagcagcgcttcaagtgcttcaacgccttgcaacagttcagcaaaatacaatttctgcacttaatcagaatagaaatgccatttatgataactatggagtttctcccccacaggcaaaattacaacaaccagcacaatcaagtgctaatcaagcaaagttgaacaatattctgtttggtcgttaa

SEQ ID NO: 59482 - DNA, 366 bp, Acinetobacter baumannii
atgaataaaatattactagcattagtcttaataagtccaatggcttgttttgctgccaactgggtagaagtcaataacaatgagaatgtatctactgaagtagatataagttcaattcaaaagctatccaaagggaaaaggttagcatggattagaacagtgcaaaaagttgatggtaagacagttagctcaattgttagggtggaagttgattgtagtaaacaaacattggcaaataaagatttatacatcaaatcaaatgaagatgtaatttaccaaaacaacgagatttcagggaagccttttactccagttcttgattcaggcgggtggctatcgattaagtcaatttgcaaagcaccctag

SEQ ID NO: 59483 - DNA, 291 bp, Acinetobacter baumannii
atgtctgaaaatacttcacaagcagttgaagttattgcaacaacggttggctcaaaagccacatatgcaggcggtactgcaacactggttggttgggctgcatcagtagactggcttgctgtaactggtgtcttaattgctttggctggttttgcgcttaatgcgtatttccagattaagaaaaacaaacgagaagatctggagtcacgtatgcgtatgcaacgtgaacaagaaattcatgattttaatatgaagcagatggaggctaatgccaatgtcaaacaagactaa

SEQ ID NO: 59484 - DNA, 507 bp, Acinetobacter baumannii
atgtcaaacaagactaaatatgctgttggaatactagcagcctcaacggcattttttgcttcattaattggatatgagggctatagctcaaagccttatttagatagtgggaaagtagcaacaattggtattggctcgactaaatatgaaaatggtacatccgtcaaaatgactgataagccaattacaaaagagcgtgctattcagatttcaaaatcccatatttcaaaagatgagatggcttttcgcaaatctctaccaggtgtgaaattaacgcaaactgaatacgatgtttatttagactttgtttataactttggtcaaagcaactggaatcaatcttcaatgaagagtgagcttataaagggcaatcatattgctgcttgtaatgccttgctcaaatggaagttcgttgcaaagcgtgattgttctattcgatcaaatggctgttatggcgtgtggattagacaactagacaggcaccaaaaatgtttaagtgtaaattag

SEQ ID NO: 59485 - DNA, 1038 bp, Acinetobacter baumannii
atggccgaaagtcaagtttcttttacttatcttaatgatggaaatgacataatcgattcattatctaagcaacgtttttttacttatctaaagaaatctagttttaaaaaaaactatgcttttgatttatatctttataactctagactttctaaatctttactcttcccattacaagtatttgaagtttgcttgcggaatgcgataaataatttttttataaaagaattttgtttagattgggcaattgattctaattttcgaaaaatattaaattctcattctttagcagctttagataaagcaatagaacgtgcaaaaagtagtaataatgacgatattgtagctgtgataactctagacttttggtcaaatctttttcgtagtgattacgatagatcactttggcaaaaaaatattcataatgtgtttggagaaaaagttacaagaaaacttattcaaaaagatgtggctgaaataaataaattaagaaatagaattgctcaccatgaacccattctagatttaaacttaagtttagtttataaaaaaattattgagttaattcagttaatatcagcggacacagctaaatggacaaatcattttacaacttttcatgatgttatccgaactaagccctcaatgaatggaggacaaaaaccattatttagtgaaaaatatgatagtgatttttgtattgtagatgaaaatacttttttaagtgaattaccaagaaatagatttcttatatgtaaaagaaaagatatagagtttatttgtgaaaagtctgatatagctttatatatatatgattctgcaaaagatagtaatgaaattatagtggatttaacgactataaaattatctacgattatccaactagatgaaaaatcaaataagaattttcatctgtgtagtagtactgaaagttttagaaccagtaatattttatttaataaaaaatatattgattttattttagtacaagataaaaagggtatcttaggggtaataaaaaaacctcatattatttaa

SEQ ID NO: 59486 - DNA, 303 bp, Acinetobacter baumannii
atgacaaaaaaacaaaaattaaaactagaattagctaattatatctataatgttttcaaagatataaattttagagatcgtggagcaaaagcgctctcatggtttgaatcaaccggatttaatggctctaaagaaaatatgtatcatcacaaatttagagtttggaaatttatcccatcagtttatacaaaaaataaaggatgggaaaatgataatttaacgaaagagggttatttaataaaagatatctttgagtccaccgttcaacaaggtttagaagagtcagacgtacctatcaattaa

SEQ ID NO: 59487 - DNA, 324 bp, Acinetobacter baumannii
atggaaatgtggacttattggggggcaaccacttttagtattttgttaatccttagctctttaggtttattagcttggggattaattgactattatcatgactatataagtaccaatgtttgtttaaaagatgaagcattcaatgcttgtgttagtaggcttgagaaagttcgggatataacaaaaaatattggtattaccttcttcgttatgagattttccttttctttattgttatttttgaccgttatttatacgagtagaattgctattcgagcatattcacattggcgtcatagctactgcacttacattggcaggtaa

SEQ ID NO: 59488 - DNA, 273 bp, Acinetobacter baumannii
  misc_feature (63)..(72): n is a, c, g, or t
ttgctattcgagcatattcacattggcgtcatagctactgcacttacattggcaggtaaatcnnnnnnnnnncgccatgaaattcatagagagttaataccagattactttgggaaagatgctggccttgttgagacaacaaacgaaaaattcaaagatttacctgccaatgtaagtgcagtagctatgaaagcaattgaacaaatttctggaagtggaagtaattctagtacagaaaaaaacggtaagaaatctgaaggtggaacagaataa

SEQ ID NO: 59489 - DNA, 645 bp, Acinetobacter baumannii
atgtgtgcgaactatgaaccaatttcaaaagaccgtgttcacctcttagacttgtttgaaccaacttttgaatatagcaatgacatttatccaggtgcagattgtccgcttttattttcaaatgaagggaacgttgagtggcgacaagtaaagtttggcttggtgccaacttgggccaaagatctcaaaatttgccgtaaaacttataatgctcggacagaaacagtccatgaaaaacctagcttccgtcatgcttggaagaatagccaatttgcactaataccagttgataccatttacgagccaaaatatatcaatggcaaagcacattggtacgggatctaccgtaaagatggtatgccttttaccgttgctgcactttatgaaaaagccaaggtagaaggtcatcaggtacgttcaatgactatgctcacgatcaatgcagatcatcatccgtttatgtctcagttccatgcaccgacagatgaaaagcgctcaattatcgtgataccagatagcctaagaaatgagtggctcaactgtaaaaatactgaagcgcgagattttttcttagacatggcaccggacgaatacctagcacagcctaaggaagagttgaagaaaatccgaccaaatacaccatga

SEQ ID NO: 59490 - DNA, 501 bp, Acinetobacter baumannii
atgagcagcatcgaccgatccatcattgaaatccaaagctattccaggcaaagcaaccttttaaaagaagtttcttcaatcaagttagccgtccctactagcgtattttctattcctttagccattgaaaaggtggcagctggatttccttctccggcacaagactatgtagacaaaaatttagatatgaatgagcacttaattaaaaatgagtgtgcaacttttgtagtaagggtggcttcacagtcgatgctaaatgctggtatcgatattgatgatgagcttgtggtggacagaagcatagagccgaagcataacgatattgtaattgctttagtggacaacgaatttaccgtaaagcgtttaatgatagatgctgacgaacgctggttaaaagctgaaaatcctgagttttgtgatattcatttgaaagaggggcaggaactttttatttggggtgtagtcaccttcattttaaaaaatacaagaaaatttaaatga

SEQ ID NO: 59491 - DNA, 1296 bp, Acinetobacter baumannii
atgaagcacgaaaacaaagtatttgctttggtggacgtaaataactgctacgtcagttgtgagcgtgtgttcaatccaagtttgattgataagccggttattgtcttaagcaacaatgatggctgtgctgttgccagatccaacgaagcaaaactgcttggtatcaaaatgggagttccgttgttccaaattaaagatattgttcagcagaataatgtaattgtcctttcaagcaattacacgctatacgctgaaatgtctcgacgctttcataaagttttaggtacttatgtgaccgactcagaacaagaaatttactcaatagatgaatgctttttagacctaacggattactacaaaaactttaacctaaccaaccttgcccaagacatgagaacaaaaattttaaagtgggtgggtttaccttgctgtgtaggcattgggagcagtaaaacagaagcaaaaattgctaatcacattgccaaaaagtatccggcatttaatagtgtatgcaacttagtggatatggacctctgcaataaagaagcttttttagctgaaattgatgtgtctgaagtttggggggtcggccgtaaacatagtaaaaagcttcagggtatgggaattaactctgtatttgatttggcttgtacagatccgcgtgaaatgaaaaaacagttttcagtagttatggcgaggaccgttgcagaacttcagggtatttcatgtattgaaatagaacatacacctcaaacaaaacagcaaattatagccagtcgttcatttggttcacgggtaacagaactggaggacttaaaagaagctataagtatgtatgcgcaagatgcctgtagcagacttagagatgagtcattgctatgcggttgtattattgcttttgtacagtcgaatccttttgatccgaatgttccgttttacaacaagtcaattagctatacctttccagaaccaacagattgcgctttagattttgtaaaagcctcaaccattatgctgacacacatatttaaggaaggtgtgaaatataaaaagtgtggcgtcatactgacatgcctagagccaaaatctggccatacttatgacttacttacagactttgaaacgatcgagaaaaaagaaaaactcatgaaaactctggaaggggtgcaccaaaaatacggcaagaaaaaattaggtgttggaccttgttttatacctggaagaacttggtcaatgagtcgagataaattgagtaagaatccgttcagagttgagggattgttgactgtaaaataa

SEQ ID NO: 59492 - DNA, 804 bp, Acinetobacter baumannii
atgagtaagaaatccaagttttatcgagttgctgttgctggagcaactacagatggccgtgtaattgaacccgaatggattcaacaaatggcgaagaactatagtcaaaatacttatacagcattagcaaatattgaacatctccgtggttttacacctgattcaccatttggtagttacgcaaaagttattgggctaaaagcacaagaagatgaaattgccggacagaaaaagtgggctttatatgctcaattagaggcgtttgacaacctcattgaattgcatggcaaaaagcaaaagctcttcaactcaattgaggtaaacccaaactttgcagatacaaacgaagcgtatttagtgggaatcgcatttactgatacccctgcctcattgggtacgcaaattatggagtttgcatctaaaaatcctgatgtaaatccatttacttctaaaaagcagcataaaaataatctcttcactgcagctgaagaaattgcattggaatttgaagaagattctcccgtttctaatctcttttcatctgttatgaactggctaaaaccacagcaagaagaaaaagacaatcagaataaaggccagttcaatgaagttgcaaagtctattgaagcaattgcccaaacctttggtgacacacttaaagaattgaatgaactcaaaaaagaacattcaaaacttcaaaatgattttaatgatctgaaatcaaaattaggtaaagaaccaaatccacaaacaccacctcccccagaaagcactggcaacttctcagaaaaagtagagtattaa

SEQ ID NO: 59493 - DNA, 990 bp, Acinetobacter baumannii
atgtctgacagcaaagtccaggctttcactttcggagatcctgagccggttcttaataaacatgacatttctcaatattacgagacttggttaaatggtcgtttctatgaaccacctattagcttcaatggattggctaagtcatttgctgcaacaccttatctctctacagctatcatctataaaaagaatcaattggtttcagcttttaagccccatccattattgaattcagcaagttttgaacgcatggttttggacaatttggtttttggtaatggttatctccaacgcatcgataacaggctcaatcaacccttacagttcaaagggttaatgggtaaatacatgcgtcgaatgaaagatccaaatcaatacctaatgttgacagaagggtataaggagcatgaattcaacccagaaactgtgtgctgtataaaaacttcagacattaaccaagaaatctatggtgttcctgaatacatgtcagcattgcaatcagcctggttaaatgagtcggcaactctattccgacgcaaatattacaataacggttcacatgctggttttattctatacatgacagattctcaaattgatgatgatgatgtagaaggaattaaacaagctatgaaggactcacgtggtccaggtaacttcagaaatttgttccttcatgcaccaggtggaaagaaggatggactacagttaattcctattagtgagctagctgcaaaagacgattttaaccatataaaatccattacacgtgatgacattcttgcgtcatttcgaactccaccacaactgctcggtatcattccttcaaatgctggaggctttggatcaattaaagatgcaagagaagcgtactggtataatgaaattattcctgaacagaaccgcattgaaaatacaatcaatgaatgggcaggggatagaattataggattcaaatcttttgaagaagtggaacctacaaagaaataa

SEQ ID NO: 59494 - DNA, 438 bp, Acinetobacter baumannii
gtggccgcagtaaatcctgatggatcattcacaggtgaggttgggattgatatatatgatggaaacaaggtttacactggtacaaccaacctgctagaaacattcttaatgaataattttaagcagtcatataatgtgcaaaactttcaaacgttacctttaaagaatagctatggcgagcatattgcaaaatcaaatggtgattctgaaacaattaatttctttattgcaaacccccacaatttaactatattaggatgcggtcaagaagatgttaagggagcacctctatatattcttgctgaagatggtgtagagaactgttctatcactgtagatggctttcaggctgtatggggaacaaatggcacaaatacagataaaggtattaatctggcgactgtagatggtccggttacagctactttttttatctaa

SEQ ID NO: 59495 - DNA, 810 bp, Acinetobacter baumannii
atgaacataagtgagtattcgcgaatcattggaattgatgaaagtgaagtaagaaagttaatgattcgagtctctgaaatatgtgatgggcatctcgacaaagctgaatatgattggatgaaaactgatgctggaaaacgaatggcattagatgaagcactatccaatgtatctatggaaaaacgtgcagatagtaaaccaagcctattacctggctacgataaagtagatttgtttgaccctaaaattgatgacttcatagctatcgtttgcgatattcggaaatctactgaaagattaaagacgtcaagaaatggacttaaaggaatagatagcggaattcagcgagtgttctatgaaacatctgctttattaccatccctagaagttactattaacttttttaaaggaaaagtaacagagtatttaggtgatgggctcttaggatttatacaatataaggataaacaccaaatctatagtgcatttcgtgcttcaaaggcatgcgtgactctaactagggatattgtgaatcatgctctttctaatagatacaaccttccttctttagatattggagtaggcttggccttatctcctgcaatgattagggtggttactgaaaatcatgtaaaagcttttggagaatgtgtttggaaagcgaccaaactttcagatggaattaattccgtacaaattgatgaaaagcttgaatcagaatggcccgttgcaaaaagcggtggtctatcatttattccaagagatataggtaaggggtataaaggatataaagcattccctttaaaataa

SEQ ID NO: 59496 - DNA, 588 bp, Acinetobacter baumannii
gtggatttagaaaaaagtaaagagacattactacttgagagtattaaagatatacaaagcacgataagagctttagatgtaaaaactggatttctatttgtattcctttgcataccgtttagtcggattgaagcaataagtcctgcttttttgatattaattcaaaaaaatattctttttaccttagtcataattttattttttattatttggggatttgctttatttatactttttatggctgtgtcaccacaaaacaaccccgctgatagcgttgattttaatggtatttctaagcaacctaagggatttctcttcggaggttatctttttcaaaaaatatcaccaatgaaatatttaaactcttcggctatgcctgataaaaagaataatttagttgatgaaattacttatttcaaaaacttaactgaggatgaatatattgaagagttgatgtttgagcggttaaagcttataaccatccggaatttaaaattacagaggataagtatttgtattaaatcaatatttctattaattgttatgactgctgttatttggatttgttatttactagttaaggcatag

SEQ ID NO: 59497 - DNA, 264 bp, Acinetobacter baumannii
atgcatgtatttacatacaccgatgtacgtaacaatctaaaatcagttttagataaagtaattgatgatgcagatgtagcagtaattacacgcaaagaaggccaacatgccgttgttatggggcaagagcactatgacagcttaatggaaacgctttatcttctttcatctcctaataacgctactcgtttaaacgaatcaattgctcagttacgtgcgtcaaagacgaaacgaatggagctaatagaggatgacgaaccgtaa

SEQ ID NO: 59498 - DNA, 702 bp, Acinetobacter baumannii
atgcgaataactctagaaatcaagtgtccagcctgcctaagtgacagtataaagaaaaatggcacaaaagtagatggtaagcaaaattaccaatgtaaaatatgcagacgtcaatttattggtgatcatgctctcagttatcaaggctgtcactcaggtatcaaaaccaaaatattacacctcatggtgcgaggcagtggtgtcagggatatagcagaaattgaaagagtaagtatcggtaaagttctacggacacttagccaatcaaaatatcaacttcgagcacagcaaagtcattatgaaacccttgaagtagatgagttttggacttttgttggtcataagcaaaataaacaatggctaatttatgcctatcatcgagaaacaggtgaaattgttgcttatgtatggggtaaccgagatttagccactgcaaaacgacttaaattaaaattgaagcagttaggtgtaagctatacatgtatatcaagtgaccattgggatagctttgttacgacctttaaagaatgcaaacagttgattggtaaatttttcactgtgggtatagaaggcaataattgtcgattacggcatcgaatcaggcgaggctttaggagaagctgcaacttctccaaaaagcttgaaaatcatttcaaagcctttgatttagtgttcttttatatcaataatggattcgtttaa

SEQ ID NO: 59499 - DNA, 303 bp, Acinetobacter baumannii
atggtggattttatccataataataaagagctgtacggagtcgaggcgatttgtagaattttaccaatcgcaccttcaacctattaccgcactctagatctctgcgaaaatccagaacatcgagcaaagcgagatttacatgacttgcatcatgctgaacaaattaaacgaatttggaaggaaagttcaggtcggtatggtgtacgtaaagtctggcaaaaactgaaacgtgaaggttatgttatcgcacgctgtactgttgctcgattaatgaaaaagctaggtatacaaggtgtttggtga

SEQ ID NO: 59500 - DNA, 396 bp, Acinetobacter baumannii
atgaatacagatatggtgctcgatgcattggagcaagcattgcatgatcgaggcatgccaaagaatgtgattcatcattcagatagaggtgttcaatatctttccattcgccataccaatcgtttagaagctgcaaatttacgagcatcagtcggtacgactggtgattcatacgataatgctttggctgaaacggtgaatggcttatacaaaacagaggtgattgaatatctaaaagcaggttggcaaggtttagcggatgtacaacttgcgacactaaattgggtagattggttcaataaaaagcgtgtacacagtgcactgggttatgtatcgccttttgagtttgaagcaatatactatgataagattaacccgttaggtcaggtggcctaa

SEQ ID NO: 59501 - DNA, 255 bp, Acinetobacter baumannii
ttgagtaacgatttaaagatagaactatctaaattgaaagattttgtatttcagaattatgatccagtacaaatatctgttaaggctatggaaatttatagtgaatatactttgcaattatcaacttttgcatctgaaaaaattataattttagacgcaatggatatgggcgaagaatttgagttatctaaagatgaggtttatgatttattggatactttgttactagatagctctttaagctcatctagatga

SEQ ID NO: 59502 - DNA, 168 bp, Acinetobacter baumannii
atgaaagatcaagaaatatatcaaaaactaggtgagttattatggtcaatcatgccagaagatgctttagaaatttacttcataggttgtatttatcctaattattcagctggtggtgctgaatggttaactaaagaacgaaagataattagttttgaaatgggctaa

SEQ ID NO: 59503 - DNA, 237 bp, Acinetobacter baumannii
ttgattgaaagtttaaggttattagatatttttaaagaaaaatggactcattttaaaatcacacttactaatagtcgtaaatttagtacagaatttggttatatttcaagagaagatagttgggtaaatttatataggaaagctgttagtgatttgaaagaagaagaattagatgaatataatatacctcatgatgagtgggagaaacgagtaacgttgaaagagaaaaaaaaatag

SEQ ID NO: 59504 - DNA, 195 bp, Acinetobacter baumannii
atgtatgatgaaactttatgtttagatgatcctattaattctgcctttaaatcgattcacgataagaggaaattcaaactattaggaagtgaattgttcgatcttttaagagaagagttaattggccagtatgaagttacctatgaaaatcaagatagcttaaaaaattactctccagttaacctaattatatga

SEQ ID NO: 59505 - DNA, 285 bp, Acinetobacter baumannii
atgtcttttgcgattaccaattatggcaacggttttgaggcgtctttccgctcacgcatgactacagacttggctggtattagttgggactcttacgactctaaagaccataaatttttagcttatgaaactaaatatagctattcaggtgtggtatggaactttgatattgaactatcaccatctatgccagttctaaataatgagtcgctaactccaactttaacggtttattataacgaaaatggagtagataaaattgcatatatcgtcttgttcaactaa

SEQ ID NO: 59506 - DNA, 150 bp, Acinetobacter baumannii
atgaatcaatatcattgggttgagttgggaactactgcaccgctttacactgtgttcgccaaaacagaaaagcaagcaatttcaaagttaagaaaatatttagctaaagttggcaaagaaaaaatcgaattagcaagagttattgaatag

SEQ ID NO: 59507 - DNA, 273 bp, Acinetobacter baumannii
atggtgaaaattatgaaaggcaaagtctatttcatcggcggtgaatacgatggtgaagaatgggattatcctgttcaattaggtgacatagtaccccgtattaagcgccacccaattggtgagctctacaatacacaagaaacacaagcgcttgatgagataaaatacaaagccgaagtttactcagtaattggtgataaaagaatattcttggttgatccagaattaccaaaagatcaagctctaatcaagattgaaaagtacttcttctaa

SEQ ID NO: 59508 - DNA, 213 bp, Acinetobacter baumannii
atgaaagagttcaaacgagaagatgtagttaagcatgttaagaccaatgctgactggaaggttattgagtcaacaacagagtgggtaaaggttgaaaggagaaatgaagatggtcaaaggattgttgaagaattcgcgcctgaatttctggaactagtatctagaaaatcgggtggatttgtaatgggccttaagccagaagattttcgctaa

SEQ ID NO: 59509 - DNA, 141 bp, Acinetobacter baumannii
atgtttttctatactggtcgtattacggatttccgaagaccaacacctcaaagctcatcattcgatgggctttttgcattttggaggccacatgctccgaatcatcaagcaagtattttgcattcacgtttgggagtatga

SEQ ID NO: 59510 - DNA, 285 bp, Acinetobacter baumannii
atgcgtagagcagcaagaattgatgcaaatcaaactgagattgtcaaagctctacgacaggttggggcaagtgttcagtcgcttgcttcaactggaaaaggatgtccggatctgcttgtagggtttagaggcactaactacttaatggaaattaaagatggtcagaagtttaagtcggatagaaagcttactcctgatcaaatcgaatggcatgaatcatggcgcggcaaagtctttgtggttgagagcacagatcaagcattagaagtaattagtaaggtttag

SEQ ID NO: 59511 - DNA, 252 bp, Acinetobacter baumannii
atgaccacattcaaagaggctcaaaaccacgcgaagcagattaagaatgcaaagcgtggaggttatacaccaacaattgcaaaggatgtgaataagcacatcaagcaaaagttaattaagttagacaaccatttcgatgagttgtttaacgagaaatgggcagagtggaagaacactgctgatatgcatgctcaaggatttgctgatggaattgaatatgcacagcgtcaaattcaggagcttctgaagtaa
